United States Patent Application Publication US 2026/0103690 A1 - sequence listing, part 85

SEQ ID NO: 419700 - protein, 398 aa, unidentified
MTESSDYESVQVFIGVDVGKDTHHAVAINRSGKRLFDKALPNDENKLRSLISDLKQHGQILLVVDQPATIGALPVAVARSEGVLVGYLPGLAMRRIADLHAGEAKTDARDAAIIAEAARTLPHALRTLKLADEQIAELSMLCGFDDDLAAQTTQASNRIRGLLTQIHPALERVLCPRLEHPAVLDLLQRYPSPEKLASLGEKKLAAQLCKLAPRLGKRLAADIAQALAEQTVVVPGTNAAAVVLPRLALQLITLRKQRDEVALEVEQRVIAHPLYPVLTSMPGVGVRTAARLLTEVACRAFASAAHLAAYAGLAPVTRRSGSSIRGEHPSRRGNKALKRALFLSAFAALRDPLSRAYYTRKMSQGKRHNQALIALARRRCDVLFAMMRDGTFYTPQGS

SEQ ID NO: 419701 - protein, 461 aa, unidentified
MSTGLPLLDQAAAFVDVGSEQMHVSIAGGPPEVFGAMTGELHRLREWLKERGVHSVAMEATGVYWLPLYGILEAGGMEVLMVNGKHTRNLPGRKTDMQDCQWGATLHAHGLLRGGFVPPALIRRLQDYLRLRQDHLTMAASHVQHMQKALERMNIKLHDVLSNVVGTSGLAVMEAILAGERDPERLLERCDRQIQKRKAESFKEALRGIWAEEHLFALGQALESWRHYRRQIQACDEQIKAVLDALEASLPPAAEPAASPGTEPAASQGAPPLAPRNKKAGANAPDIAGLERLLIRLHGGRELTRLPACTSYALLQLIGEIGLDLSVWPSRKHFTSWMGLAPGSYQSGKRRRGVGRKRNRAGRLLCVIVRSLARSKDIALGGFFRRMRARRGGLLAIVATARKLGEMIWDAMVKGVEYVEEGLKRYEQQVLQTQQRTLERLAKKLGVDVVPRASTSAPPKA

SEQ ID NO: 419702 - protein, 368 aa, unidentified
MTSMIPAPEVVQRAVDHRRHRVVIGVDTHKYVHVAVALDEFGGVIDGQRFAADRAGYAQLMDWAAGLGRKLTFAIEGTGSYGAGLTAAVRRRDIGVIEVLRTDRRDRRLRGKNDTLDAENAARAVLGGHATAVPKSNDGVVEMLRQIKVAKDVAVKARTAAMISLKAVIVNAPPELRETLQPLSKMALIDRCAGLRPGPVTTVAAAAKHTLRSIARRWQQLNEEIKTHEALLTELTGQLVPQLVAAFGVGPDTAAELLIVAGDNIDRVRSEAAWARLCGVAPVPASSGLTTRHRLNRGGHRQANAALYRAVIVRMQHHEPTRAYVARRTLEGKSKAEIIRCLKRLLARETWALLRPLRTVPRTASAVA

SEQ ID NO: 419703 - protein, 391 aa, unidentified
MRTVFGIDVSKASSEVAILVNGKRVYGYTMPNDIIGFSRLLEDLKTVSTPEIIFEATGVYSRRLQAFLEENSYDYTRLNPLEAKKQLDGLRVRKTDKIDAEKLASSQFVLNRKPTYVQEEVYQNLHDLSRFYQNLTEDIVRTKNRLHKVLQVAFPEIEILLFIPTGEQYWNLVSIFPTKHWVLELSEAELKEAIRNSTSKRISENRVGNLAEKLVGLAKQSYSAISKTSPIIEEVKYNAQELIRLTNRREQILEQLIELAKPLPEYEILLSIPGIAETTATSVIGELGDIRRFKSAYQINVFIGIDLKHYESGDFLGQEHITKRGNPYARKILHKCIHNIASASHTNLFHISDFYEKRKRQSQTTSTKPHTIASIHRLIRTMYYLIMHNEL

SEQ ID NO: 419704 - protein, 336 aa, unidentified
MKNLFIGIDFSKLTIDVSFFEREDMGEFSHRQFSNDKEGFKRMLLWLKKETRIPSSQWIFCGEHTGLYCEPLSEYLTTKGLFIWIDSALQIKLSMGIRRSKNDKVDSEQLALYAYRFEDKAKAYVIPSKELRSLGLLYAYRDRLIKAKVGLLQAATEMRAVIKRDPTARFIYEKTIGQVNRLKKEIKEVEKKMLECIKKDPLLDKSYKLLTSIIGISLVNATMMLIYTANFTRFLSARSYACYVGVAPFARDSGTSKHAPPRISKIANKEIKALLTQAARCATRFDTQIKEYYDRKRKEGKKERVVINNIRNKIIYRAFAVINRQKPYCENYLITN

SEQ ID NO: 419705 - protein, 355 aa, unidentified
MQKYKISFKGQNIYVGIDVHLKTWHVTTLTETGCKYSFAQHSDAKELFDRLNRRFPDAHFKSAYEAGFCGFSAHYALTEQGFENIVVNAADIPTTGKERTMKSDAVDSEKIAWALKRGQLTGIYVKDKSFMDDANLMRLRQRFIKDLSRQKNRLKHLLYTQGVTYPERFAKSGTHWSRNFMKWLREEVVLLSEEKLTLMLLCDQVDNTREAVLRVTREIRRLSQSDKYKENYDLLTTIPGFGLITSMSMQTELDNNPARFPNERKFVSFLGLIPTCHDSGEKKVSGEKTFRGNKHLGPLIVEASWIAIQRDYDLGAYHTNCCQRMKPQKAIIKVARRLASRAYAVMKTKKAYVLR

SEQ ID NO: 419706 - protein, 408 aa, unidentified
MVVGVDPHKRRHAAVAMTQDFTIQTKFKFDNTRAGLEIMLDRAKTEMMKSHCRGVIFAIETGGHYWRNIAYFLDKWGLPFRFINQFTLKRRREGKDLNRRKNDYRDSEVAAQLLCTGEFTVSKIPQGVYAELRCDYNAYRRLVRERTRITNLVKGLLDGLFPEFTQVFKDPCALTALSVLSTYPIPGVIAGMTEDEFVASIEAKHQGRRLMRRKLRALHYLARTSIGIEAGSRSVALEISFLVEKLELIKRHIAIIERTLIKLVDEAEEGKYLLSIVGLNYISVAGILAELGSFKSYCSAKQLIKMAGSNPTESESAGKRSTHTPMSKKGRPVLRYCGWTAVIPMLRFNPDFRIWAKRLRERPVYANPLSGREIVGAALNKLLRLAFSLVKNQTFYQAPKAESVPLVI

SEQ ID NO: 419707 - protein, 342 aa, unidentified
MDHFAGLDVSVNETSVCIVDDAGRIVREAKVASEPNALLTVLNNPIYRFKRIGLEAGPLSQWLYSALGEANLPVICVETRHMRAVLQAQINKTDRNDARGIAQMMRAGLYRPVHVKTLRSQKLRMLLTHRKLLQSKVIAVENDLRGTLRNFGLKVGVVGKLKFEARIRELVENLPDLAILVEPLLVVRRVLREQIAVLHRRLLVIVRDDDVCRRLMTVPGVGPVVALTFRATLDVPARFRNSRAVGAALGLTPYKYQSGESDRTGGISRCGDEMMRVMLYEAAQVMLVRSTKWSWLKAWAMQIARRRGMKKAIVALARRLILHRIWVDGTEFSWSRQEAAAT

SEQ ID NO: 419708 - protein, 420 aa, unidentified
MRNAGIHANSLLEVRRMYNAVGIDVSKGKSTVAVLQPGGTVIRKPFDVSHTSQNLNELADYLSSLDGTTKIVMECTGRYHEPMIKALSEAGLFVSIVNPHLIKNFGNNSLRKVKSDPADARKIARYTLDNWTELRQYSGMDNTRTQLKTLNSQFSFFMKQKVAAKANLIALLDNTYPGVNKLFDSPTREDGSEKWVDYAYSFWHADCVRKIGLKAFTERYKSFCKKHHYIFQQDKPEKLFNASKELVAVFPKEKTYKLLIQQSIQQLNLASEHVERLRREMNELASTLPEYSTVMGIYGVGKTYGPQLIAEIGDVSRFTHREALTAFAGVDPGVDESGQHKSKSNRASKVGSARLRKTLFQIMTTLLQNAPEADPVYRFLDKKRSQGKPYYVYMTAGANKFLRIYYGKVKECLRNLEQTE

SEQ ID NO: 419709 - protein, 349 aa, unidentified
MKKNHPLKIDPEESIYERCAGIDVHKKMITVCLRIGRRTQVKEFGTLTCELREMAAWLKENDVQMVAMESTGSYWKPLYNVFEQEGIRAMVVNAGHMKSVPGRKTDIKDAEWIAKLLSQGLLKSSFIPDREQRELRDLTRFRKSQIEERARTLNRLQKMLEGANIKLSSWVSDIDGKSATQLLELIIGKEEFTVQEVERLRHFNMKADSDELFKSLEGIVTPIQRELFTHIMNVIKEQTAQIEKTECLIIGYMTQAYQEAADAIDAIPGIGQISAQQIIAEIGIDMGRFPSAAHLSNWAGLCPGNNESAGKRKSGKTNYANKTLKSTLTQCAQAVKKTRVAFSMRNTSV

SEQ ID NO: 419710 - protein, 355 aa, unidentified
MSQEKYIGMDVHQATISVAVLDSRGKLIMESILETKAATILEFLQGLHGSLSVTFEEGTSAAWLHDLLKPHVTRLVVCDPRKNALLKDGSKSDRIDARKLAELLRGNQLTSVYHGEHGMRTIKELGRSYLTITKDLTRVMSRIKALYRSWAIACSGTSVYAPRHRAEWLGKIPEPGVRLRAERLYQQLDLLQPVRQQARRDLLTESRKHHAVKLLRQIPSIGPIRAALLVAQLQTPHRFRTKRQLWAYSGFALETHDSGEYRYVRGKLQRNRERMTVRGLSNNHNPDVKNLFKGAAISASTHPGPLYDFYVALLEKGMRPTMARLTLARKIASITLTIWKKGVDFDATQLHRQEA

SEQ ID NO: 419711 - protein, 343 aa, unidentified
MYYIGLDVHKKSISYCVKDAAGKIHQEGKIGSTRRELDAWIKTLPQPRMMAMEATIFTGWIYDHLLPHAEKVKVAHPLMLRAIAAAKRKNDKIDASKIADCLRCDFLPECYMTSTEIRDRRRTLRYRGLLVKQMVQMKNRISGLLMETGMSFNKQRLHKVGYFAELMSGNEEIDDSIRPLLKLSRETISRSQKLDYALVSSLERDPMLAERLERLRTVPGVGPITALTWVLEIGDVARFQSIKQAISYCGLCGAEKSSADKVMRTPISKQRNKHIQQVLVEAAKLAPRQSHELALIYEKEKQRGNRNRATLAVATKMVAWMVAVERRKQDFVPAEEFGGTVAA

SEQ ID NO: 419712 - protein, 433 aa, unidentified
MDEVRDEPLYRDRVCGIDIGKAQMVATIRVPSERDRARRAAETRSFGTTRDQVLALADWLRTWQVPAVVMESTGDYWKGPFYRLEAEGFECVLADARQVKHLPGRPKHDPGDSKWLAACFERGAITPCFVAAPEFRVIRLHTRYRRDLTEERTREKQRAEKLLESAALKLSSVLTDLHGVTGRDIMNHLIGGERSPKALAQLARARARRKISELQAALEGAEFFTAEHAALLAAMLGRIDRLNADIAGLTAVIERLLAPYEQQLQQAESMPGWGRRSAEDTLAETGADMSRFPSGAHLASWAGRTPLDNSSGKRKGKAKSKKGNRYLAAVTGETAVAAGKTATREGARYRRLARRRGNAKACVAVGNTQLKVYHALLSRPGTRYEDLGPDYYERQRDTRRQVAHHVGKLGALGFEVTLCRIPGPAPQGGDQAA

SEQ ID NO: 419713 - protein, 355 aa, unidentified
MSTIYFGVDFHARQQTVCYLKTEDGELVIIELKHQNKEEVRAFYGQFKGPVIVGLEASGYSPWFERLLESLGHEVWLGDATEIRRRARWRQKNDRRDAELILELMVHDQFPRLHRPTPESSEILRMLRYRQKLVKLRTIDKNSLQALALQSGLSLRTKLFTKAGKQQLRTAVMSPVMEQQRDQWLSLLETFDQRILETMLWLKQQTLDDQRITRLRTHPGIGLLTALGLVHTLWPVSRFRNQRKVTAYAGLEPMERSSAERKKFLGISKAGSRLLRYLVVEAAHTAVKKDDDLKRFYRHLEQRRGRPKAKVAVARKLLVRSYIMLRDEIDYAEFQQRAVAARLARQSTRQPCLPG

SEQ ID NO: 419714 - protein, 369 aa, unidentified
METIMICGTDLHDRNLVCQIAVDRGKPAMRGYANTEKGRESMLDCLNEEARRQNCTRIVLAYEASTQGYCLHDDCVAAGVECFVLAPTKIRKSKRDQKRKADAKDAQLILDTLRGHLLAGNELPSVWIPDDATRADRETVRSRLDLGRKLTAAKTQVRTLLKAHRLRRPEGTSANWTKSYRCWLRSLCGEGQWPALATLIRQIEFMEGEIETIEKEISRLSGTPRYAGPCRALTSEIKGVGLMTAMVFLTEIGDMGRFPNRRALGAFLGLVPSSNESGEKGDRKGHITREGSPRLRYVLCQATWSRVRSDPEAALVYERIAMRNPKHRKIAAVAMMRRLGIRMWHVARKAQARCGIFAPERTAADSPAA

SEQ ID NO: 419715 - protein, 342 aa, unidentified
MDQISTIGLDLAKGVFQIVGRDAAGCRVLSRQLRRAQVEPFFAKLPPCVVAMEACSSAHDWARRLQALGHDVRLIPPIYVKPYVVRNKNDLRDADGLSLAVRRPDIRTVQIKTPKQQARASLHRVRDLLIRQRTQAANQIRGLAAEFGLIARAGRIGLKALIDAVDSSELPSAARLAIAIQAHHHAELSQQIDALTDQIAAQARSCEDARRLMSIPGIAEIAADALMARIPDPTTFRSGRDFAAWLGLTRLDRSTGGKAKTQGPISKRGDRSLRRLLVLGATAVIAHQRRRKRLDPWIEGLLRRRPFKVAATALAAKMARTVWALLVRGETYQSGHQPRLAP

SEQ ID NO: 419716 - protein, 428 aa, unidentified
MARSKTQSVIQTDDGALYYERCAGIDVHKKLLVVCLRIGRKTESREFGTTTGEIREIVAWLKSNGCQMVAMESTGSYWKPLYNIFEQEQVAAMVCNAYHIKNVPGRKTDWNDAFWIAKCLAQGMLKPSLVPDRQQRELRDMTRFRKSQIEERSRNINRLQKFLEGGNIKLGSWLSDIEGKSASELLELVIGKPDFTLEEVKARMHGRMKSTPDEIFASLDGYLTDTQRSFFQHVVDIIRQQTVQIEKTDAMIKASLNQEQKAAVQALDKIPGIGVISAEQIIAETGTDMSHFRNQHAFSNWTGTAPGNNESAGKRKSGRTNHGNKTLKSTLTQSAKSAQKVKSSFFSAQYARLASHRGKNRATMAVAHSLAIAIFFVLSGVEFKDLGADYYTQFNREKKINSHIKQLSKLGVTIPDSVLRNAVERPPG

SEQ ID NO: 419717 - protein, 340 aa, unidentified
MQVTTIGLDLAKNIFQAHGIASDGTVAFNRALRRGQVLPFFAKLAPCLVGMEACGTSHYWARELSKLGHEVRLMPPIYVKPYVKRGKTDAADAAAICEAVTRPTMRFVAIKSPEQQALLSQHRARQLMIGQRTQLSNMIRGLIGEFGCIVAKGLNHITAFAEALRSGEGPSLLATAQDVIVSLCEQLLALHQRIRMLEKKIFAASRKDARVRLLETIPGIGPVTASAIVATVGTPDQFRTGREFAAWLGLTPLNRSSGGKERLGRISKMGDRYLRRLLVAGMTSRVRAARARPDRVEPWLASLLERKPVRLATVAMANKAARIVWAVLTRNEPYKQPVAA

SEQ ID NO: 419718 - protein, 423 aa, unidentified
MNRSTLCIGADVHLDEIVLCAVDKAEGHEVTDRFRVTNNLPGAQAAATTIAQLATRLGYTRIEIAWEATGMLWIPFHRYLSRCPQLQSCELELVCLNPQLVTKFKDGLVLRRPKNDPLDASAVAARLRFGELPLSYVPGDFWQGLRRLTRHRFHLSRSLAREKMRFQAYAFLKCSDWKRVEPFADLFGATSVTLLTEFTVAELTEMTHDQLLDLICRRGRKHFADPTATARNVRQALHSSYPIDPHMDELVTAALAAAWDHIRFIQRLMKRLDQHIARAIEPLPNPLITVKGLGPVITAGLLAEIVDVTRFAEHKHLAQYAGITWEKRSTGNFVSQNTRLTKVGSKYLRYYFILGANTLRQFNLEYKAFYWRKHGEVSKYQHKRALVLTARKLVRLVHALLTKNVPYVRPQALALVQEDGVLQ

SEQ ID NO: 419719 - protein, 325 aa, unidentified
MQKQTIIGIDVSSATLDICVTGTRQKSVVIKNDQMTIRKFFNAYQKECLIIGMENTGRYNWALYEVLKDLHHQVYVIPPLHLKKSMGLVRGKNDKIDAIRIAAFIGKNYMDIPQWKPSSPSIQKLKILLTERNTRVKSRRQLVKQQYDYTKMKHLGLDKSLLKMNLQQLNLIDKQIAQIEQEIELLIKTDEQMSMQAKLIRSVPGAGKVLCWMILAKTEGFTTITEPRKMACYSGVVPFSNQSGTSIRGKERVSSYADKAIKAILHLAAMSAIRLKNDLREYYIRKVAEGKNKMSALNAVRNKIVHRIFAVVKNRIPYQSNLLLS

SEQ ID NO: 419720 - protein, 359 aa, unidentified
MPTLSNKIDFNGQHIYVGFDVHLKSWKVTIMTEKLLHKTFSQPPKPEVLHQYLVRNFPGGIYHSAYEAGFCGYWIHNKLKYLGIDSIVVNPADIPTTGKEKIQKDDVRDSNKIARSLRNGDLVPIHVPTSFTLEDRGLVRSRANLVQDLTRCKNRIKSFLYFRGLEIPESFQSSNSHWSNRFVQWLEGIELPESSSKATLNVYLSQSRHLRSAILETTRIIRELSRTERYKSRQELLRTIPGIGYLTAMILLTELETIERFATFDHLCGFVGLVPSTKSSGENESIGDLTPRGHSVLRTALIESAWVAARIDPALNKSYHEYCRRMESNKAIIRIARKLLSRIRFVLKNNLPYEYSVVK

SEQ ID NO: 419721 - protein, 342 aa, unidentified
MEHYAGIDVSLECSSVCVVDGNGKIVREGKVPSEPDALINWLRSLGYELNRIGLEAGPLSQWLFAAMREASLAVELLETRHVRKAFEAMPVKSDRNDARGIAQLMRLGWFRPVHCKSMSAQETRSLLTARKLVQSKLHDVENSLRGILRGFGLKVGKTTGQKFAGRIEELVAGHPHLQTIAKALLAVRAVLRAEFTAFEKQTRRMVRSDMQARLLTSVPAVGPIVALTYASAVDDPARFKSSKQAGAHFGLTPKKHQSGETDYTGRISKIGDASVRTALYEAANVMLTKPVKGCSQLKSWAMRIKRRAGTNKAKVALARRLAVIMHRMLADGTPFNAAAAAA

SEQ ID NO: 419722 - protein, 384 aa, unidentified
MNKDSIIFIGLDTHKTFTQIALLKEHRGAKPESLGKINTNKSAFIKLARQLQSKYPKATLHFIYEAGPCGYWIYRLLTSLSHCCYIVAPSLIPKKSGDRVKTDKRDAAKLAKLFKAEELTTIYVPEAEDEAIRDLSRARETAMKDLKDAKFQLKGLFLRNNIKPTVKDNWSNQHLRWLTELVLPHHSQQIVLQEMIQTINERIKRLNRLVNELEHQVKQWRYYPVVKAIQAMRGVRMVVAVGVIAELGDLRRFEHPRKLMAYLGLVPSESSSGDKRKQGKLTKCGNGRARRLLIEGAQTYKHKANISTELQKRQEGLSKEIVDIAWQAQLRLCRRYQRLMQRGKHRNLVVAAIAREMIAYIWAISREIVIMQKTPKERIARVPA

SEQ ID NO: 419723 - protein, 379 aa, unidentified
MKKHSTVFIGLDTHKDSIAVAYATDSRTEPVTYVGAIGTQHYAIRKMVRQFESRHPGCQLQFVYEAGPCGYWLYRLLSSWDFPCFVVAPSLIPKKPGQQVKTDKRDCMQLAQLLRNGDIDPIYVPEPEDEAIRDLSRARETAMWDLKNAKSQLKAFLLRHDIRYTGSANWSAAHIRWLSELVMPTPAQNTVFREMLYTIVERHKRLERLDNELTYQVRRWRFYPLVKAVQALRGVQLLVATSVVAELGDLQRFDNPRKLMAYVGLTPSERSSGNRRRIGPLTCAGNKRARRMLIEAAHAYRYPAKTSRILQQRQEDLPKAIVEKAWDAQVRLCRRYRSLIQRGKHRNVVVAAIARELVGHIWAIAREVVIAKPDPRLML

SEQ ID NO: 419724 - protein, 350 aa, unidentified
MSIVIGIDPHKQTHTAIAIDGGTGQVLGELTVRARRVGFERLVEWARSLADERLFAVEDGRHVSGHLERHLIARGESSVRVPPRMMGEARRADRIRGKSDPIDAEAIARAALSHPDLPIATLAGIERDIGLLVAHRESLVCERTERICKLRWLLHDIDPDLAPPLRALDRFRTLDGLRRDLEAMEPTTKVRICLELVARCRQITVRANELEREIAELIRVHAPALLQIPGCAALTAAKILAEVAQIGRFPTEGHLARYAGTAPVPASSGATHRHRFNRRGNRQLNAALHRIAVTQLRVHEPAKAYVAKKRAEGMSKTEALRALKRCLTRVVFKTMMSMNQPTDRLTAVAA

SEQ ID NO: 419725 - protein, 348 aa, unidentified
MKIIGCDFHPSYQQIAMVDTETGELWEGRLEHERGEARRFYEALQGQPVRVGMEAVGNAQWFERMLAALGQELWIGDAAQIRQMVVRRQKTDRRDAQHILQLLLDGRFPRLWVPSAAMRDVRQLLRHRQKLVELRTQVKNQLQHLALNQGVQRKRRLWSREGRAVLEGLPLEGWTARRRADLLAMLDRLEAQVKELDDAVCQEAWQRPAVRLLMSHPGVGPVTGLAYVLTIGPVARFSRGKQVASYLGLIPREHSSGGRQKLGAISKQGNTMMRTLLVEAAQNAARLDQELRRDYQRLKARKHSALAKVMVARKLAVRMYWMLRENKPYTPRPVARMQGGPSHSVVAG

SEQ ID NO: 419726 - protein, 377 aa, unidentified
MSKLRYVGLDVHAETIAVAVAEPTGEVRSVGQIPNRPEAVRRLVKKLGAPEQLRACYEAGPTGSGLYWQLTALGVACEVVAPTLVPVKAGDRVKTDRRDAEKLARCYRAGDLTAVWMPDPAHEALRDLVRAREAAQQDQLRARHRLGKFFLRHGQRPPLPMKAWTQKYLGWVKTAVHFAQPAQEATLLDYVHEVDHAAGRVERLEQAIDAVVRTTPAALGTVIGALQALRGIAQVAAVTIACAVGTFTRFRKATPLMGYAGVVACEAASGARTWRGGITKTGNAHLRRIVVEAAWAYRHRPALGSALKQRQVGVSAAVQAMAWKAQHRLHDRYRTLLGRGKAKQLAVTAVGRELLGCIWAIGVHVEQQARASQPRAA

SEQ ID NO: 419727 - protein, 422 aa, unidentified
MEVMHERVAGLDVHKAMIVACVRIMAGGRIKRECRTFETSTASLEALLAWLTASGCTHVAMEATGVYWKPVWNILSDGAFELIVANAAHIKNVPGRKTDVNDATWIADLVACGLIKASFVPDEAIQQLRSLLRARKQLSREQTSHIQRIQKTLEEANIKLDSAISDVLGVSGRRMIEAMIAGVRNPHKLAALADRRIKASPKVLYDALHGRLTQHHRFMLELYLGQHDALGQAIARIDDAVDAAIAQMDEEVETGQATFLSLVSLLCSVPGINVLGATIILAEIGRDMSRFPTAGHLLAWAGMCPGQNESAGKRKSSRLRKGAPWLKTILVQCAWAATRKKDSYYGAQFKRLRAKRGPKKAICAVAASMLTAIYHMLKHGTYHQDLGADHFDRRSSEAKARHHVAQLARLGFHVELQPAQAA

SEQ ID NO: 419728 - protein, 392 aa, unidentified
MVVSVGIDVSKDKHDCFIVSSDGEVLADVFTIPNTLDGFTCLLQRIRECTTPQDKIKVGLEATGHYSYNLLGFLLDNGLTTYVLNPLRTNLYRKSLSLRKTKTDRVDARTIASMLLSDAGLKPYTDTAYHNEELKSLTRYRFDKVKERAKLKSSIARLVCILFPELEKLVPSLHIASVYALLEEFPGAKQIAAAHLTRLKALLESASKGHYKRDMALEIRDAARNSIGSWMPAKSLELQHTIRLIRELDDEIAEIEKQIQAIMDELNSPITTIPGIGFRMAAMIFAEVGDFTRFDSPDKLLAYAGMSPSTYQSGQLKNCYPHMEKRGSRYLRYALYNATKYVCHWDPTFAAYLAKKRNGGKHYNIALSHAAKKLVRLIFAMEKSRAAYRLTA

SEQ ID NO: 419729 - protein, 416 aa, unidentified
MEEIGVTGEFIRGGEGMNPVVGIDVAKEESEVQAFLDKGKPYGKSFSIKHNREELDEFISFLGEIKSLAGQMPLVILESTGHYHTPIIQCLEENEILYILLNPIISHQAKKSSLRKVKTDAFDAYQLCVLYYKEEFEPQKRRGIQLLNLRNLSRQQEIMTNMYVEAKLHFHTILDQVFPEYRKVFGDLFSRVSLSILKEYPTSEKVLAAEEEELINRIREHCSSRSIQWAREKAKKLIHSASQNPFQKVRYESHLINMNMYIDILFHYQGHLSDLESQMVSLANEIQEYKIIQSIPGIGEKIAATIISEIGEIDRFNHPKKLVAFAGVDPSVYSSGKFTATVNRITKRGSSRLRHSLYLAVLCGIRSSRNKKLKEFYDKKRSEGKPSKVAIVACINKLLHWIYALLKSKEYFLDIA

SEQ ID NO: 419730 - protein, 364 aa, unidentified
MYHIGVDLHKDSLTVAVMDNEGNFVRVDRINTRCIHKIEEFFREFKDSRVLVEAVGFYHWFWDLVKPLVREMVLVNAIEIRKYSLGEAKTDYKDSRKLAEVSFNNEVNRNNSLRVYVPDMALRALREATRHRHQLSRSLAHAKNRFRRYLLKNNLPGPKTLEPGSVEKWLCRFEDRFNSFQRFALRQLQDQIISISRQVKDTDRLIEEMVSGERFKEVKERISSVCGIGDVIASTIIAEVGDFERFQSPEQLASFSGLVPRIFQSAEEARYGKITKQGPGNLRWVLQEAAWCAIRRNDHVRGIFNRIARRAGKKKAACAIARKILVWLWGMEKSKTAFRYDNRPAKTLSGFMRHTPVMEPSSIA

SEQ ID NO: 419731 - protein, 464 aa, unidentified
MTAGKQLWRNRKEKKEWARRLQSEDPGLEVVHPHAAGIDVGNSTHYVAVRPDRDPEPVRRFECFTADLHRLADWLQSCGVKTVAMQSTGVYWIPLYEILEEHGLEVYLVNARHTKNLPGRKSDVQESQWLLKLHTYGLLNNSFQPVSEIRVLRTYWRQRGEHVRGAATCIQRMQKALTQMNVQLANVISDISGLTGQAIIRAIVAGERNPLKLAMLSDPRVHASHEEIAKSLEGNWRPELLFVLHQEVDMYDTYQKRIAECDQRLQKHLASFTRPLPIQPPTQKLKTKKPAAKNAPRFDLSSELQRVTGVDLTRIDGIDVMVAQTLLSEVGLDMSRWITESHFASWLGLCPDNRISGDKVLSRGTRRVVNRAATALRQAANTLMRSRSYLGAQYRRLRTKLGAPKAITAMAHRLARLVYRMLKYGQTYVDKGTKYYEERFRQQQIQLLRKRAAKLGLQVAEIHA

SEQ ID NO: 419732 - protein, 344 aa, unidentified
MTYYAGLDVSLRSTNICVIDDQGEVVTECKTDAEVADIVAFLDALDIKIGQVGLEAGTLTQYLTYGLQFAGFDVVCMEARQVKAALSAMRNKTDKHDARGIAQLLRSGWYSRVHIKSMESHRVRALLASRKAVLTKCIDLENEIRGIFKVFGLKLPPRLGHGAFDPKVRPLIEADETLSLSLLPMLDARLVLYRNFRELDNRTRHLAHDDPVCQRLMTAPGVGFITALTFKAGVDDPARFKHSRTVAAHFGLTPRRFQSGELDLEGHISRCGDAGVRSTLYTAANAMLTRSSQWSPIKAWGMKLAKTRGHRRAVIAVARKLAVILHRMWIDDTQFRWGTGAARS

SEQ ID NO: 419733 - protein, 321 aa, unidentified
MQTVLGIDCAKAKFDAALLIGGKYKTKVFSNDARGFGELQTWLNQHGSGTVHACMEATGSYHEALALFLVEAGYAVSVMNPAQIKGFAQSVLTRTKTDRVDAKLIARFCLVSTPALWTPPAPEVRAPQALVSRLEALNQMRTQEGNRLATAQPLIRGSIENGIGLLEAEIAALKEQIRDHVDGHPGLREQARLLETIPGVGEATIAQLLAVVGDLARFKSARQLAAFLGLTPRQHQSGSSVRGKTRMAKMGHAQLRKALFFPAIVATRFNPLVRAFAQRLAQAGKPKMAIVGAAMRKLVHIIFGVLKSGRPFDPTMHAACV

SEQ ID NO: 419734 - protein, 338 aa, unidentified
MYYTGIDLHKETSFITTVDEKGKTVAKANLPNDRDLILKYFGDLGGETQIVIESTASWYWLYDLLTGGGFQVMISNPAKTKAIASAKIKNDKMDSHMLAQLLRSDLVAPVHVSNLKTRELKELLRHRARLVRDTTRMKNRIHHLLLKNNHQVPLSDLFGARGLDYLSRLSLPDYPKPQLQSYLTLYGQLLEQIEPLSKTIHQRAKEDPRAKLLMSIPGIGPLIAMTLVAEIEDISRFPSCRHLASYAGLVPSLEASGGKERKGRITKQGSPYLRTALIEAAQVASRLRGRRLNFFFRKRIVKSGYQKAIVATAHKLLELAFYIWKNETPYQEVSLTVA

SEQ ID NO: 419735 - protein, 364 aa, unidentified
MTIGVDVSKDHLVWGERQGPTHSIDNSPKAVNRFLAGIGPDALIAMEATGRYHRLLADTAYLRGLGVYVFNPRDVNRYAKSISPRASTDPIAARVIAEFASIRTHRLYTPAPAFADKLKDLVRSRAGLVKRRVALAEQAGQYSQIACYLRAAAASIKQCVAKLDRDIVKVAKPLPEFALLDGIPGFGQLTAAYMVAMLASGEFGRSDSFVAFIGLDLRVKESGKFAGKRKLSKRGDPEARRLLYLAALAASRQSGPFCDLRARYLSRGFTKTEAAVFVARKLARVAWAIYTKHQPYDPHRVLNQPCAKPSTQPGHKSELTYAAPNVRDKQIANTVLARARSGSFHNNQERDKPKTASAFPEGGP

SEQ ID NO: 419736 - protein, 349 aa, unidentified
MAMTIVEAPVGITGGVDTHLDTHVAAALDPLGRLVGTESFDADAAGYKALLAWLEGFGQVDKIGVEGTGSYGVGLARFLRRRGVEVIEVNRPNRQARRNHGKSDPLDAVEAARAVVSGRALGSGKTKDGPVEAIRVLMVAKRSARQARVKAIVQMRHLVITAPDQLRCRLKGLTVTALVAESAKLRATRATDPVTAATKASLCSLAHRVQALEAGLEELNEQIEALLLATAPELMARFGVGPDTAASLLVAAGDNPERLHSEAAWAHLCGVSPVPADSGKSAGHLRRHCGGDRQANSALWRIAMVRIAHDPETRMYFDRRVKEGRTKRDIIRILQRYIAREVYRYLPRG

SEQ ID NO: 419737 - protein, 355 aa, unidentified
MTVTIVGEARPVTCRAAITGGVDTHADTHVAAALDPVGGLLGVREFPATAAGYAGLLGWLAGFGAVCLAGIEGTGSYGAGLARYVTAAGIRVVEVDRSDRQDRRRQGKSDPLDAVSAARAAQSGRASGAPKGRDGAVEAIRTLMVARRSAAGERTRTINQARALVLTGPDDLRARFAKHKPAALVTGLAALRPRPGDVAGHATRIALRELGRRAQFLDGQLVRLDELIIPLVTARAPGLLAIYGAGPRTAALLLIAAGDHPERLRSEAAWAHLCGAAPIPASSGKVTRHRLNPGGDRQANHALWRIVFTRLGSDPATRAYAERRTAEGKSKAEIIRCLKRYVAREVYRQLRPAAG

SEQ ID NO: 419738 - protein, 338 aa, unidentified
MTIVMGLDQHRAQITAEWIDTSTGEVSRQRVAPAHRAGVRRFAERFGDIELEVALEATTGWRFVVEEFTAVGARVHLAEPAETAARRGTKKRAKSDRADARHLRELLMVGRLPESWIPPEHLLDLRARVRLRHTLVDARREWQQRIQAVLYHHGVPPRSWLLGAEARAWLTGLELPPAAREQIAIALALIDAHDAQLVPLDQELREYAKRQPACRALMRHYGIGPLTSITILAELGDARRFSSSREAVRYAGLDITVHQSDARRAPGRLSRQGPAALRWALFEAAQCARRPGSPDHHYYLQTAERLGGNRACLAVARKLLKRSYHTLRELGEEALQPA

SEQ ID NO: 419739 - protein, 340 aa, unidentified
MSLYGGIDLHANNSVVVLINEQDEVLYQKRLPNTLSTILEQVAPYQTALKGLVVESTYNWYWLVDGLMDAGYHVHLANPAAIQQYDGLKYTDDHSDARWLAHLLRLGVLPEGHIYPKAERAVRDVLRKRAHLVRQHTANVLSVQNILARNTGARFSLKRIHEFTKQELENLLPEADQVLAVTSSLAVLDCLSHQIKTLEHTVQKRLKHTPSYEQLLTVDGIGPILAQTIRLETGTIGRFPTVGNYASYCRCVDSTKLSNGKRKGQGNVKNGNPYLGWAYMEAAQFALRFNARAQRFYQRKLAKTNNNTILARKAVAHKLARACYYIMRDLVPFDAMKAFG

SEQ ID NO: 419740 - protein, 358 aa, unidentified
MATQSLSNLQSFVAPYHAEPFWIGIDVHKRSYHLALLRADAKTFTLVTPAIPEKLVEQLRQLEIKIAGVAYEAGPTGFSLARALQTEEIPVIVAAPSKIPRSISAGAKTDRLDCLKLAQFVSKGLLRPIAVPTPKEEAERALCRRRHQLVDSIRRCKQRIKGFLLYHGFKETESLRRWHTDYPDQIAALPLEAEGRLTIESHLRELTFFENELRSVIEHLEDMNQHPRHQPVIRSLTSVPSVGKIVATTFHTELFRPERFDRAEEVASYLGLAPNVRQSGERAARGHLAPVGQTRLRSLLIQAAWIWRAKDPYAQEVYHRLLSKTGVPQKAIAALARRLAIILWRLSIEQRAYRPLEA

SEQ ID NO: 419741 - protein, 363 aa, unidentified
MNATAALSIVGVDLAKSVFQLAVADRSWRVVESHRLTRTQFERWFANRSVGVVVMEACGSAHHWARWLNTLGIEVRLLPAAYIRAYVKRNKTDAADACALLEAARCADITPVRVKSIEQQALQGLHRTRSLWMTTRTSRINALRGFCREFGIVIAQGSRLGVEQISRTLADPHTSVPTLIRGTMTLLVEEIRLLEVRIAQLERELTALVRQSPACATLLSIPGVGLLTATAMVAATSGEVSHFRDARHFASWFGLTPKEHSSGGTRHLGRISKRGDRYLRMLLTHGARAVLRAATAALHNGKPIDALRQWALAVQARSNHNKATCALANKLARICYATLRDGEPYGSSRLHTKVGRTTFALPA

SEQ ID NO: 419742 - protein, 359 aa, unidentified
MIKDRKKITFIGQCIYVGIDVHKKSWSVAICTEHRAYRPFNISPPNVLDLVNYLNSNFPQGEYICAYEAGFSGFGLCESLMEFGISCLVVNAADIPTSDRDAEFKTDARDAAKIARSLRSGELRGIHVPSKQLQGDRALARLHDQFKKDLVRQKCRVKMHLYYFGINIPAEYDERGRWSRPFIAWLFNVELPSPQATAVLRQQMGQMIYALGMKRNTEQWLRELSRTQPYQKQVDLLETVPGIGRLTAIKFRLQLGSILRFKSLDALCNYIGLVPAAHNSGERTRQNRLTRRGHTQLRAMMVEAAWTAIGVDPALNHCYESLKKRMPPQKAIVRIARKLLSRMRFVLKKEQAYEKGILV

SEQ ID NO: 419743 - protein, 409 aa, unidentified
MKLFVGLDVSSQDAKVCFLNGEGDRLESFTITNDLPGAIILKEKILNTASKLTCEVIKIGLESTSIYSYHPAMFLHNDKKLRTYGSQVFMINPKQIANFKKSYPEMDKTDAIDAFVIADYVRFGRHTMSIVKEEQYIALQQLTRSRYQLVHALTKEKQHFLQHLGLKCSQFTQDVGSSVFGNAMMELFLERFSLEELAQMPLQDLALFLQEKGKNRFGNPEEIAKSIQKAVRGSYRLSKVVEDSIDLLLSTSIQIMRTYQAQIKEIEKGIESLMSSLPQTLESIPGIGPVFAAGIVAEIGQIERFTDETRIAKYAGLFWKKYQSGRFTAENTSLTRSGNQYLRYYLVEAANSVRRHVPEYRDYYVKKSAEVPKHKHKRALALTARKFVRLVDALLRNNQIYTPGRSVDR

SEQ ID NO: 419744 - protein, 406 aa, unidentified
MLDVHKAQVTACVRVPDGDGGRRQEIREFRTTTAGLITLADWLRSWAVTVVGMESTGIYWRAIYYLLEDEFECQLFNARHLRHVPGRKSDVQDAEWGCQLIEHGLVRTSFVPPRPLRELRDLVRYRKAKIQERGREVQRVEKTLQDAGIKLSSVASEVLGKSARLMLDAMISGTHDPALLAELAKGALRKKIPALREALEGRFTGHHALLVGQMLAQIDFLDETIATLSERVEELTRPFSREIELLDTIPGVDQRAAEMLLAEIGPDMSRFPTDAHLASWGGMCPGQRESGGKKHSAATRKGSKWLRGTLTECSKAIVRTKGTYLSARYHRIKSRRGHAKATVATAHKILTAAYHVLDKGVPYNELGEEFFYRRDTENTERYKRRLVHQLERLGHQVTLQPLPEAA

SEQ ID NO: 419745 - protein, 310 aa, unidentified
MDTIVVGIDVSKDRLDVHVHPGGESFAVARDAEGLDALIAKISPLGVHAVALEASGGFEAVVAASLSTAQLPVIVVNPAQVRAFAQALGKRAKTDAIDAAVIARFVEATKPAIRALPDADTRLLASLVARRRQIVQMIVAERQRERQLPTRHLRRSAARLIKALEKELDVLDRSIDDAIRGSPVWREKEELLKSVPGVGNVVSRTLLAELPEMGKLDRRQIASLAGLAPWTRQSGRWRGKSFTGGGRSSVRTILFMAAMVGKRCNPILKAFHQRLIDAGKPKMVALVAVARKLLTILNAIIRDKTPWQSA

SEQ ID NO: 419746 - protein, 375 aa, unidentified
MQYINDTELSSHEETRCQFNGGTGAIKFAEGRIRPVCGLGIDVHQDFYVVVEQMGGSNPKPPQRFQKEAFLHWAARLKKKSGAQVYAVYEACGFGFSLQRKLSALSIKCYVVCPQKLDEQNRRVKTDGLDAKALCLKLDRFVQGNRDALAIVRVPSEEEEQARAIHRQREQLVKARKQLEAQGRSLMVNHGLEPVQNWWKPRTFTALPAPQWMKELLANSQPILVALQQKIVALTVQLRSAASPDQPCGLGKMTSVIIDREIGDWNRFNNRRQIASYTGLCPGEYSSGNTRLQSCVTKHGNPRLRAALVELAWRLVRFQPNYKPILKWRATLAKGALATGAARKKAIVAVARQLAVDLWRIKTGRLRAEELGLIN

SEQ ID NO: 419747 - protein, 341 aa, unidentified
MDTVSLVGIDLGKHCFHLHAQDASGRMVLRKKLTRSQMFALLGNFPSCTVVMEACAGAHWIARRLQALGHEAKLISPHFVKPFRQGNKNDFADAQAICEAASRPSMRFVSPRNEAQQVVSALHRVREALVRERTGTINQIHAFLLEFGISLPRGMAVIRRLPAVLETQALPPRLVAVLERLQAHFKYLDEQIGQLEHELLTQLHEDERSERLLEIPGIGPITASVLMSELGDAHQYGSARQFAASIGLVPRQYSTGGKPTLLGISKRGDKELRRLLVQCARVIMLGIERQTDSLGTWVRSLLARRHSNVVACALANKLARIAWAILAKGTHYRSAPAALAA

SEQ ID NO: 419748 - protein, 340 aa, unidentified
MRLYLGIDLHSSNSYLGIIDETGKRVFKRKLPNDPEMILAVLSPYKNDIVGIVVESTYNWYWLVDLLMAEGYTLHLANPTAIQKYSGLKYADDQHDAFWLAEMLRLHILPEGYIYPKEDRPIRDLLRKRSHLVKLRTSLVISLQNIITRNNGVRIKGELLKALTTDHAAPFLEANEDLALAGKVSKTSIDFLTRQIKAIEANIEGKVALREPYAQLVTIHGVGKILGLTIMLETGPISRFDKAGNYVSYCRKVSSKWISNDKGKGKGNRKNGNKYLAWAFSEAAELARRYYPEARAFYNRKLKHTNVAIAHGALAHKLARAAYYVMRDQVPFMPEKLFAS

SEQ ID NO: 419749 - protein, 410 aa, unidentified
MRRVIGIDVHRTFGEVVFWEDGRLRHAGRIDMTRTALEGFGKTLLASDEVVVEATANSMAVSRVLAPFVARVIIANPLQVKAIAQAHVKTDKIDAGTLASLQAAGYLPQIWTPDAETERKRRLVARRYQVVRHRTRLKNEVHSILHAHLIPKCPHADLFNTRGRAWLAAQPLPEDERAAIDRHVRELDRLAEDLAVLDRQIAQDAIDDPAVNRLMTITGVNLTVAAGIVAAIGDIGRFNSPQKLVSYFGLNPRVRQSGLGAAHHSRISKIGRSHARAMLVEAAWAAAKARGPLRAFFVRIRARRGHQIAAVAVARKLTVLCWHLLTKGEDYQWARPALVANKTRAMQLLAGHPQQKGSRRGPTYAYNIKALRDREMLLAAQAERSYERFVAQWKPRRPKAGARAPQLGKT

SEQ ID NO: 419750 - protein, 413 aa, unidentified
MVVFQTCQRRLRRFTFTAPGGRDLCVVDESGKVLGKGRVPDGLEGVRRIHELVGIHAARAEQVVVGIETDRGLLVGALLAAGYQVYAINPLSASRYRERHVTSRAKSDPGDAKMLANLVRTDRHNHREVAGDSELAEAVKVLARSHQDLVWSRLRFVNRLRNTLREFYPAALEAFGTDLDSPDALAVLERAPTPWQGRQLSLAKIAGALRKGGRERNIEVRAGQIQAALRSEQLQAAPKVASAYGFVVKSSVAILANMNRELAQLESELSKSFKGHPDAEIYLSLPGLGTVLSARVMAEFGDDPNRFDHPKSRKAYAGTAPITKASGTRQVVLARVARNRRLADACYLWAFSSLTRSIGARRYYDLLRGRGQTHHQALRALANRWVGILHGCLRYRSTYSETIAWPTPLQVAA

SEQ ID NO: 419751 - protein, 414 aa, unidentified
MALRRWVGRAIGLDVHRDFCVVAICEDGKVRSAGRVPSTPEGLGLLAESLLPTDRVALEVTGSCWEVARILEPVVDRVIVVSPDDTGISSARAKTDKLDSRTLASLLWKGELDAVWVPDERCRILRRRLARREQLMRARTRSKNEIQAVLQRRLQAKPPFADLFGVKGRQWLAGLELPVEERESVDAGLRQIAFLDAEVAAVDRLVAQQALAWPEIRRLMTVSGVNLICAASFLAAIGEPSRFLTSRKLVAYLGLDPKVRQSGEAPARSGRISKRGSANARWALVEAAWSVVKQPGPLRAFYERTRGRRGHGKAIVATARKLTVLFWCMLTRGEDYAHQRPALTKKKQRQLELTAGAPARTKQAAGIWSTNRAILHAERALAEQAEVSYKRMVTDQKAGRPSRKVGASATPERA

SEQ ID NO: 419752 - protein, 337 aa, unidentified
MEYFAGLDVSMAETHVCVVNRDGVVVHEVKVPTTPADIAAALTRAPTCERVVFETGRMAPMLYHGLSQLGLPVVCIESRQAYQALKSLATHKTDRNDARGLAHLARTGFFKPVHVKSLPAHALRSLIIARKKLVGQRVTLENQIRGLAVVFGVRLPRALTAAFIRQALQASDGIPGLSAAMRGLIAARTAVLAAVAAIDADVRQLVRASTACRRLMTIPGVGKLTALAFTAAVDDPTRFRRSRHIGAYLGLVPRRYQSGEVDYTGGISKCGDRRVRTLLYEAANVMLTRYKPALKLKDWALAIARRSTMRKARIALARRLAIIMHAMLRDGTEFKPA

SEQ ID NO: 419753 - protein, 346 aa, unidentified
MLYAGLDLSRKRLDFHLLDREGATVERGATPPDADGLHRLSERVARHGAPVRAAIESMNGARFVHDRLELAGWQVEIADAQKVKGLAPLACKTDRIDAWVLAELARRDLVPAIWLPDPLVRAERERARWRLHLVRHRSSLKQRVHAVLLTHGKPCPVSDLFGVRGRQLLARLGLPEPWQGTIEASLRLIDELDREITGCERELRRLGAEHRYVPLLLTVPGISWVLAYTIAAELGDINRFPTPRKLAGYTGLCPRVYQSGERDLRGPLAKQGPRYLRWALVEAATHACTHPIYRERYTQTKARIGKQRGAKVAQIDLARRLSEAIWHMLSRNQPFAPKGATDPLAA

SEQ ID NO: 419754 - protein, 342 aa, unidentified
MAEVGIIGLDLAKNVFQAHGSAADGSVVFRRKLSRLQVLKFLAEQPRCTVAMEACASAHHWARAIAELGHAVKLIPAAYVKPFVKRQKNDMADAEAIAEAAARPTMRFVAPKSAAQQAAAMAFRTRELLVRQRTQTINALRGHLAEYGVIAPTGPSHVGRLAAMIECEQSALPAPVVTLARILLAQIAGLSAQIDALEKEVRQRAAQDETTRRLMTIPGVGAIVATALTTFAPPPETFSKGRDFAAWAGLTPRQHSSGGKERLGKTSKMGQRDIRRLLIIGAVGCVRWAARKGAPEGTWLARMMARKPRMLVAVALANRMARIAWALMHKGEDYRNPATVAA

SEQ ID NO: 419755 - protein, 370 aa, unidentified
MSYYVGMDLHSDNTFIAISDEEDKRLFSRRVSNSIEVIKETLEPFREEIKGVVIESTFNWYWLVDGLMESGYRVHLANPVAMVQYSGFKHTDDKHDAFFLAKLLRLGILPEGYIYPKESRQLRDLLRKRMLLVQSRTAHALSLKGTVNRNLSMGISMAAMRKLTPEDIDALFDDTHLAFSARVSVEFIHHLDQQVVAIERKVLEVAYTNPLFEQLMTPIGIGKILGMTILFETGDISRFSTVGNYASYCRCVTSNRISNGKTKGQNNRKNGNKYLAWAYVEAAHLAYRFCPYAKAFYEKKKKQKNSSVATKALAHKIARACYYIMKENKPFDLERMYEKALIEKVRQQTKKVPGLRATSPDQHGCRTALS

SEQ ID NO: 419756 - protein, 330 aa, unidentified
MKTILVGIDVASKTLAIALEHPGRSSRVFEVPNTPGGHRRLIRRITARKIPARVCMEATGVYGFELAWTLHRTPGIEVQVANPRAVRDFARAWLQRSKTDAIDAQVLLEFARRMPFAPWRPPSLRILEIRAITRRIEVLTRARTREKNRLHMVDRCREISAVVRQDILQHIEQLNRSLRHLQQVASSLVRKDPVLARRFEFLQSVRGIAETSALHILAELATLPEDMSPRQWVAHAGLDPRQYESGSSVSRPARISRVGNSHLRRALFFPAMVSARREPHVRAYYEHLLARGKKPLQANVAVMRKLLHAIHGMFSSQSTFRGEKFYAISA

SEQ ID NO: 419757 - protein, 369 aa, unidentified
MENSTTETIGCDLGDKMSDVCVMDTSGRTRRARVASTRKGITTFFSREPAHVVIEVGSHSRWVSELLEGLGHRVTIANARRVKLISASDNKTDEHDAELLARLGRADVHLLAPMKHRRAAVQADLAIAKARDTLVATRTKLVNHVRGTVKSFGERLPKCSARAFARHTRALIPAALETALAPVYETIAKLDEQIRAQDKLIEVKSEANPDVAVLEQVDGVGALTALVFMLTLEDKDRFTNSRMAGAFLGLRPRKKKSGDDDPQLRITKAGDPFVRRLLVLSANYILGPFGKDSDLRRWGLKLAERGGKNAKKRAKVAVARKLAVLLHRLWVTGEVYEPVGYQARRLEDATPHAVTPAPPPSTAGADAAA

SEQ ID NO: 419758 - protein, 404 aa, unidentified
METIFERVGALDVHKAQVTACVRVPGADGRREPHLAEFSTTVSGLLALADWLKAFAVTHVAMEATGVYWQPVWHILEEDFELMLVNARHVKNVPGRKTDVSDAQWLCQLMEAGLLRSSFVPPKPQRRLRALTRYRKTQIAERQREANRLHKALEDTGIKLDCVATDILGKSGRAMLDALVSGTTDPDVLADLAKGKLRAKIPALREALQGRFEAHHALLIGAILSHLDFLDEQINGLSEAIEELLGPTGLAGRQLASTITGVAERTGEVLVAEIGTDMSIFPTAGHLASWAGRCPGNDQSAGKRRSGRTRKGSKWLGIALEEAALAAIRSKGTYLEFRVFGVSWRVGSTSCTCGRFRTSTAGCVRVAMGASRRVRGVRWRSWRGCRIARDRGRGGCTRRGSCRS

SEQ ID NO: 419759 - protein, 313 aa, unidentified
MKNTAQVGIDVSKRFFDVHVLEDNLDRHFDANAKQIKACVQWLAERKPKLIVLEATGGYEMDLLSALQAAQLPVAVVNPRRIRDFARATGRTAKTDKLDARIIALYGATLEPATKKPLEAHMQALKDLVARKHQLTGIRTAEKNRQEHVRDKSVARSITTVIKTLEREIERVDQQIQDHIDQAPPLRHKAVLLKSAPGIGETTAFMLVVEVPELGSANKRQIAALLGVAPMNRDSGTFRGKRMTGGGRGSVRARLFMPTLVAIRHNPVIRRFYQRLLEQGKAKMTAVVAAMRKLLVILNTMVKNNQSWQANLT

SEQ ID NO: 419760 - protein, 347 aa, unidentified
MGKSITDLSSVTTVGLDLAKHVFQVHAIGAFGRVIVAKALRRKDVLAFFAQLPECLVGMEACGSAHHWARELIKLGHDARMMPPAYVKPYVRRQKNDAADAAGICEAVTRPSMRFVGVRTLENQAALMHHKAREMLVAQRTQLINALRGHLAEIGVIAAQGPKNARELAGVVMAQGDETIPACVRAALAPLVRQLHALDQEIARSDRTIAAMARGDEMARRLMTIPGLGPVTASAIAASVQDVSAFSGPREFAAFLGLTPRQNSSGGKEQLGRISKMGNRYLRKLLVVGAHAVLYHRKRHEDALRSFAKKLMQTKPFKLVAVALANKMARIAFAIMRGRTTYSAAPV

SEQ ID NO: 419761 - protein, 412 aa, unidentified
MIVGIDVGSETHYARAFNWRNYEYSKKPFAFSNDEAGFPSFKDWMDDIAEKHGMETVIPGKEPTGHYWLNLGAYLQEQGMKPVHVNPHHVKKSKELDDNNQSKNDRKDPKTIAGLVNEGRFSYPYIPTGIYAEIRNLSNLRIQTQEEITRIKNRIARWFSIYFPEIKDVYRNPDAVSGLMVIKQAPLPCDIKELGVDGVNKIWRDARLKGAGIKRATTLVTAAEHSIGNTEAPRSARKEIRNLLEDYEGYKKRMDELMEEIEKTLSEIPYIDKLMEINGIGIKAVSCFIAEVGDIGRFDNPKQVQKLAGYSIVADSSGKHKGESRISHRGRTRLRYALYEATISVIGKNKEFKEIHSYYRTREKNPLKKMQSVIAVACKLIRIFYTILTKGVDYDGQRMLADIVRPEMQLAA

SEQ ID NO: 419762 - protein, 338 aa, unidentified
MFYVGLDIHAKQITICVLDDQGQVYRRCQVRQIDRMMDFLERLPGPWRVCYEASTGYGMYFEMLSKVADQVAVAHPGLLRLIFRSKKKNDRRDAKKLAKLLYIGEVPTVHVPSADVRAWRELITFRRKLIEKRTRAKNGLRGLLRSLGIQAPHKPGLWTKRGLAWLKQLAFGNFMHALKRDLLVEEIVSLSDQLRRVEKELGRYSADSVAVQILRSIPGVGPRTAEAVAAFIDDPHRFADSKRVGAYFGLVPSQDQSGSTNRLGHITREGSATVRQMLTEAVWQAVRRSATVRAYLERVQRGDPDRRKIAIVATAHYLVRVMWSMMKHGTLWQESVAA

SEQ ID NO: 419763 - protein, 346 aa, unidentified
MVIVGCDFHPRWQQVAIFDPTTGEIAERKLVNGNGEAEQFYRSLPVPSLVGLESCGNSQWFLELLEQLGHEVWIGDAAQIRASYVRKQKTDRRDAGHILKLLLEGRFPRLWRPDAAVRDLRQLLIHRHRLVQIRTRVKNGLQHLAMNRGMQKKGKLWSAAGQRAFLALPLPGWAGCRRQDLLALLAKLDEQIRPLDAAVERAAFAHEPARLLMTQPGVGAITALAFVMTIGDAHRFQRGKQVASYLGLIPREHSSSGKQRLGAISKQGNSFARLLLVEAAQTAVRLDEGLRKKYQHRCHSKAKGVAKVAAARKLAVRLYWMLRTHTAYPEIVHNESSSRCPMAGAS

SEQ ID NO: 419764 - protein, 450 aa, unidentified
MRKSISKFETVTTVGLDLAKNVMQVHAVDAAGNVVVNKPIRRGKLIAFFAALPKCVVGMEACSSAHHWGRQIAELGHDARLMPPAYVKAYVRRGKNDKVDAAACCEAVGRPSMRFVPLRSVENQAELMRHRAREMLSSQRVALLNALRGHLAEIGVIAPQGAQNAYYLKKLAETGHDENGEVLVPDGVRQSLAPLARQIDAIDAEIAAIDKILVKQAKSDPTARRLATIPGIGPVGATAFTATVLNVKAFANGREFSASLGLPPRQHSSGGKPRLGGISKMGDRYLRKLLVVGATAVLRHADGHNDALRGWAKELLARKNGPYKKKIAAVALANKLARIVYAILSSGGTYDDRPVRARARGGGDAYEHSRRPRGEPRQENLGRAAGARTARRRQGRLRRGLRPCGYAASLTAPAGSGVGPPSASTATPGRSGPAPRRSRWSDAGLAQAGK

SEQ ID NO: 419765 - protein, 421 aa, unidentified
MEEPIVLAARIGIDWADDHHDFCLQESGSTRIESGRVPQEPLALAEWVAGLRERFGGRPVGICLESSRIPLVSALIAHDFIVLFPVNPRTLKRFREAFAPNGAKDDPGDAALLLELLAKHEDRLHRWTPDNAETRAIARLVEARRKAVDLRTRLINQLAAELKGYFPQALSWAGELETQLATDFLQRWPTLESVQRAKAQTIRKFYYGHNCRRGDLIEQRVEEIRTAVALTSDPAIVETSALNVLMLARQIDALRPSIGRYDKEIAKRFGQHPDAPLFESLPGSGAAMAPRLLSAFGSQRDRFESASEVQEYSGIAPVTKRSGRQLQTTWRWGAPRFIRQSFHEFARLSIHHSAWARAYYELQRERGKSRHAAIRALAFKWIRIIYRCWKDHSVYDEARYLQALVQRGSSLAKRIALAAAA

SEQ ID NO: 419766 - protein, 341 aa, unidentified
MNKTLFCGVDLHSNNAMYVITDQEDKAVLKKRLPNQLPVVLESLEPFRKQLKVVAVESTYNWYWLVDGLMDHEYPVVLANPSAIDQYDGIKEADDLTDAAFLARLARLDILPTGYIYPREDRPVRDLLRRRTLLVRQRTAIILSLQNLALRQTGQRMGWRTIRGLSEEERTELLGDHDCLAFVTTEQADLIQLLNEKIKRFEKKVLEHARLKPVYACLLTLPGVGVILALTIMLETGDIGRFATVGDYTSYCRCVRATHTSNGKNKGKHNGKNGNAYLAWAFVEAVHESFQTCPQAKRFYDRKRAQRNGALATKALAAKWSKAAYYMMKRQEIFDLTRVFG

SEQ ID NO: 419767 - protein, 422 aa, unidentified
MLNDVIDDGVIIERVAAIDVGKAEIVVCARVPSPTGRRSRAQEVRKFATMTPALMECSDWLSQLQVTRVVMEATSDYWKPVFYLLEAAGFETWLVNAKDVKHLPGRPKTDTLDAVWLCKVAERQMLRPSFVPPEPIRKLRDLTRYRVDLINERSREKNRVEKLLEDAGIKLSVVASDIFGVSGRAMLAALVDGERDPKVLAGLARTRMRTKIPALQEAFVGRFSEHHAFLLGKMLARIDAIDADLADLDAQIDALISPFGEAVDRLDTIPGVGATAARAIIAEIGVDMDRFPTAAHLTSWAKFAPGVNQSAGKTKGNGSTGHGNPYLARALGEAALAASKTDTFLGERYRRIARRRGTKKALVAVGRSILVIVWHLLKDPDAVFVDLGPDYYTNRVGTQRAVRNHIRGLNALGYTVTLNPAA

SEQ ID NO: 419768 - protein, 415 aa, unidentified
MYYGLDVHKDFIQVCQLSADGRQRRDFSIPATSTAIEAFAGTLTPADEVAVEVTFHTWAIYDRLTPHAGRVVAVNSMQVKAIASAKIKTDKVDAYTLAQLLRSDFLPAVQMPSKEAWSLRQLVSHRRFLLKQQTATKNTVRSLLNRQLLPLPEGWTPFAEKTRQWMRKLPMPPAEQFMLQNSLDLLEQIEMHVAKINEQLLCQARISEPVKLLMTIPGIDLTVAIGFVAAIDDIDRFSGPQKLASYFGLVPRVRQSAGHCFCGPITKAGNSTARALAIEAAQCLARSSSPLAATYYRVRNKRGHNVAVTALARKLICLVWHILHNRQPYRYAPIPRTREKLLKVTAERDRSRSVPQTLEAVYAEAGLLPNTPATPGERRAAANNRRTITRLAKKSVNAKKGKKIRNQENSPLTNS

SEQ ID NO: 419769 - protein, 341 aa, unidentified
MALIGVDPHKASHTAVAIDGDETVLDRLQVRSDAKQCERLLSWADRFDERSWAIESAAGLGHLLSQQLVAAGEHVVDVPATLSARVRVLGSGRSSKNDPNDALSTAIAALRHPGLRVVTGEDHTAICRLLANRYYQLHNDRQRAICRLHAVLALMTPGGHEGRLNADRAGLALRRIHPANAVETERKRLARDHLGDLRRLDRELDELRARMAAAVTAADTTVTDIFGIGPIAACLILGHTGDVTRFATADRYAGYNATAPIEASSGPTVRHRLNQRGNRQLNHAMHIAAIVQMSHDSPGQIYYQRKIAEKKRHKEAMRSLKRRISDNVYRHLTADAARHRA

SEQ ID NO: 419770 - protein, 375 aa, unidentified
MSDHSEAFVAFDTSKLRNAVAIADGGRAGEVRFLGEIENTGAATAKLVRKLAAKYERLMFCYEAGPTGYGLHRQIKSLGHECMVVAPSLIPKRPGDRVKTNRRDAVSLAKLLRADELTAVWVPDRGHEAMRDLTRARETTVMDLRSKRQQISAFLLRQGRHYPENKKTWSKTHMSWLASQKLEYPEQRLVFEEMMLAVRQAQERLERLEQAIRVAVPDWSLAEVVTALMAMRGMGLISAATFLAEIGDLSRFRTPRELMAYLGLVPSEDSTGDTIKRGPITKAGNRRARRMLVECSWSYQHPPRVGRDKQHKVDAAPRAVREIAWKAQCRLHRRYRALIRRGKLKTVAITAVARELAGFIWAVSREITTARAAAK

SEQ ID NO: 419771 - protein, 379 aa, unidentified
MEVFIERCAGLDVHSETIVACVMIGNRDEDLFQETETFPTLTKDLFRLLKWLEDHGVTHIAMESTGVYWKPVYNILEDYFDITLANAQRIKNVPGRKTDVSDAEWIARLLRYGLIEKSFVPPEDIRNLRDLTRLRKKWIGHLTSEKNRIQKVLECSNVKLSSAISDVFGVSGRKLLTKLISKGYVDANDVENSIHGRMAHKKQLITDSLFGTLNDHQIFLIRQSWKHIMYLESLISEIEEKIDEILVNYKEEMDLLLTIPGIKKDSAAIIIAEIGVDMKQFPTSQHLASWAGVAPGNYESAGKRKSTRTSRGNPHIKSALCEVAWAVSRSRKRWLASKYWSIAARRGKKKALVAISHRMLRIIYSMLINKEAYKEPQFN

SEQ ID NO: 419772 - protein, 321 aa, unidentified
MTYVGIDVSKATFVVAYSSAKGSKTKSFKNTTKGIHEFIQTISATEHHCVLEATGNYSALLVYLLSEAGITVSLENPLKVKNFARVMLSVTKTDEIDARLIALYGEKMQPAPYKLRSDSILILKQKRTVIRQLKKQLVATRNLKGSMEALPFFDPKCKKTIEKTIAFLEKQIKELVEALAVLAQSEYKKQMDLLTTIKGIGVTLAAALIMATGGFTYFDNAKQLTRYLGLSPTYQQSGTSVNVKGHINRNGDSSLRSQLYVAAFASLRCNAECKACFDRLRSNGKPGKVAVIAVANKLVRQAFAIVTQGKPYVDGFKSAKP

SEQ ID NO: 419773 - protein, 323 aa, unidentified
MNTLIQISNQQTFVGIDVAKETLAVFVDSTNQHSECLNQSKDLRQLARHLKKLNPTLIVLEATGGYEVLATEIFSKFDLPFAVVFPKRVRQFALGLGLIAKTDEIDAATIAYYGKIAQIEAKPLKSHELRGLQALTTRRRQLIEMRIAEQNRLDCSHSSIHKDIKKHLRWLEKQIQSIETEIDASIKQDASLNEQDQLMQTVPGVGKVLSATLITELPELGILSNKQIASLVGVAPFPRESGKWNGKRFCQGGRNSIRKILYMATISASRFNPIIKQFYDKLLERGKLKKVALIACARKLITILNAMVRNNSSWNPNSESISP

SEQ ID NO: 419774 - protein, 607 aa, unidentified
MSTIASLDRIGVGIDTARYGHRVSFLRPDRKPAAKPLTVMENRAGYQALQDRLNQLHEQHPTAHFHVRIDAAGQYAVNLELFLRGLKLPMTISVGEPKRNKDYQKAHFPKRTTDDTESQAMARFAVIELPNATPAPSTPMILLREVAGRLQSKVKQTTQAINRLHNLLARVFPELATLTEDMSVGWVLKLLDKYPTAERIAQAQIASLEKIPYLSVEQAHAVHQAAKQSVASLRGELAEALVRDLVNQLRLCQKAEQHLHQLLLEAFADLPASPHVQVLTITGIGEATAAALVAKIVDINRFATPNHLVSYFGVFPEESSSGVDKRGRPLPPGTLIMSPKGNDLVRFYLWNAARNAIQHNPAIRALYRRLRAKGKRGDVAFGHCMRKLLHLVYAVWKTDRPFDKEHFPWEGSSDTQPSATTPPSADAGTTPSANEEAVGHKRDLPAAEVVTTADATLEPASPAVKPASQSAAPRPKVDFACVREHVTMEQVLQHLGYFASLRGRGRQRRGPCPVHSQPTAPERTFSVHLGKNAFQCFHAECAVKGNVLDLWAAIHRLPLYEAALDLAETFQVPRNREEEPVKGTSSPRTATAKTSAPAAATATDGAK

SEQ ID NO: 419775 - protein, 352 aa, unidentified
MKIIGCDFHPSFQQISMLDLETRQRVRKKLEHASGEAEQFYRSLQGEAVKVGIEACGNTGWFEGLLAECGHELVMGNAARIRAMAVRRQKTDERDAEHLLELLESGKFPVVWVPSAENRDLRQLLLHRHKLVQMRTRIKNQLQHLAMNQGLQKKRQLWTVRGRQWLEQLSLPPWSERRRCDLLVLLDGLQARITELSQAVEEQAGQNERAQLLQTHPGVGPITALAFVLVIGEVSRFERSRKLTSYLGLIPSEDSSGKRRRLGAISKQGNTLLRTLLVEAGQSAARCDPELRRAYRRLCHKKQHTGIAKVMVARKLAVRLYGMLKSNQPYAPARMPGIPSHSVNPREGGSTI

SEQ ID NO: 419776 - protein, 348 aa, unidentified
MYYVGCDQHKHYSQIAVKDETGQMIEQQKLYHHDRDALKAYFDKLPSDSLIALEASGFQPWLCDLLSELKFKLVHPRKTRAIAEEKIKTDKLSASVLADLLRANLVYEAFYAPTQMRQFRYWSRYRQSLVHLKTNAKNKIHSILDQLGVQPPTLTDLFGKAGRNYLTSLEIPDVYQKAIQGYLKLIDTLQELITSVEGKYRCFAKENPAIELLKSLPGVGPILAHMILAEIGDIKRFWSSSKLSGYAGMVPSLHQSGQQYYSGPITKQGNKYLRWAFVEAAQRAIHQDVYLAKFYAKIYHKKGRPTAIVAVAHKLLIYTYWILKEQKSYKAQRPVGDPVDYTGPLAAV

SEQ ID NO: 419777 - protein, 429 aa, unidentified
MTSKSCTTSPVVRVAIDVAKLTHQVLLELPSGTRRVLRVANTKAEIDRFVATLRALELSCEIAFEPTGDYHRPLAYLLGQAGFHLCLVSSIAVARTRDALYNSWDKNDPKDAQVILHLLKNGTTQRYLDPLMTGYQDLQEIANTYQQISLRKVRLQHSLVTHHLPLYFPEAERYLHSSRAEGFIELLLFTPCPTAVRRYTKTAFVAAAREQIGGRKVDKARWLADFYETACSSVGLPVSEASETMRMFRVVLEEYRALCQLRKRLEADVVTRLANQPDFVRLQTLPGIGPILAMIILAEARDLRRFGCARQFLKYCGFDLCTEQSGQFRGTTHLSKRGNARLRYAFWMAGTVAIRMQQNSFRRKFDDYIRRDPQNTDRRRKGYTAVAAKMARVAYAVVTTGTDYRRFPEATRPGGRIPSPGAVEAHATS

SEQ ID NO: 419778 - protein, 315 aa, unidentified
MTSIIAQSVGVDISKDTLDIHLHPADATQRLPNSPAGIKKLVSWLGGFTVDRIVFEPTGSYHHRLERSLGEAGLPLVKVNPRQARRFAEVIGRQAKTDAVDAAMLARFGALIQPPARPMISQALDEMKELHIARRALVKDRVAAQNREQIRRSSLLKRQAAERLKQIDRQITAIDVELHSILDADAALKARFDILMSIPGVGDVTAITIIVEMPELGMIDNKAVASLAGLAPIARDSGAYRGKRFIRGGRADLRQALYMPALVAVRHNASMKAKYQACIEAGKPPKVALTAIMRKLLILANALIRDARTWTPTLA

SEQ ID NO: 419779 - protein, 347 aa, unidentified
MKVLIGVDPHKASVAVAALDEAKGELLERASFPQDRAGLRALERWARRFPERRWAMENAGGLGRHLAVRLAASGESVVDVPPKLSARVRVLSSGNARKNDGLDALATALAASRNERLAQVDPEVGSEVLRLLSERREDLVAERTRALNRLHGLLRDLLPGGVTGKLSAERAARILRGIRSRGGASARLRRRLASEILRDVRTLDRKIADLSGRIEAEVEASGTTLTQIFGIGPILAAKIIGTVGSVARFPTKAHFASYAGTAPVEASSGEVVRHRLSLAGNRHLNYALHMVAVCQARSDARGGTYYRKKLDEGKSRKEALRCLKRRVSDAVFRCLMTDSQAPWRSAA

SEQ ID NO: 419780 - protein, 370 aa, unidentified
MQTVRSFVGMDVHKETISISVAEDGRNGPVRFLGVIPNQPDDIAKMAKRLAKHGELDFCYEAGGCGYNIYRQLTALGHSCTVAATSLIPRKPGERIKTDRRDSQKLAILHRSGDLTRVWVPDATHEALRDLVRARVDASMHLMRARQQLLAFLLRHGRSYPTGKHWTQRHRSWLAGQTFQQEVHRIVFQDYVETVWTAQERRDALIDRIAAMTASWSLGPLVEALRGLRGIDLLSSATFIATTGDLSRFESPRMLMGYLGLVPSEHSSGGTIRRGGITKTGNREARRMLIEAAWSYRYPARVAKEKAEILVRLPKNIRDIAWKAQTRLCARYRTMIARGKKPTVVVAALARELAGFIWAIGQEMRIGTTT

SEQ ID NO: 419781 - protein, 389 aa, unidentified
MKIYVGIDIAKLNHFAAAISSDGEIIIEPFKFTNDADGFQLLVSKLESFDKNSLIIGLESTAHYGDNLVRYLVAEFYQVCVLNPIKTCQMRKNNVRKTKTDKVDTFVIAKTLMMQDDLRFITFFDLDMMDLKALGRFRQKTIKQRTRLKIQLTTYVDQVFPEIQYFFKSGLHQHAVYALLKEAPSPKEIASMHMTHLANLLKVNSHGHFTKEQAKELRVLAQKSVGANDSAISIQITQTIQQIELLDSQLEKIEAEMTDIMKFNDSVIMTIPGIGYINGGMILGEIGDIHRFSNPNKLLAFAGLDPSVYQSGNFQAKTTRMSKRGSRVLRYALVNAAWNVVRNNATFKAYYDAKRAEGRSHYNALGHCAGKLVRVIWKMLTDEVEFNLE

SEQ ID NO: 419782 - protein, 362 aa, unidentified
MTAQSIVAHCYPFVVGVDTHARNHVYAIIDSSNGALLDTQSFPVTSVGISRAIRWVARRTEGNADTLWVIEGAATYGAILAGTIAAHGFPVSEAPRMSKKQNRGVGKSDALDAHRMAIASLPLQVNKLRHPRLHEGIRQGLRILVTARSSMAKDRTRSVNALNALVRSNVLGIDARKKLTSGQITEVSRWREREEELSLRIARSEAVRLAKHTLDLDHQLTINEQQLDELVRVSEAAPLMEEIGFKAITVAKCFVAWSHEGRVRDEAAFACLAGASPIPAPSGNTTRHRLNRGGDRSLNAALHLAAITRMTHDDETRIYVEKRRAEGKTDREIRRCIKRYLARRVFKIFHVSAVAEEVTIAA

SEQ ID NO: 419783 - protein, 325 aa, unidentified
MTLSLGVDVSKSKFDAALMTAQGKYRSKVFNNTAGGFEEFLKWIDANVERGRSNVQVCMEATGVYHEALANFLFDSQVKVFVINPLRIKRFVESEGLRNKTDKGDAKALARFALHNQLDAWEAPSTGVRELQALVIRLESLQTMRHSELNRLDVAHPSICDSIAAVVAALDAQIETVRLLISKTIDDDPDLRQRQDLLETIPGLGATTIASLLAYIGRPERFKTVKSLVAYAGLTPAIRQSGTSVDKRQGLHPVGHPALRKALFYPAMTAARYNPIVAAFWQRLKAQNKPGKVILVACMHKLLSIAYGVLKSKRPFDPSLAPNNA

SEQ ID NO: 419784 - protein, 341 aa, unidentified
MKNKSFIGIDISKNVIDASIFCEGTPIKDFSHDVFNNSRKGFGEMCTWLKKNHVVLSNCLFGMEFTGSYSMELEKFLNARNYQFCMLSTHVVKHYPMGPKDKSDKIDSAKIADFLYRYNGTECVKPYKMPDKTMQRLKALMNERKFLVEQRTCFMNRRQLCITKEDAQLYDGYIKKFSRDIENIELEEQKLLATDDSLLSTYKNLLTIPGIGFVNAINVIVITRNFTAFETARQYASYVGVAPHFRTSGTSVKWRPRPSARCDGQAKADLSMAATVAVQYDAELQSFYNRKLGGKQDSDTKRKALNAVKFKLVLRMFAIGKQNRKWEPLDSKSSNEKLAIS

SEQ ID NO: 419785 - protein, 340 aa, unidentified
MNITTIGIDLAKNLFQVHAVNERGHAVLNKQLKRSQVTAFFANLPPCLIGMEACGSAHHWARKLQGLGHTTRLIATQFVKPYVKSNKNDVADAEAICEAVGRPNMRFVPIKNVEQQAVLSLHRARHAFVKARTAQANQIRGLLAEFGMIIPKGIAHIRARVPGILEDASNELPGEFRSLISRLTQHLIELGRQADEMGAQIEAWHRSNELSRKLTAIPGIGPISASALVASVGDARNFSSGRQLAAWLGLVPRQSSSGGKNVLLGMSKRGDAYLRTLLIHGARAVISRVRQKQHGNGWLLKLMGRRNSNVAAVALANKNARVVWALLAHDRPFRADYLAA

SEQ ID NO: 419786 - protein, 412 aa, unidentified
MEVLYARCCGLDVHKSSITACVLIAQAGKPLKHIRRFGSTTRELRELVAWLREFGVEHVAMESTGVYWKPVWNVLEDHFQIVLANAQHIKAVPGRKTDTKDCQWIAELLQHGLLRASYIPSVLIRDLRDLTRARTSLSQEHSRIASRIQKVLEDANIKLASVASNTLGKSGRAMLGAIIEGEESSERLADLALGHLRVKIPQLQTALEGQVRDHHRFLLRSLLRQLQFLEAEIELLDARLDQIGREHLDLAEALDRWITVPGVDRVAAWSFIAEMGIDVAQFPTAAHLASWAGVCPGNNESAGKRISSKTRKGSPWLRRMACQSAWAAARTKNTYLSAQFKRLAARRGRKCAIIAVAHTILVIGYHLQRTHCTYTDLGSSYFDRLHADGLKRYLVKRLESLGHSVILQPRTA

SEQ ID NO: 419787 - protein, 339 aa, unidentified
MKKRYLGVDLHRNCFTVYTRQEDGSGESRQWSIHSLKAFAKTVKVRDEVAVEATGNVRLFCEALTERGCRIVVVNPHQFEVISRSVKKTDEHDAKVLAEFLAKGLLPEVRMKDEIHARVASLAQTRDKLVKLRTTLKNKVNNLLAARGILIRKESLSSEKGLAEVLSAPVSELERMELEILVGEIRHLNESIKKLEGLLRDQGPKLPGWENLTSIKGIGDTGASILLSTIGRIEDFADEGKLAAYFGIVPRVSNSNEKERSGRITKRGCKLGRTALVQCALIAARYSPYLQNYYRRIAATRGTGKAIIALARKFLSIIYKTLKNNWIFEDFPQFVLVNE

SEQ ID NO: 419788 - protein, 425 aa, unidentified
MNYKQNEKINQVKESTLVVGIDIGSTTQYARAFDWRGIELGKVFPFSNSREGFESFKAWMQHLQDKYKKLDAIVGIEPTGHYWFDLGAYLEDEGILLVMVNPYAVKQTKELDDNSQSKNDRKDPKVIAKLVTEGRYSAPYTPDGVYADLRIMVANRKRLIREMTQIKNRFARWFAIYFPEYTDVFGDYEAQSSMLLLKKVCTPEAIVELGAEKINQIWRDAKLRAVGMKRATTLCETAKRSIGLKKGSSAAQYEMKLLLEDYEYKKAQLDAVMEEIEKLCRKIPESEQMLAIKGIGVITVAGFLAEVGDVRRFESPRQIQKLAGLSLRENSSGKHKGQTTISKRGRSKLRAVLFNAAIPLIAKNPEFKSLHEYYTTRANNPLKKKQSVIAISCKLIRVFYAILANGVTYDAQKMLSDIHRQPQAA

SEQ ID NO: 419789 - protein, 355 aa, unidentified
MVTLGIDAHKRTHTVVAVDELGRGLGQKTTVATTSADHLEMLRWAERFGPDREWAVEDCRHLSRRLEADLLAAGERIVRVPPKLMAHARDAARTYGKSDPIDALAVARAALGHPDLPAARLDGPARELRLLVDHREDLVAERTRCINRLRWHLHELDPTWDPPARSLGRYRHLDAIAERLAGIDGPVARIAADIVADVCHLTLRERALEGAIATLVAELAPTLRALVGVGALTAAKILAETADVRRFRSKDAYASHNGTAPLPVWSGNRERHRLSRTGNRQLNAAIHRIAITQIRCHDDARAYLERRIASGKTRTEALRALKRRLSDVVYRALTADAQPLTATRDASQTCDAEAA

SEQ ID NO: 419790 - protein, 347 aa, unidentified
MDHIGMDLGKKDSQIAILTGEGELLDKRIRTERTRLSEFFRARPKARILLEAATESEWVARCLEELGHEVIVADPNYAPMYAQRSRRVKTDRRDARALAHACRLGAYRPAHRTSDERRHLRALVAVREALVRTRARWIVLIRPLLRREGVRIRRGNAQTFLRRVEELALPAHLQAEIAPLLTLFMPLNDQIEALDEQLAGLVDQDEVAKRLTTAPGVGPVTAVSFVATLDDVRRFRGAHQVQSYLGLVPREWSSSEMQRRGHITKTGNSRMRWLLVEAAWCILRRNKKPETAALREWAERIALRRGSRIAVVALARRLAGILYAMWRDRTEYNAAKPRGRDALKQAA

SEQ ID NO: 419791 - protein, 352 aa, unidentified
MKYYIGCDAHKKYSVFTAINESGEISPAKRVEHDRNSFRSFLKTLPPASQIAVESTGNWYWLIDEMEKAGHAPSLVHAAKAKLMMGHINKTDKLDAQGLAILARNGTLPAVWIPPGELRDQRELPRMRMALSQVRTKFRNRIHSTFAKYGITFDEVSDLFGKKGRILIEKSLDELPPETRNSVQEQLWLLDQLEQSINKAEKRIREVIKIDHDMQLLLTLPGVGPILTIVIALEIGIVDRFPTGERLSSYAGKVPRVKSSGGKTYYGKVRPDVNRYLKWAFTEAANAVVLQQHRLPDCHVLRLYWRVRKHKGHAKAITAMGRHLAEATYWMLKKNEPYHEPKVKTLVSYNQG

SEQ ID NO: 419792 - protein, 344 aa, unidentified
MSNLDTCGIEVSAKELVIQLRRRGELEPLRRFTNTPGGREMVLRHLREAGRVVRVCLESSGLYGLDLALLLSAGKGLEVMVANPRAVRHFALALMKRSKSDPLDAAVLEEFAARMPFQAWQRPSPRELSLHALARRLHELVEIETAEKSRQHAAGISDTTPAAVRRDLARSLRAQQRAIQRLTRHARRLIAQDPVLSERFELLDSIPGVGETSALQLLGELAVLAPGLDTRQWVAYAGLDPREYSSGSSVHKKPRISKAGNKHLRRALYMPALVAVQHDPHLGAFYQHLIAKGKLKMQALVAVMRKLLHAIHAMFKKHQLYDGSTLFRLPVTSTQEVPCAPLAS

SEQ ID NO: 419793 - protein, 366 aa, unidentified
MLYLGIDQHARQITISLRDESGDVLQARQVSTQPEKIQAFFQQLTRERLRDGDSFVAVLEVCGFNDWLIRMLQDYRCHKVILIQPEERKKCKTDRRDAAALSELLWVNRDRLLQGKPVRGLRQVEIASSTDQENRRLTTLRKDAGQARTRLVNRVRHILRRHNLQWQMPTRRFPTKAGIAWLKQLALPEIDRLEMNHLLTDVEQVQQRLKDLEQVIAQRCGVSAEAGLIASMPGVSYFTATSLACRVGRVERFPRARSLANYWGLTPGCRNSGENTQRLGNITKAGSGMARWLLAQVTHKVLRKDARLREWFKRIKRRRGSTIARVAVMRKLATILWHMLSERKTYAECRAVAEAGAKEGEKQECT

SEQ ID NO: 419794 - protein, 375 aa, unidentified
MKKNSSGCKSPKASMKATRATNVTVGMDLGDKTSRYCMLDENGEVSREASAATTKKAMTQVFATMKPCRVAIEVGTHSPWVSRLLKSFGHEVIVANARQVQLISKSSRKNDRMDAQTLARLARVDPRLLRPVQHRSEQAQGHLRVIRVRAALVEARTMLVNAACGLTKATGERLPSCDADQMGVELMESLPAGLQNSLRPLLEEVGSLTEKIQALDQQVEQIARTDYPETDLLRQVSGVGPLIALTFVLTVEDRERFQKSRDVGCYLGLRPRQSDSGESEPQLRITKEGDPYLRKLLVQGAHCIMRRRGPDTDLKRWGLKLSARGGKNAKKRAVVAVARKLSILLHRLWVTGEVYEPLRNSQSGPPVKKTRKAAA

SEQ ID NO: 419795 - protein, 339 aa, unidentified
MVHVGVDLHKRSSQLAVLMPDGEVTQQRLENDPTQLERFFAQVPRGARVAIEASGTWWWFVDLVERLGHHAILSNPKQTKAIAAARLKNDRVDAERLALLLRGDLLPTVWIPPAELREARELVRHRVSLVWVRTEIKNRLLALLSRRNLQPTSSTRWLTVRGRRELEGLPLGAIPSTVREDCLALLRVLDEQIRRLDHELVQRWGDDPRVRRLQTIPGVGPFTAILLILELGEIQRFPSAKHLASYVGLTPRVRASANRVRMGHISKEGNRLVRWALVVAATQAARRPGPLRAWFRAVQQRKGMKIARVALARRLAEIVYQIWKQDMDFVTLVCGGVRG

SEQ ID NO: 419796 - protein, 345 aa, unidentified
MQSMYYIGLDVHKKKISYCVKDGSGTVHSEGTVPATRLELDLWMKRLPQPWSAAMEATIFTGWIYDHLKPHAAALKVAHPLMLRAIAAAKKKNDRIDAKKICDCLRCDFLPECYMAPTALRECRRTLRYRNLLVRQMVQMKNKISVLLMEAGVSYNKEKLHKVGYFRELLANNPDINDGLRSLLRLCRETVVRLGKTESALVRTLQRDPMLAERVERLMTIPAVGPITALTWALEVGEVKRFSSIKKAISYCGLCGDEKSSADTVQHTPISKQRNKHLQTTLIEAANMAPRYSPDLAALYDLEKRKGHANRATLTVARKLVAYLMAVDRGQRNFLMVANKTRAVA

SEQ ID NO: 419797 - protein, 344 aa, unidentified
MQIRSVGIDLGKTTFHLVALGATGKVLVKKKFTQKQLLTFTANMQISLIGLEACSGVHFLGRALKQQGHDVRLIAAQFVKPFVKSNKNDFVDAEAIAEAVERKNMRFVPIKTDDQLDLQAIHRIRDRLVSRRTAVINQIRAFLLERGMVFAQKPAKLKAAMADVLENAENALTPMMRNLIGMLWDEWKTVEEQIDELTDRLEQIAASDAGCCRIRQIPGIGPIVATAIVAAIGNGAAFRKGRDFAAWLGLVPRQYSTGGKAKLLGISKRGNIYLRKVLIHGARAAAMRIKRDRFPIGAWMNALEARAPRNVLVVAMANKLARIAWAVLSTGEEYRPGVIGAVAA

SEQ ID NO: 419798 - protein, 335 aa, unidentified
MKKFLIGIDVSKEKLDLCFKSQGNIREETVIENQSPLIKSYFKKVLKENHLNAIDLLICAEHTGQYTYPLCCVCNELGIDLWLENPSQIKYRSGVQREKNDKLDARKITAYAERFQDEAKIFSMPEKSIKMLKQLISERDMYIVDRGKYKGQLTDQKRFMDKDDYKKKSKRLKGLIKELTEAITQIEKEIQKIMESDETLSNQHKLLCSVDGVGEQTAVKMIVETNAFQDFTNPRKFCCHAGVAPFSYTSGSSQRSKNRVSHRADKSIKVLLHMAALIAATRMNGELHEYYLRKVAEGKNKMSVLNAVRAKLVYRMFAVIRNEKAYEKNYINALA

SEQ ID NO: 419799 - protein, 339 aa, unidentified
MGLHCAVDLHGNNGFYGITDETGKRLFKKRIPNSLPVILAALEPYREELDSGVIVESTYNWYWLADGLQENGYQVRLANPAAMQQYNGLKNTDDESDTFFLTEMSRLGILPEGHIYPKEDRPVRDMLRRRLLLVRHKTAHVLSFQNLIARERGEKVTSNQIQKLWPEQVKPFFEDERLILMGETNIEMIRFLTKHIRKIEKAVLGEVELEPEYEKLRTVPGIGKILGLTIMLETGNISRFKKVGNYSSYSRCVRSQRTSNEKKKGENNRKNGNRYLNWAYVEAANFIRRYCPEAKAWHQRKLRRSKQVVATKALASKICKACYFIMRDQVDFDVKKIFG

SEQ ID NO: 419800 - protein, 335 aa, unidentified
MQVYGIDLSMEKFDVNFIDAKGEERNGEVKNKVVSISKFLSSVAEDGVLCAEHTGAYGDLLVYLCNQAEIPIALVPGYTIKHSLGLLKGKADPLDARRIREYGERFTDKLVFSEYDEECIVEIKQLYTLRSQLVKARKTLVTSDKGRYHLPMQNVSVHNHLQSVLANLDTEIAAVEEEIEALIKMNQDLNENYELVTSIKGVGPVIATDLLIKTGNFKNIDTARKAASYAGVCPFPNTSGKMVGKSKTSPFADKKLKSLLYMGAKSAVKHNKEYQLYYQKKKLEGKPHYLIMNNISNKMLRTIYSVVKNKTPYSQDYICLDPRKRNINSSLKEVA

SEQ ID NO: 419801 - protein, 340 aa, unidentified
MGEVTTIGLDLAKHVFQVHGVDAEGATVLRKQLRRAQVLAFFSRLPPCLVGLEACATAHYWARELRALGHEVRLMPAQYVKAYIKRNKHDAADAEAICEAVGRPTMRFVPVKTADQQAAVLLHRGRERLVRQRTGLVNALRGHLAEFGVIAPQGLRNVGKLIAIVRDEGDARLPDLARQVLQVLAAQIEQLEAAVAAIEKQLMAWHKSNPVSQRLASVPGIGPIIATALAATVVEPSGFRSGREFAAWLGLVPRQNSTGGKHRLGGISKRGNQYLRRLLINGASANLLRSKATKADPWVIGLRRRRPPLVVAVALANKTARIAWAVMHRHENYQRVAAAA

SEQ ID NO: 419802 - protein, 412 aa, unidentified
METIIERCCGIDVHKKTISACLLTGKADEKPKQTIRSFSTMTGDLLACRDWLIEEGCTHVAMESTGVYWKPVFNILEDHLEVILANARNIKNVPGRKTDVKDCQWIAQLLRHGLIEGSFIPPKPIRQLRDLTRYRQKLTQQRSSEINRLQKFLEEANIKLASVVTDITGVSAQEIIRHLIQEDMTTPEMAQLARGRLRNKIEQLEQSLEGYLSGHHRLILRLSLQMMASYDEAIEKLDTEIAHRMEPHQEIIQRLETIPGVKKKTIETLIAEIGSDMSRFPSHAHLASWAGLSPGNHESAGKRKSGRTNHGDKWLKATLVEAAWAASKTKGSYLKARYHRLVSRRGKKRAAVAVGHTILIIAYHIIKEQCVYLELGADFFDRLNEQHLVNRLTKRIAALGYKVDIEKLPMAA

SEQ ID NO: 419803 - protein, 323 aa, unidentified
MAFLEHAPSHVVGIDVSKLTLAVCPAPGTAACTVASTGASTVANTARAIRKLVAGLPSGTLIVCEPTGGHEALLLAELAAAGIACHRADTLKARAFARSFGRLAKTDAIDAALLAAYGQERWRHLPLHRPADRTQAQLAALVARRHDLMAIRGAELNRAKSPGCTLVVASCRSLVRTLDRQIETIDTAIAGLCAQCTLLARRIALYRSLPGVGPRTAISLAAAMPELGTMTGKQAASLAGLAPHPNDSGTLKGYRKTRGGRPQIRSILFMAALSAARCKGPLRPVFQRLIANGKKPIVALTALMRKIVVILNARMRDHLNDMS

SEQ ID NO: 419804 - protein, 388 aa, unidentified
MPGTNDLSRSLVALEEDSTLIAVVELSQASWLAAGLLPGVDRHPLKKLRIDEHELLSLLYRWRDEAERTSGRPIERICVAYEAGLDGFWLARWLRGQGVEAHVIHATSIPVKRDHRRAKTDRLDCRLLMRAFVGWLRGEAEHCRMVMIPSPQEEDTRRPHRERQNLVHERTRTVNRMRAALVRLGVRGFNPRLRKAVARLDEVRTPEGMPIPPNTLAELHRDMARYRFLSEQIKEIDAAREAQLERAPDGKHERTVGLLRQVYGLGLDTADLLAAEVFSRDLRDRRAVARYGGLTGSPDESGKRRREKGLARAGNPRVRNAMIQLAWRFLKFQPGSALAQWYRERTADGRREVRKTMVVALARKLLIALWRFVTDGEVPDGVILKPAT

SEQ ID NO: 419805 - protein, 342 aa, unidentified
MKQYVGLDVSQKETSVCVVDESGRCVFEGKAKSHPGALTELLRKRAPNAERIGFETGAMASWLWHELRRVELPVVCVDARHAHAVLSVRMNKSDENDARGLAELVRVGWYREVKVKSEESQRVRAMLVARSRLVAIRRDLENQVRGMVKEYGLQFPRAIGRQFRGHIVELLGDDHPLRCVVEPLLIIHEEVCQQQRKLDDEVRRMAKTDETTRRLMTVPGVGVVTALTFRHTIDDPSRLRSASAVGAYLGLTPRRNQSGETDANGRISRWGDGLLRAYLFEAATVLLHRTKKWSSLKSWGLKLAKRVGMKKAKVAIARKIAVILHCIWVDGTSFEWSQAKAA

SEQ ID NO: 419806 - protein, 330 aa, unidentified
MQGRAKRRRKEIMDKEKVYVGIDIAKERIDVAVHSSEQRWSFSNDDVGITRAVSCISGVSPVLVVLEATGNLQASLVGALAVAGITPAVVNPRQVRDFAKATGRLAKTDVIDAHVIAHFAAAIHPTPRPLPDTQAQELKDILARRRQVSEMLTAERNRSGSAHKAVRDRIQAHITWLQQELDEIDDTSRRVIRESPVWREKDDLLQSVPGVGPIVSATLLAQLPELGTLNRRQIAALVGVAPFNRDSGTLRGKRTIWGGRSRVRAVLYMAAIVATRYNPIIRNFYERLCNAGKAKKVALTACMRKLLTILNAMSKHRVPWNYKLPVVAVT

SEQ ID NO: 419807 - protein, 449 aa, unidentified
MSDIPTSSIQPEFVALIGIDWGDKKHAWALQAGDSTKIEKGEIEHTPEAIQQWAAELRRRFPSGRLAVALEQSRGPLVFALSKYEHLTLFPIHPSSAAEYRKVFRPSGAKSDGPDAVLHWDMLARHRDKLRPLNPDTPETRALQLLTEDRRQLVNERTRYSNRLTANLKSSYPQLLQWFDDLYAPVTLDFLEQWPTLEELQKAKPAVWSKFFQEHHCRDAKNQQLLAAIPTAVTATTDFAVVTAGRAGVCAAVRLLRNLNQAIQEYDRQIDQLAKGHPDFALFQSMPGAGKVLVPRLIAAFGTQRDRYQRAAEIQQYSGIAPVTEASGQQRWVHWRWSCPKFLRQTFHEWAAQSIAQCDWAAAYYRVQREDKNKSHHAAVRSLAYKWIRIAFRCWKDRQLYDGSKYELALKTRAKATPEPKQPSSFPLPLRWISCAGFQKLAEKDGENT

SEQ ID NO: 419808 - protein, 345 aa, unidentified
MEIHTIGIDLGKTVFNLVGLSIQGEVIVRKKLSRKQLLHFTANLRVGLIGMEACGGAHFLGRALREQGHDVRLMPAQYVRPYVKTNKNDYIDAEAIAEAVRRPRMRFVPIKTDEQLDMQSLHRVREGWVGRRTAVINQLRGLLLERGITVRKGRRHIEDALPGILEDADNKLSAALRLLLFQLCSEMRHLQSQIDEADAVILRMASEDESCQRLDEVPGIGPVIATATISAIGNGAAFKKGRGFAAWLGLVPGEYSTGGKQKLLGISKRGNSYLRRLFVHGAHAVMQQRAKQSSGLRQWLEQLSARVHRNVAVVALANKLARIAWAVLAKGERYRPSLLAEGVCA

SEQ ID NO: 419809 - protein, 373 aa, unidentified
MSREIIYLGLDVHKDSITIAVLPSGAPAPTRVERLPNDLTKLRRFCERLAAHGEVRACYEASGAGYVVHRAMRAWGYHCDVIAPSLIPTKPGQQRKHDKYDAAQLARLYRAGELTLIRIPSEAEERVRDVVRCRETLQREVLASRHYILKFLTRRGFVYREGTNWSTAHYNWLRRLVAASSPLAPEDQMVFGEYLGLLEYKLSRRDELDRRIGELALTPALAPAVNRLQCFRGIQRHVAMVLATEIGDWQRFDSPRQLMAYLGLVPRERSSGDRERRGSLTKAGNSHCRHALVQAAWAYRYQPKVGLALKARQQGQSPVVIAHAWKAQHRLHTFYRRLAFRTKPQIAVVAVARELVGFLWAVMQDQHAAAVAA

SEQ ID NO: 419810 - protein, 463 aa, unidentified
MPKAWKSRKKLALKVDVTAGLEALHHHAAGIDVGNAEHYAAVPVGRDPQPVQTFGSFTADLHRLAKWLKACQIETVVMQATGVYWIALYEVLEGYGLQVNVVNAKYTKTLPGRKTDVLECQWLQKLHTFGLLNNSFLPPEEIRVLRTYLRQRENLVAAAGSCIQQMQKVLTQMNVQLANVISDLSGMTGMAILQAILDGQRDPQQLAALADPRVQASRKEIAQSLEGHWREDLLFVLRQVHDLYFTYLENITACDQRIEAHLKTMQAKVDVVAQPLPEARPKDRLPNRKHIPQFGLREELYRITGVDLTRIDGIQVQTAQVLVSEVGVDMTRWPTEDHFSSWLGLSPNNQITGGKVIRRGTKKVLNRAATALRLAAQTLHRSKSYLGAKYRRLRAKLGAPKAITAMAHHLARLIYRLLRFGTQYHDKGVEYYERKYRETEMKWLQKQAAKLNMQLIPTGALTK

SEQ ID NO: 419811 - protein, 402 aa, unidentified
MKVSGLDVHKDSIFCAIYDGKSYSEVKEYDSTTNSIRKLGNQLQSEGVQQVAMESTSIYWTPVWDILEEMGFDLVLVNPYLIKQMPGRKSDVKDAQWIASLLHKGLLRGSMVPCTTIKELRIYTRKYVRFQRKSIQILTEMDRVMVTANIRISSCVSNLTGKSIMKVIEALIAGVTNADDLVKLVYANTANKKSGKLREALTGNIKEHHRQSLQWAKEMYDLYQKQIRECLICMEQICKEHYSQEMMLLESIPGISKVSAMCIIAEIGADMSAFENSGKLTGWAGLRPRNDESAGKFKSKAITKGNKYLRTILVLVAWAASRTKGSYFKEKYNRLALRKSNKKAIIAIARKILVIIWNMLNDNKFYNPTLVHIYDPVKVERSIAYHQKEIEKASKLLPMKVV

SEQ ID NO: 419812 - protein, 289 aa, unidentified
MEGGRTGEVRYFGEIDTTPASVERLMRKLEKKYGRLHVCYEAGPTGYGLHRQITAMGHVCEVVAPSLIPKRAGERVKTDRRDAVTLARRLRAGELTGIWVPDDVHEAMRDLVRAREAASEDLRKKRQQIQSFLLRHGRIFTGRKHWSATHMRWLATQKFEHSAQQIVFQDHVDAVRDARERLERFDAHIEELVPAWSMAPLVAAYQAIRGVSILVAATFAVEVGDIRRFDSPRQLMTFLGLVPSARSTHSAHCSESPVGRLRRPSTGSTPENGPTPHLVGVGEKRIGKV

SEQ ID NO: 419813 - protein, 416 aa, unidentified
MNAAGIDVSSRKSTVAVLRPFGEVVRLPFDVSHSSEDLAGLARQLKALDGETRVVMEHTGRYYEPVANVLHEAGLHVSAVNPLLIREYGGNSLRRVKTDKADAVKIARYALDNWADLRDYTPMDTIRYDLKTLNRQFQLASKQKTATANNLIALQEQSFPGIRKCFDSPVRQDGTQKWVDFTYTFWHADCVRKHSLNAFAERYRKWCKRHGYIFKQSNAEEVYALAKSAVTLVSSSEVTKLLVQEAANQLTGISHSVETYRAEMNRLASMLPEYPVVMEMYGVGESFGPQLMAEIGDIRRFEHKKSLVAFAGVDPMPNQSGEKNVRSNRSSKRGSPYLRKTLFNIMGIYLRCSPADEPVYQFLDRKRVEGKPFYIYMTAGANKFLRRYYAKVRDYLATLDGLPPVDMDSTGLSQPD

SEQ ID NO: 419814 - protein, 376 aa, unidentified
MREKLRFLGLDVHAETIAVAVAEPNGELRSLGTIANREDSIRKFIKKLGSPEQLRACYEAGPTGFVLYWQLTQLGVDCAVVAPSLVPKKPGDRVKTDRRDALKLARCHRNGDLTAVWVPDAASEALRDLVRQREAAKQDQLRARHRLTKLLLRTGQRPPLGLKAWTERYWRWLAQVHYTQPAQAVTLRDCLNEVEHMSDRIKRLEEAILEVVKLAPQATQELVRGLQALRGIAHISAVTIASELGNISSRFQCARNLMGYSGAFPGEDSSGNRIRRGGITKAGNAHLRRIVVESAWCYRHLPRVGARLRKRQEGIPAEIIEIAWKAQNRLHKRYMKLSMAGKDQRKIMTAVARELLGFIWAIGVKVEQACQQPIAA

SEQ ID NO: 419815 - protein, 458 aa, unidentified
MSRNKSTDRVRRTMAVVHPNAAAIDVGATMHMAAVNADRTPEPVRSFGTFTTDLHRLVDWFAECGVDTVVMESTSVYWIPIFELLDARGFAVFLVNARDAKHVPGRKTDVSDAQWLQRLHSFGLLRASFRPKGQIAELRAYLRQRERLLEYGASHIQHMQKALTEMNVQLHHVVTDITGATGLRIIRAILGGERNPAVLARMRDRRCHATVETIEKALAGNYRAEHLFALEQALALYDTYQQKASACDARIEAVLKELSARRGRKAGPLPSPRQNRSRQQNSLLFDVRTALFALLGKDLTQINGLGPYLALKLIAECGDDLSAWPSAKHFTSWLCLAPSNKISGGKVLSSRTRRSGSRAAALLRLAAVTVGRTDTALGAFYRRLSARIGKAKAVTATARKIAVLFYNAVRHGMDYVDPGASSYEIRYRARVIDNLHRRAKAFGFMLQPMAPTPGMAVS

SEQ ID NO: 419816 - protein, 354 aa, unidentified
MSKILNAAIAIVGIDIGKNAFHVVGQDERGAIVLHQKWSRGQVAARFANIPPCLIGMEACVGAHHLSRKLKELGHDARLMPAKYVRPYSKGQKNDFRDAEAIAEAVQRPTMKFVATKTVDQLDLQALHRVRERLVSQRTGIINQIRAFLLERGIAVRQGQRFLRAELPRILAAPPDVLSARMVRVIEDLASDWRRLDERVESLSGEIEAVARQDADCERLMSVPGIGPIISSAMVAAIGRGEVFSKGRDFGAWLGLVPKQTSTGDRTVLGKISKRGNRYLRVLFVQAAWVVLIRPKSWERHGLKPWIEAAKKRLHPNVLAIALANKLARIAWGVLAHGRNFEARTNTNATAQAA

SEQ ID NO: 419817 - protein, 364 aa, unidentified
MELSRSTWLITSLSPGGGEKISKHTVRSGDVAGLWARFSQLKDKVQVRTGQVAPIIVIQEAGLDGFWIHRLLQDEGVESHVVDPASIATSRRRRRAKTDKIDGEALVRALLAYKRGEPRVCAMVRAPTPQEEDRRRICRERKTLTAERIEHVNRIKGLLFAQGISDYEPLRRKRRERLEALRTGDGRLLPEHLKAQIGRELDRLELTLQQIKSVETERDAMLSPSDEGTPAPGAMLKSLKGIGPEFAAVLWAEGLFRSFSNRRQVAAYAGLAPTPWRSGSVAHEQGVSKAGNPRLRTTMIQLAWLWVRHQPRSILTLWFHQRVQLNGGRVRKMLIVALARKLLIAFWKYVTAGVVLEGAETTAA

SEQ ID NO: 419818 - protein, 402 aa, unidentified
MNCVGIDVSKGKSMIAVMRPFGEVVVSPFEVRHTANELSELAGLLKSLDGETRVVMESTGNYHAPVAWLLHGAGLYVSVVNAMLVHDYGNNSLRRGKTDKKDAVKLANYGLDHWLTLPRYVPEEDTRLMLKTCYRQYQQYSKVQTMLKNNLISLLDTAFPDANRLFTSPPRADGSEKWVDFVAAFWHCECVCGLSEKAFTAKYQKWCRKHGYNFSQDKALDIYASACGRFGVMPKTNTAKLLVEQAISQLQTTSSALAALKQEMQSLAASLPEYPVVMGMFGVGPTLGPQLIAEIGDVRRFHSKKALVAFAGIDAPPYQSGQIDVRSRSISKRGSASLRRTLFLVMGVLLQCAPMDEPVYQFMNKKRSEGKPYRVYMMASANKFLRIYYASVKAYLDSLEHD

SEQ ID NO: 419819 - protein, 378 aa, unidentified
MQDRRLVGIDLGITSTHTVRVLSGDGTIVCRRKAVPTLASLVEVERAALTGTTPGVCLEVVLEPTGPSWLPIAVFFYARGHTVYRVSSATAHDLRRVLSRHAKSNGIDADTLARLPLIDPAGLHPLQLPDAPRAALDRRVRACDRLTQAAACHKRRIKDLVRQLMPMTPLAGELGQADLAVLERYADPHTLLAAGRARLTRVIVKASHGQQGAARANQWLGAARASLELYADHPAVAFQDLAAEVTTELRLLAATQAELDRHTTERESCYRWVDPAGLARSLPGLAEIGGPALVATMGPATRFATAAKFRSFTGLAPKASETGQTDRKGQPISKAGNRLLRTTLVRAADNAHRVDPQLARIYHPQMVERGKTTSVRSG

SEQ ID NO: 419820 - protein, 358 aa, unidentified
MNNVKSSRLDFTGQPIYIGLDVHKKSWSVSINTKYGEYKVFSQPPEVDKLVHYLQHHFPGGDYRLAYEAGYCGFWIHDQLREKGIQCLVVNPADIPTKNKERRTKRDRIDCRKLGRSLRNGEIEGIYVPCRPKLEDRTLTRTRQSMVRKQTRCKNQIKGMLLFYGVVIPEVREMGHWSRRFIQWIEGIRMERASGDIALKAHLEELSHLRQLIASLNRAILRLARTEEYRPLVHLLKTVPGISTLTAMILLTELGEITRFPSLDELSCYVGLIPDSRESGDKEYIGSLTQRRHSQLRWLLIEASWVAVRKDPALLMAFEEYCKRMRKTKAIVKIARKLLNRIRYVLRNQAEYVPCVIQ

SEQ ID NO: 419821 - protein, 367 aa, unidentified
MKYYVGLDLHSNNTYLGIIDQEGKRLYRARLRNFINLILAEVEPYKEDIEGLVVESTFNWYWLVDGLREAGYKVHLANPAAIKQYEGLKYSDDSHDAFYLAELLRLGLLPEGYIYPRKEREVRDLLRKRLMLVHQRTAHILSLQSLYNRLSGQKISVNVIKQLKEEDIHELFSSPHVILSAQADLSTIDFLTRKIKEIEERVLTTIKLLPEFKKLKTVSGIGNILALTISLEAGDIARFPKVGNFASYCRCVPSKHMSNDKKKREGNRNNGNKYLCWAFVEAANFAKRYCPYARSFYQRKSAQTNQIIALKALAHKLARASYFVIRDRVDYNPLKAFGQIKNGCGSEPTKRLDPEPYDPIGHLPQPQ

SEQ ID NO: 419822 - protein, 462 aa, unidentified
MAGHSKRRPHKPATVSPTALPAVRPRVAGLDVGSSQHWVCGPARDDDPPYVRSFGTTTDQLNALADWLLTQHVESVAMESTSVYWIPIYEILESRGIEVVLANARQLHHVPGRKTDVSDCQWLQVLHSCGRLRGSFRPSEAITRLRALQRQLGNLVAERTRCVQWMQKALDQMNVQVHRAVSDLTGATGLTIVRAIVAGERDPARLATYRDRRCRHSADEIARYLTGTWRDEHLFNLASALRLFDALDAEIAAYDARLLQELEALHPPDRHEAPVPPHPNPAKEKAIKARGEQPARATLWRFAGVDLTRVDGIGAGAARVILTEVGPQLTAFPSEDHFVSWLRLCPRTPISGGKPLKKRRNGLGANRIAGVLRMAATSLHRSKSALGASFRRIARHKGGAVAVFATARQLARLIYRMLRYGHDCVDIGEQAYDRRFQVRRLAALTDTAKTLGYALVPNVATG

SEQ ID NO: 419823 - protein, 351 aa, unidentified
MDHYAGIDVSLECSSVCVVDANGKIVREAKVASEPEALIGWFRSLGFDLARIGLEAGPLSQWLYAAMKKDGLAVELLETRHVSDAFKAMPVKSDRNDARNIAQLMRLGWFRPVHCKSMGAQEIRAMLTARKLIQAKLQDIENSLRGILRGFGLKVGKTTKRSFAARINELVAGHPALETIAAATLAVHAVLLREFNGLEKRVRAMSLLDARAKLLMSTPAVGPIVSLTVASAIDDPARFTSAKRAGPLFGLTPKKHQSGETDYSGRISKNGDASVREALYEAAHIILTKPIKGCAPLKSWAMRIAKRAGMSKAKVALARKLAVIMLRMLKDNVPFNPAAKNPAVKATVAAA

SEQ ID NO: 419824 - protein, 309 aa, unidentified
MEPIIVGIDVSKDRLDIAVRPGGAAFIVERTGDGLERLVARLAELAPSRIGLEATGGFETVVTAALAGAGLPVVVVNPAQVRAFATALGQRAKTDPIDAAVIAHFVEATRPELRPLPDEATQMLADLVQRRRQIIAMIAAENQRAKRAPARVKKSITRLLKALEKELASVDTDIDDGVRGSPAWREKEDLLRSVPGIGPTIARTLIAEMPELGALDRKQVAALAGLAPFTRQSGQWRGRSFIGGGRSPVRTALFMGAMVAKRHNPVLKTFFDKLVTAGKPKMVALIAVARKLVTILNAILRDRQPWQNA

SEQ ID NO: 419825 - protein, 398 aa, unidentified
MIYVGVDIGKDRHAAAAVNEAGESAMPPFYFTQDAGGFAALFGALEKLGGPGAVAVGMEATGHYWKVLRHALVKRGYRVDVINPLITSREASSDVRGRKSDKLDAIAIANVMRKGGYSPAPAAGATDALRTLARYRRTLVARRSDAKNRLAAALDVAFPEAAKTLGGLSGAAAMAAVRAFPSARLAAKADIRTVTSVFKKASGGRLGREDAKKFREAARHSLSLGMDTEGEEFVIPQTVDEIRALDSQIDRVERRMQEEPRPELAARLMSIKGAGRIQPLAIAAEIGDPARFAGADMAGKVLAYAGCDPRVRESGKWKGRTKMSKRGSPTLRNALYLMATTVRLHTPHFNEIYKKHADKGKHHNVALSHVIRKIVDVMCGMYKTNTDFVPPKTKVKPC

SEQ ID NO: 419826 - protein, 443 aa, unidentified
MIEPNAAGIDIGHREHWCAVPSARCERPVRAFGTFTEDLERMADWLRECGIQTVAMESTGVYWIAAFQVLERRGFAVRLVNARQVKNVSGRKSDVLDCQWLQRLHSYGLLNASFRPADAMCVLRTYLRYRDELVCARSVQCQHMQKALQQMNVQLHQVLSDVTGVSGLRMIEAILAGEREVQKLAGLADRRVRASQATIQKALRGDYRAEHLFVLRSAFELYQTYEAKIARCDEQIIAQMATLPTCAEEDKKPLPPRKPGRSLRCDLVAGTDLRKELYRCAGVDLTAIEGIGVLTAQVVISEIGLDMSRWPTEKHFSSWLGLCPDHRISGGKVLSRHTRHVLNPVADALRIAATTLQNSKTALGAFYRRMRARLGAASAITATAHKLARIIYRLLKHGEHYVQQGLDAYEKKYRERLLHNLKKTAAALGLELSQKQPLPPCVS

SEQ ID NO: 419827 - protein, 353 aa, unidentified
MKKYIGCDAHARYSIFASLREDGRWDPAVRVEHNEGEMERFLKQLPPGSPVALESSGNWYWLVRAMEEAGLDPRLAHALEAKKRMPGRNKTDHLDAKGLAMLLRNGSLPEVWIPPANLLDLRDLMRTRLATRQQGSELKCRILAALRRYGTRRYSDGADLFAESRQVQLSIAMARLPQECRMATSEEWALLKQLEQHIEALEQRIRQRIAALGWVRLLKTLPGVGSILGSTIYLEIGEVSRFATPEKLASYAGLVPTVHASGGKSWQGPTPRSANHFLKWAFIEAANVVSTRQKAWSEKHVVRLYQRLKAHKGHGKAATAVARHLAESSWWILTKRQPYRDPALGTLSSSKNG

SEQ ID NO: 419828 - protein, 385 aa, unidentified
MANQNDLSRSLVAFEQDNTIIAVIEMSLNSWLVAGIVPGIERRPLKKLSCDEQMLLQLLYRWRDEAVKAERKITRMVVAFEAGRDGFWLARWLRSRGIEAYVIHPTSVAVSREHRRAKTDRLDTELLIRAFLGWLRGEPDHCSMAAIPNLQEEDAKRPTRERENLVGERTRIVNRMKACLIRFGIRNFNPILRRATERLNALCTPEGVSLPPNTLAELRRDMARLRFVMDQINEIEAARLRRLEQAPAEEPHAKVRLLARVIGVGLETADMLVHEILSRKLRDRRAVARYAGLTGAPDESGSKRREKGLAKAGNARVRRGMVQLAWRFLLFQKNSALSQWYRTRTESAGKKRKTMIVALARKLLIALWRLVTTGEVPAGVVLRAV

SEQ ID NO: 419829 - protein, 309 aa, unidentified
MKQSVVYIGIDVAKAHLDVAWAGTFRRLPNERSGHAALVRWIRQSTTPVQLICEASGGYEQALLESLEKSEVKVTLVQAVRVRQYARAAGILAKTDRIDAKVLAAFGSAMQPQPTSPLSAEQKRLRQYEAQRRQLSRILVAEENRLAQLSCTELRTLSRSLISKIKTQIKTLDRGISDLIAQDQTLCVKAQKLTAISGVGVRTAALLLAQMPELGQLNRRQAAALAGLAPFNHDSGSVRGKRAIFGARPALRSGLYMAALSAARFNPILSSFYQRLRTKGKPHKLALTAVMRKLLLALNQTLKPLPCST

SEQ ID NO: 419830 - protein, 340 aa, unidentified
MKEVITTIGLDLGKKVFQVHGVDVAGGVRVRRSLRRSQVLEWFGKQQACLVGMEACATAHYWGRELSRLGHEVRLIAPAYAKACVRRNKNDAADAAAICEAVSRPGMRFVAIKTVAQQAAGGLHRVRDLLQKQRTMLINQLRGLMAEFGIVVAGGPQHVKDLLAVLADPADARVPELLRGPLLGLAQVLGDLERRVATLERQIVAWGRGNATYRHLITVPGYGPILAGAFAAFVVEPSALRSGRDFAASLGLVPRQEGTGGKLRLGSISKRGNGYLRRLLVNGAMSVLNTRRARQDPWIARLLASKPRKLVAVALANKLARIGWAMMVRQEDFRPRSAAA

SEQ ID NO: 419831 - protein, 344 aa, unidentified
MKITRVGLDIAKLVFQVHGVDERGKVGVRKQLQRSKVLQFFAQLPPCVVGIEACGSSHYWGRELTKLGHTVKLMGAQFVIPYRKRSKNDANDAEAICEAVGRPNMRFVAVKSEEQQSVLMVHRARTLVVANRTAQVNQIRGLLGEFGLVVPKGVARLRRELPGILEDAENGLPALAREVLAGLLDQFRHFDTRVTAYDRQIRVLAAASEPVQRLMEIEAIGPQTATALVASMGDPHVYSNGRCYAASIGITPRQHSSGGKDRLGRITRQGDGYLRTLLVHGARAALRVIDTKTDAKSAWARRLRDRRHVNVAAVALAAKHARIAWAILAHGTNYRPAAPEVVAA

SEQ ID NO: 419832 - protein, 412 aa, unidentified
MNVYCGIDWAERHHDVALVDDTGTQLAKKRITDDAAGYRVLLDLLAEHGDTPEDLIPIAIETSHGLLVAALRTGNRQIYAVNPLSAARYRDRHGVSRKKSDPGDALVLANILRTDMHAHRPLPADSDLARAITVLARAQQDAVWHRQQLVNQVRSLLKTFYPAALDAFQGKQHGLARPEARTVLATAPTPARAAKLSLPQLQAALRRAGRVRGIEAEARRLKEVFRADCARHPQAVEDAMGQQLGALIVQLDAACRAADELAKAVEESFRKHPDADVLLSFPGLGVQLGARVLAEIGDDHGRFADARALKAYAGSAPITRASGRKKFVGRRFIKNDRLITAGFLWAFAALTSSPGADAHYRRRRDAGDWHAQAQRHLFNRLLGQLYHCLQTGQLFDEQRAFTPFPTELAVAA

SEQ ID NO: 419833 - protein, 408 aa, unidentified
MNPLYVGIDVSSKSNVVYFMLPDGSKHSNFSVANSHTGSSQLVKRILSAMTSFSLDSVLIGLEATSVYGDNLVYFLREDAALARFNSKIHVLNLKQVSKFKEAYNDLPKNDFIDSFVIADCLRFGRINKEVYIGDYRYKALQNLTRARYFAVSNFIKEKQRFMNILFKKCSTMTQEKVFSDAFSTTALAVYDEFESAEALANMDLHELTDFIIEKGKNRFPDPDAVAKAIQKAARSSYRLPKTVNDSVNQVLSISITSMKALESQIKEFDKAIIALMELLPNVLISIPSIGPVYSAGIMAEIGDINRFDNQASLAKYAGLAWKQHQSGGFEAEVTRLIPSGNRFLKYYLCEAAFSLVRCYKEYSDFYHLKYKEVNRYQHKRVFALTARKFVRLVFRLLKDNRLYTSAE

SEQ ID NO: 419834 - protein, 350 aa, unidentified
MPRIKTTEPIATIGIDIGKNTFHLIGLDKTGAIVMQTKLSRNQLARRLVNVPRCLIGMEACSGAHFIGRMMEGFGHDVRLIPAQYVKPFLKGHKNDYRDAEAIAEAVQRPTMRFVRIKTPEQMDLLALHRVRSRLVGQRTGVINQIRGFLIERGITAAKGPNALRKVLPDILASCDDVLSPMIVRLIEELSEDWRRLDIWIDDLTEEIELLANEDACCQRLMTVPGIGPTISSAIVAAVGDASGFASGRDLSAWLGLVPRQMSTGDRTILGRISKRGNKYVRTLLVQAAHIILVRQPATARQGLWPWIEAASKRLHRNTLVIALANKLARIAWAVLTRGVDYQPRQLGRG

SEQ ID NO: 419835 - protein, 359 aa, unidentified
MQTQRKELNFEGQNIFVGIDVHLKSWNVSIYTEHQYHKTFTQPPNAETLSKYLKLNFPNAIYNSVYEAGFSGLHAHYELTNLGINNIVTNPVDVPTTDKEKRRKTDKVDSSKLARSLRSKDLKGIYIPSQDILEDRSFIRVRKSIVNDQCSLKNRLKSTLYFYGVEFPVEFQKSSTHWSNRFMVWLKTVQLKTKSGNMALAILIKEAELLRALLLEVDKELKGLSITDKYAKSMELIRSVPGVGLITGMLFLSEIDTIKRFENNDKFAGMIGIVPDCHSSGDNKQIGEITPRRHVHLRSGLIESSWIAIRIDPALSKAFSDYCKRMEPNKAIIRIARKLSNRIYFVLKNEKKYETRIVK

SEQ ID NO: 419836 - protein, 350 aa, unidentified
MIIIGCDYHPGFEQIAFVDTETGELQERRLQHREEAEKFYRDLAAQEMKVRVGMEASGHARWFERLLSELQIELWIGDAAEISSRRVRKQKTDRQDAQLILKLMLKDDFPQIWVPSWENRDLRQLLWHRHRMVQARTRMMNQLQAVALNEGLRCKKKLWREAGREQLEAFKLAPWASQRRRDLLELLDRLNPTIAKLTQAIEEEVEKCPAARRLKTHPGVGPLTALAFVLIIGKADRFQCGKQIACYLGLVPLEKSSGNQRRLGHITKQGNSLLRFLLVEAAQVTVRSLPDWRSKYCHLTMRRGRKIAKVAMARQLAVRLYWMLRKEWDYERLRKFGSHAGKPGPGDGVK

SEQ ID NO: 419837 - protein, 340 aa, unidentified
MTIATIGIDLAKNVFAVHGVDHNGKTVLVKSRVTRATLPGLIAGLPPCVIGMEACSGAHYWARLFRQYGHEPRLMAAKFVSPYRMAGKSGKNDAADAQAICEAVRRPHMRFVPVKDESQQAMQCLHRTRQGFIEEKTAAYNRLRGLISEFGVIAPQSTDALRHMVSEQKNSLPLQVQQCVDDLLEHVDRIEANIAEYDRILSRMAKTDHRSQRLMELKGVGPTTACALVASIGNAHDFKNGRQLAAWLGLTPSQYSSGGKSKLGRITKAGDSYLRTFLVQGARSVLIGAEKRTDSFSRWVCSLVERRGYWRAVVAIAAKNARLCWASLHYCDDFRLYSAS

SEQ ID NO: 419838 - protein, 429 aa, unidentified
MNFRPIAGIDVGKFFSEMAILSPSNEVISRMKIHHDSNTDVERAVELLKKTEKEFASRPFVVMESTGHYHKILFHSLCKAGFEVSVTNPIQTDSIKNIGIRKVKNDKVDARKIALLYRFQELRSTNIPNEDIECLRSLCRQYYKLSDELTAYKNRLTGIVDQLMLNFKNVFPNIFSKAALSVLEEYPTPTHILKANRNKLIALIQKNSHRSLKWSTAKYELLVSKARDFEPLSINNSSNIAMLSVYISMIRTLEENLEKVLKAIRLLIAEDMAKDMPMLALTLELLQSLPGIGLLTAATILAEIGDFSAFSKPGKLVAYFGIDPSVMQSGEFTGTRNKMSKRGSRLLRRVLFTIALANIRTKRNKKACNPVMLEFYKQKCQSKPKKVALGAVMRKLVNYIFAVLRDRKPYQLRSPQEHAKNLAAKHTAA

SEQ ID NO: 419839 - protein, 338 aa, unidentified
MNNIKLVSIDLAKNVFQVCGINQAGKPIVNKKVKRSQLLETVLSLKPKRIVMEACYTANYWGRKFQSFQFEVSAIPAQFVKAFVRGNKNDGNDALAIAEAAVRPNMRFVPIKTIEQQDLQTRHRVRERHIRNRTALINQIRGILSEYGVTIALGSKTVIKQIPLVLEDANNELSPSARSLLSDLSQELRTITETIKHDEVIIEQLSKSHDTYQRLMTVPGIGKILSSFIIASVGNGQQFKNGREFSAWIGLTPRQYASGDKSYLGKVSKRGNRTLRTLFIHGARAAFTRCKQRDHYLFQWSEKIAARSSKPKAWVALANKLARIVWAMLVKKTEFQYR

SEQ ID NO: 419840 - protein, 415 aa, unidentified
MKNWKEITHYAGLDWASDHHDVVVVDADGQIVGQWRFNHTLEGWQYLAAQLRQLDTVAVAVETNQGLAVEQLLAQELTVYPVNPRSARHYRERKAPTGVKNDQLDAWSLADALRVDGQGWKPLAPSDPLLAELRLLTRDEVALIEQRTALVNQLQAALRDYYPAALEAFDDWTLPGAWAFVEQFPTPARLVQARKRAWEKFLHTQKLWRPETAAKRLEIFARADQFAGSPPVSAARSLLAVTLARLLRALQNQLAEYRRRIEELFAQHPDHELFGSLPGLGPKLAPRLLAEVGSDRARFASATALQCYAGTAPVTIQSGQITKRVMRQACHDGLRHAVHLWADMSRHTCAWAQAYYQAHRDKDQSHACALRCLGQRWLKILWAMWQAGTTYDGELHARNQQKHGSWILQFQPKAL

SEQ ID NO: 419841 - protein, 391 aa, unidentified
MYKQKHKKISKEKKKMKTSQNEKLERIKSNTIIVGIDIAKEEHWARITDYRGKELSKPIKINNNIEGFEKFFALVEKVREKYESDRVIMGFEPSGHYWRAFGWYVKLHESMPSIAGVNPYHVKQSRELDDNSQSKSDKKDALTIAHLIKDGRYFDIYLPEAEYAELRVLNEERQRIMKQLNRAGNTIIAVLDEYFPELSTIWKDVTCKEALSILKKASFPQEILSLSKSDLIAIVKESSKGTEGDKMADKLVKAAKVSIGVREGAKAAKSRLLRLIGELEFYQLRLLDVEAELEAVMSKSEHSEILQSMKGIGVVISAAFLGEVGDVTRFDDWKQVRRLAGLNLVENSSGKQKSGTKISKRGRPYLRHMLYMSGNSCLLHNPEMRQYYQYL

SEQ ID NO: 419842 - protein, 321 aa, unidentified
MQIIGIDVAKASFDIALPLSAEKFRTKAKMANTAKGFRDLLDWRARHAPDAAVGMEATGVYHQALARALVEAGVVVHVANPARVKAFGQAEGIRTKTDRSDAKLIARFFQAQRPEKLRPYVPPTPSEVKLRSLVRRRDDLKEMLQMEKNRLDVADTSVQRGIMDVMQTLEDQVKQVEKAIKDHIDSDPDLRGRHELMTSIPGIGGTSSAQLLAFLGDLGKYTDVRQVVAHAGLNPAQRQSGNYEGRAHISRIGDAELRSKLYMPALTGKLRNPVLKAFSERLSERAKPPKVIMCALMRKLIHIIWGVLRSGRPFSPEIALA

SEQ ID NO: 419843 - protein, 345 aa, unidentified
MQPMYYIGLDVHKRKISYCVKDSSGKIHAEGWIPATRLDLDRWLETLPAPWSAAMEATMFTGWIYDHLKPHAAALKVAHPLMLRAIAAAKKKNDRIDASKICDCLRCDFLPECYMASTAIRERRRTLRYRNLLVRQMVQVKNKVAALLMEAGISYNKQRLHQAGYFRELLANHSEIDDGLRSLLRQCREMVVRLGKMEQALIRSLKQDRLLAERVERLRSIPGIGPITALTWALEIGGVERFSSIKKAVSYCGLCGAEKSSGSTVQRTPLSKQRNKHLQTTLIEAAKMAPRYSPALALLYDREKQKGNANRATLAVARKLVAYLMAVDRGQRSFLVAKQEGYAAA

SEQ ID NO: 419844 - protein, 323 aa, unidentified
MSTKATKKRRSFIGIDVSKKLLEVGVHQSDYHFRCPNDPKNFPALITELISLRPARILLEATGGLERALLQALHAAGLPVVVVNPRQVRDFAKALGLLAKTDRLDARVLAHFAAAIQPAIRPVKAQQETELDALMGRRTQLSDMLVQEKNRRGSAATKDARDDIEEHIEWLEERIQELDEKLKEQLKCSAVWQQKDKILQSVKGIGFVTSLALLADCPELGQLNRHQIAKLVGVAPLNRDSGQQRGARHIWGGRAQVRSKLYMATLAAIRFNPVLKSFYQRLLAKNKLKKIAIVACMRKLLTIINVMIRENKLWNVKAQPVSA

SEQ ID NO: 419845 - protein, 409 aa, unidentified
MQVMHERCAGLDVHKKTVVPCVILTLPDGRVEKHTVTFSTMTSQILAMADWLKSCGVTHVAMESTGVYWRPIYQLLEGQFTLLVANAQQIHRMPGRKTDLTDAEWLADLLRHGLIAPSFVPPQAQRQLRELTRHRSNVTGRRTQCINELHKTLEGTNIKLSSVATDITGVSAMDMLQHLLAGQTDPNFLAELARGVLRKKIPELRQALQGVVGEHQKLILNQLLGDIERFDQQIEDLNAEIARRLAQEQSVIQRLDQIPGVDRKVAEVMVAELGTDMSRFGSAQRAAAWSGMCPANRQSGGRRYAARSRFGNKHLKGTLAEAGWAAGRSKQTYLGAQFRRIAARKGSRRAALAVGHSILTISYHMMDRGTPFTELGADYFDRRNPERVKDRLVSRLEKLGYRVSLEKAA

SEQ ID NO: 419846 - protein, 312 aa, unidentified
MFVGIDVSKPRLDVHVRPSGESWSVANDTDGHNELVRKLAVISPTLVVVEATGGYQASVVAELGANAIAVAVVNPRQVRDFARATGRLAKTDAIDAAVLAHFAEAIRPTPRPMPDDLTVELQALVTRRRQLIDMRTAESNRLETCRVLPVRRNIQKMVNLLTKQIGKVDDDIDTTIRNSPLWREREDLLSSTTGVGSTTARTLLTQLPELGLLNRREIAALVGLAPFNNDSGKRTGPRSIRGGRADVRAVLYMATVTAVRFNAQLRPMYERLVAAGKVKKVALIACARKLLTILNAMMRTKTPWRLNPAQTT

SEQ ID NO: 419847 - protein, 351 aa, unidentified
MGKDITVGMDMGDKNHNVCILDAEGNVLKRATVANTVQAIGKFFGGMEPCKVAMEAGTHSSWVSRTLEALGHEVLVGNPRKLRVIWDSNEKHDDRDAEMLARIARLDPHLLHPIHHRGQQAQTDLAIVKGRDMLVKTRSMLVAHVRGVVKSTGQRITKCSAESFHVRLRMEMPMELQPALEPIMKSLEDLTCRIRHYDKLIESVCTGKYPETQGLRAISGVGPVTALAYVLTIEESTRFDQSRTVGPFLGLTPKRDQSGQTDKQLRITKAGDVYLRRLLVGSAQYILGPFGPDCDLRQFGLKLAARGGKNAKRRAVVAVARKLAVMMHRLWKSAAVYDPFYQQNRKQRKAA

SEQ ID NO: 419848 - protein, 342 aa, unidentified
MTQYKRIAIDTSKAVFTLHGIDHADRPVLRIELRRAQMIPFFKKLPPTEIAMEACGGSHYWARELTALGHKVLLIPAQYVKPFVKRGKNDRIDAAAICEAAGRPGMHFVAVKSAEQQAQAMLLKVRETLVDQRTMLVNTLRGHAGEFGVIAAKGISNIVRLLEAVEADTSIPSEAREMMTLLGEEIDRLDTRLNEMEARLMKAHKANPVSRRLATMPGVGPIIALTVAVEIDPAAFESGRHFAAWAGLTPREHSTGGKQRMGGISRAGNERLRRLFVLGAMSVIKVAERPGNKLATEWLLNLLRRRPRKVAAVALANKMARIAWAMMTSGENYRRAPAARVS

SEQ ID NO: 419849 - protein, 417 aa, unidentified
MLKTSYKNCAGIDVHKTNIVVRIAKTDAHDVTEYQLKKFSTMTEELIKCRDWLVENGTFDVCMESTGKYWIPVFNILEEKCRCVLTHPKYVKSIVGKKTDNKDSLRIVDLFKYGLVEPSFIPPADIRQLRDLMRYRNKLVNMRSSEKNRFQNSLTVSNIQIANVVTDVFGKTSQSILKLMLEKPDLTLDDIVPLLDWRLKSSPEDILKSINGSFDESQSSKMAVCLKHYEALNDSIDLLEQSILKLAKKYVSEINLILTVPGIKEISAIFIIAEIGTNMEVFPDDKHLISWAGLSPRCNESNKKKKSSRINKAGAYIKPLLVQCALAALKDKRCPYIRARYESLKRRRGHKKAIIAIARLLLTSIYHILKNKEPFDYERFIKLQNRNFKSKKKNFKTEDDMISYLTSLGYNITKQNT

SEQ ID NO: 419850 - protein, 320 aa, unidentified
MENIALIGIDLGKNSFHIHCQDHRGKAVYRKKFTRPKLIEFLATCPATTIAMEACGGSHFMARKLEELGHFPKLISPQFVRPFVKSNKNDFVDAEAICEAASRPSMRFVQPRTESQQAMRALHRVRESTVQDKVKTTNQMHAFLLEFGISVPRGAAVISRLSTLLEDSSLPLYLSQLLLKLQQHYHYLVEQIKDLESQLKRKLDEDEVGQRLLSIPCVGTLTASTISTEIGDGKQYASSRDFAAATGLVPRQYSTGGRTTLLGISKRGNKRSELCWFSVRGIHTKTGTPVWQVGRLGQGSCCVGKATLSSPVLWQTSWPE

SEQ ID NO: 419851 - protein, 364 aa, unidentified
MDAPRRHLCAKVTGVELPPKEASVKQATTIGLDIAKHVFQVHGADGAGHVLFRKRITRVKLLGFLAAQTRCVVAMEACAGAHYWAREIAKLGHHVRLIAPVYVKPFIKRQKNDAADAEAICEAAQWPNMRFVPVKTEEQQANGIVFRARDLLVRQRTQCVNALRGHLLEYGYVFPKGITHVETLVALVEDLQSSLPNSVRIILKLLVDTFTALEAQIAVLDAEINRRSKSDPAARRLMTIPGVGPIASTAITALVPAAEGVPAGRDFAAWLGLTPLQKSTGGKQKLGAVSKRGERTIRRLLIIGASAVVQQASRRGAPKGSWLAQMLARKPKMLVTVALANKMARVIWALLVKGGTYSAPVAAA

SEQ ID NO: 419852 - protein, 489 aa, unidentified
MKSQPAKKAQNDKKQRYQASGKPTPGKWDEMNRKQRREMMRKMQSEDLNLEVVHPQAAGIDIGNESHYVAVPSSLDPQPVRCFGCTTAELKKMAEWLTQCGIRTVALQSTGVYWIAVYDILEEAGLEVYLVNARETKNLPGRKTDVQESQWLMKLHTYGLLRNSFRPSQEIRTLRTYWRQRQDLVRSTGRHVQRMQKALTQMNIQLANVISDISGVTGQAILKAILNGERDPRELAAYRDCRIEASEEEIAQALEGNWQEDQLFLLRQEQAGYEFCQKQIMECDQQLAQYLTKLEDRTQGATLPEETRKKRRKKKKGNPQFNLREELFRMTGTDLTQIDGIDVMTAMTVVSEVGWDMSKWKTENHFVSWLKLSPDNKISGGKIIGKGRMPTNNRATTVLRMAATTLRESDSYLGAQFRRFRTRLGPPVATKAMAAKLARLVYRMLRYGMKYADQGAELYDAQYRKQQVIHLKRKAAQLGLQIIEVAPAA

SEQ ID NO: 419853 - protein, 369 aa, unidentified
MEQNSEVFVGLDVAKARHAVAIADEGRSGEVRYLGEIDSDPVSVRRMVARLEKPHRRLHFCYEAGPTGYGLYRQLTAMGHDCAVVAPSLIPKRLGDRIKTNRRDAIQLAKLLRAGELTPVWVPDETHEAVRELVRSREAAVDDLRRKRQSISSLMLRYGRAYPGKKTWGARHRQWLQAQRFDHPAQQLVLQEMILAAQHAVERLKRTEAAIVEFLPEWSLAPVVDALQALRGVQLITAATIMVEIGALRRFDSPRQLMGYLSLVPGERSTGDSVRRTGITKAGNGRVRRALVESAWTYRHLPRTSKLKHYVHERVPTAVRDIALKAEARLCGRYRALPGRGKKLTVVVTAIARELAGFVWAIGRIVQTA

SEQ ID NO: 419854 - protein, 367 aa, unidentified
MKKVSTILAKQSRKSFQQKLTIGLDLGDRNSWYCVLDEVGHIQLEQRVRTSAKGLGEVFGAMPHSRIALETGTHSPWISRLLREFGHDVIVANARKVRLIGESRKKDDRLDAQTLARLARIDPELLCPVKHRSAQAQADLMMIRARAGLVRARTGLVNTARGLAKSYGERLRGCNVRNMNPEKAEGLSAELQAALEPLLAAIESVSERIAEYNQRIEKLAQESYPQVAVLKQVKGVGTLIALTFLLTLEDPHRFDKSRDVGCYLGLQPGRRNSGQSEPQLHISKEGDPYLRTLLVQGAQHILGPFGVDCDLRRWGLKLADRGGRNGKKRAIVATARKLAVLLHHLWVSGEVYEPLHNNRRVAVTAAA

SEQ ID NO: 419855 - protein, 407 aa, unidentified
MIFVGVDWAEAHHDVCVLDAEGSVLARRRIPDSLVGASELHALLADHLGDDDDAQSVIVGIEKDRGLIVTALVAANYQIFAINPLAASRYRERHHVSGAKSDPGDAKVLADLVRTDRHNHRAVAGDSALSDAIKLLARTHQNTIWTRQRQVNSLRSALKDYYPGALDAFGTDLSGPDAVAILAIAPTPGIARTLSRAKITSALKRAGRQRHLDERVERIHEVLHREQLRQPTTLENAYGVTTEAAISNIAQLNVSLAKLEASLSEHFKQHPSAKVILSLPGMGTVLGARVLGEFGDDPNRYSDAKSRRNYAGTSPVTKASGKSRVVLARHSRNKRLASALDQWAFSSLLPSPGARHYYDDLKARDKHHRKAIRQLANKWVGILHGCLESDCPYDENIAWNTREERAA

SEQ ID NO: 419856 - protein, 398 aa, unidentified
MKGLVIALDVSKGSSHIQGFKSFGVPLGKAERIHHSREGFSVIKETAESLGKATGELPSVVLESTGVYGACVVRYCQSINLAVYLISPLASAKMRKAEIRPTKTDAIDPSTIAKVFYSRELRRLPVQGGARDSLRDLSRIYGSESSALTELKNKYRRLLDLVWPCLDEAWEDPFSSVPMAVVERYGHPEILATKPKSRIATAIFAGSFASKAKSEAEAEKAKEYSKAHVSGVPASSPYVAEIRAKAAEIRAKEAKLESVKKGMESIAESIPEWRCLKTVPCCSGIAGLRILAEIGDVRRFETPDSLVAYAGLDPCVSQSGEMSGKGLSITKKGNSVLRHQAYLVVKTMHQYSDCSITRFYDKKKSSGLSDKAAAVAASNKLLRVIYSVLAKKAEFVQQ

SEQ ID NO: 419857 - protein, 353 aa, unidentified
MTFYIGVDLHPHQQTVAWCNTETGETQTRDLKHDPETVREFYSSLPEPAIVGIEASTRATWFENMLFETCHKLFVGNPVLIRKRATSRHKNDRRDAELILQLLLHDEFPKIWRRPIESNRILEMVRLRQSMVRQRTQVCNRLQAIAHDLGLPKGRVRGVAFQAILKAAPADETTSIRRSHLFSLVGTLNEHIQKLDKWLEAKAAEDNNVQLLLTQIGVGYLTALVTVHTLGDVSRFSRISKQVASFAGLDSMERSSAGRIRFGRVSKAGSPLLRYQLGVAAKMASRSDARLKSFYTRLAKKKPKAVARMAVSRKLLIKLSIMLRDKITAEEFDQRGRTVGNARVLQGSERTVV

SEQ ID NO: 419858 - protein, 421 aa, unidentified
MKAHGEHPYAATIGIDWSNAKHDICLRVQGRDQLEYSQIPHTVEAVNEWARELRSRFGGQSVAVALELAKGPLVYLLEQHPQLVIFPINPATLAKYRQTFTPSHAKDDPTDAFLALDLLTRHHEHLSPLRPERPAMRALKQLINTRIMLRGDITRVTNRLTSASKNYYPQVLDWFADKDTRLFCDFLLRWPTSAQAKKARRSTLERFLRAHNVRRANVIKNRIDAINSLTVMSTDPGVVEPNTLLVQILAEQLTVLLDSRARCEGKISSLCEQCPDHHLFASFPGAGPIYSARLTSAFGEQRERLPSATHAQRHFGIAPVIERSGNKSWTHWRYRCDAKLRQTLVEWAALSIPHSFWANAYYQQQRHKGSTHQAALRALAFKWTRILYRCWHDGVEYDESTYLAALKQRGSPLLKYIANSA

SEQ ID NO: 419859 - protein, 353 aa, unidentified
MRTYYVGMDVHRATIAIVVVNGAGKVVEQFVVETSATRVRRYLKQLPGRVYVTFEEGTQAQWLYEVVQPLVTAVIVCDPRHNKLLQAGNKSDRIDAQKLAELLRNGSLKAVDHRDHGVRALKELVRNYDCLVRDTTRVMNRLKAMFRGQAIACGGHEVYRQDRRELWLSKLTERGAKERASSLYRQLAALQALRHEAKLAMVREARRCAAYVWLMSVPRLGAVSVAQLLAVVGTPHRFRTKRQFWSYVGLAVVTSSTADMEVVDGVLRRSRRPVATRGLNRNHNHLLKRVFKNAATSACQSEPFKQHYELRLQQGMDPALARLTVARQLSAITLSLWKRGEQFQAERMKRQAA

SEQ ID NO: 419860 - protein, 341 aa, unidentified
MDEYIGLDVSMKETAVSIRRAGERIWRGKCASDPSIVAELIRKRAPSVKRVVFETGPLSVWFYHSLRIEGLPAICIDARHAKAALDMATNKTDANDADGLAQLAEVGFFREVRVKGFDSMLTRTLVAARTRLVRITTELSNQIRGVMKTFGLLVPAGKGSTFEKNVRSLLADQDRLASIVLPMLEAWRGIRVRAAELGRQLVRDARLSRSCRILMSIPGIGAITATSFTTAIEEPDNFRKSRSVGAWIGLTTRRYQSGEVDYDGHISRRGDRSLRGLLYEAAAVILTRSSTHSTLRTWGLQLRERIGFKRAAVAVARKLAVIMHTMLKTGELFNPNAGAVA

SEQ ID NO: 419861 - protein, 418 aa, unidentified
MGVDVAKHTHYAQMINFRGEGLHKPFPFQNTISGIGDLVQQIKTIQFKHGLSKVLVAMEPTGHYWLPLACVLKTQGITVVLVNPHHVKKAKELDDNSPTKRDDKDAGVIARLARDGRFYIPHIPAGVIADIRNLVNFRGRLNKDLQQSEARINTILDLYFPEFQDVFKSVEGKAAMAALDNFPFPADLIEKPVDEVADVLSRATHNRVGLKHAELLKDKARTSVGVRDGLEGARMELRYQLRRVKEILKECELVEARLAELLREIPYAGYLLTIPGMSILQVATIVSEVGDLNNYRNARQLIKLAGLNLVENSSGTHKGRTRISKRGRAKLRCALFRVALVLVARTQEFSILHHYYTTRPNNPLKGKQSLVAICCRLLRIIFALARKGMAYNRDLVLPESHPALVHAGPVRPVAKVAA

SEQ ID NO: 419862 - protein, 324 aa, unidentified
MTEVTTIGLDLVKTVFQVHGVDASGVVRVRRALRRSRVLAFFAKLPPCLVGMEACATGHYWAREIAKLGHEVRLIAPAYAKAYVRRNKNDAADAEAICEAVSRPSMRFVAIKSETQQAAAGIHRVREMLVKQRTMLINTLRGLMAEYGIVVAERPRLVGELVAILADPADERIPAPLHDGLMALVETLRGLEQRIERIEQQIVGWGRDNATCRHLITIPGCGPILSTAMAAMVIDPAAFTSARHFAASLGLVPRQEGTGGKVKLGPISKRGNGYLRRLLVNGAMSVLCSRRAKEDPWLAKLLETKERRSSPVRSPTRWHASPGR

SEQ ID NO: 419863 - protein, 343 aa, unidentified
MESYVGLDVSLKRTSICVVDRTGKVLCEGTVNSTPEAIVEFVKSKAAGAVRIGLETGPTSTWLWTEIKALGLPVICIDARHAKAVLKMQINKSDRNDAFGIARIMQCGWYKEVRVKGLDSHAMRALLESRALLVKMKRDLENQIRGLLKNLGLIIATARGQAFHARVQELVEGRPCLAVAVLPLLETRNGIVRQIATLDREVLMMARNDTQVRLFMTVPGIGPITALCYRATIDEPSRFKRSRSVGAYVGLTTRRYASGEVDWTGRISKCGDAVLRSYLFEAAGVLLTRVQKWCALKAWGMRLAKRVGLRKAKVAVARKLAVILHRMWIDGTEFQWSAEKVVA

SEQ ID NO: 419864 - protein, 410 aa, unidentified
MEVLHPHCAGLDVHKDTVVACVRHMTNRTVKREVRTFKTTTTGLLALSEWLASEGCTQVAMEATGVYWKPVWHILSDGDFTLTLANAAHVKNVPGRKTDTNDATWLADLLTHGLIRASFVPDAATQEQRGLLRTRKQLIRERASHVQRLQRTLEDANIKLDSVVADVMGLSGRAMVEALVAGEADPDKLAALAHRGIRTPRETLREALRGRVTSHHRFLLQLHLKQIDALDEAVAGIDREVDAHVEPFRAAIAQLKTIPGIGDLGACVILAEIGHDMSRFPTQGHLISWAGLCPRNDESAGKRRSTRMRKGAPWLKTVLIQCAWAGARKKGSYLQAQFHRLRARRGAKKAIGAVAASMLTAAYHMLKEGTFYQDLGPDHFNRRAKQAKADGLVAKLKSLGYDVQVTLLPG

SEQ ID NO: 419865 - protein, 344 aa, unidentified
MDITTIGLDLAKSIFQVHGVDANGRVVIRKSLRRAQMLPFFARLPSCLVGVEACGTSHYWARELIKLGHEVRLMPPAYVKPYVKRSKTDAADAEAVCEAVTRPTMRFVPVKSPEQQAALSMHRARDLLVKQRTQLVNMIRGLLAEFGINIPKGLERALLMARRIVDDEAPDVPIEAAKIVGTLSQQALDIHVRLRQIDRDLLVWQRGNDVARRLMTIPGIGPVGATALAASVTDPHQFRSGRQFAAWLGLTPLQKSSGGKERLGRITKMGDKYLRKLLIVGMTSLVRRAKDNPPTIDPRLANLLVRKPVRVATVAMANKTARIIWAIMTRGETYRASHQPALAA

SEQ ID NO: 419866 - protein, 345 aa, unidentified
MGQITRVGVDIAKSVFHVHAVDRFGERQWKGKYCRTKWLDAIENKVPKGTEIAMEACGSSHYWGRELQKRGFKVKIIHAQFVKPYVKSNKNDAIDAEAICEAMSRPNMRFVSVKSSKQQDIQSIHRIRDKLMVQKASKANQIRGLVSEYGLVAPVGINKLREAIPLWLEDAENGLSALFRLLLRNLFDDLRQLQERVDTLDTLIEKEVKNDPVARSLLQLRGIGILCASALSCAIGDAKGYRKGRDFAASIGLTPRQHSTGGKPRLLGISKRGDGYLRKLLVHGARSVIRHAHRHDDNLSKWIEKLCAYKHVNTVTVALANKTARAAWAMVNTNESYDPELIASA

SEQ ID NO: 419867 - protein, 480 aa, unidentified
MIKSVGIDLAGTGEHKVRCLDEGAQVCDGFGFQTTPEGLTKLEERIFGDGSNPVIVFEPTGLAWLIVAIYLKARHPDCRVVRVQARKVVALRKYLRRSSKSDKIDALTLAKMPFIDPEQLEGIYLPPAKIYAIQRLARQRKRLESEIGSRKKRIGSIVDGYFPVMRQAFSDPWSAHARTFLRSRLNPLAVVHSGEKALHTFLTKARQHGKADAVESHLVYLACQDAATLYKASRSVGTIDEDFFAALQDEISRELRLMEMEEAESEAIAKRLEQLYHELHPSDNLRTIPGVGEHTAPIFLATVGDPARFRSQSAFANYSGVVPAAKQSANAEAKGLRMTKAGPAIMKWALYQAGQIGRRFDPQLAWVYYREMVHYGKNHKQAMGAVMSHTGARVLAVLREDKPYELRDIDGRPITREEARRLILLNYQVPEEIKRERRRRKQVAGKAVKSGRRNREMAAHRTNEAATAPQPVVATAISQN

SEQ ID NO: 419868 - protein, 417 aa, unidentified
MIRKVMEVIHQCVGGLDVHKKTVMACRRRLLGDGQVESEVREFGTSTLQLCALSKWLSEWGCTHVAMESTGVLWIPVWNVLEADFKLLLTNAQQLKKVPGRKRDVGDAEWIAQLMQCGLLKPSFVPNREVRHWRTLTRQRMKLVDQRTGVVNRLHKVLQQGNIKLSSVATDVLGVSGRAMIQAMIEGESDAQTLASMAKGRLKSKHEQLVESLEGRLNQDDRWVMKELWEQMEYLEEEIARYDEEIKEKMSPYEESLRRLMTIDLIERRSAENLLAEIGPDMTLFPSDDNLVSWGGLCPGSDESAKKNRSGKTPKGNQWLRRALVEPAWGAARRRDGYLGAMYRGIAVRRGEKRAVIAVARTILQAAWHVLSKGEEYKERGGDYFDRINSEQTKNKLIRRLEKLGYEVELKAKQEAV

SEQ ID NO: 419869 - protein, 343 aa, unidentified
MEYYVGLDVSLKQTSICVVNQTGSIVQEGVVDSDPEAIASFVRSRAPGTVRIGIETGPTTTWLWTELKRLGLPVICIDARHAKAVLKMQINKSDRNDAAGIARIMQTGWFKEVRVKDLDSHAIKALLASRALLVKIKRDLENQVRGLLKNLGLVIGRAKFNVFAVRAEVLIEGRPELVAVVRPLLAVRKAIEQQVSDLDRKVHKLARHDAQVRRFMTVPGVGPITALCFKATIDDPTRFKRSRSVGAYIGLTTRRHASGEIDWSGRISKCGDAMLRMYLFEAAGVLLTRVPKWSGLKAWGAKLTKRNGLRKAKVAVARKLAVILHRMWIDGTEFNWSTKKAAA

SEQ ID NO: 419870 - protein, 428 aa, unidentified
MDFEVKHLICAGLDVHKKTVVAAVCITDPVTLEATYKVKSFSTNNSQIAAMRDWLLSYNCLHVCMESTGKYWIPVFNILEPHMHVILTHPKYVKAIKGKKTDKREAKWIANLFRFDIVKASFIPPADIRALRELSRYRLKLSYMRSAEKNRYQNSMTISRIRIDCVLTDPFGKTASSIMDYLLSDVPFDETECAKLIHGRVKASNEEIFDSIRGFEILSEQRFKMSHAKQHMELLSSYMDEIETELFRLSRPYDEVIKRISGIVGFTERSALFVISEIGADMGVFESDKHLCSWAGLTPANNESANKKKSTRCSKAGQYLKPLLIQCALAAVKSKKNPYYAIKYNRLAKRRGRKKAIIAIARMMLTSIYHMILNNEEWKPDDYEAIIHPSKPEKVALTLDNVIQFLGEQGADPETLKLLQQQCAVTPG

SEQ ID NO: 419871 - protein, 316 aa, unidentified
MDTPRTYVGIDVAKAKLDVASYPPGLTTTVRNTEDGMAALVGTVHSVAPALIVVEATGGYELPLVRALVEAALPVIVVNPRQVRDFAKATGQLAKTDAIDAQVLALFAARVQPTLRLHPTPATQELAALLARRRQLVEMLTAEKHRRSRAPAAIRPGIQAHLDWLTQQVTTLDEDLTTRIRQSPLWKEQEDLLQSVPGVGPVLSRTVLADLPELGTLTRRHIAALVGVAPLNRDSGAWRGARTCWGGRARVRTAVYMATLVATRCNPIIRQAYQSLCARGKKRKVALVACMRKLLTILNAMLKHRTSWQEHLHQSA

SEQ ID NO: 419872 - protein, 480 aa, unidentified
MLLVSASSGLVPRRNGRDLCPVGKPRLRAPVQEPDKVAVARVACTINGAPCMAPSRGKCIMHGERQWFVGIDWASQEHVVSLCDGQGKKIGQRNFAHGGTGLSDMIAWLLKMSGGEPSEIHVAIETPHGPIVEALLERGFNVYSINPKQLDRFRDRFTVAGAKDDSLDAYVLADSLRTDMHLFRKLTIAEPLIVELREWSRIDEELKVERVRLANRLRDQLWRYYPQMLELGDLDEDWMLDLWQAAPTPEKAARASKAAIERVLKKHRIRRFDAAQVLSALRRPALSVAQGTIEAAIAHIKVTIERLRLVNRQLADAELQLDRLCKKLAEPVANDGENVPGQRQEHRDATILDSLPGVGRTVLVTMLAEAPHALQRRDYHALRNLCGSAPVTRRSGKSCLVTRRRACNRRLSNATFYWAQTATQCDPTSKAKYQALRARGHSHARALRSVVDRLLYVACAMLEKGTLFDPSFAEKNNAAA

SEQ ID NO: 419873 - protein, 358 aa, unidentified
MTKYSAIGVDLGDRCSVVCGLDDQGVVIMTQRVKSTPEAIEGLFSKIEPTKVAIEAGSLSAWVSRVLEAEGHAVIVANPRKLKLISENEKKTDGLDAELLARLVRADPALLKPIRHRGKQAQADLAVIRSRDVLVRSRTVLINHVRGTLKAFGIRLPRCSAEAFHHRVIGFIPKALSPAVAFVVGQIRTMTIAIREYDKDIEREVASRYPMVRHLAQVGGVGTLTALAFILTIEDPGRFPQPRQVGAFCGLCPRSARSSDSNPQLRISKTGNDYLRRLLVGSGHYILGPFGPPCYLREWGLALMARGGRNARKRAAVAVARRLSVLLLALWVSGEDYDPQRNGKTEAAHTLEGVASQS

SEQ ID NO: 419874 - protein, 412 aa, unidentified
MRRIIGIDIHRTFGELVFWEDGRLRHGGRVDMTRTALEGLGKTLSATDEVVIEATGNCMAVSRVLSPFVQRVVIANPLQVKAIAHAHVKTDKIDAGTLASLYAAGYLPEIWTPDAATERMRRLVARRYQVVRHRTRIKNEVHSILHAHLIPKCPHADLFNGRGRDWLQRQPVPDDERIAIERHVRELDRLREDLLILDRQIAEGTMEDPAVKRLLTITGVNLTVATGLMAAIGDIARFRSPQKLVSYFGLNPRVHQSGLGAAHHGRISKIGRNHARAMPLEAAWAAAKAPGPLHAFFVRVRARRGHQVAAVAVARKLAVLCWHMLTKGKDYFWARPSLVAHKTRSMELQAGQPQTKGNRRGPAYAYNVKELRDQEMRVAEQAEKHYERFIDAWRPRRPKEKARGRLNPARLE

SEQ ID NO: 419875 - protein, 400 aa, unidentified
MISVGIDVSKEKSTVCILKPYGEIVSKPFEVYHVEQELSELATMLLRLNDEVRIIMEATGIYHLPVLSYFKEKGFFVAVINPFEMKEYRCQGLRRVKTDKQDAIAISHYGIDHWYRLKEYEAQENIYTELKLLGRQYCHYMRMRVESVLELTHLLDYTMPGIKTLLQGWNEKNGKDKLGDFAEEYWHYDNITKKSEKQFIDSYLKWAKKKGYHQNQDKAIKIYALAKEGIPTVSSNTPSTKMLVQEAVRVLREVDHTLMTILTQMRSLAKSLPEYPIVRAMGGVGDVLAPKLIAEIGDVRRFHSGKALIAYAGIDAPPYQSGRLVGTERKISKRGSSNLRKIGYEVMRSLKTHKVPEDAAVYEFILKKEREGKSKRAAKIAGLNKFLRIYYARVMEVYRK

SEQ ID NO: 419876 - protein, 317 aa, unidentified
MQNSITWVGMDVHAENIVLVAVRGRSDAVVFRAEFPNTPKGRERLAGKLAENAPVRCVYEAGPCGYELRRFLEGRGIECDVAAPALIPRKPGDRVKTDRKDAEKLARLHRLGELATVFVPTPAQEALRDLLRTREDAREDLLRRRHRLSKFLLRRGRRYAEGVRWTTRHWDWIRAQTFTDRNAETVFREYIVAIEQEVERIRRIEQQIVEESRSPEVGKAIARLRALRGVDTITAMTIITEVIDLNRFRSPRELMAFIGVVPRERSSGGRERRGSITKTGNAHIRRVLIESAWHYQRLPAGTPKAILAVRRTVKIPL

SEQ ID NO: 419877 - protein, 360 aa, unidentified
MFGERTSVGLDVHARSVVAAAIDGQTGEVLKARLTPSHADVLEWIARLPGPCAVVYESGPTGFGLARALTAAGWRCEVAASSKLQRPAGDRVKTDARDALHLARLLRLDEIVSVRIPTPAEEAARDLVRARESARQDLMRARHRLSKLLLRHGIVYCGGKAWTDLHDRWLHRQRFDSIPTQAAFEDAYETVVLATTRRARLDEKITALAGDSEFTPLTRRLACLRGISTLTGFALAVELGDWERFTGASIGAYLGLVPSEHSSGQSRVQGAITKTGNTHVRRLLVEAAWHHRTTYRPGVVLQRRWEQAPAAARTRAHAGNQRLHARWVNLNLRKKRPVIANVAVARELAGWCWSLAVLPD

SEQ ID NO: 419878 - protein, 312 aa, unidentified
MIEHSYGGIDVSQDRLDVVVLPQGKGFSVTNERAGWNALIERLQGLPLVAIGLEPSGGYERGVLRALLGAGLSVRRINPNRLRQFARARGALAKNDRLDARLIAEYVAIMPTRAVRHDPAAGRIAEVVTMRRQLSDEHVAVENQAAHLEDAMLRRLAKRRLARLNADIRLLDKRLAEMVAAEPALARRYEVLASMPGVGPVLAFTLIALLPELGEMSRKQIAALVGLAPYDFDSGKLRGHRSIYGGRMPVRNVLYMAALSACRYNPALKAFRDRLVGARKKPKVVIVAVMRKMITTLNAMLRDGAAWQPRSA

SEQ ID NO: 419879 - protein, 343 aa, unidentified
MNAVGIDVSSRKSTVAVLRPLGEVVCLPFDVTHDIAGLASLVEKLKALDGETRVVMEHTGRYYEAVEKALHEAGLFVCAVNPLLIKEYGANSLRRVKTDKADAVKIARYALDNWADLRDFTPMDAIRYDLKTLNRQFQLASKQRTASANNLIALLEQSFPGIRKCFDSPVRSDGTQKWVDFAHSFWHVDCVRKQPFAAFCERYRKWCKRHAYLFKLSNADEVYALAKRAVVLTPKAKVVKVLVQEAANQLSSISRSVEVYRAEMDRLAAMLPEYPVVMAMYGIGKSYGPQLMAEIGDVRRFERKQALVAFAGIDPMPNQSGDKNVRSNKSSKARLSLPPQNPF

SEQ ID NO: 419880 - protein, 359 aa, unidentified
MNKNSMFVVGLDLGDKFSYITIVDQDGEMIEESRLPTTKASFQRKFSALQPCRVAMEVGTHSRWASHLLTELGHDVLVANARKLRAIYHNTRKGDRADAEMLARLARLDPALLSPIHHRSPQAQADLAVLRSRDAIVRCRTLLINHARDIVKASGSRLPSCSADSFAHKTAPHIPEPLRPALDPILDTIASLTKQIRAYGKKVETLCSQRYPETKLLRPVSGVGTLTALGYILTLENPDRFRRSREVGPAIGLVPRRDQSGDRDPQLRITKTGDAYLRRLLVGSAQYILGPFGPDCDLRRWGLKLAERGGKNAKKRAVVGVARKLAVLLHHLWKTGEIYDPFYLARKHDRAPEAVPVAA

SEQ ID NO: 419881 - protein, 469 aa, unidentified
MKKKPPQRRHGKPPASRPSLLERINPNAAGIDCGAATHYVAVPPDRDPTPVRTFQTFTGELHRLADWLTACGVTSVAMESTGVYWIPLFEILEARGLDVALVNARHVKNVPGRKSDVMDCQWLQELHSVGLLRASFRPTAAIAALRAYLRHRETLVQSAATHIQRMQKALVQMNLQLSVVLSDITGVTGLRIVRDIIAGQTDPHALAQHRDKRCQASEADIIAALTGHYRPEHIFVLQQNLELFDTYHRQLAACDAAIEAHVAPLAAQAPPPAGPLPSPRTKAKPKARDNAPRFDIRTPLHQLTGVDLTQIDAIGPYSALRLLAEIGTDMTRWPTADHFTSWLTLAPHNKITGGRLLSSKTMPSANRAAGILRLSALSLGRTDTALGAFYRRMASRVGKAKAITATARKLAILVYRTLKEGLVYQDPGAAAYDAHHRERVLRRLRQRAAHLGYVLLNRETGELLEGAVS

SEQ ID NO: 419882 - protein, 343 aa, unidentified
MQTITTIGLDIAKSVFQVHGTDAAGQVVIRRQLKRRAVLAFFQKLPPCLVGIEACASSHHWSRELQALGHAVRLMPPAYVKPYVKRQKNDMADAEAICEAVTRANMRFVPTKTPEQQGCLMLHRTRHLFIRQQTAVINSIRAHLAEFGIVAPVGRKGVMELLQVVADPSDKRVSEVTRACLTALGNQLLSLKEQILEFDRMIMAWHRSNEPSKRLRYIPGVGPMLATALVASVADPKTFRSGRNFSAWVGLVPKQHSSGGKDRLGSISKQGDRYLRSLFVAGALSVIRYAKIHGTKHRPWLTALLARKPTKVAAIALANKLARMAWAMMARGERYRNPVALAA

SEQ ID NO: 419883 - protein, 422 aa, unidentified
MEPIIEVDEDEVYYERCAGIDVHKKLLVVCMRIGRRQEVREFGTLTHEIREVAEWLKDNGCQMAAMESTGPYWKPLYNIFEQENLPVMVCNAYHIKNVPGRKTDVNDAKWIASCLSKGLLHPSYVPDRQQRELRDMTRFRKSQIEERARNVNRLQKFLEGANIKLGSWLSDVEGKSATELLELVIGTADFTVNDVAERMHRNLKSSAAELFKSLEGYITPTQREFFKHIMDVIRVQTAQIEKTDTMIQESLNDNYKAAVKALDVIPGIGRVSAEQIVAEIGVDMSRFRGPDQLSMWAGVCPGNNNSAGKRKSGRTPPGNKTLKSTLAQSAKSARKVKGSFFFAQYNRLVTHRGKNRATMAVAHSMLIAIYFVLSGNDFKDLGADYYNQFNREKKINSHLKQLAKLGFTVPDDIKATIMQNSA

SEQ ID NO: 419884 - protein, 342 aa, unidentified
MEHCGIDLHAKSSEVVVIGDAGDVDEQARIPTTESALRRWFGERAPMVICLEAGGQSAWAARILTSLGHDVVVANPSKVRLIAEATLKNDTVDATTLARLVRADRTLLAPIVHRSAETQRQRGVLRVRRTLINTRTACLNAARGILRSFGFKTPGKSARRLAEALADGRIPEELVTVVMPLVETALELTERIEGLDDEVEALGKAHPAVALLKTAPGVGPLVGLAYVLCIEDPERFAKSRDVGPFLGLRPKMRESGDTSRYGSITHQGDPEMRKLLVQAAHGVLRTRADSELKRWAEALAARVGKKKATVALARKLAVVMHRMWVTGEPFRPFRDQATEKAA

SEQ ID NO: 419885 - protein, 388 aa, unidentified
MQTVADRPEAPNAIRTDLGAIFISLELSRSTWLITSLSPDGGEKMSKHAVRGGDVAGLLERFAQLRKKARARTGKVFPFVVIQEAGLDGFWIDRVLRKEGIESHVVDPASITTSRRRRRAKTDRIDGEALVRALLAYKRGEPRVCAMVKAPTPEEEDRRRLCRERKVLIVERVRHVNRVKGLLFSQGISGYEPLRRDRRERLDTLQTGDGRLLPDHLKAQVRRELDRLELLLDQIKAVEAERDALLAVQQGAAPAPAAMLLNIKGIGPEFAAILWSEGLFRHFDNRRQVASYAGLAPTPWQSGSVDREQGVSKAGNPRLRTTLIQLAWLWLRNQPQSALALWFKERVNRNGGRLKKTTIVALARKLLVALWKYVTAGVVIEGAIMKSA

SEQ ID NO: 419886 - protein, 482 aa, unidentified
MANQKKSTFQRLINGRLNRKPRRELGRKLSAEDPGREIVNRNVAGIDVGNESHFVAVAPGRDPQPVQEFGSWTADLERMADGLKACGIRTVVMQSTGVYWIALYDVLEARGFKICLANARHTKNLPGRKSDVQESQWLLKLPTYGLLRDSFRPPDEIRALRSLWRLRDRHVKEAARAVQHMQKSMITMNIQLSNAISDITGVTGQAIIRAVLAGERNPGELAKLRDRRVKATEQEVARSLEGNWRADMLFELQQAVDAYDFIQKQVAECDQRLQTLLAVLPTREVEAAVVTTQAAGKPARKKRSRGKHKNVPRFDLHAELKRVCGVDLTSIDGVDIMTAQTVVAELGTDFSRWKDEFHFSSWLGLPPSRDISGGKVLRQGTLKVKNRVATALRTAANTLLHSDSYLGARFRSLPTRRGAPKAIKAMARYLACLIYRMFTHGQAWVDRGAQEFENKRAQRELSALKRKAAAHGFKLVNLEVCA

SEQ ID NO: 419887 - protein, 381 aa, unidentified
MEVLHAHCAGLDVHKDSVVACVRHMADSKVTTGVRNFKTTTQELMALSEWLSAEGATHIAMEATGVYWKPVWHILSDGEFELILANAAHVKNVPGRKTDVNDAMWLADLMAHGLIRASFVPDEPTQQMRDLLRTRKQMVRERSSHVQRFQKTLEDANIKLDSVVTDILGLSGRRILEALIAGQTMPQALASLAHRRIHASTDELEAALRGRVTKHHRFLLKLHLDQIDAFDAALARIDEEVSANVEPFRAAIELLTTIPGINALSAQVLVSEIGIDMSRFQTAGHLISWAGLCPRNDESAGKRRSTRMKKGRTLAENHASPMRLGRRPQEEQLFASSVPATALTAWLQESHLRRCRLHANRRLAYAQKRHLLRGSRTKPLR

SEQ ID NO: 419888 - protein, 336 aa, unidentified
MKTKKVKFYIGLDVHKRFTEYSVRDIDGNIQLQGRCASTGKDVYEILEPYLFSCVIGLETNVEIYPVYEYFRSKDIDIRAGNTIQLRTLVGKNDRLDAKRISDMLRLNTFPTAFIPEGKIKELRSIVKTRHSNLQEAQRLQYQIQALTRKYGLRMPPGESFTQQWKNVLEKYIVLNQGNIALKHLYDTYKFVNSQLEQITSQMSIFAKTHFPEEYNVIIAIRGIGNTITPYLISEIHPITRFKSEKSLRRYAGVVPVSSETGDKIYSTYLPKTTSRTLLRYAFVEAAGCMSIHDPGIRTYYKKKKKQKKLHSKAIMCVASSISDKIYKTLKGLQAG

SEQ ID NO: 419889 - protein, 374 aa, unidentified
MTASMDEEAPAMESMRWVGVDVHAKESLAAVLDRATGEINTQRISGRPGEAVLEWLATVGQPFRAVYEAGPTGYGLVRRARERGLDVVVCAPEHILKNATDHIKVDKRDAVRLARLLSAGELRLVRVPEPDEEQLRDLVRSREDLRVDLTRIRNRIGKFLLRREIYAPQHTETWGVLHRKWLRGLVFDDSASELVFEDAMHAHDILVARREQLERALVEIAETSAWALTIARLRCLRGIDTLSALGLVAEVGDFRRFHHPRFLTSYLGLVPSEHSSGEKRRQGGITKAGSKHARRLLVEAAWQYRHVPRTSHHISQRQKGQDPRVIDIAWRAQRRLYKRWQRLLGERRKRSTVVAVAVGRELAAFCWEIATLTG

SEQ ID NO: 419890 - protein, 400 aa, unidentified
MISVGIDVSKGKSTVCILKPYGEIVSKPFNITHTQKDLSELSSMLFRLNDEVKIVMEATGIYHLPVLTYLQEKGFFVSVINPYLMKSYRNESLRKAKTDKIDSRIIANYGIDHWFKMKEFQTSGEIYEELKLLGQQYRHYMKLHLLSLAELTHLLDLTMPGIKNLLASWNETNRKDKRSDFVERFWHYDVITSMSEQEFTEEYILWAKEKKYVPSQEKAKVIYTLAQESIPTLPSETSSFKMLVTEAVRVLKEVDTTLGLILSRMQEIAKTLPEYSVVREMGGVGNTLAPKLIAEIGDVRRFRNGKALVAFAGIDPPPYESGQFVGCNRKISKRGSASLRKVGYETMRSLKMRSRPEDPVYRYVVKKESEGKSKKSAKIAGLNKFLRIYYARVTELYKNI

SEQ ID NO: 419891 - protein, 453 aa, unidentified
MEMEIINPNCAGIDIGSKSHFVAIGQALDDVREFGVYADDLTAICLWLKESGVTSVAMESTGSYWQNLYVELARYGFELVLCNGKFTKHAKGKKTDVKDCRWIQKLHTLGLLTSSFLPDSTTEQLRTYCRQRTNWIELSCEASQKMQKYLRLLNFRLDVVVNDICGQTGMAIIEDICKGNLDAQKLAAHRHYNCRKSEEEIAKALKGNNRQDYLFGLKQELESYRFYQRQIDACDKQITLFLKTQINIHPEKKKLKTESKPHKRVNKNTVKNLDINQTAFQYFDGVDLMRIEGLSYSTVLTIMSELGPDGFDKFKTAKQFTAWLRLAPNNKISGGKVLSNHIPRGSKRLKIALRQAANAIGNLKETHLSNFFKRVAYRKGRQAAVSATARKLAVIIWNMVTRKIQYQPPSDYLFLDQKRKLKLVSRIKQNIVKFDIKPEDVGFYNSLNFSMKI

SEQ ID NO: 419892 - protein, 438 aa, unidentified
MSNKVIFNLDELFISVGIDVGADFSWMSIALPNQQFVGKPYKILHNSIDSLTTAVSKIKEAEELYSLESRIFLESTGIYHYPLFCYLRDKGFNCSVINPIITKNSTNINIRKVHNDRFDSKKAALVGLKPDLKVSLMPSDLALNCRNLCREYYDLMDNRSAYVNKLQGELRMAFPQYLGIFSKVTINTSLTLLETYTSPSAFLEADKQEIIDIIKSTARFGLTYAQNKYNAIIQAATDANQFGYIIDSNIKRIRLYISFIRKYDEEINSILESLHELVNANEDADFVKQIHLIETFKGAGFLSAVSIMGEIGDFSAFSKPKQLFAYFGLDPAVKQSGKFEGTKVQMSKRGSAIARRVIHMLTLQSISISRNGEAKNPVLREYYLKKCDSKPKLVAMGAVSHKVCNMIFAILRDNKPFKIIAPQEHIKQYNAAKCDIAA

SEQ ID NO: 419893 - protein, 363 aa, unidentified
MSANATSVGLDVHARSVVGCGLDGRTGELFERRLTPDHGDIASWIRSLPGPVVVTYEAGPTGFGLARYLARHGIDCQVAAPSRLQRPCGDRVKTDVRDARHLARLLHLGEIVAVAVPSVEQEAARDLVRAREDVRGDLMSARHRLSKLLLRQGIVYYGGKPWSGSHDLWLRTQRRSAVFTLPGLGLAFDIAYDTLLATVARRDRLDAAISEMAAASEFTPVVTRLGCLRGVSTLTAFGLAVEIGDWHRLDGRSIGAYLGLVPTESSSGGSRSQGSITKTGNGHARRLLIEAAWHHRKPYRPGVELRRRQDRATPAARDRGQRANWRLHCRWVSFDARHKRAVVANTAVARELAGWCWSLAVLD

SEQ ID NO: 419894 - protein, 322 aa, unidentified
MSECILGVDIAKKKFDVALLINGKLKHKVFTNNQEGFEALLAWLHKQTVDHTHVCLEASSTYGDELATFMHDAGHRVSIVNPARIKGFANSELLRTKNDKVDAGLIARFCLAMHPEPWTPLPPAIRDLQALVRRVDALINMRTQELHRLGTAQDTVERSIREHIMYLERQIAALKQQIADLIKNDPDLKAKKDLLKSIPGIGEATIAAILAELPMFERCDHVQKVVAFIGLAPRQFISGSSIKGKPRLSKMGNARLRKALFMPALVSIQCNPIIQIFYHRLKENGKNGKVIVCAIMRKLIHLIFGILKSGKPFDPNYTPHCA

SEQ ID NO: 419895 - protein, 324 aa, unidentified
MLPTLGIDISKNSFQVELSVNEKLRHRKLANRKEGFAELCVWLAKHKVAQVHVCLEATGSYSEDLALYLYQQGHTVSVVNPAQIKAFGQSELLRNKDDRPDAGLIRRFCEKQQPAAWTPPPAHWRELQALTRHLENLLETRQQQLNRLEGSKTKGVLKSLRKLIAYLDSEITRTEKQIQEHINNHPDLKQQCQLLESIPGIGKRTAAKLLAEVKDIEQYKSARQVAAFAGLTPRNNRSGTLRGKTRLSKIGNARLRKALFLPAMVAKQHNPIVRSFCQRLANHGKNKMEVIGAAMRKLIHIAFGVLKSRKMFDPNHELFLNSVS

SEQ ID NO: 419896 - protein, 528 aa, unidentified
MRASVLECGSPDMIPKVIQQRGKGSVKKPSPELVNNFAAAHNRGGEQVATPEPRLGSPCPARARHRSPTPVPAPGPSAERTLPQEGSYIRSHPFRGPGPLSTATKMKTDWTEQTYFVGLDWAKDHHDVVVVDRLGTIVADFQFPHSAEGWNDFQERIQTFGKCPIAIETSNGPAVDQLLQRDYPVYPVNPKAAQRYRERKCPSGNKTDRIDAWSLADALRTDGQGWVQLIAQDEPTMTLRLICRDENVFIEQRTAMVNQLQAALLEYYPLALESFEDWTKPFAWAFIQSFPTPQALRQAGKRRWEKFLHTHKLWRPETAPTRLAAWQKGQQLNASAAVANAKALLALSLVKVLQSLQKQIDEYRQRIRAAFEQHPDHDIFGSLPGAKDKLAPRLLGEVGCQRDVFPDAQSLSCRAGTSPVSFQSGQLRKARIRWACNDFLRHTVHLWADLSRHTCLWAQTYYAAKRKQGHSHASALRCLGKRWLKVLWRMWQDRTAYDESIHLQSLQEHGSFVAKLLAPQPAQSDSSL

SEQ ID NO: 419897 - protein, 398 aa, unidentified
MICVGVDVSKGKSTVAVIDKDGEILMRASEYEHTETGMTKLIQRLKMLKEEPRIVVENTGYYHWPLVNSLMDAGFFVCVVNSIIVSKFAKVQMRSGKTDRLDAMMLCRFGLAYWSELVRCQPDEERRTLLRLYSREYSHAVHLVVEQKVHFTSLLDKVMPGIKTLLEDKGGRSKLSDFALEFWHFEKISKQKPDSFTKRYCKWAKEKGYHANESKAAQIYALSQNGIPTLPCTDAVKQLVQEAARVLKRLEESVNSILAQMNALASTFPEFEVVSEMKGVGKHTASRLIAEIGDVRRFHSAKALTAYAGLDAPPYQSGKFESHNRKISKRGNKYLRKVGYEVMASLVSTKPVEDHAVYSFICRKKAEGKYYLSAYMAGLNKFLHIYYARVCEAMKEPT

SEQ ID NO: 419898 - protein, 407 aa, unidentified
MELVALYKRVIGLDIHQAQITACALIEETDGSTRIEQRQFGGFKRDRRELAEWVASLHPDEVVMESTGIYWKSPYAALESVGIRAKVVNARHVKNVPGRKTDVGDAHWLATLARAGLLRGSFVPPAKFRELRLIARQRQKLVGQLASEKNRLHKVLTDSGVRLGVVVSDLHGQSARAMVKAIIAGHSPNEVLKLASSRLKASREEIFDALQGELTASHRFVLDELMRHVEEIETRIVRFDARLLSELESERNTLALLQTIPGVDLIGAAMLLVEIGTDMNAFGNPDRLASWVGICPGNNESAGKRKSGHLRKGNLYVRRLLCEFAHAASRTTSVFKSKFQALLIRRGYKRAIIAIGHKILRTIYFMLKQREHYRDCATDYEALSVQRNAPRWIKALIKFGFITPANA

SEQ ID NO: 419899 - protein, 375 aa, unidentified
MTFTRVDADLRRRHPKERITVTMTIVANTYTYVVGADTHSRTHTVAVVNAANGALETATTFPTTAAGLKRAVSWIAKRTGGLADVLVVIEGIGSYGAGLARCCAQASYRVVEPFPTARRLRCGRGKSDELDAELIACSVLSADTTQLREPREDSGIRAALRVLVTARDLVNAERTREINALTALLRTVDLGIDARRPLSKAQIVQIAAWRSRSENIATATARKEAIRLARRVRDSDDELAANRDEMTSLVQASDGVHLLDEPGIGPVNAAVIIAAWSHAGRVRSEAAFAALSGSSPVPASSGNTTRHRLNRGGDRRLNRALSSIALTRMAHHPATRAYVDRRRAEGRTTKEIRRSLKRYIARQIYRLLAQTATTA

SEQ ID NO: 419900 - protein, 411 aa, unidentified
MSLRCIAGIDVHKKMLAVVIRREADGKLEYLKRKFGTMRSEIEHLAAWLGSERVEEVAMESTAQYWRPVWNGLEAHCKLHLCHPLKVKAPRGRKQDFKDAQRLADRWWSGDLEDSFIPGAEQRQWRWLTRSRVQLRSLMGVARNRVEGLLEQGGIKLTAVATDPFGVSGWAILKLLAKGETDVEVLVGQARGRLRKKDAALREALSGKLDPVSRLLLQQNIEGVELLRRQIEEIQQTLGQVMQAYLPVLVRLSKIPGVDWCAAQALLAEIGPGATAFPSPEQLASWVGVCPGSNESAGVCYSRRSAKGNRYLRRILSQIAWAAIHTKDSFFAGLFGRLLPKLEGKGAAWAVAHRIAKVCWLLLHEGVEYEEKGSPPNPKALTRKFRRLVKDLARAGMDVNSLLNQLSPATS

SEQ ID NO: 419901 - protein, 394 aa, unidentified
MFIVGIDIAKRSHAVSVITSEGQIVCKPFSIRNSCSGYNTLLERLRKISNHKSDFILAMESTAHYWLPLYARLRKDGWQAVVLNPLQTHAMRELLIREIKTDDIDALLIAETIRFGRYKPSSVPQENLLALRELCRNRFYLMDLVSDLKRKVTALLDQVFPEFETQFDSIFCKSGLAVLKNYPTPERLARAQLGKLTEVLQTASNGRFGEWKARELRESAKDSFGIPDCEGVYSILILTYLEQMQNLMDSAASLERRMGELFSQFDSTLTSIPGVGPVLGAVILSEIRDISCFASADKLAAYAGVDPRVKQSGEMKLGNVHMSKRGSPYLRRAIWRASVVAVQCDPMFRSYYEKKSAEGMRYMNIIGHVTRKMSSVIFAVMRDKRIYEPILLAA

SEQ ID NO: 419902 - protein, 402 aa, unidentified
MNCVGIDVSKGKSMIAVMRPFGEVVVSPFEVRHTANELSELAGLLKSLDGETRVVMESTGNYHAPVAWLLHGACLYVSVVNAMLVHDYGNNSLRRGKTDKKDAVKLANYGLDHWLTLPRYVPEEDTRLMLKTCYRQYQQYSKVQTMLKNNLISLLDTTFPDANRLFTSPPRADGSEKWVDFVATFWHCECVCGRSEKAFTTQYQKWCRKHGYNFSEDKALDIYASACRHFGVIPKTDTAKLLVEQAISQLQTTSSALAALKQEMQSLAASLPEYPVVMGMFGVGPTLGPQLLAEIGDVRRFHSKKALVAFAGIDAPPYQSGQIDVRSRSISKRGSASLRRTLFLVMGVLLQCAPMDEPVYQFMNKKRSEGKPYRVYMMASANKFLRIYYASVKAYLESLEHD

SEQ ID NO: 419903 - protein, 421 aa, unidentified
MRERVMIMSGSSSPTPEPVVTTHVVGIDIGMESCTMSCLTMDKRQAIKSTPFANTVQGFDWLFERLEGLGVAPKQMLIGLEATSRYGENLLQALLKRGYQVCLLHPAQMHAFAQQRGLRAKTDQLDAVTIARALLSGEARFGYVPSEQVATYRELMRLQHQLSDDVVRYKNEIHALLVVLFPEFTQVFVDPTRPTALAVLKRYPSAQAIAQTEVETLSQFLHELAPRHYGRPTAQALVRVAKASISSGVAIAARSSSLRILCDQLEHTQTNLEHLQHEIDQLLDQDPKAKGLLSVPEFGPTTVAVLRAELGDLTRFTRIDQVVAYVGLDLQVKQSGKWKGQTKLSKRGSGRVRRILYLAALRSIQLEASPFGAYYQRLVARGMQKGMAVVAVMRKLLIVAAHLIQTGESYDPGKVAVPRVG

SEQ ID NO: 419904 - protein, 344 aa, unidentified
MSQVTTIGLDIAKNSFHAHGADESGEAVFSRKLSRGKLLDFFAAQPACLVAMEACGGAHHWARELTQLGHDVRLIPPAYVKPFVKRHKNDAVDAEAICEAARRPGMRFVAVKTEEQQAAGMVFRTRDLLVRQRTQLVNALRGHLAEYGWVAPRGKAQMAILADLLDEDEMASSLPDAARAMFRIMTDMLAELDHRIADLDKEIARRAREDEVARRLMTIPGIGPIAATAIVALAPHAATFSKGRDFAAWLGLAPLQHSTGGKQRLGRISKMGERTIRRLLIIGGSAVVRQATIHGAPAGSWLEGMLARKPRMLVSVALANKMARIAWALMTKQEDYKAPIVAAA

SEQ ID NO: 419905 - protein, 366 aa, unidentified
MRESSTTGRKRKQILHQEKLTIGMDLGDRFTYYCVLDQAGEVMIEDKLPTTKQGIQHVFGKIPRSRVALETGAHSPWVSRQLMQLGHEVIVAHARNVRLIGESSRKDDRVDARVLARLARIDPRLLSPIRHRSAEAQTHLTVIRARAALVGARTALINAARGLTKSCGERLRKCGSQQVGQELAAGLSAELRAALQPLLTEVESLNQRIAEYDQRIEQIAKEVHPEVALLKQVKGVGTLIALTYVLTVDDPHRFRRSRDVGCFLGLRPGRRNSGQSQPQMHISKEGDPYLRTMMVQGAHYILGPFGEDSDLRRWGLRLTERGGRNAKKRAVVAVARKLAVLLHRLWVGGEVYEPLRHTHQAVRAVA

SEQ ID NO: 419906 - protein, 402 aa, unidentified
MRFAGIDIGGDRHVVAVVDESGAVILKATAVTEDAPGYKRMLEVLGTAADCLVAMEATGHYWRNLFAALVTAGFKVALINPLRTSRFAEEELQRTKTDAIDALGIARFAVQKRPPTTHLSEVALQELRELVRLKEQVVQQFGDRVRQLHRAVDLGFPEFIRHVRTLDSELATAILARYPTAAALRTVSIRKLARLCYDGSHHVGEALARDLIEAAKQSVGAHHGEPYQLEVRYACEDINVLRRRLRSLEHDIERRLEQHDVGKLLTTIEGIGPQTAACIMAEVGDPARFHSARALASYVGVIPRVHQSGKRKFSASAKVPLGNARLRRALWMPALTAIHHNPWLRAYYQRLRAAGKPPKVALVAVIRKLLAAVYSVAKHRRPFVLPPIFTPAAGGAVVPAAQ

SEQ ID NO: 419907 - protein, 370 aa, unidentified
MHQSSTLYVGLDVHKESIAVAYVAAAHHAEVVSLGNIGTRQCDIDKLIRQLQSKSSQLIFVYEAGPCGYWLSRYLTKKGHVCWVIAPSLIPKKPGDRVKTNRRDAIKLARLMRSGDLTPVYVPKVEDEAIRDLCRARAEAIRDLKAAKFRLKAFLLRHDIRYAGRATWGPAHLRWLSEVVCPTPAQQIVFQEYIRAVNEHTERLARLEQELTDQVQTWRLAPVVAALQALRGVQFTVAVTTVAELGDLTRFDNPRQLMNYLGLTPSEYSTGERRRQGGITKTGNTHARRALIEGAWAYRYPAKISRHLQLRLEKVPKAIQDMSWKAQVRLCKRYRQLSARGKNPNQVVVAIARELSAFMWAIAQEVPLTP

SEQ ID NO: 419908 - protein, 339 aa, unidentified
MSAVTLIGIDLGKHSFHLHAQDGLGRMVFRKKLSRQQLLRTLSNIPACRVVMEACAGSHWLARRLADMGHEARLISPQFVRPFVLGNKNDFGDAQAICEAACRPSMRFVSPRNEAQQTVSALHRIRERLVRDRTAAVNQIHGFLLEFGLSLPRGAALMSRLPAVLDHETLPPRLVALVVRLREHVYYLEEQIKQIEQDLVAALREDDKSRRLLEIPGIGPITASALAVELGDAQQFANARQFSASIGLVPRQYSTGGKPTLLGISKRGDRNLRRLLVQCARAVMQHADSRTGALGAWVKALSARRHSNVVACALANKLARIAWAVLARGTRYEAQAVAA

SEQ ID NO: 419909 - protein, 326 aa, unidentified
MEHELHYIGIDTAKEKLDVDVLRPDGRHRTKKFANTTKGHDELVSWLKGHKIDHAHICIEATGTYMEPVAECLYDAGYIVSVINPALGKAFAQSEGLRNKTDTVDARMLAEFCRQKRPAAWEAPHPLERALRALVVRHHALTDMHTQELNRTETAREVQRPSIDAHLLWLEAELKRLEKQIKDLTDDDPDMKHRRKLLESIPGIGEKTSAVLLAYIGLKDRFAHARQFAAFAGLTPRRYESGSSVRGASRMSKAGHVSLRRALYMPAMVATSKTEWGRAFRDRLAANGKKGKVILGAMMRKLAQVAYGVLKSGVPFNASRHNPVAA

SEQ ID NO: 419910 - protein, 389 aa, unidentified
MIYVGIDIAAAKHACCILSEDKKVIKQFSFANSASGYEKLRSALLSPAETKIGLESTGVYGNNLVEFLRRNGYTTHIFNPLLVKKSIQATTLRKTKTDKSDAKQIARYTMEHSQPDQVPSYHISELKSLSRGRFSLVRERSKAKTQAKTLLIQLFPEFSEAFSDMFGVTASAVLRSFPSARALSLCPANVLTEILSQTSRGRFGKARAEYLIGLAKDSIGTQSIALELELQMLLQQIDLFTAQIAGYEAAIKSVMEEIDSPITTIPGIGYVLGAVILSEIGDINRFSTPAKLQAYAGVDPSISDSGSSVSAPGRMVKHGSCYLRWALCQAARCVSLYDPVFAAYMQSKRNEGKHYCVACSHVAKKLTRVIYSLLKNNSVYSPTYSLLSA

SEQ ID NO: 419911 - protein, 316 aa, unidentified
MGKMIIGVDVAKEWIDAAVAGDSRVRRIVNSERAIAAWLVQMGAGSIGLVAFEPTGGYERHLRRCLLRAKVASKQVHPNEVVAFRGRRGIKAKTDRIDARLLADFAAEELVRRDRLAVPEADEVLRELAARRRQLQELLHAETCRRDLADSAMVRKSLRTVIAALERSLAAVETAIAEHIAGSIHAETSRRLQTFCGVGPGIAETLIAELPELGHLSGKKIAALCGLAPRTRDSGKQRGHASTGHGRPGVRKALFNGARSAIQHNPVMSAFYRHLIQDNHRLGKVALTAVMRKMLVTLNAMVRDGADWKHAANPAA

SEQ ID NO: 419912 - protein, 335 aa, unidentified
MKIKQTIGIDISKLTFDVRIYRNQMYLSFDNQNQGFSKMLKWVNKNNPFKQCETLYIFEHTGLYSHQMAIFLTENNISFTIVSGLEVKRSLGIVRGKDDKIDATKLARYAYRLRSEIQTYKLPTEQIQSLKRLLSLRDRLVKHRAGYKASYKEQKRIFTKKDNQVLFNVEEQTISFLSKKIIKVEQEIETIIKSDQTLKIQYNLITSIKGVGSQTALFIIVYTHGFTKFKNWRKFASYGGIAPFPNRSGTSIMGKTRVSHLANKKIKSLLDQCAKSAIQHNQEMKLYYNKKIEQGKNKMSVINSIRNKIIARVFAAVNRGTPYVDFMKFTAIKCS

SEQ ID NO: 419913 - protein, 403 aa, unidentified
MLHDHLKHPTAIRVQFGAIFVSLELSRKTWLITSLSPGKGEKMSKHSVTAGDIAGLVVRFAELRRKAEMRTGKTFPIVVIQEAGLDGFWVHRVLQQEGIESHVVDPASIAIPRRRRRAKTDKIDGEALLRALLAYKRGEPRVCSMVVAPSPEDEDRRRLCRERDTLTAERVRHVNRIKGLLFAQGIADYAPLSRNRRKRLDELCTGDGRPLPQYVKAQISRELDRLELVLEQIKVVEKERDRVLLSPAPVAAVNTRPDGGCNKPRGATGVAMLTALRGFAADGATKLWSEGLSRHFSNRRQIAAYAGLAPTPWQSGGIAHEQGVSKAGNPRLRTTMVQIAWLWLRHQPQSALARWYFAKVGVCATKARKKVAITALARKLLVALWKYVSAGELIEGAIMKPVA

SEQ ID NO: 419914 - protein, 338 aa, unidentified
MYYTGIDLHKFSSYLTTVDSSGAIVKQENLKNVAHNFVQYFNSIPGEHQTTVESTMTWYWLNDLLTSINIPLVLAHAKYVKAIAYAKVKTDKVDSHTLAQLLRMDYIPAAHKISNDNRTLRDALRARLKIVQRHTSVTNSMHLLLAKYNYDSPTQLTGIPEFQYQQLSEVESLLDEQMLELEKQLYPYLIPNDDIQRLLWIPGIGKMNAFTILLEVDDINRFPDVKNFFSYCRLVPSARNSGGKSKQRSSKDGNKYLKVTFCDAAVHAVQYYPVIKKYHDSKLRKKKKQVAHAIIAKEIARIAFYVLKNKSDFNNKFKGTELEHKKSLQWPRVVSPDA

SEQ ID NO: 419915 - protein, 328 aa, unidentified
MKVQHIIGADLSKESIDLFFHQLRTHLKIENSLKGFRQMLKWLRDQKTHPSQIMIVMEHTGLYSYQMEVFLHEHNVSFTKVSALAIKRSLGLVRGKNDKIDAQRIARYGFEKRDLLVAASKPIKVIERLKMLHSTRDRLVRHRASLICAIRQYEGILKPSDLIIQSHFGLVKNFDKQIKKIEAEISTLITQDQRVNQNFQLLKTIKAVGKITATAAIIKTGNFTQFPTARKFACYCGIAPFEHSSGKSIRGKTRISHLADKEMKTLLHQSAKCAIQYDEELKRFYERRLAMGKSKKSTINIVRNKILYRMFSVIRRQTPFIDRYLQTA

SEQ ID NO: 419916 - protein, 405 aa, unidentified
MSDGRFAGVDWASEEHATCVVDERGRIVEGRRYRHNEAGIRALCARLVRLRVALVALERPDGLLIERLLDAGLGVVAVHPNQVKAMRPRFSVAGGKSDGFDSFVLAELARTDSHRFRVLVPDSDQTKALRAMTRARDGLVRTRVGLANQLRDQLATFWPGASKVFWSVDSQIALAFLKRYPTPAETRGLGEQRLQAFLKRHGYPGRKPARELLARLRNGAEGRAGELETQARRQVVLALVSALEPVVARISELSIEIRHALDAHPDGPTFRSLFIAPDSWLCAATMIAEIGDCRERYPTYRALAADAGQAPVAVESGKARHAQFRWACDHRLRQAVCTLADSSRRHNPWAADIYDRARARGASHTHATRILGRAWCQVIWRLWHDHDTYDPQQHTALQRLIAAAA

SEQ ID NO: 419917 - protein, 350 aa, unidentified
MLIIGCDYHPGFQQIAYVNTDTGELSEARLGHKEQAEQFYYDLKTHGVPVRVGMEASGHARWFERLLAELQFELWIGDAAEIRTKRVRKQKTDRQDAQLLLRLMIEDRFPRIWVADAENRDLRQLLWHRHRLVQMRTRVMNQLHVVALNEGLRRKKALWRPAGRRELEALSLAPWASRRRQDLLDLLDRLTPKIHELNEKLEQIVARRPVTRQLSTHPGVGPLTALAFELVIGTPERFACAKQIASYVGLVPAEESSGDRRRLGHISKQGNALLRFLLVEAAQVTVRSDAQWRSQFFHLAMRRGRKIAKVATARKLAVELYWMWRNGWDYHEMQQLGSHAGAPGNRHGVQ

SEQ ID NO: 419918 - protein, 410 aa, unidentified
MELLHRRCCGLDVHKETVVACLRLVSNGKVTTEVRTFQTTTADLLRLSEWLSANECTHVAMEATGVYWKPVWHILDDGEFVLVLANAAHVKNVPGRKTDINDAMWLAELLAHGLIRASFVPDTQTQEMRNLLRTRKQLVREQSSHVLRVQKTLEDANIKLDSVLTDLMGKSGRAIIEALIAGETNPVKLANLASRRVKASPEELREALRGRVTKHHRFLLRLHLNQIDTLDAAMATVDAQVQANLGPFRTAVDLIVSIPGVKNLGAHVIVSEIGVDMSRFPSAAHLISWACICPRNDESAGKRRSNRVRQGSTWLKTTMVQCAWAAVKKKDSYLQAQFYRIKARRGPKKAIMAVVASILTAIYHMLKDGTMYKDLGRNHFDRHSTDQQTKRLIKRLADLGYAVEIKPLAA

SEQ ID NO: 419919 - protein, 414 aa, unidentified
MPQLWAGIDAGKTEHHCVVIDADGTKLLSRRFKNRETEILTLLGDVASLPGGTDVAWATDLNHGGTGLLQSVLTAHEQPLHYISGRVVHHASGAYRGEAKTDAKDAVIIADQARIRRDVSLMRQADEATAELRLLSARREDLVHDRTRAVNRLRAILLHYFPSLEAAAFNYAVTRGPLVLLSKYATPAAIRRMGEARLAAWLKGQGCWKSAAIAKTAVDAAKEQTTVVIGEAAAARLVNRAARDLLRIRDELAEIEAEIDTALQGSEPAGLLVSIPGFGYRLAADFLAATGADLTVFETPDRLASFAGLAPVSRDSGKISGNHHRPRRYDRRLLNACFQAAFIASRTCPVSKAFYQRKRDEGKSHKQALIALARRRVNVIWAVLRDQVPFAGLEPTSSSNVGAVRQVQPRAQIE

SEQ ID NO: 419920 - protein, 345 aa, unidentified
MKLSRVGVDLAKNVYQLHGVDRHGKTVWKRRLRRGQWLQVLTDTVEPGCEIGMEACTGAHHWARELESRGYTVKLVAPQFVKPFVKSNKNDANDAEAICEAMSRPHMRFVSVKTVEQQDIQATHRVREELKAHRNAKANQIRGLVAEYGLVAPKTLLALRRAIPEWLEDAENGLTDNFRSLLHGLWNDLLTLDDRLKELDKEIEKLARSFEVTKRLQQLRGVGPLVATALVATVGDGSQYSKGRQMASALGLTPRQNSSGDKYRLFGISKRGDVYLRTQMIHGARAVVSQAKHRDDPLSRWVTDIAKRRHPNVAAVALANKTARMAWAVLQNETNYDASLAVGQA

SEQ ID NO: 419921 - protein, 323 aa, unidentified
MSETRAGGIDVSKAWLDVAARPGRPVARFANTAAGHAEVVASLAALPVGERPEVLVVEATGGLQRGIERALTAVGWTVAVVNPRQVRDFARCLGRLAKTDRLDAEVLARYGETVDPEPRPPPDARLQELRDLEARRRQLVEMLTMEKNRLQQAPPRTQAGIRRHLELLREELADVTRQLADAIQADPTWRETVARLRTVAGIGPIPATLLVLDLPELGRLDRKALAALVGVAPFNRDSGAARGTRSCTGGRAAVRTGLYMAVRSAIRWNPAIRACYTRLTAAGKRDKVAVVACIRKLLAILNVMLRTKTDWDPQRFQPTTTPA

SEQ ID NO: 419922 - protein, 355 aa, unidentified
MAIFGQFRNTHDGMRSVKRGGRSCHSMSALVCGLDVHKDSTYATILNNEGKIVNQARMSNERVLSYLVHYKVDRVAMESSTAIAPLFRRLESRGFEVMVSHPKKTRYIAEAKIKSDRVDSRAIAELARLNALPLAYVPDIETSRLREKVRRRAFLVRQRAKLKVKIKSVLTYEGIEPPSDHGLFTLKGVQWLHSLKLESIDSYLRIMSTFSREIKLLSKQLLGLAEEDEDVKLLMTIPGIGYYSALLVKSEIGDVNRFPFGERLCSYAGLVPSTRSSGRVVRHGGITHEGSRWLRWVMVQAAQTHVHRFDSTVTRMYNRVAERRSKRVALTAAAHKLLLVCYSVLRNKRPYYDQA

SEQ ID NO: 419923 - protein, 357 aa, unidentified
MQKENSSPEFNNQEFYLGIDVHKKNWTVTIRSSGIVMKTFSMNPKPKEISQYMQKHYPGGKYHSVYEAGFTGYWIHRELISYGFNNIIAAPTEIPTSWKEKENKRDPVDSRKLARELENGSLEGIYIPSLLNQEIRSLVRLRSQIIKSQSRLKNQIKSYLNFYGQKLPENYELRHWSRSFIEYLRGIDFEYPIGKAQLEIYLDELVNKRNQLVNIVKKTRDYLKGYNLWEIIDLLSSVPGIGFTTAVTLYSELEDIGRFRNFDNLASYVGLVPSIRSSSEKELVLGIKRHHNRQIRQLLVESAWVAVRNDPALTRAYGNYQRRMSKQEAIIRIAKKLLSRIHYVWRTGNRYKCSLVN

SEQ ID NO: 419924 - protein, 312 aa, unidentified
MDVSKGTLDYTWLPDGDQHKQVNNTAAGIKKSIRNIMMLSPEIVVVEVTGGYQAPLVNALHESSIPVKVVNPRQVRDFARSLNRLGKTDKLDALTLAEFGLSRKLQADNPKTPQQILLSAVLRRREQLNEMLIAERNHLEHAPGKYAEQIVSHIKMLNKELYALEKDLAEIISSDKSLLEDNCIIQSIPGIGPVVAGTIIAELPELGNVTRKEAAALVGVAPFNKDSGKFRGRRHIWAGRAKIRKVLYSAMRPCLRYNGVIRGWFDRFRAAGKLYKVAVIACIRKILTVIRAMLISRKSWNPHYFTVIPGSA

SEQ ID NO: 419925 - protein, 456 aa, unidentified
MTPRKTKNLRMPTQPSEPLRVVNPNAAAIDVHSEVHWVCVPSDRDPQPVQKFGSFTVDLDAIADFLARCRITTVVMESTGVYWIPLYELLERRGFRVLLIDPRKARRLEGRPKTDRLDCQWLQGLHAYGLFAGAFRPPDQIVELRTYLRQRQMLLTYAAVHIQHMQKALEQMNVKLTEVVSDITGATGTRIITAILEGVRDTQVLAKMRDCRCKNDEETIAKALQGNWRAEHLFTLKQAVELYGFYHQQLTACEGKIEALLGTFADRSGGKPLRPKPGGRRTANAPGFDARTLLYRFSGVDLTVIEGIESTAALVILSEIGYDLSGFPSVKHFTSWLGLCPNRKISAGKVKSSHVRPGRNRVAQALRLAARSLHSSKSALGAFLQRLKSRIGKAQAITATAHKLARLVYAVLKNGTEYVRKGLEEYETQYRERLVRNFQRKARELGFTLVPAVPVG

SEQ ID NO: 419926 - protein, 368 aa, unidentified
MDRKSSKLYVGMDVHKESIDVAVAEEGGELRHHGQIGGEMHALWRAVRKLESLGRELVFIYEAGPCGFGIYRGLTARGHVCWVVAPSNTPRRVRDRIKTDRRDSLKLAGLARAGELTPIYVPDVRDEAMRDLVRSREDAVVMQRQARQRLAALLLRNDVRYAGKTAWTAAHRRWIADLRLPQSAQRLAFEEYVQAVEEASARVQRLGQCIEQELAHWRWRSVVAALQACRGIQLIHAVRMVAELGDLSRFRHPRQLMAYLGLIPGEDSSGEHRHQGAITKAGNSSARRALVEAAWAYQYAAKVSALIARRQADVPKVVLDIAWKAQVRLCARFRRLAARGVNRNKIVVAIARELGGFVWAIAQQVKPV

SEQ ID NO: 419927 - protein, 351 aa, unidentified
MKTEHTARPKLFIGIDIHKRSWKIHCSTDISGGKTFSMPPSPEGLKNYVEKYFQDHQVITAYEAGCCGYHAHRSFESYGWRSLVVNPADVHRKGKKKHTKTDRIDAQLIARELKDGRLDSIHVPDMEREQLRSLFRRRNDLVKDYRRIKSLIKSQLLYFGVIVPEQYDNSHWSHGFRDWLDALQFEYCPARATLDSRMRQFRFVDQDLRDVSTQLRRFCKTYYKKDYNLLRSIPGIGGIVACGILCELGDLRRFRSLKHLSGYVGLAPGIYQSGDNLRTTGMTRRAHRLIRSYFIEASWQAIRTDPIMQSYYRKHLGKNVKSIIVKVARKLLSRTLAVIKTETPYVIGVVE

SEQ ID NO: 419928 - protein, 359 aa, unidentified
MRYVGIDYHKRYSVLCATDERGQELKQRRISGNSATGFAQFFSELGEESKVVMEACWNWGWLYDLLAKIDGIDEVMLAHPYKTRLIAEAQIKTDRLDAQMLAELLRGDLIAQSHAPSAATRARKHLLRQRLFWVRLRTMLRNRMHAILDRQQGLERPQLKNFFSRRGQTWLEEVQLPCAEDQPLLTQDLEVAELLEEKIKQLDRSIGQSQSEEEKLLESIPGIGPLFSSVIATEIDGVGRFNSATKLAAYAGVVPTTHASGGRVFNGRLLWQCNKWLRWALIEASWSAIQFSGYFGSIYRCARARGKNKNIAITMVAHRIIKIIWLLLAERRPYTETLPDRSEDGMTVVVRRKVLGLAS

SEQ ID NO: 419929 - protein, 410 aa, unidentified
MELLHRRCCGLDVHKETVVACLRLVADGKVTTEVRTFQTTTADLLRLSEWLAANDCTHVAMEATGVYWKPVWHILDDGEFELVLANAAHVRNVPGRKTDVNDAMWLAELLAHGLIRASFVPDTQTQEMRNLLRTRKQLVREQSSHVLRVQKILEDANIKLDSVLTDLMGKSGRAMIEALIAGETNPAKLASLADRRAKASHEEFREALRGRVTKHHRFLLRLHLNQIDALDAAMATVDAQVEANLGPFRTAVELLISIPGIKNLGAHVIVSEIGIDMSRFPSHAHLISWAGICPRNDESAGKRRSNRLRKGAPWLKTTLVQCAWAAVKKKDSYLQAQFYRIKARRGPKKAIMAVTASILTAIYHMLKDGTMYKDLGRNHFDRRSTDQQKNRLVKRLTELGYAVEIKPLAA

SEQ ID NO: 419930 - protein, 348 aa, unidentified
MKVSRIGLDIAKMCFQVHGVDKRGKEVFSRKLRRNQVIPFFVNLPPCLVGIEACGGAHNWAREIEGLDAGHTVRLISPRHVKPFVVNNKTDAADAKAICEVVGRPDTRFVNIKTVAQQDLTAWHRIRERKVRERTALANQIRGLLGELGIVIAQGINHVRNELHPIIDNLNNKLSMMAKDYLSELYTELLECDEAIKRYESRILVSAKSNEACCRIQKIPGIGPITATAIVDHFGSAKHFKNGRAFAACLGMTPREHSSGGKQKLLGITKRGNSYIRYLLIQGARTALRYALLRPDADSSSRLQWIRGVCSRKNKHIAVVALANKTARIIWALLSSGETYQPYFAQTG

SEQ ID NO: 419931 - protein, 328 aa, unidentified
MQKNKEYVGVDVSKESLDMVAYSTGETRIFGNDDAGIAKATTWLKQVNSAIIVMEATGGMEVSLYIALQEANLPVAVINPRQIRDFARSMGTLAKTDKVDAKVLARYAATIQPEARPLPDEEVRQLNTLVTRRCQLVEMITAESNRATITRDKTMKQRIHTHIDWLKQELTDIDKHISQMLKENPVWHAKDELLQSVPGVGPVLSATLIAELSELGILNRKKIAALVGVAPFNRDSGKHRGERSIWGGRCRVRQPLYMATLSAVRFNPTIRIFYERLLANGKEKKVALTACMHKLLIILNVMLKHNSYWSCNYAIFNNTCIPDAKTVA

SEQ ID NO: 419932 - protein, 346 aa, unidentified
MTLYIGVDFHPHQQTIAYCDTSDGEIRFLTLKHSDKPAILSFYQGLKRPAVIGVEATGGLDWFEEMIFENGHKLLVGHPQKIRRRAMSRHKSDRRDAETILDLLIHDEFPEVWRRDEQSRITLDMLRFRQNLVKHRTSVGNQLQAVARKRGLPRFTTRTKKGRNLLLTAGLSEPDIYLRDSLYGLFDELTAQIERVDERLQKLALENERARLLMTYSGVGFRTALAVTATLGDVRRFNNMRQVSAFVGLDPLNKSTGENLRIGRISKRGSRVCRFLLGQAAARSSDPRLRASYKRISSRRTTAVAKVAAARRLLSNCYIMLRDSIDYEEFTRRGEVGLHGNTPASK

SEQ ID NO: 419933 - protein, 355 aa, unidentified
MSLPLEEREVILGVDTHLDVHVAALIDVVGRVVATHSVPTTAIGYEQLIGWTGSFGRLSRAGVEGTGTYGAGLARYMRERGIQVLEINRPDRSRRRLRGKSDPTDAENAARAVLSGDAHAIPKAQSGVVEAMRAINMARRSAVKAKTQAINQLRALLVTAPESIRTTLWKVKPEQCVARCARLQSLGETPLLKALTSTLRMLARRWMSLAKELRQLDTALDELTKRAGRRLLTRFGVGPQTAATLLVTAGDNPERLRSEAALAALCGVSPLEASSGKTTRHRLNRGGDRAANNALWTISMVRMRSDPRTRAYVARRTTEGLSTNEIQRCLKRYIVRELYPLILADLADAARPNLT

SEQ ID NO: 419934 - protein, 465 aa, unidentified
MQHQPRRRAPKPRHSPAALERLHPHAAGIDCGAAEHFVAVPPDRDATPVQSFPTFTGDLHRLADWLTACRITHVAMEATGVYWIPIFEILDARGFQVILVNARHVKNLPGRKSDVSDCEWLRDLHMLGLLRGSFRPADGIVALRGYLRHRTTLIESAGALVQRMQKALVQMNVQLPLVVSDITGVTGLRILRDIVAGQRDPQHLAQHRDVRCRASEAELIAALRGNYRAEHVFVLQQNLELFDIYQQQLAACDRTIEGHLAQLAVTASSASPLPAARRRPRTAKDNEPAFDLRTPLHQLTGVDLSQIDGIGPYNALRLLSEIGTDMTRWPTVKHFTSWLTLAPQNRISGGRLLSSRTQPSANRAATILRMAAMALGRSQTALGAFYRRLAFRIGKAKAITATARKLAILVYRTLKDHLVYNDPGAEAYEAQDRSRVVRRLRQRAEHLGFGLVNLSTGEVTPGAVS

SEQ ID NO: 419935 - protein, 385 aa, unidentified
MGSQAFIARDYDVFAGLDVDKKSISVTFTDHQGLLKSMRMPYSVDHLVNHVRKHYGDKKVAFAYEAGPTGYGLYDGLVAKQYPCLIASPSMIPKAPGQRVKTNRLDSLGLAENLRGGQLKSIHVPTTLYRELRHLTQLRDALVSEVVAMKQRIKSLLLMEGLEFPPAPPGSQWSFLVKAKLRKLPCSSVVRFKLDQLLDNLEFGEKQILKTTREIRRFCHNDPELSQCIDYLKSLPGIGWIVASQMMARIGDWRQIKNIRELPAFLGLVPTESSTGERTTRGSITHSGDPRLRSKLIQASWSAIRQDGELLKFFRTVAKKHPRHLGPRVAIVAVAHKLCVRAAVVLMKQRPYEMREKVQSAPLTQEETVPQGTTRRRRVPGEKIS

SEQ ID NO: 419936 - protein, 389 aa, unidentified
MQFYTKQHKSYCGIDLHARSMYVCVLNQDGDIVMHRNMQARPDTFLRTVASYRDDLVVAVECVFTWYGLADLCAQEGMPFVLGHALSMKAIHGGKAKNDTIDAHKIAVLLRGGMLPQAYVYPAEMRATRDLLRRRMSLSRTRAELLAHIQNTNSQYNVPEIGKKLASKANRAGVAERFPDPAVQKSLEVDLALIGSDDHLRSDVELHSVKAAKQHDAQTLYLLQTVPGIGKILRLVLLYELHDIQRFPRVQDFVSSCRLVKWAKASAGKRDGTSGSKIGNAYLQWAFSEAAVLLLRDHPAGQTYLARLEKKHGTGTALTVLAQKLGRAVSSMLRRDTGCDRDNFLHGEGSGAGEPAASLGHYGTSRVTVLCNDASTASTNAQEHIGALS

SEQ ID NO: 419937 - protein, 415 aa, unidentified
MWNKVTSVKCPVEPVSNKHFGGIIMICVGIDIAKDKRDCFILSSESEVLADVFTIPNNAEGFDALLQTIRRCTRPADKIKVGLEATGHYSYNILGFLLDCSLPTYVINPLHTNLYRKSLTLRKTKTDRVDARTIATMLMSDVNLKSYTDASYHNEELKSLTRYRFDKARERAKLKCSVSRLVYILFPALEKLVPTLHMTSVCALLSNFPGTKQIASVHLTRLTNLLHEASKGRYGRDKAIEIRNASRNSIGSTMPAKSLELKHTIRLIGELDVEIDEIENEINSIIDEAHSPITTIPGIGNCMGAMILAEVGDFSNFASPDKILAYAGLSPSTYQSGQLSNCYSHMEKRGSRYLRYAIFNATKYVCHWDPSFAAYLAKKRAEGKHYNVAISHAAKKLVRLIYAMEKTRQPYRPAA

SEQ ID NO: 419938 - protein, 381 aa, unidentified
MTTAVTHHEPENTIEATLFVAFELSEKTWKLGFTTGHGQKPRERTVTARQQERVLDEIVQAKRRLGLPETATVVSCYEARREGFWLHRFLQGHGITNQVVDSSAIEVNRRRRRAKSDGLDVRKLLSMLMRYHHGERQVWQVVKVPSVEAEDQRHLHRDLETLKRERASTTTRIKGLLSTQGLQVTTLTKLPEQLEALWLWDGSPIPPGLRDRILRVYAHYTFLSQQIAEIEAERRAQLQTSSDASLDKIRQLMQLKGIGINGSWLLVMEFFGWRAFKNRREVGGLAGFTPTPYQSGASAREQGITKAGNRHVRWMITELAWSWLRFQPESALSVWFRERFGSGGKRLRRIGIVAVARKLLIALWRFLETGALPEGAVLKEG

SEQ ID NO: 419939 - protein, 340 aa, unidentified
MRQLYVASDLHGNNNLVGIIDGEGKRIFKKKLPNDPLVISDVLKPFKEEIIGIVVESTYNWYWLVDALMEEGYKVHLANPAAIQQYSGLKHADDTHDAFWLAEMLRLGILPEGYIYPREERPVRDLLRKRGHLVRLRTSLIISLENIISRNFGRKLPANDVKGLRKDRVTPLFKGNGDLALAGRVSKETIDFLTHQIRQIEGVVEKRIQLKEPYRYLLTIHGVGKILGLTIMLETGPIGRFETVGDYVSYCRKVPSQWISNGKRKGSGNRKNGNKYLSWAYAEASDFARRFHSESRAYYNRKMQKSNPAVAHSALSHKLARAAYYIMRDQVTFRPEQLFG

SEQ ID NO: 419940 - protein, 358 aa, unidentified
MSKIKSNKLDFTGQPIYVGLDVHKKSWSVSISTQYGQYKSFSQPPEVDKLVHYLRQHFPGAQYSTAYEAGYCGFWIHDRLKESGVGCLVVNPADVPTKNKERRTKRDRIDCRKLSRSLRNGDLEGIYVPPREKLEDRSLIRTRLSMGRKQTRCKNQIKSMLFFYGVVIPEQKEMGHWSQRFIRWIEGIRMERASGDMALKIHLEELGHLRQIIAKLNRAILALARTEQYRPWVLLLRTVPGISTLTAMILLTEIGEITRFPSIDELTSYVGLIPDTEASGEKEHIGGITQRSHSQLRWMLIEASWKAVQKDPALMMAFDQYCKRMRKTKAIVKIARKLLNRIRYVLKNRSEYVPAVLE

SEQ ID NO: 419941 - protein, 358 aa, unidentified
MEVYVGMDVHRKRSQVALLDQDGGQILNRNLPNDPAELVPILGTLAPRTPVAFEAAYGWGWLADLLDELGLEPHLVHPTRCKAIASARLKDDRVDARTLAHLLRADLLPEAWIAPPQVRDQRALLRHRTALVRTGTALKNRIHAVLADRGVRVEQRLWSQAGRAWLAQLDLPAAQRRIINDCLGLIDQLTPVITQLERDLLARARPDPRVQALRELPGIGRITAMTLVAEIGDISRFPTARKLCAWAGLTPQVRNSDRTIRHGHITKQGSAAVRFVLEEAAERAKTRPPFAGFYAQCAARRGCHIATVAVARKLLARCFHVLTEVDNHQHNHADHASEKVTSPGALEVPHVPATRPSN

SEQ ID NO: 419942 - protein, 485 aa, unidentified
MRKRAYRAIAIKNVNLAELLPRLAPGRVQVGVDVAKNELLVTLHDSSDAFQRPWKVKQPTELPELIRCLLVVSKERPLVVAMESTGTYGDCLRQALTDAGLIPNRVSAKAVKDHAETFDGVPSNHDGKDAAIIAELTSFGKARPWPTVEPTQWEAEIQRRVHWMDTHQEILQLWLGRIEALLARHWPELSGLLKLNTWTLLRLINHYGSPQSLAKCDQAEKWLRKWGKAGLTEAKIKAIIESARGTVGVRMVDENILQLQEYAAEALKARQEIKRSKEALKTLGSNKEKIVAMAQVVGPVTACILWTSVGDPHDFHCGEAYRKAMGLNLKERSSGKHKGKLKITKRGPSIARRWMYFNALRVIQKHPVKNWYQKKKEKEKGCGGHGIVAVMRKLALAVYAVTVRKEPFQLERLLPGKPWSSPRTARLNTGGLPPDPQDLSHGAKTKGVGRSRKIPERAPPSFVAPETALGSVPTVALSSAQVNNR

SEQ ID NO: 419943 - protein, 343 aa, unidentified
MQIRSIGIDLGKTTFHLVALSDDGKVLLKKKLTQKQLITFTANLQTSLIGMEACSGAHFLGRALRAQGHDVKLIPAQFVKPFVKSNKNDFLDAEAIAEAVDRKNMRFVPIKTDDQLDLEALHRVRDRLMARKTAVINQIRTFLLERGVVSAKSPIRLRERMPDVLENADENLTPRMRNLLSCLWEEWKDLEQQLAALNLKVEQIASSDAACRRLRQIPGIGPLIATAIVAAIGNGAAFHKGREFAAWMGLVPRQHSTGGKAMLLGISKRGNQYLRKILIHGARSVVLNSKRDRVQMGQWMSALEARAPKNVLVVAVANKLARIAWAVLSSGNDYRAFPAPMAS

SEQ ID NO: 419944 - protein, 349 aa, unidentified
MLADQLDYVVGVDTHRDEHVLAVVVAPTGAIVAQRSVCANARGYAQALRFVQEHTDGARVWAVEGAGHYGAGLARSLSRQGETVCEISRGPRDERRLRGKDDLLDATRAARTALASETLSLPRAGQRREALRLLLLARRSAVDVRRVALVQLRSVIVTCPDDLREQLRGLPAGRLIQRCSRLRRSSSRTPDQLATILVLRSLARRIEAATAEAAELEAEILGHLRALAPQVLDEAGVGPIVAAQLIVTWSHPGRVRSEAAFARLAGAAPIPASSGQTNRHRLSRGGDRQLNRALHTVILHRRLHDPATKDYIARRVAEGKSRRDAVRLLKRYLARHLYRLLEQQEPLMT

SEQ ID NO: 419945 - protein, 349 aa, unidentified
MSHPTRWVGIDLHRRRSQIAIIDEHGELMLSKRVPTGRETITELLGDPHGTSVALEATYGWEWLAELLEDAGFDVHLAHPLRTRAIAAARVKTDAVDAKTLAHLLRTGLLPEAYIAPPELRDLRDLLRHRATLVHLRTSIKNRVHALLARQGILPEFSDLFGTAGRAYLAGLALPDGPRRRLDSLITLISDFDREITDTTSEIDQRAKADERVKLLCQLRGIGPYTAMLVIAEIGEVKRFPTAKHLCQWAGLTPTVRSSDGKARLGHISRQGSTILRWALCEAAQHTPTGGGPLRAQYERIAKRRGSKIARVAIARQILTLCYYGLRDGEIRCLAKHPDDNDSELADAA

SEQ ID NO: 419946 - protein, 378 aa, unidentified
MSKQNYAFDAAQLPKEIAIRLKCPDEKHVAMDNHKEMTVIGVSDNRGRIIHETIVPTEGKALVEFIDCLGGTINLTFEEGTHANWLFNLLEPLVSFVLVCDPRRNRELTRGGNKSDKLDVRMLLQLFRGNMLRPVYHQREADRTLKELARNYDTWVKDTARQMNRIKAIYRGRAIKSSARLYSQSQRQHWLGMLSEPGVRLRAEHLLEGLDYQREMRQKARAAMIVESRRHKDSKRLQTIREFGPVRVARLIAHVGTPKRFRGKEQFWAYCGLAVVTQSSADFIMVNGQLRRNYKNVQTRGLNRNHNHYLKDLFKSAAVAAIRSGEFKEFYQERIARGMRPEMARLCVARKLAAIALTVYKGGESYDPARVNKTAAKA

SEQ ID NO: 419947 - protein, 355 aa, unidentified
MTSVKYIGLDVHQATIVVAVRDESGKLIMESVVETRASTILDFIDGLRGKLCVALEEGISADWLYNVLKPHVDYVMVCDPRKSSKMKAGSKSDHIDARDLSELLRGGQLQPVYHGDSGVRTLKELARSYMTLTEDVIRVMNRIKSVYRSQAIRCAGPRVYSARYRAEWLDQLLQPGQRLRAEHLHQQFDLLQPLRMLARQELLKESHRYPARATLQKIPWVGPIRAALLIALVQTPHRFRTKRQFWAYIGLGVETHSSADYQFKNGELQRSKKKSSTRGLNVNHNPDLKNLFKSMAVSASTRRGLMQDYYEDLLAKGIRPAMARLTLARKFAAIVLVLWKKGESFDPKKLTSQAA

SEQ ID NO: 419948 - protein, 388 aa, unidentified
MMLIGIDPHKSTHTATAVDPETNRDLASIRIDVTLQEYQRMLDWALQWPERRWAVENAKGLGRHLTSWLLARGEQVVDVAPSATARVRQLSRGAGRKNDRIDAAAAACVAALQGDARPVQPEGSTDALALLDERRSNLAQARVRAVNQLHALLRALLPGGAPRDLSAAKAEQLLDTVVPVGSAELTRHALAADLIAEIRIWDVKLKDNAKAMAALVAESESRLTDTPGIGAVTAARLLGRTGNPARFPTASSFAQYAGTAPIEIASADRARHRLSRRGDRQLNAALHTVAVTQIRMPGTRGHTYYQAKLSEGKTSREAQRCLKRRLADHVWRTMISDERRRNQTTGPGEQPGATTASSAAGPTPTTGSSDKSLPGPAEPEPTPTPQPA

SEQ ID NO: 419949 - protein, 362 aa, unidentified
MAQVRSWAGLDVHSAMVVAAVMDRESGELRMRRLPGATSDIVAFCAALPGPTRVAYEAGPTGFALARALAAVDVQCVIAAPGKIERPTSDRVKTDERDAQRLLRLLMIDGLHAVRVPSTQEEALRDLVRAREDVRGDLMRARHRMSKLLLRHDVRFDGTAAAWTTHHRAWLGKVDLGEHGAQVTLIDYLGAIDALIIRRDTLEHAIGELVPDSPWADTVARLRCLRGIDTLSAVGLCAEIGDWTRFPRPAHLMSYLGLVPSEHSSGQTRRQGSITKTGSGHGRRLLVEASWHYRRAPAKGQALKRRQAGQPAHVIAISWAAQQRLHRTWQRLDTQRGKRRTIVAVAVARELAGFCWATANAD

SEQ ID NO: 419950 - protein, 420 aa, unidentified
MSKQNVELAAFIGLDWADQTHVVTLQEAGSDRRRENFTLDQTPEALQTWIHQLRIRFGGRPVAIAVEQVRGALIYALMHVEFLHIYPVNPQTLAKVRQAFYPSGAKDDPRDADLLLEVLLTHRQHLRVWVPDDVLTRSIQLLTEGRRHLVDERTALTNQLTAALKTYFPQALDWFGDVHTARACAFLHRWPSLQQLKRATSSSIRKFYQSQGYRGQDKLNQLLGNIKQAQPLTEDGAVLLASTMMVQALVTQIPSLTESIEGYDQQIASLFAQHDDSTLFGSFPGAGPALSPRLLAAFGSDRNRFEFAAEMQQLSGIAPVTEKSGKSCWIHWRLACSKFLRQTFHEFAGQSILGSDWARAYYDQQRQRGKSHHAALRALAFKWIRIIFRCWKNRTLYDETLYCKSLQLRGSSLAVALTTE

SEQ ID NO: 419951 - protein, 422 aa, unidentified
MRIIGAMDVHRKQISFKLQDIGTGEVRRGRLPCDRESVRRWLADLRGRSDVHLALEATTGWRFVVEEIQRAGYAAHLAEPAETAARRGPKQRAKTDKTDCDNMVELLALGRLPESWIPPDHLLEVRTLVRLRKDLVDERRKWYQRIKAQLFHQGVPGSMRLTTHQGRNRLAEVELSPAGRQVAATGLRVIDHLEQQLDPLDRQLIAFAKRQPGCQALTALYGVGHLTAVAIWAELGDVRRFSNSDDAVRYAGLDITVHDSDGKRSAGHLSRQGPEVLRWALYEAAQSAARPASPDHAYYRAIKARIDHNRACLAVARKLLRRAYHILKGLGDAALEPVAIDATSKRPRGARRPLGPAADDGAESVARFAAHGKPMTFAAGSPTPPVATAAPWTSWKDRAAATLPAGSPDLSSCRRSLLRAPR

SEQ ID NO: 419952 - protein, 389 aa, unidentified
MIAEMQMILEQSRLVPFGLPFLGSGELNEGRPSVTASFDYHIGVDYHKAYSHLVVQDSSGKTLRSGRVKNDRQSLGSFLEPYRENSHAVVEATRNWTVMYDWLDDICDDVVLAHPLKVKAIADAKVKTDKIDATVLAHLLRADLVPEAWAPGEKARELRIALRERMFYVRLRTMVKNRIVTVFDRYPEQTAQVKKLGDLFGKAGHQQLAALHVSDIDRIQIDRGLAFIGDIDGRIKQSEATIRVMTKTNGNVKLLKTIPGIGEFFARLLDAEIDDISRFRNPKKLAAYAGLVPSTYSSGGRTYHGRIIKQGNKWLRWAFVEAVAPAVATDPQLRAQYDRLRSRGTNKAKVAVARKLLTIAFQILRDQRPYERRGASSEEGAPSTISRLS

SEQ ID NO: 419953 - protein, 390 aa, unidentified
MSSSSAIAVVPATFTIYLGMDVHKYSITIAVLPEVAKSPTRVERLPNDFGKLRRFFDRLAKQGQLRCCYEASGAGYVLQRAISDWGYSCDVIAPSLIPKRSGVQRKYDRRDASDLARLYRAGELVTVHIPSEAEERVRDLVRCRETFQREVLKSRHYILKFLARRGLIYREGTNWSRGHFAWLRRVARPFSSPLVSEDQLVFSEYLELLDYKLKRRDELDHQIENLVLTPALATTVGFLQCFRGFKRQSSMVLGTEIVDWRRFAKPSQASAFVGLVPREASSGSRERRGSITKAGNSHCRHVLIQAAWSYRHRPRMSAEIKRRQQGQPARVTRIAWEAQQRLYKRYQHLAYRKSPQIAVVAVARELLGFLWAAMQELPHTTPAVAGSGVI

SEQ ID NO: 419954 - protein, 343 aa, unidentified
MEYYVGLDVSLKHTSICVVNPTGSIVQEGVVDSDPEAIALFVRSRAPGTVRIGIETGPTTTWLWTELNRLGLPVICIDARHAKAVLKMQINKSDRNDAAGIARIMQTGWFKEVRVKDLDSHAVKALLASRALMVKIKRDLENQIRGLLKNFGLVIGRGKFNVFAVRAAELIDNRPELIAAVRPLLEARNAIEQQVDDLNRKVHKLARHDVQVRRFMTVPGVGPITALCFKATIDDPTRFKRSRSVGAYIGLTTRRHASGEIDWSGRISKCGDAMLRMYLFEAAGVLLTRVPKWSGLKAWGAKLTKRNGFRKAKVAVARKLAVILHRMWIDETEFNWSTKKAAA

SEQ ID NO: 419955 - protein, 427 aa, unidentified
MPYRIAGIDVHKRMLAVVIADVTVGGGYEFERRRFGTRPSELRALAEWLVGLEVEEVVMESTAQYWRPVWAALERIWTVQRRSLEGVGPLSGALHLAQAQSNRGAAGRKKDFPDAERLVKRYVAQELTLSFVPAGEQRLWRTVTRRKYQLTCNRTQLQNRLECLLEEAQIKLSSLVSDLLGLSARRMLQAIADGETNPNSLAALGDRRLRATSEQFCDALSACTDLHPVYRRLLKMTLEELRLLDEKINKLDQEMANLLSAHQQAVERLAEVPGLGADSAQQIIAEVGPDAATFPSAKHLASWIGVCPGEEESAGVNYSHRSPKGNRQMRRLLNQAANAAVKTKGSIFEFVYKRLVVRLGHAQAIGAISHRLCRLIWIILHRAVRYTEHGQTVIRRRAQNRASKMIRELRKLGYRVELGPSQSESPA

SEQ ID NO: 419956 - protein, 342 aa, unidentified
MRIVMLGIDLGKNLCSLAGLDETGAVVLRRRMKRASVLPFTAQLEICTVAMEACCGAHHLGRQLVAQGHVVRLMSPAYVQPYVKAQKNDERDAEAIAEAATRPTMRYVEIKSEAQLEVQSLHRVRGRLVAERTALINQLRALMLERGITVPQGRRKLERYLPEILADERNGLGPRLRQLIEDIREEWRSIDQRIKGYDDELAEQVRNEDTAKRLISIPGIGVLTATALVAAVGNAQTFSCGRDLAAWLGLVPRQATTGGKPRLLHISKRGNGYLRMLLIHGARTALPGLAKKDTPLGRWVKALLARAHRNVVTVALANKLARIAWAVLARDRQYVTVQAIGK

SEQ ID NO: 419957 - protein, 344 aa, unidentified
MKVTTLGIDLAKNVFQLHGVNEIGKPVIKKQLKREQMAAFLVNLPPCLIGMEACGSAHYWARKLQGFGHTVKLMAPQFVKPYVKTNKNDAADAEAICEAVTRPNMRFVPIKNVEQQSVLALHTVRQSFVKARTAQANQIRGLLSEFGLIIPQGIGHIAKRVPELIEDASNELPGNFRLLVQRMLDHLKVLDTQVDELEAQIVKWHRQSALSSKIAGVPGIGPITASALVATIGDAKNFDNGRQVAAWLGLVPRQHSSGGKQNLLGISKRGDIYLRTLLIHGARSVIHWESRKPDSCSWVSGVLKRRNKNVAAVALANKNARIVWALLAHDREFRPDYVSAKAAT

SEQ ID NO: 419958 - protein, 306 aa, unidentified
MTMPACFVGCDVGKNDIAVFFSASATSVMLANRPEALARFARSLDPACLVVCEATGGYEAALLEALHAAGIACHRADARKVKAFIRSLGTLAKTDAIDARALARYGAERHDRLERWRPQPEDQQRLQALVTTRRDIVAARTAWSNRCKAPTAQGIAPLLDPIVATFQTQLRAIDQAIAALVHAGRLAARAARLQAIPGIGAVTAYSLLALMPELGSLSRRQAASLAGLAPHPRQSGARDAYRRVRGGRPAVRQALFMAALAAVRANPQLKSFYQRLIANGKKPIVAVTAAMRKLITFANAQLKQLS

SEQ ID NO: 419959 - protein, 371 aa, unidentified
MHSGEERSNDHIYHGPVRCDDDCLEVVLGVDTHKDVHVAVVSSPVGRRVATASFSTTSAGYVQLLSWAKGFGAVQRAGVEGTGSYGASLTRYLSAQGVVVTEVNRPDRATRRRRGKSDPVDAEAAAHAVISGRAGAKPKSGDGPVEQIRVFKIAKDSAVKAKRQAINQLHALVVNAEPALRERVGQLGRKALVTRCAAFDPLDDGSVIAAVQHAMRSLARRVQALDAEIADLTGRLEALVLDTAPRLLLEHGVGVDSAATLLRTVGDNPQRLHSEAGFAALCGVSPVDMSSGRTRRHRLNRGGDRQANAALFRILMTRLRDHHPTRDYVARRTAQGMSKRRILRCLKRYLARHLFSIIQAAFTPPTVNSTA

SEQ ID NO: 419960 - protein, 348 aa, unidentified
MIVIGIDPHKSTHTAVAVDGTGRKLGEKTVAARSSGHFELVRWAARFGERTFAVEDVRHLSRRLSTDLLLAGEAVVHVPPKLMAGARRSSRERGKSDPIDALAVARAALREDLPAAVLDGLEREVRLLVDHRDDLVAERTRMQNRLRWHLHELDPGNEPVARGLDRTVVLDALAERLADAPGLVGRIARELVVRIRELTAAINGLEREIAGLAAGLSPTLLELVGCGSLGAAKLVGETAGVGRFRSAAAFARHNGTAPLPVWSGNTERHRLSRTGNRQLNLVLHRIAITQIRLGGAGRAYFDKRLTAGDTKAEAIRALRRRISDEVFRRMREDEQHRATPRARLVAAA

SEQ ID NO: 419961 - protein, 451 aa, unidentified
MEILYTNCAGLDVHKKTVKVCLLTPGSNGRPHKEFRTYATTIEELLNLSDWLHEQGCTHVAFEATGVYWKPLYNLLEGHFEILVVNAQHIKAVPGRKNDVKDAEWIADLLQHGLLKASFIPSGSQRELRDLTRYRVKLTEEKAREINRVQKTLEDTNLKLGDVVSDIMGKASRMILYAIADGETDPSRLAAFAIGRVRASQEQLEAALTGRVTDHHRFLLREHLTQIRHLELAIDRVTAEITRRFTPPSPPEEPTASEKEDEATQERASESAPLPEAPVPPQAALSWTQAVVLLCSIPGISERTAIGILAEIGTNMQQFPTAAHLASWAGVCPGNHESAGKRLSGKTRKGNPQLRCLLVQAAHSASHQKHCYLAEQYRRIAKRRGAKRAAIAVAHSILVIIYHLLSNQTTYLEKGETFFEERDRQGMEKRLVRQLSRLGYQVELQPIAQAG

SEQ ID NO: 419962 - protein, 428 aa, unidentified
MNYNTQNAKIASITEKTLIVGIDVGSETHYARAFNWRNYEYSKKPFAFSNDEAGFASFKAWMNDMAEKHGMETIIPGMEPTGHYWLNLGAYLQEQGMKPVHVNPHHVKKSKELDDNNPSKNDRKDPKTIAGLVNEGRFSYPYIPTGIYAEIRNLSNLRIQTQEEITRIKNRIARWFSIYFPEIKDVYRNPDAVSGLMVIKQAPLPCDIKELGVNGVNKIWRDARLKGAGIKRATTLVTAAEHSIGNTEAPRSARKEIRNLLNDYEIYKNRMDELMQEIKETLSEIPYIDKLMEINGIGIKTVSCFIAEVGDIGRFDNPKQVQKLAGYAIVADSSGKHNGESRISHRGRKRLRYALYEAAISVIGKNKEFKEIHSYYRTREKNPLKKMQSVVAVACKILRIFYTILTKGVDYDAEKLRGDIKRPQAQAA

SEQ ID NO: 419963 - protein, 361 aa, unidentified
MNRTEKPLAFQPGAFDVFTGMDTSKKSIAMTFIDDAGEIKNVKMAYNPQAVVSFVQRRYPGKRVAFAYEAGPTGYGLYDELTKSGFHCMVVSPGLVPKKPGNHVKTDRIDGETLSVSLRGGQIQSIQIPMGDYRNLRHLIQLRDTYVKQLAGNKTRIKSLLLFHGISFPGSQTTEQWSCSVMTALRTLPCDEHIKFHIDQLLDLITFQRTKVLEVTRHIRKLCKGNEEIQHNIQLLSTISGIGFITASQVIACIGDTKILRHCDQLAGYFGLAPKEHSSGEATRRGSITRAGNPRMRTKLIQCAWAAIRTDQELKAVYTKILTRNHGAGGPNKAIVAVARRLATRIYAVLTQQRPYVLRNI

SEQ ID NO: 419964 - protein, 265 aa, unidentified
MKMQSRYLGVDVSKELLVVAFEGHRWEFSNSKQGFGKLIAQIRQQSGSVHLVCEATGPYHLPMCLALQEAGIAVTVSNPAQIKYYGRSQGVLAKNDPIDAALIERFAHERRPAADPPFTREQIALNELINHRGQLADSRKGMLASRQTVIDPGVRKEIDRAIAALDRCIATVERRLKEKVDSNPLWKEKIARLGSVSGVGFVTAVVLLVKMPELGSLSRGQCAALAGLAPYDNDSGSAAASDRSAEAELGGAQRPVYGRSQRDEP

SEQ ID NO: 419965 - protein, 457 aa, unidentified
MSIRIIGIDLAVSAKHKAVVLDPAGNKFIGKQISFRSYPDDLERVLSRARKGASEEVQLIAIMEATGMAWYPVGVYLHHRGVTVYRVNGQKTKDLRRVYWKHTSSDHIDSKVLARLYQLEPDRLEHWWPASGEQLALQRACRAFARWRKLKTALKNRLHAYDQWAWDDLSKLVPADAHDWIRQHWYNPWRVQEAGVDRLTAAWQSTNPRKPADTDWITRWVGRAEQMTTLYGSEEMVDYDDLQEIMRHSLRLRDQYVQEQACLTRERILPLYYKLFPDCFLVSIQGIGVQSAATYMAFIQDINRFPTVEKFRLWCGMVPASKQSGYAEAKGLRITQAGPNLIKAALYLNAEVARQWDVQIAAIYHKQIVEYGKHHSQAVCACASHLASRIFAVLKQQRPYQLRDLENKPISKKQSRNLCKELRVPDEVRKRNNKRFRRAKAETRKDSRLKQHRNLGK

SEQ ID NO: 419966 - protein, 364 aa, unidentified
MYDSTTTVAVGLDVHARSIRLAAVRADELLEERTLPYDEQAVERLLRRWPSVRCCYEAGPTGFGLYRHLVERGIECAVVAPGLVPQRPGDRVKTDQRDARRLARLLAGGLLEPIHVPSPELEAARDLVRAREDARLDRMRDRHRLSKFCLRHGRLLPTSSWTVVRRKWLGEQRFEHAAEQITFDGYLHTVDLVDARIEQLERAIRAVSEQQPWRVLVGQLRCLRGIDTLSALGLVAEIGDFSRFRTAEEFMAFVGLVPSEHSSGEHRRQGSITKVGNAHVRRLLVEAAWHARRRPTVGYELSRRQRGQDPAVIERAWRCQQRLYSRWQRMAGRGKPQQKIVVACARELAGFVWAIATDQPLRTT

SEQ ID NO: 419967 - protein, 433 aa, unidentified
MRIIGLDIHRAFAEAVAWEDGRLRRLGRVDMPRDLLAAFAAKLSPNDVGVIEATGNATSAAAVVAPHVKKVGIGNPKQVRIIAYAKIKTTIDADVLAQLYASGFLPEVWIADEPTQALRRQVTRRNQIVRQRSRLKTVIQSILHSHLIPSCPHADLCGAKGRTWLIEQVVPQDERLAIDRHLREFDRLGEDLQVIERDLARSALEDEGVKRLMTIPGVDITVALAMKAAIGDVSRFDDPQKLVTYLGLNPSVRQSGQVRPTMGGSPSRAVVMRAACSSRRPGRPLVLPDRCEPSPCGVRARRRQHVAAVATARKLSVVIWHLLMKGESYAWARPSLHAKKLARCGTQGREQGCARPKGSRARLQHKEPPGRRAPLGGAGRGRLCTPRRRLEPTRSEEGRHGCRKRGATIEAARQGSHLGPCSSPRGRPCATGE

SEQ ID NO: 419968 - protein, 378 aa, unidentified
MTALDTVLQDKDTTTQGDLHVSFELGDRSWKLSCSDGTRSPSRYSVNAGDQAAVLDCMEKARARCGLDPRAKVHTCYEAGRDGWWLHRWLRDQGIDSIVVDSSSIEVNRRAKRAKTDRLDADKLLALLLRYHRGERRVWSVVHEPTAQEEDARRTHREIGRLMHERTAHTNRIGSLLVMHNLRPGRIGGRTWQSWWDDHCMQVPALLRAEIEREYARLVLAKQQLNALEAERRHEVAEGAHPIVAQLAKLRAIGPRGAWILDKELFGWRRFANRRELAGCLGLAPTPYASGTSEGEQGISKAGNKRARALLVELAWRWLKFQPDSAMSQWFHQRFGIAGKRSRRIGIVALARRLAIALWRYVEHGEIPAGAALKTVNA

SEQ ID NO: 419969 - protein, 326 aa, unidentified
MEHELHYIGIDTAKEKQDVDVLRPDGRHRTKKFANTTKGHDELVSWLKGHKIDHAHICIEATGTYMEPVAECLYDAGYIVSVINPALGKAFAQSEGLRNKTDTVDARMLAEFCRQKRPAAWEAPHPLERALRALVVRHQALTDMHTQELNRTETAREVQRPSIDAHLLWLEAELKRLEKQIKDLTDDDPDMKHRRKLLESIPGIGEKTSAVLLAYIGLKDRFAHARQFAAFAGLTPRRYESGSSVRGASRMSKAGHVSLRRALYMPAMVATSKTEWGRAFRDRLAANGKKGKVILGAMMRKLAQVAYGVLKSGVPFDASRHNPVAA

SEQ ID NO: 419970 - protein, 424 aa, unidentified
MSKRKSSPAGLQALYARVCGLDVHKKLVVACVRILESKDGTVQSTLRKFGTMTADLLELRRWLAELRVTHVAMESTGVYWQPVFNLLEGHFKVWVVNAQHIKKVPGRKTDMKDAEWIAQLLQCGLLRPSFVPDRQQRELRDLTRQQTKLVQQRNAVGNRIEKVLETANIKLGSVASDVLGVSGRKMVEALIAGEQDVTVLADLAQRQLRGKIPELQRALEGELTEHHRFLLRQLLEQYDFLENKIASVSERLGAVAPPSFRAAVEQVDAVAGIAERGARALLAETGTDMSRFPTHKHFTSWAGQCPGNHESAGKRRSGKTPAANRHIDAVLTEMAHAAVRTKNSYFKSQYHHLAGRRGKKRAIGAVKHSILVTVYFMLRDNKPYKDLGADYFDKLNPQQRIRYHVRKLQELGQGVELSPIADAA

SEQ ID NO: 419971 - protein, 334 aa, unidentified
MKKYIGIDAHCKYCDVAVIDEKGTLLSHRSVKTSAENLINAIKEVSGERAVVVEESTLAGWLQRTLTPYCNEFQVADPQHNESIAKSEKKSDRHDAQTLAQLYRGGYIKPVHHSLDMRHLELKEAVQHYHDYVNQIVRWKNKVKALYRKHGILSLSDQVYDPVEGAKYLEHLPDPTSRQRARDHLRVIAMLERLTKKAERRMKRLSSRFPIISMFEDIAGVGPIVSATTVAIVETPHRFPDKEHLWSYSGLGIAKSESGGRSAKGHASKKGNRLLKKVLMQAALSASKTDSRFGRRYRELKHKGTSIAQRTVARSILATMYGMWKTGELYREQD

SEQ ID NO: 419972 - protein, 401 aa, unidentified
MKTLHRRCAGLDVHSDSVVACARLTVRTKASHEVRRFSTTTRDLMELADWLAAQGITRIAMEATGVYWKPIWHILEGRFELVLANAAHIRNVPGRKSDVNDAVWISDLLAHGLIRASFVPPAQIQDVRDLTRTRTQLGREVAQHIQRIQKTLENANVKLTSVISDIVGTSGRRILNAIIAGERNPAKLAELGSKRLKCSRAELIAALDGRVTTHHRFLIGHHLHLIEELERHIAAFDARIEELLAPHRDAVAQLITIPGVSRVSAQVILAEIGADMTPFPTAGHLLSWAGLVPRLDESAGKRRSTRVRKGAPWLKPVLVQCAWGAARSKGTYYQAQFFRLKARRGPKRAAIAVAASLLTAAYHMLKMVHSTKTSAPIFLSNATRPASSPNSPVASRTLDTT

SEQ ID NO: 419973 - protein, 402 aa, unidentified
MNAVGIDVSKSKSVVAIMRPFGEIVSTPFEIKHTASDIHSLIELINSVEGESRIVMEHTGRYYEVLAHQLLEANLFVSAINPKLIKDFDNDSLRKVKSDKADAVKIARYALDKWQNLKQYNVMDELRNQLKTMNRQFGFYMKHKTAMKNNLIGILDQTYPGVNTYFDSPARSDGSQKWVDFASTYWHVDCVRKMSLNAFIDHYQNWCKRKKYNFSQSKAEEIYGKAKELVPVLPKDAITKLIIKQAVDQLNSASTTVESLRTLMNKTASKLPEYPVVMAMKGVGTSLGPQLMAEIGNVSRFTHKSAITAFAGVDPGVNESGTYEQKSVPTSKRGSADLRKTLFQVMDVLIKTHPQDDPVYQFLDKKRAQGKPYYVYMTAGANKFLRIYYGRVKEYLASLPES

SEQ ID NO: 419974 - protein, 346 aa, unidentified
MKKIFIGIDFSKEKFDATVIKAEGVEERAERLHEVFDNKVSGFRRLLRWVKSVADEPDAGLWLFCGENTGGYSKALCNHLYGSGYDMWLENALSIRRSSALQRVKSDKADSGVIAEYAMRNYDQMRLYKPLGKNLERLREVFLYRHNLVKMKASMTVRKGEKKLTQEKSDISRFMAQSSKHLISEFNKKIAECDMKIEKIISEDEELRRNFEILISVPGVGTQNAVCLMVYTDNFSRFDYDSRKIACYYGVAPFGRQSGTSVNTPPHVSPFANKLIKALLTQAALASINFCPQMAVYYRRLVEAGKKKPVAVNNVKNKLLHVITAMVRNGEMYNPDHDYYAALKVA

SEQ ID NO: 419975 - protein, 409 aa, unidentified
MQVVYPRCAGLDVHKKDVYACALVVDENGQKRQQIRKFSTVTVELLKLADWLQSHAVTHVAMEATGVYWRPIWAILEGQFELLLVNPHHVKAMPGRKTDAKDCEWLAALLQHGLVRGSFVPPTEIQDLRDLTRYRIELTQSQNRVANRIQKVLEQANIKLSSVAADTLGVSGQLMIQAIIDGEEDPERLADFAKRKLRQRIPELQVALSGRIRPHHRFMLREHFDEWKTLSERIQRVEQEIDRAIAPFEQAVMRWKTIPGIDRVTACCLVAELGVNMAQFPSAQHLASWAGICPGHNESGGKRMSGKIREGNRWLRRALCQAAWAATRKKNSYLSAQFKRLSARRGVKRALIAVAHSILIIAYTMMKNAQDYKEVGGDYFERLNHTQLQRHLIRRLQRLGLTVTVQLAT

SEQ ID NO: 419976 - protein, 349 aa, unidentified
MLADEVDYVVGVDTHRDEHVLAVVVAPTGVVVAQRSVAASGSGYAQALRFADEYASGTRVWAVEGAGHYGAGLARYLSGRGETVLEAGRSPRGERRLRGKDDGLDAIRAARAALGNDGLAVPRAGQHREALRLLLVARRGAVDVRRQALVQLRSVIVTSPEQLRHELRRLPQQRLLERCGRLRRSSSRTPDELASVLVLRTLARRVQAATAEAAELETEILTHVRALAPQLLDEPGVGPIVAAQLIVAWSHHGRVRSEAAFARLAGAAPIPASSGQTTRHRLSRGGDRQLNRALHTVILHRRLHDPDTKAYITRRVAEGKSRRDAVRLLKRYLARHLYRLLQNQEPLMA

SEQ ID NO: 419977 - protein, 398 aa, unidentified
MISVGIDVSKEKSTVCILKPYGEILSSPFEILHTESDLSGLVTMLQRFDEEVRVVMEATGAYHLPVLSHLKENNLYVSVINPFVMKEYRCQGLRRAKTDRLDAKMIAKYGIDNWYHLENYEFSEEKYQELKLLGRQYAHYMRMRIESVLVLTNMLDYTMPGIKALLNGWNESSGKDKLADFVEEYWHYDNITKKSEKQFVNSYVKWAEKKGYHQSEAKAVKIYAMAKEGIPTLSSSAPSTKMLVLEAVRVLREVDNTLKTILTQMQELARSLREYPVVRAMGGVGDVLAPKLIAEIGDVRRFHSGKALIAYAGIDAPPYQSGQFVGTNRHISKRGSSMLRKVGYETMRCLKTTKNVDDSVYQFMIKKEIEGKPKKVAKMAGLNKFLRIYYARVKEVYQ

SEQ ID NO: 419978 - protein, 354 aa, unidentified
MSQTQNAAIAVVGIDIGKNSFHIVGHDERGAIVLRQKWSRGQVEARFANMSPCLVGMEACVGAHHLSRKLNSLGHNARLMPAKYVRPYSRGQKNDFRDAEAIAEAVQRPTMKFVATKTADQLDLQALHRVQERLVSQRTGIINQIRAFLLERGIAVRQGQRFLRAGLPRILATPPDVLSPRMVRMIEDLAGDWRRLDERVESLSNEIETIARQDAGCERLMSVPGIGPIISSAMVAAIGAGDVFTKGRDFAAWLGLVPKQISTGDRTILGKLSRRGNRYLRVLFVQAAWVVLIKPKIWERHGLKPWIEAARKRLHHNVLAIALANKLARIAWSVLARGRAFEARKIDQAANQSA

SEQ ID NO: 419979 - protein, 318 aa, unidentified
MPQIVSRVVGIDVSKAKLDWCIRGVANGVVANAAQGHAALAAELARHGVDIAVMEASGGYERAAAQALREAGLCVAVVDPKRVRDFAKAAGRRAKNDPIDADTIAWFGEIFAKQDTAPDTDREELAALVAARKHYVDLRVACLNRREHSRCALDEAVREDMIANLERYIVKFDKAIAAKIAATKHWAAVATILDSVPGVGLQAMAAILAWLPELGHTSIGNIAALVGVAPFDDKSGKHDGVRHIAGGRRDLRNILYMATVAAATQHNPVLKAYYQRLRAKGKCAKVALIACLHKLLLILNVMLVRGQTWKPTPHATAA

SEQ ID NO: 419980 - protein, 338 aa, unidentified
MTYYAGIDVSLEYASVCVIDAEGKTVREGKVLSEPEALTNWLASVGVGLTRIGLEAGPLSQWLYAGLRQAGHPAELLETRHVRRAFEIMPVKTDRKDARGIADLVRLGWFRPVHCKSIAAQETRAVLTARKLVQKQVLETESSLRGILRGFGLKVGKTTPVRFEARVKELVAGHPSLERIAASLLATRAVLRREFNGFERQVRAMARNHTRARLLMSTPGVGTIVALTYAAAIDDPSRFQSSKTVGAHFGLTPRRYQSGETDYTGRISKLGDSSVRSALYEAAHAILTKPLKGCTALKSWAMKIARRAGMNKAKVALARKLAIIMHRMLVNGTTFHSA

SEQ ID NO: 419981 - protein, 326 aa, unidentified
MKNSLTFVGIDISKNTLDICSLQGEKKLKKRISNNKKAIKAFFRCSEPQQLKVCFENTGRYGRKIVEVLTSLNISFYEVNPLHLHKSIGLTRGKDDIVDAFRIAKFLEKNYKDLKPYQKPEPGIEKLKALMSHRNLLIKQRAQLKAKNKENLLIADLDLPQLEEHGAELIKLLTEKIKQTQKLITEVIEQNKLLRNQYQLINAIPGVGPILSWNMLIKTNAFKSITNPRKFACYAGVAPFSKSSGTSVFGRASVSIYADKSIKKILHLAAMRAIQLPSDFKQYYHRKVNEGKNKMSVLNAIRNKIIHRIFAIIKNQEKYNINLQVS

SEQ ID NO: 419982 - protein, 400 aa, unidentified
MSERRNRVWVGIDAGKGHHWAAAVDETGATLWSKKVDNDESAILTAMGEILDLADQVQWAVDISGTSSALLLALLAAHGQQAVYVPGRTVNRMSGAYRGEAKTDARDAYVIAETVRNRRDFATIDVPAQLAADLALLTAHRCDLVADRVRMINRLRDTLTGVFPALERAFDYSSQKGALVLLTGYQTPAALRRRGRARLTAWLANRGVRGADAVAATALEAAQAQQTALPGEDVAAQIVADLAAQILALDDRLKRIDQQIRETFRSHPQAGIIESLPGMGPILGAEFVVAAGDLTAYADAGHLASAAGLVPVPRDSGRRTGNLHRPKRYSRRLRRVFYMSAQTSMMREGPNREFYLKKRGEGCKHVQAVIALARRRASVLWALLRDNRVFTPELPVARAA

SEQ ID NO: 419983 - protein, 371 aa, unidentified
MKEFNKYIGLDVHKETMAVSVAEAQGGEVRYVGEITNTPEAMEKLVRQLRKGGANLLFCYEAGPCGCGIHRQLTDMGWECLVVAPSLIPKKAGDRVKTDRRDSLSLARLHRAGELTAVWVPDGAQEALRDLTRAREDMKHLQRQAKQRLLAFLLRHGRRYDGKSHWTQAHYRWLEQTKFEQPVQQIVFQEYIDTVKAMSQRVEALDKQLESAAGESVFWPVIEGLMALRGVSLLTATTIVAEIGDLRRFASAPQLMAYLGVVPSEHSSGGTKSRGGITKTGNGHVRRVLVEAAWTYRHPARKTTVLQRRAERTPEVVQEIAWKAQKRMCGRYRLLESRGKLKVQVTTAIARELAGFIWAIGQALPPPAANA

SEQ ID NO: 419984 - protein, 381 aa, unidentified
MTTAATHHEQSNTTEAMLFVAFELSEKTWKLGFTTGHGQKPRERTVTARHHEHVLDEIAQAKRRLGLPETAPVVSCYEAGREGFWLHRFLQAHGITNHVVDSSAIEVNRRRRRAKSDGLDVRKLLSMLMRYEQGERHVWQVVKVPAVEAEDQRHLHRDLETLKQERASTMTRIEGLLSSQGLRVTSLTKLPEQLEALRLWDGSPIPPGLRRRVLRVYAHYTFLSEQIAEVEAERRAQLQTSSEASIDKVRQLMQLKGIGINGAWLLVMEFFGWRAFTNRREVGGLAGFTPTPYQSGESAREQGITKSGNRHVRWMTTELAWSWLRFQPDSALSVWFRERFGSGGKRLRRIGIVAVARKLLIALWRFLETGVVPEGAVLKEG

SEQ ID NO: 419985 - protein, 532 aa, unidentified
MLSIPVVTERCAGIDVGKRGLAVAVAVGPADKEAEIQTRWYGTTVPALEELALWLRQQGCTAVGMESTGSYWIPVKNILEPAFPITLACARKHRPKKGDKTDFRDAVDLVVHLRHGMLTGSYLPERGIVELRDLTRRRKKLIGNLQSEKNRIQKVLETANVKIGNVVSDVFGVSGQEILQALLEDKPITAEEMAEMAKMRLRKKIPQLTETLQSHQMKEHHRWLIQQSIAHAQFLDEQIEELEKKIEEHLEPYRRQYELLMTIPGIKEAGAANILAEIGADIGKFPTSGQICKWAGICPGNNRSMGKQKSSHIKKANKFLLAALVEAAWGASRKKDSAFQRSFQRWLRKKGKDETCVAIAHKQLRVIWSVLTHNRPYVEPDAAVWAAIDRNKQVRHHMSQLRRLGADEQTIQQLMEQLLEPAASSQNGEAAARPIAESAEELPPEQTPPARPARPQLDDSTIIPAAHDTPAETLAPTKQPPRGVLGFRIKPGGSRNVKIFKEQMGSPPNGIKPKRSDARSRHVRACSHVSES

SEQ ID NO: 419986 - protein, 388 aa, unidentified
MSSIEHISEERASVRNDLSAIFVSLELSQSTWLITSLSPGGGEKMSKHQVRGGDIAGLLARFSQLQAKCKVRTGQPYRLIVIHEAGLDGFWIHRTLQNAGIESHVVDPASIATSRRRRRAKTDGIDGEALVRALLAYKRGEPRVCAMTKAPTPEQEDRRQISRERRSLIAERVEHVNRIKGLLFAQGVADYQPVRRDRRQRLEALGTGDGRVLPICLKQRLSRELDRLELLLEQIRTVEAQRDALLTPQAEAPQSPPVVLQKLRGIGPEFAMVLWSEGFFRHFNNRRQLASYAGLAPTPWQSGTVAREQGVSKAGNARLRTTMIQLAWLWLRHQPKSALTLWFHERTKAAGGRNRRVMIVALARKLLVGLWKLVTTGVIPEGAIMSAA

SEQ ID NO: 419987 - protein, 384 aa, unidentified
MAVVDIVYPVCCGMDVHKKFIVACIATTDERSRTTHKIKRFSTFTNDLRRLADWLAEHNCKDVCMESSGKYWIPVFNILEQTCNVCLTHPKYVKAIKGKKTDKKDAKWISELFKCDLVRSSFIPPPEIRQLRDLCRYYAKLTYVNVSEKNRAQNCLTMCNLKLDDVFSDVFGKSATRVFDALIEHGNSDFDIAPLLHKGCKKSVEEIKAALDGNLVEEQMSKLDIIRQHKDCIDALQDALEILILKLAEPFTEEVSLLLTVPGIKSPLTAVRILAEIGADMSVFETSKRLCSWAGLTPQNQESAGKKKTTRIGRAGAYLKPLLVQCVLAVSKSDKHPELKNKYLSLKKRRGGKKAVIAIARKLLTAIWHIFDKKEAYNAELYQK

SEQ ID NO: 419988 - protein, 355 aa, unidentified
MNQEKYIGMDVHDASISAAVKNAQGKLLMECVLETKAATILEFIQGLRGTLALTFEEGTLAAWLHDLLKPHVSRLVVCDPRKNALLRDGNQNDRADACNLAELLRTNQVHAVYHEKHGIRTLKELGRSYLALTQDTTRVMNRIKSVYRSWAIPCAGTNVYSRRHRGEWLAKLVEPGVRMRAEHLYQELDSLEPLRQAARRELLRESRKHAAVKLLRQIPAIGPIRSALLVAILQTPHRFRTKRQLWAYSGFAVQTYDSGEYRFVRGKRQRNRERITVRGLNRNHNHDLKNLLKGAAISAIERPGPLQDFYVALVEQGMRPSMARLTLARKIAAIILIMWKKGVSFDPKQLQRPAA

SEQ ID NO: 419989 - protein, 420 aa, unidentified
MTRAGEQLKLFVGDDWAEAYHDVELMDATGRRLAKARLPEGVAGIARLHAMIGEQLGEDADEDDAGQVAVGIETDRGPWVQALIAAGYTVFAINPLQASRYRERHGVSGAKSDAADAHVLADMVRTDSHQLRPVAGDTALAAAVKVVTRTHKTLIWERTRTTQRLRHALRDYFPAALEAFGDLDAADTLELLARAPDPASAAKLTTAQISAALKRARRRDIAAKAERIQAVLRAAHLGQPDIVAAAYAASARALIAVLATLNEQVKTLQGQVEAYFGQHPDAEILLSQPGLGPVLGARVLAESGDDPGRYISAKARKNYAGTSPITRASGKKKTVMARHVHNDRLIDALISQAFTALRTSPGARACYDHQRARGAGHNPALRQLANRLTGILHGCLKTRTLYDEATAWPQHPTATEKTAA

SEQ ID NO: 419990 - protein, 354 aa, unidentified
MSQTPNTAVAVIGIDIGKNSFHVVGHDARGAIVLRQKWSRGQVEARLANIPPCLIGMEACVGAHHLSRKLASLGHDARLMPAKDVRPYSKGQKNDFNDAEAIAEAVQRPTMKFVAIKTAEQLDLQALHRVRERLVSQRTGIINQIRAFMLERGIAVRQGIGFLRTELPTILATRTDALSPRMLRVIEELAGDWRRLDQRIDGLSGEIEALARQDQACSRLMTVPGIGPIISSAMVAAIGTGDVFSKGRDFGAWLGLVPKQISTGDRTILGKISRRGNRYLRVLFVQAAWVVLVRIKNWQRYGLKSWIEAAKKRLHHNVLAIALANKLARIAWAVLAKGRAFELTRTDDADVRPA

SEQ ID NO: 419991 - protein, 342 aa, unidentified
METIHYIGLDVHKKTIAYCVKNISGKILSQGTVKADRKALIQWLSNLPGPWMGALEATIFTGWIYDFLKPHAVELKVAHPQMLKAITAAKKKNDRADAEKLADLLRVNLLPECTMLPEDLRELRRVLRYRNLVVRLSSQMKNKMSGLLMEVGANYEKKRLHGRKYFTALLETVEDVPDSVKELLILSRGNLELFTAAQKKLTNALREHPLICKRVECLMSIPGVGEILSLTWVLEIGEADRFSNSRQAISYCGLCSAQKESAGKEKRGPISKQRNKHLQTVLIEAAKLAPRWNEQLAELYAKELERGHKNRATLAVARKLVEYLLAVDRRGTPFKTLKRQAM

SEQ ID NO: 419992 - protein, 429 aa, unidentified
MPEAVAVASLQFAAFVGLDWADQKHDVVLAEAGVAACESRVLPHTPEAIDAWAGELRQRFGGRPVAVCFEQTRGAIAYALLKYDFLVLFPLPPARLAKYREAFVSSGAKDDPTDAGLLLDYVLRHREQLRAWLPDSPETRELQLLVEARRDAVDQRTRISNQLTAALKLYFPQALTLIGDVVSTPLACDFLAKWPTLEAVQKAAPAALRKFYWSHFCRSEERIRERLALVTSARPLTDDQALILAGVLKIRCQIGQLRALAKAIAAYELRIKQLMQQHPDAPLFAELPGAGDALAPRLVAAFGGRRDRFQSAAELQAFSGVAPVTKRSGKRWTVHRRWACPNFLRQTFHEFAGCSRLKSVWAAAFYQQQRAVGKGHHAALRALAFKWIRILFRCWTTRTPYCEARYLETLRKRQAPLLAFLSPKAADRA

SEQ ID NO: 419993 - protein, 423 aa, unidentified
MGHARARKIPAQLVEDEDYQLRHERVAGIDIAKAKADVCTRLPPAREGGRRASRVEEVPARAAEILALAARLLADGVELVVMESTSDYWRIWFYLLEGAGFNVQLVNSRQSRQLAGRPKTDRLDAQRIARLAEMGLLRPSFVPPPEIRALRDLTRTRLQLVRDRTREWQRLEKLLEGAAVKLSSAVHSLAKTAIAEALEGMTVAGHHRMLIRVHLDHIAFLDRSVAAVEDEIQAALDAIPAARGVSADGIRCAGPGPDAAVLPAAERLAEIPGVSLDLARAIIAETGLDMARFPTAAHLVSWAGLSPVTRQSGPRSRKPQKGQGNDYLKGYCTQAATGAARTDTFLGERIRRLSRRLGPNKAKCAVARSILVIAWHLLASPDAIFTDLGSSWHERKTSRDRKIRTHVRQLEALGLNVTITPAA

SEQ ID NO: 419994 - protein, 310 aa, unidentified
MENIALIGIDLGKNSFHIHCQDRRGKAVYRKKFTRSKLIEFLATCPATTIAMEAYGGSHFMACKLEELGHFPKLISPQFVRPFVKSNKNDFVDAEAICEAASRPSMRFVQPRTESQQAMRALHRVRESLVQDKVKTTNQMHAFLLEFGISVPRGSAVISRLSTILEDNNLLLYLSQLLLKLQQHYHYLVEQIKELESQLKRKLDEDEVGQRLLSIPCVGTLTASTISTEIGDGKQYASSRDFAAATGLVPRQYSTGGGGQHCWASASEATRRYEPCWFSAPEYLYKNWNTSQAGWPTGAGSYCAGKVTLS

SEQ ID NO: 419995 - protein, 412 aa, unidentified
MQVLYERCAGLDIHKKMVVVCVLITHPSGKVEKLFRTFATMTSDLLALDEWLHSLSIEHLALESTGVYWYPIYNILEEDRHILLVNPQHMKAVPGRKTDIKDSEWLADLLRHGLLKASFIPPQPIRELRELARYRKTLVGQRAQEVNRLQKVLEGTNIKLAAVATDILGKSGRSMIEALIGGEQDAQALAELARGRLRAKLPDLQKALEGNVRPHQQFLLKQLLAHVEYLEQALCEVQKEIEQRLAPFEAVVQLLEQIPCVQRIAAIAILAEIGTDMSRFPTHKHLASWAGVCPGNKQSGGKRLSGASTSGNPHLRAILSEVACNIARSKEANYLTALYHRIARRRGKQRALLAVAHSLLVCIYYVIRDQKVYQDLGADYFDKLDTARIERHHIRRLEQLGYVVTLAPKETA

SEQ ID NO: 419996 - protein, 350 aa, unidentified
MDKELYIGVDVSKQTLDLAYYDGESIDWKKAHIKVSNNNAGFKKIGSWVAKVSKGVDIVLFCMEYTGLYTQNFRLWLEEKHYIYRMVEPRKMHRFEPDLDDGLRSLDRIKTDELDSFRIAIYCEQNHRKILRNPSKLPPPVYFKLKRLLAERKQTVKQSVLYKQQLHDICAYDTDLSVERKNGQLKTLNDALKGIDNEIDMYIKEDADISKNFSLLISIPGIGRVVALETIVLTENFMAIDNPRKYACYIGVAPFKKESGTSVRKGSSVSKKGFKQAKADLSIACLVCMQHIPNIRDYWERKRKEKCSGIVFNAIKFKMILRMFAVIKRGTPYVETDNYRNGKNKQPGVN

SEQ ID NO: 419997 - protein, 341 aa, unidentified
MQITTIGLDIAKNVFQVHGIDASEKVVVRKQLRRSQVLAFFKALPPCLIGMEACATAHHWARELTKLGHTVRLMPARDVKAYVKRNKNDAADAEAICEAVRRPTMRFVQVKSTEQQSQLMLHRVRDLLMRQRTQVINALRAHLAELGITAAQGIAGLKELLKIIAGEGERLPVDAQASLVVLAAELQAMQTLIGSLEKRLMAQHRKSEASKRVATIPGIAVIGATAITATVTDPKAFRSGRDFAAWIGLVPRQDSTGGKQKLGPISKQGDRYLRRILVVGAHAVLKLAKQKPEKYPWLTQLLARKPFKVVAVALANKMARTAWALLAHGGTYRAPRLAAAG

SEQ ID NO: 419998 - protein, 353 aa, unidentified
MNSLVYIGMDLHKNTSTFSVKDGDGAVLDNRKIETEPSAIKGYLRKFPNASLAVEPVSQWYFYADLMQKLGVDVHLANPLKVKAIASARIKTDSIDAGVLCDLLRTNLLPEAYFSSPDVRFWKEMVRFRASLVNLRTQVKNKIHSILFKNALRHPFTDLFGVSGRKWLAALELDEHFAFNLNRYLELLDTCIRLVKETDEKIEQTVTDQPQARLLTSIPGISYCSALTIMAEIGTIDRFPSAKKLMGYAGLVPSTYASGETTRHGRITKQGSRWLRWTMIEIAQRQQLCKKTPGFGWYYDRVKKRKGTGAAAVATARKLLAVAWRILKDNRPFEVIPPRLEVQEAHRKTIVSS

SEQ ID NO: 419999 - protein, 332 aa, unidentified
MQLVYERGAGLDLHKKTVVACAIVPDEHGQRRKELRTFSTMTPDVLRLRDWLAILGVTQVAMESTGVFWKPIFNLLEGSFDLLVANAQHIKAVPGRKTDVRDAEWIADLLQHGLLRPSFIPPPWQRQLRDLTRSRTSLIEERSRVINRVQKLLEDANIKLASVASDLMGKSARQMLAALVEGQEDPAILAEYARASMRSKRPLLEQALQGRVTEHHRLLLKEHLAHIDALDEQIEHLSAELSERLRPYEAHLRRLETIPGIKRRLAEVLLAEIGPDMSRFPSARHLASWAGMCPGNRESAGKRLSGKTRKGSPWLRSALVEAAHAATHSKEC

SEQ ID NO: 420000 - protein, 316 aa, unidentified
MNNENIYAGVDVSKSSLDVAIIPSGKSVCFANDKQGRTKLVKCFGKLKVSHVTLEATGGLERPVAMELVSAQVPVSVVNPRQVRDYAKATGRLAKTDSIDAGVIARFGEALKPAVNQLKDAQTAELSELVTRRSQLRKMVVMEKNRLYLASGLSGVLIKSHIKYLEKQIEKVDTKLAEMIDANLEWRESDSLLQSVPGVGRGTSAVLLALLPELGKINRREIAALVGVAPFNRDSGFFRGRRSVWGGRADVRNMLYMCAVVASRFNPAIKSFYQHLKEKGKPSKVALTACMRKLLIILNSIMKSRTKWSDNHESID

SEQ ID NO: 420001 - protein, 423 aa, unidentified
MNRLHYELHVGIDLGQWLHQACVVDANGELLEERGFEHSVDGLGTTLAWLLSLAGKDAERIAVAIEKPHGAVVETLLESGVAVFAINPKQVDRFRDRHSMSGAKDDRRDAFVLADALRTDGHRFQRLQLPPPEMVALRELLRTRDQLVKNHVALSSQIRDLLARCWPHLVTLAPKDKALDAFFCELLQLFFDHHPTAELSLQNIQKLVHQHHIRRLQPEHILEVLRKTPLRVAPGTTEATSAHLNLLLHQLLLVRQHRRDSDQHLERWFKQLQPTSNQPYSDAAILASLPGVGAVVLASVLSYAHDPVRLRNLDAFRSLGGIAPVTKKSGKRGKQRPQILMRRARSLPLNNALHHWARIAVLTDPRFKEHYGRLRDRGHSHARALRGVMDRILAIAVAMLRDQTLYDPSKRANFNKGAKKVSS

SEQ ID NO: 420002 - protein, 343 aa, unidentified
MKKTTTIGLDLAKNVFQVDGGDETGETVLRRQLRRSEVLKFFAKLPPCLVGMEACASAHYWGREIAALGHEVRLMPPTRVKPYVKWGRKNDQADAAACREAVTRPSMRFVPIKTEEQQSVLMPHRARKLLVEQRTRLGNALRAHLAEMGISAAKGEAGFNFVLSVIDDDVNGMLPPLARQGLAPLAAQWRAASEQIDVLDRQIVEWHRANEDSRRLATIPHIGPVIASTLVATIGDARRFKNGRQFAAWLGLVPSQNSTGGKERLGPITKTGDRYVRKLLVLAALGMLRRVRRDETVSPWLAELLKRKPPKQAAVALANKLARTAWALLARGEIYREPTAGTA

SEQ ID NO: 420003 - protein, 315 aa, unidentified
MVDVPCFMGIDVAKAQLDIAVRPSGERWAVPNNTDGVATLVEQGQALHPTLIVLEAPGGLERAATAALATAGLPVVVVNPRQARDFARATGQLAKTDALDARALAHFADVIRPTPRPLPDAQTQELRALLGRRQQLIVMRTAEQNRLAGTSGRLQTDIEAHITWLNERLATLDDDIETLLRASPLWRENDDLLQSAPGIGPVCARTLLLELPELGTLNRRQIAALVGVAPLNRDSGTLRGRRTIWGGRAHVRTVLYMGTLVATRYNPRIKAFYERLLAAGKVKKVALTACMHKFLTILNARLKHRTPWQAQEVQG

SEQ ID NO: 420004 - protein, 341 aa, unidentified
MRYIGLDVHKDNITACVLTSTGKPKFEKNFIKDSESWNLSELMGYGDKDGFCVMMESGTYAYQPFRFFNDQGVETHVVHAQALKVITQSDKKTDKKDAYTIARMLRLWKRKEIDLQMAFMPTREQCELKDICRYREEISKKIGDETRRIKSHMSRNCEHLPEAYDNFQTQRARNYVRFNFQSDITLMNRMADLERLFEERDSVQKEVESRLPGSRDVEILMTIPGVARQTAVQIMSMIVDIDRFDDAEKLCAYFGLVPRVRDSGGKDHHGRMTKNGDKMMRSVMERVTQSHVMNCDSSITQYYKRKCSEMGTKKALITASRKMLSVIFAMLKSGSDFRLAA

SEQ ID NO: 420005 - protein, 349 aa, unidentified
MLIIGCDYHPSFQQIAFVNTETGELEERRLAHREEAEQFYRQLKEQDLVRVGMESSGHSRWFERLLRDLEFELWIGDAAEIRTKRVRKQKTDRQDAQLLLRLMVEERFPRIWVPDAENRDLRQLLWHRHRLVQTRTRVMNQLHVVALNEGLRRKKALWRPAGRQELESITLAPWAGRRRQDLLDLLDQLTPKIQQLTRALEEEVEKRPVARRLATHPGVGPLTALAFELVIGTPERFHCGKQIASYVGLVPTEESSGDRRRLGHISKQGNVLLRFLLVEAAQVTVRSQQEWRSKFFHLAMRRGRKIAKVAMARKLAVHLYWMWRQGRDYGQLQKFGSHAGEPGNRDGAQ

SEQ ID NO: 420006 - protein, 353 aa, unidentified
METIVAIDLGKYKSVFCEMNRGSLKTQYRTLRTRPEVFHDFFAELDVDRSIVLFEVGNQAGWLSDMLRGMGLTFKAANTNDPAWKWANNPTKSDKKDAHRLAMMYHHGFFPEVHIPCKEVRQKRALIGYRQKMVGRMTQVKNSIRALLCTMAMDLPAGRNCWTKKQLKALSEHAAPFEAIDDPSELWRGQLYTELQHYAALEEQLNAVETKLDAINRQNTAVALLQTVPGVGPRTAEALAAVIDDPHRFKSCRQVCNYVGFTPRRYQSGEMDRTGRISKRGNPLLRMLLVQASWASLQFAWARDIYKRVGRGSVKRRKIAIVAVARHLLMRCWAMLRDNKPWCCSVEKVAAWK

SEQ ID NO: 420007 - protein, 408 aa, unidentified
MNPLYVGIDVSSKSNVVYFMLPDGSKHCNFSVANSHTGSSQLVKRILSAMTSCSLDTVLIGLEATSVYGDNLVYFLREDAALARFNSKIHVLNPKQVSKFKEAYNDLPKNDLIDSFVIADCLRFGRINKEVYIGDYRYKALQNLTRARYFAVSNLIKEKQRFMNILFKKYSTMTQEKVFSDTFSTTALAVYDEFESAEALADMDLHELTAFIMEKGKNRFPNPNAVAKAIQKAARSSYRLPKTVNDSVNQVLSISITSIKALEAQIKEFDKAIATQMELLPNVLISIPGIGPVFSAGIMAEIGDINRFHNQAQLAKYAGLAWKQHQSGGFEAEVTRLIPSGNRFLKYYLCEAAFSLVRCDKEYSDFYHLKYKEVNRYQHKRALALTARKFVRLVFRLLKDNRLYTSAE

SEQ ID NO: 420008 - protein, 424 aa, unidentified
MSKHSYQTKTFKTLNRERIAEQTRSEPRVIFGVDVAKEVFVGALMKADRSVLVTLKWSHPQQTRELVERLITTVDVERLEVVLEPGGTYGDALRGCWRAAGVAVFRMSPKRTHDARELYDGVPSLHDAKAAYLPGRLHLDGVSQRWREPAPQRRELRAAVAELELHQSSYQRHLNRLEAQLSRHWPEVSGLLELDSVTLLNLLIECGSPEAVANQAEAAGALMRRSGRGRLTEAKVRQVLTSAATTVGLACLEPERRYLSALAREALHSYRGAQQVRHALEQRVEADSQLAPMAALVGRVTSAVLIASPGSPRNFPSAASYVKGSGLNLKEHSSGKHQGQLKITKRGPARARQYLYLAVLRWLQHEPLIAAWYQAKVQRDGGRLKGKALVALMRKLAKAVWHAARGRAFDAEQLLDRQALTGAR

SEQ ID NO: 420009 - protein, 351 aa, unidentified
MIVIGADVHKRKHTFVAVDEVGRRLGEKTVNATTAGHIAAIVWAREQFGTHLKWGIEDCRNMSARLERDLMSADQKVVRVPTKLMAQTRKSARRRGKSDPIDAESVARAVLREPDLPVASHDEVSRELKLLTDRRDILVAQRTSAINRLRWHVHELDPERGPAPRSLKAAKHQQALHEWLQTVPGLVAEMARAELADIIRLTAEINGLEKRLSDRAEDIAPRLLDIDGCAELTAAKIVGEAAGIARFKSEDAFACHAGVAPIPAWSGASEGQMRLSRSGNRQLNAAIHRIAVTQTRMNGSQGHAYYQRLISVGKTKAAARRCLKRRIARRVYQALLADHQHRNQAPKPVAA

SEQ ID NO: 420010 - protein, 528 aa, unidentified
MNNCIAIDVSKQVLNVFDGKRSFTVKNERGLKELKAYIEKQLYAESKDKGKHKSNNAVNESKSKSKDKHKSNNIANKSKCNSKSKGKGESKNKSRNKNKCNSKAKEKKGTEERENERMKINGSRNGSKNGRTKGSAEEEKTIRKRGYSGNEKNAGNRKYVKSDETEDPNRNQSEEDNFYVIFEPTGIYSNYLKEFCIDNRIKAYIVNPKKTSNFAKVIGHRSKTDKIDAKMLYAFNVLINKDELKVPSDDNISNTLSSYLSMYWFVIKMRISVSNYVEMLEYTDIEQSDRMLFSLFEKEVKRYKDIQEKIISKAEKLIKSNGNLKKKYECLLSIPGIGRTSAVALISLFLKYPDTNRAEITALTGLDPTRKESGISVRGKRRISKSGDKMIRKMLYMPTMNAIQHNEVIKSFYERLVNEKHKPKKVALIASMKKLLLIAHSVYKNETPFCNNFSEKHSAKADKTNPESREETEQTIREEKAKEGILKPIRKDTIKTNGKVKSKQTTNNHLIKHTDKKRIKEQRNRNKG

SEQ ID NO: 420011 - protein, 319 aa, unidentified
MTTACAAGIDAGKSYLDVGLAPSRRHFRVANRREGIEHIVDRLREAGIDKVVLEAIGPYAQPVVTRLVAAGFAVGLVNPRRIKAFREAEGRTAKTDRLDAALIARFAVKMTDALRPVPSADQQLLKALATRRRQLVEMIAMEKTRLKQCVEPFLCESHRMTIATLTAERRRIEADLEARLAADPKQLRQRVILQSLPGFGASVSTTLMTDMSELGTLDRRAAASLAGLAPHPSQSGTAPARNEIAGGRPCVRTALYMASLSAIRCDPRFKAEYQAMREAGKPAKVAIIAIARKLIVLANALVKNDALYDPQRAIAMNDP

SEQ ID NO: 420012 - protein, 343 aa, unidentified
MRGITTIGLDIAKSVFQVHGIDAEGNVIIRRQLKRRYVLAFFQKLPACVVGLEACASSHHWSRELQALGHTARLMPPAYVKPYVKRQKNDATDAEAICEAVRRPTMRFVETKTLEQQSCLVLHRTRHLFIRQQTSVINAIRAHLAEFGIVAPVGRRGVEELLDVIGEASDKRLPEVARACLATLGNQLRMLKAQILNFDRMITAWHRSNETSKRLDEIPGVGPALATALVASVADPKAFRSGRDFSAWVGLVPKQSSSGGKQKLGSISKQGDRYLRSLFTAGALAVIRYAKIHGTKHRPWLTALLARRPTKVAAIALANKIARMAWAMMARGERYREPVALAA

SEQ ID NO: 420013 - protein, 343 aa, unidentified
MQTVTTIGVDIAKSVFQVHGIDAAGQVVIRRQLRRRHVLTFFQKLPPCLVGIEACASSHYWSRELQVLGHTVRLMPPAYVKPYVKRQKNDATDAEAICEAVSRPNMRFVETKTAEQQSCLMLHRTRHLFIRQQTAVINSIRAQLAELGIVAPVGRRGVDQLLVIVAYPSDKRLPEIARICIAALGAQLQMLKLRILEFDRLIRAWHRSNEVSRRLDRIPGVGPALATALVASIPDPKVFRSGRDFSAWIGLVPKQNSSGGKDRLGNISKRGDRYLRSLFTTGALAVIRYAKIHGTRHRPWLTALLARRPTKVAAIALANKLARMAWAMMARNEDYKEPVALAA

SEQ ID NO: 420014 - protein, 346 aa, unidentified
MQYTAFDAHKHYTWARVERADGTVVRERKILHERGALRQFLTGSEPGSPVAVETVGNWYWIVDEIEAAGCQPQLVHARKAKLMLGTVNKTDRLDARGLVRLQRTGTLPVVWIPPRELRDARELPRTRMVLVAQRTRLKNRIHASLNKYGILLPDVSDLFGQRGRQELRARMSELPPHTGFVVSRLLEQVEGLDREIAGLERRMKALFAVDDAMRFLMTLPGVGFILGTVIGTEIGDVGRFGRHEQLAAYAGTVPRVHESGGRRHYGPVRSDVNRYLKWAFVEAANGVCRTRRLHRERHTSRLYERIARRRGHQKAIGAVARHLAEAAYWMLTKGEPYRDPGLSRGA

SEQ ID NO: 420015 - protein, 412 aa, unidentified
MEVMHHCCAGLDVHKDTVVACVRRTLPDGRVENQVRTFAATTSGLLELGDWLVEEKATIAAMESTGVYWKPVWNLLEGRLDLMLVNARDVKQVPGRKTDVKDCQWIAQLLACGLLKRSFVPPVGQRELRDLTRTRTSLLQDKTRLANRLQKTLEDANIKLGSVASDVLGVSGREMIRALIDGKMSPQQMAELARRQLRLKIPALKDALTGRVSEHHRFMLKFQLDHIEQLEQQIAQLDRRIEEVMTPLDRTALQLLDEIPGIDCRAAQNIIAEIGVDMSRFPSADHLASWAGMCPGNNQSAGKRRSGRMNDGNRWLKGTLNQCAWAASRKKDSYFAAQHRRVASRRGVKRATMAVAHSQLCVCFELLKHGQFYNDLGRDYFERSSEDRTRRHLVKRLEKLGYTVTLDKKDAA

SEQ ID NO: 420016 - protein, 341 aa, unidentified
MNKFIRIAVDLGKRYFQVHGLESEGGRSVSRKLKRSKMLEFFSQIERCRVGMEACGSAHHWARELVAMGHEVVLIPPAYIKPYVKRGKNDAVDAAAICEAMSRPDMRFVPIKSADQQAVLMLHKTREMFVKQRTMSVNALRGHLAEFGIVVAKGIGRVDELLALAESDAALPQVAKSIVAGLAQHLAGLDQSIEAVEDEIARAHGQNPTSCLLDEVPGIGTLIASVIAASVPDPGVFKSGRDFAAWLGLTPRQNSSGGTEKLGAITKQGNRYIRKMLVTGSTSVLRVAGKRKGVLADWINALRARKPERVVAVALANKLARICWAIMTTGESFRVDTYVKA

SEQ ID NO: 420017 - protein, 381 aa, unidentified
MHASNTCPLIADHNGTIFLATELSLKGWLITLRSPERDRISRYRVDGGDHAGLLKRIEEVRDRAARALGQTPAVVSCYEAGYDGFWLHRLLSAAGMTNFVFDAASVPVEQRSRRAKTDRIDGELLLRTLMAHCRGEPRVVRIVQVPSREVEDARRASRERDRLIKEQTGHINRIKGLLRTVGLAAGNPRRGDWRRWLAEQRDPEGRPIGAGLRRELEHEHARLLLVREQLAELEQEPARCEGAAVPMAKQKIQLQRLKSLGAAFAGTLVGEVFYKDFDNRRQVASYFGLAPSPWQSGGMEREQGISKAGNPRARRAAIEAAWLWRRHQPESALSRWFEQRTAGASKRQRRIAIVALARKLMVALWRYLTTGLIPEGAVMKA

SEQ ID NO: 420018 - protein, 327 aa, unidentified
MSIATLGIDISKDKLDVALYQDNAYRLATFANERDGYRRLAKWLKKQKAKRCNVCIEATGRYGEAVAMFMHDRGYPVSVVNPARIKAYGASQLKRNKTDKEDAKVIAHFCATQEPGLWTPPALEIQELQALTRRLEVLKAERTRELNRQKSGIQSKTVLADIKAHIRFLNKQIAAIEQRIHDLIDRHSDLRKQHDLLTSIPGIGDTTAANFIAEVPDVTRFHSANQLAAYAGLTPRKHESGSSIHRRGRLVKTGNKRFRTALFMPALVALRFNPIVQALAQRMEANGKNRMTIVGAAMRKLVHLAYGVLKTGKPFDPDYLVSVQITC

SEQ ID NO: 420019 - protein, 348 aa, unidentified
MDKIIRIGIDTSKSVFVLHGVNTAEQPVLCKKLRRRQMVDFLSKLAPTRIGLEACGAAHHWARDLAALGHEVVLLPPQYVKPYVQRGKNDAADASAICEAMSRPRMRFVPVKTAEQQAALMLMGMRDQLIARRTQLSNMIRGYAAEFGVTAAKGLDKIEPLLARIATDPTVPEFAKDLFATLAEQYAELKPKLHRIEARLLAWHQHNELSRRLAEIPAIGPIGASLLVMKLPNPRTFRTGRDFAAWLGLTPKDHSTAGKQRRGVITRAGDETLRATLVVGATAVIQQVSKGRGKPSPWLTALIKRKPPKLAAVALANKTARIAWKLMVSGERYNRNHGAAASTARIAA

SEQ ID NO: 420020 - protein, 328 aa, unidentified
MFYLGMDVAKAKLDCCLLLDETTGRRKTKVVNNTRSGIADLLDWLAKQQVSSQQLHVVMEATGVYHEQAALTLADAGVAVSIVNPAQAKDFGRGLAVRTKTDGVDSFVLARYGALLKPAAWTPPAPEGRILQALLARREAVAQDLQRERNRQEKAESTDTPERIRQSLANSIEFLVKQLAELQQDIDEHIKRHPNLKDDMALLQSIPAVGPQVGGNLLSVMHCHDFDSAEQLAAYLGLVPVERQSGSSVLGRARLSKAGPARIRALLYMAAIVATRYNPHVKAVYERLLARGKSKMSALGAAMRKLVHLCFGVLKTRRPYQHDYAKIA

SEQ ID NO: 420021 - protein, 343 aa, unidentified
MGDVSTIGLDIAKSVFQIHGVDVDGAVVVRKRISRAKLLEFFAALPACLVGIEACPTAHYWSRQLGVLGHTVRLLPPSYVKAYVKRSKNDANDAAAICEAVTRPSMRFVATKSEEQQSSLMLHRSRQLLVCQRTMLSNAIRGHMAELGIISAKGRNGTAELLKIIADEQDDRIPVAARFSLEVLARQYAAVRAEIAAIEKRIHAWHRSSEESRRLEEIPGVGPIIATALVAEVGDWKVFSSGRSLAAWIGLVPRQHSTGGKERLGRISKQGNRHLRWLLVAGAMAVIRYARQHGTKRPWLARLMDRRPIKIAAVALANKIARMAWAMMVRGERFKEPKLLPAA

SEQ ID NO: 420022 - protein, 605 aa, unidentified
MSTSPPLDRIGVGIDTARYGHRVSFLRPDRLPAAKPLTVLENRAGYQALQARLEQLHRQHPQAHFHIRIDAAGQYATNLETFLRSLRLPMTLSIGEPKRNKDYQKAHFPKRTTDDTESQAMARFAVVEQPAATPALSAPLAGLREVAGRLQAKVKQATQAINRLHNLLARVFPELATLTEDLSAAWVLDLLDHYPSADRIARARLQTLQKIPYISPELAQQVQLAAQQSVASLTGEVTEALLRDLVAQVRHAQQGEKDLRRLLRVAFAALPASGHLQMLTVPGIGTGTAAVLVAKVGSLDHFATAAKFVGYFGVFPEENTSGVDKYGRPVPPGTMCMSRKGNDLVRSYLWNAACSAITHNPAVRALYRRLKARGVRGDVALGHCMRKLLHLAFAVWKTDRPFDPNHYPWEGGPEEPGAPANSAPGVVNPRPDDDEKAVGHTRALPAAEVVTTAGGTVEPPPEPVKGPGEGSGQRPRRQVDFAWVRQQVSMEQVLERLGVLGQLRGRGQQRRGPCPIHRGGADPAPTFSVHLSKKVFQCFQADCGAHGNVLDLWAAVRHLSLYEAAVDLVETFGLGRNREEEPVREPVAGDGARPDPKGGRGQGKG

SEQ ID NO: 420023 - protein, 411 aa, unidentified
MATLFCGIDWGESRHDVAIIDQAGTVLSRTKITADAAGFTELLDLLAAAGDTPDCPIPVALETDRGLLVAALRGTGREVYPLNPLAASRYRARHQVSGAKSDAADAVLLANILRTDRAAHRLLAADTELAQAIRVLARAQQDAVWARQKLGNQIRSLLKDFYPAAFEAFASMPNGGLARPEPRTILAAAPTPAKAARLTRPRLRALLIKAGRQRRIDAEVDRLFMTLRSEQLRQPAIVEEAMGMQLTTLLAQFEAACQASDDLEAAAREHFESHPDAAVISSFPGMGTLVGARVLAEIGDDRKRFADARGLKAFAGSAPITRASGKRTVITYRRIKNNRLASAGSIWALAALKASPGARRHFQTRRERGDWSQQAQRRLFNKFLGQLHHCLQTGTSYDETHAFPPPLDLAA

SEQ ID NO: 420024 - protein, 351 aa, unidentified
MNEITTVGVDLAKELIVVCAGDAVGRTLFFRQFGCAGFAGWMANLPPCTVGMEACSSAHHWARVLAGHGHRPKLMAAEFVKPFRKSQGAKNDRNDAQAILSAVREPNMRFVSVKSLEQQSILACHRMREGWHAERTALLNRTRGLLAEFGIWLARSSAALYRALPRLSQEETVPARVRALLGQAHEHLRQIDAQISHCEAQIRLHAKQSECAQRLTAIIGIGPITASAVVATVANARDFRNGRQMAAWTGLVPRQSSSGGKERLGSITRRGDTYLRALLTQGARSALQAALMRAPEKRSRLEHWMVELRQRVGYHKTLVAIANKHARICWAILAKGEEYDPQAWQRHALAA

SEQ ID NO: 420025 - protein, 404 aa, unidentified
MELSEIGVFVGVDMAKTDHFAQATTTDGVELFARSVLNDQTAIEKLIDDDAAGHGAVAVVIDMTASNAHLLLAVAAGREVPVAYVTGLQMRRAADLYAGSAKTDPRDGWVLADFARRNADRLAWLDVGDELLLELRVLNGRDVDLATDANRIINRTRDALTALSPGLERAVGQRLVQAGARDLIAKWSTPTALRAAGKIKIRNAIKKRSPRLANKIADEIWAALNAQTVVLPAEETWGQVVGELLADLDRIQTQRARLAAQIEEAFLAHPLGQVLVTLCGFGPRTGARTLAEIGDPTRFANGSRLASYAGLSPTDWRSGSSIKGAFQHRGGNHRLKNAMFLAAFVATQHDPDARAYYQRKRAEGKKHNAAVICVARRRCDLIHAMLTTATPYDPSRSKKLAEAA

SEQ ID NO: 420026 - protein, 345 aa, unidentified
MMNEHAVGIDVSKKKLDICVVSANKTKTKVLKNTSAGHGELERWLRQRDLPKTTPVVLEATGPYSERVATMLADAGWAVSVVNPARITGFAQSELSRNKTDKADAKLIARFAQKAELQLWQPPSLAVRELRALVDRLQALIDMRQQELNRLEAIDQGSVTSVGDMVREHIDWLNSEIKNVQSEIDDHIDGNPELKHDAELMESIPGIGKRASAQFLAYIGDVRRFKSAKALAAFIGVTPRQKQSGTSLNGRSSLSRAGHTAARKALFMPGMVAKHHNPVIIAMAQRLEQRGLTPKAIVGASMRKLVHLIYGVLKSGQPFKAEIPMAGLEIQEGIWPWFHWFRVKT

SEQ ID NO: 420027 - protein, 351 aa, unidentified
MAAKKRSVIGGVDTHRDTHHAAVIDSTGGLLGDAEFPATTAGYADLLAWMRSFGRVTAVGVEGTGSYGAGLARYLTGRRIAIREVDRPDRRARRAQGKSDPIDAIAAARATLAGTAMGTPKTRTGPVEAIRALRVARRGAVKARTAALNQMRGLVAAAPEPLRAHLTKLSAAVLVSRCAALTYDPARLHEPEHATAAALSGLARRVTALTDEITTLDRQVTPIVQRAAPRTTALFGVGPEVAAQLLTTAGDNPDRLHSEAALAHLCGAAPIPASSGRVRRHRLHRGGDRGANHALHTIALCRMRYDQRTRAYVHRRITEGLSKQEILRCLKRYIVRDVYTALRADFTALAP

SEQ ID NO: 420028 - protein, 449 aa, unidentified
MKKRGSERKGLPVIHTRAAGIDIGSRFHVVAVPADLAESPVQTFKAFTADLDRMADWLVSLGITTVAMESTGVYWIPVYEILEAHGLQVVLANARDARAVPGRKTDVNDAQWIQRLHSCGLLRASFHPDREIAALRSYLRLRERHLDYAAAHIQHMQKALTHMNVQLHHVVSDITGLTGMRIIRAIVAGERSPSVLAAMSDRRCKAGVDVIEAALVGNYQPEHLFALSQALAMYDAYQAQLVVCDQQIAQTLIKLSQVNAPPTAPLPKPRHNTRQPNALNFDVRTLLYQLVGVDLTQIHGIGPFLALRLVAECGTDLSRWRTCHHFTSWLTLAPGCRISGGKVLSAHTRKTKNRLTAHLRLAAVTVGRTSTALGAFYRRLAARIGKAKAVTATARKIAILFYNAMRFGMSYRDPGEDQYEQRYRERVVKGLHRRAAEFGFALQPVEGVS

SEQ ID NO: 420029 - protein, 346 aa, unidentified
MTIVEATRSVTGGVDTHLDIHVAAALDPLGGLLGVESFATTPTGYRKLLGWMGAFGPVVLVGVEGTGAYGAGLTRYLRRHGIDVVEVDRQNRQARRARGKSDTADAIEAARAAQSGRASGAAKTRDGNVEAIRALVVTKRSARDVRIKTLNQIRHLSFTSPDDLRERLKDVSAKMLAAEASALRPRTGSDPVVFATKLAIQTLGRRLLDLEDETARIDAVLSELVTATAPSLLALHGVGIDTASALLVAAGDNPERLRSEAAWAHMCGVAPIEASSGKVTRYRLNRGGDRHANSALWRIVMVRMVSDPRTRDYVERRTKEGRSKREIIRILKRYVAREVYPYLPRA

SEQ ID NO: 420030 - protein, 351 aa, unidentified
MLSQAMPPKQEADMELYAAIDLHSNNSVVVVTDASDHVVMAKRFRNDLESIVTALRSCAGEVRAVAVESTYNWYWLVDGLRSAGFDVRLVNTAAVKQYDGLKHSDDFSDGKHLAQLLRLGILPQGYICPPELRALRDLMRKRAQLVRQRTANILSIHNLLARNLAKSVRGDDIKRLEDAQIDGLALLEDQKRAIKANAAVLRCLEEQILRLERAILAKGRLREEFHGLKTVSGIGDVLALTIALETGDIHRFASVGKFASYARMVNSRRESNGKNKGIGNRKCGNKHLSWAFIEAAHHAVRYDPSIRRFYQRKRAKSLSVVAIKAVAHKLARACYHVMREGVPYDGTRAFA

SEQ ID NO: 420031 - protein, 320 aa, unidentified
MRNAVGLDISQNTFDAAAIVNGKRKQALFNNSINGFENFKAWLDGFDCDLHICMEATGNYFEDVADYIGQFYTVSVINPYKISEYGKSRFHRTKTDKQDARLIAEYCHTAMPKDLPARQKISIGHYRLKRLLALYEQLKTQKTAQKNRLKVAKDEFVRKIHQVQIQELDQHIQQVEAEIQAITNSNQDLKAVSDRLQTIPAIGKLTAAILTNYLLSGDFKTANQFTAFAGLNPQQKESGTSVKGRSSMTRYGNRRLKSALFMPAMVALNRNYFPDFVKRLKAKNKPKMLILGAIMRKLLVVAYHVYKTQKPYNPERYKTT

SEQ ID NO: 420032 - protein, 334 aa, unidentified
MQNITLIGIDLGKHSFHIHCQDKSGNVLLRKKFTRAKLIEFLAGCASSTVVMEACAGAHFMARRIADLGHEAKLISPQFVRPFVKSNKNDFVDAEAICEAASRPSMRFLQPRTEAQQAMRALHRVRESLVSDKVKTTNQMHAFLLEFGISMPTGVAVVKRLSTVLAENERPPYLAQLLMRLHAHYIYLVGQITELEIALEQELSRDEVGQRLQTIPGIGPITASVLSLQLGDGKQYSCSRDFAASTGLVPRQYSTGGKNTLLGISKHGDKNLRRLLVQCARSFIQRIANQSGRLADWVRALLARKHSSVVCCVLANKLARIAWAITTQQTVFER

SEQ ID NO: 420033 - protein, 454 aa, unidentified
MGNYAGVDWASDKHDVLVADAAGEKLLTATFAHDENGLRALCRALVRLEVELVAIERPDGLLVERLLDAGVRVLALHPNKVAAARDRFRVSGGKSDRFDAFVLCELARTDHHRFRVLEPDGDQTKALRALTRGREDLVGARTALVNQLRAELERFWPGPLHLFSDLHSRISLAFLERHPSPADSRGLGEARLRGFLARERYSGRRTAAELLAKLRAAPTGRVGERELTTRRRLVRGLVAMITTLNEQIADLEREIAVAIREHPDGRIFTSLFKGSVLTAAELLAEMGDCRGRYPTRDTLGGDAGQAAVAIESGKRKAACFRWGCNKRLRNAFHTLADSSRHHNPWAQDLYAQAIARGHDHPRALRTLGRAWSRIVWQCWQDAVPYDPARHRALQRHVTVTIPTSSGPVPDLAATQRMAGVDVTRRAARRAEREALDGKPTSAKPAARPPKRQRG

SEQ ID NO: 420034 - protein, 327 aa, unidentified
MSTSEVAYRWLGIDVSKDTLDVYDPNQPSSTRYENDSEGVGQLWQALQDRSDWAVVCEASGGYETLMATTLAAHGCRVSVVNPRQVRDFAKASGILAKTDAIDARVIARFGGLLQPPATVFASEAAQQLQDWVRRRAHLVEILSGEKNRRQQLKGRNKAVLTDDVEAHIEWLQDRIAQLDQKIEQLSQQQSQWREDKALLTSVKGIGPVIATTLLADLPELGQLSSKQIAALVGLAPFNRDSGRYQGKRTTWGGRATVRSALYLATLVAVRHNSPLRTLYQHFLDQGKEKKVALIACARKLLTCLNAMLKSRTPWQDELVTARYTPT

SEQ ID NO: 420035 - protein, 347 aa, unidentified
MNFYTLPHKHYCGVDLHSRTMYVCIVGRDGAMLLHRNLPCNRDRFLLAIAPYREDLVVAVECVYSWYWLADLCAREGIAFVLGHALYMRLIHGAKAKSDRVDSEKTAVLLRGGLMPRAYAYPADMRATRDLMRRRLLFVRQRGSLLAHIQITHHQYNIDPPGKRITYRSNREGLGDGFEDSSVRHSIAADLALADHYEVTIGELELAVLRQARIHDPNALALLTSVPGIGKVLALTILYEIHDISRFPSVRDFASYSRLVKCERSSAGKSLGSGGNKIGNAHLKWAFSEAAVLFIAKSEQGRTVLTRLERKYGKPKALSVLAHKLGRAVYYMLARKQAFDPQRFATS

SEQ ID NO: 420036 - protein, 354 aa, unidentified
MKRTTKYVALDVHQATTVASVRGESGRVLARTVLPTEEPAIVEFFRGMRGAVHVAFEIGTQSQWLHELVAPLVDRVVVCDPRQVIRQGNKGDRVDADRLSELLRLGGLRAVYAQSAHRADLKELTRTYRTLVEDGTRVMLRIKALFRARGITTPGSAVYHPVKRAHWLAQLTDRGVQFRAEALYAELDVLRELRPKAKAMMVAEARRDPAWPVLQAIPFYGPVRVALLLATMQTPWRFRTKRNLWAYSGLAVQTSSSADHRFIAGQVVRRRRAPLTRGLNRNHNRVLKDVFKGAATAAASQPGPLQEFYAAMVARGMREEMARLTLTRKLAAITLRLWKRREQYDPAKLTTQAS

SEQ ID NO: 420037 - protein, 366 aa, unidentified
MLLKAELSCEADSENDLGGSSETMYYIGLDVHKRTISYCVKDAAGKVHQEGKTGSTRRDLDSWIKTLPQPRMMAMEATIFTGWIYDHLLPHAEKVKVAHPLMLRAIAAAKKKNDRIDAGKIADCLRCDFLPECHMASTEIRDRRRTLRYRGLLVKQMVQMKNRVSGLLMESGVSYNKQRLHKLGYFTDLLSTNEEISQSILPLLKLGREHIVRAQRLDSALIGSLEKDPLLSERLRRLRTIPGVGPITALTWALEIGDYTRFRSVKEAISYCGLCSAEKSSADKVMRMPISKQRNKHIQHVLVEAAKMAPRYSPELALVREREIQRGNKNRATFAVARKMVAYMLAVERRKQDFVPAEEMAGRAVA

SEQ ID NO: 420038 - protein, 450 aa, unidentified
MPKITPQNLTQVNPRAAAVDIGSTMHMAAVNPEQTDMPIRAFGTFTHDLHDMAAWFRSCGVTSVAMESTGVYWIPAFEILEQHGFEVILVNARYAKNVPGRKTDVSDAAWLRQLHFYGLLRGSFRPSAMVATLRAYLRQRERLVEYAAAHIQHMQKALMEMNLQLHHVVSDITGVTGMKIIRAIVSGERNPDVLASLRDVRCHSSTETIRSSLIGNDRDEHVFALSQSLELYDFYQVKMLECDRRLEAAIVTMTSDLEAPLAPLPKIRNRTKQANAPSFDVRAALYGLTRIDLTQIHGLGSSLALKLIGECGTDLREWPTAKHFTSWLCLAPGNKISGGKVLSSRTRRSSSRAAALLRLAATTLGRSDTALGAFYRRLAGRIGKQKAVTATARKIAVLFYNALRFGMVYRDPGAAAYDERHRGRVIANLQRRARSMGYQLELMPVAESVS

SEQ ID NO: 420039 - protein, 350 aa, unidentified
MLHAGLDLSRKRLDVCLLSEHGELVEEFSAPPDADGLRGLVRHVGKHGVPVRGVIESMTGARFVHDTLEQLGWEVLIADAQKVKGLAPLACKTDKIDARVLAVLSERDLLAAIWLPDPRIRSEREQARFRLHLVKHKSMLKHRIHSTMLSFGHPCPVTDLFGVQGRELLERLEIPDPWRQTVDASLQLIDDLERQIAEINRDLKASGAEHPYVPLLLTVPGIGWVLAFTIASEIGDISRFPTAKKLCGYTGLCPRVHQSGEKDRRGPLTKQGPKYLRWAMLESTMHALRHPAYAERYQRNKKRLGKQRGARVAQIDIARKLTEAIWHMLTNNQPFAPTPASGGAAFRLAA

SEQ ID NO: 420040 - protein, 409 aa, unidentified
MPERKVYEMIDKEAPVLAFDVSKGSSHCQGFLSFGKPLGKPVRVRHSKSGMAAAEDISKSLKEKSGESPKVILESTGVYSDPVVHWAESLGLEVFLVSPLESAKVRKSRIRPTKTDALDCGVIAEVAYTRDLRRRSPVSSRYSDLYSVSRRRSAIVRRLVDSKNQYRKNLDAIWPLFDEICDPFSDYALFAVARYRCPERLARSSEGRVASALDKANVRLGPVSRAEIAKRLVSYANDVLGGHRPNDAEVRSLMSSLEDVKDDLESLESITVELVNLAKGLDHFPIVSSIDGCGEVLASLLCAEIGEPSRFSSKEGLVAYAGLDPTILQSGRSDGLHYSITRKGNSSLRGYLFLTVENMLIRKSDNPITRFYLKKKSSGLCHKAAATAACRKLLVCIWGMLRSGTFFEK

SEQ ID NO: 420041 - protein, 354 aa, unidentified
MQQFVGIDWATRRARWCAVTPAGLVIDEGWIPADEDGLALLVGRLGPEALACMEMMSGAAWVRERLQAAGWIVQIADARKAKAVGSLAAKTDKLDARVLAELARRDLVPQVHVPTFADRELKERLGRRMHLVRLRTSAMNRAHGVMSQFGVKLAFNRLRQPDRDDLLTGLGVPDVWRRSIAEAVAVVSALDERLIPLEQELRPIARADPRVQLLVTIPGIGDLLGLTIASEIGDISRFPTARKLVGYSGLTPRVYQSGEKSRTGKLSKTGSTMLRWAAIEAAQQAWRPNNPWHQLYGDVKERCGGKGNPAKAAVARKVLIASWHVLALREPFNPSRPRGAAAPVPANSSCVLAA

SEQ ID NO: 420042 - protein, 496 aa, unidentified
MSTNIFPRRSQALQNVMMDGDARKILVVPIDFAKETHVVQIVRGTGEYLKKRPLNVRNSVAGSKYLIEKVERCCSKYRIGKSRVLFGGEDPPEYVWNFIGSVQAAGYAFVRVNAKEAKKHRTNTRATSDQLALDGIAQVMLLRRAYDLACRDEVYGAMKLAERARRKLKRQETALKNRIHRIVDVLFPGLLKESLSGLLPFGVSCLDLMEAGCSVVRIKRMRTETLTKRLKAGRTHNPGKVAAQLKELAQSALPPAPGIVPYMEKSLATKARHMKVLRESLRIEENEMARCLVQTPGFLLTSIPGLGIVLAGGIIAEYGDTSDWRIPDQMASYAGIVCRQHQTGGPASEPVKGSLPIDANHHLKDQLLQAAYHTGQNRHPAWRRLGLPGEHLLFEHYHAVELREGKSRLSTAKKLLRVASAMVRDERIYLPPSAHNPSAHDAMPARQFTAYLEIVAEMLTTKWKKYDLSGIPEESNRLTRWIQNTNELAEHLQKDK

SEQ ID NO: 420043 - protein, 355 aa, unidentified
MGTISLGVDLAKCIFSVCEMDGIGRVLRRREFRRDAFATYLAQLPAGTVVAMEACSGAHHWARRCREYGLVPRLIAAQFVRPFRKNPVAKNDPNDAEAIATAARQGNMRFVPVKDIDQQARLSWHRVREGYKAEHLAIGNRLRGLLAEFGIVVPNRDAALHRVLGDLDAYSELPGELKELLRSLAEHWMQVHAAMAACDVRIERHARQDPRCVRLRAVVGVGPLTADAMVASIGNAREFKNGRQLAAWLGLVPTQHSSGGHTRLGAISCRGDGYLRTLLIQGARSSLERAKRVGLDKATPEQVWIRSLACRMPFGKVIVAIANKHARQLWAMLAHDLDYDPVACAKHPMQQRAAA

SEQ ID NO: 420044 - protein, 345 aa, unidentified
MREIIRIGVDTSKYIFQLHGVDAAEQPVLRKRLGRRQVLEFFTRLAPTRIGMEACGAAHYWARELIKLGHDVRLMAPQHVKPYVKRNKNDSRDAEGLCEAMSRPTMRFVPVKTAEQQAALMLTGAREQMVARRTQLSNMIRGYAAEFGITAAKGLDKIEPLLAQIAQDENVPALARDLFALQGRQYAQLQTELKTIEARLRAWHRANPDSRRLAEIPGIGPVGAPELVMKTPDPGAFTSARHFAAWIGLTPKDHSTAGKTRLGKITRAGDERLRSILVVGATAVIRQAMCGRGHPSPWLVALLKRKPPKLAAVALANKNARIAWKLMMTGQSYDGARMHAASAAA

SEQ ID NO: 420045 - protein, 416 aa, unidentified
MKKHNNSLKKSEATTKRAKSRGPVQRDTKEVLAELVGKLKEKLDPKKAAAASAGDGHPRGELRPNLDRLTVGVDLGDQWSHYCILGLEGETLAEGQLRTTQEDFATFFQGLNAARVVVEVGTHSAWVQEVMCGCGHEVLVANPRFMEGSKRRKRKNDRIDANKLARLGRVDPESLHPIQHRSREVRQDLVMLRARDALVAARTEIINTTRGLVKSMGTRLPKCSSRSFAQKGEEAVAVEMREALLPLVRLAATLSADIKEYDKKIEELGREKYGHTALLRQVKGVGPITALAYVLTLENPQRFAKSRDVGPYLGLVPKQEDSGESQPQLGISKAGDGMLRKLLVGSAQYILGPFGPDTDIRRYGLRLCERGGKNAKKRAAVAVARKLAVLLHRLWVSGEVYEPLHHAKSVPIAAAA

SEQ ID NO: 420046 - protein, 455 aa, unidentified
MAHNVARKLISSKVDSILPDGQSLSVLSINHQEVLLLSFKILKNNCCGLDVHKTWIYACIGITDPNNRTEYKQARFSSFTKGLNELCDWLVKYNCNDVCMESTGKYWIPVFNILEKNNIWVTLSHPKYTKPQKGNKTDRKDAKWICDLYMCGMVKPSFIPPADIRELRDLVRYRFKLTCMITSEKNRAHNCLTVSNLKLDDVFSDIFGKSSRSITEQILQHPGETFDVTPFVDGRCKTPIEEIQAAVDGAISTEQAVKLRHCLNHIDELELHKAEIEREIFRLSDKYEEVLTLIRTVPGFDKNPLTAIQVLSEIGGDMSVFPTAKNLVSWAGCCPRNDQSNQKIKSTRISRAGSYFKPVLVQIANALIKSKKHPEFTTRYRRIKARRGHKKAIIAICRMILTAIWHILTDLKPYTPVGFLEPRPVKKSKILTASQALNLLKLRGYIIKDDVVAVT

SEQ ID NO: 420047 - protein, 401 aa, unidentified
MDAIEHYDAVDVFIGVDVGKGEHHAVALSRAGKRLFDKALPNDEARLRTLISGLKEHGKLLLVVDQPTTIGALPVTVARAEGILVAYLPGLAMRRIADLHAGEAKTDARDAAIIAEAARSMPHALRSLRLDDEQLAELTMLCGFDDDLADQITQASNRIRGLLTQIHPALERVLGPRLDHPAVLDLLQRHPSPASLAATSEKGLANKLSKLAPRMGKSLAHEICQALSEQTVVVPGTNAATVVLPRLACQLAALRSQRAEVAQEVERLVQAHPLYSVLTSMPGVGVRTAARLLTEVVAKAFASAAHLAAYAGLAPVTRRSGSSIRGEHPSRRGNKVLKRALFLSAFAALRDPVSRAYYARKISQGKRHNQALIALARRRCDVMYAMMRDGTVYCPAPLVNA

SEQ ID NO: 420048 - protein, 346 aa, unidentified
MRYYTQQHPYYCGIDLHARSMYICIVDRDGKTLFHENRAVNADVLQQAIAPYLPDVAISVECIFTWYWIADFCAERDIPFVLGHALYMKAIHGSKTKNDKIDSYKIAMLLKAGMMPIAYVYPANMRSTRDLLRRRMHFMRKRAELLSHIQNTRHQYNLPAFEKAIAYKANRINLLEHFTDPGVQQSIFLDMELINRYDELLQKTELYILKHAKINCAQELFLLQTIPGVGKILAMVILYELHDVNRFERVQNFCSYARLIKPLKESAGKTKGSGNKKMGNAYLKWAFSEAVILLLRESELVKEQHQKLKNRHGKARALAILSHKLGRAVYYMLKNIKAFDVNQFVK

SEQ ID NO: 420049 - protein, 325 aa, unidentified
MYVITDQEDQQLFQRRLPNQLPVVLESLEPYRPRLKVVVVESTYNWYWLVDGLLDRKYPVVLANPGAIDQYDGIKEADDLTDAAFLARLARLGILPTGYIYPKEDRPVRDLLRRRSLVVRQRTSMILSLQNMALRQTGQNFGWRALRRLSDQERAEVLGDHDCLAFVTTEQLDLIELLSEKIKRFEAKVLEHAQVRPAYECLLTLPGVGVILALTIMLETGDIGRFATVGDYTSYRRCVRATHTSNGKSKGKNNGKNGNAYLAWAFVEAVHHALRTCPPARSFYDTKVAKRNGALATKALAAKWSKAAYYMIKRQEPFDLARVFG

SEQ ID NO: 420050 - protein, 351 aa, unidentified
MWIIGCDYHPSMQDIAVADTETGEYLERTLNHSTGEAEKFYRDLKQKAVTVRVGMEATGHGRWFERLMAELGFELWIGDAAAIKAARVRKQKTDREDARLLLRLLSENRFPRIWVPDPGNRDLRQLLWHRHRLVQMRTRVMNQLQAIAMNEGVRLRKKLWSESGRAKLESLQLASWAARRRKGLLELLDCLTLKIEELNVAVEQEAQKRPEVRRLMTHPGVGPVTGLAFVLVIGTPQRFRCGKQIGSYLGLIPCEDSSAGRQRLGHISKQGNSLLRFLLVEAAQAAVRCDADWKRRYLHLAMRREKRIAKVAMARRLGVQLYWMWRKGWDYQQVLQFGSHAGELVTGHGVK

SEQ ID NO: 420051 - protein, 348 aa, unidentified
MITIARIGIDTSKSVFQLHGVDEREQVLLQRKLRRREFLTVVGKLEPTSIGLEACGASHYWARELQALGHRVMLIPPQYVKPYVGRNKNDKVDAEAICEAMSRPKVQQRLVPAKSVEQSAGQMLLGVRDSLIRRRTQLSNAIRGHAAEFGLVAAKGLDKVAPLLARIAAEKAVPALAKELFAVLGQEFDELGPRIAQIDKKLMAFHRSNELCRRLMEVPTIGPIGACLLVTKIVNPRAFRSGRRCAAWLGLTPKDHSTAGKQKLGGITRAGDETLRATLVSGATAYIRHVRSGRSTPSPWMAELLKRKPPKLAAVALANKTARIAWKLMTSGERYDPARRAAREALAA

SEQ ID NO: 420052 - protein, 358 aa, unidentified
MKYVGVDVHKKVCQAAIVGESGEVLDEFRFRNSREGIEGFALRLKGFRDGVRVAVESTANLWIPLYDHLEGEGVQVVLSNPAKTRLIAEAKVKTDRVDARTLAQLLRSDMLPLCWVPSGEQRDKRGFIRHRLGLVKTRTEVKNRIHALLEKHGLRCPSSTLFSKKGVKWLRGLDLGFMDDAVLKSDLALLETLDGQIALMEAKIATVAVNDERVKLLMTMPGLSYFAASLLVAEICDVNRFSSDRKLVAWAGLAPGIRQSGEKVRAGGITRQGNKLVRWVMVQAAQTARLHDERFRIFYERYVKRRSSQKAVVAVAHEMLRIVWFMLKRREPYRGERPDLSRRKLKRLERCALVGLRA

SEQ ID NO: 420053 - protein, 468 aa, unidentified
MERKGGEGSAAAAVPGRSKSGRGRRKRARKASFELAHPDCAGIDVGSSSHFVAVPPDRNAQPVREFGSFTDDLCRLADWLSACGIKTVVMESTGVYWIALYELLESRGFAVYLVNARHVKNVSGRKSDVLDCQWLRELMSFGLLRGAFRPSQEVCALRAVMRQRDTLLAGQARHVQHMQKALAQMNIQLANVISDVVGETGQRIVRAIVAGERDRSRLAALRSPRMHASEQEIARALEGTWRAEHLFALKQAVALFDAYAQMLAECDRELERMLAELARHDGDPGKPKRRGRQKNAPRFDVRAGLFRACGVDLTRIDGIDTTTALKVVSETGPDLGRFPTQKHFTSWLNLCPNTRITGGKRLKGRERNRCNRAGQALRQAAVGLSTSKSALGAYFRRMAGRLGKGIAIKATAHKLARLIYAALTKGMVYVDRGMAAEEERYRLRALQHLAKRAAALGYSLSPTLREAN

SEQ ID NO: 420054 - protein, 414 aa, unidentified
MTEEEIISWFAGVDWGSERHQVCLLDARGTTVGEREFPHSGEGLAELGDWLLSMASAASTVAVAIEVPHGPVVDALIDRGFVVYAINPKQLDRLRDRFSVAGAKDDRRDAYVQADSLRTDRRLFRRLQVADPRLIELRAWSRLAEELRAERVRLSNRVRHQLWRYYPQMLKLTDDLAAPWFLELWAIASTPAKAGRLRKSTVERLLKQHRIRRMDAETVLRILREPAIKVAEGVAEAASIHIRSLVARLRIVNRELREAERKLDELCTAVSEIEQTSGESLQRRDVAILRSMPGIGRINLGTLLSEASGPLSRRDYEGLRTLSGAAPVTKRSGKSLIVVRRYAAHVRLRDTVYHWARVATQRDPKCRARYTALRKRGHSHGRALRGVADRLLALACVLLQRQTLFDPYFGGSTA

SEQ ID NO: 420055 - protein, 395 aa, unidentified
MKMNGKITGIGLDSHRTFSSVTARDAQGKIVWRKRLEHADRGPLREELRRWPEGTPVVLEGTFGWGWLSDELSAAGLEPHLASSKKVAAWRDARGLAKSNRTDADLLSELWSQQPRWWEVWLVPPEVRSQREWLRYRMTLVRLQTGLKNRIHAILHRHGMVHGETDLFGTSGRRFLNLLVASKDATLPESARAMLKGYLQLLDQLRRQIANVTRELRGQITRTPAGERLRTIPGIDYILGYTILAEVGRIERFRSAKHLASYSLMAPRSYDSGEDDGEAPKGRHVGHAGRRTLKWAWIEAAHGAVRSGGRFREIFDRRTDGGKRDRNRGYIAVGHELCRIAYTVWKKEVDYSEIPPLRPGRGKRRRGLRRAMSVTPGRSRPGTGQPEHPMVAVLT

SEQ ID NO: 420056 - protein, 358 aa, unidentified
MQTKVKKLDFRGQNIYVGIDVHKKSWSVSVLSENAVLKKFSQDPKPEALHKFLTTNYPGAKYHSVYEAGFCGFWIHHRLTELGIDNIVVNPADVPTMSKEKLRKTDAVDSGKLARELRSGTLRGIYVPRTELLEIRSLIRLRNSIVKDSTREKNRIKSMLHFHGVHIPEEFASTSSHWSKRFVHWLRELELSTEYGRKTLDLHIEQFTRLREMLLQETRFIRQLSRSEPFAEPLRLLMTVPGIGITTGISFVTEIDDVNRFKNAYHLASYVGLIPMCHSSGEKDGTGDITVRKQATLRWAIIEAAWAAIRKDPAMTMAYEEYCKRMPCSKAIVKIARKLVNRIYFVLKRRQEYVPCVV

SEQ ID NO: 420057 - protein, 408 aa, unidentified
MNNVVGIDVSKGKSMVSVLRPFGEVVAKPFSVGHTGSELKELADYLKSLDGETRVVMEHTGRYYEPVARFLHDEGVFVSAVNPKLIKDYGNNTLRKVKTDKADSRKIARYGIDNWAELRQHTPMDTIRMQLKTLNRQQSLYSKTKTMMKNNLIALLDQTYPGVNALFDSPVREDGSQKWVDFATTFWHVDCVRNMSLTAFAERYRKWCKRHGYNFSQSKAVEVHAGAQDLIAMLPRDALTKTMVRQAIDALNAISASMERLKAEMQALAAQLPEYPVVMAMHGVGDSLGPQLMAELGDVTRFTHRNAITAFAGVDPGADQSGTHEAKSTRVSKSGPPELRRALFLVMDCLLKTQPQDDPVYRFMDKKRAEGKPYLVYMTAGANKFLRIYYGRVKDGRVKEYLASLEGN

SEQ ID NO: 420058 - protein, 419 aa, unidentified
MEKSKTKKLKTVNEKTMIVAIDIGKSIHHGYFRGSDGQDIKAFPFYNSQKSYEEFWVKVLHFKQQKNLEEVVVGFESTGPYAEPLMNFLAKKPIRLVQVNPMHTKRLKELTGNSPNKTDSKDPRVIADVIFLGHALTVIVPAGPAAELRRLTQARQRASKNRTAMVNQLHHLVFVVFPEFMQIIKKITSKSSLYLLKNHPFPEDIVDLGFERLQAFLKKISFGQLKQCQVKALFEAAGNTAGIDEGKESILTEIRQLVSCIERESQFMDRLEEQMSQYLKKIPYSQSILSIKGIGEVTVAGLIGEVGDFRQFTTISEIMKLAGLDLYEISSGKHRGQRHISKRGRSYLRKLLFFVAINTIRTNGIMHENYLRMLNRGMPKVKAVVAITRKLLRIIFALVRNHTTYRENYEQQYHGKLAA

SEQ ID NO: 420059 - protein, 345 aa, unidentified
MTVYIGVDFHARAQTISYLTTEDGEIRRAQLDHGQPQEVRKFYEQFAGQQVIVGFESSGYAAWFEELLEELGYEIWIGHATAIRLFARRRQKNDRRDADLILDLLWRGDFPRIHRYSPQSRAVLQQLRYRQRLVKMRTMVVNSLVFLASSRGVGLRTQLKSRRGIERLRQIALPQPLIDQRDEMCQLLQELKTKTERVERWLEAKADSDVRVQRLRTHYGIGPLTGLCLVHTLECVERFANARKVTAYVGFDPVEDSSGERRRIGSISKQGSRLLRFYLVEAGQIAIRKDPDLARVYHRVRLRRGHAKAKVAVGRRLLVRAFIMLRDEIDYAEFQRRGVAARSSR

SEQ ID NO: 420060 - protein, 424 aa, unidentified
MEVDGVAVGLANSKPAVQRMDQGTALPGEPSMLYIGIDLHGKQLTVCIRDEGGNILVQRQVSTRPAKVEEFVEQVQQLGAGKYVVVLEVCGFHDWLVRRLRADARCQEVVLIQPEETSRKKTDRRDANRLSEVLWVNRDRLLAGTRVQGLRRVYIPTEAERQDRQLTSVRQRLGVQRTRTINRIRQILRRNNLEWERPTKGFQTKKVKAWLKTLTVDETDRLELEQLLEQWAMWDRQLEALEERIATRYEQNAAAKLAATIVGVSCYMALAMVSRIGDIRRFPSARSLANYFGLTPSSRSSGEKACLGSITKQGSRIVRFLLGQLVLHVLRKDAKLRRWYKGIKQRRGAKIARVAVMRRLAVILWHMLSKQEAYVYGGVPERLRARLEDPTEACTLPERAAVLAAFGRPRGSGEEVPVPLLCSE

SEQ ID NO: 420061 - protein, 412 aa, unidentified
MAVFCGIDWSEQHHDVAIVDVNGMLVARRRISDDVAGFAELVQLLAEAGDNATAPIPVAIETSRGLLVACLRATGRAVFAINPMAVARYRDRYVVSGKKSDHADAMVLANILRTDLAVHRPLPTDSELAQAVAVLARAQQDAVWDRTQAHNKLRSLLREYYPGFLAAFRDARGGIMRPEARMVLSDAPTPAQAAALNVERLAELLRQAGRQRGVEAEARRLHGFFTAEYMRQPALVEQALGRQASALLRALDAACVSAEDLATAAEQAFDQHPDAEIITSFAGIGRLVGARVLAEISDDRSRFADARAVKSYAGSAPVTRASGKSLLVMHRRIKNQRLATAGYHWAFSALTASPGARAHYQRRRTAGDNHNAALRNLFNRLLGCLHHCIKTGRHYRESVAFPDLQPLLASAA

SEQ ID NO: 420062 - protein, 350 aa, unidentified
MDKYIGFDIDCKKTVICIVQKDKKDIYATIGSDVESMKKYLKEQKKDGSKVHLVFEVSGQAGFIYDYLEGVVDTITVANPSKMTWIFRTAKKNDRIDARKMAVLLSINEVPSVYMPSKEVRQWRETILHRKKIVDKVVRAKNNIRATIKGHGLKPVDSGSWWKKSNVFWMRCLSEDAGKLWHIQLSNLLDEFDLLQNQLKRLTDYLDIYLSSKPASRILQSIPGIGPRTTEAILAYTDDIERFSNYKKYCSYFGLVPKLDESGATRRLGHITKQGPSVVRWAICESSWMAIRKSSSLRAYFDRISCSQRVRRKIAIVAVARKLLCIIRAMLLSGELFNEELVAETLELAA

SEQ ID NO: 420063 - protein, 413 aa, unidentified
MTTNSQPQSITSNVCLHMSIELAATSWKLGFADQLGRNPRVRSIAAGDLLKLRKEIAAAKKVLGLDPEAPVISCYEAGRDGFWVHRCLVTMGIESHIVDPASIQVTRKKRRAKTDRIDAQQIVNALMRFKAGDRFACRMIRIPDAEAEDARNINREMRTIKTERTAHTNRIKGLLVTQGIPKVTIDGSFPRRLQRMQTAEGKPLGENLREQLLREFDRLALVTAQIRTLQMQQAEMMREAAKEVKESEVERTSAKCAVTAEFLARLGGIGPVTAWTLSSEVFSWRDIENRRQLGALAGLTPTPNASGDEEKEQGISKSGRGELRVLLIEVAWGWLMHQPESELAKWYHKRFNDGTKRNRKIGIVALARKLLVALGKFIRYGEIPAGAKLKSELKFNYLRLLKIPGTELDCLAV

SEQ ID NO: 420064 - protein, 378 aa, unidentified
MGKHKLAFVAFDSAKEKHAVAIADDGRDGEVRYLGEIDNSPDAVRKLVAKLSRQYERLHLCYEAGPTGYGLHRQLTDLGHVCDVIAPTMIPKRSGDRVKTNRRDSVTLVKLLRAGELRAIWVPDTVHEAVRDLTRAREVAMIDLKKKRQQLLSFLLRHCRIFPGGKNWTKMFERWLAKQTFNHPAQQIVFQDHLEVINAAQVRLAALEQQLREIVPTWTMAPVVAAYQALRGVSFLVAVTFVAEVGDVRRFATPQQLMAFLGLVPSERTTGDTVRRGSITKTSNHRARRVLIEGAWTYRFSARVGETLRGRLKDLPLSIRSIAWKAQVRLCARYRRLIANGKKTPVATTAIARELAAFLWAIGQQVAPRQQPQQQGSW

SEQ ID NO: 420065 - protein, 338 aa, unidentified
MSLYAAIDLHSTNSVLAVMDQAGKPLLQCRRPNELSVLLSDLAPFHDELAGIAVESTYNWYWLVDGLMDGGYAVRLVNTAAVPQYAGLKHGNDHTDALHLAQLMRLGLLPEGYIYPREQRATRDLLRRRFALVRQAVRLMLSIQSSVCRATGRVLSGNGLKQITGPQLEALLPDATTRYGVLVQFKLWLTLQEQIAGLEHWIQRDLARPDLLARLQSVPGIGPILGTTILLETGDVARFASVGDYASYCRMVESVRLSNGKVKGHGNRKCGNRYLCWAYIEAANFAIRHHAAIRRWYERKRAKKHRVVALKAVAHKLARACFHMLHEGTAFDVRRAFG

SEQ ID NO: 420066 - protein, 370 aa, unidentified
MSVRRILAKTIDTDLEYEAIGIDLAKNCVSAALLTTDGEVVCIDRLDYSELEKSAQALSSTTFAMEPCTEMNYLVQKLEAWGHRCLVIGGKNVQNYVENHFSGQKTDLNDAQALAFLAQDTQLRTIKAKDVEQQKYASLTTLREQYIKQYRQTIVSLKGICQAWGLNISKGISGKARLKDLIENHAAFPEELKESLVDMVTHAQTAQKALNKITKTLEELAKSDKVCQLIQTIPGLGSICSCRLRATVGDIKRFKSPKDFPAYYGLVPRSIATGHNERKGKITHRGDRTMRSLMVQAAGSLVNMATKGKLKSKQLTKWILKKQKEKMPWGKLVCAVAAKLLRIVRAVLISNKPYNSKIAGVAKCSLPKGT

SEQ ID NO: 420067 - protein, 378 aa, unidentified
MESVRFVGLDVHAATIAVAVAEPGGEVRSLGTIANRPEAVRKLVKKLGPAEQLRVCYEAGPCGYVLYWQCTELGVPCVVVAPTLTPVKAGDRVKTDRRDAEKLARSHRAGELTAVWVPDPAVEALRDLVRTRVAAKRDQLRARQRLAKLLLRHGRRPPTRTKAWGTAHLAWIKTVRFEHPDREAAYLDLLHEVEHAQARIPRLERAIEAAIAAAPAPVRDVIAGLQALRGVAQLTAVTLVTEIGQFTRFPHPSALMSYGGIVPREHSSGTRVWRGGITKTGNGYVRAILVEASWAYRHRPRIGYALHKRQEALPERVKEIAWTAQTRLYQRYRHLLGRGVMRQKVVTALARELLGFAWAIGVTVEQCQGLPAPAPLPV

SEQ ID NO: 420068 - protein, 383 aa, unidentified
MKKTQETLKKNVSTKAAVLHVAFELSNSKWKLGFSDGNKMRFKSVDARNLEQLEEEIEKAKSRFRLDNDVRIVSCYEAGRDGFWLHRYLLNQEVENVVVDSSSIEVNRRKRRAKTDRIDARKLLNMLMRYHGGERKLWSVVRVPSVEAEDGRQLSRELESLNKERTRHRSRIRGLLILEGLEVKNPSGKKFLEELDSLCTWDGKQLPGDFKARIVREYERLRMVEEQMGILRKEREIRVGSAETLSMRKVAQLRTLYGIGVTSSWDFVMEMFGWREFRNRREVGAFAGLTPTPYDSGGSQREQGISKAGRGRIRALNIQIAWGWLRFQPQSKLSQWYQERFAGGGSRMRRIGIVAVARKLLIDLWRYLEYGVVPEGVRLRLVK

SEQ ID NO: 420069 - protein, 387 aa, unidentified
MQTDNHTMSSTTLYLGLDVHKDSITLAIAEPGSKGEIRLFGTITNDLQALEKAFSRIRKAHPGAQLETAYEAGPCGFGIARRLQQLKVPCLVAAPSLIPRQPGAPFKTDKRDARSLARLLRAGELTAVYVPEPTDEAIRDLCRARTDAVDDLRRCRHRLKGFLLRHDYRYHGKANWSQPHMRYLRELVLPHLAMKTILEEYLQGIDAAHARVERIEASMRSLLETWRLKPAVEALMAFRGFQLVAAMVTVSELGDIHRFDHPRQLMTYLGLVPTESSSGPRQRQGAISRCGNSHQRWILTECAEHYALPPKISKELSRRQEGQPESVRALSWKAQHRLHLRFMRLLARRLQRNKAKIAIARELCGFIWALLRAQECYRQPLKAQASQ

SEQ ID NO: 420070 - protein, 422 aa, unidentified
MAADEQIQAWIGIDWANDKHDMSLYDVATGRRQHLEVEQSPEALAEWIGQLRLRYGNRGKVAVILEQGKGPLLNVLMGCEFLVLYVINPKSLSRYREAFYGSGAKSDPVDAELMGEMVRQNPDRFRAWRADDAQTRSLRLMTEGRRNLVNQATALTNQLTALLKSYYPQALLWSGALDTQWACDFLEQWPTLQALQLSSRRQILRFYEKHPRPYLDLEQQLQQFHQALPLTADEAVLEYSTLMVQALIPQLRALLHSIEEFDRKIAEVFRKHPDRPIFESFPGAGAALAPRLLAAFGADRDRYQAASEMQQFSGIAPVTEKSGKQHWVHWRMACPKFIRQTFHEFADHSRRWCGWAKAYYQIQIERGKKHNAAVRSLAYKWIRLLFRCWKQRLPYQEEIYLRSLAKQQSPLVQKIAIAVEKL

SEQ ID NO: 420071 - protein, 376 aa, unidentified
MENDSTLFVGLDVHKDSITVAYALGSGEVEVLGKIGSSQSDIDRLCKRLKSKAPHVRVVYEAGPCGYGLQRHLRAKGFGCMVCAPSLMPRKPGDRVKTDRRDAIKLTRLLRAGDLSAVHVPSVEDEAFRDLARAWSRCRSDLKRARQQLKAFLLSHGVRYTGTANWGPAHRRWLSALSLHNKWQDLAFNELRRTIEDRLAQCQRLEDALREAVQRWHFYPAVLAVQAMRGIAFTAAIGLVSELGDLTRFAHPRQLMAWLGVTPSEYSSGSKRRQGSITKTGNSYARKLLVESAWQYRHAAKVSRDIQRRQDGLPKAIIDRAWDAQLRLCRRFRKLLARGKERNVAAIAVARELAGFIWDIGRLGMAQASPAPESTA

SEQ ID NO: 420072 - protein, 348 aa, unidentified
MWYVGIDLHGYYMITAASKQGEQMRPTRIENQDSEKIRDYFTSLGEFKAVIEASGTYMWLYDMLKELGGEVVIAHPLKLKAIASAKVKTDKIDSKMLAKLLEGDLIPCSYVPAEKYRSLRDITRYRCRMVRQRTLMRNRLSYILLKKNVVSPYKNKFCKSGEKWFREQSWNETDNFQRDQLLDILEILEHKIEATDKKLLEISENFPEVAVLQELGGIGLYTALVIIGEIAEPERFRSGDQVAGYTGLCARVSQSGKHCYNGHITREGSAWLRWILVEAALKLVRKDEWFKRFYQRIRKRRGKHVARVAAARKLVRICWHRLIKYRNNVSDFTPGWQRTYVMGAVSAR

SEQ ID NO: 420073 - protein, 314 aa, unidentified
MAERVYVGIDVSKERLDIATTDGQSWFCSNQEQDFKELIERFKAGSTALIVLEASGGYEGPVVASLHAAGLPVVVVNPKQVRAFAKAIGRKAKNDRIDAEVLALFAQKIQPELRPLKDEQTQELNALLSRRRQLMDMLVAERQRLRVAAANVRGDIREHIHFLVKRLKETDRGLDQLIRQTPLWREREELFKPVKGVGPQLLRALCACLQELGKLNRREIAALSGVAPFDCDSGKFRGQRHCYGGRKAVRNVLYMATMSATRYNPVIRAFYQRLLAAGKPKKVALVACMRKLLTILNAMARDRTAWNEQLHQTA

SEQ ID NO: 420074 - protein, 344 aa, unidentified
MEHTTIAVDVAKSVFQVAVSSRRGSVDIERRLSRDRFLTFFAQQPPANVLLEACGSAHHWARQLQELGHTVRLLPAHDVHRYVRRNKTDRTDAKALLEADHNEDIHAVPVKTVEAQAIASLHRIRSAWVATRTARLNGLRGLLREFGISIPLGAHHVVPRVRELLGEPTPLPDLVRTALANACDEIACLEANMKAVEHQLLTIGRTMSDVALLQTVPGIGLLTATALVALVNDIRRFRSGRRFASFLGLTPKENSTACHRRLGAISKQGDVYLRMLLIHGARTVLWHARAKVHPTALQRWAVHTAQHRGPNVAAVAVANKLARIVWAVWARQRPYEAEPRTVGA

SEQ ID NO: 420075 - protein, 441 aa, unidentified
MAVEFVGGPEQAEFMARVRGLDPGQVLLVPVDVGKSEAMAMVTDLRGEVVMSPFKFALTASGAKVLSDRTVSASVSRSAALCRVGVETAGHYHRPLVEHLVADHVEVVELNSAAVKAARGQQLRARQKTDERDLAAIADLLIRGAGRPPQQRSAALLEQAAWVGHRRRKVDMGRRLRQQIHAQLDLVFPGLGACFGDIFATRSGRMILTEFCNPERVVRLGPNRLAGCARTRGIRMTVAKSELIVACARDALTPQSSQRDLVEQHLAADLSMFLTVEGEVLRCERELAALIASTPARVLTSLPGFGVVRASAYGAAIGDHTRFTDADSAYAFAGLSPASYESAGRARPGLGITKSGSVTLHQAILELGKGMGMHQPDFADYRARLISRGKPRPIAAVAVAHRAHRVAFALMRHGVAFDPAHPIPTSAGRPVTTSQPTPETT

SEQ ID NO: 420076 - protein, 346 aa, unidentified
MDKVARVGIDLAKRVFHLTAVDADGAVLERRKLRRAGLQSYLALLPAGCTVAMEACGGAHHWGRLAARQRHRVVLMSPQFVAPYVKGNKNDVNDADAIAEASARPGMRFVGLKSAAREHVQQLHRVRQMAVRNRTAQCNQIHGLLLEYGIESPKGVAALRRRLPEVLEDAENELPVAARALFRELGEELRRLDERVGEYDAQLAAVARDDPACRRLMTIPGIGVLTATALAAAAGDAAEFKDGRQMSAWLGLVPRQRTTGGRPTLLGISKRGDRYLRTLLIHGARAALRTAPQRPDDGRSRWALATQARRGRNVAAVALANKNARTAWAVLARGTAYDAGLAGDAA

SEQ ID NO: 420077 - protein, 406 aa, unidentified
MAVVIGVDPHKGSHTAVAVDQAEKVLGELRVRSSPGQVDRLSSWAAQWPERTWAVEGAGGLGYLLAQQLLSAGETVVDVQPKLGSRVRLLATGNVNKNDPNDARSVAIAALRSKGLRPVAAEDHAAVLKLWSKRRRDLGSLRTQVVCRLHSVLCDLVPGGHPRKEMSADQAARLLSELEPLGAVALARYELAMDFLADLRRTDAQMREAKKRLEVAVKASGTTVTEVFGVGPYVAATVVGYVVDVSRFADRDRFAAYNGTAPIEVSSGGHKVFRLSRRGNRRLNHAVHMAAVTQVAYRHSEGRAYYDRKLREGKTKKEALRCLKRRISDAIFAHLVADAKRKAEAAKAGPGGQRGNGSVSSVAGSHPERQLFGQATPRPVPTIRPTPTTRGPRAQEPVRKKPRKAS

SEQ ID NO: 420078 - protein, 365 aa, unidentified
MISDNYTTIGMDVSDKKIQVCVMTKSGVNPKIVMETTIPTTKDGLQKFLSTQDKYSPVVFETGTHCRWMHEVAKEMGFKVYVANPCRLKMITESKTKNDVNDARMLARIALSDPGLLHPVKLRDAEHQKMLNLHEMRNLLVKQRTAAIVQMRFIAKSMGFRIPKTSTKCFHKLDTSLWPKEFRNIAWPMLKNLEQLDITIKTYEKQIRELAATPTFKAQVDRLMEIHYVGLFAATGFVAVTGGDMNKFEQPRDIGPWLGLSPKQDQSGDIDKQCHITKAGSPFMRRLLVECAQMILRDGAIETDLKIKGMRICARGAKIAKRKAITAVARSLAVLMTAMLKKMDTPYVPLSEANGKELMAMLISA

SEQ ID NO: 420079 - protein, 389 aa, unidentified
MNFIGADLHKKSITLCVMDEKLKVLARKTVGCDQTDQIVEFFQQFRPFKLAVEATASYLWFVELVRPLAEEIVLANPSKLRVIAESIKKTDRLDAQILAEFLARDQIPRAYMPTPRQREHRTLIRHRQYVRERMSSVRCKIRHILADYNADRKDLFSAKAGWNYIKGIKLNDAYAFVIKQLWTEWEEHQVRLLKLTGKIKAFVAKAPRKEAEARQIVKSAPGVGEVTTEVVLSEIGDVSRFRNAKTISAYAGLVPRVRQTGNKKSLDLPITKQGSALLRWALVQAAWRLVGTSPQWSAFFGRLRKRKGSKRAIVAVARKLLCVLYAMLKTSTPYRIIASEPRPPEPAKATRLRLVRKSTTETSPAAETKVPSTRKRPARASTAKSTVTT

SEQ ID NO: 420080 - protein, 340 aa, unidentified
MKKDVKFYLGMDVSKLWVDIALMCVVDHNKQPLAGERFDNNAAGMKALDKWLKKHKVCFNENSLLVIENTGVYHRLVWEYCSTHNLPLHIGNATHIKYSFGIARGKNDKIDSERLCAYAFKNADELKATPVLNPVFLKLKDMMTARSRLLAQLNSIKVYLREMKLSNSKETQAIIEEAHKAALEGIKKSLKAVEKQIHQMVQQDAAIKNNYKLLLSVPGIGHLTAVYIICCTNNFICKITGKQLASYAGVAPFSNTSGTSIKGRDKVHKMANKDLKKLFHMGAMSAITYYPEFRDYYERKVKEGKHEQSVINAVRSKIALRAVAVINNQEKYVDKYKKTA

SEQ ID NO: 420081 - protein, 340 aa, unidentified
MTVIIGIDPHKASHTAVAIDGDEHSLAEIKVRATCQQTERLLAWAKPLGPRTWAVESAGGMGYLLSQQLVSAGEDVLDVPATLASRIRVLGTGRSNKNDPNDALSVAIAALRSPGLRPVRVADHGELLRLLAKRNHEIGRLRNIIVSRLHAALQNLSPGGIAKELNASDAIALLGAYEPMTPVEHTRYELALELLEDVKRLDVQLKASHKRIKTAVQASGTTLTDLYGVGPILAAELIGYSGDIRRFTSRDQFASYAGVAPVELSSGGRTVHRLSRRGNRQLNHAIHMVAICQIRQTNSEGRAYFEKKVAEGKTKREAIRSLKRHIANAVYRQLLLDATK

SEQ ID NO: 420082 - protein, 465 aa, unidentified
MSKKSKKPRKPLTEVKPVDALAQINLNAAGLDIGAEEIYVCVPADRDAQFVRAFGTFTRDLHTLAEWLTNCGIETVAMESTGVYWIPVYEILESRGFEVFLVNARHLKNVPGKKTDVLDCQWIQQLHSYGLLRASFRPPEEICALRALVRHRDTLVRYRSAHIQHMQKALQQMNVQLTQAVSDITGVTGLSIIRAIVSGEHNPHVLARLRNPQCKRSEAEIAAALQGNYRFEHLFVLKQALAQYDFYDQQIRECDAQIETIYASLPLAEHDDDDVPPPPKPTRRTPRKNQAHFDLATSLYRMVGVDLTAIDGIDALIAQKIIAEVGLDMSRWPTVKHFASWLGLSPHNKKSGGKVLSRRTKKTKNRANTAFRIAAQSLSRSNSALGGFYRRMRAKLGKAQAIVATAHKLARIVYYMLKYRQPYQDPGQDYYEQQWRDRAIRNLKRKAASLGFELASATPVTGDVS

SEQ ID NO: 420083 - protein, 374 aa, unidentified
MQRPDRKLSALSLVRVLVHTTIDQFYKLNSYKGMKNLFIGVDFSKEKVDVAIIFADGLTETAPRVFNEFKTTVSGYKQLVKWVEQNSCGIDSSLWLFCGENTGDYSKGLCNFLYGKGYDMWLENAKSIKDASGLRRLKSDRADASMIAEYAMRNYDKAVMYEPLSESLAQLRELFLYRQMVVRHRCSFQVRRGEKRLTMEKSPVKTMISQSERHIVSELNKEVEKIDKRIAELIKSDEELTEVFTIVTSVPGIGTQNAVCLMVYTDNFRRFNYDSRKISCYYGIAPFGKDSGTSVHSDPHVHYMANRQIKAMLTQAALAAVNFNPVMARYYMRLVERGKKKQVALNNVKNKLVHLVTAMVRNRQTFTPEYKISA

SEQ ID NO: 420084 - protein, 359 aa, unidentified
MTAMSIVAHSHAFVVGVDTHARNHVYAIITATTGELVDTRDFPTTGAGINRATAWVARRTGADLAVLWVIEGAASYGAILAGTVVTKGYSVVEAARMDAKSHHGVGKSDVLDAQRIARAVLPMQEKQLRRPRLNEGVRAALRVVVSARHSMTGERTRAVNGLTALVRVNELGLDARKALTGAQIAEVSRWREQDEELALSVARTEAVRLAKRIGDLDKDVAGNTQQITDLVKVSEAAPLLDVKGFGAITAATCLTVWSHQGRVHSEAAYASLAGVNPIPASSGNTVRHRLNRGGDRSLNSVLHMVAITRMTHDEETREYVQKREAEGLSTKEIRRCIKRYLARRVYRIFNSQAEALIAG

SEQ ID NO: 420085 - protein, 379 aa, unidentified
MFTKPSIRTIGIDVHKDSYTLSTYCPETDSHIGEITTSSCSKMVINYVKKLKKESGPNVTVISAYEAGPTGFGLQRDLLKVGIECKVMAPTSIYEKRGGNRVKTDRGDARKLSKALHWGAFKEVVALSPEDEATRDYIRMRDDRRGALKKAKQQLLSFLLRKGKHYPEKGSKWTLKYRSWLRTITFESPVDQLTYDEYHAEVYRLEEAVERFDQQIEEYSQDDRYKEKVSRLRCFGGIDTHIAMALVCEVGDFSRFSTAKEFSSFLGLCPGQQSSGGRTRMTGITKAGNSNLRRLLTESANSMARTTIFAKSKRLKARQAGNPAAVIRYADRGTSRVRYKYHKMVREGKNANLAKAACAREIACFVWGMMTDNIRGEIF

SEQ ID NO: 420086 - protein, 388 aa, unidentified
MDVLYQSCAGIDVHQATLVVCILHGPLTSTRPKREMAQFDTTTKGLKACHDFLSRFHVEAVGMESTGVYWRPVWHELCDDFELILAQPAHMKAIPGQKTDKKDAHWIAQLTRIGLLPRSFVPDETIQELRELTRQRKHYVESRNRETNRIHKILQSGGIKLTTYIEDIMGASGRNLLQLLIDETPLTPRMIHQSVYTSLKRKVPQLLEALDGYFSAHHRFMLGQSLEIYDFYQKQIDCLEERMNGYLNLYERPVEILDSIPGIDLITASVIIAEIGVDMSQFPTAGHLASWAGLCPGNNESAGKKRSTKIRHGNSYLKRCLCQTVFAAKKQKGSPLAERYYQIRSRRGPQKATIALAHQLLKIAYILLKENLTYQEFVLQKRLLETSQ

SEQ ID NO: 420087 - protein, 350 aa, unidentified
MLIIGCDYHPSFQQVAFVDTETGELGERRLLHREEAEQFYRQRREQSIQARVGMEASGHARWFERLLHELQFELWIGNAAEIRTKRVRKQKTDRQDAQLLLRLMMEDRFPRIWVPDAENRDLRQLLWHRHRLVQMRTRVMNQLHVVALNEGLRRKKALWRPAGRKELESFALAPWASRRRQDLLDVLDQLTPKIQQLTRALEEEVEKRPVARCLRTHPGVGPLTALAFELVIGTPERFPCGKQVASYVGLVPSEESSGDRRRLGHISKQGNVLLRFLLVEAAQVTVRSQPEWRSRFFHLAMRRGRKIAKVAMARKLAVHLYWMWRQGWDYGQLQKLGSHAGEPGHRDGVQ

SEQ ID NO: 420088 - protein, 654 aa, unidentified
MRPKKPMTTEVGDLFRARLDQIINMKHELVLLAFKIDWDWIDGEIAPLYSDKGRPGIETRFVVGLLLLKHIYGLSDEAVCDRWVHDPYFQHFTGEAFFQHEFPHERSDLSHWRKRLGDKLELLLAESLRVAHETGALRTRDLKRVTVDTTVQPKAITFPTDAKLLHAAINGLNRLARKCQLRLRQSYLRIAKRAALMASRYAHAKQFKRHHRQLRLLRSRLGRIIRDIRRNIEGRPELEAAFEAPLRHAAQIRSQQQRQRGWKLYSFHAPEVECIGKGKASAPYELMAWTTPALSGNVEPRGAAAGAQAMSNIVTIGIDLGKNTFHVVGFDATGAITLRKKRSRNQLDQSLGNVPRCLIGMEACAGAHHLGRKLEKLGHQVRLLPAQYVKPYLKGHKNDFRDAEAIAEAVQRPTMRFVPLKSAEQLDLQALHRVRSRLVTQRTAVINQIRGFLLERGLPVRQGAAALRLALPQLLSMLSDNLSPRVVRLIQDLAEDWRYLDRRVASVTKEINELVNQDAHCRRLMSAPGVGPIISSAMVGAIGTGDAFHKGRDFAAWLGLVPKQISTGDRTILGRISRRGNRYLRTLFIQGARAVLLRRQTWPKHGFGAWLEAASKRLHSNVLVVALAAKLARMAWSMLAKGRDYDANFLGHTA

SEQ ID NO: 420089 - protein, 354 aa, unidentified
MVKDILKHVLGIDVAQKELVVTLGRLAQNLSINLYAYKVFKNNRKGFVSLIKWLKKQVDDVSEVIFVMEATGVYHQKFAYYLNSQSYKVSIVLPNKISNYMRTLDTKTITDKTASQAICQFGLERNLDYWEPPKEVYKELKQLVREREQIVQERSIVKNQLHAEKSEAYPGKRSIKRFEARIKFLNEQEKQIKDDIKEILNKEENIELKEEINRLSTIPGVGCLTAVIVLAETNGFELIRNKRQLTSYAGLDVKEKQSGTSVRKKPRISKKGNKYLRKAMHFPALTAIKYSERYKEYYKRLVSKSGIKMKGVVAVQRKLLELIYVMYKNKTVYQENYEQEKRAAVHLETATLGN

SEQ ID NO: 420090 - protein, 440 aa, unidentified
MTYPNAAGIDIGSTSHFVAVPADRVEPQEPCVREFPAFTRDLHGLVAWLRECRITAVAMESTGVYWIPLYEMLEAAGFEVHLVNARHVRSVPGRKSDVLDCQWLQQLMSYGLLRGAFRPSGEVCALRAVWRHRDMLLSYQARHVQHLQKSLTQMNVQLHHVISDIMGATGQAIVRAINAGERDPAVLARLRDRRIKAKEDEVAASLQGNWRDEHLFSLKQALALIDAYAEQISQCDAELQRLLDALKDHDLPEQGLGAPKRKAAARNAVGFDARTALFEASGVDLTRIPGIDTSTALKVVAEVGVDLRRFPTVKHFTSWLNLCPGTKISGGKVLSAATKASNNRAAQALRMAAQALRKSQSALGAYHRRLCARMDRPKAITATAHKLARLIYFMLTRGQGYVEAGQEAYEQKYRERVVQSLTKRARQLGFELTPTASLNP

SEQ ID NO: 420091 - protein, 342 aa, unidentified
MKIIGCDFHPSFQQIAMVDLQTGEYTERKLTPEEARQFYAELKGPVLVGMEACGNTLWFERLLASLGIKLRLGDAGKIRALELRKQKTDRRDAQLLLQLLLEDRFPEVWVPTVQQRDLRQLLLHRHKLVAMRRQVKNELQHLALNQGVQQKRKLWSASGQQRLEELPLEGWTALRREDSLQLLDELDRRVAKLDIAAQQEADRDAVARLLQTHPGVGPITALAFSLTLGTIERFARSRQVVSYLGLNPAEYSSGGRQHLGAISKQGNPMLRSLLVEAGQSAARCVPELKRAYQRLKHRKHSGVGKVMVARKLAVRLFWMWKTQQPYAAARTQASPSHHVVAV

SEQ ID NO: 420092 - protein, 411 aa, unidentified
MDKIYDKCCGVDVHKKLMVACFRQGRKQEIREFGATTRELLEMADWLKSGGCEMIAMESTGSYWKPLYNILETSDLKAMVVNAGHIKNVPGRKTDVRDAEWIADLLQHGLLKASYIPNKDQRELRELVKYRKSLTEERTRELNRLQKMLEGANIKISGTIKDINGKSSRNILELIVSGETIDSARYDLLYKQKAIAHNLKASKEQIIDDLNGVMTDLQRKVMRVLLRHVDELTAHISELDDDIDNFMKPEEKQAAKKIQQVPGIGNTSAQAVIAVIGTDMDRFPTQAHIASWAGLCPGDNTSAKKRKSGKTRKGNQLLRATLVTCAHSAVKNKASYFYAQYMRISAHRGKKRAIVAVAHSILIAIFHILKCDYPFRDLGADYYNQFNRERKISAYLKKLKALGWEPSPAAC

SEQ ID NO: 420093 - protein, 410 aa, unidentified
MQTLVERGCGLDVHQATVVACLLIVLKNGRVQKQVRTFGTTTRELMGLREWLLSESCTHVAMESTGVYWKPIYAILEGAFEIVVANAQHVKKVPGRKTDVKDAEWIADLLCHGLLRPSFVPPSPIRELRDLTRYRRKLVESRTAERNRLLKLLETANIKLASVATDVFGVSGLLMLHALVEGKATAQEMAELAKKQLRKKIPELELALEGKVEEHHRFLLRVQLRRLRTVEEDLGILEQRIQEKLKPYAAQFTLLQEIPGIDETLAAAIIAELGVDMGVFESVSQLSSWAGVCPGNNESAGKRRSSRIPKGNVYLKTALVEAANSAAKAKGTYLRDKFYRLKARRGYKRAAVAVAHKILVAIYHMLSHQVCYNELGDVYLDNLNKHHVTRNLVNRLERLGYAVTLQQKAA

SEQ ID NO: 420094 - protein, 363 aa, unidentified
MQVMHPVCCGIDVHQKSIVCCILDGPLTSNEPKKYQTTFGTTTKELKAALDWILEHQVTHVFFESTGQYWIPLFNIFSDSDLELVLANPQHIKNVPGRKTDVKDAEWIAQLGRCGLINQSYIPSQEVLQLRYLTRYRLSVKQRLTQIKNHIHVILQRANIKLTSYLSDIFSKTGQALLTLFIDGEVINEDNVESCIHGRIKASTRQLIEAMDGKLSTVDRFLIKECMEEYKLQKKISDELNKEINEYILEHFPEEYQLLLTIPGISDNCCATILAEIGPNVDAFKTDKKLASWAGMCPGSNESAGVKKSSHTTQGNKYLKQALVMSVLSVQRAKEETFSLFYQRISSRGSKMKAIIYLYIYVL

SEQ ID NO: 420095 - protein, 310 aa, unidentified
MDIIIDKGCGLDVHKETVVACVMGSGIKKEIRTFSAMTGDLLRMKGWLTDLGITHVAMESTGPYWKPVFNILEDSFEVILANARHIKNVPGRKTDVKDSEWICKLLRSGLITASFVPPQAIRDLRDLTRYRQKLIQAVSAEKNRIQKVLEDANVKLSSVASDTFGVSAGKMVRAIISGNVDPVSLADLAVGRLKGKKEKLKEALQGHFRDHHGFMIQASLDHIASLEKIIADLDRQINEKLKDYHRERELLASIPGVKEQGSSSILAEIGAAMNVFPSEGHLSAWAGMSPGNNESAGKKKVARQPTAIKT

SEQ ID NO: 420096 - protein, 320 aa, unidentified
MEKNENNFVGIDVAKYELVVHILPTNQQLTVPNATDGIKELVKILKKNNPKQVVLEATGGCERELLTHLAASGITTILVNPKQARDLAKGLGEFAKTDAVDARILARVAQLQCLPVRPLPSREIQEMNDLVTRRQQLIGMRTAETNRLHTAGQKEIQKSIEKVIAFLEKQIEGIDVRIAQMIEANPDWSEKDKIIQSIPGVGPKTSQVLISALPELGDLNRRQIAALVGVAPFCRDSGTRSGTKRIKGGRANVRAALYMATFAAIRWNKTFKEFYQRLIAKGKKYKVAIVATMRKMITVLNVMVKNGTPWNEQNVLAQNP

SEQ ID NO: 420097 - protein, 351 aa, unidentified
MLIIGVDYHPSFQQIAFCDQDTGECGERRLTHSDGEAEHFYRDLKQRGISVRVGMEASGYARWFERLLGELDYELWIGNAAEIQSKRVRKQKTDRNDAQLLLRLLLEDRFPRIWVPSPENRDLRQLLWHRHRLVQMRTRILNQLRALAMNEGWRWKKKLFSEQGRVELEKLALAPWASRRRQELLKLLDQLNPIIADLTASVEQEASKRPEVLQLMTHPGVGALTAMAFVLILGTPQRFRRGKQVGSYVGMIPGEDSSGGKQRLGHISKQGNSLLRFLLVEAAQAAVRNNAEWRRRYIHLAMRRHKSIAKVAMGRRLGIRLYWMWRNGCDYSSSFEFGSYAGQLGTGQGGK

SEQ ID NO: 420098 - protein, 343 aa, unidentified
MDHFAGLDVSVKETSVCIVDDTGRIAREVKVASEPDSLLQVLTNPAYHFKRIGLEAGRLSQWLFSTLAEAGLPVICVETRHMRAALKAQVNKTDRNDARGIAQMMRAGLYRPVHVKTLRSQKLRMLLTHRKLLQSKAIAIENDLRATLRNFGLKVGMVGTVKFETRIKELVDNLLELAVLVEPLLIVRRVLREQIGILHRRLLAVVRDDDVCRRLMTVPGVGPVVALTYRATVDVPARFRNSKAVGAVFGLTPSRYQSGESDRTGGISRCGDEMMRAMLYEAAQILLVRSAKWSWLKAWAMKIARHRGLKKAIVALARRLAVIMHRIGVDGTEFRWTREVAAT

SEQ ID NO: 420099 - protein, 367 aa, unidentified
MAKIIKSESSKTMVDGGAAAVVLDLSDRKARLHAIDSEGKTVEVGTVTLGAVALQRWASNIPPTVMAIEAGTHSPWVSRLLTACGHEVIVANPVKVALITRNTNKSDGVDAEYLARLARVDRNLLHPIQHRGEQAQLDLQVIRTREILVESRTKLIGHVRGAVKSFGARLPKCSTEAFVNKTRKVIPEQLRTALDPVYVQIEHFTTTIAGYDKQIETTARERYPEVERVAQVKGVGTLTALSFVLVLEEASRFRRSRSVGAFLGLTSKRDQSGESDPQRRITKAGDRLMRRLLIQSAHYILGAFGEDCDLRRHGLRISERGGNRAKKRAAVAVARKLSVLMHRLWVSGERYEPLRNSGKLQEFSTAA

SEQ ID NO: 420100 - protein, 324 aa, unidentified
MSKNKQFCGIDISKDVFDVVDHLEHHHQFLNDASGFKEFGKILTENSHCVMEVTGSYYQSLATWLHSKSIDVSVVNPLSVKRFIQMRLKTSKTDKADAKMIQLYAEAENPGLWQPPSEYIIEANDLHRLIALLLKQRTALKNKLHSLTAKGVKKGTVITSTRRQIRNLDQEVSTLEMKLEEVVKAHQADLITRLCSIPGIGKRTAIYLIVLTQGFEKFETSRQLISYFGLDPTIHESGSSVRGKSRISKTGDNLIRNLLFMCSFTACVHNKSCREIYQRITAKGKSKKLALIAVANKLLKQSLAIAKSGLSYDENFRSVNLNNV

SEQ ID NO: 420101 - protein, 389 aa, unidentified
MKRAAPGCGITPGDKSNTLKEEQPMKKIAYVGVDYHLNSLSIAVVVEGQRKLHDTIRLKNDHRVILRYMEKLSRDYDIKACYEASTNGYAFQRKMNHWGYHCDVIAPSLIPKKKGDRRKNDFRDARDLAQNYAAGMLSIVHPPSEEQEAVRSLIRCRMAFKDAERRTKFQINSLLLAQDLRWPRSKWTFAHRQWLAGLQLPSPYLQEVLEEHLGHLSYIENRLTHLDGQIEEIARSEVYAPNVTKLRAFKGIGTLAAMLLIAEITDFRRFANPRALMAFLGLIPSENSSGDKRVDGSITKAGNRRCRTQLIESIQHYVRGPHITLQMKCDLSKVDPFTANAAIKCLKRLNKRYWTLITKGKLRPIAITAIAREFVGFIWAVMQPQPHAV

SEQ ID NO: 420102 - protein, 347 aa, unidentified
MEKVIRIGMDTSKSVFQLHGVNAAEQVVLRKQLRRRQVLEFFARLAPTKVGMEACGGAHYWARELRALGHEVVLLPPQYVKPYVKRGKNDRADAEAICEAMSRPTMRFVAVKTAAEQAALMLAGLRDQMVRRRTQLTNAIRGYAAEFGLVAARGLSKIEPLLVRIAEDESVPELAKDIFAAYGQEYAGLEGRIAKVEARLMAWFRHSEPSQRLTQIPGIGPIIASMLVMKIPDPGAFHSARHFAAWLGLTPTDHSTAGKTRLGVITRAGDEDLRRLLVSGAMSVIQQAERGRGSPSPWLLGLLKRKELKLVAVALANKMARIAWKLLVSGENYDPRRAKAMALDKAA

SEQ ID NO: 420103 - protein, 364 aa, unidentified
MEGQRYVGIDVGKRTMEVRFISHDSRVTAWNGKTDSRGRAKLASLVNPGDTVGIEAGVLGFALAKQLRAKQADVRMLNPGKLAVIYASTRKTDAEDALKLAQMVKRFEPHELPLVDTPTEEEEQDRAQVCELAFLKKVRTQHINRLHAVYVRGGETDVTKADLATKKSREATHNRLSGLLAKEAVRAEAFIDQYEASIEEIEGQQSERLKTNELTPYLFSIPGVGPSLAMAFLAYIGDGKRFCTGSQVANYTGLVPRVDCSGDTNRYGPITKRGCKAIRRVAIQAAWSLVYSKKGGALKNFYETRSSEIGKKKAIVGVARKLIVLMWTIAKNREYYRGTELKERLVKLRQYKLIEKKGKSGTGG

SEQ ID NO: 420104 - protein, 423 aa, unidentified
MMKLKYSICCGLDVHKNVIVATIVITNNDGISEYKQKSFSTINSDIQKFHNWLIENNCFHVCMESTGKYWIPIFNYLENDIDVCLTHPKYVKAIKGKKTDKKDSKWIADLYKFDLVRCSFIPPKDFRQLRELARYRFKLVCMKSSEKNRIQNCMTVSNIGIASVLSDPFGRTATEIMSYLLEHTADSMDEKAVRKLIKKGAKAKSDEIIEAIRGYNIETDQAKKLELARGHLEYLDDMITQTEVELYVRIKPYYEFVEFVSTMPGMTELSSTIVLAETGVDMSIFDDAKHLCSWCGLSPANNESAGKKKSVRIAKAGDYLKPMMVQCALAAVKNKKRPYFAIKYGRIKKRRGHKKAIIAIARMMMVCIYHMVSEKKSFNPTDYEELMDPRNHVERVVLNETNVFAYLESLGYDSSKLVKRNDN

SEQ ID NO: 420105 - protein, 422 aa, unidentified
MLEQTHDEQEIIQRVAALDIGKAELVCCVRVPDPKGGSRRLEEVKTYSTMTRSLQLMADRLLDLGVTRVVMEATSDYWRSPFYLLEAHGFQTWLVNAKDVKHLPGRPKTDRLDAVWLCKVAERQMLRPSFVPPVPIRRLRDVTRYRIALVSDRNREKNRVEKLLEDAQIKLSVVASDIFGMSGRDMMAALIAGERNPQALAQLARSRMRGKIPQLEEAFVGYFTDHHRFLLAKMLTRIDALNADIDELEAEIEAQLAPFAPAVARLDEIPGVGVTAAAVIIAEVGLDMTRFPTPAHLSSWARFAPGVKESAGRKKGNGSTGHGDPYLARVLGEAAVGASRTNTFLGERYRRIARRRGKKKAVVAVGRSILVIVWYLLSDPEVGYHDLGPGFYDSRINPERRKRNHIRELEALGYKVTLQPAA

SEQ ID NO: 420106 - protein, 406 aa, unidentified
MTAVMIGVDPHKGSRTAVAIDTAEEPLGKLRVQASASQAGRLVKWAAKWPERTWAVEGAGGLGHLLAQQLVAAGELVLDVQPKLAARVRLLEAGDSNKNDPNDALSVAVAALRSRARRQVRADDHAAVLRVWSRRHRDLGRAKNQAACRLHAAGCEVVPGGVPEEITAAQATRILGSAKPSGAAGQARGELAAELLADMRRLDEQMRESKKKLAAAVRASGTSLTELFGVGPFAAATVIGDVTDVARFASRDHFAAYNGTAPAGVSSGNRKTCRLSLRGNRRVNHAIHMAAITQIRHSHSDGRAYYDKKTAEGKTHKEALRSLKRRISDAIYARLRADARQAASSANQGPGGQPGSDSDSSAAGSHPEHRLFGQATPGPDTSLRPATPARPAMPPEPDSREIRRSP

SEQ ID NO: 420107 - protein, 412 aa, unidentified
MNVRVEKACGIDVHKSFLVATILNLEGVKETKEFNTGLEDLINLREWILERHCQRVAVESTGIYWTPLYTCLEGKVETIVANPRHIKNIPGRKTDYLDSEWIAELCLNGQIKPSYIPSKGIRELRDLTRTRTKTIQTMTAFKNRVHKVLEKANIRISGVLSELFGIAGLQILNGILNNKNIDEVLKDVKRIGKKKAAIKEAVRGELSQTDIWLIRECLETIDFLKRKINLLDSMINRHVEKEQKQNQLQILMTIPGISYTSASAILAEIGDINVFACPKSLVGWSGLAPSLNESAGKSSNGHITKRGSKYLRRMLVQCAHVIAGHRPNKMRFFYQRILMRKGKKIAIVALARKLLSIIHHLLKNNEKYIEDELKPKNIKLPKFQLISELSLDEMIEIISKAGFTVEEISSKG

SEQ ID NO: 420108 - protein, 313 aa, unidentified
MIIIGVDFHPEFQQIASVDTETGEFQEKRLAHREEAETFYRGLAAAGQKVRVGMEASGHGRWFERLLSELQIELWIGDAAEIRTRRVRKQKTDRQDAQLILKLMLKDDFPQIWVPSWENRDLRQLLWHRHRMVQARTRIMNQLQAVALNEGLRCKKRLWREHGRQQLESFRLAPWASRRRRDLLELMDRLNPTIAELSQAIEGEVEKCPEARRLMTHPGVGALTALAFVLIIGKAERFGSGKQVASYLGLVPLEDSSGNRRRLGHITKQGSSMMRFLLERRTTNDTLATGLPTSARYPARRTPTVPLSTTGAG

SEQ ID NO: 420109 - protein, 316 aa, unidentified
MLYVGIDVAKNKHDVTALNVPGKTVLKPLTFSNNKADFELLDLSLRQLNQDCLIALEDTGHYAFNLLNFLHEQGYKVYTYTPLLIKEFAKSLSLRKTKTDKKDAHGIALKLLSDPNREQFQHDNRQVELKILARHIHRLKKKQSDWKVQYTRCLDIIFPELDKIVGKHSEYTYQLLTCYPNPQKRLEAGFDKLIEIKRLTASKIQDILSVAPRSIGTTSPAREFEIIENIKHYKMLIDKAEKCVNDLMAEFNSVITTVTGIGNRLGAVILAEIQNIHAFDNPAQLQAFAGLDSSIYQSGQIDLAGRMVKRGSPHLR

SEQ ID NO: 420110 - protein, 316 aa, unidentified
MSDPQMFVGIDVSKAQLDVALRPTDDCWHVSNDELGIASLVERLRTVQPALVVLEATGGLEVPVTGALAEAGLPVVVVNPRHARDFAKATGRLAKTDTLDARGLAHFAEAVRPTPRPLPEAQAQALSALLTRRRQLVQMLTAERRRLQAAPQPIRADIQAHITWLTRRLARTDADVAAAIHASPLWRAKDEILQSTPGVGPILSRTLVAEVPELGVLNRQEIAALIGVAPFNRDSGTLRGKRAVWGGRAHVRAVLYMSTLAAVRHNPVLKAFYERLRAVGKAPKVALTACMRKLLTILNAMLKHQTPWQENYATQS

SEQ ID NO: 420111 - protein, 419 aa, unidentified
MSFKILKFNCCGLDVHKTWIYACIGITNSNNRTEYKQARFSSFSKGLHQLCVWLAKYNCNDVCMESTGKYWIPVFNILEQHKIWITLSHPKYTKPMKGNKTDRKDAKWICDLYMCGMVKPSFIPPADIRELRDLVRYRFKLTCMITGEKNRAQNCLTVSNLKLDDVFSDVFGKSSRSITEQILQHPGEKFDVSPFVDSRCKTPIEEIQAAVDGNISKEQAVKLRQCLDHIDELQKHISEVEQEILRLSDKYEAALNLIRTVPGFDKNPMTAIQVLSEIGGDMSVFPTAKHLVSWAGCCPRNDKSDRKIKSTRISCAGSYFKPVLVQIANALIKSKKHFEFTTRYKRIKTRRGHKKAIIALCRMILTAIWHILTDLKPYTSDGFLESRPVKKEKVLTTSQALNLLRQRGYLIKDEPSPVS

SEQ ID NO: 420112 - protein, 385 aa, unidentified
MTNQIQVPRFVPRDYDVFAGLDVDKKSMAVTFADHAGSRRALRMAYSATPLVNYVRKHFGGQRVAFAYEAGPTGFGLHDELVRRAYTCVVVAPSKVPRAPGERVKTNRLDSRKLAENLRGGQLQGIHVPSAVYRDLRHLVQMRDTHVRQLTSSKLRIKSLLLYEGIAFPDPHEKWTARALRELQTLPCSETVRFKLDDLLDTLHFHFQAAARATKQIRQHCLQEPELQQSIEVLLSLPGIGWIVASHLVARLGNPQEIKNGRQIAGFLGIVSSEHSTGDKENRGEITRSGDSRLRNKLIQSAWTAIRKDPELRAFYRRIYQRHPKKVAARKAIVAVARKLTNRIYVVLKEQRPYVIRPDSSIAPLTAEETVGPRERLDAAQNDQP

SEQ ID NO: 420113 - protein, 354 aa, unidentified
MPCLPVEVILGVDTHRDTHAVVLVDLVGRLIATATFPTTRPGLRALIKWAQQRGNVRRAGVEGTGSFGAGLTRALHHEGIEVVEVTRATRVGGRHRGKNDTRDAEAAARSVLSGQATAAPKARDGIVESIRVLRNTRASAIKARTQAILHIKNLIVTAPDELRETLSPLTNRQLVKRCARMHRSSRRDSLAATRHALRSLARRHQDLDCEIAELDELLGDLIAQAAPRLLKQPGIGPEIAARMLLVAGDNPTRLRSDAALAALCGASPIEASSGKTIRHRLNRGGDRQGNSALWLIATNRMIHHPETREYVKRRTTEGKSTKEIRRCLMRHIARGIYPLILADLHDAHQQSALT

SEQ ID NO: 420114 - protein, 310 aa, unidentified
MEITVGIDVSKARLDVHVHPAGESFAVSNDEAGVAALVARLGRLEGVRGIGLEASGRYERLAVASLAEAGLPVMVLNPAQVRAYAHAIGQRAKTDPIDARLIARFIEAVRAEPRPLADAGTQELAALMARRRQLVGMLGAEKARYRQAAPGPVRLSLARMVTTLEDALKELDRDIDTTMRGTPVWRDKENLLASVPGIGKTIARTLLAELPELGRLNPKQVAALAGLAPFTRQSGKWRGRSFISGGRTAVRTALFMGALVASRHNPTLKAFHARLIANGKPKLVAIVAVARKLLTILNAIIREHKPWKPA

SEQ ID NO: 420115 - protein, 370 aa, unidentified
MLDTTTFVGLDVHARSIKAVSLDVMTGEVRAATFGYDAGAVAGWVRSVDPGARCVYESGVTGFDLQKRLSGLGVDCVVGAVSKMIKPSADRRRKNDRNDAEFLARMLSVGNVVEVWVPDDECEAARDLTRALEDARDDLSRSKQRLSKFLLRHGLVFDERTPTGRRKGNWTRAHWSWIESIRFAEGADNDVLAYYVDAVRRAAEEKARLEGLVGAEARKPRWRKRVDSLRCLKGVDTATAAGLVFEAGEFSRFRNARSFAAWVGLTPSEHSSGESDRRGAITKAGNKHLRKALVEAAWHYLTCSGRPKDLARGQAPDRVARRHAAKGVRRLVERREALLARGVHGNKANVATARELACWVWAVGLMAEEA

SEQ ID NO: 420116 - protein, 332 aa, unidentified
MMAQNDCVVVGIDVAKDKVDACIRSLSQRQTFPSTTEGRRALIRWLRKHKVGKAAMEASGGYERDWAKVLREAGIEVRIVDPKRVRSFARSAGRLAKNDAIDAAMIAWFAETFTDAPGQTCDAARDKLVQIVRARQSLLDLQTSLQNRGEHAAPEVVEKMQARLLKTIAREVAELEAAIAALVKATPHLAELAEIIESVPGLGKITSAGLVAAMPELGQVSNNVAAALLGVAPYDDDSGQRRGDRHIKGGRRKVRNLFYMACLGAATRHNPVLKTFYDRLIAKGKEPKVALTACMRKLICILNTMIARRQKWDANRYKMSDPARLPPSACPA

SEQ ID NO: 420117 - protein, 404 aa, unidentified
MEVLDAAGRRLGRARLPEGVVGIERLHALVGQFADPDDPAGAEQVLVGIETDRGPWVAALVGAGYRVFAVNPAQAAAYRSRHSSSGAKSDPGDAHVLADMVRTDAHQLRGVAGDSAAAEGIKLLARAHQSLIWERTRHLLRLRAGLVEYFPGALAALIAGGLELGDRDILELLDAAPDPDTAARLSQNKITAMLRRGGRRATRGGDLATRAGQVQAALRAPQLTQPPELAGAYAVITRSLVAVLTSLAEQIEQLEGQLSAYFGRHPDAEIYRSQPGLGVILGARELGEFGDDPHRYASAKARKNYAGSSPITRASGKKKAVMARHARNHRLADALHAQAFSALRASPGARAYYDALRARGIGHHAALRQLANRLVGILHGCLKTRTLYDETTAWAHHQDQPAAA

SEQ ID NO: 420118 - protein, 531 aa, unidentified
MNRYIGMDLGLSTKHRVAVLDGAERLGKPFSVEVCREGFEELLRRATAGAEGPVRFVLEPTGLAWVPVAAYMAAAGHRVHLVKPQKVSHLRKFLRQHTKTDSVDAETNARLPQVDPKGVHELRLPTPEQMALRRLVNRYERLTQQVGDQKRRVHALMVMVNPPLMSALGDAAFGQAGLAFFRHYADPALVVKMGRAKLEQFWKRHTKGPVDKDLVDRVFKACCTTAELYADLRRTGKLPFDYSEVQEELVAELDWMEHAQLEAKRLEPRITEIYNHLDPDRTLKEIRGIGDVIAPCIEALVGDIERFHNTRQFTSFSGLCPRKKQSGMSDQPMPITKSGQRLLKKYFYLAADVARQWDAEFAAYYARRYARGDHHNHIMIALARKMALRVYALLKRREKARRARQASGSAEPVSFVLRNPVGGAAVTKMQARELVLEKYTRAVANPERYKRERGRVGKGKGTGSAKSEWPSEDATSRRAVPTPQIPQARITRNPVDVQHRGEGWTSIGQVLSSLENLSVEKHVNRKRKNCE

SEQ ID NO: 420119 - protein, 386 aa, unidentified
MSKVIMIGCDLHDEKMRLRMAADAGKSVAKSLATADVAGLVDWARDFAVQQGASRIVLAYEASGQGFGLYDALTDAGIECYVLAPTHLPHTPHGRKNKTDDKDAQMILDEVRGHILAGRKLPAVWVPDPQTRDDREIVRMRLEMGEARTRIKNQIRNLAKRSKLAFPAWFTKSGEWSKRSLAWLTEAAQGTAGNLAEGVRTGLTSLLALYGEFSRQLGELDKAVAQLAGRKRYAQVFRKLKLMPGVGTLTAMTFLTELGSLARFANRRQLSAYLGLAPTAFESGQQDDRKGHITRQGPARVRHMLCQASWAALRASDQWRATYEKLKRGSAKRSKIAIVAVMRRLAIAMWHTARSTELDGLLHEIDQQRTSAPARQKGLGGGVEIN

SEQ ID NO: 420120 - protein, 386 aa, unidentified
MNYIGIDISKYKHDCFIATETISQQFSFENSQLGFDELLGHFKPLLKQEMIIGLEATGHYGENLKSFLTLHGYAFMEINPFLVKKFSEAHSLRKTKTDKKDAQMISTYMRSVDYKAYHHQSYHISALKSLTRLRFKLVSMRTKHYNMMTKTLDIIFPEYKSFMREQGYSDTSLYILKHFSSPERIAKMNDSHFDKLRKLSMGKFSYPKFVKLKTLAKSTIGITQDHQLFKLKTSISYVKQLNRDIDETEKQITSLMGKYPTRIQTIKGIGVISAAVIISEYGDISLFSNPAEMLSYAGLDSTIKQSGTTSSTGKLVKRGSKYLRATLINVCMMVMIYNPIFYDYYTKKKQEGKHHRVALIHLTKKLIRIIHHLETHQEDFDSSQLQ

SEQ ID NO: 420121 - protein, 485 aa, unidentified
MAKRKMSTFERLQRGKWSREQRKELAQKLEAADLTIVHPDAAGIDVGNESHFVAVPAGRDAQPVQEFGSWTADLQRMAAWLKACGIRTVAMQSTGVYWIAVQEVLEQAGLKVFLVNARGTKNLPGRKSDVQECQWLMKLHTYGLLANSFRPPEEIRAVRTIWRQRDRLVQDAGRAIQQIQKALTTMNIRLANAISDVSGVTGLAIIRAILKGERDPRELAKLRHPCIQASEEEVVRSLEGHWRDDVLFELKQVVEGYDFYQRQMGACDEELQKYLAVLPDRRKESAAVGADPRLTKGTKQRHRSKAERKGKRRRKNQPGFDLQAELHRTFGVDLTRIDGIDVMTGQVILSEVGPDLSDFPDEDHFASWLELAPRRNITGGKVISQKSRESRNRVANALRLAAESLSRSDSYLGARYRRLRGRKEGKKAVKAMARHLACLVYRLLTKGQDYVDRGAAYFEKKRTEREMIGLQRKAAEYGMRLVPVA

SEQ ID NO: 420122 - protein, 483 aa, unidentified
MKSKPEEQNKRATNHPTQHQWHEMNRKQRREITRQIQSEDLSLEVIHPDAGGIDIGNESHYVAVPPGRDNQSVRRFGCTTAQLKAMAAWLKQCRIRTVAMQSTGVYWVAVYDILEQAGLEVYLVNARDTKNLPGRKSDVQESQWLMKLHTYGLLRNSFRPSQEIREMRTYWRQRNDLVQSAGRHILRMQKALTQMNIQLANVLTDISGTTGQAIIKAILAGERNPHKLAEFRDPRVKASEEQIAQSLEGNWQEDLLFVLKQEHKGYEFCQKQMAECDRQLKQYLQQREDRSHGAPLPEEKRKGRLKKKKGNAPQFDLREGLFRMTGTDLTQIDGIDVMTATTIISEAGWDMSKWKTEDHFVSWLRLCPDNRISGNKVIGKGRLPTNNPITIALKMAATTLRLSKTYMGAQFRRLRTRLEAPIAIKAMAAKLARLVYRMLRYGMKYVDQGAAVYELRHRELQIKRLKAKAQKLGYRVTPIPAAA

SEQ ID NO: 420123 - protein, 314 aa, unidentified
MTTIGVDVSKNQLDVAARPSGERSRFANDEAGRAELVAHLAKLKPERVLLEPTGGYEAPVVAALKAAKLPVIVVNARQVRQFAQAAGRLAKTDQIDADVIAHFGEALRPEVRELPDEARLQLEALVTRRRQLIDIRAGELKRKQTAPAVVHPSIDHVVAFLTKQIEDIDSDLKKLVDSTPEWSATDELLQSVPGVGPVLATTLTALVPELGKLDRKKIASLVGVAPLNNDSGSRNGKRSTWGGRAPVRAVLYMAAVAAKRSNKTIAAFYDRLIQHGKDPKVALVACMRKLLVTLNAMARNRSKWTPAPLPALAG

SEQ ID NO: 420124 - protein, 387 aa, unidentified
MIYIGIDIAKLNHFAFAMNSDGEILLEPFAFTNDHIGFQKLLTKLSKFPKEDLLIGMESTAHYAENLTYFLFSMDFKLCIINPIQTSGIRKGGIRKTKTDSIDTFIIIKSMIMNNHRIFSQRDMYTLQLKSLCRFRRKLMKSRTKVKIQLVTYVDLLFPELQYFFKSGIHGKACYALLKEEPNPDKIAKMHLTRLSNLLNKTSNGHFGKQTAIALKELASQSVGTKNDTLSLQIFQSIIQIELFTSQLKEVDKDISVIMDSIDSVIKTIPGIGNLNGAMILGEIGDINRFDKPCQLLAYAGFDPSVYQSGNFNASGTRMSKRGSKLLRYALINAAWQLTLNNDTFKTYYNLKCSQGHRHYCALGSTSHKLVRVIHKMLTDELEFNLN

SEQ ID NO: 420125 - protein, 366 aa, unidentified
MHVQGREPVNSLLSLIPLLQTNMTNIQFKDIDPEAKPVLFAGIDVGAEELILVIRKNGKPFDPQKFANTPADRTRLVKKLVKLPGIIVCLEATGVYHFDLSLALHDAGVLLMVVNPKAAHNFAKVLMKNSKTDVVDANTLAEYAARMDFVAWTRPSDASIALRSFARRINALTGQKAAAKNHLHALTATSETPKAVIKDAKLAITQLEKRIDRLTAEALILIGKHPELTRILQLLIGIKGIGNTSAIALMGELLLLPPDLSHREWVKFAGLDPRAFDSGKSVHKKTRISKAGNRHIRSALYMPALSAKQHDPHVKAYFQHLVANGKKPLQAVCAVMRKLLHAIHGMLKNNEPFDNTRFYAIPECNG

SEQ ID NO: 420126 - protein, 366 aa, unidentified
MKKISTVQVWGNEILQEQKLTIGVDLGDRWSFYCVLEEAGKIILEQKVATTPEAMKQTFAKIPRSLIALETGTHSPWASRLLTELGHEVLVAHAQKVELITKSNRKDDRHDARALARLARIDPELLGPVRHRSAQAQIHLTVIRARAELVSARTALVNAARGLVKSYGQRLPKCGTQQVNRELAAGLSTELREVLEPLLQEIESLNERIPEYDERMEKIAQEVYPEVSLLKQVKGVGTQIALTYVLTIEDPYRFEKSREVGCFLGLKPGRRNSGNSEPQKKISKEGDRYLRTMMVQGAHYILGPFGEDSDLRRWGLKLAERGGKNAKKRAVVAVARKLAVLLHRLWVGGEVYEPLRNSQKAMRAVA

SEQ ID NO: 420127 - protein, 333 aa, unidentified
MLYVGVDAHRETSWITLMDEAGAVVKRQCVPSTQEGVRRLLEKYDCPKKAVLEASYCWGPMYDWLDELTDEVLLAHPLKLRAIAEARIKTDKIDSEMLAHLLRANLIPEAHAPSKEVRSLKRVLRQRLFFVKVQTMLKNRLMALLAQHSVQRPEVSDLYGKSGLEWLRGLELPEPDGEILREDLALLEVVWERIAATEALIQRLSEGDEVVKWLESLPGIGEFFSVLIRYEVDDIGRFRDAKKFASYTGLVPSTYRSALKVAHGRLTKQGNKWLRWAFVEAVTPAVRCSPWIRGYYERLKARRGAKDARTATARKLAELVWKVWTERRCYEEW

SEQ ID NO: 420128 - protein, 343 aa, unidentified
MDYFAGLDVSVKETSVCIVDDAGKIVREARVASEPEALLQVLTNTIYRFKRVGLEAGPLSQWLYSVLAEAGLPVICVETRHMRAVLKAQINKTDRNDARGIAQMMRVGLYRPVHVKTLRSQKLRMLMTHRKLLQSKAIAIENDLRATLRNFGLKVGVVGAVKFEARIKELVENLPDLTVLVEPLLIVRRVIRGQVDILHRRLLAIVRDDDVCRRLMTVPGVGPVVALTYRATVDVPARFRNSKAVGAVFGLTPAKYQSGQNDRTGAISRCGDEMMRMVLYEAAQSMLARSAKWSWLKAWAMKIARHRGMKKAIVALARRLAVIMHRIWIDGTAFRWTREVAAA

SEQ ID NO: 420129 - protein, 346 aa, unidentified
MEHHAGIDVSLELSSVCVVDGRGKIVREAKVASEPDALVSFFKGLGLPVKLIGLEAGPLSQWLHAGLMRAGFEAVLLETRHVKAALSAMTVKTDRKDARGLAQLIRMGWFRPVHAKSIGSQEIRALLVARKQLLGRLLDVELSIRGILRGFGLKVGQVTRKTFEARIQELVTGHTMLERIAEAMLSARATLQAQYEKMHKAVLAFVREDAVCRRLMTVPGVGPVVAVTFKSAVDDPSRIAKSKAVGALFGLTPRKYQSGEKDVTGGITRTGDEMVRTALYEAANVLLSRITRFSKLKRWGMDVAKRRGSKRAKVALARKIAVILHRMWIDGTTYRWAEAKPIAAQA

SEQ ID NO: 420130 - protein, 487 aa, unidentified
MSLRVTPKHENGLEVGIRWSQPARDEGRNSLEREARLTVWPGHRFAPPIVAPLRREHAEQIVFPFDVLRRRRKEWIMETILACCAGLDLHKKSVEATVRRREANDHFHKETRHWGTMTCDIRAMADWMAAQGVTQVAMESTGVYWKPIYNILEGRFTVLLVNARHLKQVPGRKSDLRDSEWIAQLLQHGLLKGSFIPPRWQRELRDLTRHRIELVEEKGRTVNRMHKLLEDTNIKLASVATDILGASGRAMLQALIDGQEDPVKLAELARRSLRGKIPELEKALDGHLTDHHRFLLRLLWKQLQQQEEVIAEGETRIEELTRPFAEQMQRLDAVPGVDRRVAEVWLAEVGPHLDPFPTDGNLASWAGMCPGNEESAGKRKRRRITPGNRWLKRTLTQAAWAASHTKNSYLASQYRRLAGRRGKKRALIAVGHSMLVIFYHMLKQGTTYQDLGAHFLDRLEPERMTRYYVKCLERLGHKVTLETRVTA

SEQ ID NO: 420131 - protein, 352 aa, unidentified
MPRTTRFHSVTTTIGIDMGKNTLHMIGLDSNEAIVLREKVSRGRIASRLTNLPPCLIGIEAGMATRYVARELAALGHNVKQVPPTYAKPFRQGHKNDFRDAHAVAEAVQRPTTRFVPAKTAEQLDLQALHRVRSRLVSERTAVINEIRGFLLERGIIVRQGLRFLRQSLPDFLAKRTDVLSLRMVRIVADLADDWRRLDQRIEAVTDEIETVVKSDDNCRRVMTVPGIGPIISSAMVAAIGNGVAFARGRDFSAWLGLVPKQMSTGDRTILGRISKRGNGYLRMLFVQAARVILRRPTNWSKHNFGGWLVCAAQRLHPNVLAAALANKLARIAWTVLAQQRCYEARVTKAAA

SEQ ID NO: 420132 - protein, 318 aa, unidentified
MAVQVWAAGIDVGKANLDIAIHRKPGETLRVRRDQAGFTQLIAWLRQHDVTRVGLEASGGYERDVMDALEDAGFMADLLNPLRVRRFAQAKGRLAKNDRVDADIIAAFTAQMLDAPPRRRDRALERLGEYLTVRRRILGWINDCDNAMEQARDPAMRKLLRAQRLGFEKLLAKQDAAIAGLIAGNADWDVLDRRLRTVPGVGPVLAAALIAWLPELGRLDRQQIAALVGLAPFDRDSGRYHGRREISGGREHVRHALYMPSLSAMRHNPVLAAFAKRLAGKPPKVIIVACMRRLLTFLNAMARDATDWRAPASVVKAG

SEQ ID NO: 420133 - protein, 338 aa, unidentified
MELSVIGMDIAKNVFQLHCVDRQTGEIERIKLRRNEVLPYFARRTPALVAMEACGGAHWWARQLQQLGHTVRLLPAKAVRPFVLRNKTDAADARAIWTAVQQPEMKTVAIKTEYQQSILALHRMRAQLLKFRHMQTNAIRGLLLEFGHPLPESYLALRKAFPTVMATLDKQLPGILIETLREQWARVQSLDNEIALIEGRLKRALAETPTCQMISDIPGVGLMTATAAVATMGDPASFKTGREFAAWLGLVPRQTGTGGRIRQLGISKRGDAYLRTLLMHGARAIIARRTYSDWIAGLIARRPYSVVIAAIANKLARTIWAVLATGKRYDGAAFAAAI

SEQ ID NO: 420134 - protein, 430 aa, unidentified
MSYRIVGIDVHKKILAVVVSDVEIDSEFHFERRWFGSNPEQLRSLAAWLLEQEVEEVVMESTAQYWKPVWEALERYWKPIREKREGARRRSGTLHLAQALSNRGRRGRKRDFPDAERLVKRLVSRELTLSFVPDPEQRLWRTVTRKKYQLTRDKVRLQNQLEALLEEAHIKLSSLVSDLLGASARRMLQALAEGETNPAALATLADQHLRATPEQLCDALGACTDLKPVYRRLLKMALEQLQFLEQQMGQLDQEMANLLSQHQDAVQRLAEVPGLGVDSAHQIIAEVGPSAATFPSEECLSSWVGVCPGQEESAGVNYSHRSPKGNRNMRRLLNQTANAAVKAKGSIFEIVYRRSVPRLGHNRAIGAIAHRMCRLIWLILYRKVPYEERGPAVSQKSKQVRTSRMIRQLRRLGYRIESPNTQYASSAQVQ

SEQ ID NO: 420135 - protein, 411 aa, unidentified
MDRFVERCAGLDVHKDSVAATVRVPGGGGERLQETRMFQTTTRGLLTLADWLESYGVTLVGMESTGCYWKPVYYVLEERFECWLLNAQHLRNVPGRKTDVQDSAWICQLVEHGLVRASFVPPRPIRELRDLTRYRKAQIEERSREVQRLDKVLQDAGIKLSSVASETLGVSVRRMLEALIAGTHDPEVLAELAKGRLRRKLPALREALEGRFRGEHHGLLVAQILAHIDYLDETIATLSERIEEVIAPFSTQRELLETIPGIGRTAAQVLIAELGVDMSVFPSSGHLASWAGQCPGNRESAGKRRSGRPRHGSKWLRTTLTESAKAASRCKGTYLSAQYTRLRGRRGPGKATGALRHSILVAAYHILDQNVPYHELGADYFDRRSTEQRTTRLLRQLEQLGHKVSLEPLPA

SEQ ID NO: 420136 - protein, 338 aa, unidentified
MIVIGLDVHKQSVTAVAVDEAGRPLGEQTVLVGSDELIGWASALGAERLWAVEDCRQLTCWLERQLLEFGEQLVRVPPKLTVPERRAGRMRGKSDPIDALAIARAALREPDLSRPRLDEQVFRDLKLLVDHRDDLVDARRRTQQRLRWHLHALDPTFVVPLRMLGRSSHLERVSRWLARQEQEMQVRLARELVARCRSLNRTIGELDQELEQRAAGIAPALLELPGCAAVTAAKLLAEIGPVDRFKSDAQLARHCGVAPLEASSGRVQRHRLDRGGNRQLNAALYRIAITQARYHPPACAYLERKKAEGKSRREAIRCLKRLLVRAVFNTLKASPALT

SEQ ID NO: 420137 - protein, 413 aa, unidentified
MSSTAGRVVIGMDPHKRSATIEVMSADETILAGGRFGTDRDGYAALLRYGKQWPHRVWAIEGCAGIGKHIATRLLADGEQVADVPPKLSARARVFATGQGRKTDATDAHSVALVGTRMAGLRPVVNDEQLAVLRILVDRRRSLGEDHTRMVSQLHQLLLELIPGGAKKDLTARQAKALLAKVRPRDAAGKTRRRVAAELVADLERIYARKKAANKELSELVAATGTGLLDLNGIGPSGAARLLVEVGDITRFPTKAHFASWNGTAPIDASSGDQVRHRLSRAGNRQINRVLHIMARVQIRNPSQGRDYYERKKANGKTPMEAMRCVKRRLSDIVYQQMLNDALGQTRTGPGGHRGTSTDSSVTSSHPHAGSSDKSLPGPATDDHTPTHTARSSPSSPRPLTAPTHSRRQAHSA

SEQ ID NO: 420138 - protein, 453 aa, unidentified
MARRNARVSLKPDKSRAALTITHPNAAGIDIGSASHFVAVPPDRDDQAVREFSSFTVDLNALADWLDVCGVDTVAMESTGVYWIPLFELLESRGFTVLLVNARHVKNVSGRKSDVLDCQWLQQLMTYGLLSGAFRPAEQICVLRCLYRQREMLLKSQARHVQHMQKALTQMNIQLANVLADIVGVTGQKILRAIVAGERDGATLGALKNVRVHASADEIAKSLQGNWRAEHLFALKQALAMFDFIGTQLSECDGEIEAQLQSLRTHDGDPAKGKKRSRSRNAPKFDLRVQLFQMCGVDLTRIDGVDVTTALAVVSEIGVDMARFPTVKHFTSWLGLCPGTKITGGKVMSGKTKRCVNRAAQALRLAAAALRSSKSALGAYFRRLCSRMDKPKAVTAAAHKIARLIYLMLTKGQEYTDRGQDYYEQRYRERVLRALSQRAAKLGMKIVAIEQPA

SEQ ID NO: 420139 - protein, 389 aa, unidentified
MKNTIVHHEGAASLEDAVGKVKLSGSIIKIGLDVHARLYVAVAQYDHLLPKPARRFAPMEFVPWVEQLLRVGHTVHVVYEACGFGFGLYRELKALGAHCYVIAPRKLDEHFTRVKTDPRDATTLCQRLSRYLDGNTRELAVIRVPTQEEEQDRHVSRQREQLLRLRQKLEAQGRSLLISQSLPSPAHWWKNQTWSRLRKLLPGWICIRLEVHRPPLLTLQKEIDALSAQLQAAAPADVPLGTGKLSTVLMTREICSWERFRNRRAISCYTGLCPGEHTSGTKRMPGSVTKHGNPHLRAALVECAWRMVRFQPNYPPVKKRLSVLAKGARATGAQRKKAIVAVARHLAVDLWRIHTGRCSAAQLGLSSAETSSCSRGTEKEARTASTIIT

SEQ ID NO: 420140 - protein, 350 aa, unidentified
MKTTYPIIIGIDTHKATHVAVAINTQGSRLAALSIPTNPKGYLELERWARSLGEVLAFGIEGTGSYGAGLSRSLLAQGHNVVEVTRPNRQLRYTQGKTDSLDAEGAARSVLSGQATARPKTQTGSSEMIRHLKIARDTAVKSRSQAMVTLKTLIINAPADLRDALDHIRGKIALIRHIAAFRPGDIDNPFASAKAAMRALARRWLWLHEEITAHDKELERLVTESAPELMASHGIATLTVAEMLILVGDDPTRIRSEAAFAKLCGVCPIPASSGKTHRFRLNRGGNRQANAALYRVAIVRMRSHEPTLAYVKKRTKDGKRKSEIIRCLKRYIVREIYSQLCVPKSSQIEA

SEQ ID NO: 420141 - protein, 386 aa, unidentified
MKRNDLSRSLVAFDQASTMVAVVELSFRSWLVAGLVPGLTRQPLKKLGPDAQALLTLLRRWQGEATKAGSTINRIVVAFEAGRDGFWLARWLRARGIEAYVIHPTSIPVSREHRRAKTDRLDTGLLMRAVLGWLRGEPKHCSMAAIPTIAEEDARRPNREHQTLVQERTRIVNRMKATLIRFGIRTFNVKLRKASDRLAVLRGPEDEPLPPNTGAELRRDMARLQLIRDQIKVIEEARLQQLKHAPRKGTHPMLLMLAEIIGVGVETADMLVHEVLSRKLRDQRAVARYGGLTGAPDESGTKRREKGLARAGNARVRRGMIQLAWRWLTHQKNSELAQWYQTRTTGAKPAARKTMIVALARKLLIALWRYVTTGEMPAGVTLHPAT

SEQ ID NO: 420142 - protein, 425 aa, unidentified
MEAAVITAVGIDVSKSKSTVAVRRPGGEIALRPFEVHHTNSDLKKLASTLKKLGGDIRIVMEHTSTYWRPIALTLKEAGFFVSIVNAMLIHDFSDNTIRKLKTDRADALKIANYALTFWDTLPPFNNEEETRLLLKMQSRANERITATATALRNGLIALADQTFPGVNIAFAPNTKNANGHEKWVDFFLRYRHKDCVCQYSMEAFKESYRGWCKRKNYKFRTDTAHKIYLLAQEGVATLPKCESTKMLITQACKSLNAVCEAKQSTQLEMQRLAAMLPEYEVVMQMEGAGLITGPALMAEIGDVRRFKNKKALVAFAGIDAPPFQSGTFESKSRHVSKRGSPHLRRTIFIVSNIILTRSNPENAVYCFMDKKLLRAGKHPKGSPKRTKEQDVAFSTHFKAILEASRRLMLKQFSLYVVCVCFLLD

SEQ ID NO: 420143 - protein, 309 aa, unidentified
MKEFVVEVGVDVAKADLQVATTTQNVGYRNTPDGRRQLIGWLRLLGSVRVVLEATGGYERPLVEALHCEAIPVSVVNPRQVRDFARAQGRLAKTDKIDARVLVDYAVALRPKPTPAPTSRQKCLTQRVRARSQLIASRSIVHNQLEHLVDPLARRCLVEMVRAFDTRIARLEKAIADLIAADPALRARRQKLVQVQGVGPTTAALLLAEMPELGALAKTEVAALAGLAPRNCDSGQFRGQRHIGGGRHAVRTGLWMPTLVAVQHNPILKTFYQRLRSNGKPAKVALTACARKLLIHLNCLLKNPPLLPC

SEQ ID NO: 420144 - protein, 417 aa, unidentified
MARKYHISIVNVVHPICCGMDVHKETISACLLKPGTGEQQEVEIREFGTFTDELIRLRQWLLENECPVVAMESTGIYWRPIHNILEDALTVVLVNARHVKNLPGRKTDIADSVWLAGLLRVGHLKGSFIPPRDVRDWRDLTRLRRLYALDMADYKRRTHKLFESANIKIDSVVSDLFGATGRALMSVLMEKSEITISDVEACAKGRLKSKTEALCRAVNGCFRDHHRYVLGSLLLVIDTLGKQIEALNQKLRNLMTNQQTLIDHLIEVGGISEVSAHAILAEVGPTLAEFPRCASLCSWCGLAPGNNQTAGKRRSGKSPVIKHHLKTIMTEVAWAAVKVKRSYYRAKFYSLKARIGARRAIIAIAHRLLKAIYVIIKKGETFKDLGEDYLVRINTEARVARLQRNARQLGYELVARN

SEQ ID NO: 420145 - protein, 389 aa, unidentified
MKIYVGIDIAKLNHFAAAISSDGEIIIEPFKFTNDADGFQLLVSKLESFDKNSLIIGLESTAHYGDNLVRFLVTELYQVCVLNPIKTCQMRKNNVRKTKTDKVDTYVIAKTLMMQDNLRFVSFFDLDMMDLKALGRFRQKTIKQRTRLKIQLTTYVDQVFPEIQYFFKSGLHQHAVYALLKEAPSPKEITSMHMTHLANLLKVNSHGHFTKEQAKELRVLAQKSVGANDSAISIQITQTIQQIELLDSQLEKIEAEMTDIMKFNDSVIMTIPGIGYINGGMILGEIGDIHRFSNPNKLLAFAGLDPSVYQSGNFQAKTTRMSKRGSRVLRYALVNAAWNVVRNNATFKAYYDAKRAEDRSHYNALGHCAGKLVRVIWKMLTDEVEFNLE

SEQ ID NO: 420146 - protein, 406 aa, unidentified
MRTIIGIDVSKNKANIAVATDLVVVKELVISLDALGFNELKHVVLQFGGNSEIVFEATGVYSRRLEYFLQQEGLNYHILNPLTAKNRIATGSRLRKNDERDARRLAVTEFTEHLEPYLLAYKQDPIYRELTDMNRYYDQLNEDKKRARNRAHRVLQLVFASFGEAKIGFDFDTKCAWQLLVLFPHAQIIREIGDLNELETRILAAHFKGIGPKRAHDAARKLWKLAAKNGDAVPLSSDNTRQMKALAEQVLALETAQDQQVLRMMELGKFLPEYELLQTIPGIGSSTAIRLISELGDMRRFNTRQQLNSYVGIDTTEVDSGDHQSARHITKHGNPHARRILYWTVILMINPKMGNNHIRDAYQKRREASSSKKKLIVRQMDRLIKTILYLIKTNQPYSYELAPQSK

SEQ ID NO: 420147 - protein, 317 aa, unidentified
MDVETKADRFVGIDVSKARVDVHVRPDGIAFGCATDLEGLGALGARLKPLLPCLVVLEASGGYEGAVAAALVEAGLPVAIVNPRQVRKFAGAIGRLAKTDAIDAAVIAHFAQAVRPPARPLPDDLSVRLAELMARRRQLVVMINAEKQRLAKARDPIAQSSFKAVLKRLQAERARIDKAIDRLIEVSPLWCAKQDLLKSVPGIGDVVARTLIAELPELGRVDRHQIAALAGVAPINRDSGRYRGKRKIQGGRVEVRAPLYMACLVAIQHNPVLKSFYRRLREAGKPARLALVAAMRKLLILLNAILRDQRPWAHAQT

SEQ ID NO: 420148 - protein, 390 aa, unidentified
MEVVHARCCGLDVPKDTVVACLLTPGSGGRPTAEVRTFGTLTDELLALGDWLAEAGCTHVAMESTGVYWKPIWNVLEGQVALLLANAQHIKRVPGRKTDVQDAEWIADLLRHGLLTASFVPDRAQRELRELTRYRLALVRERSREVQRVQKTLEGANIKLGSVATDIMGKSGREILAGLAAGRADAAALADLAQGQLRKKLPELERALVGRFGAHQRFLVEIAERVRPCEDAVTRLDGIPGVGRTTAEVRVAEIGTDMTRFPTDAHLASWAALCPGHHESAGKRTSGKTRKGNRALRTALVEAAKAARRTRGTYLGAQYQRLAARRGPNTAAIAVAHSILIIAYHLLKDRGTYDDLGADFFDRRDQDALERRLVRRLEALGNKVTVEKVA

SEQ ID NO: 420149 - protein, 359 aa, unidentified
MPVTRKELSFKKQNIYVGIDTHLKSWKVTIMTENLVHKTFSQDPKPELLYNFLQRNFPEGNYYSVYEASFCGFGIHRSLNSLGIKNIVVNPADIPTTDKEKQQKEDMRDSRKLAKALRSGVLQGIHIPSKETEGLRSIVRFRRTLVKDISRMKSRIKSRLYYHGIEIPEALLMSSKYWSNNFIQWIQSIELSTLHGTFVLHELLETMLLLRKRLLLVNREIRKISKSTEYKELYELLIEIPGIATITAMSLIAELENIHRFKKLDHLCSYVGLVPTTNSSGEQEKTGRITSRANKFLRKALIESSWVAARNDPALSMAFNKLCQRMKPNEAIIRIAKKLLNRIRFVMKTKTKYVPCVVS

SEQ ID NO: 420150 - protein, 428 aa, unidentified
MKYNTQNAKIESITEKTLIVGIDLGSETHYARAFDWRNYEYSKKPLEFSNNEAGFVTFKVWMEELAEKYGKDVVIPGMEPTGHYWFNLGAYLQDNGMKPVHVNPHHVKKSKELDDNNPNKNDRKDPKTIAALVNEGRFSYPYIPTGVYAEIRSLSNLRLQAQEEITRIKNRIARWFSIYFPEIKDVYKNPGAVSGLMILKVAPLPKDIVKLGVDGVNQIWRDAKLRAAGLKRAKTLVTAAEHSIGSQEACDSARIELKILLNDYEIYHQREEELMELIEEKLSEVPYIDKLLEIKGIGMKTVSGFVAEVGDIKRFDNPKQLQKLAGYAIVECSSGKHKGESHISYRGRKRLRYVLYEAAISLIARNTEFKEIHRYYQTRGKNSLKKMQSVIAVACKALRIFYAILTKGVTYDGAKMLQDIKRPQLKVA

SEQ ID NO: 420151 - protein, 463 aa, unidentified
MCAELRFQAQISVFLSTETYLCNDATRSCLRNSVNVGLHYFYIGGSLLALKIVYPVCCGMDVHKSFVVACIASTDSAGVTTYKSKRFSTFSHDLRFLAAWLSDNNCRDVCMESTGKYWIPVFNILEPTCNIVLAHPKYVKAIRGKKTDKRDAKWIADIFKHDLVSGSFIPPYDIRQLRDLMRYRYKLTNFTVGEKNRAQNCLTVSNVKLDDVFSDVFGKSSSAILDRLSLCPNGDFDVAPLVSGKCKSPVEKIQAAVDGSICPEQLQKLAIIRSHINAIYECKSNLDSLICSIADKFRAQVNLVSSVPGIQFFSAVSVISEIGVDMSVFPTAKHLCSWAGLVPQNNESAGKKKTTRISRAGAYLKPLLVQCALTVCKSSKHPEIRNRYLMLKKRRGHKKAIIAICRMLLTAIYTILKTATPYNPSLYRSQNSAPKSRTFTTISAIAFLKSHGYVVVDCDGVMT

SEQ ID NO: 420152 - protein, 339 aa, unidentified
MELYAGLDLHSRNTYIGIMDKTFNRVFKKRVPNHLEHILQTLDPFRDQIKGFVVESTYNWYWLVDGLMEAGYSSAHLANPSAIKQYEGLKHSDDQHDAFFLAQLLILGILPQGYIYPKKDRPVRDLARKRMFLVQHKTAHILSLQSLIQRHCAMKVRANDMRHLTVKKLEELLEEKYLVLSAQANLDSINFFKQNIQRLEKAIRKKVKLKKAFHCLKTVPGIGDILALTIMLEVGDINRFNKVGNFTSYCRCAPSQRLSDGKSKGHGNRKNGNRYLSWAFTEAAQLGRRHNERFRAYYNRKVAQANTSLATKALGNKLARICYYIIKDQVPFQEELLCH

SEQ ID NO: 420153 - protein, 416 aa, unidentified
MVDDVQWFTGIDWATQSHCVCLLDAEARRVGQREFAHGGAGLTELRDWLLEKTKAAPGQIAVAIETTHGPVVEMLLEHGFVVFAINPKQLDRFRDRFTVAGAKDDRRDAHVLAGSLRTDREAFRQLASDNPTVIELREWSRITDELKQERTRLANRLRQQLWRYYPQAAELTDDVADDWFLALWQKVPTPASAAKATEKAIARILKEHHIRRLDAETVLETLRKIPLCVAPGTTEAACAHIRSLAARLRLINQQSKEAQQNLDRLCAKLEEENPSGQSLEQCDVTILRSWPGIGRINLATLLAEATEPLRRRDYHALRALAGVAPVTRRSGKQRFVIRRLACNGRLRTAVYHWSRVAIQHDAAARRRYDALRGRGHGHARALRSVGDRLLYALCTTLKRQTLYDAAYHGAQMVAKA

SEQ ID NO: 420154 - protein, 523 aa, unidentified
MATKTRKNKNSKTTVRFIGKPTGQIQERVQKVGPQHFGIVSVDCAKRRSKWMLCDFYGRVLVEPTVVEHTRSGLDMMTQSITIARQTHHLKDLIVAVEMTGIYHRPVQRACRDAGFETRLVHPFASKHFHKPLHTDDKTDDHDLEAIFHAVAQGYGLEIKPLDEIYLSLQLLTRHRSRLVKQKARLQIQIRQLMHQSMPGYADLFEDDNFFNKSIAISVAKKFSSAKEIYDAGVKGISAYLKKNKIRFQAPTVEKIVAWASNAADAAPLGKMLTMQWLELNDLRFQMVENVVRIEREMAGFLAKTPYVLLLSVTGINVVSAGALAGEAGPLNRYANSRSMIGRAGLFPSRYQSDEVDRPNGKLVRQGNKRLRVALLTIAENLIKCHSYYRGYSALLTQQKVHPRDRRCRVANKASRMIFQIVGGRQVWRGKGVDREYLLYKLKEFHRTHRSPATQTVGDLNEAFKWLPKSSYREEAEQLSVAAGKRRRGVTSLGDLLIPLLIRLGVPASDEVDSSSSEARDSH

SEQ ID NO: 420155 - protein, 349 aa, unidentified
MSTEQRSAVTYGIDLGKTWFHVVGLDAQGSPVRRTKLNRTSITRFFINIPRALIGMEACPGSQWLARKLQALGHEVRIVPAQFVKPYVKSNKNDTIDAAAIAEAITRPTMRFAQIKHCEQVDLQALHRSRDLLVSTRTRLINQMRAFCLEYGVAMRNGVGAFKAALPAVLGNEGNDLTSAMRELLVDLAQELTTIEDRIAQLTRKINAQADQCDGARRLATVPGIGQLTATALVAAVGDARQFKTARDLSAWLGLTPGQYSTGGKTHLTGISKRGNSYVRKLLIHGARSCSMHLDRTKDRLGLWIAQIEGRLHHNKMVVALANKLARIAWVILTKPGALYERQAPQLVS

SEQ ID NO: 420156 - protein, 341 aa, unidentified
MQISVLGVDLGKNSCSVVGLNGSGKVMVRRRMRRETVIAYSAKLPACIVAMEACCGAHHMARELVAQGHVVRLMSPEYVRPYVKAQKNDDRDAEAIAEAATRPTMRFVELKSQAQLDMQTLHRVRDRLIGERTSLMNQIRSVLLERGHIVPQGKAKLAARLAELFAEPALALSPRMRELVCDMRERWQVLDKRIGAFDKEFAEHARQDEHARRLITIPGIGALNATALVAAVGDARTFARGRDLAAWLGLVPRQQTTGGKPRLLGITKRGSKYLRKMLIQGARAAMPTLRKSNTRLGAWLRGLLSRAHGNTAVVALAAKMARIVWALLRHERTYEATAVAA

SEQ ID NO: 420157 - protein, 355 aa, unidentified
MNSQKYIGMDVHQATISVAVMDDQGKLIMECILETKAATILEFIQGLRGTLWVTFEEGTSAAWLHDLLQPHVSHLVVCDPRRNALLKDGSKSDRIDARKLAELLRGNQLKAVYHGENGVRTLKELGRSYLTLTQDLTRVMNRIKALYRSWAIPCQGTTVYAARHRAEWLAKIREPGVRLRAKRLYQQLDLLQPVRQQARRDLLLESGKHPGVKLLRQIPSIGPIRAALLVGLLQTPNRFRTKRQLWAYSGFSVEIHDSGEFRYVRGKLRRNRERITVRGLNDNHNRDLKNLFKSAALSASARPGPLYDFYVALLAKGMRPTMARLTLARKMAAITLTMWKKGVDFDPKQLHRQAA

SEQ ID NO: 420158 - protein, 317 aa, unidentified
MSKSFIGIDVSKNSLDVHILPEGLSLSYRYETKPMKALIKKLKTHTPELVVLEATGGYEITIGIALADAGLPVAIVNPRQVRDYARALGILAKTDKIDAYVIARFAQDVKPEARGQMTFKEMELKSLVARRQQLVEMLSAETCRLSRITVPRVKKGIQEVIQVLEAQIKAIDEDLDNEIKKNPTWNQKLEVITSFTGVGKHTANTLVFGLPELGTLNRQEIAALVGVAPFNRDSGMLRGKRTISGGRANIRKALHMPTLAAATRWNKDMMVFYQRLVSRGKKHKVAMTACMRKLLITLNAMVKNNEPYHPKFRGVPA

SEQ ID NO: 420159 - protein, 345 aa, unidentified
MESQIIFGIDVSSKSSTVCVVNDRIKQGESFRISNDSFGYQKLYEQLNQYLITPLVVFEATGVYSLSLQAFLEDYHIKYLKLNPLKAKKLMDNNLRHNKTDKVDAYRLALIQFNAPQKLRDPQPREYHELQNASRYYEELTRSIVTTKNQLHRNLQSTFPQIEEILSHPSGRIYWALVSLFPHAGYVLEKNETQVTQMLNSISGIGQQRARYLTTRLYAFAREAYPYDSKDSIIVRAIQRNISNLFSLQQERDYVINYMEKLAKAVNARALSIYLSIPGVARITAVRLVAELGDLRRFSTSAQIDAFVGIDPGRYQSGEKDSSLGITKHGNHIARKILYLSLIHI

SEQ ID NO: 420160 - protein, 319 aa, unidentified
MLPHPTPLATHLVGIDVSKDWLDIAFDDTKVERVDNTPAALQRLARRLVKAGLTTAGLEPTGGYERLAVAVLREAGLTVLQVDSWRCRQFAKACGQRAKSDPLDARIIRAFMLHHPCRPFPEPSQAQSDLTAWVREITRAEADIRRLENRKAHPTLAAITARLDAEIAALRETVAAAEQAIEALIAADPAMDAKAKIITSVPGIATKTARVLLAEAPELGRFTPRQAGAIGGCAPYRNDSGKARRPAHIEAGRRALKRACYLAAFAAIHWNPWAKQLYADLKARGKPAKVALIAIARKLLTILNAMIRDNKPWRDPKTA

SEQ ID NO: 420161 - protein, 386 aa, unidentified
MSRPSNILLPAINYDHTLVLSVELSNKSWVLAAQVPGLPRTKAQRTIEPNKNALLAAIDGYRARAAAVGYTVDRVITTYEAGWSGFWLARWLVAQGVEVHVVQPSSVPVDRRLRRAKSDGIDAELLLRTLLAWLRGEPRVCSMVPIPDEADEDARRCVRERTELLSDRVGLTNRIGAVLATLGVNDYNPLLQSRRRRLAELRTGLDEPIPPNALAKIERLLARLELVLAQIAELERERDEVAAADAPDRAGKMIQQLASLRGIGVQSATVLVREAFVRHFSNGKALGSYAGLTSTPYSSGGIDREQGIGKAGNRRLRTVMVELAWLWQRYQPGAAQVAWFRDRVGSTGRRIRKVMVVALARKLLIALWRFVIDGVMPEGAVMKPSI

SEQ ID NO: 420162 - protein, 341 aa, unidentified
MKQFIRIGVDLAKNYFQVHALANEGGPAVTRKLKRSKMHEFFAQIEPCLIGMEACGSAHYWARELETMGHEVLLMPPAYTKPYVKRGKNDAVDADAICEAMSRPGMRFVPVKSAEQQATLMLHKTRELLVKQQTMSVNALRSHLSEFGIVVAKGIGRVDELLELAESDTTLPEVAKAAVKILAQHLEGLDKSIDDLEKQIGRVYAQSEMSRLLDQVPGVGKIIASVISASVPDPSVFKSGRDFAAWLGLTPRQNSSGGKQTLGGITKQGNRYIRKSLVLGATSLLHVVGKRKGALRDWIVALLAKKPARLVTVALANKLARIVWAMMKTGECFRAEMFAKA

SEQ ID NO: 420163 - protein, 354 aa, unidentified
MSEQYAGRQIVGMDLHRRRSVLVRMTDMGERLETVRISNDPEYLAQVMARAGEAPEVVLEAAYGWYWAADTLAELGATVHLAHPLGVKMFSYRRVKNDQRDAADLADLLRMGRLPEAWIAPPATRELRGWVRHRAKLVGLRSSLKCQVHGVLAHAGVWVPMSDLFGVAGQQLLAELSAGDRLSIESRSRLDSALRVIGALEFEIELFAKLVNGRLRTDPGYRALQAIPGVGPVLAAVFVAEIGDITRFHRPEQLASWAGLTPKHHESDTTVHRGRITKQGSRLVRWAAVEAIQRVSGHTRLGQHRDRVAARRGRNIGVVAAARELLTLVFYGLRDHHIRALDTPAAPVASTPAA

SEQ ID NO: 420164 - protein, 354 aa, unidentified
MSQTLNAAIAVVGIDIGKNSFHIVGHDERGAIVLRQKWSRGQVEARFANMPPCLIGMEACVGAHHLSRKLRAQGHDARLMPAKYVRPYSKGQKNDFRDAEAIAEAVQRPTMKFVATKTADQLDLQALHRVRERLISQRTGIINQIRAFLLERGIAVRQGLRFLRAELPRILATPPDVLSPRMVRIIEDLAGDWRRLDERVERLSDEIEAIARLDAGCERLMSVPGIGPIISSAMVAAIGAGDVFTRGRDFAAWLGLVPKQISTGDRTILGKISRRGNRYLRVLFVQAAWVVLIKPKIWERHGLKPWIEAAKKRLHHNVLAIALANKLARIAWSVLARGRAFEARKMDQAANQSA

SEQ ID NO: 420165 - protein, 350 aa, unidentified
MIIIGCDFHTRYQQIAMMDTETGELVERRLEHENGEARAFYASLPKPVVVGMEATGYAQWFERMLAEFGHELWIGHASEIRAGVVRKQKTDARDALHLLHLLLEKRFPRIWIPSPAERDTRQLLRHRHKLACFRVSVKNQLHALAMSQGVCRKKKLFTARGREMLEKLSLGPWARRRCQELLGMLDQLNTVIDELDRAVQQQAESHAEAARLMRHPGVGPVTALAFVLTLGPVTRFRRSKHVVSYLGLNPKERSSGGKQRTSTISKQGNTMMRWLLVEAAQTAARYDPELLRLYQRLKFRRGANVAKVAIARKLAVKLYWMLRATASCAQRAPMQGSSRGTLVPQAGSSF

SEQ ID NO: 420166 - protein, 412 aa, unidentified
MEVIHHCVGGLDVHKKMVMACRRRLVDEVHAEVEIKPFKTTTAGLRELAEWLSEWGVTDVAMESTGIYWVPVWNILQEHFKLMLVNAQELKKVPGRKDDVLDAEWIAQCLQCGLLRASFVPGLEIRQWRHLTRQRAKLTDHHTAVVNRMHAVLHQVNIKLSDVASNIVGVSCRKIIIAISKGESNPETLAGFGRGRLKAKPEDLAESLDGRVEDHDRWLLKRLMSQLEMLEKEISIYDERIRFQMKDYDTQIQLLDTITGVGRRVAENLLAEIGPNMGQFPTDDNLVSWAGLCPGRNESAGKKRSSKTTNGNKWLRRTLVEAAWAAVRSKNTYLAALYKRLAPRRGKNRAIIAVARTILQAAWHILSKQIEYRELGGNYSERLNKNKTRDYFVNRLHRLGYNVALTEKEKVA

SEQ ID NO: 420167 - protein, 363 aa, unidentified
MKIVGCDLHARQQSIAMVDTETGVLTEKVLKHEGNAVREFYAALEGPVVVGIEATGAMQWFLELLEQLGIECRVGHPAKIRAAETRKQKHDRRDAEVILDLLLMNRFPEIWMPSSEQRDLRTLLRDRHQWVKMRTRLQHTLQAIALNHALREGRALWTAAGRRSLQDLTLPKYTAQRRDELLRLYTQLDKRIQQLDKQVETEARQRPQARRLLTHPGVGPVTALATEVFLGDPHRFAGAHQVASYIGMIPCEHSSGKRQRLGKLSKEGNSLLRYLWIEATLHAAVKDPELKRFYRRKLVQKGMGKARVATARKLGIRLWIMLRDEIDYEEFCRRGKLPQKGKTHAGMPDYNSGPARAVTGSTE

SEQ ID NO: 420168 - protein, 345 aa, unidentified
MYYLGVDCHKKYSQVAVLDGEGKLKMNLRVQNNKEHFASLVDNLGQPCQAVIETGYTWGIMYDILTEFGIDVKVAHALKVKAIASAKIKTDTIDARTLAELLRANLIPEVYVPAKDIRSQKDIIRQRCWLVKLKTMLKNRIHQVIGRNHIESPGFSDIFGVGGRKFLNSLELPQPDQDILRQDLSLFDFINEQIKLTEKWIEDFLADNHYRKIIQTIPGFGKILSTLVALEINDINRFNYPGKLAAYSGLVPTTYASGGKVFHGDLLPGCNRWLRYAFVEAAWKSIVVSPYCRSLYDRLKKRKCSNTAIVAVARRLSEIAYLCLKENRCYEERPYKLYEKRFAKI

SEQ ID NO: 420169 - protein, 345 aa, unidentified
MTIVEARVITGGVDTHADMHVAAALDSIGGLLGVEEFPVTPAGYARLLGWLGGFGTVGLVGIEGTGSYGAGLARHITAAGIQVVEVDRSDRQDRRRQGKSDPLDAVSAARAAQSGRARGAPTGRDGAVEAIRALMVAKRSARSERVQTINQARSLIVTGPDDLRARFAGHTVAALVSELASLRPRPGAVVGYATRIALRELGRRAEFLDSQLERLDELIVPLVVGRAPGLLALHGVGPDTAALLLIAAGDHPARLRSEAAWAHLCAAAPIPASSGKVTRHRLNPGGDREANHALWRIVITRMSSHAPTRAYVERRTAEGLSKKEIIRCLKRYVAREVYRHLRPVG

SEQ ID NO: 420170 - protein, 301 aa, unidentified
MDRFLPVIRIRKVGFTMEYELYFIGIDVAKTKLDVDILRPDGRHLCKKFANTPPGYEDLVRWLRSHEVSHAHVCMESTSTYMEDAAAHLSDAGYTVSIINPSLSAAFARSEGLRNKTDKVDARMLAHFCREKKPPAWEAPHPTERALKALVLRHQSLTEMQTQEKNRQETAPEVQLESIDVLLQCLGAELRRIEKQIKDLTDNDPDMKQRRKLLSSIPGIGEKTAAVLLAYTGLKLRFATARQFAAYAGLTPKQHESGSSVMRTSRMSKAGPVHLRGALYAGDVSVVSHGMGKSVQGKAGR

SEQ ID NO: 420171 - protein, 353 aa, unidentified
MAEDPSSVIAVIGIDIGKNAFHVVGLEGRGAIVLRQKWSRGQVEARFANMPPCLIGMEACVGAHHLSRQLRALGHDARLMPAKYVRPYSKGQKNDFRDAEAIAEAVQRPTMKFVATKSADQLDLQALHRVRERLVRQRTGISNQIRAFLLERGVAVRQGLRVLRAELPGILARRCDVLSPRMVRLIEDLAGDWRRLDERIESLSGEINALARQDAGCERLMSVPGIGPIISSAMVAAVGAGDAFEKGRDFAAWLGLVPKQISTGDRTILGKISKRGNRYLRALFVQAAWVVLIKPKSWERYGLKPWIEAAKRRLHHNVLAIALANKLARIAWSVLARGRGFEARLIASVTQPV

SEQ ID NO: 420172 - protein, 341 aa, unidentified
MKKFMRIGVDLAKNFFQIHGIEEEGGQALSRKLSRTKFKPFFEGIAPCRIGMEACGSAHYWARELRALGHDVVLIAPAYVKAYVKRGKNDAADAAAICEAMSRPDMRFVPIKSADQQAVLMLHKTRDLLVKQRTMIVNALRGHLSEFGLIAARGIHRVHDLLALALDEEGLPEEARQAVAVLAEQSELLDGKIDAMENKIAKSSAKYPMARLLKEIPAIGPLIGSALAASYPDPSVFKSGRDFAASLGLTPGQHSSGGKEKLGAITKKGNRYLRKMLVVGCTSVMRVAHKYKGALAEWIVAIKAKKPERLAAIALANKLARVCWAMLSTGEGFREELYTRA

SEQ ID NO: 420173 - protein, 409 aa, unidentified
MDPVIDCVAGLDVHKATVVATVRAPGAHGQRTSRTETFGTMTADLIALRDWLQASGVTHVALESTGVYWKPIYYVLEDTFQLLLINMLELKHVPGRKTDVKDSEWLAQLLECGLLKASFVPPPAIRELRDITRYQVQQVRDRAAEVNRLCKVLEDAGIKLTSVATDVLGVSGRAMVDALVAGTTDPTVLAELARGKLRAKLPALRRALHGRFRRHHAFLVEQILAKIDFLDETLDRITAELDERLVPFAPMLANLDTIPGVNRTTAVSIIAETGGDMTRFPTAGHLCSWGGMCPGHDESAGKRRSGKTRQANRYLRAALIQSALGASHTKGSALQARYHRVKRHRGHKKAIVAVGHQILEIAFYLMRDGGTYDELGADYFDRRHTDRTVRRHVRQLEALGFQVTIEKAA

SEQ ID NO: 420174 - protein, 412 aa, unidentified
MEVVHARCAGLDISKKDAKVCVRVAGAGRRKTIETVTTWSSMTNQVLALREHLIAEKVTCVVMEATGDYWKPFYYLLEDLPGVAVELVNARHVKNLPGRKSDVSDATWLAQLGAHGLVRGSFVPPEPIRVLRDLTRTRTAVTRERSREVQRLEKLLEDAGIKLSAVAADIIGVSGRLMLAALIDGQRDPAALADLAKRRLRSKIPALTEALTGRFNAHHAFLARVHLDLIDQHTAAIEEITARIEVVIEPFQGFRDLISTIPGIGPLTADVVIAETGADMTRFPTAGRLASWAGTTPGSNESAGRVKSTKTRPGNPYLQGALGAAAMACAQNPSTYLGARYRRIATRRGPMKANVAIQHKMLTIIWHMGTTGTLYEEPGADFYSRLHPDRAKNRALHQLEAMGYQVTLDRAG

SEQ ID NO: 420175 - protein, 461 aa, unidentified
MRPERHVSQSKTWEGLKVIHPHAAGLDIGSTEVWAAAPPDSTAEPVQVFGTTTPDLLALADWLKSCGADTVAMESTGVYWIPSYEILEARGFEVCVVNARHFKNAPGRKSDIQDCQWLQELHSVGLLRGSFRPEAEIVALRAYLRQRAELIEHRAAHIQHMQKALAQMNVQLTQAVKDITGVTGLSIIRAIVAGERNPQKLAALRQPGVKKTEVQIARALSGNYRPEHVFALKQALALYDFYTGQLAECDVEIERQFANMKPVDEDLPPLPPSDKTDSHSKNAPSYDARSHLYQMTGVDLMAISGLNASTVQTIISEIGSDLRAFPSEKHFCSWLGLAPHNDISGGKVLRSRTLKTHNRAGQAFRLAAQSASRSPDTVFGAFYRRMKARLGGKQAIVATAHKIARAFYYMLKHREPFHDLGGEEYERRARERELRNLDKRAQKLGLKLVPVQITAVAPAVS

SEQ ID NO: 420176 - protein, 330 aa, unidentified
MKTYNLILGVDVSKLTLDISCAKRSLHIKIENDSKGFSKFKTWCRTNKIHLSETMVVMEHTGGYEYRFIQFCESVSLHYCRISGLEIKRSMGITRGKNDKVDSYRIGLYGEEKIARLKPSKPLDQNILTLKQLLSFRKRLVRENAGLSATIKERQHIYETGAKDAVVRIANLKIRANANHISQIEKEIDHLIKSSDSLSKSYRILTSVKGIGPINALMTIAYTENFISFTDPRKYAVYVGVVPFDNSSGTSIKGKKMVSYIANKELKQELNQAAKSAVTHDPELRAYAQRKMENKHYKIVLNNVKFKLILRMFAVIKRGELYTKDFRTAA

SEQ ID NO: 420177 - protein, 386 aa, unidentified
MQYPNDSRRCLTVLDQDSTLIAVIEMSLSSWLVAGIVPDIERQPLKKLEADEHALLKLLLRWRDEAMKAGRKITRIAVAFEAGRDGFWLARWLRARGIEVHVIHASSVAVPREHRRAKTDRLDTEMLKRAFLGWLRGERDHCKVVAIPSLAEEDAKRPNRERESLVGECSRLVNRMKAAFVRLGIRGFNPKLKKAPERLGALRTPEGEAIPPNTVAAMRRDMERLRLVREQIRQIELTRLERLQKAPEVGAHAMVRLLARVMGLGIETADMLVQEVLSRELRDRRAVARYSGLTGSPDESGRKHREKGLARAGNARVRRGMIQLAWRFLMFQKNSALAQWFRQRTENAPRTRKTMIVALARKLLIALWRFVREGVVPEGIVLRPAP

SEQ ID NO: 420178 - protein, 358 aa, unidentified
MSHYRVGCDAHRRYSQFAVLDQNGQLRQQTRVDHEPGAIQAFLEALPEGTPVALESVGNWYWIADEIEAAGCLPLLTHAAKAKVMMGNVNKTDKLDAKGLAKLLHLDSLPTVWLPPGEIRDERELHRTRMALSKLRTALKNRIHSTLAKYGITTTDHSDIFAGTGRIWLQGTIGRLPPETGRCVVQEIEALDGLGDQISQLERRIRQRTALTPSIQLLKTLPGVANVLAIVIEREIGSIDRFDTSGQFTSFSGLVPTVHASGGKTRFGHMRKPCNQYLKWSFIEAANVIVRHRHHPAWKTKYVCQIYDQVSQRKGHAVAVGAVARHLAEAAFWILKRQQPYRPPANRQASPKQVRGRA

SEQ ID NO: 420179 - protein, 425 aa, unidentified
MTAQPNATPAATWVAIDIAKRHHAVLIETPDGKQQQFRMASSMEEHDRLVALLRGLPQPARIAMEPTGDCHRTLAFRLLTEGFDVCLVSSVAGARYREAMFNSWDKNDPKDARVILALLKQGMTLRYIDPLLAGHHGLQELSKTHYKISLARTRLQHSLMTHYLPLYFPEIERYFDSAHADWFARFMLRFPTAASIQQRDCETFRKEAWDLVGRKVNKAAWLRELYEIALRSIGLPVADDSLEVQSFRLQLQRFQELVQQRDRLAEQAHQTLSGRPDYESLRSIPGIGPVLALTILAEAGDLRRFAHHRQFLKYCGLDLAKCQSGQYKGQERLSKRGNARLRFAFWFAATVAIRMRENSFREKYERYIRNDPSNADRKRKALTAVAAKMARIAYGLVKQKTQYRCYFENALPRRSTPLRRAVGTS

SEQ ID NO: 420180 - protein, 394 aa, unidentified
MFLVGIDVGKLSHMFCIMDSSNGEILVSPVSFKNNKQGFDFLMGNIKLYPKDKLLIGMEDTGHYHFNLLKFLLDSGYTVALINPITTDLTRKMQLNPTKDDNLDTMTICDVLASSPRKKGYRISKINNFEFYEQKRLTREHHDLKEQLNVYANKLQKCIDIVFPEYNSLFRSKYGTVYMKVLKAFGCANAIAHADIRNIRKCFETNRNGRTISLTPEKLKEAAKHSIGFPSKAEVIEIRHLIDLIELIKEQIKDVDIKIEEFSTQLNSPILTIPGISHFSGTSILAELGDLRNYSKASQIIKFAGVSPYKHQSSQYEAQHTAITKKGSRYLRKTLYQVILPVIRYNPVFNEYYHLKLSQGKGHRCAQGHCVRKLLRIIYHLVITNQPFDSTLLK

SEQ ID NO: 420181 - protein, 354 aa, unidentified
MNTTQVFEKRKIAVAIGIDLAKDHCDVVAYNADNKICFTKSNWAYPQLMEWLANAQPAVVLMESCKGSMVRARDIADLGHDSRLVKGADVKALRNVTQKNDIRDADYIARLFYVPGTKYVFVKNQRQQSLQFLQNEYKSLQELRIRVGNQIHAGLEEFGCPGSKSKKFIQSRMMAHLEKNAELIPDEVMASFLRRRDMWLNLFEQEEQAKTRMEEIAMTDDDAKRIMTVPGVGAQTAVGMLVHIGGDIGRFKNSGQFAASIGLVPKQNSTGGNITLNGITKCGPKRLRANLVQCGQVILMYADKLKGNFGDWVRKLRDSGKKRGVIACAIAAKIAKIIYRLMKDKVDYTPVPSR

SEQ ID NO: 420182 - protein, 412 aa, unidentified
MRRVIGIDTHRTFGEVVIWEDGRLRHVGRVDMTRTALEGFGKKLLATDEVVIEATGNCMAVSRVLTPFVKRVVIANPLQVKAIAHAHVKTDKVDAGTLASLYAAGYLPEIWTPDAATERRRRLVARRYQVVRHRTRIKNEVHSILYAHLIPRCPHADLFGRLGRTWLTSQPLPDDERAAIERHLRELDRLGDDLRVLDQEIAQSALDDAAIKRLITITGVNLAVAAGLVAAIGDIGRFSSPQKLVSYFGLNPRVRQSGLGAAHHGRISKVGRSHARAMLVEAAWATAKAPGPLHAFFVRIRARRGHQIAAVAVARKLAVLCWHMLTKQTDYHWARPALIANKRRAMELQAGRPQKKGNKRGSTYAYNVKALRDQEMRLAQQAEHSYEHLVAHWQARPAKKRARGRLKPAGLE

SEQ ID NO: 420183 - protein, 405 aa, unidentified
MEHRIITAVGIDVSKYKSMVAVRRPGGEVVMEPFEVQHTAAGIAGLVSKLAALDGEVHVVMEHTGMYWRPVAMALKQAGFFVSVVNAILIHRFSDNSLRKVKTDKADAMKIANYALAYWQDLRDYSETDETRQLLKVQCRLYERTIKTAKSLRNSLISILDQTFPGANNFFPTSYRNAKGHYKWVDFVRRFWHKDNVAAVSIQSFSESFRKWCKRTGYHYSQADAERIHRHARESVATFKKNDSTKLLITQAVDSLNAVYEAAEALRGEMYRLASLLPEFDVVMNMQGAGPITGPQIMAEIGDVRRFTHKGALVAFAGVDAPPFQSGTFDSKNRHVSKRGSPHLRAALFRVCSVILQCKDEGNAVYAFMDRKRAEGKHYYVYMVAGAAKFLRIYYARVKECLAAA

SEQ ID NO: 420184 - protein, 388 aa, unidentified
MDVLYQSCAGIDVHQATVVVCILHGPLTSTRPKREMAQFDTTTKGLKACHDFLSQFHVEAVGMESTGVYWRPVWHELCDDFELILAQPAHMKAIPGQKTDKKDAHWIAQLTRIGLLPRSFVPDETIQELRELTRQRKHYVESRNRETNRIHKILQSGGIKLTTYIEDIMGASGRNLLQLLIDETPVTPRMIHQSVYTSLKRKVPQLLEALDGYFSAHHRFMLGQSLEIYDFYQKQIDCLEERINGYLNLYERPVEILDSIPGIDLITASVIISEIGVDMSQFPTAGHLASWAGLCPGNNESAGKKRSTKIRHGNSYLKRCLCQAVFAAKRQKGSPLAERYYQIQSRRGPQKATIALAHQLLKIAYILLKENLTYQEFVLQKRLLETSQ

SEQ ID NO: 420185 - protein, 342 aa, unidentified
MVFLNPNSCMGLEPEPSKEGSWMMAQNDVVVAGIDIAKDKADGCIRAVSQKQTFPSTTEGRRQLISWLRKHKVTKVVMEASGGYEREWAKALRVKNIEVRIVDPKRVRHFAKSAGRLAKNDVIDADTIAWFAETFGEAPGQAHDAARETLQQMVNARRGLMEMRTMVSNKGEHDVPEAVKNGHARLLKAIAVEIAKLEAAIAAMVKATPHFAARAEIIESVPGLAGTTSAGLIAMMPELGEASNEAVSALLGVAPYDDDSGKRQGGRQIKGGRRKARNLFYMGCMGAATRHNPVIKAFYQRLIAKGKLAKVALVACMRKLIVILNIMIARGEKWDASRYAVS

SEQ ID NO: 420186 - protein, 395 aa, unidentified
MSAEGEAIRSNDYRKDTTVKAPSTRPAAVLGLDVGKSSHWACLIDRDGEVLASAPVRNREAELDALFASAPAGTLVVVDQFRNMGSLAVRRARAAGLGVAHLPGLAASRAAGLFAGEAKTDERDAAVIARTALGVPDSLSGVPGRGEALEAARALSSQRDHVVACATRDKNRLRAVLLESCPALEAAVDLSDRRWLELLAGFGGAWGIARSGAGGPRAEAAGEAAAASTAPPPALVEAENRQVMFLAARISEALDEAGALEAETAALLEGDETYACLLTVPGIGPRTAAQLAVSVDIGRFPDHDHLASYCGIAPRVRSSGTSVRSVRASRRGDARLKSLLIFSCNSLVRSSGRYGEYYRACRARGMGHGRALKAVARKRLRAIYAVMRDRVPYRE

SEQ ID NO: 420187 - protein, 312 aa, unidentified
MAMLSFCGIDVSKDRLDVVVLPEGWFFSVSNDTAGWAELVARLRPLTVSAIGLEPSGGYERGIIRALLAAGLSVRRINPNKLRQFARARGVLAKNDRLDARLIAEYVAIMPTRVVQRDPAVERLAEIVTMRRQLCDEHVAAENQAAHLEDAMLRRLSKRRQMRLEADIRLLDKRLAEMVAANVALAQRYELLTSMPGVGPVLAFTLIALLPELGKMSRKQIAALVGLAPYDFDSGKLKGHRSIYGGRMSVRNVLYMAALSASRYSPALKAFHNRLADADKKSKVIIVAVMRKMITTLNAMLRDSAAWQPRSA

SEQ ID NO: 420188 - protein, 347 aa, unidentified
MRFVGIDIGKWKCRAAIMDPGGLILEEFTFTNNHEGIEGLASRLTLADRVVMESTGSVWTNLYNHLDEKHIPVTLANPLKTKAIASAKIKSDKVDARILAHLLRSNLVAESYVPPKHLREIRTLIRHRVAIVKIRTMVKNEVHALIDTHGFTCPYSDMFGKGGIEWLRTLQLPALDRLILDNHLTHLENLNQQTERVDEEVHSEAVEDPDVRLLLSMTGLNVYSALLVKSEIGNITRFPHYKKLASWAGIAPSLHQSGNVEYHGSITKQGSRMLRWVMVEAARVAVNHDDRMRAFYERVKNRRGDQKAIIAVANKMLKITWFMLTRREPYESRNEKRYQKKLNSINN

SEQ ID NO: 420189 - protein, 350 aa, unidentified
MLIIGCDYHPGFQQIGFVDTETGECGERRLVHREEAEQFYRELKERNLAVRVGMEASGHARWFERLLRELQFELWIGDAAEIRTRRVRKQKTDRQDAQLLLRLMLEDRFPRIWVPDSENRDLRQLLWHRHRLVQMRTRVMNQLHVVALNEGLRRKKALWRPAGRKELESLVLAPWASRRRQDLLDVLDQLTPKIQELTRALEEEVQKRPVTRRLTTHPGVGPLTALAFELVIGTPERFHCGKQIASYVGLVPSEESSGDRRRLGHISKQGNALLRFLLVEAAQVTVRSHPQWRSRFFHLALRRGRKIAKVAMARKLAVHLYWMWRQGWDYGQFEKFGSHAGAPGNRRGVQ

SEQ ID NO: 420190 - protein, 342 aa, unidentified
MESAVTIGLDLGKSVFQVHGVDAGGAVVVQRRLTRSKLLAFFAKQPACLVGMEACAAAHHWGRELRKLGHTVRLMPPRYVKPYVKRQKNDAADAEAICEAVTRPSMRFVEIKTCEQQGTLVLHRVRLMLTRQRTQLSNAVRGHMAEYGLVAPVGRNGLQRLIAILDNPDDERVPAVARASLAPLVCQLGLVNDQVLENDRRVRASARSTELGCRLMEVPGVGPVLASAIVATVSDPAAFKTGRDLAAWIGLVPRQNSSGGKEKLGGITKQGDRYLRQLLVAGALAVIRYAQRHGTKRPWLVHLLARRTPKIAAVALANKMARMIWAMMVTGERYREPVVAAA

SEQ ID NO: 420191 - protein, 339 aa, unidentified
MKTTVFGLDLAKTEFHVVGLNQAGKEGAKKKLKRGKVLDYFRQQDPALVAMEACAAAHYWAREIEGLGHQVMLLPPQAVKPYLLGSKNDYNDALAIAEASGRPKIHGVRVRSVEEQALQGVQRLRELQVKQRTALGNCLRGLLGEVGIVVAQGLAQLRTALPGILEDAENGVPDLLRQALNRSYQQLRQLDEDIDQHERQIKAAVARHEDAQRLLSVPGFGPIITAAFISSVGDGKQFQRGRDVSAFLGLVPRQHSTGGKNVLLGITKHGNTQLRSLLVHGARSVLQHAGKKQDRLSRWAVQLEQRVGWNKAVVAIANKIARIAWAVLTSGGTYQAQAA

SEQ ID NO: 420192 - protein, 431 aa, unidentified
MRPNAGGIDIGATEVFVGVPADRDADSVRSFPTFTQDLHELADWLQRCRVDTVAMESTGVYWIPLFQILEARGIEVHLVNAQHVHHVPGRKSDVLDCQWLQYLHSVGLLRPSFRPEQAVCEIRSLMRHRESLVQMACVHVQHMHKSLDQMNLQIHHVISDITGVTGLAIVDAIVAGATDPKELAKLRNHRIKASIETVRKSLVGDYRPEHIFTLKQSLTAYRHYQQLIVDCDQEIQQRVQTFQSKDDGPTATADSSATPTTGSSFDLHSHLERIFGVDLTLIPGFDVLRIQTIFSELGADLSKFSADDAFSSWLNVCPKDGFSAGRRIRSPKIKTKNRVAHVFRMAALSLHSNKSYLGDYYRSQRARHGAPKAIKNTAHKLARIFYHLVTTRQPYDETVFAKLEARNQERRFRKLQSLARQMGYSIVEATM

SEQ ID NO: 420193 - protein, 345 aa, unidentified
MREITTVGLDLAKNVFHVVCRDQHDKEIKKRMLKRSQLPGFFANLPKCLVGMEACAGAHDWARRLREHGHEVKLIAPQYVKPYLRGNKNDYNDARAIGEAVRRPDMRFVAVKTVAQQDIQALHRMRERSLEERTGLCNQIRGLLMEYGIVLPRGVGVLRKRLPELLEDGENALSGFFRPLLARSYQQLQQVDEHIDFYTREVELHAKQDEAQKRLQTAPGFGPIVASVFHSVIGDAKAFAKGRDVSASLGLVPRQHSSGGKEVLLGISKRGNSRLRSLLVHGARAVVSHAHKKDDRLSRWIMRIKDRRGFNKAVVALANKMARIGWAILRHNATYDPKHACRAAG

SEQ ID NO: 420194 - protein, 362 aa, unidentified
MFRPHTLYIRIRIVRKVSEPAFAMKDQDVTDVIRRKQQTAMRYIGIDVSKATFVVAYSSDKGGEIRTFNNTTTGIKQFIGALPKDSSIHCVMEATGNYSAMLLYLLNVAGIAVSMENPLKIKNFARAMLSTVKTDKIDARLIALYGEKMNPQPFKIQGEAILRLRQKRTVIRQLTKQITAMSNLRGSLACLPVPDKGATHTVDETIEFLEKRRDRLQSELTDLVEVEFSRQLALLTTIKGIGITLATALIITTGGFTYFQNAKQVSRYLGICPTYEQSGTSVNIRGHINRNGDAYTRGLLYVAAWTASRFNTKCGETYTRLRQNGKPGKLAMLAVANKLVRQAFAVVTHDKEYVDGFVSNRP

SEQ ID NO: 420195 - protein, 350 aa, unidentified
MMIGVDYHPSFQTIAFLMEETGECGEQELNHSDGQAEKFYRDLKQRGISVRVGMEATGYSRWFERLLAELGFEVWMGNPAEIKTRRVKKQKTDRKDAQLLLRLMREDNFPRIWVPSPENRDLRQLLWHRHRLVQMRTRIMNQLQALAMNEGYRWKKKLFSEQGRAQLEKLTLAPWASRRRQELLELLDRMNPTIEELTAAVEREARKRPEAMRLMTHPGVGPLTALAFVLIIGTWERFPRGKQISNYVGMIPSEDSSAGKQRLGHISKQGNSLLRFLLVEAAQAAARCNPDWRRRYFHLAMRRHRSIAKVAMGRRLAVRLYWMWRNGCEYSPSLEFGSYAGQLGTVHGAK

SEQ ID NO: 420196 - protein, 342 aa, unidentified
MMIVGCDFHPSFQQIAMVDTETGEYTEGKLTAAQARPFYGALQGAVMVGMEACGNTLWFERLLAELGHELRLGDAAQIRAMEVRKQKTDRRDAALLLRLLLEGHFPQLWVPSLEQRDLRQLLLHRHKLVAMRRQVKNQLQHLALNQGVQQKRKLWSAAGRQLLEALPLSGWTAKRRDDSLQLLDELDSRIAELDLAAQQEAEKNSVARLLQTHPGVGPITSLAFALTLGRIERFAHSRQVVSYLGLNPAEHSSGGRQRLGRISKQGNPLVRSLLVEAGQSAARCVPELKRAYQRLKHRKHSAVAKVMVARKLAVRLYWMWRSQQPYAAARTQGSPSHPVVSE

SEQ ID NO: 420197 - protein, 387 aa, unidentified
MQHTMQRNAAVIEYSTLTTSIRNMGAALLAEEVKEIAMESTGMYWIPVWNILEEMGFNLTLVNPYLIKQMPGRKSDVKDAQWIATLLHKGLLRSSLVPCKEIRELRTYSRRYVKLQQRKTSVLQDMERTLEVCSIRITSLVSNISGKSIMKVIHAIIEGENDPEVLAGYIHGRIVNKHNREKVVESLRGYITPQHRFQLELSLEEYELLCRQSDRCVEKMNTLCHEHYPKELELLQTIPGISLLAAMIVIAETGADMKAFENSGKFAGWTGLRPRNDESAGKFKSTATTKGNRFLRAILVQIAWAASRTKGSFFKEKFNRLCIRKNRKKALIAIARKMAVLIWNVLYDQEGYNPRKLIVYEPGKVQAKMNYHQKELERLEKLMQNYA

SEQ ID NO: 420198 - protein, 425 aa, unidentified
MSETRSEVRRWYAGVDWGSESHCVFLSDDQGRKVGQKFFKHSGEGLAEMASWLLKASGANEPGQVLVAIEVPHGPVVENLIERGFAVHAINPKQMDRFRDRFSMAGAKDDSRDAEVMSSCLRTDAKCFRRLVCAEPIFVELREWSRIAEELGVERNRLANRLREQLWRYCPALLQLEDDCSAEWLLDLLALASTPAKAVRLREAKLTQLLKQRRIRRLDAATILKAVQAPPPKLAAGTVEAASAHVLSILPRLQLVNRQIKEADRKIGALIDSLTANEDNQESEPGQKKQHDAAILASLPGVGRTVLATLLAEAWEPLQRRDYAALRSLAGVAPVTKQSGKSRFVVRRQACHDRLANALYHWARVAVQHDPRSRAKYAELRKRGCTHGRALRTVADRNLSVACAMLKTGTLFDPALQAEKNKRTV

SEQ ID NO: 420199 - protein, 391 aa, unidentified
MVCVGIDVAKDKHDCCILDSDGMVRADCFTIPNNMDGFKQLLQTIRNCTQKSDKIKVGLEATGHYSYNILGFLLDKDLAVYVMNPLHTNLYRKSLSLRKTKTDRVDARTIATMLLSDVDLKSYTDTAYHNEELKSLTRYRFDKVRERAKLKQSVSRLVTILFPELEKLVTSLHIASVYALLSEYPGAKQISEIHLTKLTNLLATASKGRYEKEKAIQIREAARTSIGSVMSAKSLELKHTIKLIKELTSEIDEIEDSIQQIMDELHPPILSIPGMGVHSAAMILAEIGDFSNFDSPDKVLAYAGCSPSTYQSGKLTNCYAHMEKRGSRYLRYALYNATKYVCHWNPVFAEYLAKKRSEGKHYNVALSHAMKKLVRLIYALQKSGKAYLTAA

SEQ ID NO: 420200 - protein, 434 aa, unidentified
MVPETQELGTTEDLVERVAAIDVAKASGMVCMRLPHATRTGRRVQEVWNVPSTTTAILELGDRLVCQGVTRVVMEATGAYWKPYFFLLEARGLECWLVNARDVKNVPGRPKTDKLDAVWLARLTERGMLRPSFVPPKPVRQLRDLTRLRAALNQERSRHKQRVEKILEDAQIKVTSVLTDLFGASGRDMLAALIAGERSPRVLADLARGNLVRKKATLADALTGQFEDHHSFLCQTLLDSIDHLTGQIARLNEQITAAVQDLPGPEEHTRPGPSLVERLDAIPGVGPTTAHILLAELGPDMAVFPTADHLASWAKLTPRTTQSGAKRGSSPTGRGNPWLKSALGEAASAAARTDTYLGARYRRIVKRRGRKKALVAVARSILIIAWHLINDPDTTFCDLGSDYHERLIDPKRRTRDLVRQLNALGHDVTLTPAS

SEQ ID NO: 420201 - protein, 338 aa, unidentified
MDHYAGIDLHSNNSYTAIIDNDNKKVFKKKTKNDLRLVLHALKPYRDQVKGIVVESTYNWYWLVDGLIEEGYTIHLANPSAIKQYAGLKHSDDVTDAFHLANLLRLGILPTGYIYPKEERPIRDLLRKRMQLVQQRTLQIQSFQNLVSRNLGKSMNGNAVKKLSEDDVEHLFTDKHLVVSGKASIATILFLRDRIQAVENIIHKAAKLRDEYRLLMTVPGIKKILGLTIIYETGPIERFEKVGNYASYCRCVGSKRLSNDKVKGKGNRKNGNKYLSWAYVEAAHHALQHYEYVKRYYQRKMVKTNMIVARKTIAHKLARACYYIIRDQTRFDPARVFV

SEQ ID NO: 420202 - protein, 334 aa, unidentified
MDTHADMHVAAALDPVGGLLGVQEFPATAAGYASLLSWLRSFGILDVAGVEGTGSYGAGLARHLAAAGVRVVEVDRPDRQDRARQGKSDPLDAVSAARAALSGRASGAPRGRDGAVEAIRALMVAKRSARQERTQAVNQARALIMTGPEELRARFVRRSPAQLIEAIAALRPRPGDVPGYATRVALREPVRRDWFLDARLDRLDDLTGPLVTARAPGLLARHGVGPDTAAMLLVAAGDHPERLRSESSWAHLCGVAPIPASSGKTAGRYRLNRGGDRQASSALWRIVIVRLSSHPATRAYADRRSKEGLSKKEIIRCLKRYVAREVYRQLRNGA

SEQ ID NO: 420203 - protein, 391 aa, unidentified
MGRAWIGVDIGKDFHWALAIDETGRELSSRRVENEQGDIERLIEQALGLGYELVWGVDMSHGPVALLVASLLAAGQEVVFVPGLMVNRCRGAFVGANKTDALDARVIAENARMRHDLATFGVKDDLLVSLRMLVERRKDLVTDRTRSVTRLRSVLITVFPGLERTLKIKNKGTLILLTHYQTPEAMRRAGEKRLADWLAKRGVRGATKLARTALAAAKAQTIVLPGTDTAAALIARMATELLDLDTRLATATKELESCFFSHPQARIITSLPGMGPSLGAEFLAAVGDIGRFASADRLAAYAGLAPVSRDSGKTQGRLVSTRAGNHSLKRVFFQAAFASLHEPRSRAYYDRKRSEGKRHNQAVLALARRKVDVLWAMLRDGTFFESCARAA

SEQ ID NO: 420204 - protein, 388 aa, unidentified
MLYVGIDIAKLNHYASAISSDGEVLIEPFEFTNDNDGFHMLLSKLDQFEKDSIIIGLESTAHYGYNLVNFLVSRSFRVCVINPLQTSAMRKNNVRKTKTDKIDTFVIAKTVMMIDRPRFVTLYDIGLMQLKNLGRFRQNVVKQRTRLKIQLTAYMDQVFPELQYFFKSGFHHKTCYALLKEAPSSDMIASMHLTHLTHILKSNSHGHFKKETALELRVLAQKSVGTSDKSLSIQVTHTISQIELLNDQLMDIENEMTDIVRSLDSTIMTIPGIGYVNGGMILGEIGDIHRFSRPNQLLAYAGLDPTVYQSGNFQAKKTRMSKRGSRALRYALINAAHNVVKCNDTFRNYYDSKRATGRSHYSALGHCAGKLVRIIFKLLTDEVAFDLD

SEQ ID NO: 420205 - protein, 408 aa, unidentified
MQTHNCEVVITPQYNIGAGIDCHKDIMVVHISSKDGQKSETKEFKTFTDDLDKLTSYLVNEKVEVVLMESTGVYWISLYHKLIGAKLNVIVANPQHIKQMPKRKTDRKDAKWLCTLAINGLVRKSFVPDGVHYSFREYCRIRDNYRKRITQLNNRMVKILERSNIKLRSVSSSIRTKTCQLIIDSILDGITDPAQLSTLCLGKLKNKKEAIEKAVKGTISEGDQIILRLLQEDRDHAQKQLDSVNEKILEMEQAHYTLEVKLLDEISGIGQLTAQQIIAEIGTDMDKFETADQLTSWAGLAPGNNESAGKKKSTSTKKGNKYLRTAMVTAAWAAARSKKTYWFFLFSYLKRKMSAKKAIIAIARRMLKVVFKVLKEKIHYVEGGKELFDHYQHVRLAKQVDKSTIKAA

SEQ ID NO: 420206 - protein, 331 aa, unidentified
MKILETVGIDVSKLVIDVIIHSNQCFSQFENTPNGLKKMCKWAFKESSHSAENVLFVFEHTGLYSHTLAVYLSENDIPFAMVPGLEIKRSLGITRGKDDKIDASKIARYGFRLRDEIKPYKLPAKNILKLKSLLSIRDRMVKQRAGYKVSLREQKRVYQCSENKVLFSTQENIIKQLTKQIGLLDSTIMDIILSDEQLLNTYKLITSVKSVGQQTALFLIVYTDCFTKFGNSRKFASYCGIAPFPHSSGTSVRGRTQVNSLANKKIKTLFDLCAKSAIRHNPEMKKYYNKRVEQGKSKMCVINIIRNKLLSRIFAVVNRQTPYVNLQLYSS

SEQ ID NO: 420207 - protein, 363 aa, unidentified
MSHNEFKKIREPIEPQEVSPMKQEMTVLGIDLAKHVFHAVGMDNTGKIVFRKRLSRHDLMPFIAKLPMVLIGLEACGGAHYWARRFRASGHEVKLMAPQFVKPYVKSHKNDSRDAEAIAEAVTRPTMRFVPAKDVDQQDIQALHRVRERLISERTALVNEVHGLMHEYGIVMPKGVSKFRQAVVGKLESEKDKLTPLSQEMFWKLVEEFAALEEQLAYYQKKLEALATTHPECQRLMTIPGIGPLSATALVAAVSDASAFKNGRQFAAWLGLVPRQHSTGGKERLLGISKRGDSYLRKLLVHGARTTIRWVGRKTDRRSQWIRQLVERRGKNRTAVAVANKNARIVWALLTSHQDYQLATGEG

SEQ ID NO: 420208 - protein, 352 aa, unidentified
MTIIGVDFHPEFQQIASVDTDTGEFQEKRLSHREEAENFYRTLAGQKVRVGMEASGHARWFERLLSELQFELSIGDAAEIRTKRVRKQKTDRQDARLILQLLLEDRFPQIWVPSWENRDLRQLLWHRHRMVQARTRIMNQLQAVALNEGLRCKKRLWREHGRQQLESFRLAPWASRRRRDLLELLDRLNPTIAELTQAIEQEAEKCPPAQRLRSHPGVGALTALGFVLIIGEAERFSCGKQVASYLGLVPLEDSSGNRRRLGHITKQGSSILRFLLVEAAQVTVRSIPQWRSKYFHLAMRRGRKIAKVAMARKLAVGLYWMWRKGWNYEQLTKFGSHAGQPGNRHGVQSNTE

SEQ ID NO: 420209 - protein, 217 aa, unidentified
MTLTDGFDAITDELRKYPVVLVLIEATGGLEAAVACLFQAEGFDVAVVNPRQARDFARTMGYLAKTDRINARVLAQMAEVTNRHPGRERFIRAMLDAERQVLAAMVVRRRQLTAMLIAERNRLYPVHPQSRKSINIIIKALAARLSSIKGVGTMTVAALLAEVSDLGSLSRRAISALVGVAPINWDSGTMWGRRTIFGGRGGVRTALYIAALVALIR

SEQ ID NO: 420210 - protein, 416 aa, unidentified
MATQTCPAPLLIALPQHHQAAMAPTNLTHPAQTDQPDVVIGVDTHKDSQVAVALATNVGLPGECSIPANRLGYAILQEWALERGRRPVFALEGTGSFGPGLCCELMAVGYTVVEINRPDRSTRRRLGKDDAIDAEAAARSLLTGTATITPKGGTHLVEMIRLIKGNKDSASKSRTRAINQMKAILITAPAVLREQLEPLVLEALMATYAAFRVAMVDSPNAAAKKALRFLARRVLGLEREIAALLDDLNQLTQQAYPGLRQTYGIGTDAAAANMIVTVGDHPERLRSDVAFASLCGVSPLPASSAKTNRHRLNRGGNRQANATLHRIVVVRMRWHDQTKAYAARRLKEGGSKAEIMRCLKRFIAREVFHTLLGGPPVRTTAALVIQVINASDHHGNQGPGRRHHPNCARMNCGGGA

SEQ ID NO: 420211 - protein, 360 aa, unidentified
MRYSTIVGIDTHSKKNAVCAIVPATGEMREAVLSEDPEQLLAWIVGQDFPKPVGCVYESGPTGFGLARSLVAGGVACTVAATSKLSYRVDRQKNDRVDAKWLAQQMIAGGVREVRVPTPEEESLCHLSRLRGEVAADLRKAKQRVSSFLLLTGTEYTLTKKKWSKTFRKWAASCEFDQPADTFAFRCKMSAVLRLEERLAEVEAEILRIVASSPKLSERMSRLTCIHGVGKVSAFSLVCEVHDFDRFNNGASFASYLGLVPSENSSGKKVSRGAIAKQGNSHLRRILVEAASCYSKPFKAVRSEDAAVPEAVRAKAEKCAARLRKRRAALKKRGVSANKAKVAVARELAEWIYHIAVMPA

SEQ ID NO: 420212 - protein, 387 aa, unidentified
MSEAFDPRKSTTAFDQASTLVVVVELSGKSWRVGANAPGVSRRPLRTVAARDIGAVLEAIERWKGEANKVGCEVGRVVVGYEAGLDGFWIARALRAHGVEVYVMHPASISVERRGRRAKTDRIDVDILLRTLLGWLRGEPRHCTMAPIPSEAEEDMREPGRQREALTAARLKVENQMRSLLARFGVADFRPRLKKAAELLTRLRTFDGRPLPPNTMASLERLLAQHRLLSKQLKGIETAREQVVAVADPDRLQRMIQLLAGVVGVGVETATTLVYEVFSRRFRDRRALAAFVGMTGTPYDSGGSKREQGLSKNGNPRVRRILTQLMWRWTIFQPQSALTRWFVARTGGAKGRIKKIMAVALARKLLVALWRYVETGVVPEGVRLAAA

SEQ ID NO: 420213 - protein, 430 aa, unidentified
MKSNTQNTKIEAVTENTLVVGIDVGSEFHYARAFDWRGIEYSKKPFKFSNTEPGFTEFKAWILHMQAEHDKDAVVPGMEPTGHYWFNLGKFLQDNGMKPVLVNPHHVKKSKELDDNNPTKNDRKDPKVIAGLIKDGRYSYPYLPDGVYADLRTASNLRFQMQSELTRIQNRISRWFSIYFPEYKDVYGNPDAKSGMMILKVAPLPEDIVALGVEGVNRIWREAKLKAVGLKRAKTLYEAAEHSIGSREGATAARLEIRMLLEDYESRAARLDEIMALIESLVKQIPMAEKLMEIKGVGIKTVSGFLAEVGDISRFDNPKQLQKLAGLAIKENSSGKHKGETTISKRGRKRLRYLLFEAAMSLVSKNEEFAQLHLYYTTRRINPLKKMQSLMAVACKLIRIFYVMLTKKVDYDPQKMISDIRRPEIYLQAA

SEQ ID NO: 420214 - protein, 391 aa, unidentified
MLYVGIDVSKDDFSVCFLRPESKKKKEKLPVFKYEQTRKGFKSFLSKLKSFGDKEPLAVMESTGTYHENLRKFMDDEGINVVVLNPASVKKHMDVLSKSKTDEIDARNLAKIAYHFMETVETSNIPQDKQLALRELVRFRQNLVEECSSYKKRLRNYLRLTMPEVLKEFSSMGSVVLLHLLKEYPTKEKMLADPEGVVELLRSHRWKEEDARDLLNNLKESIGGKKDQYGSYEKVILLCVKKISENEEEAEALKKEIEKLLKDYPDHPAGSIPGVGTISLAVIIGEAGDIFRFVTKKHFVSYTGLEPKLRESGRWRGNTRISKQGNAHLRHVFYQIASRVIGRSDKYKAIYNNLRDRGKTHKKAVTAIARKMAELAYVLTINDTTFSEEHS

SEQ ID NO: 420215 - protein, 404 aa, unidentified
MKGPIVSIDVSKGKSDYQAFKNLNVKYAGSRSIKHTKEGFDEIVNLVREMEKKLETEVCVVYEATGVYHRVLKKVLEDNNIKQFIINPLLSAKTRKNDSLRCPKTDKLDPKSIAKTYYSHSLHNSHKQETIYHELRELSRYYEDILVHIRKDKVAFRAQLDIVFPGYDTLYDDLYGPVALAVIEKYPHPEMLQKKKINTVSKVIQSKTCHRQAVSDTMADKAIEYSKTIYSGCDKDDIEVLILQRFIKKLNEDMAEAERTIGEMIKLAQELPDFSIIKSIPGIGDNLAARIIAELGDMTRFKKKNELVAFAGLDPRISESGKNDGDHMHITKKGNKRLRCLLYLAVTCSIRLKRDDNSIKDFYIKKKQQSNPMCSKAAKTACASKLVRIIYSMCKTGELYQYNK

SEQ ID NO: 420216 - protein, 364 aa, unidentified
MAKFTRIGMDTSKSVFQLHGVDAEERAVLRKKLRRKELLAFFAELEPTIVGMEACGGAHYWARELNRLGHEVRLMAPQFVKPYVKRGKNDAADAEALCEAMSRPTMRFVPAKSEEAQAAQMLAGVREGLIKRRTQLSNKIRGHAAEFGLIAAKGLEKIEPLLARIAANESLPVLARDLFAALGEEFRQLKSRLAEIDAKLRSWHRGNECSKRLAEADGIGPITASMMVMKTPDPKAFRSGRAYGAWIGLTPKDHSTAGRQRLGVITRAGDETLRSLLVSGATAVIQQVRLGRTKPSPWLAAILKRKPPKLAAVALANKMARIAWKLMVTGERYDQARAMSEGRAAPHKGGCATRPSRKTIYAQA

SEQ ID NO: 420217 - protein, 427 aa, unidentified
MNYTQNEKIMSITERTLVVGVDIAKSIHYARAFDYRGIELGNVFKFENTREGLEAFKEWMDGLTKENGKSSSIVGMEPTGHYWLNLGHFLKDEGMRLVLVNPFHVKRSKELDDNSPTKSDRKDPKTIAKLMIDGRYSEPYIPKGIYSDLRIAMDVRDSISKSLIRIKNRVIKWLDKYFPEFFDVFGDWEGKAALITLREFPTPEKIIAIGIDDIVTTWRKEVSRAVGVKRATKLMEAAKRSIGIKEGLRMAQKELRAIIEQYDLYMAQLSEVETDMEELALQVPGVKEMLTIKGVGIATAAGFIAEVGDIRRFSHPSQIQKLAGLNLVENSSGKHKGQTTISKRGRSRLRSILFKVMMPLVAKNDEFKMLHKHYTTRRENPLKKKQSLILLCCKLIRIFYALINKRVAYSPERLLKNISYLQLQDAA

SEQ ID NO: 420218 - protein, 342 aa, unidentified
MKDTMIGVDLAKSVFQLHGASLVEHLQFRKKVTRVQFRLFMAKHEPTVVVMEACGSASYWAREMVKLGHEVRLIAPQYVRPFVKRQKNDAADAEAIVVAAQRPEMRFVEPKSEDQQACAVLFRARERLLHQRTELVNALRSVLYEYGHVFPKGIAHLRRIEVVLTDPASDLPALVRDECHDLLEQISEQTARIEAKTAKARGLAGTNDTARRLQTMPGVGPQTALAISGFAPPMDSFKRGRDFAAWLGLVPRQYISGGKERLGRISKAGQTDIRYLLIIGAMSRLTVLARKSIQEGSWLARMLNRKPLMLVAIALANKMARAIWAMMTKKEDYRDPARAAST

SEQ ID NO: 420219 - protein, 461 aa, unidentified
MKKEKYYLGIDVSKGYADFTLLDGKKNPLEKVFQLDDNRKGHDTLKLIIQDKIKEHKIEVLCCGLESTGGFENNWFASLSGWSKTMPVKVARLNPSGVKNNIAAGLNRNVTDALSSRYIGEYLIDHESKVSYDVEDNEYSNYRSLYTYILLQNKQKTQLINELKMLLYSGFPEMVRYCKEGVPIWVLELLVKYPTAEKVAKLKSAKLSKIRNITPEKAETIIARAKETVGSRLSSTQGFLIQSLAEQIMDKQAIIEKAKKFLTENCKGPEVDLVTSIIGIGKYSASCIMIEIENIYRFASPKKLVSYFGLHPELKDSGDKIKIYHISKKGRSSMRGVLYMCAQSAVLHDPHFKQIYHNHRSKGMNHRQAIVVIMHKLLRVIWGILMNKKPYEAATDKANQNKKVTAIKDENKLKEVKAKRRYQEADLEAPISNRQTKIRKVQSDSQVDMVEQIRDVPIARL

SEQ ID NO: 420220 - protein, 382 aa, unidentified
MEKSSTLYVGLDVHKDSIDIATADAGRDGEVRHVGTTGGDLASLDKALRKLISKGQALHVVYEAGPCGFVIWRHLSRQGLRCEVVAPSSIPRRSGDRVKTDRRDAIMLARLARAGELSAVRVPDAADEAVRDLVRARDDAVRERRNARHRLKALLLRNGILYSGKSSWSEAHLRWIARLKMEHPTQQIGFQEYVHSISESSARIERLEQAMRDALPDWGAMPLVQALQAMRGMQLIAAMTLVGELQDFVRFESPRQLMAYVGLVPGEHSSGAKRRQGSITKAGNSAARRMFVEVAWHYLHSPRVSPVIATRQDRLPKAVTDIAWAAQLRLHAKFKRLLARRVMKNKAVVAVARELAGFVWAIGCEVQNSGWRGVKLASAAAA

SEQ ID NO: 420221 - protein, 373 aa, unidentified
MSVNLRYLGLDVHAETIAVAIAEPGGEVRSLGMIPNDPTAVAKVIRKLGAREQLRACYEAGPCGYVLYWQLTKLGVACDVIAPTLVPTKPGDRVKTDRRDAEKLARCHRAGDLTAVWVPDAAHEALRDLVRAREAAKADQLRARHRVSKFLLRHGIRPPADAKPWTQRHRRWLDTLAFVPPAQQTTLADYVHEVDHAGARLERLETALDAAVAAAPAPMRAVMAALQTLRGIRQITAATIVSEVGPLSRFTHPRQLMGYSGTVPSEHSSGSSVHRGAITKTGNAHLRRVLLEAAWAYRFPPKCAKALRTRQRGQPPAIIEIAWKAQHRLHTRYRRLLGRGKPMPHVITAVARELVGFIWAIGVTIEREVPAAA

SEQ ID NO: 420222 - protein, 343 aa, unidentified
MKEVSIIGVDLAKNVFQLHGAAADGTVLFRKKLSRQQFQRFMSEHPRCLVAMEACGGAHHWAREMERAGHEVRLIAPRYVKPFIKRQKNDTADAEAIVEAALRPTMRYVEPKSGEQQARSILFRTREQFVKQRTEAINALRSHLYEFGYVAPEGIGYLPRLAVVIEDPGSDLPPLAREICRELLDQIARLTNRINAMKKRIDAIAREGETSRRLQTMPGVGPISALAVETFAPPMEQFKRGRDFAAWLGLVPRQASTGGKQRLGKTSKMGQRDIRRLLITGAMAVIRWALRHGAPHNPWLARLLERKPPMVAASALANKMARGIWAMLTRGEDYRGLEIGSAA

SEQ ID NO: 420223 - protein, 396 aa, unidentified
MLCFASEEFGGRLGQTQLERLWFCNQFVQKTDRPSTSLNSIRSEMVKATSACVITSLSYGKGMPITNSPNKTIRRFVMKYYIAIDVSNKVLSVFDGKKDLTFKNERGLRALKSYLREKFETFDDVVIIFESTGPYSNYLKEFCATNQIKTCIINPKRSSNFAKAIGNRSKTDKIDAKTLYAFKNLINPSDIKVPEIDKDVEVLSAYLSSYEFIIKVRVSISNHIKALKYNANAPKGLLITLKHELERNKQLEKELLDKITEYIEKNEELKKDYYNLLTIPGIGKISAIALLYLFKNYKDTNRSQITALVGLDPTRKESGTSISGRRKISKNGNGTVRKILYFPTLNAIRYNKKIKTVYERLVENHKHKKLALMAAMRKLVLIAHAVYKNKVEFSIV

SEQ ID NO: 420224 - protein, 311 aa, unidentified
MQQKFTKFIGIDVSKEKLDIFLSDSQKYIQIQNCKKSIKNFLKSLTPNDETLVIIDLTGGYEAICVNEFYEQGYNVHRAEGRRVKAFVKAIGENAKTDKIDCKILTLYGDKMQEKIILYKPEDEKLKKLNERLQDLKDFLQREKNRSKAPNLDETVKRSIKRNMENLKKEINEIEKEINSKIEKDPETKAKITAMKKQKGIGKKTATTLISMLPELGQVNRQTISALAGVAPYAKDSGKFRGSRHTKIGRNIKPFLFLPTYTAIRHDKKLNSFYEKLLAKGKRKMVAAVAVMRKIIITLNSICKHFYPYHA

SEQ ID NO: 420225 - protein, 413 aa, unidentified
MLLFIGDDWAEDHHDIEIEDETGRRLAKARVPEGLEGITTVHGLIAEHAPVAWADLPSEEVAARVFVGIETDRGPWVTALRAAGYQVFAINPLSSARYRERYSTSGAKSDAGDAHVLAEIVRLDRDHHRQIAGDTDLVDAVKLLARAHQTAIWERTRQVLRLRSTLREYFPAAIEVFEDLAAKDSLLLLARAPSPQRAAKLTRSQVVSALRAARRHHAEAKADALLAVLRAPGLRQPATVDAAYAAVVIGQVGIITALNEQIAQLQEVVAEHFGRHPDADIYFSQPGFGVVLAARALGEFGDDKKRFGDSRARKNYSGQSPITRASGKKTVVLARYATNRRLGDALHRQAFSALVGSPGARAYYDALRARKIGHHAALRQLANRLVGILHGCLKTGTKYDETTAWQHQIVTAA

SEQ ID NO: 420226 - protein, 402 aa, unidentified
MNAVGIDVSKSKSVVAIMRPFGEIVSTPFEIKHTASDIHSLIELINSVEGESRIVMEHTGRYYEVLAHQLLEANLFVSAINPKLIKDFDNDSLRKVKSDKADAVKIARYALDKWQNLKQYNVMDELRNQLKTMNRQFGFYMKHKTAMKNNLIGILDQTYPGVNTYFDSPARSDGSQKWVDFASTYWHVDCVRKMSLNAFIVHYQNWCKRKKYNFSQSKAEEIYGKAKELVPVLPKDAITKLIIKQAVDQLNSASTTVESLRTLMNETASKLPEYPVVMAMKGVGTSLGPQLMAEIGNVSRFTHKSAITAFAGVDPGVNESGSYEQKSVPTSKRGSSDLRKTLFQVMDVLIKTHPQDDPVYQFLDKKRAQGKPYYVYMTAGANKFLRIYYGRVKEYLASLPES

SEQ ID NO: 420227 - protein, 340 aa, unidentified
MKLYAAIDLHSNNSVLVLIDEQDRVVYQKRLPNELAVILMELSVYRCEVEGIVVESTYNWYWLVDGLMAEGYQVHLANTTAIQQYDGLKYTDDHSDARWLAHLLRLGILAEGHIYPRAERPVRDLLRKRSQLVRQRTTNLLSIQNLMTRNTGSSLSAKEVKGLDVQQIEELLPNSDLALAVKANLAVMMSADEQVKRLEQTILQRVQLRPQFRFLKTAPGIGEILALTIMLETGEIGRFPTVGNYASYCRCVGSQKISNDKKKGQGNTKNGNKYLAWAYVEAAHFAIQHHSRIKSFYQRKQAKSKSIVALKAIAHKLCRACYYIMRDQVAFDISKAFGPK

SEQ ID NO: 420228 - protein, 343 aa, unidentified
MQTITTIGLDIAKSIFQVHCVDASGQVVIRRQLKRRQVLAFFQKLPPCLVGIEACASSHYWSRELQAVGHTVRLMPPAYVKPYVKRQKNDMADAEAICEAVTRANMRFVPTKTPEQQSGLVLHRTRHLFIRQQTSVINAIRAHLAEFGVTAEVGRKGIEELLRVIADPSDKRVPDAVRACLAALGNQLLSLKKQILAFDRMILAWHRSNQTSKRLNCIPGVGPLLATALVANVADPKAFQSGRNFSAWIGLVPKQHSSGGRPRLGSISKQGDRYLRGLFVAGALAVIRYAKLHGTKYRPWVAALLERRPTKVAAIALANKLARMAWAMMAKGERYNYPASLRV

SEQ ID NO: 420229 - protein, 372 aa, unidentified
MDRVCGLDVHKDSVFMCILTANGEKIEDVFGTLTPELDRLRDTLVSHGVGKVAMESTSIYWVPIWRILECDFDVKLVNPYFIRQLPGRKTDIKDAQWIATVLQKELIKGSYIPDSKIQELRQYSRRIFHLTRRKQQAESAIDLTLQRCNIRLSNYVSDIGCKSMRKVVNALICGETDSEVLALLVHKRIRNKHCHEVIKSSLTGIVSSSDRDMLKMSLEEVELYDRQLLECKEKMRIICEGHYAEELEILQTTPGIKEESAMRIIAEIGVDMKAFLTASALVGWAGLRPRNDQSAGKIKGRKTLHGNKYLRVMLTQCAWGACRTQTSKFYSRYHTLKKRMNHNKALMANARKLLVVIWNLLAKKQPYMPFVN

SEQ ID NO: 420230 - protein, 396 aa, unidentified
MTTIGIDIGGRTHVVARCRIGQARADREILRVSQDRAGFAALDAWFERQAEPVTLVTMESSGHYWMPLASHLGRQDVPVAVVNPLAAKYFAKSRLARTKSDPADARSLAEMAMRDTPAARDPLAGVELRQAARFAMTLVAEQAKVCQRLIRLVELGFPELGELFDDPTCRTAREVLRIAPTARAATRRRTSTLANANAGPGHRRLGQTKAERLQAAAADSIAVPELDAEVAFEVGLLLDQYDLLEGQIEAADRHVASLLDGELARRLRTIPGVGPSIAATLLAEIGDIERFTDFDQLLAYAGVHPAERSSGKKGSNPETAWHMSKAGNSHLRAAAYRMAVVGVQHNPVIAAHYARKRAAGKSKMNALGHCMRKALSLVWGVWRNGQDFDPNWGAEA

SEQ ID NO: 420231 - protein, 357 aa, unidentified
MSCKLEAAIATVIGIDIGKNSFHVVGQDRRGAIVLRQKWSRGQMEARLANLPPCLIGMEACVGAHYLSRTLKMLGHDARLMPAKYVRPYSKGQKNDFRDAEAIAEAVQRPTMKFVATKTADQLDLQALHRVRERLVSQRTGIINQIRAFLLERGVAVRQGLRFLRVELPGILATRTDVLSPRMLRMIEDLAGDWRRLDARVEGLSSEIEALACQDKHCERLMTVPGIGPIISSAMVAAIGTGDAFSKGRDFGAWLGLVPKQISTGDRTILGSISKRGNRYLRTLFVQAAWVVLVKIGPKQWERYGLKSWIEAAKKRLHYNVLAIALANKLARIAWAVLNKGRAFQCVKIDAMAPRSA

SEQ ID NO: 420232 - protein, 355 aa, unidentified
MNSEKYIGLDVHQATICVAVMDAKGKVVMESILETKATTILEFLAGLRGTLSVTFEEGTWAAWLYDLLKPHVANLVVCNPRKNALLKHGNKSDKIDARKLANLLRLNDLEPVYHGETGVRMLRELARSYLTIVKDVSRVMSRLKAIYRSWAIPCAGRDVYYTRHRGEWLGKIPEAGSRRRAEQLYQQLDMLQPLRQQARRELLAESRKHTITAKLRQIPSLGPIRSALAVALIQTPHRFRTKRQLWTYSGLGLETRDSGEYHYVEGQVRRRKKQVFIRGLNKDHNHDLKGLFKAAATRASVQPGPFQDFYQRSLAKGIQPTMARLTLARKIAAITLTLWKKGENFDAEKLKAQAA

SEQ ID NO: 420233 - protein, 359 aa, unidentified
MNYVGIDYHKAYSVVVTMNERGQLLQEARIPGNTPVAFAQYFQRLDGPAKVVLEGCRNWGYLYDLLHEIKPIEEVQLANAYKVRVIAEAQVKTDKIDARALANLLRGDLIPRLHVPSPRNRCRKNVLRQRVFWIRQRTMIRNRVHILMDRQRGLKVPVVRDLFGKRGMDWLKGLNLPEPDGTLLREDLAVMERLNEQLKELDRLVASENRNDAMATLLQSLPGVGAFFAAVLSSEIDTIGRFMSAAKLCAYAGLAPTTSASGGKCYQGKLFGQCNRWLRWALIEASWVAIQCSSYFGERYRFHKARGKKSNQAIVIVARRLCEIAWHLLKENRPYEERPARLKPIFPGRSVSKVIESVG

SEQ ID NO: 420234 - protein, 407 aa, unidentified
MHHKLKYLYIGIDLHKRHHTAVMMTCFHEKRDEIQFENKPSAFPKFLHQVEKLAKKEGLTPMFGLEDVGGYGRGLAMFLIENKYEVKAVNPALTVSMRRSSPNNKKTDAWDAESVARILISNLDTLPTANPHDLYYAISQLVTRRENIVSVVTGIKLQLHQLLGYHYPSYKKFFSQVDGKTALAFWLKYPSPSCLSGVNVGELANFLYKKSNRYMSTKKAEDILSLVQQDGDTSKDYQGVNDFLVKNVVRDLIARDHQLEQIDTELAKHLALLDYKLETMHGISTVTAAELIAEIGDVSRFSSADKLANFAGIAPVQHSSGNKQKSKLGNRSLYDIFYNLAIRQLGVSRAKKPNHPVYHAYYEKKLAEGKTKWQAIICVMRKLVNVIYSMMKNKTEYKMPVLTEQAA

SEQ ID NO: 420235 - protein, 389 aa, unidentified
MLLDHPSDGPAAIRTQFGAIFVSLELSRSNWLITSLSPGKGEKMSKHSVTAGDVAGLMKQFADLRRKAEARTGESYPIITIQEAGLDGFWLHRVLQQNGIESHVVDPASIATPRRRRRVKTDRLDGEALLRALLAYKRGEPRVCAMVVAPSPEEEDRRRICRERQSLIAERITHVNRIKGLLFAQGISGYEPLRRDRRARLEALRTGDGRELPAHLKAQIGRELDRIELLLEQVKAVEAERDALLVAARKPASEEAAPDAVTLLLALKGMGANFAAVLWSEAFYRQFSNRRQVAAYAGLAATPWQSGGIRHEQGVSRAGNPRLRTTMIQIAWLWIRHQPQSALTRWFKERSPQGRKRAIVALARKLLVALWKYVTQGVVIEGAVMKPAA

SEQ ID NO: 420236 - protein, 439 aa, unidentified
MKQRTTFETVNSYAAGIDIGAEKIFVSADGITVISFETFTTDYYQCVTYLKQQGVQRVAMEATGVYWMALYEILESKGIEVCLVNPKEVKQVKGRKTDVKDCQWIQKLFAAGLLRQSYIPAGKLKELRMMVREREDIIEMGSAYINKMQKALELMNIKLKNVIAQIHGVSGIRMIEAILAGERNAEVLLALCDARIIKNKSASVKKALEGNYNQTWLFLLEQNMKMWRQHEQHVLVIDQKIESLLDELNKDKPMVNSEAKIKSVRHHKPAVKELHQKLLNLYGVNAATLSGLTDYSLLRLVGETGNELSRFPTAKHFISWCQLSPRHNQSGKMNRKLKMKNKSKAGQIFREAAQSLIQSKNIAIGAFMRKIRAKKGGPVAIKAGARKIATAYYYILTKGIEYVEQGIKKYEAKLKAQEVKLLTLLANKHNFKLLDYQIT

SEQ ID NO: 420237 - protein, 342 aa, unidentified
MTIVAGFDVHRRQITFDALDTDTGELMRGRIDATPSAVERWAARFEDREVQVALEACTGWLFVSRALERAGAVPHLAEPVETHALRGRKRRAKTDREDARWLRTLLAEKRLPESWIPPEHVREWRSRARLRKTLIDERTQWLARIQATLFHHGVAGAPAELRSGPGREFLEELELPADARERIAIALAMIDSLEGQLRPLEAELRKLARRQTGCRALMAQFGMGELTSLMTLTELGDVQRLSASRKAVRMAGIDIGVHRSDRRSRVGKLNRQGSPHLRWALYEAALSATRPRSPDHEDYLALKARGLSHTRASLTIARKLARRSFHILRELGPAALEPITTT

SEQ ID NO: 420238 - protein, 413 aa, unidentified
MGYKVAGIDIHKQVLMVVVMLVYAGGLVEKFERRRFGTTTPELAQLAAWLQALGVQEAVMESTAQYWKPVWYELEGKIPTLHLAQAFSNRARRGRKDDFRDAERLLRRLVAGELVLSLVPAPEQRNLRTMTRMQVHLTQDRGRLHNQVECLLEEMRIKLSSVLSDLFGVTGRRILGAIVKGETDPQKLAALAGNRLKCTSEQLVAALTGQLLAMHRRLLGLYLERLQLIDEQIDELKRMSAEALAAHQEAVQRVAEVPGFGADSAQQFIAEVGPEAATFPSAGEMSSWVGTCPGKNESAAQNHSSRSAKGNRYARRLLTEAANAAIKTKGSHWQVVFRRLLPRLGYQQAVWAVAHRLCRVVWKVLHDKVRYVEQGVNRDPKARANRARTLSRALRQLGYNVELTPLTPTPAQT

SEQ ID NO: 420239 - protein, 343 aa, unidentified
MDHFAGLDVSVKDTSVCIVDDAGRIVREVKVASEPAALLPVLKNAIYHFKRIGLEAGPLSQWLFSALAEADLPVVCVETRHMRAALKAQINKTDRNDARGIAQMMRVSLYRPVHVKTLRSQKLRMLLTHRKLLQSKAIAIENDLRGTLRNFGLKVGMVRAARFEARIKELVEHLPDLVALVEPLLVVRRVLRDQVAVLHRRLLAAVRDDEVCRRLMTVPGVGPVVALTYRATVDVPARFRKSKSVGAVFGLTCSRDQSGERDRPGAISRCGDEMMRTMLYEAAQSMLVHSTRWSWLKAWAMQIARRRGMKRAIVALARRLAVIMHRIWIDGTEFKWTREVAAA

SEQ ID NO: 420240 - protein, 494 aa, unidentified
MSSQSINPEERLRHLEGHYADRVTAFRQRLAHVGLDRVLITLLDIGKNVHWATAWTASSIELVRPHRLPATQTGLTQFIHMTDGLIAEHDPLLVLLGHEPSGVYHEPWARALMDYYGPHIDGQAQPVFDYRFFNPYQVKLARLQTHLRHRKTDPRDLAAMLDLMLRGLGQPAFLPTGTELLIRQEIGFIRAQSRLLGHLDRQLRQQLDRLWPGAVVNLKQFSKAHPGLPKPTPIIQTRPLQRDRIRVLLTHCPNPHDLITMSDQRILDLYREHAGRAGPALLNILHTWADDAVLLPSDVSSSLAEQLQRLFLQYVAAETLIEEGRGRLVPLIPDTPARHLPAIPGLGDMDAAAYLAGVGSIDRFHRAAEVWAFAGFDPIADGSGDKPDRVGKISKHGDPGFRDALYQMGYRTAQNYAPVSITFLDAFDRGQCEVEATIHAAHRVNRICFHLMQNDEPFESQSTPKLEAEKARRWRVFKAEKKKRGSRRRRGKRR

SEQ ID NO: 420241 - protein, 396 aa, unidentified
MSSTATPGPNRVVIGMDPHKRSATIEVMAPDEGIEGGGRFGTDRDGYAAMLTYARRWPDRVWAIEGCAGIGTHIANRLLTDGEEVVDVPPKLSARARVFATGQGRKTDATDAHSVALVGTRMTGLRPVVNDEQLAVLRILVDRRRSLGEEHTRLVSQLHQLLLELIPGGAKRDLSARQAKALLAKVRPRDAAGKVRRRVAAELIADLERIYARKKAANKELTELVAATGTGLLDLPGIGPSGAARLLVEVGDITRFPNKAHFASWNGTAPIDASSGDQVRHRLSRTGNRQINRVLHIMARVQMRNPSKGRDYYDRKRADGKGPMEAMRCVKRRLSDIVYQQMLNDAITHAVTGPGGQQGNDSDSSATGSHPHTGSSDKPLPGPANNKPKTPLRKAG

SEQ ID NO: 420242 - protein, 320 aa, unidentified
MQKIALGLDISKQTIDAYFSGQEDFIRVMNNQAGIEKLIERIKNHQQQNKEIHACCEYTSVYYLPLASALHESGIKISVINPLSIKLYAEYRLRRTKTDKQDAKLIADYCEKENPPLWKPISEKRNTLKVLNRRIEQLNVLLNIESNRQEVSDTVIKSGIEIILEAIKNEIESCKKAIQNLIDSDKELSHNQQLLQTISGVGKTTVAWLLSVLVDIDKFENSKKLISYLGLSPVIRDSGTSVRQAKISKMGDKKVRKALYYPARVACLRSKLWRPWFEQKIKQGKHPKQIYILMMCKIVKYAYAVIKTGQPFDENRHKPA

SEQ ID NO: 420243 - protein, 350 aa, unidentified
MPRKFDTAVVTIGIDPGKNTLHLVGLDARGEIVLREKVARAKIVSRLANMPPCLIGIEAGMGTHYVTRDLLVLDHDVRQVPPVYAKPFRQTHKNDFRDAHAVAEAVQRPTTRCVPPKTDEQLDLQALHRVRYRLVGQRTAIINQIRCILLEHGITVRQRLHWLRHALPDILAQRTDVLSPRMVRILEDLAQDWRRLDDRIEAVSGEIDALSRSTEPCRHLMTIPGIGPIISSAVVAAIGNGTAFACGRDFAAWLGLVPKQISTGDRTILGRITKRGNRYLRMLFLQVARVVLLRPRNWMQHGFGPWLAAAAQRLHHNVLATALANKLARIAWSVLVEHRVYETRLGAAAV

SEQ ID NO: 420244 - protein, 372 aa, unidentified
MDRVCGLDVHKDSVFMCILTANGEKIEDVFGTLTPELDRLRDTLVSHGVGKVAMESTSIYWVPIWRILECDFDVKLVNPYFIRQLPGRKTDIKDAQWIATVLQKELIKGSYIPDSKIQELRQYSRRIFHLTRRKQQAESAIDLTLQRCNIRLSNYVSDIGCKSMRKVVNALICGETDSEVLALLVHKRIRNKHCHEVIKSSLTGIVSSSDRDMLKMSLEEVELYDRQLLECKEKMRIICEGHYAEELEILQTAPGIKEESAMRIIAEIGVDMKAFLTASALVGWAGLRPRNDQSAGKIKGRKTLHGNKYLRVMLTQCAWGACRTQTSKFYSIYHTLKKRMNHNKALMANARKLLVVIWNLLAKKQPYMPFVN

SEQ ID NO: 420245 - protein, 344 aa, unidentified
MKVTTVGIDLAKNVFQIHGVDAHGKAVLKKQIRRDQLMLFFTNLPACLIGMEACASAHYWARRVQECGHTVRLMAPQFVKPYVKTNKNDAADAEAICEAVARPNMRFVPIKTESQQAVLAVHRARQSFVKARTAQANQIRGLLAEFGLVIPQGIAHIAQRVPELLDSDTCALPGPFRLLVLRLMEHLKLLDQHVRELETQIQTWHRDNPASRKLAEIPGVGPITASALVASIGDAKNFENGRQLAAWLGLVPRQHSSGGKSTLLGMSKRGDSYLRTLLIHGARSAILAAQRKPDTDSWLSRLLGRRHPNIAAVALASKNARVIWALLAHNQQFRPGYATAAAVA

SEQ ID NO: 420246 - protein, 366 aa, unidentified
MGDYSEAFVGLDTSKLRNAVAIADAGRGGEVRFLGEIENTTAATAKLVRKLTAKYERLTFCYEAGPTGYGLHRQIKDLGFECVVVAPSLIPKRPGDKVKTNRRDALSLAKLLRADELTPVWVPDGRHEAMRDLTRARETAMLDLRTKRQHVSAFLLRLGRPYPESRKTWTKAHASWIASQKLEQPQQRLVLEEMMQRLEQAVAAAVPEWSLAPVVTALMAMRGIDLVSATTLLAEIGDLSRFRTPTELMAYLGLVPSENSTGDTVKRGPITKAGNRRARRMLVECSWSYQHPPRVGQAKQPKVDAAPPAVREIAWKAQCRLYRRYRTLIRNGKLKTVAIVAIARELAGFIWAVARAVTTAGVAATA

SEQ ID NO: 420247 - protein, 366 aa, unidentified
MKKISTVAMERIEIFKESQRTIGMDLGDRSSHYCILNEAGEVIWESKLPTTPKGMEEVFGRIPRSRIALETGTHSPWVSRQLTQLGHEVIVAHARNVRLIGESSRKDDRLDARTLARLARIDPALLSPVRHRSAKAQIHLTVIRARATLVSARTALVNAARGLTKSYGARLPKCGSEQMNREIAQGLSQELREALDPLLAEIESLNERIAEYDQRIEKVAKEVYPEAALLRQVKGVGPLIALTYVLTLDDPHRFRRSRDAGCFVGLRPGRRNSGMSEPQMHISKEGDRYLRTLLVQGAHYILGPFGQDSDLRRWGLKLAERGGKNAKKRAVVAVARKLAVLLHKLWVSGEVYEPLRNSQKAMRAVA

SEQ ID NO: 420248 - protein, 414 aa, unidentified
MEVIHPRCAGLDVSKRDAKVCVRIASPGRVKAKSTVTTWGSVTNQVLALRDHLVAEEVTLVVMEATGDYWKPFYYLLEDGPFELMLVNARHAKNLPGRKTDVSDAAWLAQLGAHGLVRGSFVPPEPIRQLRDLTRTRTTIVRERGREIQRMEKLLEDAGIKLSSVASDINGVSGRAMLEALIDGQRDPAVLANLAKRRLRIKIPELTEALTGRFGEHHAFLARLHLDLIDGHTQAIEELTARIEVVIAPFCRVRELLVTIPGISAIVADVIIAETGGDMSRFPTAGHLASWAGTCPGSNESAGRVKSTHTRPGNPYLKGALGTAALSASRSKDTYLAAKYRRIASRRGPIKAVVALEHAMLIAIWNMLTNTNDYCDPGADFYTRLNPDKAKNRAVDQLRKMGYDVTLEPLAAAG

SEQ ID NO: 420249 - protein, 484 aa, unidentified
MKAANRSRVPQTAAKRSRAATGPTRPAKALPILHPHAAGIDVGATEHFVCVPADAVGANESAVRSFGAFSGELDQLVEWLLTCKVTTVAMESTGVYWIPLFQKLEAAGLEVVLVNARHLKQVPGRKTDLKDCQWIQRLHSYGLLNGSFRPEDIICRLRTFMRHRANLIDACSQQVLHMQRALDQMNVHLHHVISDLDGETGLRIVDAILAGQRDSKALAQLRDPRVRKSTVAEMEAALEGDWRAEHLWVLQQAREAYRFFHNQIAALDQQVEALLPQIVTAPPALPESERPQNPQAAPDARRPRKKQQRKGNAPAIDFTAELTRICGVDLTRVVGFNLLSVLILISEIGVDMSPWRNAKAFCSWLGLCPGNKISGGKVLSTRTARVSNRAATLLRTLATAVGRSDTWLGSFHRRMKSRLGPAAANTATAHKLACLIYHLLKYREAYIEVDRLLYEERLQRYRVAKLKKLAVELGFDLVETKQAA

SEQ ID NO: 420250 - protein, 338 aa, unidentified
MKLYGGIDLHSNNSVVALLDEQDRVVYRQRLANDAPRVLEALAPYREGIVGLVVESTYNWYWLVDALMDAGYRVHLANTAAIVQYSGLKYSDDDSDARWLAKLLRLGLLPEGYIYPKEQRAVRDLLRRRSRLVQQHTANVLAVQNLLARSRGQSLSANAVKRLTPEAVARLLPNPNLALAVQSTLLAMRGQEAAIELLEREALAQVRGRAPYRHLLSVSGIGPVLGLTILLETGPVERFGQVGQYASYSRCVGSAHLSNGKRKGHGNTKSGNKYLAWAYVEAANFAVRYNPTIKRYYQRKRAKTNGIVAIKTVAHKLARACYWMLREGTEFAVNRAFA

SEQ ID NO: 420251 - protein, 316 aa, unidentified
MDGISKVVGIDVSKRRLDCCELPSKHAWSSDNSDEAIAGLVERLRGLKPELVVMEATGGYETRLATQVAAAGFRVAVVNPRQVRYYAKAMGRLAKSDRIDAQVLAEFGLKVEPQIRPLADEHTCELAALVARRVQLVSMRTQEKNRLSNSAGAMRPRIKAHVAWLDQEIAALEVDMTAKLRGSEAWCDKRDLLLSVPGVGALTTVTLLARLPELGQLNRHAIANLVGVAPLNDDSGSHHGRRFTWGGRHEVRAVLYMATLTASRHNPLIRAFYQRLRAAGKEFKVAIVACMRKLLTILNAMLKTNTPWNPLGFKTA

SEQ ID NO: 420252 - protein, 391 aa, unidentified
MIYVGIDVAKDKHDCFITNSDGEVLFKAFTITNNLDGFNDLYQKIETVMKDITKVKVGLEATGHYSYNLLGYLIDKGLPTYVINPLHTNLYRKSLSLRQTKTDKVDARTIASILMSDVNLKSYSDISYHNEELKSLTRYRFDKVKERAKLKSSVSRLICILFPELEKLVPTLHMASVYALLSEFPGAKQVANAHLTRLTNLLSEASKGRYSKDTAITFRDAARTSIGSNMPAKSLELKHTIKLIKELDSEIDEIENEIKIIMDEINSPILSIPGINYRMGAMIIAEIGDFSRFDSPDKILAYAGFSPSTYQSGHLYGAYAHMEKRGSRYLRYALYNAAKYVCYWDPTFTAYLAKKRAEGKHYNVAISHAVKKLIRVIYHLEKTNQQYIKAS

SEQ ID NO: 420253 - protein, 343 aa, unidentified
MLTNNVIAIDLAKNVLQICHISVHGELLFNRPLSRQKAKEFLTKAKPSIVAMEGCCGCHYWGQFAEQCGHEVRIINPKKVKGYLEGHKTDHNDALAIANAAIQIGIKYSRPKPIEQQAMHSLESSRRFLSRSVVSLGQHIRGTILGYGIANPRGKKGLKASVQAVLDGETPIPANVVSVLSMLWEQYKQLKTKLIEFEKEKNALTRQIEPCKRLMEIEGIGDTTAAMLYTTLGDGKQFKNGRQASAFVGLTPKQHSSGGKVFMIGIDKCGGVKELRSLLYLGAMSYVGRLPEKPKTQKDAWLTKIINRIGFEKACIALANKIVRTAWAMLRYETEYKPILLTD

SEQ ID NO: 420254 - protein, 390 aa, unidentified
MSQPFDASRSLTVLEQDSTIIAVIEMSQSKWLVSAVVPGVERQPLKKLDPDEEALRKLLHRWRNEAGQAGREIKRIVVAYEAGRDGFWLARWLQARDVEAYVIHPASVAVSREHRRAKTDRLDTELLMRAFLGWLRGEKRHCSMAAIPTAEEEDAKRPNRERGNLVTDQTRIVNQIKAILARFGIRTFRPTLRKAAEKLDGLRTAEGTPLLENTRAELRRHLARLRVVREQIRAIEHERLRKFAAAPAGVKGPHAMVRLIARVVGVGVETADMLVNEVLSRHLRDRKAVARYAGLTGSPDESGRRRRERGLARAGNARVRCGMIQLAWRFLRFQKKDSALAQWFDARTADGRGSTRKTMIVALARKLLIALWQLVTTGEMLRGVVLRPAS

SEQ ID NO: 420255 - protein, 386 aa, unidentified
MQKLNDLSRSLTALEPNGTLIAVIEMSLSSWLVAGIVPGVERQPLKKLAVDESALLKLLHRWREEAEKAGRRIERIAVAFEAGRDGFWLARWLKARGIEAYVIHASSVAVSREHRRAKTDRLDTELLKRSFLGWLRGERDHCKMVEIPTMQDEDAKRPNREHDSLIGERSRIVNRMKAALVRLGIRGFNPKLKRATTRLDGLRTPEGEPIPPNALAELRRDMERRRLVNNQIRQIEEERLERIEQAPCDGAHVMVRLLARVMGVGIETADMLVHEVLSRNMRDRRAVARYAGLTGSPDESGRKRREKGLARSGNVRVRRGMIQLAWRFLLHQKNSALTKWFRSRTENARGTRKPMIVALARKLLIALWRLMREGIVPDGVVLRPAQ

SEQ ID NO: 420256 - protein, 390 aa, unidentified
MHVVAHQPEAPGAIRSDLGAIFVSLELSRSTWLITSLSPCAGEKMSKHGVAAGDIGALLARFSEFKQKAFARTGKSFPIIVIQEAGLDGFWIHRVLQSERIESHVVDPASIATSRRRRRAKTDRIDGEALLRALLAYKRGEPRVCAMVKAPTPEEEDRRRLSRERKTLIGERVEHVNRIKGLLFCQGVSDYEPLRRDRRQRLDELKTGDGRALPDHLKAQISRELDRLELLLEQIKAVEAGQNTLFAAAKAEAPTPAPVTMLLDIKGIGPEFAAILWMEAFFRSFANRKQIAAYAGLAPTPWQSGAVNCEQGVSKSGNPRLRTTLIQLAWLWLRHQPQSALALWFKERVTRNGGRFKKTTIVALARKLLVALWKYVTAGFFIEGAVMKAA

SEQ ID NO: 420257 - protein, 440 aa, unidentified
MNHSTHPFDLVIGLDRSDQKADLHLIDTHAGTSRAQTIGTAPEALHDWLLPLRQQHPEARVAICLEQPAASLILFLETYAWITLYPINPVTLQKFREAFVTSRAKDDGKDARYLAELLFTHQEKLQAWQPNDAQTRLLEQLVSHRRAVIDERTALTNALQSLLKTYFPQALELCGQDLWRPLATALLLKWPTLQSIQKVQPATLKAFYYRPGSRSQTLIQERLEFIAKAIALTDEAAVLQSHTLRVQLICRQLEQVQRTVAEFEKRLSAVFAQHPDREIFASLPGAGPVLAPRLLASLGSERERFENAASLQSFSGIAPVTKQSGGTRRVHRRYCCPVFMKQSFHEYAQQSVLHSRWAAAHYQQQRAKGSAHHAAVRSLAFKWQRIIWKCWQSRTPYNEAIYEAALKKRGSPLVARLTQIQVGKSPVKKLKKPLVGSPQR

SEQ ID NO: 420258 - protein, 410 aa, unidentified
MEVLHPRCCGLDVHKETVVACLRHVSGGKVNTEVRTFETTTASLSALSEWLAQTGCTHIAMEATGIYWKPVWHILADGEFQLVLANSAHVKNVPGRKTDVNDATWLAELLAHGLIRASFVPDTQTQELRTLLRTRKQLVREKASHILRVQKTLEDANIKLESVITDVMGMSGRAMIEALIAGESDPAKLASLANYRLKTSQEKLREALRGRVTKHHRFLPRLHLNQIDALDAAIATIDRQVEAGIAPFRAAVEQVSSVPGIRDIGAQVIVSEIGTDMSRFPSDGHLISWAGLCPRNDESAGKRRSNRLRKGAPWLKTTLVQCAWAAVRKKDSYLRAQFLRIKSRRGPKKAIMAVAASILTAIYHMLKDGTLYQDLGSNHFQTRSKGQQTQRLVKRLADLGYEVALKPLAS

SEQ ID NO: 420259 - protein, 427 aa, unidentified
MKTENIRLEEFRQLRSEIRGSTKHLIVGIDIAKEKHNAFFGTATGKTLFKRLVFNNSKEGFEKLLTQIEAVMVQNNLSLTVLGMEPTGNYHKPLGEYLIESGYQVALLSGVAVKRNRELLDGRWDKNDIKDSANIADLISQGKCQFYEYPDINIRELRNQLSLKKRFKKQEHGLKVRIRNNLLAQYFPEMDRYFKSYMPENLAIVKYSLAPDMIAKLHYNEFFDMVTTRKKGLRQHKHLYKIWQEAGKSIGCEAAEGTMFEADLVVEHLKEVSACIRSIDLEIEDICSQIPEYKYLLTIPGFGPVVSSNVVAAIGNPFRFDKVSQVIKTSGYDLSANRSGKNSDKAVPVISKKGKADLRYALYQAAMVASTKNQYFIKYFTEKLRGREGEKGIKIKMRVKLAAKMLVIAWTLMKNKEPYNPDYLKIE

SEQ ID NO: 420260 - protein, 354 aa, unidentified
MDNYIAGCDVHKHYSLFGTLNLDTQARAHTRVEHAPGAVRAFLSKLPPGTPVALETVGNWYWIVDEIEAAGCLPLMANAGKAKVMMGNVDKTDKLDVNGLLTLLQTGTLPTVWLPPGPLRDARELYRTRTTFCRQRTGLKNRVQATLAKYALSIEDETDIFSGKGREQLELTVGLLPPETRCSVQQELQVLDYLQKQIHAMEKRIRECVKLTPTMQLLKTLPGIGDILAIVIALEMGCADRFARAEQFSSYCGTVPKVKSSGGVTRYGHTRQECNHYLKWAFFEAANVAARHRKAPSWRDKHIVRLYERIRKRKGHGVAIGAVARHLSEAAYAVVLRNETYREPQSQKDLPKQR

SEQ ID NO: 420261 - protein, 401 aa, unidentified
MEGPIVSIDVSNGNSHYMCFIKNNKRFGKVKKIDHDIEGFKRLLEDIQKLEAETNEKVCAVFEATGVYTKPLERFLSKNSIKTYIINPLESARKRKEEIHNKKTDKLDPISISKVYYDKEEMMELKKKDETYNWLRKKNRLYEDQLNHLRKYKVTFQNQLSICFPGYLDLFKDGYSDIPMTILKKYPHPDLLKNKKAETVARYLEKNTCHTHKISLEYALKIIGFAKKTYPGCEKDDVEVEIFKILLDKVIETQRECEKTLNEMITVASTLEEYRYISSIDGIGPNLAARIIAEIGDIEEFKSREALVAYAGLDPHIYQSGDQDGKHLKISKKGNKYLRCLLFLAVGCSIRGAKDNPVNRFYQKKKQQSNPLNSKAAKTACTAKLLKIIYGICKNKTTYER

SEQ ID NO: 420262 - protein, 314 aa, unidentified
MKKNYVGIDISKEKCNLCYRDGLEIVLEEESVNDVKALKKSLTAALKTFSVTVDEVLVCAEYTGRYIYPLTVACQELDIFLWMDDPTRIKSSMGPTRGKNDAIDAARIAEYAYRYSDKAIRYCIPDAALVSMKSLRVDREFLLIDKKRYQSQITDRKRDMAPGDFKHKCARWKKVIRTIDEQIKAIDAEIESFIAENPVLTRQKELLTSIDGVGDRIAINMIAITGGFTRFQNARQFCRFAGLTPYKYDSGTSVRSKAKISKRANQTMKALLHLAAVGAATHMKESEYRNNSQYDNLCRRGNMCAQPAEILPRH

SEQ ID NO: 420263 - protein, 419 aa, unidentified
MTQAQNTTAISIMHPVCCGLDVHKMKISACLITIDSNGNEKSEIKEFGAFTDDLISLRAWLTTNNCPIIAMESTGVYWRPVHNVLEHHLEIVLVNARHIKNVPGRKTDISDSKWLASLLKHGLLRGSFIPEKDIRHWRELTRQRRKVTESLSDYKKRVHKVFETANIKIGSVVSDLFGKTGMNLIEKLCDENASLVEADIAECACGRLKSKSTELYRSIQGFFEDHHRFELCSLMRIISILGSEIGIISDRISWLMISHDGVIDRMEKIPGVGTRSAQIILSEVGYDLKTFPNTASFASWAGLCPGNNESAGKRKSGKTSVQKHPFKTIMVEVAWAAVRTKGCYYKDKYYRLRSRRGAKKAIIAIAHRIAKAIFYVIKHGEIYRELGEDYLKQKRHSKKLKSLRQQASAMGLQLIPVEG

SEQ ID NO: 420264 - protein, 364 aa, unidentified
MQRYIGLDAHASSCTLVVLTAAGKKVKELVVETHGEALVEAIRLVPGRRHLVLEEGTHSAWLHEILERHVQELVVVPVRRSKGQKSDSIDAQRLAEALRTGAIEQPIFKAPRKFAPSLVQIARSSARLRLPLRDLARGHRMLVRDVVRVQTRVKSVFRSRGVSCPGKTVYGRRQRDAWLAELPPSSQVLVSMLLAQYDALVEIRNQAERELLAECKQHAISKVLRTVPGLGPIRVARLLPVVVTPHRFRSKRQFWSYCGFGVVMRSSADWEQRPGGGWERTGRPRSCGLNHRFNHGLKDVFKGAAQTVLTKHTDEALCAHYARLCAAGTKPNLAKLTIARKIAAITLAVWKNKEAYDSARLQAA

SEQ ID NO: 420265 - protein, 447 aa, unidentified
MCLSWRLLCNGHGHILRKPFSVKNSPEGIEYLIEQVTRSCSHRQIDLKNVFFGGEDVGSYAENFVNTLRSGGWIVAGVNAHDAKEQRSNMQASTDRLDLMGIASMLLNRRGNCSPAQSGIYRNLRTLVRHRKKLVTMSTEVKNRIHTVVDRLFPGFLNEKKSGIWSFSESSLYLMENRFSPHQIRRRKRKKLIEILERCGTAKPESTAAKLQEYAARVLNTPNEYITTLQLSLTQHVKHLRCLQDSIDQLEHEVAVWLAQTQGAFLTTFRGIGIVLAAGVSAEIGNPHEQKPLNNLVSYSGIIPRVKQTGGSEGKTYTGKVAKRCNHILKDYVVQSGNHMGLHGPEELIADYKRREAAGQHADFGIGRRYLRTAMCLMRTSQIYMPEQLRNTKVKPEERAGYYLTIWPYLRRKWKKAGALDAAFEKDRPLGQWRCMVQELYEIRLKL

SEQ ID NO: 420266 - protein, 322 aa, unidentified
MAMLSFCGIDVSKDRLDVVVLPEQQCSSVRNDTAGWAELVEQLRGFSIATIGLEASGGYERGVLRALLAAGMSVRQINPFKLRQFAKASGVLAKNDRLDARMIASFVAIMPTRPAQRHAPAIEQLAEIVTLRRHLSDEKIAAENASRLLENAMLQRLSRRRIVRLAADIAQLDEHLVEIVAADAALAHRYRLLTSMPGVGPVLACTLIALLPELGQLSREKIAALVGVAPYDFDSGKLKGMRCIWGGRAPVRNVLYMAALNASNWNPALKAFHDRLAATGKKPKVVIVAVMRKMITALNAMLRHNTSWVDRCSDRHSVTTAR

SEQ ID NO: 420267 - protein, 338 aa, unidentified
MAEITTIGLDLAKNVFHAVCCDARGKVIKKKVLKRPGLLAWFANLPPSLVGVEACASAHYWARELQSQGHQVKLIPPQYVKPFVRGNKNDYNDALAIAEAVVRPEMRFVAIKTPQQQDIQALHRLRERRLRDRTALCNQLRSLLAEYGIAFPRGVNALRKRIPQILEDAENGLSDLFRDLLSRGYQQLTELDEHIDAYTQSLEDLARRDDACQRLRTIPGYGPIIASAFYSVVGNGAAYRRGRDVSASLGIVPRQHSSGGKEVLLGISKRGDRYLRSLLIHGARAVVARAGSKEDALSRWINKVRATRGFNRAVVALANKLARIGWAILAYNTVYEAR

SEQ ID NO: 420268 - protein, 303 aa, unidentified
MSRSILYLGMDVHKESVTIAVLPGGAAAPTRVDRLPHDLAKLKRFIDRLADNAEIRACYEASGAGYVLQRALRDWGYACEVIAPSLIPSKPGIQRKHDKYDAAQLARLYRAGELTPVRIPSEAEERVRDIVRCRETFQREALKSRHYILKFLARRGFVYRDGTNWSSRHFVWLRHLASSNSPLAPEDAIVYGEYLALLEYKLARRDELDRRIEALALTPALATAVAHLQCFRGLQVHGAMVLACELVDWRRFARPDQLMAYLGLIPREYSTGDRERRGSGPVPISWTVIRLGSLWCVRIPFLC

SEQ ID NO: 420269 - protein, 409 aa, unidentified
MQPILKSCCGIDVHKSMIKACIAKGPLDKPPKLATRTFSTMTSDLLKLKDWLRENEVEAVAMESTGVYWKPIFNILEDAFPVVLANPQYLKKVPGNKSDVKDSKWIAEMLRCGLIPASFIPPKAIRELRELNRTRRKLVGMMASEKNRIQKVLEDANIKLASVVSKIDGVSSMNMIRALMKNDKLSREEISEMARGKLKNKVDQLVEALNGKVTKHHRFLLRLHLNDIAFLAEQVQEIDEQIQKAMIPFQKENTLIQTIPGISKTTASAIIAEIGVNMSQFPSDAHLASWAGMCPGNNESAGKKKSGKIRKGNIYLKATLTEAAWAASRAKGSAYSAIYHSLAKRRGKKKALIALGHQILRDIHRVLKTGMPYVDEGAEAVYLRNSKARKQSAIRFLERSGYTVIMASA

SEQ ID NO: 420270 - protein, 372 aa, unidentified
MSQSSTLYVGMDVHKESIAVAYVAQDHGAEVISLGTIGTRQCDSDKLLRHLQSKGQQLVFVYEAGPCGYWLYRYLMKKGYVCWVVAPSLIPKKPGDRVKTDRRDARQLARLMRAGDLTPVSVPAVDDEAIRALSRAREETLRDLKAAKLRLKAFLLRHDIRYTGRANWSPAHLRWLSEVVCPTPAQQIVFQEYVQTVTEQTERLQRLEHELHEQVHTWRFQPVVEAFQALRGVQCTVAVTTVAELGDLTRFDNPRQLMNYLGLTPSEYSRGARRQQGSIPKTGKTHARRALVEGAWAYRYPATVSRHLQLRLEKLPQAIQASSWKAQVRLCKRYRHLRAKGKNAHQVVVAIARELRAFLWAIAKQVPVTPKA

SEQ ID NO: 420271 - protein, 351 aa, unidentified
MLIIGVDYHPSDQYIAFADTETGECGERRLNHRAGEAEKFYRELQSRAASVRVGMEATGYSRWFERLLAELGIELWIGDAAEIKTRRVRKQKTDTNDARLLLKLLLEETFPRIWVPSPENRDLRQLLWHRHRMVQMRTRIMNQLQALAMNEGQRRKKKLWSEQGRAQLEKLPLAPWASRRRKDLLELLDRMNPTIEELTRAIEREARKRTEVARLMTHPGVGPITALAFSLIIGTPKRFGCGKQIGSYVGLIPAEDSSAGHQRLGRITKQGSALLRFLLVEAAQAAARCDADWRQRYLHLAMRRQRNIAKVAMARRLGVRLYWMWRNGWEYSEWVKFGSNAGQLGIGHSVQ

SEQ ID NO: 420272 - protein, 364 aa, unidentified
MKEYIAFDSHKRYTWAECEEVLTGNMRHQRIAHRRGAIRSFLEHCPAGESVAVEATGNWYWIVDEIEQAGKQPQLVHPRKAKLMMGMINKTDKLDAHGINRLQRNGTLPTVWIPPAELRDLRELTRTRMVLAQSRARLKNRLGATLAKYGLAVEGFTDTYAVGARGQLEGLLKQLPRHTAWVSGHLLSQLDFVQKQMEEEEKRLEELVQETPQMRLIKSLPGVGTILAAVMSLEIGAVGRFASASRLASYAGTTPRVYASGDKVRYGKLRPDVNRYLKWAFIEAANGVCLNHKRGLSAQRHVSKLYARLRDRKGHAKAIGAVARHLAEAAWHVLSKQQSYCDPELKKIKGESGPAKGGLSAVSS

SEQ ID NO: 420273 - protein, 346 aa, unidentified
MTIVGCDFHPSWQQVAVFDSETGEIRELKLENGNGEAERFYRELSSPALIGFEACGNTQWFEDLLERLGHEVWMGDAAAIRASYVRKQKTDRRDAAHILKLLMENRFPRLWRPSAEERDQRQLLIHRHKLVGIRARAKNGLQHLMLNRGVQMKRKLWSEAGQKALRALPLEGWAAQRRQDLLHLLGGLDPQIGQLDEAIKRAAQENPRAQLLMTQPGVGPITALAYVLTMGDVNRFQRGKQVASYLGLIPSERSSSNRRRLGSISKQGNSFMRMLLVESAQTVNRLDEGFRKQYHHRCHRMAKGVAKVAAARRLAVRLFWMLRTNIGYPEIAHIESSPRYGVVGES

SEQ ID NO: 420274 - protein, 343 aa, unidentified
MTVIIGVDPHKASHTAVAISGGEEELDCKKVRATCVQVDQLVAWAEPFQTRMWAIESAGGLGYLLAQQLVAAGETVVDVPATLASRARLLSTGRSNKNDPNDALSIAVAALRSSSLRQVEPVGHSEVLRLLAKRNTDIGNQRSRLVCRMHALIAELAAGGIAKEINASDVDRFLEDLTPVTPVEQVRYDLTLELLDDVRRLDSQLKASHKRIRQAVRASGTSLTELIGVGPIIAGMLIGYTGDVTRFANRDQYAAYNGTAPVEFSSGGRVVHRLSERGNRKLNHAIHMAVICQLRQPHSDGRIYFERRVAEGKTNKEAIRSLKRQVSNAVYRHLVADARRTRR

SEQ ID NO: 420275 - protein, 338 aa, unidentified
MQHLAIDLGGRESQICVRGPKEEILEERKVATKRLGEYLAKQPHSRVILETSAEAFAVADLAKRAGHDVRVVPSTLAPSLGVGAHGIKTDRRDAQALSAVSCRVDLRSVHIPSEQARAWRTLCNARDALVSSRTKLTNTAKSQLRCRLVLTSKRRSAATPEQIRTLWTELEGSVPPHVERELRVIEMLDAQILEADKEIRQLVKKNEICPRLRTAPGVGPLTAMRYVATLDDVKRFTTAHQVESYLGLTPGEDSSSRRTRRTHLTKAGSPQMRWLLVQAAWTAMRCAPKDPMVTWAIQVAERRGKRIAAVALARKLAGILFAMWRDGTTYNAKRGTAD

SEQ ID NO: 420276 - protein, 455 aa, unidentified
MKVKAVSALRSKRGLHRVSGAEPQVVGLTPQTTDERKTDTMKTYILRDPKPVEPQKSTRPPRPKPAAAVTAAGLLPRPSATIKDPVLFIGLDVHNDSIAVSLAPSDSTEVRRYGIIGGEHEDVLKLAKKLAEAHPGTTLKFCYEAGPRGFALCRCLQAHGWDCMLVCPSKIPRKPGERVKTDRRDADQLARLFRAGELTGLYVPEPVDEAMRDLIRARFQVGKQQHRARQQLKMYLLRHNLRYGGQTSWTPAHLRYLAKLKMPFPVQQIVFQEMLEVISEATARLERYDQEIERAVPGWRWAPAVRAVMSLRGMALLHAATLVAELGDFNRFAHPGQLMGYLGLVPSEHTTGTDRQQGGITKMGNAPARRALVEAAWQYRAPARLSPHLKKRQEGLPKAITDIAWEAQRRLHHRYTHLTRVGKKKSQVAVTAVARELAGFVWAIARQVKPVATTP

SEQ ID NO: 420277 - protein, 392 aa, unidentified
MLFIGINVAKSRHDCCMIDSGGVVIIDSLKISNSKDGFQILYNTILSSLGSDDLSKIKTGLESTGHYSINITDFLNSKGFHIVLFNPLATNAFRKAGTLRKTKTDKCNAKVIATMLFSDESKFYSPSSYQIQELKSLTRHRYRMIGYRSKLKLSVTRLIDIIFPELPALVWSIHQSSSYQLLLELPCPDEIRRCHLTHLTNVISKASRGKYGREKAIQLRELAANSIGSSNRSLTFELQQTIRLIQSVQVEINTLDKQIKLVVDELNTPLMTIPGIGYTIAAIILAEIGDINNFSSPAKLLAFAGMEPSTYQSGKYNASKTPMVKRGSTYLRWAVMQAARLVSMRDSTFAAYMAKKRSEGKHFNVAQSHVGKKLIRVIYSLLKNNTAFVPQM

SEQ ID NO: 420278 - protein, 459 aa, unidentified
MKRKGSGGKRITVKRAEGKLSVTRPKVAGIDLGSVEHYVACPPREGQANVKSFGTTTPELATLADWLQAEGVESVAMESTGVYWIPLYELLEQRGIEVVLVDARQMKHVPGRKTDMIDCQWLQLLHSCGLLRGAFRPADAFCRLRAVVRQKATLVDEQADWLRRMQKSMDQMNVRVHRAVSDISGTTGMAMIRAIVAGERDPHKLAGLRSERCSRSVREMIEELTGNWREDHLFNLKEALAMYDFILQRIAGYETEIQRILQALTPNPNVGPAPEPSNPNKKKLLRTRGQEPLRQALYGVCAADMTSIDGISTSTAEVVLSELGPDLSDFPTERHFVSFLKLSPKLAISGGKPIRKRPHGTASTRVGAALRMAALTLRNSKTALGGAYRRLARRKGASVAVFATARKLAILIYRMLRYGAAYVDEGLQAYEQRFQQAKLHMCQQIANQFGYKLIQQETT

SEQ ID NO: 420279 - protein, 388 aa, unidentified
MSNIIYIGMDVHKENYTLCSYSFDEDRLGYRQAVKPDYKMVLKYLEEIRKQKKNEIEFICGYEAGCLGYTLYHQLTDHNVNCKILAPTTMAITNNNRVKTDRRDAGNIARCLAYHTYSEVHIPTAEDEEIKEYIRMRDDHKKELKTIKQQILAYVLRHGYRYDRGKNYWTVRHVAWLRALDFGGVLQESLDEYLITYEYLSSKLERMDKRIEEYAFSENYCEKVKKLSCLIGVRAHTALSVVVEVGDFNRFAKAENLAAYLGLVPGEDSSGGSQKRLGITKAGNVHVRRLLVESANSYTRGSIGYKSVVLKRRQEGNSPHVIAYADMANERLRRKFYRMTLENKINRNIAVTAVARELACFMWGLMTGNIVSTNSSGLEFSVKKKEEG

SEQ ID NO: 420280 - protein, 395 aa, unidentified
MYYLGIDVGKNNHEAGLIKEDGSHVGKSLRFSNTLEGFERLLLFLEQRLPEQEAFCVGMEATGHYWLALYSFLREQGFDLHVINPIQSDSLRNFHIRKQKTDAVDCFLVAEVIRFGKFSETHLADEDILVLRNLARFRESLKDSCADYKRQVVTVLDQVFPEYAALFSNIFGESSRAFLKTYGTPEQTIDVDTKSLAALLRKASRGRHGADKARELKSLAARSVGLTLCSDAFAFQIRILIEQIEFTEKQIDEIDKKIAKQLKKLSSVILTIPGVGPATGAIILGEIGDIGRFSNPKKLVAFAGIDPTSFQSGNYVGQHNRLSKKGSPYLRRAVWMSALIAVRCDPVFKAFYEKKRSEGKAHGTALGAVSRKLLYTIHAVLKADKPYEVRRKTIG

SEQ ID NO: 420281 - protein, 360 aa, unidentified
MQTQRTELNFEGQNVFVGIDAHLKSWTVSILTDHLFHKTFTQPASAEPLHNYLERNFPGGVYHSVYEAGFCGLWPHYKLKGMGIDNIVVNPADVPTSQKEHLQKDDPTDSRKLARSLRSGDLKAIYIPDPSTLEDRSLVRMRATLVKDMVRFKQRIKSFLYFYGIDYPQEFEKCGTHWSKRFMKWLNEEVSLEHDSGTQALRILVQEAEQQRKLLLEVLRKIRLLSRSEKYAKSIVLLRTIPGIGSITAITFLTEIEKIERFENTDHFAGFVGLIPDRHSSGEKDNNGEMTFRGNDILRRSLIESSWMAARFDPALMMSYHGYIKRMEPNKAIIRIARKVLNRMYFVLRNKVEYVSGVVK

SEQ ID NO: 420282 - protein, 429 aa, unidentified
MSFKPIAGIDVGKFFSEMAILSPSNEVVARMKIHHDSNTDVERAIELLKKTEKDFASKPFVVMESTGHYHKILFHSLCKAGFEVSVTNPIQTDSIKNIGIRKVKNDKVDARRIALLCRFQELRTTNIPSEDIECLRNLCRQYYKLSDELTAYKNRLTGIVDQLMLNFKDVFSNIFSKAAIAVLEEYPTPTGILKANRNKLISLIQKISRRSLKWSTAKYELLVSKARDFAPLSVRNSSNIAMLGVYISMIRTLEDNLEKVLKAIHRLIAEDMAKDMPTLALTLELLQSLPGIGLLTAATIVAEVGDFSAFSKPGKLVAYFGIDPSVMQSGEFTGTRNKMSKRGSRILRRVLFTIALANIRTKRNKKACNPVILEFYKQKCQSKPKKVALGAVMRKLVCYIFAVIRDRKPYQLRSSQEHAQMLAAKHSAA

SEQ ID NO: 420283 - protein, 415 aa, unidentified
MEHPLWFVGIDWSSEYHQVHVMDASGAKRGARRFPHSGAGLAALAEWLLQVTGAPPEAIHVAIETPHGPVVETLMARGFRLYAINPKQLDRFRDRLSPAGAKDDRLDAEVLAGALRTDRHCLRPLQPLDPVVIELREWSRIAEEFSRERVRLGNRLRDQLWRYYPQMLEIADDIAADWVLAMWKLAPTPRAAKRVRETTVARLLKAHRIRRITAAELLQRLRKPPVTVAAGTTEAATAHIQILARQIPMINRELRAAHARIDQLIRRLMEPLETEPGQLPEQRDAAILASSPGAGRTAVAALLTEAPQAVRQADYQALRCLTGAAPVTRQSGKMTFVVRRLAVNRRLQNAVYHWALAAIRVDPVSRARYDALRQRGHKHARALRSVADRLLAVACAMLRNRTLFDPNRNACHLAA

SEQ ID NO: 420284 - protein, 415 aa, unidentified
MATPLVVGVDVHRKANAVALMDGNGAELCTGFSVANNRPGTQKLAQTVAQHMSSGTFDCVRIAAEATGWYWWHFFRTLDQDQTLQQWPLDLLPFNPRLTANFKKTYVDLDHADPIDAFVAADRLRLGRDLPAPFHYEERYTGLRLLTRYHYHLVHALAREKAYCIAILYLKASAYTQVKPFSNTFGAASRAVIEEFAAIEDIAALPFADLVEFVDSHSRRTLEDPAATARLLQQMAAESYPLPGALHAPVNLILRSCLQQIVHMEQAQKRVDTAIAQAMLAIPHTLETVPGIGPVFSAGMIAEIAGVERFGDDEAKVAKFAGLKWRKHQSADFQAEETRLTRTGNRYLRYYFCEAANAVRLHDAEYAAYYDRKFHEVRKHQHKRAVVLTARKLVRLVVHLLMTNQPYQARRPHHS

SEQ ID NO: 420285 - protein, 344 aa, unidentified
MEGYAGQQFVGIDLHRRRSVIVRMTESGEVLESVRIVNDADRLTEVITRAGQSPEVVLEATYGWYWAADALQAAGASVHLAHPLGVKAFEYRRVKNDVRDAIDLADLLRMGRLAQGWIAPPATRKLRELVRHRAKLVAVRSLCKAEVHAVLAKCGVQVPMTDLFGVAGTALLDRLDLPAAYTARIASLRRLMDALNVEIDLFARLARARLARDPAYTAVQTIPDIGPTLGAVFVAEIGDVTRFATAPQLACWAGLTPRHHESDNRVRRGSITKQGSRLVRWAAVESVQTLSATSKVGQIRDRIAAHRGRNIGVVAAARRQLEYVYYALRDHHVRALQPNPTAAA

SEQ ID NO: 420286 - protein, 419 aa, unidentified
MTSIKEKKVKHINKKTMITTLDIGKTIHYGYFRAPNGSDVKAFPFYNSKKSFNTLWGKICQFKREHQLDEVVIGFESTGPYAEPLFHFLRGKDAKLVQVNPVHTKRIKELTGNSPDKTDKKDPRVIADIISLGHALTLIVPKGAAAHLRRLTQARERALKQRTATINQLQDLIFVIFPEFLSIMKNITTKTASYLITHHPSAESICTMGVKALVATIKKISRGQLGHQRAQELVAAAKNSVGIYEGKESILLEIEHLNRKIEFENRFIDNLEHQMAEYLQQVDYSGCILSIKGIGTVTTAGLIGEVADFNKFDTISEVMKLAGLDLYEISSGRHKGQRRISKRGRPLMRKLLFFMAINTVKSKGIMHTKYQQMLAQGMIKMKALVAISRKLLGIIFAIVRDNTKYVENYSGNYHYKLAA

SEQ ID NO: 420287 - protein, 370 aa, unidentified
MGEYSGAFVGFDTSKTKHAVAIAEGGRGGEVRFLGEIASSPVRVERLVGKLASRYDKLHFCYEAGPTGYGLYRQIRELGHDCTVVAPSLIPKRPGERIKTNRRDAVTLARLLRAGELTAVWVPDAVHEAVRDLVRARAAAAQDLRGKRQQLLSFLLRHGRIFSGRQHWTLAHRRWLAEQSFAHPAQQVVFQDAVEAIAEALARLQRLEQQLVAIVPSWSMAPVVEAYQAMRGASFLVAVTFAAEIGDVRRFDNPRQLMAFLGLVPGERSTGETIRRAGLTLAGNRHARRVLVEAAWSYRHPGRVSPTLRARLEGLPKPVRDTAWKAQVRLCARYRRLSAAGKKLPVVIAAIAREMAAFLWAIVRHVAPAV

SEQ ID NO: 420288 - protein, 422 aa, unidentified
MLEETNDSEEIIARVAALDIGKAELVCCVRAPSPDTPGKRLQEVTTYATMTRSLLVLAERLGVLGVTRVVMEATSDYWKSPFYLLEAHGLEVWLVNAKDVKHLPGRPKTDKLDAVWLAKLAERQMLRPSFVPPPAIRRLRDLTRYRADLVAVRTAEKQRVEKLLEDAQIKLSVVASDIFGVSGRAMLAALVAGERDPKRLAQLARTRMRAKLGQLEEAFTGHFSDHHAFLLARMLGRIDQASADIAELEARIDQEVAPFAQAVDRLDEITGVGRTAAQVIIAEVGTDMGRFPTAGHLASWAKFAPGVKQSAGKPKGKATTGHGNSYLARVLGEAAVAASRTNTFLGERYRRLAKRRGTKKAIVAVGRSILIIIWHLLADPTARFHDLGAGFYDTRINAERTKRNHVRQLEALGYKVTLEPAA

SEQ ID NO: 420289 - protein, 409 aa, unidentified
MERQLERCCGLDVHKETVAACVRVGGRTGQAEQHVQTVGTTVGDLLVLRDWLAAHGVTHVAMESTGVYWKPVFYALESDFTGLLVNAAHIKQVPGRKTDVKDCVWIAQLLEHGLLRGSFVPPAPIRDLRDLTRYRKTLIHDRTRVANRLHKALEEAGMKLASVASDILGVSGRAMLAALVQGTTDPAVLADLARGRLRGKLPALRQALASRFRPHHAFVIGQLLAHLDYLEEAITTLSAEIERVMAPWAEPLRRLDTIPGINQRTAEVILAEVGADMSAFPSARHLASWAALCPGHHESAGKHKSGKTRKGNRWLRTALIEAAAGASRAKHSALQARFRRVLRRRGPKKAVVAVAHALLRVVYHVLADGTVYREAGANSYDRHQSQRVTRRALQTLERQGYRVTLEPAA

SEQ ID NO: 420290 - protein, 355 aa, unidentified
MNSEKYIGLDVHQATISVAVMDPRGKVVMESILETKASTILEFFAGLRGTLSVTFEEGTWAAWLYDLLKPHVAKVVVCNPRKNALLKDGNKSDRIDARKLAELLRLDNLKPVYHGETGVRMLRELARSYLTIVKDLTRVMNRLKALYRSWAIPCAGRDVYYTRHRTEWLGKIREAGVRRRAEQLYQQLDMLQHLRQQARRELLAESRKHPIIAKLRKIPSLGPIRSALAVALIQTPHRFRTKRQLWAYSGLALETRTSGEHRYVRGQLRRSKKQVSIRGLNKDHNHDLKGLFKAAATRASVQPGPFQDFYQRSLAKGIKPTMVRLTLARKIAAITLTLWKKGENFDAEKLKSQAA

SEQ ID NO: 420291 - protein, 344 aa, unidentified
MKLYTALDVSLRWVSICIVDEAGEVRHEAKVAADVDTIVVSLRNFSEDVKMVGFEAGALTQYLAYGLQAAGFEIVCLEARQVNAALAAMRNKTDRNDARGIAQILRTGWYSRVHVKSLASHQIRALLSSRKAILRKCIDLENEIRGLLRVFGVRLASKVPHGAYDAVVREHVESEPLLARALVPMVEARQMLYRTYLKLDNEVKAIVRNDRVCQQFMSVPGVGAITALTFKAAVDDPRRFKSSRTVAAHFGLTPRRYQSGESDNPGRISKAGDPDVRCALYVAAHSLLCRSETWSALKAWGVRLAKTRGHRRAVVAVARKLAVILHKMWIDGSQFRWTSAQASG

SEQ ID NO: 420292 - protein, 344 aa, unidentified
MCLTSKVRIMRKFWIGIDVSKKTLDAALLGENGNVLAQKKVSNSEKSLKKLYGQWAKGFGFSKRECLVCLEPTGHYSNVPVLTCLDMEVGTWLVHPNNVLKSNGTTRGKDDKVDALRIAIYARRYDDKARLVAEDFRRTLRLKQMITERKNLVKRKASLDGKLKDTARYCNEEDRDNCTRMARAELALLKKHIKELDKVINEVIKADPQLYEQHKLLLSVDGVGNVLSAHLLATTEGFTRYNTPKELACHTGVVPFQYTSGTSIKGKTRVSKQARKSLKTIVHMAALSVIRLKGELRDYYLRKVAQGKNKMSVLNAVRNKIIHRVCAVIARGTPYVATKTMKIA

SEQ ID NO: 420293 - protein, 411 aa, unidentified
MRLFVGDDWAEDHHDVELMDQAGRVLARRRLPEGVAGMGRLHELVGQQLGEDDRDAEVVIGIETDRGPWVAALVAAGYTVYAVNPLQASRYRERHGVSGAKSDGADAHMLTDMVRTDSHQLRAVAGDSADAEGIKVLARTHKTLIWERTRHIQRLRHQLREYFPAALEAFDDLDAGDTLELLGKAPDPARAARLTRAQVSAALKRARRRGIPDKATAILAALRGPQLGRPPAVTAAYAATVRSLIAVIITLNEQVKTLQGQVEEHFGQHPDAEIYLSQPGLGTVLGARVLGEFGDDPHRYADGKARKNYAATSPITRASGKKKVVAARFIHNDRLVDALNAQAFASLNASPGARAFYDELRARGIEHNDALRRLANRLVGILHGCLKTRTTYDEATAWSHRENLPQSSVAA

SEQ ID NO: 420294 - protein, 432 aa, unidentified
MKFNQSNKQNQRISRISETTLVIGTDIAKHNHVARAFNYRGIELGKRCLFQNDENGLLNLLAWAESIKQEQGLTDVLLGVEPTGHYWFPLFHFLKQRGIEVVLVNPHHVKKSKELDDNSPTKNDIKDAKVVAKLVIDGRYTQPQLPEGVYADLRVLMNQRDRLCGDLNRVKGRIHNWLDRFFPEYTQVFKDWEGKASLITLQNFPLPQDVIAAGETTIAAIWKKNGVTRAVGPKRAELLYRKARKSIGLTEGATAARHELAMYMEQYVMLCRQIEQLMELVAGLVEQIPGAAHMMSMPCIGLITVAGFLAEVGDLSGYDHSQQIVRHAGLSLRENSSGLHKGETTISKRGRCRLRALLFRAALTMVAKNPEFRALHVYFTTRRDNPLKKKQSMIALCNKLIRVLFELGRKQKNYDASKVLGPHREAQLQAAA

SEQ ID NO: 420295 - protein, 343 aa, unidentified
MSEVTTIGLDIAKTVFHAHGADERGRCVFSKRLTRAKLLVFFAAQPRCTVALEACGGAHHWARELTALGHDVRLIPPAYVKPFVKRHKNDAVDAEAICEAAQRPSMRFVAVKSEEQQASALVFRTRDLLVRQRTQLINAIRGHMTEYGWVAPKGPAYVSMLGDLLEDEMGASLPPAAFSMFRVMLDLLADLDERIAALDKEIAQRAREEETARRLMTIPGIGPITATALIALAPAAETFAKGRDFAAWVGLTPTQHSTGGKQKLGATSKMGERTLRRLLIIGASAVILQATRRGTAKGSWLEQMLARKPRMLVTVALANKMARIVWALLAKGGTYRAPMAVAA

SEQ ID NO: 420296 - protein, 355 aa, unidentified
MEKEQNNFTDLQLYVGLDVHKKQWSVSIYTPSSHHRTFSQPPHPEALKSYLDKHFNGAKIKCAYEACKFGFWIHRQLTSFGYECLVVNAADIPTSNKESTEKADPSDSRKIGKALRAGLLSSIHIPDQRTEGDRQLFRYRKRLWSDLVRVKNRIKDKFLFTGVEIPTEMDNSNWTKAFLKWVKEVKLPDPHTRLTVDLLLEQYHFIYRHFLKVSVEVRKLQRTSYYKVNAKLLRSIPGIGPLTTVQLLTEIEDINRFASFKKFNGFVGFKPTTHSSGEHDWRGRLTYRKNKALRSSLIECAWTTISSDPIMLQRYDELKKRLTGKRAIVIIARKLLSRIYFVLKKQKPYELGLAK

SEQ ID NO: 420297 - protein, 381 aa, unidentified
MTTLTTHNPQDTTTEGTLFVAFELSEKTWKLGFTTGHGQKPRERTVTARHQERVLAEIAQAKRRLGLPDTAPVVSCYEAGREGFWLHRFLQAQGITNYVVDSSSIEVNRRRRRAKSDGLDVRKLLSMLMRYHHGERQVWQVVKVPSVDAEDQRHLHRDLETLKQERASTTTRIQGLLSSQGIRLTSLNQLPEQLDALRLWDGSPIPPGLRRRVLRVYAHHTFLSEQIAAVEAERRAQLQTATEAHIDKVRQLMQLKGIGINGAWLLVMEFFGWRAFKNRREVGGLAGFTPTPYQSGDSAREQGITKAGNRHVRWMTTELAWSWLRFQPDSALSVWFRERFGKGGKRLRRIGIVAVARKLLIALWRFLETGVIPAGAVLKEV

SEQ ID NO: 420298 - protein, 369 aa, unidentified
MLRPRQQGKLARGAKDEEHAMSHKLNAGIAVIGIDIGKNSFHVVGLDRRGAIVLRQKWSRGQVETRLANLPPCLIGMEACVGAHHLSRKLTSLGHNARLMPAKYVRPYSKGQKNDFRDAEAIAEAVQRPTMKFVATKTAEQLDLQALHRVRERLVSQRTGIINQIRAFLLERGVAVRQGLRFLRAELPRILATPRDVLSSRMVRVLEGLADDWRRLDERIEGLSSEIEVLARRDAGCERLMSVPGIGPIISSAMVAAIGAGDAFSKGRDFAAWLGLVPKQISTGDRTILGKISKRGNRYLRVLFVQAAWAVLIKPTSWDRHGLKSWLEAAKKRLHHNVLAIALANKLARIAWSVLAHGRTFEASKMQAA

SEQ ID NO: 420299 - protein, 349 aa, unidentified
MLADELDYVLGVDTHRDEHVMAVVTAPAGAVVAGAAAPANAHGYRELLRLAERHAPGRRAWAIEGTGSYGTGLSRYLHARGESVLEVSRIPRSERRLRGKDDALDAARTARAALASDTLALPRRGERREALRLLLVARRSAVDVRREALTQLRAVIVTAPELLRQELCQLPEGKLLDRCSRFRRTNSAGADELATRLVLRSLARRIDAATREAAELEREILAHVRALAPALLDEPGVGPIVAAQLIVAWSHRGRLRSEAAFARLAGVAPLPASSGQTRRHRLSRGGDRQLNRALHTIVLHRRRHDPATKDYIAKRIAEGKSRRDATRLLKRYLARHLYRLLQNQEPLLA

SEQ ID NO: 420300 - protein, 362 aa, unidentified
MRTQTYKKSEPELVNFTGKTVYSGIDVHKNSWNVSICLDDMFVKRFHQEADPKALHAFLTNRFPGAKYVACYETGFSGFSVQRELAELGIECVLAHAADIPQTNKEKLNKTDKVDSRRIAEALSKGMINSIYILDKQAEADRAFVRYRRGCKERLKARKAAIKMKLFTLGIKIPPQFDKSHISKKYISWLSSLTFDEPITKFTLDFMIEDIEALRKKEYELNKCLRKMSVSDRYKDIYIELNKIPGIGLISIMTLLTELVDINRFGSFKKINSYVGLCPTEFSSGEKSMHGKITPRANKGLRTVLVEAAWTAVSCDPAFTQKYSELCKRMKKNDAIVSIARKILSRIYAVWSKKIDYKIGVR

SEQ ID NO: 420301 - protein, 423 aa, unidentified
MVMRKADTGKVKVVKDDTLIVAIDVGMEMNRGYCTTSDGRSTKPFKFENTREGLDTFWGMIMTSKNRFKCNEVIVGYESTGPYGEPMVHYLMKKPVRVVQVNPMHTKRVKEINDNSPLKTDDKDPRVIADIIKLGRALSIVIPEGDAAYLRRLNNSRERHVRERTALVNQLQQLVFLLFPEFKKVIKDIKCRTPLYLLKKYPTPEAISVLETHVLGEEMRKKSRGKFREHHADMLINLARNTIGIREGVSGLSMDIRHILVQLEMLKNLIAEIEGEMEITLGRIPYSSKLLSIKGLGVVSVAGIIGEIGDFKKFGTQPEIMKLAGLDLYEISSGKMKGQRRISKRGRSLLRKILYYAAIQTIRKNGILHDYYTRLTDRGMKRMMALVAVSRKLLGIIYAIVRDDSEYSVNFESMKRQVIKKAA

SEQ ID NO: 420302 - protein, 333 aa, unidentified
MQNFYFIGIDVSKKKLDICVMSNSKVLKEEQVSNHPQAIATVIAGIKEELSMSNDCFIICAEHTGQYTYPLICACKSVGSKLWLENASQIKYCSGVTRGKNDKVDARRIAEYAMRFFDKTKPYQRPIEELMRLKQLEAERSLYLTDLAKYKAQLSDQEGFMEDKIFKRKAKRLKEMIKSLEKTLKEIAQEMADVIYSSEELSRQMRLLKSVEGVGPVVAMNMIIATEAFTRFDNPRQFNCYVGVAPFAYTSGSSQHSRNRVSQRAVKYIKCLLHMAAVAIAHKKTGDLKTYFERKVAEGKNKMTVLNAVRAKLVARMFAVIRNNRVYQPILSV

SEQ ID NO: 420303 - protein, 367 aa, unidentified
MKKVSTVVAKPSKKISQQKLTVGLDLGDRNSWYCVVNEAGQIQLEQRVRTNEKALREIFGAMPRSRMALEIGTHSPWISRLLSELGHEVIVANARKVRLIGESRKKDDRLDAQTLARLARIDPELLYPVKHRSAQAQADLMMIRARAGLVRARTALVNTARGLAKSYGERLRSCNVRNMNQEKAECLSPELQTALEPLLACIESVSEQIREYNERIECLAKQSYPQVALLKQVKGVGTLIALTFLLTLEDPHRFRKSRDVGCYLGLQPGRRNSGRSEPQMHISKEGDPYLRTLLVQGAQHILGPFGVDCDLRRWGLKLAERGGRNGKKRAIVATARKLAVLLHHLWVSGEVYEPLHNKCGTTVAAAA

SEQ ID NO: 420304 - protein, 521 aa, unidentified
MSKSRSQPRRRRRTNFVQKPNGSLAPRVQAVGPERFGIVMVDVSKQRIQTQICDFYGNEIVPFTVYEQSRPGCEACLRSIRQVQAEARVLDLVVAIERTGEYHRPFQRAAQRAHYDVRIVHPLATHHFRTIAHPGNKTDPTDLGGIHRATVNGFGLVERVLPPEYAQLQLLVRHRRDLVHKQTTLCCQIKEALHAIMPGYDQCFAAFWDSTIALAIARATGSADAVLRRGVAGLAELVERGHQPRHQTTFHRIVQWAQTAPPGHAHSDIVRSVLDDLDDDRLGKNRHIHQLERIIARHLAGTAFVRLLVIPGINVVSAADLAGELGPIAHYANANAITGRAGHFPARYQSDAVDRPDGALIRTANRRLRATLMQIADNLVTCNHYFRAKASTWRSAGKDPRWIRVKVAKIFTRIAYAILAGAGPFQHPCLQGDNYVLGKLNAFHLAHHTPVAEVLAGLHATIEQLPAAQYAHEARPWQQQYQRRQASRRNGPTPLSEILLEVLARLGTGTVESTHEGAGLG

SEQ ID NO: 420305 - protein, 348 aa, unidentified
MKHYVGLDVSIKETSVCIVDENGKLCRERKVASHPDDLVAILNDPALNLDRIGLEAGPLSQWLFDGLAKAGSPVVCIETRHTKAFLEALQQNKSDRNDARGIANMMRVGLFKDVHVKTLGSQKRRALLTARSLLQEKAIDLENEMRGLLRNFGLKVGQTSGGTFERRILELVENDAELVEIMQPLLDGRRKLREGLAKLEKRVRSEAKNDDVCRRLMTVPGVGAVVSLAYVATVDIPTRFRHSRSVGAVLGLTPVLNQSGEVSRVGHVSLRGDAMMRRLLYEAAQSMMTRVVKWCWLKAWAMNVAKRHGSKKAKVALARRLAVVMHRMWVDGSEFRWTKIEPPTSVAA

SEQ ID NO: 420306 - protein, 355 aa, unidentified
MNDAKYIGLDVHQATISATVLDSTGKLVMESILETKAATILQFIHGLRGSLHVTFEEGTCAAWLHDLLKPHVTRVLVCDPRRNALLKVGNKSDRIDSRKLAELLRSNLLRPVYHEHTGVRTVKELARSYLTITKDLTRVMTRLKAIYRSWAIPCACQQVYAPRYRAEWLAKISEAGVRRRAELYYQQLDALRPLHQEARRELLAEGRKHKAMNLLRQIPSIGPIRAVLLLALIQTPHRFRTKRQLWSYCGLALETRNSGEYRMVHGQLKRSKKVVAIRGLNKNHNHDLKNIFKGAAIRAAAVAGPFQEFYAALLAKGMKPPMVRLTLARKIAAITLLVWKKGVLYDAEHLKQQAA

SEQ ID NO: 420307 - protein, 350 aa, unidentified
MKKVSTAKAKQGRNISRQRLIIGLDLGDRNSWYCVLDETGQIQLEQRVRTTVKALQEVFGAMPRSRIALEIGTHSPWISRLLSELGHEVIVANARKVRLIGESRKKDDRLDAQTLARLARLDPELLYPVKHRSAQAQADLMMIRARAGLVRARTGLVNTARGLAKSYGERLRGCNVGNMDPEKAEGLSPELQRALEPLLSAIEEVSERIVEYNDRIEALAQASYPQVELLKQIKGVGTLIALTFVLTLEDPHRFHRSRDVGGYLGLQPGRRKSGESEPQMHISKEGDPYLRTLLGMRTLTDYCAEPKLQNKSLRPNRKYRSAMRRLPGLMDVISPKSGSVTPLSGLLKFG

SEQ ID NO: 420308 - protein, 360 aa, unidentified
MDVHKESIAVAYVAQEHHAEVVALGNIGTRQGDIDHLIRKMQSKSKHLIFVYEAGPCGYWLYRYLTKKGHVCWVVAPSLIPKKPGDRVKTNRRDAIKLARLMRSGDLTPVYVPQVEDEAIRDLCRAREDTIRALKAAKFQLKAFLLRHDIRYTGRATWSPAHLRWLSEVVCPTPAQQIVFQEYIRAVTDHTERLTRLEQALTDQVQTWRLAPVVDALQALRGVQCTVAVTTVAELGDLTRFDNPRQLMHYLGFTPSEYSTGERRQQGGITKTGNSHARRALVEGAWAYRSPAKISRHLQLRLEKVPKAIQDISWKAQVRLCKRYRQLSARGKNPNQVVVAIARELSAFMWAIAQEVPLTP

SEQ ID NO: 420309 - protein, 364 aa, unidentified
MQCVITNTELSSQEGTRCQFNGGRCTIKLGIDVHQEFYVVVMQEGASNPKPPQRFAKRAFVHWATKLRRRGAEIHAVYEACGFGFALQRQLSAVGIHCYVVCPQKLDELAKGVKTDGLDARALCLRLDRFVQGNSAALAVVRVPTEEEERSRAVHRQREQLVKVRKQLEAQGRSLMVNHGMEPVRNWWKRSNFAALEVPAWMKELLGNSQPILLALQERITALTIQLQAAASAKQPRGLGQMTSVIIDREICNWHRFNNRRQIASYTGLCPGEYSSGNTRVQSCVTKHGNPRLRAALVELAWRLVRFQPNYKPILKWRRLLAKGALSTRAARKKAIVAVARQLAIDLWRVRTGRCQPQALGLVL

SEQ ID NO: 420310 - protein, 351 aa, unidentified
MNYIAFDSHKRYTLACVERAEGGILREVRVGHERGAIRRFLSTCEPHSPVAVETIGNWYWIVDEIEQAGMVPRLVHARKAKLMMGSINKTDKLDARGLNRLQRNGTLPTVWIPPAELRDQRDLPRTRMVLSRERTRLKNRIHSTLAKYALNIEGVSDIFGKAGRQLIKERMEQLPPHTRYATERVLEQLEVVESQIDLFEQRTREVFSETAELELVMSLPGVGFILGVVIVLEVGDVSRFPTASHLASYAGTTPRVHSSGGKTRYGQLREDVNRYLKWAYVEAANAVCLQRRFFPHRHVSQLYDRIARRKGHQKAIGAVARHLAEATYWMLRRRQSYQEPKRTVPVSSTEA

SEQ ID NO: 420311 - protein, 351 aa, unidentified
MGEYIAFDSHKHYTWVEREQVETGQVRQQRVPHQPGAIRSYLAGSEPGTAVAVEATGNWYWIVGEIEQAGLRPLLVHPRKAKLMMGMINKTDQLDAHGLNRRQRNRSLPTVWIPGGELRDLRELTRSRLVLTAQRTRLKNRISATLSKYGVRESERSDAYAKGARRERQQRLEALPEQARWVSEQLLSQLDFVMAQIQQLEKRLGALVQTTPEMQLLKSLPGIGVLLSATIALEIGDIGRFPSAEHLASYAGTTPRVHASGGRVRYGALRQDVNQYLKWALVEAGNSVAVNYPRYEQRHVSQLYRRLRERKGHSKAIGAVARHLAEAAFHVLQRREVYRDPAAQRVVPAEV

SEQ ID NO: 420312 - protein, 355 aa, unidentified
MEKQNRDVIGLDIAKTIFHAHVAASDGKTGESRRLRRKELLDWAARCEPALIGMEACATSQHWARELTALGHDVKLMPARYVKPYIKRGKSDAIDAAGIAEAVTRPTMRFVPAKSKEQQAALMPHRTRALLVRQRTALANALRNHFAEFGIVVPTGIAKLAELISTGAEEIGKSIPEAARCCFAVLVNSYEGVTGNLKAVECQIKEWHLRNDRSQRLSTIPGIGPITASAIAATITDAGAFRSGRDMAAWIGLVPRQTGTGGKTHLGRISKQGDRMLRKLLVLGATALVRYARITARPTCLPDGLRCWILGLLERRPARLVTIAIANKLARTAWAVLSTGEAFRGDHRPRAYVMA

SEQ ID NO: 420313 - protein, 341 aa, unidentified
MKKNLFFIGLDIAAVDFAASIFKAPDQSIVTKEAIPNNQEGFDLLLLWLKEHHLDKTNSHICMESTGVYSQAIAYYLLFAGFPVSVEPPLKVKRAFDPVGHKTDPVDSKQIAEYAYRFQDELTSWQPKEEILEKIRQLLSVREQFTKQKVALKNASQAYSKQRVQMVLIKKAHQETLAQIKKQITRIDQELTKLIKQDPEIFQKANNLDSIPGYGMLLAAHLLVITENFTKIQKPKRLAAFIGIVPYQHQSGTSVFKRAKIRHFGPGPSRKLLRLAAQSVATHDVTFRHYYLRKLAQGKAKALVLNNIANKLLKVACAMIQNNTRYIKDYRSIHPMYLKSA

SEQ ID NO: 420314 - protein, 330 aa, unidentified
MENYDEVVGIDVSKKSIDAYCYQSQCYKVFSNELAGYKSLINWAKKHAKGGSVFYCFENTGYYSLKLALYLTSQKIVYVEESPLKIKRSSGIVKEKTDRLDAELIARYGWLYREELEPSTVKSNLQLELGRLLALRDQIVRNNAGLKGTLKEMKALLSSPTTDLGCISLKRSIDYLSKQVASIETRILELISQDESMSKNYKLLCSLKGIGLVLACQLIYHTGNFTRFDNWRSFSSYCGTAPYEYRSGTSIHRRKQCHYLGDRKMKSLLSMASISAIQHDSELRLYYKRKIAEGKETMIAVNNVRNKLISRAFAVVKRGTPYVVLDQYAA

SEQ ID NO: 420315 - protein, 312 aa, unidentified
MTASQDVFIGIDISKDRLDVHVRPLGVGFSVSNEAAGHAALIARLRPLRSKRIVLEATGGYERALWLALSEAGLVAAVVNPRQVREFARAAGRLAKSDRLDAAVIAHFAETFAPRPGKPDPVADRLGEHVLYRRSLQEEIVALEHQRRRLETPALRERAERRLVALRAEVKEIEREMRAIVDGDPGKKALFACLTALKGVGLVLACTLIANMRELGSLTRHQAAALIGVAPLNHDSGVRRGYRAIAGGRRRVRNVLYVATLSAVRSNPVIREFYRRLSAGGKPAKVALVACMRKMLVMLNGRVRDHLATATA

SEQ ID NO: 420316 - protein, 438 aa, unidentified
MKKIRTHAAGIDIGAKKVYVSIEDLPVKSFDTFTQDLEALGVYLVAHGIETVAMEATGVYWVILYDILVSQGLDVWLVDGAGTKQVPGRKTDVKDCQWIQQLHSYGLLNKCFVPDIRVQELRAYQRLREDHIRSGAMHIGHMQKALILMNIRLKEVISQIHGTSGMRIVRAILSGERNAEKLALLCDQRILKTKKEWVIRSLKGHYSEAALFELGQAVACYDFYGEQIAMCDIKLEEVLKKMDLDGTPKPRSKGTRKAIRHNRPDIENMGGHLLGIFEGKDATVLPGITDYNWMQLLSEVGTDLGKWKSEKHFTSWLGLAPKQHNSGKMKRNYKPKGAPRAGLIFKQAAVGLLNSKHIALGAFGRKIRAKKGGLVAIKAVARKLAELYWKLFVKGLEYVENGIQKYQEKMLLNKQRAVTRMAQELGLGITPLKIQSAD

SEQ ID NO: 420317 - protein, 326 aa, unidentified
MSRIQEKKTITTATSPFIVMGIDVSKDQLDVYVSPTGNHHSFKNDAGGVAELVNVCRDHDADLVVLEATGRYHRMAHKTLHEAGVRTAVANPARSRNFARSVGRLAKTDRIDARVLAEYGERVRPPASTPPSKQQAKIAEITVARRQIVDEMKILKQQQTQTLDDLVIAQIAARISLCQCHCKDLEQLLAELIEEDDGIRRKHEILTSIPGIGLTTAATLISELNELGGANAKQIASLSGVAPMNRDSGSFRGKRKIGGGRKPVRDVMYMAAVVAIRWNKDMAAFYQRLKKAGKPFKVAITAVMRKLLILANTLLSENRLWSETQP

SEQ ID NO: 420318 - protein, 351 aa, unidentified
MIFINCLGIDIGKSQSLLAHYKDEVLVKEMVIQNNQNGYRYLKNYIKHLDSLFILFESTGIYSRGMKRFCEIHKIDYLEMNPLEAKFKTSSLRSWKTDKSDAHKLALLAFRMKDSKVQRQSEEIYFELRERARFHLEMEINQNRLKVELVETLHQTFPGLEKLFTNRYSKIALNIAKAFPHPDFVSTLTHDELVEKVLHSTDKGISVNKAHKYVQKLIEIKNNSFPNVDKSSFLLQKVQYLCDKLLIGIEEMKEFDQEMIDLAKNTTEFENIISIPGIGELTAALLIGELGNIREFKTNKQLNAFVGIDIKRYQSGTSKSRDTINKRGNKKARRLLYLIIIKAILWIIIIN

SEQ ID NO: 420319 - protein, 340 aa, unidentified
MSEITTIGLDLAKHVFQVHGIDAQGTTVLRKRLRRGQVLAFFSRIPRCVVGLEACATGHYWARELRALGHEVRLMPAQYVKAYIKRNKHDAADAEAICEAVGRPTMRFVPVKTAEQQATMLLHRGREQLVRQRTMLVNALRAHLAEFGIVAARGLRNVGQLIAIVRDDADIRLPAVAQQVLQVLASQLEQIEAAVAALERQLLTWHKTNPVSQRLASIPGIGPIIATAIATTVADANEFRSGREFAAWLGLVPRQNSTGGKIRLGGITKRGNRYLRRLLINGASANLLRSKATKADPWVIGLRRRRPPLVVAVALANKTARIAWAVMLREKEYQPRAMAA

SEQ ID NO: 420320 - protein, 400 aa, unidentified
MFYVGIDIGKRQHEVGVIDDKGQPVGKTLRFANTKAGSNKLLEYFNQHKLTPDNSVIGLEATGHYWLSVFSFVHKLGFKTTVFNPLQSDALRHFYIRKTKTDVKDAYLIAQVIRIDSPDETPFIEEDLLRLRHLERLRYSFVDQASDMKRKIVSLLDQVFPEYEQLFSDTFGKSSTEILMNYTLPEEFIEIDTDELANLLLEASNGRFGEYRAFKKATQIRESALNTFGITIGTDVFKLQIQLLLEQIQLIEKHLVEIEDVMIEISNRQKHYLTTITGISDVTACVILGEIGSIKRFERPEQLVAFAGLDASVHQSGDFNSQNTRMSKRGSPYLRRAIWQAAFVASNHDPALSLHYKRLRKRGKAHGTAVGAVARKLTHIIFAILRDNKPYEPRPQPNPN

SEQ ID NO: 420321 - protein, 403 aa, unidentified
MSQQAEQVIIGVDPHKLSATIEVVDEREQLLGSGRFTTDRAGYAAMRTYAKKWPDRVWAVEGSNGAGRPLAQRLLEDGERVLDVPAKLAARVRLFDTGHNRKTDAHDAHAVAAVAVRTKTLRVLQLDGELEALRMLTDRREALTRRRVQTVDRLQALLAELLPGQAKRNLTTGQAKTMLASVRPRDIAGKTRRRLAAEELAELIAVEAKIKKSTAELKTIVLARGSRLMDLHGVGPVVAARVLADVGDVTRFADRNRFASWTGTAPLDASSGEQNRHRLSRAGNRRMNHMIHIAAISQLRLDTDGRGYYRRKRAEGKKPLEAIRCLKRRISDAIYRQLLADAQEAAGTGPGGHCGATQESSAVDLPPHIDTSDQPLPGPADPTLRPAAAARKTHHEDTLAATG

SEQ ID NO: 420322 - protein, 416 aa, unidentified
MITILARIFERYIAVDLHKDYVMVGGVNIRQEIVLPPRRIELKAWLRWAERHLTKADALVVESTSNAWDFYDQVEPLVGRAVVANPHLVKLIANARVKTDKVDTLALAKLLAANLIPEVWVPPLIVREVRGLLAHRRRLVKTRTMSTNRLQSVLQRHNLPVPEGPLFSSDNRSWWETLKVSLTEKLRIRQDLDTLAHLNKQLAEAEDEIKRLSTTEPWASQVAFIMQLPGFSVLLAMTILAAIGDIPRFLHPKKLVGYAGLGASIHSSGKTHRSGHITKTGRRELRWALVEAAWSAVRYSPHWQAEFERLTKRMPANVAIVVIARKLLVVIWHVLTEQVADKHADEEKVAVKFMRWSWKLTQEQRDGLSTRLFVRRHLMRLQLANDLTHFTYGGMPRRVASVEELLAACPEAAASG

SEQ ID NO: 420323 - protein, 312 aa, unidentified
MTSEKFVGIDVSKRGLEVQVHGEAESRKFGNDPDGIRSLLEQMKALQPVLIVFEATGGYERRAAKALSEAGLAVAVVNPTRVRRFAEALGGLAKTGKIGAKGSAHVASVVVPAPNGQQSDLEEQLAACVERRRQLLVELAAEKNRLATCPACMRENIEEHIAWLEEHVDSLEAEIHSCIMQKPEWQTRAEIIDSVPGVGPVTATTLIAELPELGQLNRQKIVALAGLAPFNKDSGPKKGKRKIFGGRSGIRRPLFMATLSATKFNPVIRAFYESLLKRGKEKKVALIACMRKLLVIINAMVRKGEAWRVSPA

SEQ ID NO: 420324 - protein, 411 aa, unidentified
MEVVYGRCCGLDVHKGTVVACLLVRDGDTTQKEIRTFRTMTADLLVLHDWLMAYGVTHVAMESTGIYWKPIFNLLEGTLEVLLVNAAHLKRVPGRKTDVKDCEWIADLLSHGLLRASFIPPQPVRDLRDLTRYRKSLTDERVREVNRLEKLLETANIKLSSVASDVMGVSGRAMLEAMLCGNTDPQVLADLARGRLRKKLPLLQQALEGRFRPQHRFMLGQILSHIDYLDEAIETISMEVEKHISPFLEEVKLLDTIPGVDQKVAQSIIAEIGVDMSRFPTHRHLASWAGFCPGNNESAGKRKSAKTRKGDRWLKRTLIEASWAASRAKGTYLHSLYHRVARRRGKKKAAVAVGHSILVSAYHMLKNHVPYQDLGPDHFDLLNATHIKHHFVHRLEGLGFKVTLEPLPTPC

SEQ ID NO: 420325 - protein, 347 aa, unidentified
MMRILALDLGKYKTVACEYEAESGRHRFVTVLTTAKALHDLIVDREPQRVVIEICSIAGWVSDLVRSLGVELQVANTADQRWQWRKVKQKNDRRDALKAAQLSAVNQLCPVHVPELQMRQWRALIAYRYKLVQRRTKVKNHIRDLLLREGQLLARGRTAWTQAGMATLAAMAQPFEELDGEQLWRGELGIELAQLTELQQQIMTVENKLDELAAADARVQLLRTIPGVGPRLAEAIVAMFDDVTRFTTAGQVGAYIGMVPKQFDSGETARSGRITRHGNRLVRSLLVEIAWASLRHNPWARQTFQRISGGKKSRRKIAIVAVGRKLLVRCWGMLRHQTPWHWQSGVA

SEQ ID NO: 420326 - protein, 347 aa, unidentified
MKRIAVDLAKSVYQVAESVRSGQVVQRKRLNREAFRRYIQEQTEPVEWVMEACGTAHYWGRVAQALGHSIKLIHPRYVRPYRRRNKTDRNDCDAMLEAARCKDIYPVPVKTHEQQQVQQLHGLRETWKKSRTQRINLLRGILREAGIEAPVATAAFIRAAHELVERPEVAPLSHQLHIVLAEINLHEQCVAECEQQLKRWHADDEVVRKLDEVGGIGLLTASALKNAVGKPERFASGRQLSAWLGLTPREFSSGDRRKLGHISRQGNVYVRTLLIHGSRAALLAAQRCQARSPEKLTQLQRWAVETAARIGHNKAAVALANKLVRICWAVWCHERRFSGNWQSLKPA

SEQ ID NO: 420327 - protein, 380 aa, unidentified
MVPKAKLASLGDREKARIAAPFHNVRRSPNSCLGRGAIASRARTRKVGPFSRSSIERRVSLSTGERATYVGIDVSKATLDVAILPTEEHFVVANDEGGIDGLLDKLAERVAGVLVVLEASGGFERPAVAALAASGVALFVVNPRQARDFAKATGKLAKTDRIDAFVLARFAEAIRPTPRAIPDQEAREFQEILARRRQIVRMTTAEKNRLGASSAGAVRGRIKAHVKWLEKELSRTDRDLDETIEGSPTLKENEALLRSVPGVGPVLCRTLLAELPELGSLSPRELSALVGVAPLNRDSGTLRGRRTVWGGRARVREALYMGALIASRFNPAIKEFYERLVAAGKPKKVALVACMRKLLTILNAMMREGTPWRCPHALNS

SEQ ID NO: 420328 - protein, 329 aa, unidentified
MKAIKQLTKLYCGVDVSGDTLDICYQTAEGALEWFKCSNGVGGFTEIWKLTGKDYHFIMESTGVYQLPFCFFLVGKKARYSVVNALQIKRYIQMKLERNKTDKKDAFHVCMYGVDHNPECYQMPSHLYFECRAINNAIETITTEITSFKNKLHSLSKLEIDSKVIVTGYKKILRDLQGELKKFEAELYKKLEAWQPALVKQVRSVVGIGKRATAILIVTTQGFKHTQTYQQLISYAGLSPKEYSSGSSIRGKVRICKQGGSLLRHTLYMCALNAKETNGACKELFDRLVAKGKNKKLAVIAVANKLLKQVFGVVKNECLFDRNYYKKVA

SEQ ID NO: 420329 - protein, 363 aa, unidentified
MQSEHQRLDFNGQDIYAGIDAHLKSWRVSILTNGIICKTFSQNAKAEDLKKYLENNYPNGTYYSAYEAGFCGFGPHRKLREMGITNIVVNPADIPTTDKEKKQKEDSRDSKKIVRSLYNRELEAIYVPNMEMEGLRSLVRYRRTLVKEISRYKNRTKSFLYYHNIEIPTELATGSTHWSKRYSNWLDSLELGTIHGRETLTHIKHTVEHLRAKLLEINRSLRGLEQDSEYSAMIALLRTVPGIGLITAMTILTELDNIGRFKSIDGLCSYVGLVPRTNSSGENEKIGRITPRSNRQLRSMLIESAWIAIRHDPALMMKYGELVKRMDAPKAIVNIAKKLLSRIKHVLVNKTPYVNPTWLHTQI

SEQ ID NO: 420330 - protein, 347 aa, unidentified
MEKRSMDHFAGLDVSVKETSICVVDDTGRIVREVKVASEPEALLQVLKNPAYHFKRIGLEAGPMSQWLYSALAEAGLPVICVETRHMRAVLKAQINKTDRNDARGMAQMMRVGLYRPVHVKTLRSQKLRMLLTHRKLLQSKAIAIENDLRGTLRNFGLKVGMVGKVRFEARIKELVDNLPDLAAMVEPLLIVRRTLREQFCVLHRRLLAIVRDDEVCRRLMTTPGVGPVVSLTYRATVDVPARFRKSKSVGAVFGLTCAKYQSGESDWSGRISRCGDEMMRVMLYEAAQSILHSKRWSWLKAWAMQIARRRGKKKAIVALARRLAVIMHRIWVDGTEFRWTREVAAA

SEQ ID NO: 420331 - protein, 422 aa, unidentified
MCVAEAREPARISSVGRHDPVSSVFVGVDIGKRKHQSALLGEKGEVLAKTLSFPNSLIGFESFLKQMAPWTKEDILIGLEATGHYWIDLYTHLTDSGYSVVVINPLQTDGVRNMYMRKTKNDRADALIIADVLRFGRFRESSVPEENIAQLQSLSRMRTGMVLSIGSLKRSVITVLDRLFPEFESCFKDVFSKSSMTVLDEYADPEDLSNCPLEKLTNVLWNGSNGRLGVVKAELLKKTASRSFGTAYAKDAMKFQLKLLLDQARFIQSQVDEIEKKIKELMKEHQLITTIPGISDILGAAILGEIGEVSRFESPKQVVAFAGLDPSVHQSGSFNATSMRISKRGSPHLRRALYIAAHVARIHDPVLKEYYEKLMGKGKHHRQAQTAVAAKLARIVHSVLFLNEPYDQEKLRLKPKLDHLTA

SEQ ID NO: 420332 - protein, 341 aa, unidentified
MNIKRVGIDLAKLVFQVHGVDCQDKVVLRKQLRRNQLLSFFATLPPCLIGMEACGGAHHWARELQKQGHTVKLIAPQFVKPYVKSNKNDANDAEAICEAVGRPSMRFVTIKTVTQQDLQAIHRIRSELVRQRTAKANQIRGLLSEYGLVVGRHLHTLRRALPDLLEDAENGLSFDFRALLDDLWKDLITFDERVAEMDKKVHALAHSVPAAKRLLSIPGIGPINATAIVCAVGDGKQFKRGRDMAAWLGLTPKQHSSGGKDRLLGISKRGDTYLRTLLIHGARSALKAIDKKTDPRSQWLQNLCGRRHKNVAAVALANKNARIAWALLTKETDYLPVGKPA

SEQ ID NO: 420333 - protein, 412 aa, unidentified
MEVLYRCCCGLDVHTQTVVACLIRDGKKQTRTFSTMTDELLRLVDWLSGEGCTHVAIESTGVYWKPVFNLLEGVLDVVLVNVRHVKAVPGRKTDVRDCEWLADLLRHGLLKASFIPPLEIREVRELTRYRQTLVKEQASVANRVQRIIEAGNIKLGQVASNALGVSGRLMLRALCEGETDGAKLAALARGQLKKKEAELRRALTGRLSPAQRFVLRELLDRYEELEAALSRASEQIKQEVGKCHDPFVAEAVELLQTIPGVGERVAQVIVSEIGVQMERFATDGHLASWAGMCPGNHESAGKRQSGRTTKGSIYLRNALVQAAWAATHTKETYLAAQYQRLAKRKGKNRALVAVGHSILVIIYHVLLRKESYHELGGDYFDKRNVEVQRNRLVRQLERLGMKVTLEALPVAA

SEQ ID NO: 420334 - protein, 354 aa, unidentified
MTSVKYIGMDVHSESISIAVRNSTGKIVIESVIETKASTLVQFLDGLRGDLRVTFEEGTWAAWLYDLMKPHVTEVLVCNTRKNTSRNGSKSDRIDARKLSEQLYMNNIKSVYHGEHGLRTLKELARSYLTISKDLTRVMNRLKALYRSWGIPCAGKEVYAPRHRAAWLAKISEAGVRRRAEQYYQQLDALRPLRQEARRDLLLEAKKHKPWKLLRLIPGIGPIRAAIVIAVMQTPHRFRTKRHLWTYSGLALETHDSAQYRVAEGQLQRSKKPATVRGLNKDHNHDLKDIFKGAAMRASTAAGPMRDFYEALLAKGRKPTMARLTLARKIAAITLIVWKKEVRFDANYLKSQAA

SEQ ID NO: 420335 - protein, 448 aa, unidentified
MRTRKPPRPRKMKLPKHLQHINPHAAGIDIGGRSHFVAVPEGSCEQPVREFTSFTDDLHRMADWLLACAVSTVAMESTGIYWIPVFEILESRGLEVRLVNARHVKNVPGRKSDVLDCQWLQRLHSYGLLQGAFRPTEQECTLRAYVRQRMNLVRYAASHIQHMQKALAQMNLQLANVVADITGGTGMRIIKAVLAGERDPLVLAQLRDVRCKSNEATIARSLQGNFRPEHLFSLKQAVDLYEFYQGQIGECDRQILDQLSSFDGADASGNGPPESLDEALQRMTGVDLTRIDGINSNSALKVISEIGTDMSRWKSAKHFASWLGLCPGTKISGGKLLSAKSKPVANRAAGTLRMAAFSLFNSKSALGAYLRRQRSRLGAPKAITATAHKLARLVYSMLKHGTAYVDVGQKRYEERYRTRVVENLKRKAHDLGYALVEVSGKQPQPVAS

SEQ ID NO: 420336 - protein, 356 aa, unidentified
MKYLKDIERFVENKVVFCGVDVHSNDHKLCYVCDGEIVEKVVVNGEVRSIVQHTKALYSKAKEIRFVYEAGFSGFHLYRALTANGYDCIVTPPSRIPRMADKVKTDKRDAQKLAQFHAGGLLKSVWVPPLQIDSDRHYIRLRDRYQKKLSCVKSQIKSQLRLHGKHWLPGDGGYWTKRYIRWLESLEFNNESLGLILDEYLSEYRYLRSRVATLTRRIKELSRSETYHTSYTRLTACRGVGLITAMTFLLEIWDMSRFKSVEAFGSYLGMTPSQHSSGEHVRHGHITREGNARVRKVLVESAWTVIRHDPFLRAKYQRIQSRGTNGKKAIVAVARSLAIRFRRCLLNEEPYVIGVC

SEQ ID NO: 420337 - protein, 422 aa, unidentified
MHKERRWFVGIDWGSQEHVVSLCDDVGKRIGQRKFAHGGTGLTDMIAWLLKESGGKPGEIHVAIETPHGPIVEVLLERSCNVYSINPKQLDRFRDRFTVAGAKDDSRDADVLADSLRTDMRAFRKLSSVDPTIVELREWSRIDEELKAEHVRLTNRLKHQLWRYYPQIYELANDVGAGWFLDLLEALPTPEKAAKTREKTVARILKQYRIRRFDAAHVLGELRKPALTVAPGTVEAATAGIRILIARLRLINSQLVDAEQQLDRLCKKIVGPVAGEEGENTPGQKNELRDAAILDSTPGIGRTVLASLLTEASDALQRRDYHALRALCGTAPVTKRSGKSCLVSRRRACNRRLRNAVHYWAHNAVQHDATSRAKYEALRAKGHGHARALRSVADRLLNVVCAMLRTGTSFDSSLASKKQAGT

SEQ ID NO: 420338 - protein, 379 aa, unidentified
MNEATRFLGLDVHAETIAVALAEPGRGEVRSIGMIANEPTAIRKLIQKLGKKHLRVCYEAGPTGFALYWQLAELGVECDVIAPTLIPKKPGDRIKTDRRDALKLARCFRAGDLTPIWIPDQAHEALRDLVRAREAATYDQHRARQRLSKFLLRTARKAPSGCSTWGTRYMEWIRSLHYEHVAQQATLTDYLAEVDHLTERIRRLDQAIDDAVKQASPSVQAVIEGLQALRGVAKVSATTIAVEIGSFSRFETAKQLMAYCGVVPSEHSSGNTRRQGAITKTGNAHVRRVLFESAWSCRHRPNLSVKLKERQRRASAATNEIALKAQHRLHRRYLALAARGKPSAKIVGAVGRELLGFIWAVAVQIEQEHASKPKQKVAA

SEQ ID NO: 420339 - protein, 439 aa, unidentified
MLQTLPMLDPLAAFVDIGSEHMHVSVGGNRPEVFGTVTSQLHALRDWLLAQGVHSVAMEATGVYWLPLYGVLESAGLDVRMVNGRQTRNLPGRKTDMADSQWGATLHMHGLLHAGFVPPADIRRLQDYLRLRADHVAAAAGCVQLMQKAFERMNIKLHDVISSLAGVSGMAVTRAIVAGERSPEALVALCDVQIRRKKEPAVIEALRGTWANEHIFALGQALQSWDHYHRLIADCDGRIAAVLPPHDEAQPPLPRSTRQTGVNAPEISRLRETLAQMCGGRDLTKLPALSSYGVLQLIGEVGTDLSVWPTEKHFTAWTGLAPGSSDSGKRRKGVKRGRNRTGQLFCMMAQSLVRSRDIALGGFYRRLAARRGGLVATKALARKLAAWFWRVMVKGDDYVEKGLARYEEQVRKNREHALNRLARELGRQLVPVPAVSQTA

SEQ ID NO: 420340 - protein, 345 aa, unidentified
MKVTTVGIDLAKNVFQVHGVDEHGKAVLKKQLKRAQVAEFFANLPRCLIGMEAWGSAHHWARKLQGFGHDVRLIAPQFVKPYVKTNKNDAADAEAICEAVARPNMRFVPIKNVEQQAVLAQHRVRQGFIKARTAQANQIRGLLAEFGLIVPQGIANIAKRVPELLEDATNELSGSFRLLVQRLMEHLKELDRQAGEIEAQIVTWHRDNELSRKLAEVPGIGPITASALVATVGDAKNFDNARQLAAWIGLVPRQNSSGGKNVLLGISKRGDTYLRTLLIHGARSVICAFQRKKDKVDGWLGALLARRNPNVAAVALANKNARIVWALLAHDREFRPGYTSVQATT

SEQ ID NO: 420341 - protein, 334 aa, unidentified
MEKITTVGIDLAKAVFSLHGVDGAGRVVLRRTVRRDQLLEVVAGLSPCLIGMEACSGAHEWGRRFQGLGHTVRLMAPKFVAPYRKSGKNDGNDAEAICEAVTRPNMRFVPVKSVEQQGLLAMHRVRQGFVVERTATINRLRGLLCEFGVVLPLRSVTVRRQAAQAAENLPELARRAIGDLLEQLRSLDERIGGYDREIEAQARLCEPAQRLMKIRGIGPTTALAIVATVGNAREFKNGRQFAAWIGLTPSQHSTGGKPRLGHISKRGDAYLRNLLVQGARSVLNSASRHQDRMSRWILELQPRRGYYRTLVAIANKNARIAWALLAKNETLRAA

SEQ ID NO: 420342 - protein, 412 aa, unidentified
MEGETVIAGVDTHKDVHVLCLLDGLGRKIWSGSFGADPEGYDRLAEAIGDPGSCMVVGVEGTASYGAGLTRRLVELGYNVVEVLRPKRDKVRPGEGKSDPLDAERAARKAASGRGCSVPKSQDGWVEAVRQLYVARRLAVATSTSCVACAKSMLTTAPSALRERFRGRERPKDLMPLLARGRKAGDALEESVLASLRSVAAVWKEARSQVESLDERIRALLEANAPALLGVEGCGTTTAAALVVAAGDNPGRLKGEAAFSMMCGASPIPASSGKTDRHRLNRGGNRQANWALYEIAIKRMAYDERTRRYVARRTSEGKSRREAVRCLKRYIAREVYRVLMDPNPDGAAPEGPELAKMRKAMRVTQKKAAAELGLSAATLGHLERGKRRSTKLERRYYELLCELERTLPQTAS

SEQ ID NO: 420343 - protein, 429 aa, unidentified
MNYNTQNAKIASITEKTLIVGIDVGSETHYARAFSWRNYEYSKKPFAFSNDEDGFASFKAWMDDIAEKHEMEKVIPGMEPTGHYWLNLGAYLQGQGMRPVHVNPHHVKKSKELDDNNPNKNDRKDPKTIAGLVNEGRFSYPYIPTGIYAEIRNLSNLRIQTQEEITRIKNRIARWFSIYFPEIKDVYRNPDAVSGLMVIKQAPLPCDIKGLGVDGVNKIWRDARLKGAGIKRAKTLVTAAEHSIGNTEAPRSARKEIRNLLNDYEIYKSRMDELMEEIEELLSEIPYIDKLMGICGIGIKTVSCFIAEVGDIERFDNPKQVQKLAGYAIVADSSGKHNGESRISHRGRKRLRYALYEAAISVIGKNKEFKEIHHYYRTREKNPLKKMQSVIAVSCKLIRIFYTIQTKGIDYDGEKMLRDIVRPGMQSAA

SEQ ID NO: 420344 - protein, 419 aa, unidentified
MRYYLGVDWADAEDVVWVEDEQGLVVEQRHVAHTTEAVVEWGRWLDERRAEGVELWAAIERPDGRVVDFLLDHGVVVYPVNPKTLDRARDRFRVSGAKSDPFDARVLAGFLRTDHGHLAPLRPSSEAAQELKGLTRDYTRQVRQQTRLLNQLTVTLKEYYPRALEVCDDLKSQWARAFLQHYPTPRTLQAVSARQWQRWARQQHLSADRTAALWTIVQRPQLAVPAHVERLKARRLAVLVDQLALTRAAVDSYRQAVQDFFASMPAAKWAGTLPAGQRGTTVPALWAELGDAPGRWQTAQHLQGHAGAVPVTERSGKACVVKFRFACNTHLRAALQQFAFLSLRRSEWARAYYDRCRARGHAHQHALRALGAKWLKIIFALWTRQLPYSEQHHLASVVSPTLLYICRLWPKCAPRTRST

SEQ ID NO: 420345 - protein, 358 aa, unidentified
MKYYIGCDAHKKYSVFAGVSEAGEIIPAQRVEHDREKYSSFLKGLPPASQIAIESVGNWYWLIDEMEKAGHIPTLVNAGKAKLMMGNINKTDKLDAKGLAVLSINGTLPAVWIPPRELRDQRELARMRIFLVHIRTSLKNRIHATFAKYAITFEEVSDLFGVRGRNLIEKRLAELPPETRDSVKEQLKLLDQLQRQISMVEEHIRQIVKITPEMQLLMSIPGIGPILAILIALEIGNVARFGDGAHLASYCGAVPRVKSSGGKTYYGKTRPDVNHYLKWGFTETANVIVLTQHRMTGHHVVTLYRRIRQSKGHAKAIGALRRHLAEAAYAVLKSGQPYHEPGTPRKSSVTKEVCARLA

SEQ ID NO: 420346 - protein, 329 aa, unidentified
MDESGNAEARRKLRRSELRAFFEEQEACTVVMEACGAAHHWARVLIGLGHDVKLLAPEAVRPFVKKGKKNDAADAAALCEAASRPGTRFVPVKSLGQQGVLALHSARALLVKQRTMLANAMRGLATEFGLVVPKGMGRLEELVTLVEEDGTFPEQARGVFAGLLEQCRATAERIEALEAEIVAHARGDDTARRLATVPGIGPITASLIAATVGGNIRAFRSARHFAAWLGLVPRRRSTGGKTRLGRITKAGDREIRTLLVLGATSMVYRAAQWDSAAGAWTRGLLARRPVRLATVALANKMARIAWALMTREEIYRATGHAAAASAATA

SEQ ID NO: 420347 - protein, 360 aa, unidentified
MTHRTWKLGNVKWLRVSEGDAMTVGLDVHKASVHAALRRNGQEIGTWVMPMENKTIVASLNRFGPALKKVVYEAGPTGYGPARALKKAGLPVEVIAPGKVPQAPNPDSKTDRLDSRKLAEEAEKGSLKKAVIAIPTEQEEADRQLARLRDQLIGKQRRVKQQIKSLLLQQGLAEPAGLAHWSAEGLAALKMMRLRHQWQLSLEVMIEELEHLVALRKRVERHEAWLMKQRRHRKSARVLQTHPGVGVVTATAFRLEVYQPERFATPEQLAKYVGLAPRVRQSGPKRRGGPLIKAGRGSLRSLLIEASWRWIRDDAAAAKTYRRLVRNTGSGQKAIVAMARRMAVHLWCMMCRSVEYRSAA

SEQ ID NO: 420348 - protein, 362 aa, unidentified
MASVSHLAPIHLGLDVHRGTISVGILAADQQVPEVDRIPHDEPSVRGLVGRLGDPRRLRACYEAGPTGFELVRLLRSMGVGCQVVAPSLIPRAPGDKVKTDKRDCRLHRAGELVAIRIPTVQEEAVRDLCRTRADMVADRTRARHRLGKFLPRHGRVWRGGATAWTQAHERWLLAQQFDEPAPRATYAHYRVVLESRDAHLDAVEADLAGWYDRPPFAGQVARLGAYRGVTRLGALTLAAEVCDWRRFAKASQFMGFCGLVPSEYSSGQRTVRGHLTKAGNAHLRAQLVESAWSYQHRPGVGAQISDRQQGLDPQVIARAWAAQLRLCGRFRRLAARKDSKNVVVAAIARELAGFLWAEMTA

SEQ ID NO: 420349 - protein, 407 aa, unidentified
MLFVGDDWAEDHHDVCLMDEDGARLAARRLPEGLTGVGQLHEMIAAHAEEPGEVIVGIEKDHGLWVGALVSSGYQVYAINPMAVARYRDRHRVSGAKSDGADAKLLADLVRTDRHNHRLLDGDSDQAEAIKVLARTHQNLIWMRARQVATLRAGLLEYYPAALQAFPNLGDRDRDRDALAVLGRAPTPDQGARLSLSKIAAALKAGGRQRGTDERAREIQTLLRSQHLSAPATVTAAYGAATSATVNIVVELTNQISAVESELAEHFRNHPDADIYLSQPGIGVILGARVLGEFGDDPNRFTDAKSRKNYAGTSPLTVASGRRHAVMARHVRNRRLYDALDRWAFATLKCSPGARAFYDQHRAAGDTHHQALRALANRLVGILHGCLRHHTPYHEDTAWAHRIPIAA

SEQ ID NO: 420350 - protein, 387 aa, unidentified
MARKRTLSTLDTSIAYEAVGLDLAKEDVALAAFDSEHKEPYLIDRISYDKLYELLADMAPTLVAMEPCSGAHQICEQIEALGHEVLMISGRHVQAWVKDHCNGQKTDLNDAFAILNLAYDRWLTPIRGKTREECRLLALQASYRQLKGQRTKTLVHVKATLHAWGFPIRTGSFNQKVLHELIDANREAFGDEMAETLHLMINRVRDLDHDIATVLKLLTEATKRDPRASLLRSIPGFGILTTSRWCAVIGDIARFDSPKQTMAFVGLVPNNRITGHHTETSSGREARGQGKMSKRGDKMLRSLCILGAASLCLMVRNDRLPDCPFVASIKERLASPRPWFKVLVYVAAKLVRIATALLKYGETFSYEKAGISKAVLKQWELEQAKAA

SEQ ID NO: 420351 - protein, 345 aa, unidentified
MHIASIGIDLGKTTFHLVALGERSKVVVRRKFSRTQLLAYTANLPCSLIGLEACAGAHFMGAALREQGHEVRLIPAQFVKPYRKWNKNDFIDGEAIAEAVTKQNMRFVQIKTQEQLDVQAMHRVRDRLVQRRTALINEIRGFLLERGIPFPAQPIHLRKNLPTGVEDAEQNLSPRLRWLLDRLWQEWKQTEIDIQTVTDEIERISNEDERCQRLRQIPGFGPLVSTATVAAIGNGAAFRRGRDFAAWVGVVPRQYSTAGKQRLFGMSKRGNIYLRRMLIHGARAVLFRIKYDTAGLGQWVHRLSQRAPRNKVVVAIANKLARIAGAVLSSGRDYRHQPLPQRAAA

SEQ ID NO: 420352 - protein, 415 aa, unidentified
MALKIVYKICCGIDVHKTFVVACIASTNSKGVTTYESHRFSTYTKGLRDLLQWLLARNCKDVCMESTGKYWIPVYNILENDCTIVLAHPKYVKAIRGKKTDKKDAKWIADLFKHDLVAGSFMPPADIRQLRDLMRYRFKLICFKSSEKNRLQNCLTVSNIQLGNVVSDTFGKSAQAILDKLLENPADTSFDLEPLVFKSLKKKLPELRDAIDGFITPEQAGKLKVIKGHFEDLESRKAELEELILALAAPYQQELAILQTAPGISSVFTAIGIISEIGTNMEAFPSAKHLCSWAGLTPTNNESAGKKKSVRVSKAGCYIKPLLVQCANAVVTSKKHPEVRNRYLRLKKRRGHKKAIIAIARMLLTALYHMLKNGENYNAELYRKSNLPPVDREITVEQAIIIARNQGYKIKSATA

SEQ ID NO: 420353 - protein, 368 aa, unidentified
MSEIKAFVGLDVHKETISVAIAEASRLGEVRHFGNIENTPTAIAKLARRITRQHQAVEFVYEAGACGYNVQRQLTALGLTCRICAPSLTPRKPGDRIKNDRRDAIALARLHRAGELTYVWVPDALHEAIRDLVRARHAACQDVRRCRIRIQAFLLRCDLRYEGKSWSYRHRMWLCNRQFAHPAQQIAFQTYLNALEYEEQRKAELEKQIQDTLERSHWAKLLSALQALKGVGPVVAATIIAEVGDFTRFAHPRQLVAYFGLAPGEHSSGSTVRPRGITKAGSSIARAVLCEAAWNYRTTPKVGQWMKQHRPPASKEVIAIAWKAQLRLHKTYKRLTSRGKRSVVATAAVARELLGFVWSIGTLVPLDG

SEQ ID NO: 420354 - protein, 376 aa, unidentified
MERGSLMLNTTTFVGLDVHARSIKAVALDAMTGEVRSATFAYDAAAVAEWVGSLDPAAKCVYESGVTGFDLQKKLTALGVDCVVGAVSKMIKPPADRKRKNDRNDAEFLARMLSVGNVVEVWVPDDECEAARDLVRALDDAREDLKRCKQRLSKFLMRHGYAFSETTPTGRRKGNWTAAHWAWIRSIEFPEKADDEVLAYYIDAARQAMEDKARLERLVEAEASKPRWKKRVDSVRCLKGIDVTSAADLVFEAGEFSRFKSARSFAAWIGLTPSEHSSGESVRQGGITKAGNKHLRRVLVEAAWHYISASPHPKDLAKGQAPDPAARRHAAKGIRRLVKRREEMLGRGVHKNKANVATARELACWCWAIGCMVENG

SEQ ID NO: 420355 - protein, 378 aa, unidentified
MSEFSSPPTRFIGLDIHKEYLVASGVNPAQEMVFGPQRASMRDLEDWVAKYLTPQDAVVVEMTTNTYAVYDALLPHVHSVTVVHPPHVALIVRAQVKTDRKAALTLAQLHAAGLLVGIWIPPKDVRDLRALIAQRQKMERLTTTAKNRLHAVLHRHHLDAPGDSQPFSPKHKEFWLNLPVSAMERVNVACDWETVEFAERQKERLEQGIAQAAVGDERIPLLVQLPGIGLIAAVTLLAAIGDIRRFDDAKHLIGYAGLGARVHDSGHLHATGRITKAGRKDIRHVMVEAAQSAARTHPHWKAELARLEPRLGRPKAIVAIARKLLVAVWHVLAEQGADRFAEPGQVACSMFAYAYRVASRTCPTAKAPCSSRAISLTG

SEQ ID NO: 420356 - protein, 415 aa, unidentified
MNNTISDIDIDLTAVCEAEDDAAQAEAQPAQNESDDTYAQKMQEQLALARSSANCRYIGIDLHSNNIWLSVIVNEQRPSGSVGKVIFSRSIGTQRVDGTLPEDLIKPVIERFCKDQPHIACVEATYNWYWLTDLFERNGWNLVLADPSTVSEAKTKAADDRKDAEYLADRLRYNALRYAVIMPKQLREIRDLVRTRGTAVKQRAREKIIVINKLTNLIGRKITGKELRELIKEHAEFGTEAPMLLNWGLTEEVRTILDYHLTMATNIDQGIQKLEEHINAVGRNLRYTRELQKMPGCGPVISSILASEIGSIRRFATAANFVSYCRLASTSKLSNGKSKGLGNAKNGNAYLSWAFTELATLMVRYSEAAKRHFEKLMRKYGQLRVKAIRVLAAKLARSVYQCLSKNEPFDVLRCF

SEQ ID NO: 420357 - protein, 346 aa, unidentified
MDLAMTAPDRSGSSTASANEAAPAVGVDVSKASLEVVILGKDADCSVSRSIPNTEDGFDKLREWIECEVEVDFEEIHVCLEASGGYERPVARYLHEQNLTVSVVNPRRTSAYAESRLNRSKTDPVDARLLARFCQREEPSSWQPASSEQKNLKDMTRGLQSLKKERDRLKNQIGRSENPTVTSSLESVLESVNEQIDRLEEAIDEHVQSCRALARKQELLETIPGIGSATAALVLAELGDHQRFESARQAAAYAGLTPSHHESGSSVHRKPRLSKVGSSRLRKALYFPAISALRCNAAIKAFGERLAERGKAKMVIIGAAMRKLLHICYGVLKNQAPFDASLHPGT

SEQ ID NO: 420358 - protein, 352 aa, unidentified
MAKNNFDELMSVGVDIGKDVFHLVGFDRDGQRVLRKKIKRMALIATFEELPHCIVGMEACLSAHFVSRTLRKMGFEPRIIPAIYVKPFNKGQKNDYNDAEAIAEAALRPNLKTVSEKTQEQLDLQALHRVRSRLVSRRTATMNQIRAFLIEQGITVRKSVAALRSSLDAILENRSSEISLRMRKLILGLQQDWIWTDKRIEMTTAEIKAVSESEASCQRLMTIPGIGPIISTAVVAAVGTGEAYDRGRDFAAWLGLVPRQHSTGGLTILGRITKRGSRYLRMLFVQAAQVIMMRPKNWPKFSFGAWLESASTRMQHNKLGVALANKLARIAWSVLNSGRDFDWKEKELATAI

SEQ ID NO: 420359 - protein, 391 aa, unidentified
MSQHCHFDASRSLTALEQDSTIIAVIEMSQSKWLVAALVPGVERQPLKKLDAQEEGLLKLLHRWRAEAGQAGRTIKRIVVAYEAGRDGFWLARWLRARDVEAYVIHPTSIAVSREHRRAKTDRLDTELLIRAFLGWLRGEMRHCSMVAIPTIEEEDARRPNRERQNLVTEQTRLVNQMKAIFTRFGIRSFRPTLRKAEDKLKGLRTAEGTPLPENTRAEVCRHLARLRVVREQIRAVEQERLRKLAAAPAADYGPHAMARLIARVLGVGIETADMLVNEVLSRHWRDRRAIARYAGLTGSPDESGKRRRERGLARAGNARVRCSMIQFAWRFLRFQKNSALAQWFQARTADGRGSTRKTMIVALARKLLIALWRLVTTGEVSDGIVLRPAS

SEQ ID NO: 420360 - protein, 417 aa, unidentified
MDTLFAKVAGLDVHLKGIQCAVRSRQESGKLFSQVRSFGTMTRDLRALADYLQALGVTHVAMEATGVLWKPVWNVLEGRFLLLLVNPRHLKKVPGRKTDVSDAEWIAQLLQYGLLRGSFVPPRPLRNLRDLTRHRAQLAGEHTRVANRIHKLLEDANIKLGAVASDVLGKSGRKMLRALLRGQDNPEELAELALGRLRQKIPQLKLALEGTCTEHHRYLLGRLLAHLGYLESQIQEFSQRIGQRLAELLPAATWERLDRIPGVNRITIDNILAEIGVDMSVFPDEHHLASWCGMCPGNEESAGRRLRSRTRKGNPWLRRALVEAAWGASRVKKSYLSSQFRRLAAKRGKKRALVAVAHSLLVVIYHVLKHNVEYRDLGPDYFDRLEPERLRRYLVKRLQGLGYDVTLSPKNPDDRAA

SEQ ID NO: 420361 - protein, 388 aa, unidentified
MQDVADQSVAPTTIGADLCAIFVSLELSRSTWLATSLSPGRGEKMSKHSVSAGDIAALLARFSELRRKACARTGKSFPIIVIQEAGLDGFWIHRVLLSEGIESHVVDAASIATSRRRRRAKTDRIDGEALLRALLAHKRGEPRVCSMVRAPTPEDEDRRRICRERKVLIMERVQHVNRIKGLLFSQGASGYEPLRRDRRARLDALQTGDGRRLPQHLKAQVCRELDRLELLLEQIKAVEAERDALLNAEQTKVSAPPPMLLGVRGIGPEFASVLWSEGLSRHFDNRRQIAAYAGLAPTPWQSGSVNREQGISQSGNKRLRTTMIQLAWLWIRHQPGSALTLWFKDRIERNGGRRRKTTIVALARKLLVALWKYVSAGVVIEGAMIRPA

SEQ ID NO: 420362 - protein, 371 aa, unidentified
MADYREAFIGIDVAKLKNAIAVAESGREGETRFWGEVDASDASMRRIIQRIAAKFDRVHFCYEAGPTGYGLHRLIRSLGHECVVVAPSLIPRKPGDRVKTNRRDALALARLLRAGELTAVWVPDEGHEAMRDLVRARAAAVETLRVHRQQISAFMLKHSRIYPRKKGWTMRYLRWLQEQQFDHPAHQIALQEMVEAVRVSKERVERLEKVIEEFVPTWSLAPVIRALQTLRGVDLIVAVTFATEVGDVSRFESPRQLMGYLGLVPGERSTGETVRRGSITKAGNGRVRHMLVESAWTYRHPPKVGTRKLYLMEQAPSKVREIAWKAQSRLTSRYRMLATRGKRTTVVCTAIARELTGFMWAVAREAQAIKS

SEQ ID NO: 420363 - protein, 333 aa, unidentified
MNEQAVGIDVSKKKLDICVATGNKFKSKVFANSPSGHEALNAWLQQRDIPTDIPVVLEATGPYSEAVAIFLADLGWSISVVNPARISGYAQSELSRNKTDKADARLIACFAQRARLERWAPPSLAVRELRALVDRLQALIDMRQQELNRLEALSQTSTSSVEKMVKEHIDWLNDQIKKIQSDIDDHIDGSPDLKNDAELMQSIPGIGRRASSQMLAYIGDVRRFKNAKALAAFIGVTPRLRQSGSSINKRSAMSRTGHVAARKSLYMPGLVAKRHNPVVVAMAIRLHARGLSPKAIVGASMRKLVHLIYGVIKSGMPFNAEIAMNGLDLQEGI

SEQ ID NO: 420364 - protein, 387 aa, unidentified
MFSLQFRIVFNDVLKLMQSRITMSQEIKKRTSQKLEDEYLKYSIGIDLSKDKFDACISLMNKGQHVKVIATRAFSNNPNGFKVFYEWYLHKCKLVLPAVFTMEATGIYYEKLAWFLHRNNQYVSVVLPNKAKKYMQSVGIKSKNDKIDSIGLARMGAEQKLLKWETPKEIVMELRDITRYRESLQESKTRFNNQLLAYKCGEFVDESIVKGLEEIIALIDKQIEETEKMITEKIDSDEEIKARVKNIIEIKGISIISIATILAETNCFEMFTNQRQLVSYAGYDIVENQSGKHIGRTRISKKGNAHIRRILHMPSLNVVANGESVFVNLYERVYERTKIKMKGYVAVQRELLCLIYTLWKKNEKYQRHYKNEHPEMQSRSSSFRMAS

SEQ ID NO: 420365 - protein, 339 aa, unidentified
MGEIITVGLDLAKTVFQVHAVDANGTVVVRRTLRRSQALAWFAKLPGCVVGMEACATAHHWARELTKLGHEARLIPPAYAKAYVRRNKNDAADAAAICEATSRPSMRLVAIKSVEQQGAAGVHRVRDLLMKQHTMLRNQLHGLMAEFGVVAAKGKLGLKELLAVLADGEDGRIPDPLCAALRMIAETLREIDGKLAAIDRQLAAAGRENATYRRLITAPGYGPILSSAMAAMVANPQAFRRAADFAASLGLTPRQEGTGGKIWLGPISKRGNGYLRRLLVNGATALINSKRAKQDPWLAKLLAAKPRKVAAVALANKLARIGWALMTRQEDFRVRPVAA

SEQ ID NO: 420366 - protein, 347 aa, unidentified
MRFYTTQHQHYCGIDLHARSMYVCILNQAGAVLLHRNLRASPEAFLKAVAPYREELVVAVECMFTWYWLADLCRAEGIPFVLGHALYMKAIHGGKAKNDRIDAHKIATLLRGGMIPQAYVYPAEMRATRDLLRRRLHFTRKRAELLTHIENTNSQYNLPAFGKKLTYATNRDGVGQRFDDPSVHKSITVDLELIAHYDELLRELEYFILRTAKGHDANTLYRLRSVPGIGKILSLVILYEIHDITRFARPQELASYARLVKCAKESAGKVRGSSGTKIGNVHLKWAFSEAAVGFLRKNPEGKAYYERLVRKHGKGKALTVLAHKLARAVYYLWKHDQVFDQEKFLAT

SEQ ID NO: 420367 - protein, 344 aa, unidentified
MSKLATDLSGVTTVSVDLAKHVFQVHAVDACGKVVVARALRRRDLLPFFASLPPCLVGMEACGSAHYWGRELMALGHDVRLIPPAYVKPFVKRQKNDANDAAAIHETLSRPGLRFVKVRSIASQAVLMQHKAREMLVGQRTQLLNGLRGHLAEMGVIAAQGTGNMRALGALIHEGDPAIPDAVRASLTPLVDQIGHLDEAIKAIDADIAAQAKADPVANRLMTIPGIGPVTASALVATVGDPSSFSGPREFAAFLGLVPRQHSSGGKARLGRITKMGNSYLRKLLVVGAHAVLHHQARHDDPLRQWARKLLATKPFKLVAVACANKLARMVFALMRQNTRYAAV

SEQ ID NO: 420368 - protein, 321 aa, unidentified
MTYVGIDVSKATFVVAYSSAKTGWTKTFKNTVKGVHEFIQAVSAAEHHCVLEATGNYSALLVYLLSEAGITVSLENPLKVKNFARAMLTVTKTDEIDARLIALYGERMQPVPYKLRSDSILILKQKRTVLRQLKKQLVATRNLKGSLEVLPSFDPECKKTIEKTITFLEKQIKAMEETIASLAQGEYKKQMDLLTSIKGIGVTLAAALIVATGGFTYFDNAKQLTRYLGLSPTYQQSGTSVNVKGHINRNGDSNLRSQLYVAAFSSLRCNSECKACFDRLRSNGKPGKVAVVAVANKLLRQAFAVVTQGKPYVDGFKSERP

SEQ ID NO: 420369 - protein, 364 aa, unidentified
MEGKEKTVTRYVGIDLGKRTYEVAIVEKSTVKKSNGRTCVSGRQSLYKKLRSSDKVALEAGNLAFIIAKELEAVVGCRVYVLNPSHLPLIYGSMKKTDKEDSLKLAHILEDFQEERLPVVPVPSDKEMMRRKLLAGYRRAQQGRGREINKLHALFLAQGITTVMRKDLSTREQRKETIKVLTGLEREEAEYLVLCLELHERRIEAMGQQIKKESAGDEVIQRLQSVPGVGPVVAFAFVSHVGAGRFENASQVSNYLGLVPRVYISGETVRYGRITKRGNGYLRALLVQAAWALTRARKGGKLKERFEYMTIEQSKSKKKAIVAIARRMAELLYTMMRDGAWYAPKPFIRENKALEEMAQLALSA

SEQ ID NO: 420370 - protein, 376 aa, unidentified
MEHNSEAFIGIDTSKLKNAIAIAESGRDGEVRYLGEIETTDAATRKLVKKLATKYCKVTFCYEAGPTGYGLYRLITSLGHECSVVAPSLVPKKPGDHVKTNRRDAVGLAKNLRSGELTAVWVPDTRHEAMRDLSRAREAAVDDLKSKRQQISSLLLRLGLHYPGKKTWGKSHRRWLASLKLDQREQRIVIEELFGAERQAQERVDRLASAIIDAVPEWSLAKIVTALMAVRGIDLVAAVTIMAELGDLSRFASPRELMAFLGLVPSESSTGDSVKRGGITKAGNRRARRILVESAWSYRYPPRISRDKLAKVAAAPEPVRAIAWKAQTRLSSRFRALIKRGKRPTIVATAIARELCGFIWAIHRAVTAPGGRQIVP

SEQ ID NO: 420371 - protein, 430 aa, unidentified
MNDPTAPPLPNTPSSTTDFAAFVAIDWADKKHTVCLQIAGAHTVQEREVVQTPQGLSEWCNSLLAQFPNQKVALIIEGNRCGLIYHLLNYPAFVIYPINPKAAAKYREAIHPNGSKTDPIDAALLLDFLLHHRDRLRAWVPDTVETRTLGQMSEDRRSLVDTRTGLLNTLTSRLKLVFPQVLDLFEDMAVPMVAAFLNKWPSLEKLQKAKPAQLRAFFYAHNSRSEELIQSRLQIIAQAKPLTQDAAILTTATMMIEALVLQIQELHKTIARYDQRLVDLTQAHSDAPIFQSLPGAGKVLVPRLISALGTQPERWPQAYALLCFSGVAPIEIASGKQYTVAWRWNCPRFLRQTFVEFASSSTKYCPWALAYYEQQKSRGKKHHQAIRALAFKWIRIIWKCWKDKVPYDETVYLTSLQRKNAPLPPKPTTQ

SEQ ID NO: 420372 - protein, 326 aa, unidentified
MAKRITVCAGIDTGKRKLDVALDGSAEQLQVDNTAEGCKTLLQWLRQHRVKRVGIEASGGYEQAVVAELRRKRFVVVVFQPAQVRAYAKFHLQRAKNDKIDAALIAACTAAVKEIHPAPDPRLLPFAEHLTLIDQIGEDIARLKNRLETCRNARLRALWKENIAHLVKLEKGELKTLVAAIRKHPDLAKRLDLINSIDSIGLPTAVAILVRMPEIGQITRQQAAALAGLAPYDDDSGDKVGARHIQGGRERLRRALYTAALPGAFRWNRQLIALYQRLRAAGKEHKHALIACARKLLVFANAVVARGTPWQDKPQTGAAVTSPSVA

SEQ ID NO: 420373 - protein, 409 aa, unidentified
MDRTKYLYVGMDIHKETHTAVLLNYLEEKQGEITIKNTLQGFHQLEKYVLKQKGELIPIFGLEDVTHYGRYLSIFLLDRKYPVKEVNPSLSFMERMSYASTKKNDSWDAQCISAVLMRRSHLLPDANPQDYYWTMRHIVNRRNALVKSLGGLTRQFHEQLQVAYPSYKQFFHELTCATSLAFYERFPSPKYLEYVSEEELGAFLRVPSHNTCSTNRARKILDLVAQEQQTTLDYQKERDCLVRSIAQQIRFILREISSIETLEKKMYRRLGYQLETIPGVNVVTACSLVAHIGDIHRFSSPHKLANYAGVAPLHFGSAGKGKDVQNKSQGNRNLYSTLYFLAIQQIYLTNKGEPRNPVYRAYFEKKISEGKTKIQALICIMRKLIRIIYVMMKKKVAYELPELKQKAVS

SEQ ID NO: 420374 - protein, 349 aa, unidentified
MNQIIRIGMDTSKYIFQLHGVDASEQVVLHKRLGRNAMLAFLAKLPPTVIVIEACGAAHYLARELGKLGHTAKLIAPQLVKPYVPRNKNDGRDAEGLCEAASRPRMRYVPVKTAEQQAALMLLGIREQLVGRRTQLSNTIRGHAAEFGLIAAKGLDKLASFLAAIERDERVPALARELFAMLAREYARVQAELKAIEAKLLAWHRADALSRRLAQIPGVGPVTAAALVMKAPDPHAFRSGRLFAAWLGLTPKDHSTGGKTRLGKITRAGDERLRQLLVLGATSVVRQAKAKGRAPRWLLALLKRKPPKLAAVAFANKMARIAWKLMTTGEKYESARLDARTDIQAATTA

SEQ ID NO: 420375 - protein, 310 aa, unidentified
MEITVGIDVSKARLDVHVHPAGESFALDNDEAGVEALSARLGRLEGLRTIGVEASGRYERLVVAALAEAGLPVVVLNPAQVRHYAMAIGLRAKTDRIDARLIALFVEAVNPEARPLGDARTTELAALMARRRQLVVMLAAERMRRQQAPKGPVRLSLARVVTSLEEALRELDAHIDTTVRGTPVWRDKEDLLASVPGVGKTIARTLLAELPELGSLSPRQIGALAGLAPFTRQSGKWRGRSFIGGGRTQVRTALFMGALSAARYNPALKAFRDRLVNNGKPKLVAILATARKLLVILNAIIRDQKPWQPT

SEQ ID NO: 420376 - protein, 344 aa, unidentified
MNIMHYIGFDIHKKVISFCEKQMDGTIVDQGMISATRKSLTDWVKERKTPWIAAMEATLFTGWIYDYLLPHAQELKVAHPAMLKAITAAKKKNDAADAEKIADLLRCNLLPECYMAPEEQRNLRRILRYRNLLVREAAKMKTKTAGLLMEVGAEYNKKRLHGAKYFQELLGNLDYVPESVLNLLQMSRTSMESFGKMQKSLIRALRSDPQISQRVELLMSIQGVGEITALTWVLEIGEVERFGRVSQAVSYCGLCSAQKESAGKNFRGPISKKRNKQLQTVLVEAAKLAPRWSPQLAEVYEREAAKNNRNRATLAVARKLVAYMMAVDKNQREFIPKEVVLEPA

SEQ ID NO: 420377 - protein, 346 aa, unidentified
MENPTTIAVDLAKAFFQVSVSTAPGRVSERKRLSRAKFVSFLMQQSPAEIVMEACGSAHYWARTARELGHQPVLLPAHYTAKYVLRNKHDRADADAILEARRREAIRPIPIKTVEQQAIAFIHRMRSGWIQTRTARINAMRGILRELGKVIPAGPHNVVPRLPDLMADVPEALHPCLLAIADEIRRLESHIKDAERQIKALLADSDGARSLQSVPGIGLITCSAMIAFVGSPSRFRSCRAYSSYFGITPKEHSSGAKRRLGSINKEGDRYLRTLLIHGARAVLLAAKRSKNPDRLQTWALRVHDRRGHNRAAVAVANKIARIAWAVWSKGTLYQSFSARTRPTATN

SEQ ID NO: 420378 - protein, 411 aa, unidentified
MTKEDFIYVGIDLHKETHTAVVIDCYNNKLGEITFANRPADFPKLVTKVKKSNTDGKTVVFGLENAYGYGRALAVWLIDKGYLVKDVNTAISHRQAKHRGAMYRKSDSDDAEAIALATLNMLDKLPDACPNDTYWSLGQLVHRRDNIMKQRTRLVNQLHEQLCIAYPSYKSFFNDISRPTALYFWEHYPSRKYLKGKTVEDLREELVPVSHNKCSTKTCEKILDAVASDKVKNNDFQDARDMVTLSIVSDLQHYDKQLAEVDKMLAKMYEMLHCTLTTIPGVNVITAVKILSEIGDIKRFANANKLAQFAGIAPLHLSSSGKGKDMATKQGNRRLQATIYFLAIQMVQVSSKGTPRNPVVRAYYEKCKAEGKSSQQALICISRRLISIIYGMLKNGTEYRMPVLENTGENR

SEQ ID NO: 420379 - protein, 420 aa, unidentified
MEIDQSEQHLIARVAAIDIGKAEMVCCVRVPGTGRARAQEVRTYSTMTPSVLEMADWLTGLGVTRVVMEATSDYWKPVFYLLEEQVPETWLVNARDVKHLPGRPKTDRLDAVWLCKVAERQMLRASFVPPPAIRRLRDLMRYRTDLVAVRTAEKQRVEKLLEDAGVKLSVVASDIFGVSGRAMMAALIAGERDPARLADMALGRMRVKTALLEKAFVARFSEHHAFLLATMLRRVDTANDDIAAIDTHVAAVLDEELHDAAARLMTIPGIGAVTAVAIIAEIGLDMTRFPTAAHLCSWAKFTPLTSESAGRTKGRQSTGHGNRYLARTLGEVAVMAGRSHTFLGARYHRIARRRGKPRAIVAVGRSLLVVIWHLLSQPGATFTDLGADYYETRVNHQRTARTHIKALEGLGYQVTLAPAS

SEQ ID NO: 420380 - protein, 349 aa, unidentified
MTVTIVEEARPVTGGVDTHADTHVAAALDSVGGLLGVREFPATAAGYARLLGWLGGFGTVCLVGIEGTGSYGAGLARHITAAGVRVVEVDRSDRQDRRRQGKSDPLDAVSAARAAQSGRARGAPKGRDGAVEAIRTLMVARRSAAGERTRTINQARALVLTGPDDLRTRFARHTPAALITGLASLRPRPGSTVGYATRIALRELGRRAQFLDGQLTRLDELIVPLVTARAPGLLALYGIGPRTAALLLIAAGDHPGRLRSEAAWAHLCGAAPIPASSGKVTRHRLNPGGDRQANHALWRIVFTRLGSHPATRAYAERRTAEGKSKAEIIRCLKRYVAREVYRHLRPAGG

SEQ ID NO: 420381 - protein, 424 aa, unidentified
MMDTLHERCAGLDVHKAMVVACVRLMIGGKVNRECRTFDTTTTGLLALLKWLTESGCTHVAMEATGVYWKPVWNILGDGPFELRVANAAHIKNVPGRKTDVNDATWIADLTACGLIKASFVPEEAIQQLRSLLRARTQLTREQTSHTQRIQKTLEEANIKLDSVISDILGASGRRMIEAMIAGVRNPSKLAELAGRRIKASPKQLYDALHGRLTDHHRFLLRLYLKQYDALQAAIAEIDQQVDAAITRMDEEAKEGQPPFRSLIDLLCTIPGISILGATIILSEIGSDMSRFPTSGHLLSWAGLCPSQNESAGKRRSSRLRKGAPWLKTLLVQCAWAASRKKDSYYKAQFLRLRAKRGPKKAICAVAASMLTAIYHMLKDGTEHRDLGAGHFDRRSTEVKTNRLVAQLTKLGFKVELQLLADAA

SEQ ID NO: 420382 - protein, 440 aa, unidentified
MLQALPMLDPLAAFVDVGSEHMHVSVGGNRPAVFGTVTSQLHALRDWLLAQGVHSVAMEATGVYWLPLYGVLESAGLDVRMVNGRQTRNLPGRKTDMADSQWGATLHMHGLLHAGFVPPADIRRLQDYLRLRADHVAAAATCVQLMQKAFERMNIKLHHVISSLAGVSGLAVARAIVAGERSPEALVALCDVQIRRSKAQAVIEALRGSWADEHIFALAQALQSWDHYQKLIAECDARIATVLPPHDDTQPPLPRTTRQSSVNAPDIARLREILAQMCGGRDLTKLPALSSYGVLQLIGEVGTDLSAWPTEKHFTAWTGLAPGSHDSGKRRKGVRRGRNRTGRLFCMMAQSLIRSRDIALGGFYRRLAARRGGLVATKALARKLAAWFWRVMVKGDDYVEQGLARYEEQVRQSKERALKRLARELGRELVPLSAVDHATA

SEQ ID NO: 420383 - protein, 368 aa, unidentified
MKSVKFVGLDVHKNSIAIAVADEGRNGEVRSYGSIPNTFEAMHKLIRKLIADNSQLRFVYEAGPTGYGLYRHLNGNGFECTVVAPSLVPRKSGNRIKNDRRDAVMLARLFRAGELTAINVPHPEDEAMRDLTRAREDAKITERKAKQRLNGFLLRNGFKFSGKTHWSKAHFNWIATIRLQHPNQQLALQEYVDAIHESTRRVERLTTSIRELVAKWRWAPVVAALQSLRGVSLLTAVITVAELGDLGRFEAPEALMAYLGAVPSEHSSGETVQRGGITKTGNGHVRRVLVEAAWSYRLPARKTRGLLKRQEGLAQSILDIAWKAQVRLCSRYRHLVAKGKAKQVVVTAIARELAGFIWAIARQATVNV

SEQ ID NO: 420384 - protein, 351 aa, unidentified
MKKFFIGIDFAKEKFDAAIIEACGLKEFGARQFGTFPNDSKGYRQFMKWVKGIAGTTVEEECLFCGEDTGSCSLGLSKWLYGKGYDMWIENAYVIKHSNGIQRIKTDRADASMIAEYAWRHQDKAVPFEPLSDSLTQLREVFLYRHKLVQQRVAMEVRKQDKEASDKTRALNFINRKSKHLMAEIDKAIKECDAMIDRIIESDDELKENYAIVTSIKGVARQNGACLLIFTNNFKRFDMDARKIACYYGVAPFAKESGSSVHTPARTSHFANRLIKSLLSQAAQIARIFNPEIKEYYEGLIKRGKKQSVALNNVKNKLLRIIVALVKKKTMYDPDSYKFYRDRLSKKFSPA

SEQ ID NO: 420385 - protein, 381 aa, unidentified
MQTIDTVNPSILLAIELSASTWLVAARVPGLEKPHLHRIDSGDTAALLALISSLRARAARRLDAIGIVCCFEAGRDGFWLHRLLTAHGVICHVLEPTSILVNRRARRAKTDRLDAEGMLRVLAAYLRGDHQACSMVRVPTPEEEDAKRTHREREKLVQERLRIENRIEALLFTQGIRKRPSLRSWERDLAVLRTGDGREIPRHLRAELDRLRRRLVMTLELIREVEAERDQAAKTKPQDQTCHKIAALCRIRGIGENFAAVLTREVFYRSFDNRRQIASYVGITPMPYQSGGMDRDRRISRAGNPRARTTMIQLAWLWLRYQPDSELAEWFRERVGTLAGRTRRIAIVAMARKLLIALWRYVETGVIPTGAEIRAETTVAA

SEQ ID NO: 420386 - protein, 330 aa, unidentified
MNEHITIGMDLGDRNHILVIFDDQGNEIACKRIANTKLALQRYFQAYLGATVALEAGTHSPWISRELQQLGLRVYVGNPRKLRLIWDSHDKSDERDARILAMVCRVEPRLLWPVKHRNAQAYNDLEVIKARDMLVQTRTKLINHVRCVVKSHGERLPGCSAQSFARRVAGLLPAPLSDALSYLIKTIADITQRIADLERKIEQLSNQRYPQTQQLRQVAGVGPTTALTYVLTIEDPSRFRKSRMVGAYLGLTPRRDQSGASDKQLCISKAGNGYLRRLLVNCAHYILGRFGPDCDLRRFGLAIAAHGGKNAKKRAAVAVARKLGAHSRPC

SEQ ID NO: 420387 - protein, 355 aa, unidentified
MTSAKYIGMDVHKESISIAVRNDAGKIVMECVIETKASMILQFIDGLRGDLQVTFEEGTWAAWLYDLLKPHVTKLVVCDPRKNASMREGNQSDRIDARRLAELLRLNHLSSVYHGEHGLRSLKELVRSYLTITKDLGRVMSRVKAIYRSWGIPCSGKQVYAPRHRAEWLGKIGEPGVRRRAEFYYQQLDALRILRQQVRRDLLAEGKKHKAWKRLCQIPSIGPIRSAELLGILQTPHRFRTKRQLWTYSGFGIETQSSADHRSVGGQLERVKKQISIRGLNRNCNHDLKNLFKGAAIVASSKPGPFQEFYTALLTKGIRPEMARLTLARKIATIVLMVWKTGACFDAQHLKPQTA

SEQ ID NO: 420388 - protein, 353 aa, unidentified
MTDTPSIAWLGLDAHSRNCVLAQLDDQGHEIHHWRFPTDPRQLLRHIQAIPATVKRLMLEESNLARWISQLLKPHVQQLVVCDARRNRLISHDANKHDRRDAFALARLLRLNEYRPVWQPTDDQRVLFKRAAQAYENSVLRQTRLKLQLKSLFQHWGLFPTGATVFSQAGRSAWLQQLPYDALRAQARLLYELLDQALAGQARARRLLCQAGRPFPEVQHLRTAPGIGLVGAHLFVAYVQDPHRFAKFSRLSKYCRLSIRDRTSDNKPLGFKQLDRQGNGVLKAISYRAFLQAAKRRSGPLWDFYQASLRHTGSTTHARLNTQRKILLVLWTLWLKDKDFDPNQFSRSQPFDV

SEQ ID NO: 420389 - protein, 325 aa, unidentified
MNSKSFSCWLGIDVAKAKLDCTLLCDGKYRSKVVNNNAAGFAQLQDWLLKQHVSGPLHVCMEATSVYWEAIAQYLADAGHVVSVINPALAKAHAQSCGLRSKTDAIDARLLADFCREKCPPAWQPLSPSELALRALVLRHQALVEMQTQEKNRLGTARAAVDSSLREHLAWLDKELQRIEQAIAQQIDDDPDLRGKRELLDSIPGLGERTIATLLAYLGQMRRFERAGAFVAFAGLCPRLHESGSSVHGKPRLSKVGHAFLRRALYMPAMVTLWRTDWGRAFRDRLAANGKPPKLIIGAMMRKLAQVAFGVLKSGQPFNPALHAA

SEQ ID NO: 420390 - protein, 387 aa, unidentified
MVQINDLSRSLAAFDPISTLVVVVEMSKASWLVSGVVPGVERQPLKKLEPDATALLRLIERWRNEAVRAGRPIRRIALAYEAGRDGFWLARWLIARGIEAHVIHSASVAVSRERKRAKTDRLDAAMLMRVFLGWLRGERGHCGMVAIPTMEEEDARRPNRERESLVNERSRIVNRMKSALARLGIRGFKPHLRKAPERLAGLRTAEGTGLPANIIEEFRRDMARLALVREQISSIEKTRAERLERAPDTGPHAMVRLLARVIGIGIETADMLVREILSRNLRDRRALARYAGLTGSPDESGLKSREKGLAKAGNARVRRGLIQLAWRFLMFQKDSALARWYRTRTEGPSGARKTTMIVALARKLLIALWRLVTTGEVPDGVELRPAA

SEQ ID NO: 420391 - protein, 387 aa, unidentified
MTVCTVNQLPAATHGETARCLFAIELSKQSWVIGFITPLSAKINRRILSGGDWRGLLELIEEMRARVSRETGRAVEVISCYEAGYDGFWLHRQLEAHGIRNYVIDPASLQVDRRVRRVKTDRIDTERLLRSLMAYLRGEPKVWSVVRVPSVAEEDARRLHRERDRLVSERVQHVNRIKGLCALQGIYDYHPLRPQAMARLEQLRTAQGVALPPRLKSEIKRELHRLELVVEMIASLEAERDTIVEDKASTHVNAKKIQNLHKLKAIGPEFAAVLVGEIFHRDFNNRRQLASYVGYAPSPFQSGNVAHDQGISKAGNRKGRTTGIELAWLWLRYQPDSDLSVWFRARVGTTKGRIRRIAIVALARKLLVALWRYLETGVVPRGAVLKG

SEQ ID NO: 420392 - protein, 352 aa, unidentified
MEEAITYRIGFDVAKNVFQVHGVKNEAGEPVALVRRLKRAQVAAFFAGLPRSLIGMEACGSAHYWARLAQSCGHEVRLMPPAYVKAYVKRNKTDAHDAAAICEAVARPHMRFVAVKSEQDQAMVMLHRVRASFVEKRTAAANQLRAVFAEVGIVAPVGARGLSALLALVETQAEAFVRLPAALRLVLAELARQWRSVDATVRQMEVEIAASVKRSARAMRLTAVPGIGPMGASAIDCLLPDPHAFKSGRDFAAWNGLTPREDSSGKSVRRGPITKKGDGYLRRLLVLGATAYLARVRRGRIKAASAWVLKMAAHPRRKLAAVALANKMARIAWAMLARNQDYRAPAAVLQAA

SEQ ID NO: 420393 - protein, 322 aa, unidentified
MERFYLGIDVAKAKLDCALLLPNGKLRSKSGLANTSKGFAELEHWLSTHQARQVHVCMEATGIYWEAVAEHLSDAGHTVSVVNPFQIKSFAHSCLARSKTDKIDARLIARFCVERRPEPWQAPSLSEQTLKALVLRLDALQAMRVQELNRVEVAREAVRSGIAAHIEWLDVQIKALLRAIRQHIKNDPDLKGKRELLDSIAGVGERTINMLLAFCIHPGRFGNARQAAAFAGLDPRQHESGSSVFARARLSKVGHGVLRKTLYMPAMVTLYKTRWGQRFRQRLTAAGKEPMLIIGAMMRKLIHVAFGVLKSGQPFNPVLHGV

SEQ ID NO: 420394 - protein, 382 aa, unidentified
MRTSSNTPPSIVTEAATFIGIDYHKRYSVWHAIDAAGCDLGKGRIEHHSPQDFATLVKRWPNPRVVFEASMNWHWLYEELEQHMPAQHLTLANPFKTRIIAEAQVKTDKIDARILALLLRAGLVSSVHIPCKETRQRKEVLRQRCFFVRQRTMLRNRIHRLLGAQHDLKLPQCSDLFGKKGLSFLEKLELPAPAGLLLKQQLEMLKNVQQRIKEDEKALEAMMSTTPAQQHVLSIPGMGPILASVVVSEIDDIERFHSAQKLCGYIGLCPSTSSSGGKTYNGKLMKHRNKWLRWAFVEAAWVAMGCDSYFGDLYKKKRALGKKANTAILCVARLMARITWQLLTQRRDYQKMPPAPPLKANAAKAKTKQTFPSRSNCTLVGC

SEQ ID NO: 420395 - protein, 369 aa, unidentified
MGEYSGAFIAFDVAKAKHAIAVAEAGRTGEVRFLGEVENTPARIERTIKKLAARYGRLQVCFEAGPTGYGLYRQTRELGHDCLVVAPALIPKRAGERVKTNRRDAVTLARLHRAGELTGVWVPDPVHEAIRDLVRAREAAMEDVRRKRQQLLSFLLRHGRIYTGGGHWTLAHRRWLARQAFGHPAQQIVFQEAVDVIEDTAQRLRRLDEQLAVIVPTWSLAPLVQAYQAMRGASFLVAVTFAAEIGDISRFDTPRQLMSFLGLVPSERSTGDTVRRHGLTLAGNRRARRALIEAAWTYRYPARVSETLRARLEGLPKAVRDIAWKGQVRLCARYRRLSAAGKKLPVVVAAIAREMAAFLWAIGREVVPV

SEQ ID NO: 420396 - protein, 429 aa, unidentified
MSEEKSLELRISVDVGYRRHSVAMGLSSGEVLEEFEIDHRPEGFQEFFSRIEAQRKKRNCAVSVAMEGYNGHARPLDSLVRERGYRLYNLNNLKFARFKEIFPGAAKSDRIDARKGLELFQLSDHLPLAKEVLQEVSGTAPENEVLKRLTRRRRRLVNERVRVVNNLQADLQAVCPGLLEITGEASNQWFLNFLLSADTLPQLARLKRSTLLKIPSVGVKSAAIIEHWQKRAHFSQEVEWVSEMIQEDAKRCLELDEKIKRLQAKIAEVAKNSKIAKTLRSIPGFGAVCTSELAGEIGTIERFASEGSLSLYLGMSMLDNSSGKYQGTKAPKHVNTRAKAAMMIGVDRHRKYVPESQRYYEKKRSEGKKHNQAIRALGRHLARIIYKMLKQEREYEIRPEKGDTKAKVGPRSFVKTKIRRPKISSKETK

SEQ ID NO: 420397 - protein, 442 aa, unidentified
MHQKQKYIYIGIDTHKSTHTAVIINCWGDKLGEITIQNKPSEFINILQEVKKHKKRGLKEIYGLEDCGGVGRSLAVFLLHEKKEVKEVESNLANVERKALPIYHKDDTFDALCVARVLLSRLDDLRNANPQDLFWTINQLVERRSMMVKTATSLKNQLHVQLAHNYPSYQKFFSEIDGKTAIEFWEKYPSPASLKAATLEELAAFLFEKSHRFFTEKKARQILEFVEKDGKTELPEYQYIRDLLVESIVKEIKFIDTEVTRIEAQITAIVDKLGYKLHAMTGINHVIAAKLIGEIGDISRFPTPDKLAKYAGVAPITYSSGQKDKQLKNKQGNRVLYGVFHLLAVHQIIMERNTQNPRNPVFREYYEKKMSEGKTSGQAIVCVARRLVNIIWGMMRNKTEYKLPESYTAARENDTSKKQLSNTCLSNKQTKSKSNLFQPNTE

SEQ ID NO: 420398 - protein, 339 aa, unidentified
MSEFTKKKCFVGIDISKDHLDVALLKAEELDVFKDKKVDNSFAGFAAIQNWLLKKRVKLEDCLFCMEHTGTYGLLLFAWLSQLGIDYCVEPGMKIKRSSGITRGKNDKVDARRIADYASTNKAKLKPFQMPSSLLLQIKQFLTYRDQQTKIKVSLKNSLKSHNQYQRVSGVQSISDEIQHQIQEYDQRIDKIDAQIIELIETDESLKKNFDLTTSVKGVGLVIAAFMLVTTNNFTCFENGRKYACYTGIAPFENSSGKYQGKTKVSHLANKRVKVLLSNGANSARRWDPELRVYYDRKIQEGKEHNLVINSIKCKLVNRVFAVIKRQTPYINIYQQNFA

SEQ ID NO: 420399 - protein, 386 aa, unidentified
MSRPNDLSRSFSPFDQQRTLVVVIEMSQSSWLVSGIVPGVDRQPLKKLDPDENALLRLLQRWRGEAEGRGASVERTVVAFEAGRDGFWLARWLRSRGIEAHVLHSSSVAVSREHRRAKTDRLDTELLKRAFLGWLRGEREHCKMVAIPTLGEEDAKRPSRERESLVAEQSRIINRVKSALARLGIRGFNPKLKKAAGCLDDLRTPEGEPIPPNTLAAIRRDLERRQLLREQIKQIETARLERLGTAARQGPSAMVQLLACVLGLGIETADMLVHEVLSRDLRDRRAVARYAGLTGSPDESGGRRRERGLARSGNARVRCGMIEFAWRFLRFQKDSALARWYEERTAGMRGLRKKMIVALARKLLIALWRLVREGVVPDGLVLRPAS

SEQ ID NO: 420400 - protein, 343 aa, unidentified
MQTVTTIGFDIAKSVFQVHGVDAVGQVVVRRQLKRRHVLAFFEKLPPCLVGIEACASSHHWSRELQALGHTVRLMPPAYVKPYVKRQKNDMADAEAICEAVTRANMRFVPTKTPEQQSCLMLHRTRHMFIRQQTAVINSIRAHLAEFGIVAPVGRKGVTELLQIVADPNDKRVPEVARACLAALSNQLLRLKEQILGFDRLIMAWHRSNQTSKRLHYIPGVGPMLATALVASVADPRTFRSGRNFSAWIGLVPKQHSSGGRERLGSISKQGDRYLRSLFVAGALAVIRYAKIHGTGHRPWLTALLGRRPTKVAAIALANKIARMAWAMMARGERYKQPAALAR

SEQ ID NO: 420401 - protein, 345 aa, unidentified
MTSNMHEMYVGLDVHKNFIQGCVLDKEGKVILEQKFKNEPHSMDVFLSNVTQDSKVALESCSCWQYVYDYLHDAGYKELVLANPSRVRLIAASRKKTDRHDAKVLADLLRMNMLPESYAPPLETRYERQITRHRLSLVRLRADVKRKINALLLRHGYQHEYSDLFGKAGMEQMYSLDLPMCDRFELDNYLKTIDFLTEKINNTQERVKDFVSYNPQARLLMSIKGIDFYSALMISAEIGDVRRFNSAKKIISYAGLNPSISQSGDKCYVGHISKQGNNNLRWILVECANIAVMHDSRLALFYHKIKKRRNHKVAIIATARKLLTIIYAMLMNNRNYIPQKKCKAS

SEQ ID NO: 420402 - protein, 425 aa, unidentified
MSERDYNRQVVKRERIGRETLVIGVDVGNAWNAVGFMNKEGKVLGSCAKLYNSREGFEEFVKMTEGFKAKHGMNSVLIGMEPTGHYWRKLAYFAKDQGYEVRFVRTTALKHHRELDESASAKSDKRDALTIANITREGKYIDTVIEDGVVRQLRTLSKVRERLLRYSVGAKNALHAALDDYFPELHEIFWSMNSRSLWAVLDRCPFPEDVLSMKVSALRELIARSARKKAGAAQKAKALKQAAKKSIGVRRIGSADRYRVKICLEEVKRTVLMLKGIDRQMKGVLKEIPSSEYLLSIPGIGPLSAAVFLGELGSPAYFQNARQIVKYAGYDPQESDSGSRISRRFISKKGRWLLRKFLFFMSMRVVVLSNYFKEYYQRKLQTKNRVGQLPRKKEILCAVAIKLIKVIFALLRDKRRFQDTVNIAA

SEQ ID NO: 420403 - protein, 358 aa, unidentified
MKSLTPKQKWFKKISLTKNDKIFVGLDVHKKSISVAICLNGRVELTFNTSACPRRLAAQLLPLKKALRQVVYEAGPTGYGLARTLQDAGLPVEVISPSNIPRPAKRQSKTDRLDCRQLAEYAAKGLLKPVAIPTVQQEADRQLIRLRDQLVAKRRRVRQQIKSFLLQHGLEEPQGLENWSLASIKQLIQMPLSHPLRFTLDLYLQELDELTEHIQQTETELRRLGENPHYRQTIKILQSHPGVGPVTAWAFALELFNPQRFQRAAEVAAYLGLAPQIIQSGQSCREGPITKAGRKSLRSKLIEAAWVWIRQDHHAQDTYYRLCRHTGCSQKAIVGLARRLAIRLWRMLCTGRHFQPAA

SEQ ID NO: 420404 - protein, 433 aa, unidentified
MEEAQDEPLFCERAAGIDIGKQSVMVTVRVPGETRRGGRAQETREFGTTRRQLLELADWLRCWGVERAGMESTGDYWKPVFFLLEQQGFDCVLYQASKVKAQPGRPKTDKLDSVWLAKVTERGSVAGSFVPPEDIRRLRTHTRYRRRLTQARTAEKQRAEKLLEDAHLKLSSVISDIHGVSGGDMLRALAAGERDPRVLAEMARGVMRRKLAALREALDCSFVTEEHAFVLSMMLDNIDHYSAQITVLDEKIAALCEPYERQIAQLDQIPGFGVKTAQDLIGEIGVDMSVFPTAGHLCSWARVAPRPKESGGRRKGGSATGKGNPYIGATLGEAAVSVGRTQTFLGAKLRRLVRHMPKKKARVAVMRTQLAAARALLSDPEAEYRDLGPGYYEQRAGTARQARGHVRSLERLGWKVTLEPLDPDTGELTAQAS

SEQ ID NO: 420405 - protein, 347 aa, unidentified
MLHAGLDLSRKKLDICLLSERGEHLDQLVVPPDVDSLRRLARRIDEVHAEPVSAVVESMTGARLVHDTLEAEGWSVEIADAQKVKGLAPLACKTDEIDSLVLATLSQRDLVPAIWLPDPTVREERELARFRLHLVKHKTALKNRVHSTLINFGRACPVTDLFGVEGRRLLERLEVPEPWRGNVGASVMLIDDLERQIDEINRRLRAERADHPYVPLLLSVPGVGWVLAFTIAAEIGEIERFSSPEKFVGYTGLCPKVRQSGESDRRGPLTKHGPRYLRWALLEATMHALRHPAYSERYQRTKRRLGKQRGAKVAQVDIARRLAHAIWHMLTRKERFAPRGAALRLAA

SEQ ID NO: 420406 - protein, 413 aa, unidentified
MEVIHERCAGIDISKIDVKVCIRVPSGTGTRRRSEVRTFSAVTSALLAMRDWLLAEGITVVGMEATGVYWKPVFYLLEHDMECWLLNARHMKSVPGRKTDVKDSEWIATLVEHGLVRPSFVPPEPIRQLRDVTRYRTEIIRERTRETQRLEKLLEDTGIKLSATVSNILGVSGRAMLEALIAGERDPHDLADLAKGSMRRKTDALVEALTGNFTAHHAFLARAMLDRIDACTATETKLSEHIEVMLQPFRRRIELLVTIPGVDTRAAQVILSEIGADIARFPSAADLASWAGVCPGNHQSGGRTGSGKTRHGDPWLKAALGQAAASASRTKDTYLAARYRRIVARRGKKRALVAVEHSILTAVWHMFTHDAEYADLGGHYFIERTGRARQTRRLVSQLNQLGYQVTLQTEGAA

SEQ ID NO: 420407 - protein, 345 aa, unidentified
MKVTTVGIDLAKSVFQIHGVNERGKAVLRKQLKRSEMLKFFANLAPCLIGMEACGSAHYWARKLIELGHEVRLMAPQFVKPYVKTNKNDRNDAEAICEAVARPNMRFVPVKTTEQQAALALHRARAGMMKARNAQANQIRGLLGEFGIVLPQGIGQLRRRLPEILEDGENGLPGLMRTLLRRLLAQLQQLDQQVSELEREIVLWHRQNDNSRRLERIGGIGPLTASAYVASLGNAKGFNNGRQVAAWLGIVPRQDSTGGKPKLLGISKHGDVYLRTLLIHGARSVLRHLEHRPDQADSWLKRLMLRRGKNVAAVALANKNARIAWALLAHQREFDPDYVSTAPSR

SEQ ID NO: 420408 - protein, 370 aa, unidentified
MGKSTPLFVGLDVHKDSIAVAHAQGHSADPPVFVGAIGTRQADLDKLIRRLQAKTRTLVFAYEAGPCGYTLHRDLTGQGFTCHVVAPSLIPKKPGDKVKTDRRDAVELARLLRSGDLTRVYVPTVEDEAIRDLCRARDAARLTLKNAKLRLQAFLLRLGRQYVGRADWTDAHRRYLAKVVCPTAAQQIVFQESVRAVDEQVDRLHRLEAELRERGPAWRLYPVVQALQALRGVQWLVAITVVAELGDLTRFDTPRQLAAFVGLIPSEYSSGPARRQGGITKAGNGRARRALIEGAWAYRHPAKVSEHIQRRIDGLPKPIQDIGWKAQVRLCKRFRRLTARGKHPNVAVTAVARELIAFMWAIAKEVPVPA

SEQ ID NO: 420409 - protein, 386 aa, unidentified
MQKLNDLSRSPNPLDPDGTLIAVIELSLSSWLVAGMVPGVERQPLKKLAVDENALLKLLNRWREEAAKAGHRIKRIAVAFEAGRDGFWLARWLRARDIEAHVIHASSVAVSREHRRAKTDRLDTELLKRSFLGWLRGERDHCKMVAIPTTQDEDAKRPNREHESLVGEQSRIVNRMKATLIRLGIRGFNPKLKKAAERLDGLRTPEGEPIPPNTLAELRRDMVRRRLVSDQIRQIEDARLERLKQAPSDGPHAMVRLLARVIGVGVETADMLVQEVLSRSMRDRRAIARYAGLTGSPDESGRKRREKGLTRSGNARVRRGMIQLAWRFLMFQKDSTLAQWFRTRTESARGTRKTMIVALARKLLIALWRLVREGVVPDGVVLRPAP

SEQ ID NO: 420410 - protein, 426 aa, unidentified
MNDMTRFAATVGLDWADQKHDLWICPADKFQARHLRLEQTPEAIHDWVAKLRQETNNRPVAIAIETSRGPIISALLAYDFIVLFPINPKALKSYRAAFAVSGAKDDRTDAKLLEEYVRLHGQELRPLEPDTELTRKLAGLVQHRRQLVDERTRLVNQLHSVLKTYYPLAEELLGSQMTKPLASEFLARWPDLASLQKAGARTVRAFFYQQHSRAPKTIEERLQAIAQAQALTTDPALIQPAHLFVGALATILKPLHQAIARLDQAIEQALNQHPDAAIFRSLPGAGPALAPRLLVALGTNRDRFQSAQKVAQFYGVAPVVRQSGNTKTIHMRTRCPKFGRQTFHENAACALREEPWAQCYYQEHKKTHRDKHHPACRALAFKLIRIYFACWKNHQPYDSTHYLDALRKHGSHLHKKLEQAQPASGK

SEQ ID NO: 420411 - protein, 384 aa, unidentified
MLTTATHNEHYTAMYAPEPVLFLAFELSEKTWKLGFTTGHGQQPRERSIPARHQARLLHEVGQAKRRFGLPETAPVVSCYEAGREGFWLHRFLQAHGITNHVVDSSSIEVNRRKRRAKSDGLDGRKLLTMLLRSHHGERGVWRVVNVPSIEAEDQRHLHRDLETVKQERASTTARIKGLLSSQGIRLTSVTKLPEQLDALRLWDGSPIPSGLRRRLLRVYAHYQFLSEQIAELEAERRALLQSAQEASLEKVRQLMQLKGIGINGAWLLVMEFFGWRALKNRREVGGLAGLTPTPYQSGASAREQGITKSGNRHVRWMTTELAWSWVRYQPESALSCWFRERFGGGGKRLRRIGIVAVARKLLIALWRFLETGVIPEGAELKEA

SEQ ID NO: 420412 - protein, 391 aa, unidentified
MRKPKKQKKPLNDLSRSLTPFDPNRTLIVVIDMAKENWLVAGIIPGVERQPLKKLPADENGLLKLLERWRAEAEIAGHKIERIAVAFEAGRDGFWLARWLRARGIEAHVIHAASVAVPREHRRAKTDRLDTEQLKRAFLGWLRGERDHCKMCAIPTFAEEDAKRPHRERETLVGEQTTIINRIKATLARLGIRSFNPKLKKAPERLEHLRTPEGEPIPPNTLAELQRDMARKQFVAEQIRQIEKARLEQLKQAPKTGPNLMVLVLMRVIGIGIETADMLVKEILSRNMRDRRAVARYGGLTGSPHESGSKSREKGLARSGNARVRRGMIQLAWRFLDYQKDSALARWFEARTKNGSRKKMIVALARKLLIALWHFVRDGVVPEGVVLRPTH

SEQ ID NO: 420413 - protein, 475 aa, unidentified
MAAREESTKRDAAAGEGDGNGAEVAEERTEVVTYAAAIDVAKGSGMVCTRVPGSRPDRKRQTVWQVDADYASVVALMDHLRCQGIQRLVLESTSDYWRIYYYLAEAAGLEVWLVNARDVKHLPGRGKSDREDCVWLCKLNERGMLRRSFVPPQAVRDLRALTRTRSRLAQDQARHQNRVEKILEDALVKISVVISDLFGASGRRFLDALAAGERSPAALAALGDPRLHATQQELAAALTGQFREVHAFEIATHLRLIDTINDEIARLDARIEQQLTSVPGVAPACTSCGLIGGGHSPGCAAGGTPVLGLVERLDEITGVGACNAQVLIAELGTDMSVFPTPGHAAAWARLTSRTFQSGTSARPGRTGKGNSYLRGALGQCVMAVARTDTRLGEQYRRIARRRGKQKAIVAVSRVICEIACILIADRSARFTDLGADYYSRANPARQTRSKIRELERLNPGMKVTLTPAGPATTAA

SEQ ID NO: 420414 - protein, 342 aa, unidentified
MSDVITVGLDLAKNVFQVHGADGIGQAVLRKKLRRAQVLEFFSQLPRCVVAMEACGGAHFWAREIGKLGHDVRLIPPAYVKPFVKRQKNDMADAEAICEAAVRPSMRFVPVKSEDVQGAAMVFRVRELLIRQRTQAINALRGHLTEFGEVVPQGAANAKRLSAIVEDASSGLPDEARATLLVLIETKTRLDDQIVKLNAEISRRAKENEVARRLMTIPGIGPLIATALVALAPPPETFRRGRDFAAWLGLVPRQHSTGGKQRLGATTKMGERSLRRLLIIGANSVIIKRHVHPLARPGTWLGGMLLRKPPMLVRVALANKMARIVWALMAKNEDYRAPTAVA

SEQ ID NO: 420415 - protein, 353 aa, unidentified
MQRTAASFPKITIGVDLGDRKSHICEIDESAQIVKETSIPTTRRGVEGYFAGRESCRVVLEAGTHSPWFSRQVKSLGHADVVSNPSKVYGKHRRTKRNDRSDARYLARQGRADVELLHPIQHRGAEAQEHLALVRARDQLVRARTKLINHVRGSVKSVGGRIVKCSAEAFAARARHEVPVELRIATEPVLDVITGLTGKIHEMDTRVERIAQKYPEVERLRQPKGVGVLTALAYVLLVEDPKRFKASRDVGPYFGLVPRLDESSDSSPQLGITKAGDELGRRLLVSAAQYILGPFGPECDLRRFGEAIAARGGKNAKKRAVVAVARKLAVLLHRIWVTGADYDPDRQLKRRSA

SEQ ID NO: 420416 - protein, 344 aa, unidentified
MLHAGLDLSRRRLDVCLLDEGGELVGETAVPPDADGLRGLAGRLAGRRVRAVIESMNGARFVHDALEEHGWEVLVADAQKVKGLAPLACKTDKIDARVLAVLSQRDLVPAIWLPDPSIRRERELARFRLHLVRHRTTLKNRVHATLITFGHPCPVSDLFGRAGRELLDRLAIPDPWRSNVDASLELIDDLELRIARLTVELKRHGADHRYIPLLVTAPGFGWINAFTVASEIGDIERFASPAKLCGYTGLCPRVIQSGATDRRGPISKHGPRYLRWGLFEAAMNACKHPLYAERYQRTQRRLGRQRGPKIAQIELSRKLTEAIWHMLTRNQPFAPAGAAFRLAA

SEQ ID NO: 420417 - protein, 519 aa, unidentified
MLAIPVITERCAAIDVGKRGLAVAVALGPADKEAEIKTRASGTTVPALLDLKAWLVEQGCTTVALESTGSYWIPVKNILEDAFQITLVCARKHHPKKGDKTDFRDAIDMVIHHRHGLLTGSYLPERGIVELRDLTRRRKKLLGNLRAEKNRIQKVLETANVKMGNVVSDVFGVSGQEILQALLEDQPLTAEELADKAKKRLRDKIPQLTEALEAHQMNHHHRWLIDQSVEHAKFLDRQIEELEKKIDQHLPPYRRQHELLMTIPGIKEAAAANILAEIGADMNQFPDGDHLSSWAGICPGNNQSAGKRKGSRIKKANQFLLAALVEASWAAVRKKDSALQRKFHRWLRAKGEKKTNVAISHSLLKVIWSVLKHDRPYVEPDVLVLKTLEREKQIRHHAQRLRQLGADEQTITTLVKNLLEAPKPDSTDHPPVATHPYPSDSACASRPKCSPQKQGSPPPRRRPLARGVLAFRIRTAEKKQYSAVQDLPDSPSTTTPPEKNTPPKPSATNNKKGQSTTRH

SEQ ID NO: 420418 - protein, 359 aa, unidentified
MEQKRFVGIDLGKRTYEMKIIGINGKVTGTNGQTNPSGRKLLYRKLLATDRVAIEVCSLGMVMAKEIQKEVGCEVVLLNPSQLVLIYRSLKKNDKEDALKLARLVQKYTNEEFPKVELPTEHEENLRQILTEIRQLKNDRTKEINRLHAIFVECGITEIKKKDLATIDNRIKCIKMLKGIALAQAERILKKLELVETQIEEVEELLDKEIDGDKNIEKLTEIPGVGKQLASAYVAFIGDGSRFPNASTIGAATGLVPRLDMSSTVCRMGHITKCGNKNLRTLLILAAWSHVRSRDGGALKDKFLYMTRFQSKGKKIAIVAIARKLAELMYILLKNDTSYEKRPSPTISQLVDEAMKFSS

SEQ ID NO: 420419 - protein, 365 aa, unidentified
MQKAELSCEADSENDLGGSSKTMYYIGLDVHKRTISYCVKDAAGRVQQEGKIGSIRRELDGWIKSLPQPRTIAMEATIFTGWIYDHLLPHAEKVKVAHPLMLRAIAAAKRKNDRIDASKIADCLRCDFLPECHMASTEIRDRRRTLRYRELLVKQMVQMKNRVSGLLMEKGVTHTKRRLHKLGYFAELMAGSQEIDQSIRPLLKPSREHIVRAQKLDYALVSSLERDPLLVERLKRLRTVPGVGPITALTWALEIGDVSRFRSIKQAISYCGLCGAEKSSADKVMRTPISKQRNKHIQHVLVEAAKLAPRQCHELALVYEKEMQRGNRNRATLAVARKIVAYLLAIERRKQDFVPTEQFGGTAAA

SEQ ID NO: 420420 - protein, 350 aa, unidentified
MKKHNTVGLDMGDKIHSLCVLDWRGQVVERAEVGNTGAAIRKRFAKMKPCRIAMEAGTHSGWVSRILEELGHEVLVGNPRKLRAIWDNAQKNDVRDAEMLARIARFDPQLLHPIRHRGKEAQCDLAAIKARDELVKVRTALIAHVRGLVKSTGERLKKCSPECFHLRAAEAMPADLAPALEPVVASIAELTVRIRHCDNLIEQLSAKKYPETERLQAIPGVGPVTALAYVLTLEEAERFEKSRDVGPFLGMTPRRDQSGQTDKQLRITKDGNAYLRRLLVQCANYVLGRHGPDCDLRRFGLKLAERGGKNAKRRAVVAVARKLGVLLHSLWKSGEAYEPNRRPVRAKKVA

SEQ ID NO: 420421 - protein, 339 aa, unidentified
MFYAGIDLHKQSITVCVVDKHLNVQIRKRLMCANESTIIAFFTELGLFRAVVEATASHEWFVKLIESLAEKVVLAHPGKLRIIAESTRKSDRLDAQILAEFLALDIIPTSYRATPRQRDHRCLVRQRNTIQRWITSVKNRIRRIMSNYNADRQDLFSKAGQEFVSTYSLSAADRFSMDQLIAEWNFFRQQLQAANQALKGFASAAPIREQHQRELLQSIPGVGFVTTEVVLSEIADIDRFDSQKQVVAYAGLAPGQRESAGKSKELHIEKSGSRHLRWALVEAAWQLVRRVPRWKTIYERLKKRLKAKKAIVAIARRLLGMMVAIMKSGEPFSVTHQPA

SEQ ID NO: 420422 - protein, 356 aa, unidentified
MGEGSWVGLDVHARSVVAGVIDGGSGEVRSQRVPAGCDETVEWLTTLPAPVRVVYEAGPTGYRLARACAEAGIGCVVAAPSKIRPAADRVKTDRRDAERLARLLRLGEITPVRVPDPEEEAARDLVRAREDARGDLMRARHRLSKLLLRHGLVYDATAWTRTHDAWLRRQRFPSGPRAIVFDECYGRMLDAKTRRDALDKAIAELAATPSYVDVVERLVCLRGVSTLTAFALTVELGDWRRFRPEALGPFLGLIPSENSSGERRRQGAITKTGNSHARRLLIEAAWHQRSPTRLSVTLERRREGKPLAVRAQAERSARRLHGRWHALEARGKPRSIVVVAVARELAGHCWALATME

SEQ ID NO: 420423 - protein, 354 aa, unidentified
MMIIGCDYHPGFQQIAFVDTETGELQERRLEHREEAEKFYRDLAAQGMKVRVGMEASGHARWFERLLAELQCELWIGDAAEISARRVRKQKTDRQDAQLILRLMLKDDFPQIWVPSWENRDLRQLLWHRHRMVQARTRMMNQLQAVALNEGLRCKKRLWREAGREQLEAFRLAPWASQRRGDLLELLDQLNPTIAKLTQAIDREVEKCPAARRLQTHPGVGPLTALAFVLIIGKADRFQCGKQIASYLGLVPLEKSSGNQRRLGHITKQGNSLLRFLLVEAAQVTVRSLPEWRSKYCHLALRRGRKIAKVAMARKLAVRLYWMMRKEWDYEQLSKFGSHAGKPGNRDGVKQNTE

SEQ ID NO: 420424 - protein, 387 aa, unidentified
MRTVCGLDVHKDSVFLCILHDSGEIIEKVFGVLTHQLRDMRRMMQSHGVSEVTMESTAVYWIPVWRVLEPHFHLKLVNPYFIKQLPGRKSDVKDAQWIAECTLKDLVRGSFVPPERIQQLRQYDRRIFDLDAEIVRKLSKLDAVMQRCNIRLSNYVSNTDTKSYKNVVRKLCEGVTDPEELIKEIYSRITNRHGRETILAALTGVVSDAEKDTMRQLRDELDLAEKHKQECQDKMMHICKTYYPEELRRLMTIPGIGERAATSLIAEIGVDMTKFQTAAHLASWSGLKPRNDESNKKIKSRRITHGNVYLRKTIIECAWGASRTKDCFFSRFSYHQTQVRKKNKMKVLVAVARKLLIAIWHVLHDETEYKDFGADNDCDTSVSESNG

SEQ ID NO: 420425 - protein, 457 aa, unidentified
MGWMAPERHRCAKLGMQLQQRGPSMTQVTTIGLDLAKRIFQVHGMDAAGAVVLRRQLKRRQMVPFFTKLPNCLIGMEAYGTAHHWARTLQALGHAVRLIPPAYAKAYVRRNKTDPADAEAICEAVSRPSMRFVPIKSEADQAMAAVHRVRERLIAQRTQTINMLRGQMAEFGVVAAKGPQHVKALVAELAEPESVPEPLRQVLLGLVRLITALSDQIAVLDKQILAWHRANPCSRRLSAIDGFGPILSSALALRVQQPQRFACGRDLSAWIGLAPKQNSSGGKVRIGAISKKGDVYLRRLLINGAQAVLNSKRAKTDPWIARLLHSKPRLVVAVAVANKMARIAGAVMVRQTEYQTDFRRPPAAALRPPSERRVGSAARELAKEKVHTDVGSRPTRRGRPGGSMGHRSRGLDIEIPTLRSPPGPAVMVPHLKGRTHDCNHLRTSAAISSCESGAIHT

SEQ ID NO: 420426 - protein, 382 aa, unidentified
MIVIGADTHKRSHTVAAVDAATGRLLDEQTIAARRRSFDALLIWARGHGGERVWAIEDCRHVSGALERFLLAHGEAVVRVAPKLTAGARGSARELGKSDGIDAAAIARAALREGLDRLPVARLAGPELEVRLLVDHRERLIGQRTALINDLRWQLHDLWPETEIPPRALIRAHWQDRLAGRLARAEQSARVRIARDELRRIRELTRAINDLERELAKLTATLAPRLLAERGCGALTAAKLIGEIAGAERFATDAKLARTAGSAPIPASSGQTHRHRLDRGGNRQLNSALHRLAITKGRLDPETTAYLARKQAEGKTRREAIRCLKRHLARRVWHLLQTRPRDHHHHPHNPHPAQRHDPLQHADRQPRLDREATSVGEIRNGD

SEQ ID NO: 420427 - protein, 331 aa, unidentified
MRQIYGIDLSKKKLDISFIDKNGFLQHKVIDNNIAKITRLMEQLSVNSVLCAEHTGAPGNLLRFLAHIKKVPVILVTGYEVKHGLGLIKGKSDKIDSDRIREYAERFYDKLNFAVFEGECLFELQELHSLRNQLVKQRKMLETQCCGKELNPFNSIAANRIARSQISKLNEDIKDLEKEMASILANDHELKQNLELVTSVKSIGPVTATELIVKTRNFTKIKTAKKAASFAGVCPFPNASGQMVKKSKVSPMSDRSLKSLLYMCSCSAVKHNKEYKLYYQQKLMEGKPYFLIMNNIANKLLRTVFSIIESRIPWDPNYICVDPRMREKIVV

SEQ ID NO: 420428 - protein, 421 aa, unidentified
MRKAGTGKGKGLRDGTLIVAVDIGMEMNRGYCTTPDGRDIRPFKFDNSREGMDKLWGMVMASKNRFQCEEIMVGYESTGPYGEPLVHYLRKKPVRMVQVNPMHTKRVKEISDNSPLKTDDKDPRVIADIMKLAHVLSIVIPEGDAAYLRRLNNARERHVRERTALLNQLQQLVFLLFPEFKKVMKDKKCHTPLYLLKQYPTPEAISVLDKNTLGEAMRKKSRGKFRDRHADMLISFAKNTVGIKEGVLGLSMDIRHILTQLEMLHTLIAEIESEMETVLGRIPYSSKLLSIKGLGVVSVAGIIGEIGDFKKFQTRGEIMKLAGLDLYEISSGKWKGRRKISKRGRSLLRKILYYAAIQTIRKNGILHDYYTRLTERGMKRMKALVAVSRKLLGIIYAIVRDDSEYLVHFESIKRQVIKKAA

SEQ ID NO: 420429 - protein, 406 aa, unidentified
MSKCNTKSSVGTDVSNKSIDLFEIHVQGVQTVIKYNFDLYIGADVSDKLIELFGLSADGRGEKRWQIANSRKSILEFCDSIQDPSRTLIAMETGTHSAWQSELLEKRGFKVVVGNARKLAAVWMNKNKSDREDAEMLARLARSDIKLFCPIRHISSPVRADLAVIKARHALSKSRILLMNTVKGLLRSFGVDTGEITTDNFIREASKVIPADLRPAMTGMLAQIRALQLEIKDYDRKVTKLNKKYPDTAKVGQPGGVGELTALAYVLVIEDPKRFDSGDRVGKYLGITPKRDQSGSVDKQLGITKEGNNLLRWLLIQSANYIMGRGPDCDLRRFGERIAARGGKIAKRKAKVAVARKLAKLLHKLWITGEVYDPDYKAHCKEARQKKEAEKRNTPAISEQLIPQTV

SEQ ID NO: 420430 - protein, 350 aa, unidentified
MTEIRCLVTGGVDAHSDTHHAAALDERGRLLGDSAFATSAEGYQELLAWLESFGQVARVGVESTGSYAAGLVRFLAARGVAVVEVNQPHAHTRRRRGKSDPLDAEAAARKVLAGEATSVPKHTGGVVESIRQLRVAREGAVKANTAALNQLYELVITAPDELRQQLAVRKTSRGKASLCLRLRPDRARLHEPLQAAKLALRSVAERVRDLDRQIGLLDQHLAPLVATAAPRTMSLLGVSTQHAGQLLVTAGQNIERLPSDGAFARLCGASPIPASSGRTSRHRLSRGGDRKANRALHLIAVCRLRYCARTRAYANRRTAEKRDELAPLHVPPKLRRRHLSPIYSREHGRF

SEQ ID NO: 420431 - protein, 420 aa, unidentified
MDVLIERCAGIDIGKNEVVACVRTPAAGSRGRRKQTRTFSSFTAALEAMADWFSEEGVTDIAMEATGPYWKPVWYVLEERAFELRLVNAHHVKILPGRKSDVLDAEWLAELLEHGLLHASFVPPPAIRELRDLTRYRKRLIQGHTAEQQRIQKTLEDAGIKLDSVASDVLGASGRAMLEALLAGERDPVVLAELARGTLRKKIPALRQALRGRFRDHHALLIGLCLEHTDHLEAAIARLDARIDALLAEHTSEAGIPFARARDRLTTITGVGKRAAECILAEIGADMSRFPTAGHLASWAGLAPGTNITGGKRGSGKTTDGDKWLTDILTQCAWAAARTRDNYLAAQFWRLARRIGKKRAAVAVGHSILVICWHLLTKDCDYTDLGGDYFTRRANPDRQRDRLINQLHALGYRVTLDRAA

SEQ ID NO: 420432 - protein, 337 aa, unidentified
MVTFGVDAHKRTHTIVAVDDRGRPLGQITVGTTSKDHLGLLRWAARFGAERRWAVEDCRHLSRRLERDLLSAGEWIVRVPPKLMAHARDSARTYGKSDPIDALAVARAVQREPDLPVARLDGPDRELRLLVDHRESLVAERTRLICRLRWHLHELDPAWEPKARSLDAQRTLDEVQARLQDQAGVVARLARELANRCAELTAVINALEKEIAQLAEQLAPALLALPGCGPLTAAKIIGETAGVDRFKSRDAYARYTGTAPLPVWSSNKARHRLSRTGNRQLNAALHRIALTQARWHPPAKALIAPPKERWEQRTRGDSHTQAPPLRCRLSSTRPRPN

SEQ ID NO: 420433 - protein, 317 aa, unidentified
MAQKGRLVGIDVAKAKIDAAIRSGPETSFANNPEGRAALVAWLREHGIGKAVMEASGGYERSWAELLRKAGLEVAIVDPKRVRHFAKSAGRLAKNDAIDARMIAWFGEVFDDLASQAGDADREELDRMVTTRLGILGLKDQIDNWNEHEQPKAVQKILQALRKAVDAQLAKLQQLIATKIDRTEPFAQRAEIVCSVPGLAGAAASGVIAFFPELGRIDRQAAAALLGAAPFDDDSGERHGERHIRGGRRKLRTLLFMPVLSAATRHNPVLKAHYQQLIARGKKPKVALIACRRKLIGILNTMLARGEKWDSTKHAVA

SEQ ID NO: 420434 - protein, 387 aa, unidentified
MPQPNDLSRSLVALDQNSTIIAVIEMSQSSWLVGGVLPGIERQPCKKLEPSPERLLAVLHRWRDEAVRAGRTITRIAVAFEAGRDGFWLARWLEARGVEAHVIHPSSVAVSREHRRAKTDRLDTELLKRGFLGWLRGERGHCSMVRVPTIAEEDAKRPNRERECLVAERTRIVNRMKGTLARLGIRSFKPTLRKAADRLATLHTPEGMPLPPNVLAELQRDMARLGFVVSQIREIEEARQKRLDQQPEIGPHAMVRQLVRVVGVGIETADMLVHEVLSRPMRDRKAVARYAGLTGSPDESGAKRREQGLARAGNARVRRGMIQLAWRFLLFQKESALALWYRARTADSRLGTRKTMIVALARKLMIALWRFVTTGETLGGVILRPAG

SEQ ID NO: 420435 - protein, 331 aa, unidentified
MTNAAREAAADARPVDYIGVDMAKARFEWGVHGARSTQGAGNDPAGFETLLADLRPRRVGLIVIEATGGLEHALASVLLELGLPVAVVNPRAAREFARSMGHLAKTDAIDALALAHYAHTLANKADQAGVRLRPVPEHLEALQVMVLRRKQLMDMRTAELNRRGGAMRVLHKSIDAVIKTLNEQIAALDKDIGAHLDEHFKELDQRFERIKGIGPTTCASVIAFMPELGRISNARAAKLAGLAPLNNDSGNSRGKRSIWGGRKLVRSALYMATLSAVRFNPVIKAFYQRLIAAGKSRKAAMTACSHKLLRILNAMARSGKPWNAELHGVAA

SEQ ID NO: 420436 - protein, 426 aa, unidentified
MEVLFSRCCGLDVHQAEVVACALFDDGKRRPKKVVRSFPTMRHGLEQLRDWLASLAITHVTMEGTGVYWRPVYAALEGRVDITLVNARHVKAVPGRKTDVKDAEWLATLLRHGLLRKSFVPEKEIRAIRDLCRYRRMLVQSQTTEKNRILKLLEIMGIKLASVASDVFGVSGVLMLRAIAANSCTKEQIASLARSRLRSKVPELRLALDVLVEEHHRVMLSDQLARLDRTAEEVARYDELLDKQVAPYEESLALLSTIDGIRRIAAIEIFAEVGPDVASFPSAAHFASWAGTCPGQRQSGGKSFSARRRKGNPYLQSILVEAALAATRKKATYLTDKYRRLKSRRGSMRALFAIAHKLACAVHRVLQTHEPYRDLGAGYLDLRNKRSTAKALAKRLKSLGYDQHNVATLFAPLAPTLGLRPEISAG

SEQ ID NO: 420437 - protein, 312 aa, unidentified
MAELSFGGIDVSKDRLDVLLLPEGLCFSVCNNAPGWAELIVRLRPLAVSAIGLEPSGGYERGIIRALLAAGLSVRRINPNKLRQFARARGVLAKNDRLDARLIAEYVAIMPTRVLQRDDAIERLAEIVTMRRQLCDEHVAAMNQATHLEDAMLRRISKRRLLRIEADILLLDKRLAELVAADPRLAHRYQLLISMPGVGPTLAYTLLATLPELGQIDRKQIAALVGLAPYDFDSGKLKGHRCIYGGRMPVRNVLYMAALSASRYNPALKAFSNRLAAAGKKSKVIIVAVMRKMIITLNAMLRDNTEWHPAAA

SEQ ID NO: 420438 - protein, 382 aa, unidentified
MLKNHQAARLEDNVNRGQLYLSMELSRKKWKLAFSDGKVLRARVVTIGARDWEALRREIQKARERFGVDESVRVQSCYEAGREGFWVHRALEAMGIENLVVDAASIDVKRRKRAKTDRKDAEQLVRQLIRYSRGERDAWSVVRVPTVEAEQARQLHRDMEVLKRERQQHRVRIQSLLFTQGLDVMVTPKLIKQLDQLRCWDRQPLPQALIERIRREYHRYETVEQELQMLKKQQEAMLKSDDKPSMKKVVKLQRLSGIGMDSSWVFVMEFFGWRQFRNRREVGGALGLTPMPYQSGDSLHEQGISHAGNRRVRTMSIEIAWSWLRYQPQSRLSQWYRKRFGSAGPRMRRIGIVAMARRLMVDLWRWVEFDQLPEGARLKPVA

SEQ ID NO: 420439 - protein, 335 aa, unidentified
MQIYGIDLAKEKFDVSFFDLTSKKVSNQPSHKVVTNNLKGIGKFFKGLPSDAVLVAEHTGVYGDTLLKCCMDSNVKIAFVGGYVIHRYRATPDRAKTDVLDCALLRDFGERYPDKLKYKTFPEEALYELRQLARHREMLVEQRKQLITADRSEDCRPIRSLAVKRSMDRIKEMLDTEIAETEKEMLKVINGHESIHHNYELVKSVDGVGLITAVELLVKTENFTKITTARQYAAYAGTAPYEKSSGKMDKGAHISKIGNRRSKTLLYICAESARLHNKEIKLYYERRTLIDKKPRHYVLNAIANKLLRIIFTLVEKGEYYDANFIRQDPRVVKHN

SEQ ID NO: 420440 - protein, 466 aa, unidentified
MKHNRRRSPGKPRVSPTVLDRINPNVAGIDCGAAEHFVAVPPDRDATPVQSFTTFTSDLLRLADWLAACRVTSVAMEATGVYWIPIYEILEARGFEVLLVNARHLKNVPGRKSDVSDCEWIRELHSVGLLRGSFRPTDAIVALRAYLRHRQTLIESAGMYIQRMQKALVQMNLQLSLVVSDITGVTGLRILRDIVAGHRDPHQLAEHRDHRCRASKTEIIAALTGHYRAEHLFVLQQNLELFDICQAQLAACDGAIDAHVQTLTAHVASPATPLPAPRVTKKPRDNEPRFEIRAPLHQLTGGVDLTQIDGIAPYTALKLVSEIGTDMRRWATEKHFTSWLTLAPKNKISGGCLLSSRTQPSANRAAAVLRMTAMSLGRTQTALGAFYRRLAARIGKPQAITATARKLAILVYRALKGELAYRDPGADAYTGQQRTRVLRRLRQRAATLGFELVSRQTGEILPAGVS

SEQ ID NO: 420441 - protein, 416 aa, unidentified
MKVNEHKSSAGIDWAKDEHAVCVVEEAGRKILSRRFAHDEAGITELCGSLVEMGVERVAIERPEGVLVERVLEAGIVVLAIHPNQLKAARPRFRASGTRAKSDSFDAFCLAELARTDKHRFRELSPDSDETKALRALTRSREDLVGTRVALANRLRAELEAFWPGAAILFKEIDSSISLAFLARYPSPKDASKLGEKRLLGFLSGQGYPGRKGAGELLERLRSKAPCGRAGEAEMEARRATVLALVVALKTLVEQIRLFEERISKAVRAHPDGEVFLSLFVGHNTTLTAACLVGEIGDRRERYPTNEAMAADCGMSPVAIESGKRKVAGFRRACDKRLRKAVATLAESTRHHNPWAKDVYRRARERGCDHAHAIRILGRAWVRVIFRMWRDGEPYDPARHGGLRRLQSAEGLSQGV

SEQ ID NO: 420442 - protein, 340 aa, unidentified
MTITTVGIDLAKNVFAVHCVDQHGKTVLVKPKVPRAALPELIASLPPCVIGMEACSGAHYWARLFRQYGHEPRLMAAKFVSPYRMAGKSGKNDAADAQAICEAVRRPHMRFVPVKDESQQAMQCLHRTRQGFIEEKTATYNRLRGLISEFGVIAPQSTDALRHMVSEQKKSLPLQVQQCVDDLLEHIDRIENNVTEYDRILSRMAKADHRSQRLMELKGIGPTTACALVASIGNAHDFKNGRQLAAWLGLTPSQYGSGGKSKLGRITKAGDSYLRTLLVQGARSVLIGAEKKTDSFSRWVCSLVERRGYWRAVVAIAAKNARLCWASLHYGDDFRLYSVS

SEQ ID NO: 420443 - protein, 336 aa, unidentified
MQLTTIGLDLAKHVFQVHGIDAVGNIVLRRRLRRGQMITFFAGLTPCLVGMEACATAHFWARELTALGHDVRLMPAQYAKAYVKRSKNDAADAAAICEAVSRPSMRFVPVKSEAQQAALMLHRARDLLVRQRTQLINALRGHLAEFGIIEAQGAWNLSRVLAHLETEGELPEVAQQILRLLAAQLDEAKQRIEDLDAQIAAWHKASPASQRLATIPGIGPLVATAIAATVPDASAFRSGREFAAWLGLVPRQRSTGGKQRLGRISREGDGYIRRLLIIGAQAVLLRSKAAHADPWVQGLLARRPRLVVAVALANKTARVAWAVMTKGQSYRQPAVA

SEQ ID NO: 420444 - protein, 408 aa, unidentified
MKTLHKRCAGLDVHKAEVVACLRVVNKQNVGHEVRRFPTTTHGLLELAEWLEHAGCTHVAMEATGVYWKPVWHILEGRFALILANAAHVKNVPGRKSDVNDATWIADLLAHGLIRSSFVPPPAIQELRDLTRTRKQLRREIVQHTQRIQAVLEEANVKLCSVITDILGASGRRILTAMIAGETDAQKLAALGSERLGCTRTALVEALTGRVSEHHRFLLDQHVRTIEQLEASVAAFDARIEAALAPFRDAVERLKEVPGLATIATEVVIAEIGPDMSPFPTAGHLLSWAGFVPRLDESAGKRRSTRIKKGAPWLKPVLLQAAWAAARKKDSYFQAQFLRLKARHGAKKAAIAVAASILTTVYHMLRDGTCYQDLGPEYFARRNPAKAAARLANRIRNLGFHVEIKAAA

SEQ ID NO: 420445 - protein, 331 aa, unidentified
MDPTTTTAPLFAGVDVSKDRLDVCLRWSELERHKEEEEEEEAFVVAYDDNGIDALVSRLLEERTVLVVLEATGGFERTVVGALAAAGLPVVVVNPRQVRDFARATGRLAKTDRIDAAILARFAEAVRPAPKPLPGQEIRALQAIVARRRQLLGMLTAENNRLSSAAKPVAKRIKAHIRWLEKELSRTERDLETAIESSPALGENEALLRSVPGVGPVLARTLLAGVPELGTLTHKRVAALVGVAPLNRDSGTLRGHRSVWGGRAEVRGALYMGALVAARRNPVVKEFYERLLAAGKPKKVALVACMRKLLSILNAVLKHRTPWRSPQYLSP

SEQ ID NO: 420446 - protein, 309 aa, unidentified
MEHFAGIDVAKDRLDVHLRPSQETFAVARDGEGLAQLVGRLQTLAPQLVVMEATGGYETIVASAVVAARLPLAVVNPRQIRDFARATGKLAKTDRIDAAAIAHFAEAVRPPVRPIADAEAQALGELVARRRQVIEMMVAERNRRRRVTQSRVRRAIDRHLELLQTELSELEQDIDGAIRKSPAWQADADLPASVPGVGKATLRTLIAELPELGRLDRRKIAALVGVAPINRDSGTMRGRRSIAGGRPTVRTALFMAALVASRANPIIAPYYVKLRAAGKTGKQALTACMRKLIVILNAILRDRKPWQPA

SEQ ID NO: 420447 - protein, 409 aa, unidentified
MEVLYPRCAGLDVHAATVVACVRVASGATVTYEHRTVSTTTRGLLELAEWLTAHQCTHVAMEATGVYWKPVWHVLEDHLTLVLANAMHIRNIPGRKSDKNDATWIADLLALGLIRSSFVPPAPIQELRDLTRTRKQLVREVVRHTQRIQKTLEDANLKLTEVVSDILGVSGRAILTALVAGETQPERLADLTHGRLKAPRAQLVAALEGRVTAHHRFMIKLHLAQVTALETAITDLEARIGEALAPFRAAVNLLMTMPGLRDTAAAVIVAEIGDDMSKFPSAGHLLSWGGLCPRLDESAGKRRSTRTRSGAPWLKTTLVQVAWAAARKKDSYFHAQFLRLKSRRGPKKAILAVAASMLTDVYYMLRDGVEFHDLGSQYFAQHDKEHLTNRLLRRLRALGVEVEVKSKVA

SEQ ID NO: 420448 - protein, 343 aa, unidentified
MPAICGLDWASEWHDICIADQDGGLLTERRFAHDEAGLSALIALLLEHRVVRVAIERPDGLLVGRLLAAAINVLAIHPNQVAAARERFRAAAGKSDRFDAFVLCELARTDHHRFAALAPSSDETVALRVLVRTREDLVGIRVHLANQLRAQLDASWPGARRIFADVDTPIGLAFLARYPAPGDTIGLGPKRLEGFLARHAYCGRRSVDELLTRLRSAPIAALGNLQGEAHRSAVAGLVAALTPIVIQISLLTSQIAGAVRAHPDGPIFLSFFKDPKSVVTAAGLLAEIGDNRARYPTADSLAADAGQAPVAKESGKRRNATFRWACDKRLRGHFGTLADSTRH

SEQ ID NO: 420449 - protein, 345 aa, unidentified
MEKYVGIDVSLKESAVCIVDQSGKVIRELKALSDPDALLRVLRAEGCTKARIGLEAGALSGWLHDGLKAEGFDVVLLETRHVQAAISAMAVKTDRNDARGIAQMLRLGWFKSVHAKSADSQEIRALLTARKLLTRKRVDLDIGMRGILRSFGLKVGQIGRARFDARLRELITGNTMLEKVIGAMLEARAALARELAELHRMVLRLTRESEVCKRLMTVPGVGPIASLTFVAAVDDPHRFRSSKAIGAHFGLTPRKYQSGEVDVTGHITKAGDASVRTVLYEAANAIITLRVKPSALKAWALRLVKRRGAKRAKVALARKLAVLMHRMWVDGTEFEFGAGDAQPAT

SEQ ID NO: 420450 - protein, 349 aa, unidentified
MTDQRRSYAGQHVYVGIDVHKDTYTVTCLHHKCIVKRATVQADPAGLAASLPRWFPGATLWSAYEAGFSAFVLHRALTQAGITNIVVNPASIAVAANDKVKTDRRDAKKLAFDLADGRLRGIYVPTEQEKLSRLLPRTRAQIVEHRARVARQIKAKLHQFGLIAPTSRRLITHRYLSEIETWSLPMELRLSLSWLSEQWQFATRQLIDIRRLLRDQARAQPRLEGVYRSVPGVGEVAARVLATELGDLTRFANERALFSYTGLTPSEHSSGTAMRRGPISRQGSSRVRHVLIEIAWRAVSRDAARHEIFERIAATRGKKRAIVAIARRLVGRMRACFRQGTRYAVGTFA

SEQ ID NO: 420451 - protein, 335 aa, unidentified
MKTFQTFIGIDISKLSLDVSVIYAGDPVKAVSYKVSNDSKGLMGLIGQMKQKGIALEDTLFVCENTGIYTTPLMTVLGSQKLHYWVVAAIEIKRSQGLSRGKSDKADAKTIALYGLTHQHKYQPSALPQTSLQQLKLLFTQREKIQKAIALFEQTKENEGYLPKEVYAVVKKLNQQQIGHLQRALAKIDVQMLDIVKQDDALQKQQVLLTSVPGIGKQTAFYLIITTRSFTCFDNWRQLACYAGVAPFEHSSGTSVRGRTKVSDIADKKMKSLLQMCVLSAVKCDKEIKAYYEKKKAEGKPGMLVMNNVRAKLLARAFAVVKRGTPFVNTQKFAA

SEQ ID NO: 420452 - protein, 324 aa, unidentified
MLSTLGIDVSKDSFHVELSINEKLRHRRFANRNEGFAELEAWLVKHKAPLVHACLEATGPYSEPLALYLHQQGHTVSVVNPVRIKAFGQSELLRNKDDRPDAALIRRFCEKQRPAAWTPPPAHFRELQALTRHLENLQETRQQQLNRLETTTTKSVLKSLRKLVTHLEAEIERTEQQINDHVDHHPDLKQQCQLLESIPGIGKRTATRLLAEIEDITQYRSARQVAAYAGLTPKNNRSGTKRVPAHLSKTGNARVRKALFLPAMVAKQHNPVVRSFCQRLARHGKNKMQLVGAAMRKLIHIAFGVLKSGKVFDPNHELLFNSGA

SEQ ID NO: 420453 - protein, 404 aa, unidentified
MIAVGIDIGKEKHAAAILDADGRLLAKPAFFDNTHDGARRLWALIARHAPGGHVRVGMEATGNCWKPFHDFLAAKGAEVDVMNPIVSSASMAGDVRGRKTDKRDAVVIAGIVARGERPSYRPEGEAERALKCLTRQRRLLVDGRSGMKNRLRDQLLESFPEFPALFKGLFSKLPLALLDKWPGAAELARARRDSVAKVVKANSRGKDAAKEAGRIIAAAKDSICFAHPPPKSAALCIRSTLRALRDLDAGIEEVDAEIQRCERPEMARLLDGIKGAGQALPMVIASEFGGLGRFERSPTTGARAGMAKRMLAFAGCEPRIRESGKWKGQSKVSKRGSGQLRLALYLIANTIRMNDDYFRAVYDEKIKTKHHSVALFYVIRKLLEVLCSLHRSGRKYSPTCAGRS

SEQ ID NO: 420454 - protein, 374 aa, unidentified
MEHAITYVGLDVHKDTIAVAIAETGRRGEVREHGKIANTPTALKGLVSRLTRSGAALQFCYEAGPCGYRIQRQLTAAGHGCVVVAPSLIPRKPGDRIKTDRRDATNLAKLHRAGELTPVWVPDPAHEAVRDLLRARLAAVRGLRQARQQLSGFLLRHGHHYNRPAWTLIHRRWLAGLKFEQAVHHIVLEDCIAAVEAATARRDRLEAHIKAALPEWSLAPVVQALQALRGMALVAAATLVAELGDITRFANPRQLMAYLGLVPSEHSSGGTRRQGRITKAGNGAARRMLIEAAWSYRFPARISRELLLRQEGLARSIRDTAWKAQERLCRRYRKLARAGKPPTVVTTAIARELTGFVWAIAYQVESSGALIRRS

SEQ ID NO: 420455 - protein, 357 aa, unidentified
MSKPTILKQSIGIDVSKDKIAVCFAVEQTDKKFRILATRKFDNNASGFAQLHGWIKKHQKADLPVNVLMEATGVYYESLAYFLREINFRVSVVLPNKTKAFAKSLDYKTKTDGIDAKILAQMSLEREVSEWAPAGKNMLKLKRLCRERIELLMDKTSVNNRLHAKKHSYKGEGSSMKRAEKILAFLKKQIEEVEQEITKLIASDPELKGKVEKICSIKGIGIITAATIIGETNGFALIKNKAQLVSYAGYDVVENQSGTSINGKTKISKRGNSFIRRALHFPALTTIKHNPSLKALYDRVFESTRIKMKAAVAVQRKLLVLVYTLYRKDECFDPQGLISNKSNLPNKNRQEQQSVPA

SEQ ID NO: 420456 - protein, 351 aa, unidentified
MNHTTVAVDVAKSVFQLAVSEHPGHVGEHRRLTRAQLTRFFSNRAACTVLMEACGSSHHWGRQLEQLGHSVRLLPAHAVRPYVCRNKTDRADAMALLEAARKQDLRDVPLKSVAQQTLTALHRLRSGWSATRTARLNTVRGLLREFGFVIPLGPRQVVPHVRRLVEDADSGLPDVLRPAMDAACREILHLEQLIADVEAQLKRLAPQIPGVSRLLTIPGIGLLTATALAAFVGDLRRFPTGRHFASYLGLTPREHSSGLTRRLGSISKRGDVYLRMLLIHGARSVLVAASRMDAPDRLRTWALKLQASRGHNKATVALANRLARIAWAVWCHQTDFAAGAGGPHAMEDLAG

SEQ ID NO: 420457 - protein, 347 aa, unidentified
MLHVGLDLSRKRVDVCLISDQGELVDELAAPFDEDGLCRLTDRVAAKHAGRVRAVVESMNGARFVHDTLEAQGWDVLVADAQRVKGLAPLACKTDKIDARVLAELSFRDLVPAIWLPDPRVRSGRELARFRLHLVRHRSSLKNRIHSTLITFGKPCPVSDLFGVAGRELLGRLQVPEPWRGNVEASLVLIDELDRQIDQVAGELKRIGADHPYVPLLMTAPGVGWLVGFSIACEIGDISRFSSPTKLCGYTGLCPRVIQSGETDRRGPISKHGPKYLRWALFEAALNACDHPFYRERYERTKKRLGRQRGPKVAQIDLSRKLTEAIWHMLTRNQPFAPAGAPFRLAA

SEQ ID NO: 420458 - protein, 319 aa, unidentified
MAIKTERVMLGVDVSRGWLDIHQDGEETVERVVNERRAIDTFLKRFPDAAIAVEATNTYHELVVERALKRRLVVYLVSGYQIRHYGNAVGQRMRTDPIDARLISRFLAREIDRLKPYEPKSPQHVLLWRLIKRRATLVQGRQKVQQSLSGVRELRTEAKRVGKTFARTLATVDRRIAELVKSLGWQVEVTRVEGISGVGPQTAKALVAAYHSGTFIHHDPFIAYLGLDVRAKDSGKFRGQRKLTKHGDGEYRRLLFCAAMAACRMPGYFSERYQALLARGLHSTAAYVVIARKLAAIAFNLLRKEVDFDPARLTANAVG

SEQ ID NO: 420459 - protein, 353 aa, unidentified
MPKSSESRPERTYAGLDVSLKQTAICIVDEAGKIVWERMAATDPEVIANHLFRHAPGLERVGLESGATSAWLWRELRGRGLPAVCLDSRHAHRVLSMKRNKNDRNDGRGLADLVRMGWYREARVRSLDAQLVRSMLLSRQQLLEARRAIENQMRGALKALGAMTGSTKGRRFMPRVIQLRAEQDWLGPVLDPLLAAHAAIAKQLKAVSNSILAAAREDADVRRMMTVPGIGAMTALAFKAAIDDPKRFSSSVKVGPYLGLTPRQHQSGESEWIGGIGMTNDPLLRSYLYEAAGVLMTRVRRNCPLKDWALRLAKRIGWKRASIAVARKLAVILHAIWRDGTVFEWKTAEPLAA

SEQ ID NO: 420460 - protein, 448 aa, unidentified
MLRRKSTTVTMDVLRPDAAGIDIGARSIYVALPPDRNQPVRKFETFTSDLYLLAQWLEDNGITTVAMESTSVYWIPLFQILESRGIDVCLVNARHAKSLPGRKSDVKDCQWLQYLHAVGLLRASFRPEDQIAAIRSLSRHRANLVADCTRHIHHMHKSLTQMNLQIHHVISDMTGVTGLSIIDGILAGQHNPAELAELKDRRIKASKEVIRKALEGDYRPEHIFTLRQALESFRFTQKQIEECDEQILSNIKAFNKAQKLASPPDKERTNTNKKLRLRSPRDHSIHAEMKQAFGIDLFEVPGFATNTVLTVFTEVGPDFSKFKSASEFASWLTLCPDNEITGGKIQRTRTRRSKSRLAAALRQAAYSLANATSHYGALYRRLRSKLGAPKAVTAIANRLARLLFHLVTTKQEFDESKYAVSDARSKERQLSSLQRKARALGYSIVLAS

SEQ ID NO: 420461 - protein, 386 aa, unidentified
MLDPTSREASVIRTDLGAIFVSLELSRSTWLITSLSPGAGEKLSQHTVPAGDLGGLLARFAQLRQKVSARLDRSFPIIAIQEAGLDGFWIHRVIEREGVESHVVDAASILTSRHRRRAKTDRIDGETLVRTLMAYKRGEPRVCSMVRPPSPEDEDRRRLCRERKTLVVERIEHTNRIKGLLCAQGIFDYDPVRRNRRTRLKQLQTGDGRPLPERLKALIGRELDRLELILAQLKAVEAERDALLAPAASEAPTPATMLGRLKGIGPEFAAILWSEALYRHFDNRRQLAAYAGLAPTPWKSGSIDHEQGVSKAGNPRLRTTMIQVAWLWPRHQPGSALSRWFHDRVQRAGGRMRKSAIVALARKLLVAFWKYVTQGVVIVGAVVQAA

SEQ ID NO: 420462 - protein, 411 aa, unidentified
MEAAVITAVGIDVSKSKSTVAVRRPGGEIALRPFEVHHTNSDLKKLASTLKKLGGDIRIVMEHTSTYWRPIALTLKEAGFFVSVVNAMLIHDFSDNTIRKLKTDRADALKIANYALTFWDTLPPFNNEEETRLLLKMQSRANERITATATALRNGLIALADQTFPGVNIAFDPNTKNANGHEKWVDFFLRYWHKDCVCQYSMEAFTESYRSWCKRKNYKFRTDTAHKIYLLAQEGVATLPKCESTKILIMQACKSLNAVCEAKQSTQLEMQRLAAMLPEYEVVMQMEGAGPITGPALMAEIGDVRRFKNKKALVAFAGIDAPPFQSGAFESKSRHVSKRGSPHLRRTIFIISNIILTRSNPENAVYCFMDKKRSEGKHYYVYTVAGSAKFLRVYYARVTEFLRSQPSPDAC

SEQ ID NO: 420463 - protein, 321 aa, unidentified
MEKSILGIDVSKKELVVVLLTNNKKKESTFSNDQEGCKQLHKWIQKVETNKVLACAEATGQYSEKVAEYLYSKGYEVSIVNPFCIKSYSNSILARHKNDQVDAFVIAKYAQLHNVPLYKPKDPVIKELQYLYRCLQDLKNMRTQVGNHLESEVPRSVSNTWESVLKEIEERIISIEENIKQIIFESSELLEHYNNLQSIPGISKITAVAILAEVPDVSSFRNARQLAAYAGLTPKHRLSGSSLKGKSRISKIGSGILRKALYFPAVAAKRHNPVIKLFCEKLDEKGKNIMAIICAAMRKLIHIIYGVLKSKKPFDKNLITT

SEQ ID NO: 420464 - protein, 387 aa, unidentified
MPQPNDLSRSLVALDQNSTIIAVVELSHSSWLVAGMLPGIERQPRKKLEPSPERLLALLHRWRDEAVRTGRTITRIALAFEAGRDGFWLARWLAARGVEAHVIHASSLAVSREHRRAKTDRLDTELLKRGFLGWLRGERGHCSMARVPTIAEEDAKRPNRERDCLVGERTRIVNRIKSTLARLGIRNFKPTLRKAAERLATVHTPEGMPLPPNTAAELQRHMARLSLVVSQIKEIEDARQKRLEQQHETGSHAMVRLLARIVGVGVETADMLVHEVLSRPMRDRRAVARYAGLTGSPDESGAQRREQGLARAGNARVRRGMIQLAWRFLMFQKQSALALWYRARTADSRSGTRKTMIVALARKLIIALWRFVTTGEPLEGVVLRPAS

SEQ ID NO: 420465 - protein, 431 aa, unidentified
MKYKQSKKQNQRITRISDKTLVVGADIAKETHVARAIDYRGIELGKDCVFSNTRTGLEQLVQWMKELQREHAKSDVLFGIEPTGHYWFNLAEYLGQHGIPLVIVNPHHVHKSKELEDNSPTKNDYKDAKVIADLVRNGKYSEPKLPTRIYADLRILMNLREKIMVNLGQVQRRVQNWQDRFFPEYTEVFKDWEGKASLITLDEFPTPGEIVGLGAEAIAQRWKKDVKRAVGTKRAQLLVETARGSIGLTEGLPAAKIEIKTLLEQYDMFARQLEEILSEVERLLGQIPGTKEMLTVPGVAVVTLAGFLAEVGDLSGYEHGQQIIRLAGLNLKENSSGKKKGKSSITKRGRAKLRALLFRAVMPMVAKNAEFKALHQYFTTRSQNPLKKKQSLVALCGKLIRVLHTLGTKHIPYDANSVLGPVRQAQLQMAA

SEQ ID NO: 420466 - protein, 326 aa, unidentified
MVTREGPATYLGIDVGKAQLDVAEEPSGRCWRVPNTEEGWQALVTDLAGAPAPLIVLEASGGYEVGVVVALDAAGLTPVVVNPVATRRFAQSVGTRAKTDRIDAALLARYAARMCPTPRPLPAETARTLQALLTRRRQLTKLLVAEQNHAKRAVPLVRPQITALCALLTAQRAEVDQLLASVVAGDPDWQARVDRLDTVPGIGPVTATILAVGLPELGRCTDKQAAALLGIAPDPRESGQFRGQRHISAGRGTVRHALYEAVTTTVRCEPTFRAHYRQLRARGKAHKQAMVACMRRLIGILTAMLRDGLTWQQTKVGQGQFLPPST

SEQ ID NO: 420467 - protein, 413 aa, unidentified
MDKIYDICCGIDVHKKLIVACLNHKRKKELREFGATTRELMELAEWLQKNECEIVAMESTGSYWKPLYNIMESYGLHAIVVNPAHMKAVPGRKTDVKDAEWIAELLQHGLLQPSYIPSKDQRELRELVQYRKSLVGERTRELNRLQKMLEGANIKLSGTVTNINGKSARKILEYILSGNEIDEKKYDEMYEEKLIAHNLKASKEQILDDLKGFMSPLQRRMLKELLQHLDELNVHIENLNDEIDNFMKPEEKQASQVIQDVTGIGNTSAQTIIAVIGTDMERFPSDRHISSWAGLCPGDNVSAKKRKSGKIRKGNALLKSTLVLCAHAAVRHKSSYFHAQFKRISTHRGKKRAYVAVAHSILIAIYHILKDGVKYQDLGAEYYNQFNAERKIHAYLKKLKALGWELPKEAVPA

SEQ ID NO: 420468 - protein, 364 aa, unidentified
MQYRTNIESSSHEETRSQFNGGTGAIKLGIDVHQDFYVVVEQVGGSNPKPPQRFRKEAFLHWAAKLKREGGDEVHAVYEACGFGFGLQRQLSALSIQCHVVCPQKLDEQNKRVKTDGLDAKALCLRLDRFVQGNRAALALVRVPSEQEEQLRAIHRQREQLVKARKQLEAQGRSLMVNHGIEPVQNWWKPRTFAALPMPEWMKELLQNSQPILIALQEKISALTAQLQSAAAPDQPRGLGKMTSVIIDREIGDWNRFSNRRQIASYTGLCPGEYSSGNTRLQSCVTKHGNPRLRAALVELAWRLVRFQPNYHPVRKWRAVLAKGALATGAARKKAIVAVARQLAVDLWRIKTGRLSAEELGLIK

SEQ ID NO: 420469 - protein, 387 aa, unidentified
MQSVTSATAVATTARANNITLFASLELSKSKWVVTINSPGSEKFSKHVVEGGDGACLLDLLSRSRAKAEQRYGVQVKAIVIQEAGLDGFWIHRLLLANGIESHVVDAASIAVDRRHRRAKTDAIDGETLLRTLMAWARGERRVCSMVRAPSPEDEDRRRLTRERGTLLKERIQHTNRVRGLLSGQGIGDYNPLRRDRFERLEALRTGDGRELPPMLKAEIRRELDRIALVTTQLAAVERARDALIRTDAEERNNPAALLLKLKGLGPEFASLLWLESLFRSFGNRRQVAAYSGLAPSPWQSGGVERDQGISKSGNRRLRKTMIELAWFWLRHQPDSALSRWFQARVGAAKGRIRRIAIVALARKLLVALWRYVTQGVVPEDAVFKTA

SEQ ID NO: 420470 - protein, 390 aa, unidentified
MFEHFVGIDVSKDSFLFNVTDLKEKTLAKGSCGMNHEGFENFFNVIIRFENAAVGLESTATYHQPLLFALLAREIPTYLITPFLVKNFARSCSLRNTKTDTIDARIISVFLGKNYTGLRPVSASDSNGLREIARLRESISKKSVAAKIRLKQLVTTTFPELVKEHDIFTVSMITLLEEFPSAEAIRKASLKKIEKVLNSKNKGRNLKLNAEQIKALAAKSVGVCKPMLEKTVLHIIREFNFLTDELKKCDKELIEAVSVYSHEDFEILTSIPGIGKLTAAQFLAEIGDINRFETVKQLTAYAGTDPGISQSGNSMVQKRISKRGNSSVRRIGFLTALHLISMNKVFKEYYDKKIRENMNGKKAVIAVFNKFLRCVFSMLKNKKTFSFNYS

SEQ ID NO: 420471 - protein, 438 aa, unidentified
MSNKVIFNLDELFISVGIDVGADFSWMSIALPNQQFVGKPYKILHNSIDSLTTAVSKIKEAEELYSLESRIFLESTGIYHYPLFCYLRDKGFNCSVINPIITKNSTNINIRKVHNDRFDSKKAALVGLKPDLKVSLMPSDLALNCRNLCREYYDLMDNRSAYVNKLQGELRMAFPQYLGIFSKVTINTSLTLLETYTSPSAFLEADKQEIIDIIKSTARFGLTYAQNKYNAIIQAATDANQFGYIIDSNIKRIRLYISFIRKYDEEINSILESLHELVDANEDSDFVKQIHLIETFKGAGFLSAVSIMGEIGDFSAFSKPKQLFAYFGLDPAVKQSGKFEGTKVQMSKRGSAIARRVIHTLTLQSISISRNGEAKNPVLREYYLKKCDSKPKLVAMGAVSHKVCNMIFAILRDNKPFKIIAPQEHIKQYNAAKCDMTA

SEQ ID NO: 420472 - protein, 359 aa, unidentified
MEYFAGLDVGMEATAICVIDREGKVVLETSVTTDPDAIFEALKPYAAKLRRVGHEAGSLSPWLQVELRQRGLPAICLEAWHARAALSAMRNKTDKADARGIAHIMRAGWFREVHVKSEESYRLRLLLTQRRNLKRKFLDIENAIRHSIKTFGLRLGKVSRGEFEARVRELVAGDALIAELTECMLRARAALWQEYVRLHKVVVAIVRHDELCRRFMRIPGIGPINALAYKTSIDDPQRFRRSKTVGAYLGLTSRRWQSGTSIDVQGHISKAGDGDVRHPLYEAANIMLTRYRGFSSLKAWGLKIAKKRGHKRACVTVARKLAVIMHAMWRDGSEFRFKEPKASTDRSDAAAPKLIGTAA

SEQ ID NO: 420473 - protein, 337 aa, unidentified
MIIIGCDFHASFQQIAMLDTETGATEEHKLMHTSGEAESFYRNLASPSIVGIETVGNDQWFVRLLQQLGHEVCVGDAAQIRASYVRKQKTDRRDAKHILRLLVEERFPSIWIPDTEMRDHRQLLMHRHKLVQIRTRVKNELQHLMLNQGMQKKQKLWSTGGRAALASLPLAPWTDRRRKDLLSLLVMLDAQLESLNDAVTRVAQEYPGVPLLMSQPGIGAVTALAFVLTLGDVHRFPRGKQVASYLGLVPREHSSGGKQRMGGISKQGNRLLRFLLVEAANIAVRFDPELRKEYLHRCHQKHFTVAKVATARKLAIRMYWMLRTQTPYPQVLSSRVA

SEQ ID NO: 420474 - protein, 408 aa, unidentified
MNTTLYVGIDVSSRSNVVYLMLPNGDKHSNFSVANSHDGSTQLVKRILSALTSHSLDTVLIGLEATSVYGDNLVYFLREDATLAPFNRKIHVLNPKQVKKFHDSYNDLPKNDYVDSFVIADCLRFGRINKEVYIGDYHYKALQNLTRARFFAVQNLTKEKQRFINLLFKKYSTMTQEKVFSDTFSTTALAVYDKFESAEALANMDLHELTDFIIEKGKNRFPNPDAVAKAIQKAARSSYRLPKTVNDSVNQVLSISITSMKALEAQIKEFDKAINAQMELLPNVLISIPGIGPVYSAGIMAEIGDINRFENQAKLAKYAGLAWTQYQSGGFDSVTTRLIPSGNRFLKYYLCEAAFSLVRCDKEYSDFYHLKYKEVNRYQHKRALALTARKLVRLVFRLLKDNRLYRPA

SEQ ID NO: 420475 - protein, 405 aa, unidentified
MRIVGMDIHRSFAQVAILEDGEIKQQLRVDLVHHRVVEFAKTLSLEDEVVIEATGNSAAVERLIRPHVKRVAIANPRLVRAIAYARVKTDKIDASILAKLHASGFLPEVWVADDDTLRRRRQAAERMGVLEQSVRVKGRIQAILHTNLIPKYNGHLFGKAGRKWLDGLPLPEEERAILVRLAHELERVTAQLAELDKLLAQQALADPRALRLMTIPGVSSVVSSTVLASIGDISRFPTPEKLSSYFGLTPKVRQSGDRPARHGRISKQGNTAARKMLVEAAWSAKTAPGPLRAFFVRVHKKRGAQAAAVATARKLTVMIWHVLASEEEYAFARPAFTAMKLRKVALKAGAPREYGKAGPGRDYWIKEIRQREMDYVERAERAYERMVEAWKERPPTERAQTKTMS

SEQ ID NO: 420476 - protein, 383 aa, unidentified
MTAALATFVPRDYDIFVGLDVDQRSMAITFTDHGTMQKSLKLPYSATQLLNYTEKHFLGQRLAFVYEAGPTGFGLHDELRAAHQFCLVVSPSMVPQAPRKKVKTNRLDSKKLSEGLRGGQLQGIHVPAQSYRELRHLVQLRDTQVAQLKATKQRIKSLLLYEGLPFPEAHGKWTVPALRELERLPCNATVRFKLDQLLDSLQFHYLAAAKVQKQIRRFCQNDPELRPCVRFLASLPGVGTITATHALARLGDWRQITDVRQIAGFLGLVSSEHSTGDKENRGEITRIGDKRLRSKLIQCAWIAIRKDPELRAFYRRVYERQPQKVAARKAIVAVARKLTTRMYAVLKQQRPFVIRTDISVAPLTTEETVGLGERLDVRQNQHP

SEQ ID NO: 420477 - protein, 337 aa, unidentified
MEYCGLDLGRRSSHYCIVDDARDVVQEGNVRTHKTHLRRVFSKREPMRIVVEATTACFWVADQLIELGHDVRVVDPNQTKAIGAALIKHDKLDARVLAQLCAAGLLAEVRIPTLEQRLRRMPLTARDVLVRSRTRIVNCIRGMLASEGFVLASTSPKRLVSLLDDEPPPDIPPALYAALVPLLEALVGLEANIEASTAPVYELAKTDPVLRRLQTVPGVGPITASLFVSAIGDPHRFRSRRAVGAYLGLVPRLYQSGATLRRGRITKHGNAQARWALTISANALLLSKKDSALQRWAKNLVERIGRQKACCAIARKLASVLWSLWKNEQSFQAFTPN

SEQ ID NO: 420478 - protein, 355 aa, unidentified
MNEAKYIGLDVHQATISVAVRDSDGKLVMEAILETKAETILQFVRGLRGSLHVTFEEGTCAAWLYALLKPHVTQVLVCDPRKNALLKVGNKNDRIDSRKLAELLRANLLSSVFHEDTGLRAVKELARSYLTMTKDLTRVMVRLKALYRGWAIPCATKQVYASRHRAEWLAKIREASVHRRAELYYQQLDALRSLQQQVKKELLIEGRKHSATKLLRQIPSIGPIRAVLLLALIQTPHRFRTKRQLWSYCGLALETRTSAEYRVVHGQLQRSKKPVAIRGLNKNHNHDLKNLFKGAALRAAAVEKPFQEFYAALVAKGIKPEMARLTLARKIAAITLIVWKKGARFDAEQLKQQAA

SEQ ID NO: 420479 - protein, 427 aa, unidentified
MKYTQNKKILQVTEKTLIVGVDIAKEKHHARAFDYRGVEYGKRLEFGNNREGMEKFLTWAMDLMRENGKDHLMVGMEPTGHYWLCFALYLKDNNVKVVLVNPFHVKRSKELDDNSPTKSDHKDPKTIAMLVKDGRYVEPNIPEGIYAELRVAMDVRERLNKQLGIIKNQVVRWLDIYFPEFNTVFADWEGKAALVTLKEFPTPEKIAKKSMEEILSCWKKEVQRAIGQKRAIKLLDAAKKSIGKNQGIKMAEYELKSILEQYELLTKQLEEVDKEIEKLVMQVPGVSEMLKIKGIGINAIAGFISEVGDIERYEHPKQIQKLAGLNLVENSSGKHKGETVISKRGRRRLRSILFKAIMPIVAKNKEFQELHKYYTTRAQNPLKKKQSLIALCCKIIRIFYVILRKGVKYDPVKMLKDIKRPTLQGVA

SEQ ID NO: 420480 - protein, 342 aa, unidentified
MAIVTIGLDLAKLVFQVHGVDEAGQVVVRRQLRRAEVEGFFQKLPPCLVGMEACGSAHYWARRISAFGHEVRLIAPIRVKAYVQRGKKNDANDAAAIAEVITRPHMTFVPAKSAEQQGVLMLHRTRDLMVRQRTMLINALRGHLAEFGIVAAQGVRRINELIDGLGNAAIPELARIALRQIAVPIDACSQSVEVLEGQIVAWHKTNEASRNLATIPGIGPITASALAVSVPDPSVFNCGRKLAAWLGLVPRQNSTGGKDRLGRITKTGDSYLRRLLVIGATSVIRYARDKAPGKGEWLKTLLDRKSPRLASVALANKMARIAWSVLTRGEVYRETYPVPNAA

SEQ ID NO: 420481 - protein, 479 aa, unidentified
MARKQKSDKSKKNRRPIQSLETIQPHAAGIDLGSREHWVAGPPQEDKTPNVERFGTTTPELLRLADWLTQQGIKSVAMESTGVYWIPLFEILDSKGFEVLLANARQVTHVPGRKTDMLDCQWLQLLHACGLLRGSFRPSDDICQLRALMRERNTMVEQRSDWVRRMQKSLDQMNVCVHHAVSDITGVTGMRIIRAIVDGERDPHALARMRDRRCRKSEEQIAAELTGNWRAEHLFTLRQALKMYDQLCTVVDDYDSEILAYLQTLQPADDNDTVAPPPASKAKERNIAKQGQEPLRQALYRFSGFDLTTIDGIGVDTASVILSELGLDFSKFPDEGHFVSYLRLAPNMSISAGKKVPSKSKASTCTRVATALRLSALTLRNSKTALGAYYRRMAWRKGASVAVFATARKLAQIVYRLVRYGQAYVDAGAKAYEARFNQRRLKFYTKALNDMGYNVEPIAAAEASTVEASTAAELRHCVM

SEQ ID NO: 420482 - protein, 480 aa, unidentified
MNVKARRTKKQVNVENQAINLLSKEELNKKIEVVEKELRSYTWRELETNGKFAKNDKLSFITDDMLIAGCDIGSETHYIRAIDVRGRELSSGAFEFSNTSEGFANARAWVLALAAKNDKKQIVLGLEPTGHYWFALAAWMISNGISVVQVNPYAIKQSKEIEDNSQLKDDRKDPKLIANLVKDGNYGMPYLPEKVYADMRRLSMFRDQLNEDRIRNINRLHRELKIYFPEYMDAFGKIDGAFTLEVLKVSAIPTDITVLGAEGMKNIWHNAKLRGRGYSRANEIVSYAEKSVGLTDGTDAGREAVKWYAEQILRLDEQLSEIESALHEKCREIPYAENILAINGVGENILAGILAEMGDISRFDDVKEIQKLSGMGLVACSSGKHKGQTKISHRGRKRLRYWLFQAAKSAVSHADEFKQLHEYYTTRINNPLKKMQSLVVIACKILRVIYTILKTGTTYDPQKLLKDIKHPTASQAPMAA

SEQ ID NO: 420483 - protein, 384 aa, unidentified
MKKNISTTRVMKPRIAVDVTAAQPKPTEDGAASVAPRYQAVVGLDVGDRQSHYCVLDLDGGVVAEGEVKTTEASLRVLFDGKGRMRIALEAGTHSPWISRLLIAWGHEVLVANPRKLRLIAESDSKHDRADARLLARLAHVGPALLSPIHTRSAQTQLDLTVIRAREVAVQTRTKIVNAVRGMVKSTGHRLPASPTLTFARKATEACPEALQSALLPLIRLVETLTADIAAYDRLVVETARAYPETQAIQTIHGVGALTAVAFVLVLNNDRSRFKRSRDVGCYLGLRPKQRDSGMRSPELGITKAGDPLMRRLATQSAQYILGPFGRDSALRRWGLALASHGAKNAKRRAVVAVARKLVVLMHRIWITQVAYDPMRGVPVQSVA

SEQ ID NO: 420484 - protein, 343 aa, unidentified
MQAVTTIGFDIAKSVFQVHGVDSVGQVLIRRQLKRRQVIAFFQKLPACLVGIEACASSHYWSRELQALGHNVRLMPPAYVRPYVKRQKNDMADAEAICEAVTRANMRFVPTKTAEQQSGLMLHRTRHLFMRQQTSVINAIRAHLAEFGIVAPVGRRGVEELLRVIADPSDKRLPEVVRACLAALGSQLLSLKKQILDFDRMILAWHRSNQTSKRLNCIPGVGPLLSTALVASVADPKTFRSGRNFSAWIGLVPKQNSSGGRDKLGSISKQGDRYLRGLFVAGAFAVIRYAKIHGTKHRPWLTALLARRHTKVAAIALANKLARMAWAMMATGERYNYPASLKV

SEQ ID NO: 420485 - protein, 324 aa, unidentified
MFFLGIDVSKAKLDCALLGSDANKRKTKVVPNSIAGVQTLLQWCVKQGAEPAQLHAVLEPTGQYHEQAATALHDASVSVSLVNPAQVRDFAGALAVRSKTDGIDSYVLARYGQALKPGLWRPAPLHARQLRALLARRDALAKDLQRELNRQEKTQFSDPPVLVEGSIAKTIAFLREEIKRLDHAINDHIDRHPDLKEDRELLTSIPGIGDRAGNSILSIMHNRPIESAEGLASYLGVVPVQRQSGTSLNSRPRLSKTGPSTVRATLYMAAIVSKRFNPHVGALYARLLAAGKSKMAALGAAMRKLVHLCFGVLKTRTPYRPDYA

SEQ ID NO: 420486 - protein, 365 aa, unidentified
MQYLGLDVHVKATVWHLLDATGQTIEIGKTPTTVPALQKLVCRFSQADQLLVGQEVGKMAYLVHDLVTATGVKILSFNAWHLRMIASSRKKTDRRDAFWIAKALQTGMTPTPVYLPTGEVRELRHLISRREAIVVERKRWLSRARSYLQATGHSPPRAHRSVPRLLEASISNPDGIDATLSASIELCQRMHATLTQELAQMDGILHMKAKQIDAVKRLETIPAVGERVALMIYAWVGDVTRFRNARELASYAGLVPSVSQSGESQVLGKITRMGSPQLRSTLVQSGHVLLWRCKSEHSAPLKAIAERVQTARARRKIAVVAAARHILRIAYYVLRDGTNYDPTRLRPALIKGALNAVLEVTPEVA

SEQ ID NO: 420487 - protein, 400 aa, unidentified
MSGLKGSFDGFVGIDVSKDKFDTCGITGDEAKLFQFSATMDRKGFEKLKGHLAAVSISSVLIGMESTASYHVNLFSYLVSECYKVLLINPLLISNYVKMQLRKTKTDKKDAVVIAQFLLTNGATLVQRATPSLISDLRDLSRQRESLVDEMTSLKIEIKQLLNITFPELEHVAGIFTKSILKLLQQYPSAFALRDADLGQLSQTLIADSYGHKRETFAAGLIKAAHSSIGSKSPAKDMILKQKIALLRHLEDALQEITGMLIEMSRKLMEEDINIMTSLKGIGEKAAANFLIEMGGDINQFERSGKIIAMAGLDPAVYQSGKHEGKGRITKRGNRHLRRIIWLMTTKVIQYTDIFNVYYLKRRKEGLPYKMAVLATAHKLIRVIYAMLTQRTTFCPQVNS

SEQ ID NO: 420488 - protein, 479 aa, unidentified
MNAKTTRQKNQEEKGFSVINTLSAEERQSRIDELLNTMQAKTWHDLETSGKFDKNAKLSFISEDMLIVGCDIGSETHYLRAIDIRGRELSKKPFSFTNNEEGFENAKAWIVELAAVNDKKQIVLGLEPTGHYWFCIATWLISNGISVVQVNPYAVKQTKEVEDNSQLKDDRKDPKVIANLVMNGNYGMPYLPEGVYADLRSLSLLRSQQNENRIRCINRLHRLMKIHFPEYKDAFGKTDGSFALEMLKVAPFPEDIVKLGEDGIREIWHNAKLRGRGYSRASEIFRYASASVGRKEGIEADRYAVKCYVEEMISLDEKISTIEADIKEKCMEIPHAEKILDITGLGQNIVAGIISSMGDIDRFDDAKEIQKLSGLNLVACSSGKHNGETKISHRGRKELRTWLFQGAKSVVAHAEEFQLLHEYYTTRNKNPLKKMQSLIVIACKLLRIIFAILKKGVTYDPQKMLDDIKRFEESEIVAA

SEQ ID NO: 420489 - protein, 407 aa, unidentified
MEVVYPRCAGLDVHQKTVVACVRRQGPDGVTHEVRSFGSSTRELLELADWLEARACTHVAMESTGVYWKPVWHVLEGRFELLLANAMHIRNIPGRKSDVNDATWIADLLAHGLIRGSFVPPAPIHELRDLTRTRKQLVREIAQHTQRLQKVLEDANLKLTAVVSDILGVSGRAILDALVAGETDPGHLADLSRGRLKASRALLVDALHGRITDHHRFMLRLHLGQIDALEQAVRDVEARIGDRLAPFRRAVHHLITMPGVSDTVARVIVAEIGTDMSRFPTPGHLLSWAGLCPRLHESAGKRLSTRTRPGASWLKTSLVQAAWAAIRRPGYLQAQFLRLKSRRGPKKAILAVAASMLCAAYHIIRDDRPYQDLGADHFTRRGRAAIARRLIRRLNHLGLEVEVRPAA

SEQ ID NO: 420490 - protein, 529 aa, unidentified
MPYRIAGIDVHKKKLAVVMADVEVEDEFQFERRWFGSNPEQLRQLAEWLAGQQVEEAVMESTAQYWKPVWGALERYWKPACQSREGAGPKSGMLHLAQALSNRGRRGRKNDFRDAERLVKRLLSQELILSFVPDAEQRLWRTLTRTRYQRTRDRVRLQNQLESLLEEAHIKLSSLVSDMLGVSARRMLQALADGETDPAALAALAHQRLRATPEQLQDALGACTELNPVYCRLMKMALADLKFIEEQISQLDREIAALLGEYQDAVRRLAEIPGLGVESAQQIMAEVGAKAATFAAAKNLVSWVGACPGEEESAGVNRSKRSPKGNRHMRRILNQCANAAVRHKGSIFEILYRRLVPRLGHNKTIGAIVHRLCNLIWLILHRGLRYEEHGPAVSEQDVKRKTIPYSPVRGGCQVVKVLDACDWRHIPRSMELFRRYVAQPDMPDLSLLLQLGQYLHPFHHRRTIRRHQPAAAKVHYIQRIHTQVPQVVVHRVLQKFARLALDPLGVRPSLRAHLSYERKLGRIWVQRLA

SEQ ID NO: 420491 - protein, 336 aa, unidentified
MTQIICGIDISSTSLEARIGRDGAAGSFANNPESIAELAAFCQSRQVDLVAMEATGGYEKQPFALLSEQGLAVTLLNPRAVRRFAEGMGLLEKTDALDAGVIAWFAEVKRSPPQALASASQQQLRALVNRLRQLTALRTAQRNQSRLVTDAAVLAWFAELLEVVARQVQELESAIAVLISQDPLWRKLDQAFRSIKGVADRTVARLMAEMPGSPATGLRRWGGMPEIGTLSNKAISKLAGVAPLAHDSGKLQGKRSVRGGRASVREILFVVAGVSGRYEPDFIAFHQRLQAAGKPGKVIRIALAHKLRVRLNAKTREVRQQFNAEPAARQTAVLTT

SEQ ID NO: 420492 - protein, 383 aa, unidentified
MQPTLKQDCTLDAAVLAVSLELAKGSWKVALHDGRRAKPAVHSVAHEQAAGRLVEVVQLVEATKHKWRLGAATRVVVIYEAGQDGFWIERALAALGYEVKVVDPASLPVTRRARRAKTDRLDAIGLVLSLLAWLRGERDRMQVVRVPAVAAEAQRHGVRERGALQKEIGQHRDRIRKLLRTVGCWEEVKSDFAQRLARGAVVCHDDSELPAQLRTRLERECERLALAVGQLKTLEAALMEALPEAVRERIGRLMQIKGVGQVGATRLVLELFWRDFANRRQVGACVGLVPQPYDSGESRVDQGISKQGNRRVRALLIEMAWLWLRYQPDSTLTQWFAYRTQGSGPSKRGKRIAIVAVARKLVIALWRYLEQGVIPEGAALKAA

SEQ ID NO: 420493 - protein, 353 aa, unidentified
MIELSKVEAQEVMGLDLGDRSSQICRMDRKTGAVLEERRLSTTTASVQRYFSSLPPQLVALESGTHSLWMTRLVKSLGHEVIVANPSQVRAISASLKKTDERDARFLAHLVRVDPQLLSPVEPRSEESQQAITVVRAREGLVKARTMLVNQVRGVVKSFGYRIGSCSSAAFAHKARQEKTLPSSLKETMEPLLRVIDEVSREIARFDKEIEALARRWPVTLRLRQIKGVGVLTSLVFVLTLGDPLRFANSRAVGAYLGLVPGSRSSGQSTPQMRITKQGDRLARRLLVQASQYVLGRFGPDTDLRRFGLRLAERGGKNGKKRAVVAVARKLAVVLHRLWVGETDYEPLRKAKA

SEQ ID NO: 420494 - protein, 348 aa, unidentified
MMIIGCDYHPGFQQIAFVDTETGECGERRLTHREEAEQFYGMLKGRSVRVGMEASGHARWFERLLSDLQFELWIGDAAEIRTKRVRKQKTDRQDAQLLLRLMMEDRFPRIWVADAENRDLRQLLWHRHRLVQMRTRVMNQLHVVALNEGLRRKKALWRPAGRNQLESLILAPWASRRRQDLLDLLDQLSPKIQELTRALEDEVEKRPVTRRLMTHPGVGPLTALAFELVIGSPERFHCGKQIASYVGLVPSEESSGDRRRLGHISKQGNSLLRYLLVEAAQVTVRSHQHWRSKFFHLAMRRGRKIAKVAMARKLAVHLYWMWRQGWDYGQFEKLGSYAGEPGNRQGVQ

SEQ ID NO: 420495 - protein, 385 aa, unidentified
MKGKTFKPTDYEVFGGLDVDKRSISVTFTNHQGFIRSLRMPYSVEHLVNHVRKHFGDQKVAFAYEAGPTGYGLYDGLVAKAYPCLIASPSMIPKAPGQRVKTNRLDSRGLSENLRGGQLKSIHVPSALYRELRHLTQLRDTFVSEMVGMKQRIKSLLLFEGIEFPPAPAGRQWSFMVKDKLRKLECSKTVHFKLDQLLDSLEFSEKQVLKATREIRRFCRNDAELSQCIEYLMTIPGIGWIVASQLVARIGDWRELKNIRQLGGFLGLVPTENSTGERTDRGSITHTGDGRLRSKLIQASWSAIRQDGELREFFRSVCRTHARHLASRVAIVAVARKLSVRISVVLMKQRPYEVRPKVRSTPLTQEETSPQGTTRRQAEPGEKNS

SEQ ID NO: 420496 - protein, 322 aa, unidentified
MEEKVSNKVGGGAAAKVYVGVDVSKGKLDVCVEGGRPCVVRNCPSAIRQKLRALASGHGDIHVCFESTGVYGLALLECCHEQGVKVSQINARRVRQWAEGVGVNAKTDEIDARVLCRYGRDVGPPPATRPEPWKRELRELRDLRDGWVGDKVRLEGRLEQASSKRAAGELRREISRLERKIKSLDAEMAGLFKANEPSVFARMTSVKCVGATTACLVVAAMPEIGTLGPKRAAMLAGVAPHTRQSGGAEMPGHIGGGRMAARNALYMSAVSGIRHNPVFKAVYKGLVARGNPPRHAITAVMRKLMELLERIAADPGFTPIQF

SEQ ID NO: 420497 - protein, 413 aa, unidentified
MERLIERCAGLDVHRDTVAACVRVPDERGGRAHETRTFSTTTTGLLQLRDWLASFAVTLVGMESTGVYWRPVYYLLEAEFECWLLNAQHLKNVPGRKTDVKDAEWIAQLVEHGLVRPSLVPPKPIRELRDLTRYRKALIQERTREVQRLHKVLEDAGIKLSSVASRVLGVSGRAMIEALVHGTHDPAVLAELAKGALRKKLPALREALEGHFGQHHALMAGEMLAHVDYLDEAIERLSAEVEAKIAPFSRALELLDSVPGIDRRSAEVFLAETGADMSRFPSAAHLASWAGMCPGNNESAGKHGPGKTRKGSKWLRTMLIESAEAAARSKPNYLRSQYARLKGRRGHKKAVVAVAHSILVIGYHLLSREVAYAELGPDYLLLRERTEAYTHRLVRQLERLGHKVTLEAMPATA

SEQ ID NO: 420498 - protein, 420 aa, unidentified
MKQWSELTYYAGFDWAKDHHVLLVVDAQGAIVADFEFDHSLEGWQQFIQRTSAWPNLAVAIETSQGAAVDQLLQHGSTVYPIHPVAAQRYRERKAPSGTKTDHLDAWALADALRLDGQGWKVLEPMDPMTQKLRLLCRDEVVLIQQRTALVNQLQQALAEYYPAALEAFEDWTKDFAWDFVLQFSTPRLLVKAGQRRWEKFLHTHKLWRPETAQKRLRIFSQADQFQASAPIVEAKSQLAVSLAKLLRTLGQQLELYRQQIEQLFNEHPDHDLFGSLPGAKEVLAPRLLAAIGADPARYGSPEALQCIAGTAPVSYQSGKVNQVHVRWSCDKFLRYTVHLWADCFRKRSTWGETYYQNKRQQGMSHACALRCLGQRLLKIVFRMISDKAPYDAERHARNQKKHGSWVLQIINQSAAPACE

SEQ ID NO: 420499 - protein, 311 aa, unidentified
MEHSRFVGIDISKDHLDVHVRPTGDSFRVRDDDAGLVTLVAHLRPLAPVVLVLEATAGYEVTVAATLASAALPVAVVNPRQVRDFARATGQLAKTDTLDARVLALFAEAVRPAARPVPDARAAALGELIARRRQLVDMLGAEHNRRRLLRDRRLQRHLEAHIAWLEEALRRLDHDLTTLIRSTPVWRETDDLLRSVPGIGPVTAGTLIADLPERGRLDRRRIAALAGLAPIARDSGAFRGRRMIMGGRAHIRRVLYMATLTAITHNPVIRAFHQRRVAAGRPGKVALTAAMRKLLTILNAMLRDRRPWHPA

SEQ ID NO: 420500 - protein, 365 aa, unidentified
MQKISTMSTSGKNIFKGQLTIGLDLGDRSSSYCVLDEAGEIVLEQKLLTTPEAMKQIVERTPRSRVAMETGTHSPWVSRVLTALGHEVIVAHAQKVRLIVKSRRKDDRLDARTLARLARIDPELLSPVQHRSAQAQLHLTEIRARAGLVSARTALVNATRGLVKSYGERLRKCGTEQVRRETSSGLSAELREALEPLLQEIESLNERIQEYDRRIAKMAKQTYPETTLLKQVKGVGDLIAMTYVLTIEDPHRFRKSRDAGCFVGLQPGRRNSGESEPQMRISKEGNEYLRTLLVQGAHYILGPFGEDSDLRRWGKKLAARGGKNAKKRAVVAVARKLAVLLHRLWVSGEVYEPLRNSQKVMSAVA

SEQ ID NO: 420501 - protein, 409 aa, unidentified
MNTGTITAVGIDVSKHKSTVAARRPGGEVVLLPFDVEHTAEGLKKLITKLRQLDGEIRIIMEHTGMYWRPIAMTLKEAGFYVSVVNAILIHNFSDNSIRKVKTDRADAMKIANYGLTFWIDLQEYAGEDENRQLLKIQSRLYERTATTAGMLRNGLISLLDQTFPGANKLFRDDSRNSKGHVKWIDFVLRFWHKECVAALSLAAFTDTFQKWCKRTGYKFSASDAERIHAIARNAVATLPKNDSTKLLITQATNSLNAIYDSLQAIRTEMDRLASMLPEYELVMGMEGIGKVTGPQLMAEVGDVRRFSHKGALVAYAGVDASPYQSGSFDSKSRHVSKRGSPHLRRVLFVIMSMTLIRANTANPVFCFMDKKRAEGKHFYVYTVAGSAKFLRIYYAKVKEYLNALEETA

SEQ ID NO: 420502 - protein, 315 aa, unidentified
MTAEIFIGIDVARDNLEVAVRPAVEQWRVANDTAGIAELLVRVRALRPTLIVLEATGGLELPLLGVLGSAGLPVVAVNPRQVRDFAKATGKLAKTDALDAHVLAHFADAVRPAVRPLPDAATRALSALVARRRQLVEMLTAEENRRTSAAVPIRADIQEHIAWLRKRLRAIEKELSQALRNSPLWREQEDLLRSVPGIGPVVTVTLLADLPELGVVGRKQIGALVGLAPLNRDSGTFRGKRTVWGGRGAVRAALYMAALVGTRSNPVLKALYTRLLAAGKTKKLALTACMHKLLTILNALLKHRTLWTPPTTVGA

SEQ ID NO: 420503 - protein, 340 aa, unidentified
MNLLKQVLGIDVSQKELVVTLGRMNAELSIDLYARRVFANKETGFTALIKWVNKQSSGDTVVHYVMEATGVYHQKLAYFLDDGGYPLSIVLPNKISSYMRTLDNKTITDSTCADAIAQFGLERKLDRWKQPNIIYKRIQQLTRERNQVVEERVTAKCQLHAENAEAQPNANSVKRLKARIRFLTQQEKEIKQDIEKCIKEDEAVDSTIQNLTTIPGIGRLTAATVLAETNGFELIRNKKQLTSYAGLDVREKQSGTSVKGKPRISKKGNRNLRKAMYLPSLTAVRHVNDYKELYSRLVSKSGIKMKGLVAVQRKLLELTYVLFRNGTTFQNDYKKLKSAT

SEQ ID NO: 420504 - protein, 410 aa, unidentified
MHHKLKYLYIGVDLHKRHHTAVMMTCFHEKRDEIQFENKPSAFPKFLQQVEKLAKKEGLTPMFGLEDVGGYGRGLAMFLIENKYEVKAVNPALTISIRRSSPNNKKTDAWDAECVARILISNLDTLPTANPHDLYYAISQLVTRRENIVSVVTGIKLQLHQLLGYHYPSYKKFFSQVDGKTALAFWLKYPSPSCLRGVSVDELATFLYKKSNRYMSTKKAKDILSLVQQDGDTSKDYQGVNDFLVKNVVRDLIARDHQLSQIDTELAKHLALLDYKLETMHGISTVTAAELIAEIGDISRFSNADKLANFAGIAPVQHSSGNKQKSKKSKLGNRSLYDIFYNLAIRQLGVSRAKKPNHPVYHAYYERKLAEGKTKWQAIICVMRKLVNVIYSMMKNKTEYKMPVLTEQVA

SEQ ID NO: 420505 - protein, 386 aa, unidentified
MPQLNDLSRSLVTLEQDATLIAVIEMGQSSWLVAGIVPGVERQPLKKLAVDESALLKLLHRWREEAEQAGHKIKRIAVAFEAGRDGFWLARWLRARDIEVHVIHASSVAVSREHRRAKTDRLDTELLKRVFLGWLRGERHHCKMVAIPTIKDEDGKRPNRERESLVGEQSRIINRIKATLVRLGIRGFNPKLKKAAERLEGLRTPEGEPIPPNTLSELHRDMERRRLVRDQIRQIESARLDHLEHEPGEAGHAMVRLLARVMGIGIETADMLVQEVLSRNLRDRRAVARYAGLTGSPDESGKKRREKGLARSGNPRVRRGMIQLAWRFLMFQKDSALAQGFRARTENARGTRKTMIVALARKLLIALWRLVRDGVVPDGVILRPAQ

SEQ ID NO: 420506 - protein, 354 aa, unidentified
MATSSNEAMADLASIGIDIGKDVFHIVGFDPDGRIVLRRKFKRLALVSEFERIPRCIVGMEACLSAHFVSRTLRRLGFEPRIIPAIYVKPFLKGQKNDYNDAEAIAEAALRPNLRVVREKTQDQLDLQACHRIRARLVSRRTATINQIRAFLIEQGIAVRTGAHALRKSLLEILDKRRDEISPRMHGLIIGLYEDWLWLDERVETVTGEIEAISKCEANCQRLMSVPGIGPIISTAMVAAIGTGEAFGRGRDFGAWLGLVPRQYSTGGRPILGRISKRGSRYLRTLFIQAAHVILMRPHNWEKFSFGAWLTQAATRPHRNKLAVALANKLARIAWSVLRHEKTFDAQRHEVEAI

SEQ ID NO: 420507 - protein, 441 aa, unidentified
MMAMRKRTDTVFPNAAGIDVGASSHWVAVPPDAAEESVREFGVMTDDLRALADWLMACKVEIVSLESTGVYWIPLFETLEQRGLQVRLADARQMKDVPGRKSDVQDCQWLQRLMSYGLLRAAWRPAGEVCELRAIARLRETLLAEQASWVQRMQKALVQMNIQLTEVLTDVMGMSGQAIIRDIVAGERNPEVLARHRHRRVKASTEEVIRALTGNWRQEHLFVLGQALSMYDDIARHLRECDAQMQVLLGQRAQCAINVGAVPRAGSKARAAFDVRQMLANWAGVDLTRINGLEVSSVMKILTEIGPDLSRFANVKHFCSWLGLCPGTKVSGGKVLSAGTKRSANRVRQALKMAAMTLSHSNSALGAFYRRLCSRMDKPKANTATAHKLARMVYFMLTRGEAFVDQGQQRYEELQRERSIAALKRRATALGFQINPIGAAA

SEQ ID NO: 420508 - protein, 410 aa, unidentified
MEPIIERACGLDVHQETIVACLLVGKPDQRPRKELKTFRTVTQELLALRQWLQDAGCTHVAMESSGVYWKPVYALLEDAFELIVGNAQHIKNVPGRKTDVKDAEWIADLVRHGLIRKSFVPPKPIRDLRDVVRYRRKVVQGRATERNRLLKLLETANIKLSSFLSNVFGASGMAMLHALIEGQLTPQDMAQLAKGRLRNKLADVELALDGRLQEHHRFLLRMQIERLEQANAQVQALDELIHEKLGPYREDAKRLATVPGVSTVVISELIAEMGTDMTAFQDEARLASWAGVCPGNHESAGKRKRGTKRNGNVHLTTALVEAAQAGIKKKGSYLRDKFHRLKARRGYKRALVAIAHKILIASYHVLRDRTDYRDLGETYLDRLAKHRVTSSLVRRLEKLGYDVRLEPKAA

SEQ ID NO: 420509 - protein, 343 aa, unidentified
MSKYSVQGGDAAALLGLLSRLRARAERRVGSPVGIVTVQEAGFDGFWIHRVLQANGIESHVVEAASIAVPRRHRRAKTDAIDGEALLRTLMAFKRGEPRVCSMVVPPSPEAEDRRRVARERRTLIKERIGHINRIKGLLAAQGIGDYEPMRRDCRERLEGLQTGDGRALPPRLKTEIGRELDRLELVRRQIAAVEAERAALVQEELPARSPAGVLMRLRGIGPEFAAVLWLEGFFRRFANRRQLAAYAGLAPSPWQSGSMNGEQGISKSGNPRLRTTAIELAWLWLRHQPETALSRWFLERVRSERGRVRRVAIVALARKLLVALWRCVTDGVVPDGAKLKAA

SEQ ID NO: 420510 - protein, 320 aa, unidentified
MSQNNITTNYIGVDVAKKSLDLSGLGRSEELPNDAKGHRRFLSLLAKSAQPVHVILEASGGYEQALVRLLHEAKVAVSVLEPSRVRGFAQAKGLRAKTDSIDASVLRAFGEAIRPQPSLAPRPEQLRLAELVTRRAQLIESEVAESNRSAHYLDPILRRQAGVYLRLLARQIQQCEKVIAQLIEANQSLRQRSQRLQQVCGVGSITAATLLADMPELGSLRDESAAALAGVAPYNNDSGPVRGIRCIRGGRASVRRALYMAALSAVRYDAVLKRFYQRLRSAGKKPLVALVAVMRKLIILLNRMLKNPDFALQSASGTEN

SEQ ID NO: 420511 - protein, 422 aa, unidentified
MPYRIAGIDVHKRMLAVAVADVEVVGEFTCERRQFGSTPAQLHVLAGWLVEQQAEEVVMESTAQYWKPVWAVLERDWTPRARQRDGAGRRAGVLHLAQAQSNRARPGRKRDFADAERLVKRLVAHELTLSFVPDPAQRLWRTLTRTKHQLTRNRVQLQNRLEALLEEAHIKLSSLVSDLLGVSARRMLQAVADGATDPGALAALAHSGMRATPEQLRDSLGACQDLNPVYRRLVRLALEDLQLLERQIDQVDQELATLLGPHQDQVQRLADVPGLGVDSAQQIIAEVGVTATTFPSANHLASWVGACPGDDETAGVSRSHRSPKGNRQMRRILNQAANSAAKYKGSLFQTLHRRYVPRLGHNHTIAIIAHRLCRLIWKILHQGVRYEERGPALNERSKRARAARMIRELRSLGYRVDLAVAQ

SEQ ID NO: 420512 - protein, 344 aa, unidentified
MEITTIGLDLAKRVFQVHGVDAAGAVIVRKALRRAQVLPFFAKLPSCLVGIEACGTSHHWARELTRLGHRVRLMPPAYVKAYVKRGKNDASDAEAICEAVTRPTMRFVAVKSREQQAALSIHRTRDLLVRQRTQLINMIRGLHAEFGIDIPVGLERALLMARQIVDGDAPDVPGEAIRIIAVLSKHALETHAQLREIDRSLVALQNRNDVARRLATIPGIGPVGATALAASVTDPGQFRSGRQFAAWLGLTPLQNSSGGKERLGHITKMGDRYLRKLLVIGATSLVRRIKHKPDTVDPRLVDLLARKPVRVATVAMANKMARTVWAIMTRGETYQARHRPALAG

SEQ ID NO: 420513 - protein, 383 aa, unidentified
MKQEKYIGMDVHQATISVAVMESSGKLVMECILETKAATILEFLDGLRGSLSVTFEEGTSAAWLHDLLKPHVTRLLVCDPRKNALLKDGSKSDRIDARKLAELLRGNQLHPVYHGEHGVRTLKELARSYRTLTQDVSRVMTRIKALYRSWAIPCSGTTVYAPRSRAEWLAKIPQPGVRLRAERLYQQLDLLQPVRQEARRDVLSESRRHPAVKLLRQIPAIGPIRAAMLVALLQTPHRFRSKRQLWACSGFAIETHDSGEYRYVRGKLQRNRERITVRGLNGNHNHDLKNLFKGAALSASTRPGPLYDFYVALLEKGMRPDDGASHLGQKDCRDHLNDLEERSKFRRQTIASASRLSVSGSRPFHLRRFSGGRRSVLETLGSR

SEQ ID NO: 420514 - protein, 339 aa, unidentified
MGILYVGIELAKNVFAVHGGDEHGKAVLVRPSVARAKLHELIATLPACTIGMEACSGAHHWARLFLQHGHTVRLMAPKFVAPYRLSGKQGKNDAADAMAICEAVQRPNMRFVPVKSQDEQARLCVHRVRQGLVEQRTATINRIRGLLAEFGIVLPQRAATVRREATVHLEDLPGWANTAIGDLLSDVHRLDERIAEYDHHVLQMARDDQRSRALMQLSGIGNTTASALVSTIGNAHDFKNGRQLAAWLGLVPGQYSSGGKTRLGSITKAGDRYLRTLLVLGARAVLAAARTKVDRLSRWALALEERRGYWKAVVAIAAKNARMAWAVLAKGENFKLLEA

SEQ ID NO: 420515 - protein, 418 aa, unidentified
MRVAIDVAKLTHQVLLELPSGQRRAMRIANTKTEIDRFVAMLCAFRLPCEIAFEPTGDYHRPLGYLLGQAGFHLSLVSSIAVARTREALYNSWDKNDPKDAQVILHLLKNGTTQRYLDPVVTGHQDLQEMANTYQQVSLRKVRLQHSLITHHLPLYFPEAERYLHSSRAEWFTQLLLFAPCPAAVRQYTKAAFVAAAREEIAGRKVDKARWLADFYETACTSVGLPVAATSETIRMFRVVLEEYRALCQLRKRLETEIATQLATLPDFVRLQTIPGIGPILAMIILAEARDLRRFGCVRQFLKYCGFDLCTEQSGQFRGTTHLSKRGNARLRYAFWMAGTVAIRMQQNSFRRKFEDYIRPDPKSADRRRKGYTAVAAKMARVAYAVVTTGTEYRRFQEATRPGGRIPSPGAVEAHATS

SEQ ID NO: 420516 - protein, 396 aa, unidentified
MISVGIDVSKGKSTVCILKPYGEIVSKPFNITHTHKDLSELSSMLFRLNDEVKIVMEATGIYHLPVLTYLQEKGFFVSVINPYLMKSYRNESLRKAKTDKIDSRIIANYGIDHWFKMKEFQTSGEIYEELKLLGQQYRHYMKLHLLSLAELTHLLDLTMPGIKNLLASWNETNRKDKRSDFVERFWHYDVITSMSEQEFTEEYILWAKEKKYVPSQEKAKVIYTLAQESIPTLPSETSSVKMLVTEAVRVLKEVDATLGLILSRMQEIAKTLPEYSVVREMGGVGNTLAPKLIAEIGDVRRFRNGKALVAFAGIDPPPYESGQFVGCNRKISKRGSASLRKVGYETMRSLKMRSRPEDPVYRYVVKKESEGKSKKSAKIAGLNKFLRIYYARVTEL

SEQ ID NO: 420517 - protein, 370 aa, unidentified
MENRSMFVGLDVHKETIDISIAEGERHGEVRHYGVIASDLEPLDKVVRALRAPDRRLHFVYEAGPCGFGIYRHLTNCGEACVVVSPSMIPKRSGDRVKTDRRDSQMLARLHRAGELRAIYVPDDTDEAMRDLVRAREDAVGVGTQAKYRLKAFLLRQGRRYPGREGWTLPYRRWLSDLSFPNAAQHIALQEYRDAIAETEQRIVRLTDQLRQLAPTWRWAPVVAALQALRGVSFITAVALVAELGDLTRFRHPRELMAYLGLVPSEYSSGPQVRRGAITKAGNPHVRRLLAESAWAYQGIPRIGRRHADRQDALPKVVCDIAWKAQLRLTTRFRRLVARGKAKPKVATAIARELSGFVWAIAREVSPTPR

SEQ ID NO: 420518 - protein, 396 aa, unidentified
MSAQALGWDIHRKFSKVSVEQMTAEGEILVVERARLEHGDRQGMQRWLARVPKGTPVALEAAYGWPWIADLLEEMGLEPHLAHPPAVKVLAKTEAKGDRIDADRLGKFQLRGILPQSYLATAEVRMRRERIRYRMALSCLRTGVKNRIQAILHRLGILHPFSDLFGKQGRRFLQSLALPQASHQVLRGYLQLLDRIGGLIAEVEDWMAANLQADEIVQLLATIPGIGLILAHVIYAEIGEIERFPSRRHLNSYAGLAPLSDDSAARHGQRHCGLACNHALRWALIEAVTGVLSTRGPRGQRLRKLYARLTHGGRYNKSQAKVAVARELCQLVYTIWTNRSPYSDNPPPRPGTVQDCAGPASDERRQTKAVQQAMRSDQPRFPMVRRRPSAAGQTRL

SEQ ID NO: 420519 - protein, 369 aa, unidentified
MAELAVKLSQKLEPQSTRKSEEDPRKAGLPGPNRDRLTVGVDLGDKWSNFCILGLDGEKLTEGELRTTPQDFAEFFQAMAGARVVMEVGTHSAWARDVVARSGHEVLVANPRQMEGPKQRKRKNDRVDAHKLARVGRMDPQSLFAIEHRSVEVRQDLVALRARHAVVAVRKDLINTVRGLVKSMGTRLPKCSTESFAKKVEGALPTEVRDALLPLVRLVEALSSSIKGYDERIEKLATEKYPHTKLLRQVKGVGPLTSLAYVLTLQDPQRFVKSRDVGPYLGLVPKQEDSGDSQPQLRITKMGDMMLRQLLVERAHYILGPFGSDTDLRRYGLPAERARREECQEAGRGGGGAKAGGITALSLGERRGI

SEQ ID NO: 420520 - protein, 416 aa, unidentified
MNAVGIDVSSRKSTVAVLRPLGEVVCLPFDVTHDIAGLASLVEKLKALDGETRVVMEHTGRYYEAVEKALHEAGLFVCAVNPLLIKEYGANSLRRVKTDKADAVKIARYALDNWADLRDFTPMDAIRYDLKTLNRQFQLASKQRTASANNLIALLEQSFPGIRKCFDSPVRSDGTQKWVDFAHSFWHVDCVRKQPFPAFCERYRKWCKRHTYFFKLRNAEKVYALAKRAVVLTPKAKVVKVLVQEAANQLSSISRSVEVYRAEMDRLAAMLPEYPVVMAMYGVGKSYGPQLMAEIGDVRRFERKQALVAFAGIDPMPNQSGDKNVRSNKSSKRGSPYLRKTLFNVIRTYLQCAPQDEPVFQFLNRKRAEGKPFYVYMLAAANKFLRRYYAKLRDFFASLDTLQPVAPIPTILKATL

SEQ ID NO: 420521 - protein, 340 aa, unidentified
MGEYIGLDVSLKETAVSIRRGGKRVWRGKYLSDPAAIAALIRKHAPAAERVVFETGPLSIWFYHALTAEGLPAICIDARHAKAALDMAANKTDANDADGLAHLAEVGFYKEVRVKSFDSMLARTLVAARTRLVRIGTELSNQIRGLMKTFGLVVPPASGSKFEREVEALLADNADLGRIIRPLLEAWHAVRLRAAELGRKLLADARRSDACQLLMSIPGVGVVTATSFITAIEDPTNFKRSRSVGAWVGLTTRRYQSGEIDYDGHISRRGDSHLRGLLYEAATVLLVRSRSECDLRKWGLQLRERVGFKRAAVAVARKLAVIMHTMLVTGEPFQQTRASA

SEQ ID NO: 420522 - protein, 371 aa, unidentified
MGKCIMVGCDLHDKNMLLKIAQGRGKAVKRSYRNDASGRKAMITALKKRASVAGGAKIIFAYEASGLGFGLCDELTEAGIKCHVLAPTKIARSVSQRRSKTDEKDADAILALLRAHVLAGNELPTVWVPDPQTRDDREVVRARLDAAQKLTGLKSQIRTLLKRNGTSKPSVLGKGWTKGYRAWLRGLLGDGSPLRCGARVGLGTLLRQLEFIEEEIALLDREVAALGETPRYLRAVRMMNCLKGVGVLTAMVFLTEMGDMSRFSNRRQVGAYLGLAPSSHESGESDDRKGHITHHGNARVRKVLCQATWSRVRTDSKEKAVYERIAAKNPKHKKIAVVAAMRRLAIRLWHIGLKAQGRDVPFWEDAKPAVV

SEQ ID NO: 420523 - protein, 396 aa, unidentified
MALIWAGTDIGKTHHHCVVLDADGTRLLSRRVLNDEPELLALLVDVMAIDEDVVWAVDVADGMAALWINLLLNHGQQLVYIPGLAVNRAAAGYRGTGKTDAKDATVIADQARMRRDLTTLRPDDEHALELRVLTGRRADISADRTRRINRLRGQLTSIFPALERELDLGNVGPLVLLTGYQTPAALRRAGRKRLETWLRNRKVRGAESLAQAVLDAAERQQTALPGEKITAQVIHTLAKEVMGLNEQLVEIDKLIAARFREHGLAEVIESMPGIGPLMGAEFLAATAGDMSRYGSADRLASMAGVAPTPRDSGSVSGNLHRPRRYHRGLQRVFYTSALISIRNCDASRRFYERKRAEGKRHVQAVLALARRRVNVLWALIRDGRCYQDGLSVMSVA

SEQ ID NO: 420524 - protein, 400 aa, unidentified
MISIGIDISKEKSTVCMLRPYGEVVEPPYDVAHNESELNALIEHIQSFDEDVKVVLEATGGYHHIVVSKMLSAGIFTVVVNPYIMKKYCAATLRKAKTDKIDSVKIANYGIDHWFSMTAYCPPDEVYAELKLLGRQYEQYVRLKVGCKIHLAELLDGVLPGIKKILTGNVPAFSTKDKLCDFVEKYWHYDHIKKLSEEQFLVSYEKWSKKKGYRYNESQAIAIYQLSKNNIPTLKSSTPSTKMLVLQAVKSVRDAELTLSLIISQMQEIASALPEYSVVNEMKGVGTVLSVRLIAEIGDVRRFHNGSALVAFAGIDAPPYESGSFVGTNRHISKRGSASLRKIGYEIMHALKVTKPTDDSAVYDFMIKKENEGKPKRVAKIAGFNKFLRIYYARVMEVYC

SEQ ID NO: 420525 - protein, 371 aa, unidentified
MVAKRVAGTSPRRSGSSVGTLELAKATRPRKKVPVSREYVGIDLHRCRSVIVRKNADGELLSKTRIVNDPEEMIRAVAAAGPEPEVVLEATFGWYWAADLLAELGAHVHLAHPLGNNWGNRRVKNDERDANDLVDLLRLGRLSEAWIAPPEIRELRELVRYRAKLVRLRSGLKAQVHAVMGKHGVLPTRVDMFGLGGTAQLNALDLPGGYAWRLKSLRDLIGVYDKEVARLDKTIAAQMRNDRGYRAIQAIDGVGPVLGAVMVAEIGDITRFPSPDRLCSWAGLTPKHRESDTKVRRGSISKQGSRLLRWAAVEAAAKNHAGGDFKVFYRRIAERRGRNVAKIAAARKLLTLVFYGLRDGEIRCLANPARG

SEQ ID NO: 420526 - protein, 282 aa, unidentified
MSLSAKIIWCGRVSIRDGLDNFIKALLPYCQDFDHVAVVESTYNWYCLADVFKERGWLLRIADPSTVSQANLKASDDRTDAQYLAERLRVGSLKHYLPLNYSSRALRDLCRYRMAMVQDCASLKIKLINLYRNQLSKNLRVADLLDQCRNHMQSNYRFDPDILEEFKDPNIRLRVAFEVSRIAMLEEMIEECNAEIQKQCKDQELVKLCKTIPGCGPVLSAVICTDIGTMQRFKSAGDFVSYCRLCSTSKLSNGKSKGLGNAKNGNAYLSWAFTEIENAHPE

SEQ ID NO: 420527 - protein, 354 aa, unidentified
MKRARTELQPGERVFVGIDLHNNKWHVTVRTAELELFSGSIPGKWEALKRILYHYKGHRIHTVYEAGYFGFWLHDRLVDYGAGCIVTPPSLIPQEYGNKVKTDRRDSRKLAHFLAKGMLKRVWVPTEKERYHRQVIRRRRQLVRDRTRTQSRIKAELRLYGIDLTSPYGRWTKTYLANLGRIRFRNRFMQESFNRLLEQYYFLDEQITKQTELLRELSETKLYRERVEILTTIPGIGMIAAMELLLELQDITRFQRADQLAAYVGLTPSQYTSADKVRMGRITCVGKNSLRAMLIQASWTLIRKDGVMREKYDRLKSRSGGKRAIVAVARTLLIRVRRLLLDNNPYVVGLVATN

SEQ ID NO: 420528 - protein, 343 aa, unidentified
MELYVGMDISLKETSICVVDGDGEIRCEGTVFSEPTAIAGFIDAKAPHAKRIGLETGPTSTWLWHELKGLGLPVICIDARHAKAALSLQINKSDRNDAVGLARIMQCGWYKEVQVKRLSCHEVRAVLNSRAQLIKIRVNLENQIRGLLKNLGLIIGKAGGNVFSQRVEELLAEQSVLQEAVGPLLEVREKVRLEIAGLFRKLRSLARGDVDCRRSMTVPGVGPITALTFYATIDDPSRFRRSRSVGAYIGLTSRRHASGEIDWSGRISKCGDAMLRAYLFEAAGVLLTRAPKWCALKAWGHRLWKRIGFNKAKVALARKLAVILHRMWRDGTDYIWSNKETTA

SEQ ID NO: 420529 - protein, 411 aa, unidentified
MNPVIGLDVSKGESEVQAFLDKGKPYRKSFSIKHDLDGLGSLLEFLKDIKDKTGLQPSVVLEATGHYHAPVVQFLEEHQYLLIIVNPLISHRAKSSSLRKVKTDAIDAYRLCELYYKEDLEPYKKRGIQLLNLRNLTRQHENITGMYVQTKLQFQAVLDQIFPEYRGVFGDLYSVVSLHILQEYPVSEDILAVSEDALADRIKELCKSRSKRWAVEKSQKLKAAAARNPFQKTLYQSHLLSLSMYINMLLQYKEHLSELDAEIDTLAKEIEEYKIIQSIPGIGEKIAATIISEIGEIDRFNHPKKLVAFAGVDPEVFESGKFKATLVRITKRGSSRLRHALYMAVRSGIRDCRKQKTTDEIIPRNKRLREFYDKKREEGKLYKVAVIACVNKLLHWIYAILKNRTTFQDIA

SEQ ID NO: 420530 - protein, 493 aa, unidentified
MDDRRLVGIDLGITSAHTVRVLAGDGSLVCRRKALPTVDSLGEVERAALAGTPAGTRLEVVMEPTGPAWLPIAVFFTSRGHTVYRVSSTKAHDLRRVLSRHAKSNGIDADTLARLPLVDPAGLHPLQLPDAARAALDRRVRACDRLTQQAATHKRRIKDLVQQLLPASPLVGELGQADLAVLERWADPHALVAAGHARLQRLLATASAGQQSAHRAAQWLAAAHAALQLYGDHPAIAFTELAAEVTSEVRLLRATQAELAAHARQREACYRRVDPAALARRLPGLATIGGPALVATMGKASRFATAGKFRSFTGLAPKASETGQVDRKGQPITKAGNKLLRTTLVRAADHARRQDPQLARIYWIQMVQRGKDHLGATCVVAAHLAERAWTVMDRGTPYVVCDTDGTPVTPAQAKAIIAEHWTVPEQVRRQRRSRKGRPLSKSSPDMRMALEAQRGDPPPHRPLLVASPAASSRPTRNLDSQASIGNQTISIRE

SEQ ID NO: 420531 - protein, 321 aa, unidentified
MSKVIGIDISKQTFDVCWKEKDKNVSMAFPNNQEGFKSFFKHLKKGDHCVMEASGTYFLKLAMFLHTRKVNVSVVNPLVIKRYCQMKLTRTKTDKKDAQMICEYGREQKPEFWQPDPNYIKEMNNIITTIQGYEKMATQVSNQMEAERQLDIINTVAKASKEFILAHLEQEIDKLQEELKALAEKHCPDTLAKLTTIPGIGIKTAVVLIAITGNFEYFDDARALSAYCGMCPRIYQSGTSVKGKEHICKMGGSRIRKLLYVCAWSAQRHNPQCKELKERLEAKHKPGKVISIAIANKLLRVAFGVVKSNKDYDKTKGLKVA

SEQ ID NO: 420532 - protein, 386 aa, unidentified
MQRNDLSRSLVAFDQNSTLVAVVELSLKKWLVGGLVPGLEKQPLKKLDADAGALLGLIDRWRNEGIKGGGKISRIVVTFEAGRDGFWLARWLLAHGIEVHVIHPTSVPVSREQRRAKSDRLDTQLLMRAILGWLRGERKHCQMVAIPTLEEEDARRPNREHKTLVEERTRIVCRMKSILARHGIRDFNPTRKKAAERLEKLCCPEGGSLPPNTLAELRREMALVRVIGDQVKAIEKAREQRLKQAPRAGTHPMVLMLAKIKGIGIETADMLVHEVLSRKLRDERALGRYAGMTGAPDESGNKRREKGLARAGNARVRRGMVQLAWRWLMFQKGSALATWFAARTAGSRKDVRKTMVVALARKLLIALWRYVTTGEVPAGIELRVAA

SEQ ID NO: 420533 - protein, 316 aa, unidentified
MEDVLTFVGIDVSKARLDVASHPAGATQSVANDETGIKTLVEQLRAIKPASIVLEATGGIERSVVRALVAAELPVTVANPRQVRDFAKATGQLAKTDVLDAQILARFAEAVRPVLRPLPDEMTLELRALIARRRQISEMLTAEKNRLSRAPRRVQKRIEAHIRWLEGELERYEEDLDQTIRQSPIWREQEDLLKSVPGIGSVISRTMLAELPELGNLNRKQIAALVGVAPLNWDSGLMRGRRVIWGGRAHVRTALYMGALTASRRNPVIRDFYKRLRAAGKKPNVALVACMRKLLVILNAILKHRVPWRPVVAQIS

SEQ ID NO: 420534 - protein, 312 aa, unidentified
MTFLHHAPVRCLGVDVARDRLAVDDGITAATVANSRAAIRSLLRTSRPDLVVCEPTGGYELLLLEECLRAGIACHRADTLRLKAFIRSFGTLGKSDAIDAAQMAAYGRERWTKLPLWQAPDADEKQMQALVRRRADLVAFKVAEQNRSRAPGARAMAASFRAMLATITRQIAALERAIAALVAQNAGLRHRVAICTGMNGIGTVSAVTILALMPELGHLQRRQAAALAGTAPHPNESGTARGRRRQRGGRPQVRTALFMPALRAAAGQGEFAAFYARLIANGKPPILAIAATMRKIIITLNARLRDNQNHQS

SEQ ID NO: 420535 - protein, 361 aa, unidentified
MSCSGLSAVVDRIVCVSGPSAQVKVGVEAAGHYHRPVLDYAWPPGWEVLELNPAHVTEQRRVAGRRRVKTDVIDLEAITELVLAGRGQPVLVAETVLGQIAAWAAHRSRRVAVRSATKNQLLGQLDRTFPGVSRALPDVLGTKIGRLVAAEFADPARLAALGVSGLIRFAAGCDVQLRRPLAERLVTAGREALPTADAVVARRVLAADLVLLADLDTQVGAAEAELATLVPHSRFATLTTVPGWGVVRVANYAAAVGDPRRWPGPRQIYRAAGLSPMQYESAGKRRDGTISREGSVGLRRALIDLGLGLRLTDPAARTYAAGLKARGKHGGIITCALAHRATRIAYALVRDHASYDPMRWT

SEQ ID NO: 420536 - protein, 474 aa, unidentified
MGARDAIGIDPDSKGFVCAHVKVSEPAVATRRYVASDSDLKAFLRWVQGQGDVIVAIEGSNGLSRPLEKALRETGVIFYSLQPADTEKFRKAVLGQNKDNRKDAESVARYAMAMEAQGLLQRYRRVWFADPELQLLSRSYERKSQEATAEVNRLWKLIRLASPDLYLALGGRHPEVELSENALKTQGILSLLSQKPDLGQWKALSEQQMLEAMGGGKYKGRQNLIEQLHKLAGVFTSVSAPMALMIRSSAEQIQRFKREQAEITKMLEVVTADTMAVQALTQTRGIATITAATMIAEIVDIRRFPREDSLACYSGLGMREHSTGETLRMVRSQLFNHRLKDAFMTAARNVVLYNPDSHLAGYHRNLMKAGMSSMEATKRAARALVRVIYRKLLALIKEQNTEATAQEAGEKGEGDMANGSLRSDQSHTSDISPSSPHTSKARATKNVKRTAAPSSSSSDSARDRRREPASKNRS

SEQ ID NO: 420537 - protein, 385 aa, unidentified
MNTQNFIAHEFDIFGGLDVDKKSIAVTFMNQRGILRSFSMPNRTDHLLNYVGKQFQGKKIAFAYEAGPTGWGLYDKLTAEGYPCVVAAPSMIPKVRGQRVKTNRLDSVRLSEDLRGGQLKSVHVPSESYRQLRQLVQLRDTFVKEIVATKLRIKALLLFEGLEFPKAPAGSQWSLIVRGKLKKLSCSPAVRFKLDQLMESLESTEKRALNTIKEIRRFYRQDPELCQAMALLKTIPGIGEIVASHVLARIGDPQQITNVRQLAGFIGLVPTEHSTGDRVARGAITRSGDGRLRSKLIQAAWSAIRQDPELREFYRSVYHRHPRDRGARKAIVAVARKLTTRIYAVLKQQRPYVVREMVHSAPLTQEETSPQGTTRRLAEPGDTFS

SEQ ID NO: 420538 - protein, 342 aa, unidentified
MYYIGLDVHKKTISYCVKDASGRICQEGKVGATRWELDLWIKALPQPWTVAMEATIFTGWIYDHLKPHAVDVKVAHPLMLRAIAASKKKNDSIDAGKIADCLRCDFLPECYMAATEIRERRRTLRYRHLLVRQMVQMKNRVSGLLMETGVSHNKQRLHKVGYFPELLANADAVSASIRPLLQLSRESITRLQRTEGAIIRALQRDPLLAERVRRLQTIPAVGKVTALSWALEMGDISRFRSIRQAISYCGLCGDEKRSADKVARTPISKQRNKHIQRVLVEAAKLAPRRNPDLALVYENARQKGNANCATLAVARKLVAYLMVVDREQRDFEPVHGLAGTAA

SEQ ID NO: 420539 - protein, 477 aa, unidentified
MLFDAVGRPPASNLNQRNGMAPRRKGNPPKSKTSSPQLPVLHPHAAGIDIGAREIYVAVPPDVCVRNVRSFPTFTEDLHALRDWLQDGGVTTVAMESTGVYWIPLFQILEAAGIEVCLVNARHCQNLPGRKTDVQDCQWLQYLHSVGLLRGSFRPADQVCAVRAILRHRDALVRGAGRCVSHLHKALTQMNVQLHHVISDLTGVTGQAILTAILGGERDPQKLAALKDHRIKASRDVIAKSLRGDWRSEHLFTLRQTHALWQQHQSLIAECDAQIEAMLRAFDARVDVAAAPLPPPTKTSHRKAQRNEPQFAAREECYRVLGVDLTVVPGFQTPTVLVLLCELGPEFAEKFATAKHFGSWLGLCPDNRITGGKIYSVRTRDVKSRVAEALRLAAQSLWQAKNYFGELYRRWKARLGSPKAITAMAHKLARILWHLLKYKQPFNPEVFAKEEEKMKRKKLNRLHNMAASLNYCLVPHQ

SEQ ID NO: 420540 - protein, 407 aa, unidentified
MICVGIDVSKRKSTVCFMAPGDKIIRRPFDVKHTKEELQPLVDEIRVQAKYDEIKVVMESTGVYHLSIAYFLQQNGIFVSVVNALKVANFNKAENFRHTKTDSIDSTNIARYGIAYWAKLPQFDLNGDKYFLLKRLCDAYLNFSEERSRILLQLQSQLEQTMPGIFDLFGGFDINSGKDKLLDFLERYCHIEDIIAKSEAEFVASYREWAKEKGYRSNESKAATIYAQAKNGIPSIPNNPIVRETIMWYVGLLRRADEALMASLTRLEDIAKDLPEYELVGEMGGVGRVTRVALIAQIGDVRRFKNKHSLICFAGLTPSIHESGKFRASQNHIVKKGPARLRKVLYQVMMSLVMHKIPKDDAVYRFIKKKEAEGKYKKVAKVAGMAKFLRIYYGRVMHLYRDLGLAA

SEQ ID NO: 420541 - protein, 412 aa, unidentified
MNIRVEKACGIDIHQAFLVATMLDLAGTKDTRRFSTCIEDLLNLREWLLDSKCQRVAIESTGVYWIPTYTLLEGKVETIVANPLQIKNIPGRKNDDIDSEWIAEVCLNGQIKPSYIPPKEIREIRELTRSHVKLTQAKTSFKNRVHKVLSRAGIHVSGVLSDIFGKSGIIILNGILNGKTIDQTLAEIKDKRIKIKKMEIKDSLKGELSQNDIFVIKECIDSIKFLDQKIKEFDSKINQNLNGLQKEMEIVMSIPGVGFTTAAAVMAEIGNIEEFSKPKQLVGWSGLAPAINESAGKSSNGHITKRGNKFLRTILVLAANSIAIGRPNKLRFFYERIKAKKGHKKAIVALARKLVSIIHHLLMFKEMYSEEEMKQKNFKLPKFIPVPDFSIDDMIGILCEAGYSVNKTAVKT

SEQ ID NO: 420542 - protein, 393 aa, unidentified
MQTIVGIDVGKFNHQATILDPDGNPVGGTIRFENTALGFGRLLTHLEKLIDTKTKQHILVALEATGHYWLPLYLFMLDKGYKVQVFNPYQSDALRKMYMGRAKTDTIDAELVARLARFGNQKETPLPGEEILTLRNLSRFRMELVFQSSDVKRKVIAVLDVLFPEFEKLFSDVFGKSAQAILRESPTPEEIVVLDEKKLIEILETTSRKRLGIVTAEKLKSAARTSIGSTFATKALVFELKLLLQQVEFLKVQLEELKTEITMLLSPIEQKLTTIPGVGTTTAAVIIGELGDLTRFPNVASVIAYAGLDPKVSDSGTTSKQRSVSKRGSKYLRTAIWQAAVASLVHNPELRTFYKKKCSEGKPKQVAIGAVANKLTRIMYGIMRSGQKYQTVM

SEQ ID NO: 420543 - protein, 311 aa, unidentified
MKQSVVYIGIDVAKAHLDVAWGGASRRFANDQKGRAALINWIKQSSDPSAVQLICEASGGYEQALLESLKQNNLKATLVQAMRVRQYARAAGILAKTDKIDAKVLAAFGSAMQPKPTQPPSAEQKRLRELEAQRRHLSRVLLGEENRLGQMSCAELRSLSRSLINKINKQIALLDARIECLIAQDRTLCAKAQKLTAISGVGARTAALLLAQMPELGRLNRRQAAALAGLAPFNHDSGSIRGKRAIFGGRPALRSGLYMAALSAARYNPILSNFYRRLRVKGKPHKLALTAVMRKLLLALNSTLKPIARPP

SEQ ID NO: 420544 - protein, 475 aa, unidentified
MSDPKQQQSTTKSKPKAARSKRASRGKQMDRPLFEPNAAGIDIGAREIFVAVPPERDTDPVRKCETFTGDLHQMAEWLLSCGITTAAMEATGVYWIPVYEVLEQHGIKPCLVNPRNMKNVPGKRTDFHECQWIQHLHSLGLLHSAFRPDGEVCAVRSLMRHRNDLVEMASQHIQQMKKALVQMNVQFQHVISDITGLTGLAILDAILAGERDSAVLAKLRDPRIKASDETIRKSLEGNWRAEHILALKQRLSLYRTYRDQISDCDKEIEKLVAAFEPRVDPTEKPMPEDRKQKQRKRKKKSGNPDFNMRSEAYKLFGVDLTQIPGLMALVFMLFSEVGRDMSRWPTAGHFVSWLGLCPDNDISGGKVLWRGVRRTKNRAGTLFRLAAHSLHRDQTPMGNYLRRMKAKLGPAAATTATAHKIAIIFYTMVKQQVEYDASLWAQRDQMREKRLEARLHKQAAQRGYKLVPMEEKTAA

SEQ ID NO: 420545 - protein, 314 aa, unidentified
MTDKLFIGVDVSKDWLDIARNDRGEVERIDNTTQAVANFLARLEPPPGLVVFESTGGYERPLRAGLLAAGVAFARVHPNEIAAFKARRGARAKTDQIDARQLAAFGASELATRGLRPLVEGDDDLREMTTRRRQLVDLLQAERCRAAIADNGVVRHSLASLIATLEKACDDIEAEIDAHIAKSAELAKIAELLRSLKGVGPVTVHTLLGELPELGRLTGKEISALVGLAPRTNQSGKRSFRATTGHGRPGVRRVLFNAARAAIRWNPVMREFYQRLVVENRRPGKVALTAVMHKMLVVLNAIAKENKPWKHAVA

SEQ ID NO: 420546 - protein, 371 aa, unidentified
MKHNSIFIGMDVHKNSIDIAIAESGRTGQVRHYGKINGTLAALNKAVGKLVGKGDRPHFVYEAGPCGYQIYRHLTARGFDCAVVAPSMIPKQSGNRIKNDRRDSLMLARLHRAGELTAVYVPLPEDEAIRDLSRAREDAKSDEKRSKQRLLAFLLRSGHRYSGRSPWSQAHMRWLADIKMAHPSQQIVLQEYIDTINQCTLRLQRLTEQIRQLLPQWRLFPVVQALQSLRGVSLIVAVTTVAEIGDFKRFQNPEELMGFLGLVPSDKSSGEKIKHGSITKAGNSHVRRMLVEAAWAYRFRARLSRALLKRQEDLPQPICDIAWKAQLRLCARYRHFWAKGKVKPVIVTAIARELCGFIWAIAIKTDIPVAV

SEQ ID NO: 420547 - protein, 454 aa, unidentified
MAQRKRRRKRLAVADLPEHLQHVNLNAAGIDIGSDRHVAAVPAGRDEVSVREFGAFTTDLNALADWLTKCGITSVAMESTGVYWIPLFELLEQQGLEVKLVDARQVKNVSGRKSDVLDCQWLQQLHTYGLLAGAFRPPDQVCVLRGYMRQREMLVQASSMHIQHMQKALQQMNLLLHNVVSDITGVTGMKIIKAIITGERDPKVLARHRDQRCHSSAATIAKSLLGNYREEHLFALTQAVSLYETYQAKIVECETAIACYLKQQPNRTDEEPPPTDKSVRNRDRQRGGVDVRSQLYKMTGVDLFNLPGLAADTLLTLAGEVGFDMTPWPSEKHFTSWLALCPGTRKSNGKVLSRKTKRSANRAAAAFRIAAASLTRSKTALGAFYRRIRVRVGPAEAITATARKLAVLYYSLLKHGSAYVEIGQTVYEEKYQQRRLNSIQKQALAMGYQLIPMA

SEQ ID NO: 420548 - protein, 437 aa, unidentified
MDLVYPRCAGIDIAKQSVMVCVRVAGPDGRARTTVEEWASSSSQILRLAERLTAEEVTRVVMEATGDYWKPWFFLLSEAGLDVVLANPRQVKQIPGRKTDVGDAVWLADLAAHDLVKGSFVPDRAARELKDLVRLRATLVKDRARHAQRLEKVLVASALTLSGTISDILGVSGRAMLEALIEGEHDPEALARLAHRKVKAGQKELAEALTGRFTEHHACLARSHLRVIDMLSEEITVVEGRVEAYFTPDGDPPGGVSADREWRQTAHDKRELLMTIPAVKTVTATAILSELGLDWSMFPTAGHLASWAGVAPGSNQSGGRSKPARARKGNTFLKGYLSGAALAVTRAKGTFLQARYRRLRSNRGAPKALVAVARSVIEAAWLIMTTDQPYLDLGGDYYDRRKPANAIRTAINRLLQAGCVIDHTAKGIYLIAPPAPA

SEQ ID NO: 420549 - protein, 357 aa, unidentified
MAVVAELAEQTVIGGVDTHKDTHVAVALDGLGRLLGTADFSTTPSGYRGLLTWLGSFGTVERVGVEGTGAWGAGLARFLRAAGVRVIEVDRPNRQRRRRRGKSDPADAEAAGRAVLAGDASGVPKDQDGPVEAMRALRVAQRSAERARTQATNQYRSLLDTAPAQLREQLRGLALRQMVDRASRFRPGKDLSDPMAATKAALRSLARRWLALAVEIEALERQLAALVQVAAPPALLAEFGVGPDVAGALLVAAGDNPDRLRTEAAFAALCGASPLDASSGRQRRHRLNRGGNREANSALWRIVMVRLRWDHPETRAYVNRRVAEGKTRLEAIRCLKRFLARRIWRLLTQSARPTAST

SEQ ID NO: 420550 - protein, 370 aa, unidentified
MNDKYIGFDIDCNKTCACVVQQGHKDQYATLATDLTQMKQYLQQQKQDGSRVHLTFEISGEAGYRHDALGPHVDTLTVSNPHKMTWIYRTSKKNDRIDCRKQAVLLSIGEVPTVHIPPHAVRQWRVTIQQRRVLVNRIVSVKNRIRALLKGNGLTQARHKGSCWKIENIEWMKQQAQDWSEVTAEQFWRVHLANLLEELKLLGGQLKQVTIYPDHYLDSQPGGVLLRSIPGVGPRTAEAILAYTDEVGRFKRSKQYAAHFGLTPKLDESGQTRRLGQISKEGPSVVRWLLVESTWRVIQKSPAIKAFYERIVGGQNQRKKTAVVATARKLVTIMRAMLQTGEPFNEELVSKAKKNNKNGPDQQAVNPQNN

SEQ ID NO: 420551 - protein, 372 aa, unidentified
MPQRSRVFVGLDTSKLKISVALAEEGRQGEVRFLGEIDNTPEAVRRLVGKLASRYSEVLFCYEAGPTGYGLQRQIAALGHECDVIAPSLIPKRPGERVKTNRRDALTLARLHRAGELTAIWVPDPGHEAVRELVRARDAAMADLRAKRQHLQSFLLRHGRLFPGRKPWTRAHARWLSELAFEHPAQYLVLREYRQGIEDAEARLERLTQQIADVVTTWSMAPVVEAYQALRGVALLTAVTFVAEIGDVRRFESPRQLMAYLGLVPCESSTGERVRRGSITKAGNTRVRRVLIEGAWTYRFPARMSRLLQERQANLPQLVRTIAWKAQVRLCARYRRLMAAGKRQTVVTTAIAREMAAFLWAIGHAIEPRSAA

SEQ ID NO: 420552 - protein, 412 aa, unidentified
MEVVYQCCCGLDVHKKSITACVLWAGAKGKSRKEKRSFGTFTQDLLRLADWLEECGVTHVAMESTGVYWKPVWNILAEQFEVLLVNAQHIKAVPGRKTDQKDSEWIADLLQHGLLRGSFVPPRPTRELRDLTRYRVSLAQEINRIANRIQKVLEDANIKLASVATDALGASGRAMLEAMLAGEQDSARLAEMSKGLLRNKMLELKLALEGHVTEHHRFLLQQLYDHLFFTESKRKQIEVEIERRMLPFQSEVARLCTIPGVDRVTAWGLLAEIGLNMNQFPSAAHLASWACLCPGSFESAGKRLSGKMRKGNVSLRRCLSQAAWAISMMKNNYLSALYRRIASRRGAKRAVMAVAHALLVIAFHMLKRKENYRELGADHFDRIDVSRIRRSLVRRLERLGHRVTLEPLAQTA

SEQ ID NO: 420553 - protein, 408 aa, unidentified
MGVDISKGRADWRACRPGQWGKRHHLVQDGTGFLGFEEQLRALAAEGREVWVAMEPTGPYGLCLQEWLLDRGWRAVLVNPYHVHRTEEIPDNSPRKDDGKDPGVIAELVWRGSYSHPRRMAGPYAELRTGIREWFSLVKKQTAAKNEAGALLEVWFPELGRLFRSGLCKSARAVIKRYESPQAVLAAGKGRLRRTLRAGTSGRGERYAERIWEAAEYSVALEEGQMGRVRALRGLVAQLELVEARQEQLRAELAQWLAQTPEGEYLRSVPRVGTIVAAGLLGECGPLGDFPREAAIEKFVGLHLYRKASGKRRGKLHITKRGRSGARALLGRLAALHLQPGGLAWAWGQELRAQGKQGTEIQTTLARKLLRVVFALCRRQEHFDLKRWEAGAQVADGVRVLHGMPVAA

SEQ ID NO: 420554 - protein, 337 aa, unidentified
MDRQYVGIDFHRRRSVIVRLSATGEKLGVHHVVNDPVDIAAVIAEAGEAPAVVIEATYGWYWVVDLLQSLGAEVHLANTHALNWGHRKTKTDVADATDLADMLRLGRLPEAWIAPPAIRELRELVRYRAKLVELRSGLKAQVHAVMAKEGVLPKTTDMFCKAGVRQLDAMDLGRNYAVRLESLRDLIEAYDGQVKMLERDIALHLRGDRGYQAVQAINGVGPTIAAILVAEIGDVSRFATPAHLCSWAGLTPKLHESDTKSHRGAITKQGSKLLRWALIEGASRYHGGPVLAAKYHEIAKRRGRNKARVANARHVLTLAYWGLRDGEIRCLAEPQVA

SEQ ID NO: 420555 - protein, 311 aa, unidentified
MTILTSQTVVGIDVAKAEIVVYRADQQTLESIKNERAALKRWLKTLPAQSAIALEATNIYHLDTVELAHEMGHQVYVVDAYRVSHYRRGVGQRAKNDPCDARLLARYLESEQSKLRIWTPPPKAYSTLKSLLHRRATLIKNHTGLMLSWTSEPLLKKLQTAQQKAFKQADQAIQKLLRKVSKEAGIEENIERCKAIEGVGELTATGLAATYIRGDFANGDAFIALLGMDLAVDDSGKKNGLRSLTKKGDPEVRRLAYNAAMAACRSAKWKPFYEAYLVRGFSKTQALVALARKLCRVAFALMKNQSEYLSA

SEQ ID NO: 420556 - protein, 381 aa, unidentified
MESARSTHIVANEIVLAVALELAQNSWKVALQDGLHDRPSIHSVSHVQACGRLEQVVELIRRMLEKWHLPADTRVVVNYEAGQDGFWLVRALARYGYEVLPIDAASIEVNRHQRRAKTDRIDAARLVNSLRGWLQGDRDRMRVLHVPSAEAEDQRQWMRDRGQIQKEINQHLDRMRKLLRTQGCWVDHKMDIAELVKSGELTDHSGAPLPESLNLRLLRECERLAQAEQQLAKLEAGMLAALPKATQDKVKALCMLKAIGPVGAQRLVTELYWRDFHNRREVGACVGLVPQPYDSGQSHVDQGISKQGNRRVRALLIEMAWFWLRYQPTSELAQWFIKRTSGTGENKRHRKITIVGVARKLAIALWRYLDTGEIPAGAQLK

SEQ ID NO: 420557 - protein, 370 aa, unidentified
MHNSSTLYVGLDVHKDTIAVAYAPEARDADVTYWGTIGTRQCDLDNLIRKLQSKAKQLIFVYEAGPCGYWLYRYLTKRGHVCWVVAPSLIPKKAGDRVKTDRRDAVPRARLMRSGDLTPVYVPAVEDEALRDLSRAREDALRDLKAAKVRLKAFLLRHDIRYTGRATWSPAHLRWLSEVVCPTPAQQIVFQEYLRAVNEHTERLQRLEQELQDQVQAWRLRPVVEAFQALRGVQFTVAVTIVAELGDLTRFDKPRQLMSYLGLTPSEYSSGERRRQGGITKAGNAHARRALVEGAWAYRYPAKVSRHLQLRLEKAPKRLQDISWKAQVRLCKRYRRLSARGKNANQVVVAIARELIAFMWALAQEVPIPA

SEQ ID NO: 420558 - protein, 471 aa, unidentified
MAADKGKADGSGVPGRGGDGAEVAEDSTQVVEYAAAIDVAKGFGMVCTRVPGTRPDRRRQKVWRVEARFNEVTALMDHLRAEGIQRLVLESTSDYWRIWYYLAEAAGLEVWLVNARDVKHLPGRGKSDTADCVWLCKLNERGMLRRSFVPPQPVRDLRALTRTRARLAQDQARHQARVEKILEDALLKISVVISDLFGASGRRFLDALVAGERSPAALAALGDKRLRATRAELAEALTGRFRDIHAFEISVHLRLIDAICAEITALDEQIGQQLALVPGTAPACAACGLAGGGHAPGCEDQDVALLPLAERLDEITGVGAVNGRAIIAELGTDPSQFPTPGHAAGWARLTPRSHQSGQTARPGRTGKGNRYLRGALGQAAMTAARTDTRLGAMYRRIARKRGKQKAIVAVSRVICEIAWILICDPSARYRELGPDYYQPLSPARQTQTKIREIERLNPGKKVILADAGAAA

SEQ ID NO: 420559 - protein, 340 aa, unidentified
MHTTYVGLDIHKNFIQAAAMDEQGTILKEQKFKTTSAEIERFIKSLNAQKIYAAIEATCTWYHVYQALDALDVETTLVNMRRTKTIAESKIKTDKLDAKTIAQCLRTGFIATSYIPPKNIMEQRNILRHRMSLRKELTRYKNKIHAILLRNGIQHPYSDLFGTAGMSFLKNLTLPDTEQYSLTSYLNIIETLLQEKNQTSKNIETLGKNNQQAMLLTSIPGISYYSAMIILSEIGEIQRFPHPKKLSNYAGLAPRTIQSGNHMYHGRILKECNQNLKWILDQCTHIHIRHCPNSLITKLYHRVEKKKGTNKAIVAASRKLLTCIWHMLMKNETFKYNNDN

SEQ ID NO: 420560 - protein, 345 aa, unidentified
MQPMYYIGLDVHKKKISYCVKDSSGKIYAEGWIPATRFALDRWMKTLPQPWSAALEATMFSGWIYDHLKPQATELKVAHPLMLRAIAAAKKKNDRIDANKICDCLRCDFLPECYMAPTAIRERRRTLRYRNLLVRQMVQMKIKIGTLLMEAGVSYNKQQLHKVGYFRELLTSNPDINEGLRPLLRLCRETVVRLSKLESALVRSLERDQFLVERVERLMSIPTIGPITALTWALEVGDVQRFSSTKKAISYCGLCGAEKSSGNTVQRTPLSKQRNKHLQTTLIEAAKMAPRYSPTLALLYDREKQKGNANRATLAVARKLVAYLMVVDRGQRNFQVLETSSSVAA

SEQ ID NO: 420561 - protein, 372 aa, unidentified
MEQFIGCDAHKKYSVFVAVNERGEASPANRVGHDRKQYREFLEGLPAGSQIALEAGGHYYWMVDDLEAAGHHPRLAHPLEAKKRMGKTGKKTDKVDANGLGILLRNGTLPEVWIPPAGLRDQRESLRLRMFLMQQRTRLKNRIQGTLARYNIQIAGVSDVFGVEGRLRLGKRLGELPEHTRQSVELELVTLDFLEVQLADIEKRLEELMKVTAEADLLKTLPYVGRILSMVMTLEIGRVERFPSAAHLASYAGLVPRVHSSGGHTRLGQICGDVNHYLKWAFIEAGNLVVIHQRHLAGQHVVRLYQRIKRKKNHQKAVVAVARHLAEAAYWILRKQEVYRDPQPKPKAPAKAQAAADSFVDARVSAEPAIAL

SEQ ID NO: 420562 - protein, 435 aa, unidentified
MNIYDNHPKMKHIYIGVDTHKTMHHAVIINCFNEKLDTLTFNNNNQGFNELLTMTNKYINDGLTAIYGLEDTKHLGHALATFLMAKNCAVRVVNSTLTYNERKKYPIISKTDDIDATCIAKVTLDNLADLPIATNDEIYWTLKQITKMKKSIVFDNIKAKNKLHAQLLHHYPYYTEFFSGFDGKTALDFWEQFPSPKHMTLSMEELSDFLYEKSKGVFAMAKAKTIYELIHNEKYESMNYQNERNILITMLVKQIKHNNKQMLEIDNSIISLYDELGFKLHTIRSLSKVTSAEIIAHIGNINRFSSKDKLARYAGIAPVNFSSGGKDKSIRNEFGNRTLNSHIYNLAVRSISPGNSRQEPFNAIFLEYYHRKLSHGKNRQQALTCVMRRLVNIIYVMLKNNTEYKMSDELKNECLKTYNEKIKPVIDKSKSNKKS

SEQ ID NO: 420563 - protein, 364 aa, unidentified
MASTSSIHIPSIPPAISGHIVVGVDTHKHIHVAAILDATGGIQATMTIATDAGGFQQLLAWAQSFGQIIAFGIEGTGSYGASLTSFVRRKGYKVIEVNRADRRMRRLVGKSDTLDAQNAARAVLSGFATAEPKTADGTVEMIRQLKVAHDTAVKNRSAAMITLKAMLVHAPEQLRLEMARKTQIMLARHLASLRPRELKTPEDSIRHTLRALARRWQYLDTEIKELQTMIEELVMKCAPQLVAPFGIGIDTAAEILIVVGDNPERIKSEAALAKLAGISPIPASSGMSTGRYRINRGGHRQLNAVIYRAVIVRMRFHEPTIKYVTRRTAEGKTKKDIIRCLKRYVIREVYHLINPAENTAQIAA

SEQ ID NO: 420564 - protein, 397 aa, unidentified
MIAVGIDVSKSKSTVVILNGDGSIRAKPFDVHHVADELQALVDYIKRTSEPPTILMEPTSHYHYPLLKAFQEAEFPVCLINPYQMKKYGDTELRKAKTDKRDSLRIAQYALEKSYSLIPYTPQDQKYEDLRFLSRQYSQRISALTVAKVQLLSLLDETMPGITTILPLKSRDPDNCMLLRFIKRFKSFDVIRKMGKTRFLDSYQVLVKKTKDRFAGSKGLAIYELVLNSITTRGENPLSAMTQDQCVDLVSTAQKAADEINLQMRIIADTIPEYKVLRSMAGVGDRLGPIILGEIGDIRRFHSGKALNAYAGNDAPPYQSGQFESRNRHISKRGNPALRKACFEVMQALKLTKPHDDPVYLFLLKKEQEGKPYNVAKMAAVNKFLRIYYARAMELYK

SEQ ID NO: 420565 - protein, 355 aa, unidentified
MNQEKYIGMDVHQATISVAVMDAAGKLIMECLLETNAATIVQFLQGLQGTLSVTFEEGTSAAWLHDLLKPHVSRLVVCDPRKNALLKDGNKSDRIDARKLAELLRGNQLHPVYHGEHGVRTLKELGRSYLTITQDVTRVMNRIKALYRSWAIPCAGATVYAARHRAEWLAKIAEPGVRLRAERLYQQLDLLQPLRLEARRELLAESHKHSGVKLLRQIPSIGPIRSALLVALMQTPHRFRTKRQLWAYSGFAVETHDSGEYRSVRGKLQRNRERMTVRGLNDNHNRELKNLFKSAAVSASTRPGPLRDFYVARVEKGMRPTMARLTLARKLAAISLTIWKKGVDFDAKQLDQQAA

SEQ ID NO: 420566 - protein, 339 aa, unidentified
MRFYTNQHPVYCGIDLHARSMYVCILRHDGEVLLHRNMKAAPEPFLKAIAPYREGLVVAVECIFTWYWLADLCAQEGIAFVLGHALYMKAIHGGKAKNDKIDSQKIAALLRGGLLPQAYVYPAQMRATRDLLRRRTHLMRKRAELLAHVQNTNSQYNLPEIGKKIAYKANRSGVAERFADPAVQKSIEVDLALITHYDQLLTDLELSIVQAAKHHDANTLHLLQTVPGIGKILSLVLLYEMHDIHRFPRVQDFVSYCRLVKCAKESAGKRLGTSGKKIGNAYLKWAFSEAAVLFLRNNPAGQKHLARLEHKHGKGKALTILAHRLARAVYYMLKPRFKG

SEQ ID NO: 420567 - protein, 337 aa, unidentified
MNYSGIDPHSNNSVVSVTDEHDRVVAEKRLPNELSKILAFLSPWREAMAGVVVESTFNWYWLVDGLQAAGYTVHLANTVAIKKYEGLKHSGDETDARYLAHLLRLGILPTGTILPPEQRAVRDLARKRMQLVRSRTTHILAVENITARQHGARISSNQVKRLTAETVDQMPLPDDVALAIKANVAVIATLSAQIELLEKRLQEKVAARAEYRLLTSVPGIGQVLATTILLETGPIERFAAAGNFASYARCVNSAHTSNNKKKGEGNTKNGNKYLSWAFVEAANFALRYCAEAKRFYERKKAKTNTVVAIKALAHKLARACFHILKEKKPFDVKRCFA

SEQ ID NO: 420568 - protein, 429 aa, unidentified
MDIGAEEIYVAVPDDRDEDPVRCFSTFTCGLRGLADWLQKCGIETVAMESTGVYWIPVFQILESRGFEVFLVNAHYLKSVPGRKSDVSDCQWIQYLHSVGLLQGSFRPPEEICAVRTLWRHRQSLLQMAAEHILHMQKSLSQMNVQIHHVLSDITGLSGMTILDAILAGERDCLKLAQLCQPSVKCPREKVAQALEGDYRPEHLFTLKQSVAGYRYYQKQIAELDHEIQQLMRAVVSAPDVQDHIPDRTKRTRYQRQGNDPAFDLRAELYRIAGVDLTDIPGVSAITAQVILTEIGPDVSRFRNASAFASWLGLCPEKRVSGGKVLSCKTRKVKSRAATALRLGAHSLCRAKDYFGEFFRRMRAKLGTAQATTATAHKIARVLYHVMRTREPYAETIFHKCDEQARRRAEQRLRKQAAQLGFQVIPQAS

SEQ ID NO: 420569 - protein, 328 aa, unidentified
METLVERCAGLDVHKDSVTACVRVPDGHGGRYAETRRFTTTTAGLGLLAQWLGSFGVTRVGMESTGCSWKPVWQLLEDQVECWLLNAAHLHNVPGRKTDVADAAWIAQLVEHGLVRPSFVPPRPIRELRELTRYPKTQIQERSREVQRPGQGPGRTPGPELSSVATDIIGVSGRAMLEALVAGTSDPQVLAAFAKGRLRTKLPALREALAGHIRTDHHGLLVAQILAHIDYLDETIAVLSARISQVIAPFAEQVALLDTISGVDQRAAEVILAEIGPDMGQFPTAAHLASWAGVCPGNNESAGKHRSGRTRKGPRVAGRLSERGRQGG

SEQ ID NO: 420570 - protein, 347 aa, unidentified
MRFYTTQHPFYCGIDLHARTMYVCILNQAGETLVHRNMTATPEALLKAIAPYREQIVLAAECMFTWYWLADLCADHGIPFVLGHALYMKAIHGGKAKNDKIDAQKIAVLLRGGMLPQAYVYPAEMRATRDLLRRRMHLARKRGELLAHVQNTNSQYNLPAIGKKIAYKANRDGVAERFADPAVQKSIEVDLALIGYYDALLRDVELSIVKTAKHHDANTLYLLQTVPGIGKILSLVLLYEIHDIARFPRVQDFASYCRLVKCARESAGKRSGTSGAKIGNAHLKWAFSEAAVLFLRDNPAGQRLLARLEKKHSKGKALTILAHKLARAVYYMLQRQTAFDLDTFLRG

SEQ ID NO: 420571 - protein, 367 aa, unidentified
MRAIGIDVHRDFCEVAISEGGRLRSAGRVPSTPEALELLGASLSDDDEVALEATGNALAIARILEPHVARVVVASARELHAISGAKAKTDRRDARTLAKLLAAGMFAGTWLPGEEVRALRRRLAQRAQLVRARSRLKNEVQAALMRNLVGAPSATDLFGAAGRRWLADLVLPADERETLDSCLRTIAFLDGEVERFEVAIARYAMHSVEIRRLVTIPGVGLISAATLVAVVDDVHRFRCARKLVGYLGLDPRVRQSGSTPARMGHILKGRSGCRPSSALRGRPRGDAHARAFACLRRAGGSQARPPGGHRRGRSQARHDRLATAHQRRGLRLREPRPGTPQVAARRAACRRAVAEGSPHGRVACEPA

SEQ ID NO: 420572 - protein, 313 aa, unidentified
MHLGIDVSKYTLDCCLISDGIFYERKFYNDSSGMNKLQKWLDEHGADHTLHCCCEATGTYYETVAVALSGQYKMSVVNPRTVKGFGAAVLNRSKTDRQDAKLIARYCQAMKPEQWQPLKPEHRQLQELVRYIARTKRQRAAEQTKRQTAPDYLKPHIQSTIEHLTELLNRLEQDLKAHYRSHPEQDKRRKRLKTIDGIGENAAAVLCSIITERFTHAKQLVAYLGLDPKEHQSGTSVKGRTRISKIGKSETRAALYMPALVAYRMGAFPNFTARLEAKGKPPKLIIVAIMRKLVVIAFHLLKNGENFDRSRYR

SEQ ID NO: 420573 - protein, 359 aa, unidentified
MLTQGNKIDFNGQHFFVGLDVHLKSWKVTIMTEKLILKTFSQDPKPELLHQHLVRNYPNGIYHSAYEAGFCGYWIHNKLKALGIDSVVVNPADIPTTDKEKVNKTDKRDSKKIAKFLRSGDLKAVHVPSIKTLEDRGLVRTRGTLVKDLSRNKNRIKSFLYFHGIEMPEIFKNSATHWSKRFMTWLKSIELTESSAKRSLALIIDESQHLRLLILNATQEIRNLSQSEQYVSKVNLLRTIPGIGALTAMIILTEIEMINRFSNFDQLCSFIGLIPSTNSSGEKDLVGEITHRGNNFLRSAIVESAWIAARRDMALNKSYHDYCKRMEPTKAIIRIARKLLNRIRFVLKNDQPYVCSVVK

SEQ ID NO: 420574 - protein, 343 aa, unidentified
MQTITTIGLDIAKSVFQVHGIDAEGKVMLRRQLKRRYVLAFFQKLPPCLIGIEACASSHYWSRELQALGHSVRLMPPAYVKPSVKRQKNDMADAEAICEAVTRANMRFVPIKTPEQQSGLMLHRTRHLFIRQQTSVINAIRAHLAEFGVTAPVGRKGIEELLRVIADPSDKRVPDVVRACLAALGSQLISLKKQILDFDRMIMAWHRSDQTSKRLNCIPGVGPLLATALVASVADPKVFRSGRNFSAWIGLVPKQHSSGGRARLGSIRKKGDRYLRSLFVAGAFAVIRYAKLHGTKYRPWVAALLARRSTKVAAIALANKLARMAWAMMATGERYNYPASLRV

SEQ ID NO: 420575 - protein, 338 aa, unidentified
MEFYGAIDLHGKNNVLVIMEGKKKHLEKRMPNDLDYVLKELKPYREDLTGIAVESTYNWYWLVDGLMEEGYKVHLTNTSAVKQYEGLKYTDDRHDARWLAQMLQLGILPVGYIYPKEERAARDLLRKRSSFVRQRTANILSIKNLIARNTGRTISANKVKQLTDEDVERMFENQDHAMAIKSSLHVMWSLDEEIKSIEKRVKEVASLRPEYRHLLTVPGIGEILAMTISLETGDIGRFRKPGNYVSYCRGAKSTKLSDGKKKGKGNRKNGNKYLSWAYIEAATHCMQWSESARKYYQRKSARSNAIVARKSLAAKLTRACYYIMRDQIPFDPKKMFGF

SEQ ID NO: 420576 - protein, 413 aa, unidentified
MDVLHPRCCGLDVHKSSISACILVQVEGRVQKHQRRFGAMTQDLQELANWLRQFEVTQVAMESSGVYWKPVWNILEGQFTVILVNAQHIKNVPGRKTDQKDAEWIAQLLQHGLLRPSYVPCEIIRDLRDLTRMRVSLSQEASRISSRVQKVLEDANVKLASVATNTLGKSGRAMLEEIIAGQGDPEYLASLALGHLRAKTPQLRLALEGKIRSHHRFLLRRLLDQLRFVEHEIVLLEERLEDIGRERPELSQAVARWDTIPGIDRVAGWTLLAEVGHTMAQFPTAEQLASWASLCPGNHESAGKRLGGTTRKGSPWLRRMACQCAWAAARTKNTYLSAQFRRVAARRGSKRAIIAVAHSLVIIGYYLQKNQRNYEDLGGDYFDRIDSDGLKRYFVRRLEKLGHKVTLVPIKAA

SEQ ID NO: 420577 - protein, 342 aa, unidentified
MEKELKHFVGVDISKLTFDVALLKPLGNKEGAIAHHQFKQTAAGFAEMKEWLQKQGVLLDDETLFCMEFTGIYNAPLVNYLSKEKALVWVEMAVRIKKSEGFSRSGNDKTDAIKIARYAFRYQENKQLWTPTDDSLSQIRHLIAQRDRIVDAISALTVPVNELKEVGCLMEAKQMESLQKVAIKKLDESKENIEAAILKLVNKDSNLSSKVDRVTTIKGIGVVTAIAFLVYTNGFTSFDTAKELACYCGVVPFVSKQSGTSVKSKARVSAFANKKLKRLLHLCALSAKQHDKDLKAYYERKVAEGKNKMSVINAIRNKLVLRMFAILRDERDFVENYVRKSA

SEQ ID NO: 420578 - protein, 418 aa, unidentified
MQADLSQYTAVIGIDWADKKHDVCVQDMVTGKRRASQVRHRAEDLDEWARSLHRRFGGPIAIAVELSKGPIITVLQKYDFFVIFPIDPSKLANHRKTFTTSGAKDDPTDAEFALDLLSKHTEHFRPLQPQSVEMRTLMTLVEQRRQLMNDRVRITNRLRNALKQYYPQPLEWFDHIDTLLFCDFIRRWPSLVQARRARRATLEKFFREHNMNRKPLLERRIKAIKSAMPLTTDEAVIVPHRLHALALAAQLEVTLACIKQYDAEIASLAPQHPDYELFKPLPGAGPVYTPRLMAAFGEQRERFNNAAEVQKYGGLAPVTKRSGQSTWIHWRWQCPTFLRQTFVEWAAQTVNKSYWAGLYYHQQRAKGCSHQAAVRALAFKWVRILYRCWKTRTPYDETRYLKALQERGSPLLKTADAA

SEQ ID NO: 420579 - protein, 353 aa, unidentified
MSRILAIDLGKFKSVTCLLETDSNETEFWTMSTDRHYLLTVLKKYEPDLVVLEACGLSGWVHDVCTAAGYKVLVCNPAQEAWKWRNVKRKTDRDDALKLAKLAALDQLVSVHMPCPQQREYRRLVKYRKVVVGRVTRVQNNIRSLFAQHGITMERGQKAWALERLDQIAQHRKPLAECSADELWRGELHLELMELERLREHEHELHKKLKALAAEDERVQLLQTIPGVGRKTAEVVVAFIDDPHRFQNARQVSSYSGLVPKRFQSGEMDRSGRVHKRGPRLLRGALVEAAWMMLRYNPWARAVYDRLCSRQKTRKKKAIVAVARKLLVRCWVMLLRKETWNKEAGMATLAVAS

SEQ ID NO: 420580 - protein, 420 aa, unidentified
MKPLKTKKRSFVNGKHLIVTADIGKDKHFGYWRCPDGTDVKPFAVPNNGAGFWEFWERVSRAQKLRNLDGIIFGFESTGPYAEPLAHFMRARGAELVQVNPLHTKRFKEVTDNSPNKTDQKDPKVIADIIAMGRFLTVVIPEGPAAELRRLSQARERSTRRHTALANQIQCLLASIFPEFLQAMKGIKSTSAQYLLKHYPTPQEITAYGLPNLTKTLRKVSRGKLGADRAQALYEAAQSTVGVAEGQASMVLEIQELLALMEASKRFTENLELEMIKHLAQIPYSNTLLSLKGIGDVTAAGLIGEVGDFRKFRTLGEVMKLAGLDLFEVSSGRHKGQRHISKRGRPLMRKLLYFAALNTVKKGGAMHQWYRSACDRGMPKPKALVAVSRKLLGILFALVRDHSEYVPNYPETRYQLKEAA

SEQ ID NO: 420581 - protein, 423 aa, unidentified
MSETVSGAEPRFAAFVAIDWADQKHVWSLQPADSEKRQHGQIEHTPEAVESWVAMLCGISGNQAIAVAVEQSRGALVFMLSKYEQLHIYPIHPRAAAQFRAALFPSGAKDDPIDAELLLDLLVHHRARLRPLRPDTEQTRLVQHLVEGRRRLVDEKTRQSNRLTAKLKLYFPQVLNWFDEVDSALVSALLERWPTLEDLQKARPATVRSFLTVHGCRGNERIEQRLEQIRKAVPAIRDLAVIQSSVTTTKILVDMITTLREGIATFDQQIDRAVTAHPDFAIWDSFPGAGPALAPRLLAAFGSRRDRYETAADMQKFSGIAPVVERSGKMEWVHFRWACPKFLRQSFQEWAGHSIGFCGWARAYYQQQRQSGHDHHAAVRALAFKWIRIAFRCWKDGVPYDDSHYVASLRRRGSPMAQAISQH

SEQ ID NO: 420582 - protein, 389 aa, unidentified
MKIFVGIDIAKLNHFAAAISSDGEILLEPFKFTNDADGFQLLVSKLESFDKNSIIIGLESTAHYGDNLVRYLVAEFYQVCVLNPIKTCQMRKNNVRKTKTDKVDTFVIAKTLMMQDDLRFITFFDLDMMDLKALGRFRQKTIKQRTRLKIQLTTYVDQVFPEIQYFFKSGLHQNAVYALLKEAPSPKEIASMHMTHLANLLKVNSHGHFTKEQAKELRVLAQKSVGANDSAISIQITQTIQQIELLDSQLEKIEAEMTDIMKFNDSVIMTIPGIGYINGGMILGEIGDIHRFSNPNKLLAFAGLDPSVYQSGNFQAKTTRMSKRGSRVLRYALVNAAWNVVRNNATFKAYYDAKRAEGRSHYNALGHCAGKLVRVIWKMLTDEVEFNLE

SEQ ID NO: 420583 - protein, 374 aa, unidentified
MAPPRMPEAVIGLDVGKSSHWACVATRDGEILLSAPVANREGDLDSLFGRFPDALVVVDQSRNIGALALARAKAAGMSAAYLPGLAAHGAARLFAGDAKTDERDAMVIAKTALGIPDALLPVGDPGPTVAAARALAAQRNFLTCENTRSKNRLRSILLESCPAFEALVDLSDGPQLRLMASLGGAWSVADAGPRRAAALTRGAARGKIEALVRSTASSTRPDAAAIAAEDRAVRLLARRISENSAEIDVITAEISALLEGDDTYRCLLTVPGIGPKTASELAISIDIEDFPSHDRLASGTSISSVTASRQGNKRLKNLLIFSCNCLTRTEGRWGDYYARCRERGMPHGKALKALARKRLKVIYAIMRDRVPYAA

SEQ ID NO: 420584 - protein, 341 aa, unidentified
MDITTIGLDLAKSVSHVVCCNQAGKIVRKKMLRRTQILHFFSELPPCLVGVESCASAHYWAREIAKYGHQVKQIAPQHVKAYVRGNKTDFNDALAIAEAVVRPEMRFVQTKTQTQQDIQALHVMRKKCERDRTANSNEIRGLLNEYGIILPVGISHVYKSLPELFDRQVENGLSELFKELLERHYQKLVELDEHLDWYTKKIKQLSQHEACRRLQSIPGVGPIIASALYQHIGNGSEFKNGRAVSASLGLVPKQHSSGGKHNLQGISKRGDSYLRTLLIHGARAVMRVSKHKETPLSQWIKRIEQTRGRNKAAVALANKLARIAWALLAQGGDYQPELTTA

SEQ ID NO: 420585 - protein, 344 aa, unidentified
MIHVSFYVGIDIANKDFTASIFSEPNLSVKTMTAIPNEITGFEQLESWLIHNKVQANNCVICLEATGVYGEALSYWLTAKGYNVAVEPPLKVKRAFSDKAHKNDKADSKKIAEYAYRYLDELNFWRPKADIIEQINVLLMTREQLVQQRTALKNTLTTLNKKIVQTPLANDIYKENIGRLTKQINRIEKELKKHINQHPDFKQFVSYLVSIPGVGLLLAANFLVATNGFEKEMAIMHRKLAAYIGICPYEHSSGSSVYKKPKIPHYGPARLRKLLHLAARSVVTHKDQFALYYQRKLAAGKERKLVLNNVANKLLKIMCAVVRNQRPFVDNYVSIHPKLAQINT

SEQ ID NO: 420586 - protein, 426 aa, unidentified
MQPHYNCVCGVDVHKEFLQVCILKRDESPEILRVFNNFSGIQELKQRIEEECCECIACESTGVYWYRLYLAFEGQTRVIVGNAYQIKSIPGRKTDVRDAQWIAELAMNGLINPSRIFPKNNRELRELTRSRESTVKSRTQIKNRIHRILDSAGIALGKGVRDLFGKSGIHLIWGLLNRANADDIIATLPSARVKKKAVILREILSGSLSDLQIILIKKNLEMMAHINEHIHALDEQIIARMMEQDSIRNVEIACSIPGVNVTTAVTVLAEIGDYRDFENAEKLASWAGLVPSVYQSAGKNCSGKITKHGSEHLRWILVQAAKAAGRTVNTTFRKFFNRIAYRKGANTATVALARKILCILWHLLMNKELYVDPLKSAKSTKPPVVQKFSKNSSTDVQQAIDFIIECGFKVIHPGSILDQKFQGVSR

SEQ ID NO: 420587 - protein, 419 aa, unidentified
MAFKIFRKNCSGLDVHKTWIFACIGFTDANGRTEYKEKRFSSFSRGLRDLAAWLASYNCTDVCMESTGKYWIPVFNVLEKTCNVVLAHPKYTKPQKGNKTDRKDAKWICDLFMCDMIRPSFIPPAEIRHLRDLVRYRFKLTNMLTGEKNRAQNCLTVSNLKLDDVFSDVFGKSSRSITEYILAHPGETFDVTPFVDKRCKTPIEEIQAAIDGAISPEQAIKLRQCLDHIDELEKHKAEMEREILRVSDPYFDALNLIRTVPGFDKNLFTAIQILSEIGGDMSVFPTDQHLVSWAGCCPRNDQSNFKIKSTRISRAGSYLKPVLVQVANALIKSKKHPEITERYRRIKSHRGHKKAIIAICRMLLTAIWHILTDLKPYTAEGYLAPRPVKEEKILTTSQALSLLKLRGYVIKDALPAAAS

SEQ ID NO: 420588 - protein, 341 aa, unidentified
MGQASTIGLDIAKWVFQAHGADATGRVVFRKRLVRAKVLEFFAGQPPCLVALEACGGAHYWARELGKLGHTVRLIPPAYVKPFVKRQKNDVADAEAICEAAQRPGMRFVPVKDEAQQANTVVFRARDLLVRQRTQCINALRGHLAEYGHVVPQGPAHVDSLVALVEDPKSSVPESARGILQVLIRMLNALEEQLKELDGEIARRAKADPVARRLMTIPGIGPIAATAITALVPAPEGFRAGRDFAAWLGLTPLQRSTGGKHKLGAISKMGERTIRRLLILGASAVVRWASRRGAAAGSWLARMLARKPRMLVTTALANKMARIVWALLVKGGTYKAPAVAA

SEQ ID NO: 420589 - protein, 361 aa, unidentified
MSIVAKRQSKEKRGHVNFDGKACWVGVDVHKISYAVAILDEEGQRQEFSTPAEPKKLLLQLLGMGMTIKALAYESGPTGYGLAWVCQEFGIPVLVAAPSRIPRPVSRTGKTDRLDSMKLAEFLARDMIKGIAIPTEAENHLRSLERCRQQLVERRRTVRQQIKSLLLFHGLDEPAGLSSWSLASVQSLQAMTLPDVLRITLGCYLNEHAFLLEELSRLRKQLSAALQAEGKIQTVKHLCTIPGVGETIATTFMTEIFRPERFGRAEELCAYVGLAPVTSHSGSGKATAQLGQVGQDYLRSILVQGAWRFISAEPQYHDLFIKIRTKTGLSAKAVVALARKLLVLLWRVAVENRPYRPVSVQ

SEQ ID NO: 420590 - protein, 351 aa, unidentified
MKITKLSTSHNPMNYVDANFYDYYIAIDWSSTVMAIAWMRSNSINPVVKNNLPAKLKVIKDYIKDLPGKKILTIEETTGAQWLYVELKDYVDKIIICNTYRNALLKEGPKNDAKDASDLCRLLRAGLIKEVFHSTDENYKIRKFFSAYNDLVKAGVRVQNQLSAIYRSYGQNHKKDKLNIKDDPYIDFIIEDKLKAIALYKEEKKIYEKFFREIMKSNKTIKNLTAVRGIGLINAVKIFSKVIDATRFETKYRYWSYCGLTKYRMESGQKYYGKRNTQYSRILKEAYKTAVMAALRGKNDIREYYDSLLKEGVPEKLAMNKVCRYIATSTLAMMKHGTEYKPYNWRENKIK

SEQ ID NO: 420591 - protein, 475 aa, unidentified
MGKGSGMTRGDVRRNARRERLRGMLPRDGAVIGIDLGDEKQAIAVVDHDVRVLARKTVRVKAFRLGEVLDWAVGQARAKGFAAVAVACEPAGARWLQVQRLCAERGLPLVCIQPLVSHIARQQQDYTTHKSDEPDCVMIARLAFELHCYLPEELDEAQSLLRHLGRRRAQLITAATASVQRVRDFLSVAWPVAPEACAHPFDSVTWLAAVQVVTSRCGGQPEKLAAAGLAEFTALVRQAVAGWGGQRPASGVCRAVSAALASTEGVVVSHRRALLRRCADELGDLQRTRAQLRAAEAGMAAVLGELGLSRLADIPGLTAAGAAAILAETGDPRRYDSSSSLVKHAGLSPSGNASGAFEGQAHISRRGRPGLRLTVWRAIWPLLIHNPVMAAKYAAMTAAAGTAAQAAQAQSGTRSRQASAAAAAQARRAKARVACAASLLRWIYSMVVHGTGWDPDVASGAATCQHAPRYQAEAA

SEQ ID NO: 420592 - protein, 314 aa, unidentified
MNQVSIGIDVAKDHLDVATHHQKNVMRFDNDSTGHQQLIEHLKQWPVERIVLEATGGYERTLVMQLLKHNLPIIVINPRQVRDFARATGKLAKTDAIDARIIALFAHRVAPPVRELPNEKARELQDHIARRQQLVQMRVAENNRLKQTACASVHKSIQLMLDAIVKQIEDIDDDLGKLIESSPAWQAKVERLKGVPGVGDQTARCLVAHLPELGNCSRQQIAALVGVAPINRDSGRMRGKRTTFGGRANVRNILYMATLVAIRRNDVIKAYYQRLVKDGKKKIVALVAAMRKLLTILNAMLRENKNWKENAIYA

SEQ ID NO: 420593 - protein, 458 aa, unidentified
MGKAKRKQKTRRAPAAVLEPRPRLEPNAAGVDIGATEIYVAVPPEREERAVRRFETFTADLLAAADWLERCGVTTVAMESTGVYWIPLFQILEARGLKVCLVNARHVKHVPGRKTDVCDCQWLQYLHSVGLLRASFRPEGEICAARSVMRHRESLVGMAAVHLQHVQKALDQMNLQLHHVLSDISGQTGMAILDAILAGERDPRKLAKLRHARVHADERTIAKALTGDYRREHLFALQQSVTAYRHYQELLRACDEEIEAMLEEFSDGEPAAPAAGEPKRERAPRRNELRFDLQGHLHRIFGVDLTQIPGINAQTAHTLLTEVGRDFSAFRSGPAFASWLGLCPDNRVSGGKVLSARTRKVKSRLARALRLSAQSLYASKSWLGAHFRRMRAKLGAPKAITAMAHKLARILYHMITTRQAYDETVFAQEELQHQQRSRKRLEQQARALGLQLVAITTT

SEQ ID NO: 420594 - protein, 435 aa, unidentified
MSGVIIGMDPHKTSATIEVRDQREVLLATGRFGTEGGGYRAMLRYCRQWPDRTWAVEGANGTGRPLSQRLLADGERVWDVPAKLAARIRVFDTGHARKSDAHDAHAIVMVALRTRGLRQLQVDEDLAVLRLLADRRDELSRSRAQILNRLHRLLAELIGGGAKRHLSSFKARALLATVRPRDLPGRTRRQLAAELIGELEVTDRKLKDLTKRLRDAVTASGSGLLEVFGIGPAGAARILADVGDVARFPDRNHFASWTGTAPIDASSGEHLRHRLSRAGNRRMNHVLYMAGIAQIRHDTPGRAYYRRKLTEGKTPMEAMRCLRRRLSDVIYRQLRADDTKQANQASEAGPGGHPGATVQSSAADRSPVIGTSDQPHPGPAPTTLPSSPAAAKNSASSTAANLSGAPAVSTWSAPRTNEVDTDKRRCTITATEDAP

SEQ ID NO: 420595 - protein, 319 aa, unidentified
MAQNGPVVVGIDVSKDKVDACVRALALQRTCPSSAQGHRQLVGWLRKHRVNKAVMEASGGYERSWAKILRESGIEVRIVDPKRVRSFAQSAGRLAKNDAIDAEMIAWFAETFSEAPGQVHDAAHEELVGLVKARMALVDLKARLEAQGQHAASGAVRKARTRVLKSLVGEIAKLEAIIAATIKATPRLAERAEIIESVPGFAETTSANLVAGMPELGQVSNEIAAALIGIAPYDDDSGNRRGERHIKGGRRWVRNALYMPCVGAATLNNPVIKAHYDRLIAKGKKPKVALVACMRKLIVILNTMIARGQKWDPSHYALN

SEQ ID NO: 420596 - protein, 314 aa, unidentified
MITIGIDVSKKTMVGVAINRFSKIKEEFNFGNNKVEIDNWISCIINRYKNITVASEATAEYHRFLALSCLDKGISYRLLNPIVTKQFTKATVRKRKTDKQDALIIAKLALTGVGNMVTKKSFDTTKSYTRTAAKLVHLEGTLKLVAKRFEELVPDDKGAFKSLTKCIRELEKSTKFLRKRGISKTNKDDVKLLETIPGIGRIIAPVLLSEIGDINNFKTIKSLVAYAGIDPRVKQSGVGLKHNTHLTKRGSPYLRQSLFQAASIARIHDEELRNYYQKKRDEGKRYKEATIATSRKLLYRVYAVLKRKTAYIVR

SEQ ID NO: 420597 - protein, 328 aa, unidentified
MAKGITICAGIDTGKYKLDIALEGASEQLQVDNTLADHNVLADWLRRHRVKRVGIEASGGYEQAVVAALRRKRFVVVVFQPAQVRAYAKFRLQRAKNDKIDAALIAACTAAVKTIHAPPDPRLAPFAEQLTMIDQIGEDIARLKNRLETCRDPRICQAWSEEIARLTKRRNGELKALVAAIRQHRDLAERLALIESVDGIGLPTAVAIVVRLPEIGRITREHAAALAGLAPYDDDSGEYVGIRHIAGGRERLRRALYCAALPASMRWNPQLIALYRRLIAAGKEHKRALIACARKLLIFANTVVARGTPWGRTAPVLPTTSHAQLAVA

SEQ ID NO: 420598 - protein, 444 aa, unidentified
MTRKSKKQRLQIIHPHCAGIDIGSREHWVAVDPESATDPVRCFSSVTASLNEMADWLVSLGVEIVAMEATGVYWIPLYELLDQRGFNVQLVNSRSTRQVTGRKSDVLDCQWIWQLMSHGLLKGAFRPADSVCRLRAIVRQLATKVQEQSRCIAHMQKALTQMNIQLDNVVSDLMGKTGTAILRAIVAGERNPQKLATLRDGRLRADEETVARSLQGNWREEHLFSLTQALEHYDFLDQQIRGCDRLIEKQLVELPQLAENPPEPVKVLKNPRRTKMQQSTLHQALYGVMGVDLTAIPTIGIETVLVLASEIGADLSRFPNESNFCSWLNVAPPTCISGGKKLHGRAPRIFNRAGQALRQAACNARNSHSFIGASHRARLARMDGASAVKATAHQLARLIYAMLTKGQPYVEKGMEAFEARTQDRQLKALQRKAQKLGFELVEAA

SEQ ID NO: 420599 - protein, 425 aa, unidentified
MSEKIVVGIDVSKAFSDICILSPNNDIIKRLKISNDINGMKSLIYVLEKVEDEYEDRAVIIMEATAHYHQILANFFRKHNYEVIVINPIQSGALKNINIRKIKSDKTDAYNIALLYRIKNYNETITHSDTVNSIKKLCRQHKELTDEIVEHINRLIAFLDISFPDFKKVFMDLQGKTPLSLLEKYPTIQEVLSPENKQDIIQLIKENSHKSSSYAEAKYEKLVKAAEKSIEVCIVSLSSAVLIQTTVRVIFSLQEALKAIDNEIKRLSLLDEKFHKEIVLLQSIPGVGEYTACVVLSELGDISNFSKPKELVAFFGLDPGVTQSGTYNRKNNKISKRGSPHVRSILHMLAKSNVYPNRNREYLNPVMRAYFEKKIAEKPYKVVMCAIMRKMVQIIFAVLRNQKSFELRTPEEHQKLIREKSKLVA

SEQ ID NO: 420600 - protein, 319 aa, unidentified
MDATTQDANTYVGIDVSKDQLDVHIHPAGEAFSISRNQAGLEELIERLKAYALKAVAVEASGGFEAIVIASFVAVGLPVIRVNPAQVRAFANALGKRAKTDPIDAAVIARFVEATKPEIRSLPSVQTLALADLIARRRQIVQMITAEHQRAMRSTANARLQKSIARLLKALQRELDSLDDDIDTSVRGSPVWREKEDLLSSVPGVGKVIARTLLAELPELGTLDRRQIAALVGLAPFTRRSGKWHGKSFIGGGRASCRTVLFIGALVAAKHNPDLKAFRQRLIAAGKPKIVAIVAVARKLLTILNAIIRDKSPWTPKIV

SEQ ID NO: 420601 - protein, 352 aa, unidentified
MQYIAFDAHKHYTWALVQDKKGKVMAEQRIDHIRGALSGFLETFDPGSPVAVETIGNWYWITDEIEAAGMVPQLVNARKAKLVSGSINKTDRLDVQGINRLQRSGTLPTVWIPPRELRDLRELPRTRMVLVHQRTQLKNRIHSNLAKYGVRIDEVSDIFGVTGRQLLDQRLSLLPVHTQYATKRLLDELDHLGEQINGFEKRMNNLFTPTQALARICTLPGVGLILGVVIVTEVGDVGRFPSASHLASYVRTTPRVHASGGKLRYGRTRCDVNRYLKWAYVEAANATVIHRRGHPTRHVSRLYARVRSRRGHPKAVGAVARHLAEATYWMMNNKQLYQDPSPSYQVVSTREA

SEQ ID NO: 420602 - protein, 428 aa, unidentified
MTQSPNPTPPTFAAFVGIDWADQEHAVCLSPADTLKPEQFTIHHTPEAIAEFVAMLRCRFGGQPVAIALEQARGALLYALMGHEFVRLYPIHPATSKRYRDAFAPSGAKDDPVDARLIWELLVKHRDQLRPWQPQDATSRQLTLLCEHRRDLINQRTRLVQQLQAALKTYFPQALDWTGEDLASVMATDWLVRWPTLEQLQRVPPKTVRAFYYAHHCRRPDLVQQRLHQIKTAQPLTTDAAVIAAHSLRVQSLAHQLRPLLASLAAYDQQIQALFATHPDAAIFTSFPGAGECLAPRLAAAFGTDRDRFPDADSMLRWSGIAPVTRRSGKFQTVHRRYACAKFLRQTFHEFARCSIKFCEWARLYYETQRAKGKGHHAAVRALAFKWIRILWRCWRDRRPYDDSRYTAALRRSGSPLAKLLPLPSQQP

SEQ ID NO: 420603 - protein, 404 aa, unidentified
MWYAGIDWADDHHDALVIDEKGRQVGSLRVSHTSQGLTKLNTFLEHIVGTASKEEMACIIETTHGLLIAHLLEAGWPVYPVNPRTVDRRRSASGAKTDTIDAYLLAKTGRADFADLHRLIPDSEKIAELKMLTRDQDALIHMQTRLVNQLTACLKAYYPVALDLFTKLQQKSTLRFLQSYPTPQSAMAASEAQLQEVLRQAKHPNPKLVAAQIFQQVHQPHLQADAVTARTKARLMLVLVNQLLPLLEQIAQYDREIDTLFLTHEDHEIFASLPRAGQRLAPRLVAEIGDDRSRYRDASSLQALGGTSPVLFQSGMYSKAHRRLGCIKPLRNALHQFAWQSTQSEAWARDYYQRKRAEGKSHTVAVRALSNVWVRIIFAMWMDHRCYESAIFERAQQQHARRAA

SEQ ID NO: 420604 - protein, 412 aa, unidentified
MQVVYARCAGLDVHQKTVSACASVCEPSGKKRRQIRVFGSFTGDLLVLADWLREQGVTHVAMEATGVYWRPVWAVLEGQFEQLLANPRHMKAVPGRKTDAKDCEWIADLLQHGLLKGSFVPPTPIQDLRDLTRYRVELRQSQSRVANRIQKLLEQANLKLGSVASNALGVSGRQMLEAIVAGQDTPEQLAQLARGKLNNKIPQLVQALQGRVRDHHRFLLAEFIEEWDWFEQRIVRLEAEIDKQINPFEQALALWQTMPGVDRVTACSLVAQIGVNMNQFPTAQQLASWAAICPGNHESAGKRKSGKTRDGNKWVRRTLCQAAWAVSRKKNCYLSSQFKRIATRRGPKRALMAVAHTMLVIGYPMLKTGQGYRELGGNYLEQINKDQLQRHFVKRLEKLGFKVTVEPSLEAA

SEQ ID NO: 420605 - protein, 343 aa, unidentified
MLKVTIIGVDLAKNVFQLHGATADGTVVFRKKLTRPLFERFMAGHHPCIVAMEASAGAHHWARKFTRYGYQVRLIAPHYVKPFLKRQKNDAADAEAIVEAALRPTMRFVEPKTAEQQAQAVAFRMREQLLKQRTESINALRGYLYEFGYIAPEGIAHVPDLAKIVKDRRSDLPDLVRDLCKKVLTHIAELTEHLAELGTKIAAVSQTSSMPRQLQTMPGIGPIGALAIETFAPPMHLFRRARDFAAWVGLVPRQHSSGGKQRLGKTSKNGQRDIRRLLIMGATSVIRWATRKGAPQHPWLAQMMERKPPMVVAFALANKMARAIWAMLTRGEDYRAPALASAT

SEQ ID NO: 420606 - protein, 373 aa, unidentified
MFTERTSVGLDVHAGSVAAAAIDGVTGELFQATLTPSFEHISSWLAGLPGPVAVAYEAGPTGFGLYRHLAAGGTRCEVVAPSKLQRPAGDRVKTDAKDAVHLARLLRLEEITPVAIPSIDQEAARDLVRAREDARGDLMRARHRLSKLLLRHGIVYYGGNAWTGKHDQWLRTEALEGLASPATRMAFDNDYAAVRSVLARRDRLDAQIAALAADSEFTALTRRLGCLRGIGVLTGFALAVEIGDWHRFTGNSIGSFVGLVPTEHSSGTSRAQGSVTKTGNGHVRRLLVEAAWHHRRRCTIGKTMRDRWDLAPAAARVRGDEGNRRLHQRWVGFIDRKKRSTVANTAIARELAGWCWSLAVLDDPATTSARMTT

SEQ ID NO: 420607 - protein, 433 aa, unidentified
MQVTRRPDPLVSPDGHPEPEQRRDLIGARFCVTHHSIVRPLLLIGWKLMATAKGAADVTMIGAERSDTEVETILGVDTHLDFHVAVAIDHLGRRLGEASVPTTVKGHERLLRWAERFGPVRCVGVEGTSSYGAGLARHLGAKGIDVLEVERPERRRRGSRRNLKKSDPCDAEAAARAVLAGESSGVPKSGDGTVEMIRTLRAARRSAIKARTQAANQLKGLRVTAPEQLRQRLRELSTKEFISVAARFRLGDDPRDVPTATKFALRSVARRYEALSAEIADLDAHLDRLVAQAAPELVSLPGIGTDSAATLLVVAGDNPQRLGSEASFASLCGVAPIEASSGKIVRHRLNRGGNREANRALYMICLARMRRDRRTKEYVARRTQEGKSKREIIRCLKRYVAREVYRLLISCDARSSPTGPQAEVHIASGSSAA

SEQ ID NO: 420608 - protein, 425 aa, unidentified
MRNENNGRIIGIRHRIKATAEGEARPTQIAIRKEYGDVSLYDLSDEQAELDFLRGVFPVSFRSLTEHEGVTEVEERYLKMRVLRAGEDPPKAHLKIAEGKRYRITHVADQFDGLQESDTVAMTLGGSGDYFAYALARRGEEIGARVMRVPPFVLKEYRQDDNKGRDAELLAELAKSRQGLFYELRVRDMEIIRLREAFNARQDAMKARIACEQRLRQHFIGSIFCNHDGYFPEGAIEKLYDERKANDVVYMALVAEEKARARELQKIVESSDVWRHVFSDIEGMGWAIAARIIAGIVDIRRFENASKFKAFCGVHVLSDGRFARLRSGEVANWHPDLRQALYLFGDQMNRRPDSIWGKKLREYKVKFREKYPESVVGENGKRRYGNAHIHKMAMWRTLTKFAELLFREWSRLERDAKQESTRYAA

SEQ ID NO: 420609 - protein, 445 aa, unidentified
MHYKRLLTWIDGSSSYLSVGLDVGADFTWMSIALPNGAFIGKPFKIVHSDPRSRDLAVTKIKEAQETYSLKSRCFLESTGIYHIPLLCFLRDKGFDCSVINPIITKNSTNINIRKLHNDKFDSKKAALVGLNVSLKTSIIPEDSIVDLRNLVRDYYYFKDLQSAVALKLTAELKMSFPAYAKVFSKVTTQSSLKLLSSYPLAGDMLEASKDDIVETIRSTARFGEAYALRKYDAVIAAAQDASVFGRALPSNAVRIRLYIDTYQEYQKHLDALLKALHETVERLQGTLVYDQICLLQSLRGIGFLSAVVLIAEMGDFKLFPSPKKLYAYFGLDPAVKQSGKLNGDKVHMSKRGSSLARRVLHMVALNNVKVDKGSGTPVNPVIYDYYTRKCSGKKKPVAMGAVMHKICNIIFAMLRDNKPFEIITPEEHCQRFAAEYPDKIRKAA

SEQ ID NO: 420610 - protein, 293 aa, unidentified
MTDLDRCVTGGVDTHKDTHVAAALDQLGRVLGTEAFPTTPAGYRALLRWLHSFGSVGPVGVEGTGAWGAGLARFLTAQGVEVIEVTRPNRQHRRRYAKSDPADAIGAARAVLSLEAAGTPKAATGAVEAIRLLQVARRSAIKARTQAANQLHGLLVTAPDDLRTSFTELTTPKIVARAARLRPTNLDTPTGAAKLALATIARRWLALTDELTLVDDHLQQLTATCAPSLVALNGVGTQTAATLLTTAGDNPERLTSERSFAALCGVSPRDASSGRQQRHRLNRGGDRHANAAL

SEQ ID NO: 420611 - protein, 374 aa, unidentified
MIATTRSERSVGEPTLYVGFELSQQTWKLALTSGMGATPVLRTVAPGDGAALRRVLAEARRRLGLPAGARVVSCYEAGRDGFWIHRLLTTLAVQNRVVDSASIEVSRRAKRVKTDRLDALKLVAMLIRVCQGERGVWREVTVPTAAAEATRHGSRERTRLVQDRTALRNQVRSWLVTWGTAVPRDAHGAWWTTVRDWADHPLPAALQARIARAAARLALLDAQVAELDAAQVARVGTAPAASPAQRLVALKGVATTSATTLLDEGLVWRAFRNRREIGALLGFSPTPFASGAVQHEQGISRAGNARLQSTMIQLAWQWVRWQPLSPLSQWFHGHFGPGRRPRKVGIVAVARKLLIALWRWATQGIVPAGALLKA

SEQ ID NO: 420612 - protein, 412 aa, unidentified
MDRLVERCAGLDVHKDSVAATVRVPGKDGQRLQETRTFATTTRGLLTLADWLASYGVTLVGMESTGCYWKPVYYVLEERFECWLLNAQHLRNVPGRKTDVADSAWICQLLEHGLVRPSFVPPKPIRELRDLTRYRKAQIEERVREVQRLDKVLQDAGIKVSSVASETLGVSVRRMLDALVAGTHDPEVLAELARGRLRQKLPALQEALTGRFRSEHHGLLVSQILAHIDYLDETIATLSARIEHVIAPFSRERELLQTIPGVARLGAEVLIAEIGVDMNVFPSDAHLASWAGQCPGNHESAGKRRSGKPRNGSKWLHKTLTESAKAAARSKGTYLSAQYGRLRGRRGPGKATGALRHSILIAAYHILEQKVPYQELGADYFDRRRSTEQRTRRLVRQLEQLGHTVTLQPLAA

SEQ ID NO: 420613 - protein, 402 aa, unidentified
MPFFIGLDWASQEHTVCVIDDTARVGWQGRVTHSADGLADLLRRLARFGPPATLPVAIERPSGLVVDTLLEAGHPVVPIHPNALKATRPRYAAAGSKSDPGDAFILADLLRTDGPRFRPLQPLADETHALRALVRSRDDLVTQRVALANQLRALLERLWPGAAAIFADVDSPIALAFLSRYPTPQSAERLGEKRLARFLAQHGYCGRRAAIELLARLRAAPVSRAGEAEAEAGGEGVRALVAVLVPLGTQIQQLSAAIAAVLAQHADGPIVQSLPRSGAVNAAQILAELGDDRTRFPSDEQLAAEAGVAPVTRASGKHRAVSFRWACNKRLRQALTTFADNSRHASPWAATVYAAARRRGCDHPHAIRILARAWVRVLWRCWQDRRPYDVTLHRAAMRLAAA

SEQ ID NO: 420614 - protein, 387 aa, unidentified
MAVTTQRAECIASGECRLLLAIELGRRQWKLGFTTGVGQRPRRRTIGTDAWDRVRDEIAAAKVRLRLPADTPVMSCYEAGRDGFWVHRYLTALGVTTLVVDSSSIEVSRRARRAKTDRIDVEKLLGMLRRYVGGERPVWRIVRVPSETDEQRRQLHRELAALKRDRARVTNRIAGLLATVGILLKVDTTFPGRLEQLTQWNGESIPVPLRARLTREWQKVQLMTTQIRELERGRRAALQESREAAVALVRRLLALRGIGETAAWLFVMELFAWRKFRNRREVGAITGLVGTPYKSGRLDHEQGISKAGNRRVRALAIQIAWGWLTYQPQSGLTQWYTRRFAQGGTRARKIGIVAVARRLVIDLWRYLDAGVIPDGAVFKESSGVATG

SEQ ID NO: 420615 - protein, 361 aa, unidentified
MEYIAFDCHKRYTWAVVEDQRGLVKREGKIPHVRGALREFLRGCVPGSPVAVETVGNWYWIVDEIEEAGCQPRLVHAGKAKLMLGMVNKTDKLDARGLNKLLRTGTLPVVWIPPGELRDKRELTRTRMVLVRQRTQLKQRVHATLAKYGLCVSEVSDLFGVKGREFLEDRLTRLPPQTRYVTEGVLSQIDVLEERVRAIEERMREVLEPTRGVQLLETLPGVGFILATVIALEVGDVGRFPGPGHLASYAGMTPRIHASGGKVRYGRMRQDVNRYLKWAYSEAANVVARHRSKHPERHVSQLYERVMRRKGHQKAVGAVGRHLAEATYWVLKKGEPYRDPVLKVGKAGARARRTHGPRRSG

SEQ ID NO: 420616 - protein, 353 aa, unidentified
MTDQRRAVVAGVDAHTDEHHLAVVDLQGRLLGAAAFPTTAEGYSRLIGWLRGQGEIERVGVESTGAYAAGLVRALLADGIRVVEVNQPHPHARQRLGKSDPIDAELAARAALSGQATALPKQTSGIVEAIRQLGVARAGALKARTAALQQLDDLLITAPEALRSELRRGRTLKARAALCLHLRPDSERLHEPAQAAKLALRSLARRARELEREIAELDQQLERLVTLAAPRTLQLFAVGTQSASQLLVTAGQNIERLRSEAAFARICGAAPIPASSGRTTRHRLDYGGDRQANRALHMIAVCRLRHCQRTRAYARKRTADGLNRREILRCLKRYIARQTYHTLRADLEALNGA

SEQ ID NO: 420617 - protein, 325 aa, unidentified
MTNETREPVYVGIDVSKDSLEVALADKAASVRFINDEQGVKALLEHLAGHHVAVVLLEATGGLEKRCAHALYLAGMTVVVANPRQAHEFAKSMGYLAKTDGIDARILSHFARTLHGSERFDKLQLKMATPQQEQLQALVTRRSQLVQMRVAESNRLALAHALSAKSIQAVIKLLDKQIKTLDEDIGNRLKQHFAQKLKLLEGFKGIGEGTKAVLMAALPELGQLNRREIGKLVGVAPLNHDSGKMRGKRSVWGGRADVRSALYMAALSAVRFDPTIKAFYERLRAAGKPPKVALVACMRKILSILNAVIKSNTAWEQRCPQASTA

SEQ ID NO: 420618 - protein, 343 aa, unidentified
MSKISIVGLDLAKNVFQVHGVDASGGVVLRRQLRRGAVEKFFAQSPPCTVGVEACGSAHHWARVIGHYGHQVRLMPPAYVKPYVKRNKNDGRDAEAICEAVSRPTMRFVPVKSVEQQATMAVHTTRALLVRQRTMVANSLRAALSELGIVAAQGIKGLRELMAKLEAPHEEVPEIMRGALLLLAKHWQALEADERVLEQQIAKAARSDREARRLMEVPCVGPIIASTVLAKVPDATVFRSGRNFAAWIGLTGRDHGTGGKHRPGRISKQGDRMLRALLISGASAYLRHQRTRGVSDPWLRDLLARRPYKVVMVALAAKTARIIWAMLVKGEPYRDRASAPAAA

SEQ ID NO: 420619 - protein, 418 aa, unidentified
MIRIKAKKLRIVNGKKFIVSIDIGKNIHYGYIRDLNNNEVKPFPFHNTLKSFQEFWGKISYFQKEHGLEEAVIGYESSGPYAEPLCEFLRKKPVKLVQVNPMHTKRVKELEGNSPNKTDRKDPRVIADIIQLGHALTVIVPEGTAAELRRLTHTREREIKVQTADKNRLQKLMYVIFPEFLRILKISLKSAMFLMKHYPAPEDIVEIGCESLCKILKKVSRGKIGYQQAEELFEAARTSVGITHGKKSILIEIRHIVAKIENEEVFIKRLETMMEEYLSQIPSSKSIRSIPGIGVITTAGMIGEVGDFRKFKTISEIMKLAGFNLFEVSSGLHTGQRHISKRGRPVMRKLLYYAAVNAVKSYGIMHDNYHLMLDKGKPKTKALIAIARKLLKLIFALARDNSMYVEQYNSSRKRIVAA

SEQ ID NO: 420620 - protein, 393 aa, unidentified
MICVGIDVAKDKHDCFILSSEGEVLADVFTISNNAEGFDTLLQTIHRCARPEDKIKVGLEATGHYSYNILGFLLDKGLHTFVINPLHTNLYRKSLSLRKTKTDRVDARTIAAMLMSDVDLKPYTDTAYHNEELKSLTRYRFDKVKERAKLKQSVSRLVTILFPELEKLVPTLHMASVYALLSEFPGAKQIARAHLTHLKALLNDASKGRYGRDMATELRDAARCSVGSVMPAKSLELQHTIRLIRELNTEIEDIESAIQTIMEEMQSPITTIPGIGFRMGAMILAEIGDFSRFDSPDKILAYAGMSPSTYQSGQLSLSGTYSHMEKRGSKYLRYALYNATKYVCLWDSTFEAYLAKKRAEGKHYNVALSHAAKKLVRLIYAMEKSRQPYNSVA

SEQ ID NO: 420621 - protein, 319 aa, unidentified
MTIAVPLAVAAGVDAGQRFLDVALAPSGQTFRMPNLAEGIAEIIARLERSGVRRVVLEAIGPYAEPLVKALSVAGFEVGIVNPRRIKAFREAEGGRAKTDRLDARLIARFALIMPETLRPLPTDTQLELKALSLRRRQLTEIIAIEKTRMKQVRGTLLLDSHRAAITALSAQCQAIEAELAKRIGDDAELRRVLHILKSIPGIGERVATLLITDLPELGQRDRKAIASLAGLAPHVSQSGAAPPRAAIAGGRPCVRAALYMAALVAARHHPKLRDDYNALRLQGKPGKVALIAIARKLLVTANALVKADTPYQGKTLDT

SEQ ID NO: 420622 - protein, 344 aa, unidentified
MEISTIGLDLAKSVLQVHAVDGDGGAVVRKALRRSQVLPFFRKLSPCVVGMEACGTSHHWARELAGLGHEVKLMPPAYVKPYVKRGKTDANDAEAICEAVTRPTMRFVAVKSPDQQAALSLHRSRNLLVKQRTQLVNMVRGMLAEFGVETPRGLHHALALSSKLAEGEAAAVPTLAQRVVAALARQIEALQAELIAIEKEILAWHRSSDVSQRLATIPGIGVISATALAASVTDPQQFRSGREFAAWLGLTPLQNSSGGKERMGRISKMGDKYLRRLLVVGMTSLVRRARVNPACVDPRINDLLARKPVRLATVAMANRTARVIWAVMARDESYRRPAAMPRAG

SEQ ID NO: 420623 - protein, 337 aa, unidentified
MEVYAGLDLHSTNTYVAMIDEKNKVLYKQRHRNELSSIVSALDPFREDIQGVVVESTYNWYWLVDGLMDEGYQVHLANPSAIKQYEGLKQVDDKRSSLWLANLLRLGILPTGYIYPKEERPVRDLLRKRLHLVRHRTSHILSIKNIIARSLGVTIKSAEVKKLDSLQIRRLLPDEERWRAVMASLGLIHHLEEEITEIEKMIKARIALKDEFGRLLSLPGIGNALATTIMLEVGQITRFPTVQDYSSYCRCVKSTRISNGKVTGHGNRKNGNKYLGWAYIEAAQFARRYYDAPRRYYEKKLSNTNKIVAIKAMANKLARASYYVMRDGAEYDQARLF

SEQ ID NO: 420624 - protein, 371 aa, unidentified
MEESSRTLYVGLDVHKESIAVAYALEDRGAEVASLGSIGTRQCDIDKLIRKLQSKGATLVFVYEAGPCGYWLYRYLTRKGLSCHVVAPSLIPKKPGDRVKTDRRDAITLARSMRSGDLTAVYVPQIEDEAIRDLSRGREDAMRDLKATKHRLKAFLLRQDIRYEGRANWNAAHLRWLSEVVCPTRAQQIVFQEYVRAVTEQHERLQRLETELHEEVKGWRLYPVVEAIQALRGVELTGAVIVIAELGDLTRFDTPRKLMSYLGLTPSEYSSGERRRQGGITKAGNSHARRALVEGAWAYRYPAKVSRHLQLRLEKLPAEVQAISWKAQVRLCKRYRQLTARGKHVNQVVVAIAREMAAFAWAIARTVPLAP

SEQ ID NO: 420625 - protein, 352 aa, unidentified
MTINIGADVHSKTISAYAMPTFDTESEELEYCEEFNIRFGKFRNDYESLSDLANFVRDTEHGILIENTGFTNVLYWTLTNMGCTVIVALPVDLYEINQSKQKTDANDARKLANYMRRRTLGETPFAECLMVDSVWMNRRLICRNYMTESNILSDTRRQLRSYILLKNLKPGRLTNDIASATSLASLSQCADKPLLLLITRAKDCRKRMDKVLEDIEEEFSGEPMYESMKSIKGFGPVVSAYLCSMIIDVKRFRTPNQFAAYFGIVPGQRESAESSPHCKITRRGDATARHLLLRATMLHIQFDKDRESTVSQMYDRLKGRGFPTKKAYMACTNKMAHRLFSVLKGLSDGKEV

SEQ ID NO: 420626 - protein, 343 aa, unidentified
MQVHTIGVDIAKNVFQIHGVDAHEQVVLTRQLRRKQVIPFFDKLAPCLIGMEACATAHHWARELTKLGHTVRLIPPVYVKAYVKRSKNDASDAAAICEAVTRPSMRFVPIKSEEQQAALAVHRARVLLIRQRTRLMNALRAHMAELGIVAETGLEGLAQLVNIVAEARSSQLLPRAMVQALSALIDQIMSLNQQIRELDLCIREQHRASDVSKRLESIPGIGVIGATALAATVTDPSQFKSGRDLAAWIGLVPKQNSTGGKIKLGSITKQGDQYLRRLLVIGGTSIVKMARIFPWRYPWVVKLLEKKPAKVVAVAVANKLARIAWAIMSKGGTFRTANYAVKM

SEQ ID NO: 420627 - protein, 360 aa, unidentified
MTATMTYVGLDVHARSIHAAAIDVVSGELRRARFGGDSEEVLAWLLTLPAPLRGCYEAGPTGFALYRAAVVAGLRLDVVAPSKTPRAPGDRIKTDRKDAELLARLLLAGQLKAVTVPSTAVESARHLCRAREQVRGDLMRARHRVSKLLLLYGRVYAEPTTWSQRHRRWLAGQHFDQSTAELAYLDTLAAVDGLVARKTALDERLSRLASEGEWAQTVARLRCFRGIDTLSALVLALEIGDFARFDRPARLSAWLGLVPGLDQSGESRRQGSITKTGSSYARRLLVEAAWQYLREPRIGVTLRNRQQGQPAQVLQIAWRAQHRLYRLQQRLRARGKPGNVTTVAVARELACFLWAAAVSD

SEQ ID NO: 420628 - protein, 449 aa, unidentified
MGRKRKTEQLQLVYPNCAGIDIGSRFHMVAINPEVCDEPVRRFGAFTDDLHAMARWLKGHGVDVVAMEATGVYWIPTYEVLDAAGFEVHLVNARACRQVAGRKSDVLDCQWIRQLMSYGLLRGAFRPAGSWCEVRAYARQRASLVRDQARSTQHMQKALTQMNLQLANVISNITGKTGMAILRAIITGERDGAVLARLRDPRIKASRETIARSLVGTWREEHLFALRQAVARYDFFETQIQACDRAIDATLAALADDAVTELPDLPAGRSGHRSNAEDKRLRTALIQAVGVDLAAVPTIGTDTALVVASELGNDLSRFPDGDHFCSWTTLAPPTRISGGKPIGGRHATPVNRVGEALKLAASNARHSNSFIGAAHRRRLQRMDKAVAIKATAHQLARLIYAMLTQGQPYVERGIEEFERRRQDQQRRTLERRARALGLILTEDPEKSAA

SEQ ID NO: 420629 - protein, 343 aa, unidentified
MNCVGIDVSHGKSIIVVMRPFGEVVVSPFEVLHTDSELSKLAGLLKSLDGETRVVMESTGYHHTPVAWLLHDVGLYVSVVNAMLVHDYGNNSLKRAKTDKKDAVKLANCGLDHWLTLPRYVPEEDTRLMLKTCYRKYQQYSKVQTMLKNNLISLLDIAFPDANRLFTSPPRADGSEKWVDFVAAFWHCECVCNLSEKAFTAKYHKWCRKHRYKFCEDKTLDIYSSACGHFGVIPKTDTAKLLVEQAVFQIRATSTTLAALKQEMQSLAASLPEYPVVMGMFGIGPALGPPLMAEIGDVRRFHSKKALVAVAGIDAPPYQFGQMDVRSHSISKRGSASLRRRSS

SEQ ID NO: 420630 - protein, 468 aa, unidentified
MGLRDAIGIDPDSKGFICASVKLSGTQVATKGYMATEADLKAFLSWVKGQGDLIVAIEGSNGLSRPLEKALREAGVIFYSLSAADTDKFRKAVLGQNKDNRKDAESVARYAMALEAQGKLERYRRVWFTDVELQLLTRGYERKSQGMTAEINRLWKLLRLACPELYLALGGGHPEVELSEKILKSQGILTLLSQKPDFGEWKLLSEEQLLEAMGGGKYKGRDKLIQQLRKLAGSFAPVSAALALLIRSSAQQIERFKAEQAEITKMLEVLTRDNAAVHVLKQMRGIATLTAATMMAEIIDIRRFPREDSLACYSGLGMKEHSTGDSIRMVHTQLFNHRLKDVFMTAARNFVLYNPDSHLAGYHRNLVKRGMSSLEATRRVARALVRVIYRTLSAVVAQDTHTSASTQKKEGEGDMASGLTRSDQSHTSNISPSSLRTSKTRGTKAVKGLTAQTARAGSRRKTISKKSA

SEQ ID NO: 420631 - protein, 408 aa, unidentified
MTVVGIDVSKGKSMVAAMKPGGELVAAPYEVRHSDIELSRLALNVLCMEPDTRVVMEATGRYHEPVAALLHSEGIFVSILNPLLIKQSGAGSLRKVKSDPKDALKIAKYGLDNWSTLREYTPMEAIRQQLKLCARQCDLYNKNIVMLTNNLISLSDKTFPGVNELFSSPEKADGHLKWVDFYRTFWHCDCINRMSPDTFGERYKKWCKRKGYHFSADAADALYAASCGLYTTLPRDNNARLLVTVAADQLIALRENQSKLEAEMLNFCKQLPEYETVMAMYGVGKSTGPHLMAELGDVRRFLHRSSIVAFAGVDPGVVGSGKMQLSSVATSKRGSPQLRKALFQVVSTYVKCKPENEAVYQFYTKKRDEGKPFFVCTTAAANKFLRIYYARVKECLNAAESATQVEEG

SEQ ID NO: 420632 - protein, 320 aa, unidentified
MQSPLFVGVDVAKDSVVVACSQASFPSRPVPNTTISLKAFLRTLPARSLIAMEATGCYYQNLADLAHGLGLQVYVLNPRDLYHYAKGVGLRAKTDRVDAALIARFLAHEADHLRPYEPATAEQRKMDQLLRRRAKTVTLKTALRLACAKDAFIKTETAKVIKAFDVLLKKIDGQISQLNRATPERACEVQRLQTIPGVGVLTASWLANLMDRVKFSNSDALVAFAGMDPRPCDSGQKRGRRRLSKRGPAEGRRLLFNAAMAAIRSPFWKDAYAHYRQRGWATTAAILIIARKILRIAFAMHNAQAVFDPRPFGERTARTG

SEQ ID NO: 420633 - protein, 409 aa, unidentified
MKMAGIDVHKKVLMVVVVDTSALQEKPARRRFVTLRSELQRFRIWLQEQGVEEAVMESTAQYWRSVGLELEPHMRLHLAQAFSNRAPRGRKHDFKDAERLVRRLIADELILSFVPNGEQRIWRSLTRMKVQLTRDRVRLQNQMECLLEEMRIKLSIVVSNLLGASGLRILHALAQGETDPKKLAELGDERLHCTEEQLVDALTGRVQPMHRGMLALQLQRLQLIDQQMAQLNHMIAQAMKSHQDAVIRLAEVPGLGVDSAQQIIAEVGAQASTFSSAAELAAWVGTCPGKEESAEQNQSSRSAKGNKYLRRVLNQAAHAAVAKKGCHFQVVFRRLMPRLGYKSAIWAVANRLCRVVWKILHEGVRFIEQGREVGPREKKQRAQLLARALRKLGYEVTITPINQLAPKPA

SEQ ID NO: 420634 - protein, 349 aa, unidentified
MSAKFSFEIAVIGIDIGKNSFHMVGLDRRGAIVLRQKWSRRQVETRLANIPPCLIGMEACVGAHHLSRKLASLGHAARLMPAKYVRPYSKGQKNDFRDAEAIAEAVQRPTMKFVATKSAEQLDLQALHRVRERLVSQRTGIINQIRAFLLERGVAVRQGSRFLRAELPRILATRCDALSPRMVRMLEDLAGDWRRLDKRIEGLSSEIEILARQDVGCERLMSVPGIGPIISSAMVAAIGTGDAFSKGRDFAAWLGLVPKQISTGDRTILGKISKRGNRYLRVLFVQAAWVVLIKPKSWDRHGLKPWLEAAKKRLHHNVLAIALANKLARIAWSVLAHSRTFEASKIQAA

SEQ ID NO: 420635 - protein, 410 aa, unidentified
MLFIGDDWAEAHHDVEIVDETGRRLARRRLPEGIEGLAGLHALIADHLAEDAEPADVLVGIETDRGPWVQALIAAGYTVYALNPLQVARYRERHGVSGAKSDPGDAHTLAELIRLDRAHHRPVAGDSEVAEHVKVLARTHQSMIWSRQRQTNTLRSMLREFYPGALQAFDELAGRDALAVLAIAPSPQAGRGLSINKITATLRRAGRQRNLQATAERIQTALRAPQLEAHPGVVDAYTASVKALVAVITALVTQIETLQSEVEAGFGRHPDAEIYLSQPGLGPVLGARVLAEFGDDPARYADPKARKNYSGMAPITRASGTKRVVLARYARNRRLADALYQQAFAALTASPGARAYYDRHRARGATHHQALRALANRLVGILHGCLRHHTTYDETTAWPAHHQTPIPAAA

SEQ ID NO: 420636 - protein, 405 aa, unidentified
MIFVGIDWSESHHDVEVQAGSGKVLKQLRIDADVAGLTRLQETLSELAEEPSQVVIGIESNHGLLVNALVASGYRLYSINPLTSARAREGESPGRSKSDRSDAHVLANLVRTKRQDLRPLAGDSEQAQAVQVRARSHARAVRMQQRLRNQLRSALAKFYAALLPLLSEGEDLRDALAVLSVAPNPELGRRLSLNKLQSTLGRHGRQPNLAGKAAQLQAMLRAPQLELNSPKVVSAYSDEVSYLVRSLLQVRSEIKLLEEQLAEDFRGHPDAEIYLSLPGLADVLGARVLGESGDDPTRYPDARARKNYAGSAPITQRSGKRKLVSRRIARNRLLADTTFLWGLCAISASAGARRYYDQLRARGKTHNEALRVVGNRMVGILHGCLRRRCLYDEAIAWRPSLEQAA

SEQ ID NO: 420637 - protein, 411 aa, unidentified
MDVYCGIDWSEDHHDIALVDRDSKLLARRRISDDPAGLAALLDLLAEHGDSADDLIPVAIETPRGLLVACLRATGRPVYPVNPMAVARYRDRHSVAGKKSDHGDSVVLAHVLRTDMDMHRPLPADSELAQAIAVLARAQQDAVWDRTCAHNKLRSHLREYFPGFLAAFAAARGGITRPEARAVLAAAPTPAAAAALTLTQLRALLKKAGRTRGIDTEATRLRDAFRIPQMRQLPLVEQAMGQRTQALLGQLDAACAAADDLEQAAVASFNQHPDAGIITSFPGLGSLTGARVLAEIGDDRSRFQDAKGLKAYAGAAPITRASGKTKSVTRRHIKNNRLNAAGYTWAFSAISASPGARAHYDRRKEAGDRHAGALRNLFGRLLSGLHHCLITGQHYDEATAFPARPNLPAAA

SEQ ID NO: 420638 - protein, 390 aa, unidentified
MQALYPRPDEHAAVRTDLKAIFVSLELSRSTWVITSLAPGGGEKMSKHAVPSGDIPALLARLSQLKEKARARTGQVFPIIVIQEAGLDGFWIHRVLQQEGIESHVVDPASIATSRRRRRAKTDRIDGEALVRALLAYKRGEPRVCAMVQAPTPHEEDRRRISREREVLTAERVQHVNRIKGLLFAQGIGDDAPLHRNRRERLEELITGDGRPLPECLKAQIRRELDRLELLIEQIKAVEAERDAVLAQAQASPGVPAPAAQLLALRGIGPEAAATLWSEGLFRTFNNRKQVAAYAGLAPTPWQSGSVHRDQGVSKAGNPRLRTIMIQIAWLWLRHQPQSALALWYRARIKRTGGRLGKTMIVALARKLLVALWKYATAGVLIEGAVLKPA

SEQ ID NO: 420639 - protein, 413 aa, unidentified
MKKNFILFDQVVERGAGMDVHKETIVVTIQGKGIKTETKSFRTFTSSLKKLREWLKQHGITHLAMESTGVYWKPVFNVLGDDFMIILVNARHVKNVPGHKTDKQDSKWLAKLLLSGLLKGSFIPGKEIRDLRDLVRTKTQLTGEISSAKNRFIKFMESANIKLSSVLTDVFCVTGQKIIAEILDGDYKPERLLHHVHGRVKASRQDIIEALTGNLDEHYRFMMKTMLEHIANIENVIAKIDAQIMQKTEDHKEILELLETIPGVGRDGAICIVAEIGTNMEAFASHKHLASWAGMCPGNNESAGKNKSGRITYGNAFLRTFLVQMAWAAARTKNTYLSSKYKSLVGRRGKKKAVIAVGHKILIAAYFIMKNKVGYNELGEEYLNNFRRDKLINYYKNQLQKLDPNVNFDKEVA

SEQ ID NO: 420640 - protein, 457 aa, unidentified
MMETKRRREQRSMLPVHPDAAAIDIGATVHVAAVGPARDPEPVRSFGTFTGDLHRLADWFAQCGIKTVVMESTGVYWIPIYEILEQRGFEVRVVNARDAKHVPGRKTDVSDAAWLQRLHEFGLLRGSFRPQGAIAALRAYLRQRERLLDYAAAHIQHMQKALTQMNLQIHHVISDITGATGMRIIRAIVAGERDPDTLASYRDIRCHSSAETVRQALIGNYREEHLFALAQAVELYEVYQAKVATCDEKIEVVLERLKQTCRAPAKPLRAARHKTRQPNAPAFDARGALYAVLGVDLTQIHGLGPYLALKLISECGTDLSAWPSAKHFTSWLSLAPGNKISGGKILSSRTRPSGNRAAALLRLAATTVGRTETALGAFYRRLSARIGKAKAVTATARKIAVLFYNAVRHGMDYTDPGASYYEERYRQRVLTNLQRRAKAFGYVLQPTEIKVVSMAVS

SEQ ID NO: 420641 - protein, 379 aa, unidentified
MEATLIGIDVAKSVLHLVAMSSQGIVIWRKALPRRRVLEFLASLRPATVAMEACATAHYWGREIQKLGHQVRLIHPAFVVPFRKSGKNDFNDAEAICEASCRPMMRFVELKTIAQQDMQSIHRARRLLIKQRTQAANHMRGLLAEYGITVRRSISALRREAAELAAEPERLSTTMRLVVGNNLEQLRLLDQQLAQLDRQIAQMCRTDERSRRLAEVTGVGALTATALVAKVGNARQFPNGRALAAYLGLVPRQNSTGGKTVLLGITKKGDRYLRTLLIHGARAALLVAPHHDDRRSRWALQLRRKSGPNVAAVALANKNARVMWKLLTSGEHFHPQPAADQPEIDGEGARKGSQTRKSRSSSAPALPVYPPCAPSPHTA

SEQ ID NO: 420642 - protein, 400 aa, unidentified
MTADGEIDIYLGLDVGKGEHHATALAPAGKKVFDKRLPNTEPKLREVFTKLQAKHGIVLVVVDQPASIGALPLAVARDAGCRVAYLPGLTMRRIADLYPGEAKTDARDAHVIADAARAMPHTLRAVEPADETVAELEMLTGFDDDLATEATRTKNRLRGLLTQIHPPLEKVVGPRLGHPAVLTLLERFGSPAQLRKAGRRRLVTLLRPKAPRMAERLVEDIFTALDEQSVIVPGTDAAALIIPSLVSTLGSVLDQRTLLASRIEELLEAHPLSAVLTSMPGIGVRTAARILIDVGDGSAFATAGHLAAYAGLAPVTRASGSSIHGEHPARRGNKQLKRAFYLAAFASLSQPESRTYYDRKRREGKHHVAALIALARRRIDVLFAMLRDGTFYEPPVTAAA

SEQ ID NO: 420643 - protein, 393 aa, unidentified
MNKIIYIGMDVHSSNFTLCSFEPGYGMSEDKIFGQVQFKDDLIKNTEKYICNLKSQRKDIDIVCGYEAGCLGYVPYRELTRSGINCKILAPSTMAVQKGGKKLKNDFRDALDIARCLASGSYKAVNVPDVEDEDVRDYIRMRDDHKTALKQIKQRLNAFCLRHGFQYDKSKWTLAHIRWIKHLECTLKQKEIINEYLATYEVLKSKLDAFDARIDDLATSERYAEKVNKLVCIKGIKTNTAMSFISEVGDFKRFRTAEQFAGYIGLVPGEQSSGDKVCRTGITKSGNTHLRRLAVECCNSFRRGNVGQKSVDLKKRQKNAPSEVINYADKASVRCQRKYYRMVNKGKNPNIAVTAVAREFCCFIWGMMTSNYEYSNNEVRELMPANGLIRVNL

SEQ ID NO: 420644 - protein, 336 aa, unidentified
MVQIYGIDLGMSSFDVSFLSESGSVRHLSGVKNTVHGISKFLLSLPSSAVLCAEHTGVYGDLLLRLCTLNRICLCFVPGYQIKHSLGLQRGKSDPLDACRIREYAERFYDLLRPCFYPGEEMSELQELYRTRSLLVDSRKRLDTLNIGDNCKSSVSLAADHARRAVLAELNTQISGLDHEIEALIQNSSEFSRNYQILTSIVGVGPVTSCELIIKTENFRKLDTAKKCAAYAGIAPYPKESGKMKCGHKISPMGDKQLKTLLFLCARSAKEHNKEIRLYFLKKHKVEKKHFFVAMNNIANKLLRLIYSLIHKQQTYDRDYIQRDPRCVVISDTNKC

SEQ ID NO: 420645 - protein, 341 aa, unidentified
MDIAVLGIDLGKNSCSVAGLDASGKVILRRRMQRKTIVGLASKLSPCVIAMEACCGAHHLGRVFSAQAHTVRLMSPEYVRPYVKAQKNDDRDAEAIAEAATRPTMRFVTLKSEEQLDMQTLHRARDQAVRERTSLMNQLRAVLLERGVIVPQGRAKLRLRVTELLRHGAGELSSRIQLLIEDMLTRWQGLDERIAVFDAEFTAEAKRDEAARRLTSIPGIGALNATALVAAVGDAETFARGRNLAAWLGLVPRQATTGGKPRLLGITKRGSKYLRKMLIQGARAALPTLSRSNTRLGQWLRGLLARAHSNTVVVALAAKMARIVWALLRYGTTFEPRAIAI

SEQ ID NO: 420646 - protein, 342 aa, unidentified
MKIATVGIDLAKNVFQVHGVNEHGKTVLKKQLRRDQVAEFFARLPGCLIGMEACGSAHHWARKLSSLGHDVKLMAPQFVKPYVKTNKNDVADAEAICEAVARPNMRFVPIKNAEQQAVLALHRVRQSFIKARTAQANQIRGLVGEFGLIIPQGIGNIAKRIPELIEDACNELPGSFRLLIDRLMTHLKELDRQVCELEARIKVWHRESELSSRLEKVPGIGPITASALVATIGDAKSFDNGRQLSAWMGLVPKQNSSGGKTNLLGISKRGDSYLRTLLIHGARSAILAGQRKAEGNVDSWLKGLLQRRNHNVAAVALANKNARIVWALLARGKEFRLDYATA

SEQ ID NO: 420647 - protein, 314 aa, unidentified
MSPLVFVGIDVSQARLDIAIRPGASFSFTHEESAIATVVEQLCALSPTLIVLEATGGMKIPLTSALATAGLPVVVVNPRQVRDFAKASGHLAKTDALDAQVLAQFAEVMHPQPRPLPDAETRALAALLTRRRQLVEMLTAEKNRLLSAPSPIRTRLRTHITWLERELQSTNTTLAEAIRQSPVWREKDELLQSVPGVGPVVTSTLLASLPELGTLTHKQIAALVGVAPLNRDSGTLRGRRTVWGGRAQVRAVLYMGAIVAARFNPVIRIFYQRLQRAGKAKKVALTACMRKLLTILNAMLKHRTPWRQVETHHA

SEQ ID NO: 420648 - protein, 411 aa, unidentified
MNNTLFVGIDISKRSNVATFMNCEGKVVGRLTFSNNGSGADRLVARILSYYEKEDFEAIRIGMENTSVYSKNLVWFLYEHEALNEHKLSIIPLNAIMVANYKKSFLDMDKDDITDSFAIADFIRIRPGLLPFKLDDRQEALKIMTRSRYNYVQALSRMKSQFLTRLFLSFSEMEAGKPFYSIFSKTSLSLLEEEFTLDELAEKPIPELVEFLQEKGGGKFQNPEEIAKVLKKAASSSYRVPAMVRESLNRTMASDMEIMRILENEIHNCDKNIEKLMKSVPAILVSIPGIGPVLAAGIMSEIGDISRFQKQESLGKMAGFKWKRNQSGKKESEDKAAVLSGNKKLRYYLVEAANRVRIHDPVFEAYYRKKYAESKTHAHKRALILTARKLVRVIFYLLKENKLYKPDVGIS

SEQ ID NO: 420649 - protein, 383 aa, unidentified
MKAKQRGKSDPASFAKRSKWHDMNRKQRRETMRKLQSEDLSLEVIHPDAAGIDIGNESHYVAVPQKRDREPVRRFGCTTAELKSIADWLKQCGIRTVAMQSTGVYWIAVFDILEEAGFEVYLVNARETKNLPGRKSDVQESQWLMKLHTYGLLRNSFRPAQEIRTMRTYWRQRNDLVRSASRHIQRIQKTLTQMNIQLANVLSDVSGVTGQTIIKAILGGERDPHQLAAFRDPRVKASQEEIARSLEGHWEPDLLFVLKQEQEGYEFCQKQISQCDGQLEHYLLQREDRSHGAPLPEEKRKTRLRKKYGNNPQFDLRAELFRMTGTDLTRIDGIDIVTATTIFSEAGYDMSRWETENHFVSWLRLCPDNRISLNSETPRFVFS

SEQ ID NO: 420650 - protein, 345 aa, unidentified
MPYYAGLDLHRSMSVIVLKDAQGQLICQGRVDNDPVALEQFFAPHREEPIVVALEATTNYAWMYDTLERLGCQVELAHPLKVRAIASARIKTDRIDANILCDLRRANLLPTSYVPPPPIRDLRELLRHRMRLVHDRTQVKNRLTTLLTKANLQAPGTDPFGVKGRQYLAAIPLPPMLDWQRKDGLEQLDFLNAQIHRIDRQIRVIAKDHPQVPCLTAIPGIGIFSALLILAEIGEIARFPSAKQLVSYAGLAPGVYQSAGTRHGRGITRQGSRYLRWILGQNAQHAIRRPGPLRQAYLRLSKGKGHGKAVVAVARKLLVGIYAVLHDGKSFCPTDPGTLAQRSPR

SEQ ID NO: 420651 - protein, 318 aa, unidentified
MTDVKRVVGIDVAKEKLDIALRPEKTFWTISNCESEFPSLIDKLAEFNPDLVVLEATGGLEMPVSSVLAAAGLPVVVVNPRQIRDFAKATGRLAKTDRIDADVIAHFGESIKPEIRPLKDERTRMLTEILTRRRQLVDMLTSEKNRIKTARARIRKDIAQHIKWLEKRIQHTNDELEKQVKQSPIWRKQDEIVTSVPGVGPVLSLALLTGLPELGKLNNRKISALVGVAPFNRDSGKFKGTRSIWGGRANVRSVLYMATLVAVRFNPVLKKFYDRLVQAGKKPKVAIVASMRKLITILNAMVKNGTKWQDFSQQNSCR

SEQ ID NO: 420652 - protein, 412 aa, unidentified
MEGETVIAGVDTHKDVHVLCLLDGLGRKIWSGSFGADPEGYDRLAEAIGDPGSCMVVGVEGTASYGAGLTRRLVELGYNVVEVLRPKRDKVRPGEGKSDPLDAERAARKAASGRGCSVPKSQDGWVEAVRQPYVARRLAVATSTSCVACAKSMLTTAPSALRERFRGSERPKDLMPLLARGRKAGDALEESVLASLRSVAAVWKEARSQVESLDERIRALLEANAPALLGVEGCGTTTAAALVVAAGDNPGRLKGEAAFSMMCGASPIPASSGKTDRHRLNRGGNRQANWALYEIAIKRMAYDERTRRYVARRASEGKSRREAIRCLKRYIAREVYHVLMDPNPDGAAPEGPELAKMRKAMRVTQKKAAAELGLSAATLGHLERGKRRSTKLERRYYELLCELKGALPQTAS

SEQ ID NO: 420653 - protein, 418 aa, unidentified
MPPTSRQPPRRNAGKGIADMITVGIDIGKEKHAAAILGEDERLLTQPAFFVNTHEGARKLWAAIERHAGGGPVRVGMEATGNCWKPLHDYLVAKGAAVDVINPIVTSASMSGDVRGRKTDKRDAVSIAETVMRGKHAVRRPEGEDEKELKCLTRQRRCLVDGRSGMKNRLRDQLLETFPEFSALFDDLFAPLPLALLARWPSASALAYARRDSVAKVVRDNSRRKDAAKEAERIIAAAKDSICLAHPPPKSAARCIQSTLEAIKAANANIKAIDGEIQNCKKPEMARLMDGIKGAGKTLPMVIASEFGGFERFEKSGAGAGMAKRLLAFAGCEPRIRESGKWKGRTMVSKRGSGQLRLALYLVANTIRLNDDFFKAVYEEKKKTKHHSVALFYVIRKLLEVLCSLHRSGRTYSTVRPA

SEQ ID NO: 420654 - protein, 344 aa, unidentified
MTQYAALDVSQETTAICLVDDAGRVIGEAMLPTCPDAIAAWLARRAADLGRVGLETGPMAVWLWNELHARALPVICLDARHAHAALKVRPIKTDRNDAAGLAQIVRIGWFKQVQIKTRANYEIRSLLAARDALVQIRVKVENEIRGLLRTFGILFGKAVGGFKRRADELVAGELVASPAMRRLVETLLRARAAVLGEIKELDQQLLAIARVQPVARLFMTAPGVGAITALSVASAFDQAQRFRRSSSAGAYLGLTPRRYQSGEVDRSGRISKHGSSLTRKHLYEAATTLLTRTTRFSSLKAWGLRLAKAIGFKKARVAVARKLAVILHAMWKTQAPFRWGEAAA

SEQ ID NO: 420655 - protein, 355 aa, unidentified
MSHDTAIWQRTIGLDVGDRFTQVCVLDGTGEIMEEGRVRSTREGFEARFRELARSRVVLEVGAQSAWMSRALESWGHEVLVANSYQMGRIYRGQDKSDRRDAETLARIGRSDPALLRPIRHRGAQVMADRSLVRSREILVRCRTSLVNHVRGAVKTVGARLPSSGTAQFARRARGGLPEELREALAPILDTIQELTDRIRAYERQMERVAAERYPQTALFEPIHGVGPVTRLAYVLSLDDPYRFATSRDVGAYLGLRPKRRQSGDEDPELPITRAGDPQLRRLLVQCAHYILGPFGRDSDLRRFGLRLAARGGRAAKKRAVVAVARKLAVLLHRLWVTGEDYDPLYLARRRQEVA

SEQ ID NO: 420656 - protein, 413 aa, unidentified
MLKIVYPICCGMDIHKSFLVACIATTNEHGVTSYKTKRFSTFTGDLRRLAAWLSENNCNDVCMESTGKYWIPVYNILESSCQIVLAHPKYVKAIRGKKTDKKDAKWIADIFKHDLVSGSFIPPADIRQLRDLVRYRWKLTSFTTGEKNRAQNCLTVSNIKLDDVFSDVFGKAASAITTRLLESNEPFDVTPYLTKGIKASVEDIQNAVDGKMCAEQAEKLRIIRSHMDNLELCKMNLESLILFVVEKYLPQLNLVLTVPGIQTFSSIAVIGEIGVDMSVFPTSKHLCSWAGLTPQNNESAGKKKTTRVSRAGAYIKPLLVQCANAAVKSNKHPEIKNRYLSLKKRRGHKKAILAIARMLLTAIYNILKKSEPYNPALYRKANLPPAHREVSVDQAIFILQRQGYLITHPALSA

SEQ ID NO: 420657 - protein, 344 aa, unidentified
MEKHTVAAVDVAKVVFDVALSDEPGRVRLTRRLPRGGFLAFFGQLPAAIVVMEACGSAHYWARRIQDLGHQVVLLPPHQVRPYVTRNKTDRTDAKGILEAYRNADIRPVPVKSVPQQVLVTLHRFRSGWLGARTAHLNTLRGLLRELGIVIPVGAEKVLPQVRALIADADSDIPDALRPVLAAACEEIEALTERIKMAQRQIEAIAEQTPVVDLLWSIPGIGLLIATALVAFVGDIHRFPSGRHFASYLGLTPREYSSGMKRRLGRISKRGDAYIRMLLIHGARSILCHAKKAKEHDRLRTWALELERRVGHNKAAVALANKLARIAWATWKNGRPFESLPKAA

SEQ ID NO: 420658 - protein, 346 aa, unidentified
MTIVEDACIVTGGVDTHADMHVAAALDPVGGLLGVREFPATAAGYADLLGWLSGFGTVALAGVEGTGSYGAGLARYLAAAGIRVVEVDRADRQDRHRQGKSDPLDAVSAARAALSGRAAGAPKGRDGAVEAIRALMVAKRSARAERTQAINQARALIVTGPEDLRARFARHSAAGLAEAIAALRPRPGDAAEYAVRVALRELGRRVEFLDAQLERLDDLIVPLVTARAPGLLSLYGVGPDTAALLLVAAGDHPGRLRSEAAWAHLCGVAPIPASSGKVRRHRLNRGGNREANHALWRIVITRMSWHPETRAYVERRTKEGLTKKEIIRCLKRYVAREVYHHLRGGG

SEQ ID NO: 420659 - protein, 362 aa, unidentified
MTITNPAKRIVVIGGVDTHKDTHTAAALDDNGRLLGVSEFPASASGYRELCRWFEELGDLESIGVEGTGSYGAGLARHLRTLGVRVLEVSCPNRQLRRRRGKSDPVDAEAAARAVLSGQALGVPKSQDGAVEAMRLLRTERRSAIKARTQATNQIHATISTAPETVCARFTGRTVRAIVDVAGAFRVVDPTSSLDAMTRYVLRGLAKRWQTLNGEVGRLDKVLAQMVDELVPALVSEPGVGPEVASALLVAVGDNPERLANEASFAALCGVSPVDASSGRQRRHRLNRGGNRDANRALWVIAFVRMRCDPRTKAYVAKRTAQGLSRPEILRCLKRYIARALFRKLHPLAATAATGIHQPKAA

SEQ ID NO: 420660 - protein, 397 aa, unidentified
MYIVGIDIAKRKHEAAVIDGEGTVIIKPFSFTNNCSGYNRLLAMLAKAKLPLDEVSFAMEATGHYWLALFTRLQKEGFRVQVINPVQTNSIRSFYIRQAKTDPRDALLIAEVIRFGHFSESTLHPENIYELRELCRGRHAIVSMQADVKRKVVALLDQVFPEYETAFTNMFSDTSMAILQTCPTPKELSEMPFEELCHLIEVSSHKRFRMAKAQELQELARNSFGFAMAGDVFSTMIRLYAKHLDFLKQQVREMDRKIAEIMETLDTPITTITGIGPTLGAYILSEIGDISRFSSAAKLAAYAGIDPTMRQSGEYNGVRNRMSKRGSPYLRHAIWLAASSAVLHDPALKLYFQKKRDEGKPYMASVGHACRKMVSIIYAVMRDNKAYTPCIPNEISA

SEQ ID NO: 420661 - protein, 376 aa, unidentified
MKGRPYSGSLEFVGNQISLKESPMTNDKYVGMDTHPASITAEVLNANGRVVSRSIMETHPEQIRDYFRGMSGTVRVAFEEGAQAAWLYEIIKPLVAEVIVCNPRDSKLSRSGNKSDKIDAHKLASLLRMGELKAVYQGDARTRGLKQVVRSYSALAKDSRRVMNRIKAIYRGRGIVCKGTEVYHPELRQQWAIRLADSNTRNRLELLYRELDCLSCLRKAARAELVKEVRRQPAWKILKEVPGLGPIRTGYIIAIVSTPFRFRTKRQFWPYCGLAVVTSSSSDYEVVGGKFRRSKKPIGTRGLNRNYNRDLKYVFKSAAHHASSRDPFKQYYDRLIANKMKPELARVTLARKIAAITLAMWKKGEGFDADRLIQEA

SEQ ID NO: 420662 - protein, 391 aa, unidentified
MPEDALRPAYTAIRTDLGAIFVSLELSRRAWLVTSLSPGGREKMSKHSVPASNVSGLLYRFAELRRKAAARTGRNFPIIVIQEAGLDGFWIHRVLQSEGIESHVVDAASILTSRRRRRAKTDRIDGETLVRTLMAFKRGEPRVCSMARAPTPQEEDRRRVCRERRILVGERVRHVNRIKGLLFAQGVFGYEPLRKCRRERLEDLRTGDGRPLPMHLKTQIIRELDRLEVVLAQLKAVEAERDALLEPASDEAASPATMLVQLKGIGPETAAILWSEGLFRRFDNRRQLAAYAGLAPTPWKSGSIDHEQGVSKAGNSRLRTTMVELAWLWLQNQPTSALSLWFHERVQRLGGRLRKTIIVALARKLLVALWRYTTAGVVIKGAAMKAVSAPI

SEQ ID NO: 420663 - protein, 360 aa, unidentified
MFTERTSVGLDVHARSVAAAAIDGVTGELFQTKLPPGNDRIVAWVHGLPGPVAVAYEAGPTGFGLHRSLTAAGVRCVVAAPSKLQRPSGDRVKTDAKDAVHLARLLRLDEITAVSVPSADQEAARDLVRAREDCRGDLMRARHRLSKLLLRHGLVYDGGAAWTGKHDRWLTQQHLTGAASRAAFDAEYETVLQIKARRDRLDKAITDLASDSEFTPIVRRLGCLRGVSTLTGFALAVEIGDWERFTGNSIGSFVGLVPSEFSSGQSRVQGPITKTGNGHARRLLVEAAWHHQPQYRIGALMRARWELASAAARARGDLGNRRLHDRWVRFGQRRKRHTTANIAVARELAGWCWSLAVMND

SEQ ID NO: 420664 - protein, 285 aa, unidentified
MQYLNDTELSSHEGTRCQFNGGPGAIKLGIDVHQDFYVVVMQEGGTNPKPPQRFQKEAFLHWAAKLKSQGTEVHAVYEACGFGFSLQRQLSALGVHCHVVCPQKLDEQNRRVKTDGLDAKALCLKLDRLVQGNRDALALVRVPSEKEEQLRAVHRQREQLVKVRKQLEAQGRSLMVNHGFEPVKNWWKPRTFAALQVPEWMKELLQNSQPILLALQEKIAALTVQLQAAAAPKQPRGLGLMTSVIIDREIGDWRRFSNRRQVGSYTGLCPGEYSSGNTRLQSCVT

SEQ ID NO: 420665 - protein, 445 aa, unidentified
MVGLAVRLTVGSKRKCELTSSIVPRGTSFHHTVELEHPPIAFDPEGPSCRHGLLGPAKLSAIYPDNGMDRPCSNRVNGNAAEAQLIREKERAMTDIAMHNDRIATIGMDLGKRSFHLIGMDARGKVIMRQQLSRGRFERDMANLQPCLVGVEACAGAHHIGRRLSAFGHNVRLIPAQYVKPFRKGQKNDYRDAEAIAEAVQRPTMRFVPIKSAEQLDLQALHRIRSRLVGHRTAVINQLRGFLLECGVIVPQGPAMLRKILPSVLAQRTDVLSPRMIRLIEELADDWRRLDDRVDAVTSEVQALARQDEGCRRLMSVPGIGALTASAVVATIGNGAAFTKGRDFGAWLGLVPKQLSTGDRTILGRLSKRGNKYMRTLFIIGARAVLAKPGSWAKFGLEGWLVGAAKRLHHNVLAAALANKLARIAWSVLYHGRSFARDFEPQSVS

SEQ ID NO: 420666 - protein, 381 aa, unidentified
MNKHSTEAFSIKYVGLDVHKETIAVAVADSGTAEPRVLGIIPNDADALRALVKKLGRRPSELRVCYEAGPCGYVIQRFFQRLQIDCVIVAPSLIPRKPGDRVKTDRRHASKLARLLRSGELTPTWIPDEQHEALRDLVRAREDAIEDQLGSRNRLTTFLLRLGVKPPDGVKAWSAPYKKWLDTLVWDRPAQRVVFAEYRQSLEEIQQRVTRFEREIETLAQTTAHAPTIAALQAMRGVKLITAATIVSELGDISRFQNPRQLMAYAGMVPSEHSSGGNIRRGSITKTGNAHLRRVIVETAWHYRHAPGVSGDLRKRQRDVPGPACTIAWNAQQRLNKRYRHLLVRGKTKHQNVVAIGRELLGFIWAIASVVKVTSQQPAAA

SEQ ID NO: 420667 - protein, 331 aa, unidentified
MPCRFYLGIDVAKAKLDCLLLDTANAKRKAKSLTNSAAGLASLLDWLAKQQISLDELQVIMEPTGVYHEHALFALAQAGLAVSLVNPAQLRKFAQGIGVKTKTDAADSAVLARYGAANHPPAWQPPSVLARELRALLARRDAVAQDLQRERNRAEKAATAIDIPQRVQQSLDEAIRFLQKELAELQRAINQHIDNDPELRRIWTLLHSIPGVGERVADHMTALLAARQFQTAEQLAAYLGVVPVEWQSGSSVHGRPRMSKAGPAHLRQLLYMPAVVAKSCNPHVRALYDRLLAKGKPKMSALGAAMRKLAHLCFGVVHSGKPYDQNWAIKT

SEQ ID NO: 420668 - protein, 482 aa, unidentified
MKPKPQEKNKRATNHPTQHHWHEMNRKQRRETMRKIQSEDLTLEVLHPDAAGIDIGNESHYVAVPPSRDTQPVRRCGCTTAELKAMADWLKQCGIRTVAMQSTGVYWVAAYDIFEQAGLEVYLVNARDTKNLPGRKSDVQESQWLMKLHTYGLLRNSFRPSQEIRTMRTYWRQRNDLVQSAGRHILRMQKALTQMNVQLANVLSDISGVTGQAIIKAILAGERDPHKLAQLRDRRVKASQEQIARYLEGNWQEDLLFVLKQEQEAYEFCQQQIAECDRQLAQYLQQREDRSQGAPLPEEKRKGRLKKKRANKPQFDLREGLFRMTATDLTRIDSIDVMTAMTVLSEAGWDMSKWKTEDHFVSWLRLCPDNRISGNKVIGKGRLPTNNPITIALKMAASTLRLSKTYLGAQFRRFRTRLGAPIAIKAMAAKLARWVYRMLRYGMKYVDQGAAFYELQHRQLQVKQLKWKAAKLGFQIVQATAA

SEQ ID NO: 420669 - protein, 328 aa, unidentified
MCTLGIDVSKNKIDLCLLTAGPGGKKKHKVLTNEPAVARKVIDWLNAQKCVPESVTVVLEATGIYHENLAYGLHEAGVSVCMANPCRVREFAHGMDILNKNDAVDAFVLACYGELKSPAVWVPPSPEVRKLRALLRQRDALREDVQRTVNRLEKANSTSTPQEVIRSLERTKSWLNEELARIEKLITDHTDNDPGLKADLDLLKSIKGVKDQVGREMLALLKDGTFKSASQVAAYLGLTPVEKTSGSSVRGRPHMSKTGPSGVRAKLYVAALTASRWNKQAKAIYERLVAKGKAKKAALGAVMRKLVHLCFGVLKTRLSWDENYVATA

SEQ ID NO: 420670 - protein, 369 aa, unidentified
MPVVRGERAARFSFGTPSPRGSIWRAFATVLWKPEQLIDFNSHLQGWETENMPELIHVGIDVSKDALEVACGPESPTQCFTNDDAGHEALVNVLHVHRVDLIVVEATGGYEAPCACALQAAGLAVAVVNARQARDFAKAMGYLAKTDRIDAQVLAALAAVLANRADRQKLIKALPSDEQQRLHALVLRRRQLVQMLVAERNRLPMSHQAARVSIEALIKAIRKQIVDIEADLSSHIAHHHADLAGLLRSAKGIGPHTSMALIADLPELGKLSNREISALVGLAPFNRDSGKMRGKRMIFGGRTQVRCALYMATIVAMRHNRVIQRFYQRLLAAGKPKKVAIVACMRKLLTILNAMVRTGKQWDETFHFA

SEQ ID NO: 420671 - protein, 339 aa, unidentified
MSKLLKNFIGIDISKSYFDVALIILMHPGQHIHHQFSQCKNGFKRMLQWLTQQGVFINEETIFCMEYTGIYNTGLVNYLVEQKAQLWVEMPLRIKRSCGFERGSDDKTSAVKIAAYAFRHQDQIQLWRPLDSSIEKIKNLIAQRDRIVNAITGLTVPVKEMLECGCADEARQLEKLQKTPLKALQKARHAIEQLILKIVKQDEHIYKKTKQVESIKGIGKVTAVTLLAYTKGFTTFSTAKQLACYCGVVPFSKTSGSSVRYKPTVSQHANKKLKKLLHLCALSAIKNDPEIKLYFERKVEEGKNKMCVINAVRNKLIHRVFAVVRDDRFFEENYVRKCA

SEQ ID NO: 420672 - protein, 354 aa, unidentified
MNSVRYIGMDVHRDTISVAVLDESGRLTMQSVLATRAGAVLDFIHGMRGTLHVTFEEGTHSAWLYDVLVRRVEKLVVCNPRKNALLKSGSKSDAIDARKLAELLRAGMLSAVYHGETSALEVQQIARSYSQLTEDTTRVMARLKAVFRGQAVSCAGKKLYGKRHRDQYLAQVSGGRRRRAEHLYQELDALQPLRHAVRRELLVECRKHAAAQWLQSVPFLGPIRAALLIGRVQTPHRFRTKRQFWTYCGLGLETRDSGEYRMVNGQVQRRRKPALIRGLNWNHNHEMKNLFKSTATTASVREGVWREFYLGLLDKGMRPEMARLTLARKIAAITLKIWKKGERFDAEHLKLQAA

SEQ ID NO: 420673 - protein, 408 aa, unidentified
MLEVKLERCAGIDVAKKYIDVCMLIRPAHHKPTEEVRRFRTTVRDLQQCRAWLLEKRCTEMMMESTGSYWKPIFNILEDHVHITIANPEQVKALRGKKTDRKDCRWLAGLLRHGLVQPSFIPPREIRELRDLTRRRRTLLQNGVEERNRVQKILEDANIKIGNVLSDVFGMSGQAILEGLLENKLRADEMAELARGRARVKIPQLVEALEEHRMSDHHRFLIRQALHHMKFIEEMIDELDKEIREKLKPYEKQVELACTIPGIGPDAAAAILAEIGMDMSEHGPFASCHHLASWAGMCPGNNSSGGKRKNTRIRKGNRWLKAMLCQTSWAAAATNNSSYQSRHRRILARRGAKRANIAVGHAQLIDLYWVLRLGTPYQKQSRRDKGHERESLIRHHLHRLEELGYTVP

SEQ ID NO: 420674 - protein, 318 aa, unidentified
MAKSTTLTAGIDTAKDKLDAAIAGVAVTVSVPNDKTGWQKLARIFAKHKVGRIGIEATGGYERGVVRALQTAGFCVVVLQPLQVKRFGQMRLQRAKNDTIDAALIAACTAVLDADAHAPPDKRFDALADHLTFIEQIEEDKARCKTRLEHIADKRLRAFVLADIARLEKRRAAELARLATELRAHADLAHKLDLVLSIPGIGERTALAVIVRMPELGQVTREEAAALAGLAPFVHQSGTYAGQTHIGGGRARLRRSLYAAALPAATQWNPACMALYRRMVGRGKKPISALVACARKLLIFANTVVQRGTPWEAKPAQS

SEQ ID NO: 420675 - protein, 351 aa, unidentified
MPHKLNSGISVIGIDIGKNSFHVVGHDKRGAILLRQKWSRGQVEARLANLPPCLIGMEACVGAHHLSRKLQMLGHDARLMSAKYVRPYSKGQKNDFRDAEAITEAVQRPTMKFVATKTTEQLDLQALHRVRERLVSQRTGIINQIRAFLLERGVAVRQGLRFLRAELPRILAAPCDALSPRILRVIEDLAGDWRRLDERIEGLSNEIEALARQDKGCERLMTVPGIGPIISSAMVAAIGTGDAFSKGRDFGAWLGLVPKQISTGDRTILGSISKRGNRYLRALFVQAAWVVLVKVGPKHWERYGLKSWIEAAMKRLHHNVLAVALANKLARIAWSVLAHGRTFETSKIQAA

SEQ ID NO: 420676 - protein, 557 aa, unidentified
MAQKVSFIVGVGIDTARYGHHVSFLDDEKRFATKPFHFEEGSDGYDKLQKALVAIQRKHPLVRFNIRVDAAGQYADNLIHWLHKLSLPTTISVGTPLKNKRYRQAHYDKRKADPVESLACARFAVVEKPTSMPPPQPAFSSLRNAVAALESNANHMTRLINQLHILLAACFPEFATLVSDLSKGYILALLAKYPTAKQLAQAEFDSIKEMTHLKEALAKKLYEASKASTAHATDEVHEFLVQAKIQEIVAAKSRKAALLKIMKKAWDSLPNGAHNRVHTIKGIGLQTAAALVAKMVDIERFNCDSAVIGYFGIFPEEVDASGTERDGQTPKKGTIIKMSAKGNDLVRRLLYTAAQTASKHNPAVKAVFARQAALGKHYNVVIGHCMAKLLRQVYAVWAMDVDYDPYYESKPQEKEKAEGLKVVEPQIQEVTSANSKIAPSTIPNKRPAINFAELKTQISIGQVLTHYGWTHRTQRGDQLRGACPIHGGLESDRSFAVHLKKNTYCCHSCHAEGNALDLLVSLSGQPLLEASWTWMEEHGIVPPLLNENKKEKLLSSV

SEQ ID NO: 420677 - protein, 370 aa, unidentified
MQTAADHPEAPTAIRHDLGAIFISLELSRSTWLITSLSPGGGEKMSKHSVRGGDVAGLLERFAQLQEKARARTGRTFPIIVIQEAGLDGFWIHRVLQNEGIESHVVDPASVATSRRRRRAKTDRIDGEALLRTLLAYKRGEPRVCAMVKAPTPEEEDRRRLCRERKVLTNERVQHVNRIKGLLFGQGVSGYEPLRRNRRQQLNELRTGDGRPLPKHLKTQISRELDRLELLLEQIKAVETERDALLAAQKVALPGPAAMLLDFNGIGAEFTAVLWSEGLFRHFDNRRQVASYAGLAPTPWQSGSVDHEQGVSKAGNPRLRTTLIQLAWLWLRHQPQSALALWFKERVARNGGRHKKTTIVALARKLLVAL

SEQ ID NO: 420678 - protein, 344 aa, unidentified
MEVTTVGLDLAKHVFQVHAVDAAGTVIVRKALRRAQLISFFAKLPPCLVGMEACGTSHHWARELIKLGHNVRLMPPAYLKPYVKRGKTDAADAEAICEAVTRPTMRFVAVKSCDQQAALSMHRTRDLLVKQRTQSVNMMRGLLAEFGIDIPEGLERALMMARQVIDGEVPDVPAAAVTMVGMLSQQALDTHSHLREIDRALASLQRTDDVARRLGTIPGIGPVTATALAASVADPRQFRSGRQFAAWLGLTPRQNSSGGKERLGRITKMGDRYLRKLLVIGATSLVRRAGQASDPVGRRLADLLTRKPVRLATVAMANKLARIVWAVMVRGEVYQSSHVPVLAA

SEQ ID NO: 420679 - protein, 371 aa, unidentified
MIVIGVDTHKRQHALSAVDEGTGRVRGKRQITAQDSGHLAAVRWARELDSERVWAIEDCRHVSRRLEQALIAAGERVIRVSPKLMGASRKGEREPGKSDEIDSLAIARAVVRDGADSFPVAYLDEQAMRIRLLSDHRQDLVAERTRMQTRLRWHLIDLCPELEAKIKPRSLSRTSALERLERQLRRLPACERLRVARDELSHIRRLTRQIDALEQELEALVKAHRPWLLRETGCGPLVASVLIGRTAGAQRFRSGSAFARQAGACPIPCSSGQTQAYRLNRGGDRQLNSALHTIAASRARVDPRTKEYLARKHAEGKTKKAALRCLKRTLANHFHQLLALPPLTASIPAEPTTNRKTQQITAAPTPMICIT

SEQ ID NO: 420680 - protein, 318 aa, unidentified
MTIVEAPPGVTGGVDTHLDVHVAAALDPLGRLIGSKSFTTDAKGYRELLEWLRSFGEVTKVGVEGTGSYGAGLARFLRRQGVHVVEVMRPNRQARRNSGKTDALDAIEAARAALSGKAKGHAKTRDGAAEAIRSLVVAKRSARQSRVKALVQMRALCVSAPDELHLRFRGLSVAALIETAATLRPERSPDPVTAATKSSLSSLAKRVRFLEAELALLDEQIAALVAAAAPELLALFGLGPDTAATLLVAAGDNPERLHSEAAWARLCGVAPIPADSGKVTGHRRLHAGGDRQANAALWRIVIVRIAHDPRRAPTSSAG

SEQ ID NO: 420681 - protein, 322 aa, unidentified
MNEEMKRVLVKKLANNTQLILDTLAPHREAITGIVVESTYNWYWLVDALMEAGYQVHLANPSAIQRYKGLKYTDDTHDACWLARLLSLGILPEGYIYPKQDRPVRDLLRKRGHLVRLRTSLLISLQNIITRSSNVKVASKDLKKLTEDCVSAHMCGHDALELCGTVSKETIDVLTRQIHRIESSVLKKLKPTVSYRDLITIPGVGPVLALTIALETGPISRFSTVGSYASYCRKVASIWLSNDKRKGTGNRKNGNRYLAWAFSEAAEHARQSHRPSKRFYDRKRSQSNLWVAHNALAHKLSRAAYYIMRDNVPFAEHKLYCS

SEQ ID NO: 420682 - protein, 345 aa, unidentified
MVSVQFSRGGHAAFMEGAPMLDTTTFVGLDVHARSIKAVSLDVMTGEVRAATFGYDAGAVAGWVRSVDPKARCVYESGVTGFDLQKRLSGLGVDCVVGAVSKMIKPSADRRRKNDRNDAEFLARMLSVGNVVEVWVPDDECEAARDLTRALEDARDDLSRSKQRLSKFLLRHGLVFDERTPTGRRKGNWTRAHWSWIESIRFAEGADNEALAYYVDAVRRAAEDKARLEGLVEAEARKPRWRKRVDSLRCLKGVDTATAADLVFEAGEFSRFGNARSFASWVGLTPSEHSSGESDRRGAITKAGNKHLRKALVEAAWHYLTWIGNTYLDDFGRDSPASLNSTGDM

SEQ ID NO: 420683 - protein, 351 aa, unidentified
MLIIGCDYHPSVQQIAFVNSETGESGERRLLHKNGEAERFYRDLKLRGVSVRVGIEATGHARWFERLLAELGFELWIGNPSEIKAARVRKQKNDRLDAELLLKLLVEDRFPCIWVPSPENRDLRQLLWHRHRLVQIRTRVMNQLQAVAMNEGVRRKKALWSKSGRAQLESFVLLPWASRRRQDLLDVLDRLNSTIDELSTAVEQEAKKRPEVLRLMTHPGVGPLTALAFVLIIGSTKRFACGKQIGSYLGLIPCEDSSANRQRLGHISKQGNTLLRFLLVEAAQAAVRCDKEWRRKYLHLAMRRDPRIAKVAMARKLAVSLFWMMRKEWNYEQLKKFGSYAGESDYVHGVQ

SEQ ID NO: 420684 - protein, 416 aa, unidentified
MNAVGIDVSSRKSTVAVLRPLGEVVCLPFDVTHDIAGLASLAEKLKAIDGETRVVMEHTGRYYEAVAKALHEAGFFVCAVNPLLIKEYGANSLRRVKTDKADAIKIARYALDNWADLRDFTPMDAIRYDLKTLNRQFQLASKQRTASANNLIALLEQSFPGIRKCFDSPVRSDGTQKWVDFAHSFWHVDCVRKQPFPAFCERYRKWCKLHAYFFKLRNAEKVYALAKSAVVLTPKSKVVKVLVQEAANQLISISRSVEVYRAEMDRLAAMLPEYPVVMAMYGVGKSYGPQLMAEIGDVRRFERKQALVAFAGIDPMPNQSGDKNVRSNKSSKRGSPYLRKTLFNVIRTYLQCAPQDEPVFQFLNRKRAEGKPFYVYMLAAANKFLRRYYAKLRDYFASLDTLQPVAPIPTILKATL

SEQ ID NO: 420685 - protein, 394 aa, unidentified
MKLVGIDVGKNSHHFCVMDKETGELNVTPSSFPNNKEGFDFLINSLKPYSKKSILLGMEDTGHYHVALLKFLLSNGYTVALINPKTTDLTRKMEGGITKNDKLDTITICDVLDTPERKKQYRITKVDRFDLYEQRQLTRHHHNLKEELNLYCNRLQKSIDLVFPEFNTLFSSKYGVVYMNLLKTFGSAEAIASTDIRTIRKCFEIKGRGGRISLTAEKLKECAKNSIGISSEVETIQIKHLVRQITLIKEQIAEIDKKIEEFSITNNSPILSIPGISHFSGTSILAELGDIGNYSKPSQIIKFAGVAPYHYESSQYNAQHTAITKKGSKYLRKTLYQIILPVINNNPVFKKYYRLKISQGKGHRCAQGHCIRKLLRIIYHLLETGQSFDPALLR

SEQ ID NO: 420686 - protein, 344 aa, unidentified
MYHYAGIDVSLESSTICVVDGTGKILRETKVASEPEALIAWFRSSGLALERIGLEAGPLSQWLYAALREAGFAVELLETRHVRDAFKAMPVKSDRNDARGIAQLMRLGWFRPVHCKSIEAQETRAVLTARKLLQSKLRDIENSLRGVLRGFGLKVGKTTEYTFAERIRELVAGHPRLELVAKALLEAHAVLRREFNGLDKHTQKLARSHPQARLLMTTPSVGPIVALTYASAIDDPKRFRSSKATGAHFGLTPKKYQSGQTDYTGRISKIGDASVREALYQAAHVMLTKPVKGCAALKGWAMRISKRAGMRKAKVALARKLAVILHRMLADAKPFNPTAKAAAT

SEQ ID NO: 420687 - protein, 346 aa, unidentified
MQQSITIGLDLAKQVFQVHGAKAGGSPVISQKLRRMGVLDFFRNLSPCLVGMEACGGAHYWAREIAKFGHDVRLVPPSYVKPFVKRGKTDAADAEAICEAVVRKTMRFVPVKSADQQAAAMVLKTRELLVRQRTQAINALRAHLSELGIIAGTGPAKIATLIEIVRDDEDVRLPPAARFALSELANQIEWTKTRIDKLERAIIAEAKRDEDMRRLATIPGVGAIIAASIKALVPDPHGFKSGRHFAAWLGLTPRSHSSGGKERLGRISKMGNSTLRSLLILGATAVLGHIRHKADVSKWLAAILARRPFKVVATALANKMARIIWALLTKGEIYRKSGSAIGMANA

SEQ ID NO: 420688 - protein, 342 aa, unidentified
MKNHQIGIDISKEKVNICLRSGKKSVWEYETPNTVASIKKAVQKGMRERGVTLNDVIVCAEFTGRYIYPLVCACDELRLFLWMEDPTRIKNSFGIARGKDDKIDARRIAEYADRFSDKAVAYGMPDRTLASIKSKLADRDMLLEDRKRYETQLHDQKGFMDPKDYAQKSRLWNAVIKTLNKQLALLDEQLAELVASDEKISRQMELLKSVDGIGDRIALYMVAVTMGFKRFENPRQFFCYARLAPFKYTSGKSIHSKSKVSQRANKHIKALLHLAAVSAATHMKDSEYKRYYERKTDEGKHPMLVLNVVRAKLVSRMFAVIRRDSEYQRNYDFSINHEKLSA

SEQ ID NO: 420689 - protein, 343 aa, unidentified
MELHAIGIDLGKTLFHLVGLDSSGNVIVRKRCSRTQLLKYTANLQVQRIGMEACSGSHFLARALREQGHDARLIPAQYVKPYVKTNKSDYIDAEAIAEAVQRPTMRFVPIKTEEQLDLQTVHRVRERWVTRRTAVVNQIRGLLLERGLTLPKGRSHVDRALPEILTDPTLRLAGSFRVLLGQLQLELEQLSARIEQMDAVIQETARENEACQRLTAIPGIGPVTATALVAAIGNGAGFRRGKDLAAWVGMVPREYSSGGKQKLLGISKRGNSYLRRLFVQGARVVMQYRTKQAPGLSCWLSQLMARTHQNVAVVALANKLLRMAWAVLCKNERYRISALATAP

SEQ ID NO: 420690 - protein, 345 aa, unidentified
MSNLDSCGIEISAKQLVVRLRRQGDLEPLRNFTNTPEGREMVLRYLRQAGRVVRVCLESSGLYGLDLALGLSAAAPGIEVMVANPRAVRHFASALMKRSKSDPLDAGVLEEFAARMPFQAWNRPSTPALALHALARRLRELVEIQTAEKNRQHAAGLSETIPTAVRRDLARSLRAQERAIERLTEQARKLIAKDAQLTERFEILDSAPGIGETSAVQLLGELGVLAPDLDARQWVAYAGLDPREYSSGTSVHKKPRISKQGNKYLRHALFMPALVAVQHDPHLRAYYQHLLAKGKYKMQALVAVMRKLLQALHAMFKTHQPYDGSKLYRLNPAPAQEVRCASVVA

SEQ ID NO: 420691 - protein, 408 aa, unidentified
MELEPIYKRVIGLDVHQAQITACALIEQADGSVRTEQRQFGGFKKDRRALAQWAAALSPDEVVMESTGIYWKSPYAALEAVGIRAKVVNARHVKNVPGRKTDMADAQWLAMLARAGLLRASFVPPAQLRELRLIARQRQNLVGQLASEKNRLHKVLTDSGIRLGVVVSDLHGQSARAMVQAIAQGKSPPEILQYASKRLRASREEIFDALQGELSASHLFVLQELLAHIQEIEARISRFDTRLLQGLATERQALALLQTIPGVDQIGAALLLVEIGTDMDAFGSADRLASWAGMCPGNHESAGKHKSGHMRKGNRYVRRLLCEFAHAASRTQSVFKSKFQALVVRRGHKRSIIAIGHKILRTIFFMLKRKEHYRDSTTDYEALSVQKNAPRWIKALAKFGYITPPSAA

SEQ ID NO: 420692 - protein, 370 aa, unidentified
MSDHSEAFVAFDTSKLRNAVAIADGGRAGEVRFLGEIDSTEAATRKLVAKLAAKYRQLTFCYEAGPTGYGLYRLIRKLGYDCIVAAPSLIPKKPGDRVKTNRRDAVGLAKLSRAGELTAVWVPDERHEAMRDLSRAREAARKDLKGKRQQVSSFMLRLGRHYPGKKTWEPAHMNWLMLQKLEHREQRIALEELLGAVRQESERVERLEQAIRDAVPEWSLAEVVTALQAMRGIDLVAAVTVLAEIGDLSRFQNPRELMGYLGLVPSESSTGDTVNRGGITKAGNGRARRILVEAAWSYRHPPRVSREKQIKVAAAPRAVREIAWKAQMRLCGRFRSLTRKGKRPTVVATAIARELSAFIWAINREVMASR

SEQ ID NO: 420693 - protein, 311 aa, unidentified
MKIYAGIDVAKKTFDLNIHGQKEVFHFDYNDAGIQHCIKRLTENKVERVAMEATGGYERDLAVALHTEGLVVTIVNPKRIRDFSKSMGKLAKTDRIDAMMISAFASTCPLPKSTVIDANAYRLKALVARRNQLIALRTCENNRKEHIADQVIARSIDTILGVFEKEIGLIDQEISDHIDGQPELKERTTIMESVPGIGTTTASMLVSEVPELGICNKREIAALIGVAPINRDSGQFRGKRMTGGGRVHVRSRLFMPTLVTIRYNPKLKAFYQRLLAKGKSKMTAIVAVMRKLLVILNTMIKKNQLWNEHLA

SEQ ID NO: 420694 - protein, 389 aa, unidentified
MKRLFCGIDVAKYEHVASIYDPATGEYILDSLHFGNDEKGFDSLFTHLSKLKNGQEILIGFESTGHYHMALFSYLTGKKYTCYLINPYMTSRFRSVSLRDTKNDDIDSRTIAAFLSFEYSRLENEEFINNELKELSLQRHFLKEDIAKMKIKLKAYLDRVFPEMEKLVNISTEAIRAILKEYPTAKDIAGVRIDKLKNLADKASKGKYPPSKIIRLKEAAKVSVGYPSEAIGLNIRHCIETLEVKERQIEEIEMMIRIHPLVAQSPLKQLKGMNDIEIGYIMSAVISISRFSSPKKLVAYAGLDPKVRQSGTWEAKTTRMSKRGNRLLRYALIWSAYNMTRCEGPLKDYYELKRSQGKSHYNALGHCAAKLCRYIFWILNHPEEEFLYR

SEQ ID NO: 420695 - protein, 398 aa, unidentified
MDLPVYYELETNNGNRDYRIQIGGHYMNYNTVYVGMDVHKESFTLCSCKYEDEKASHYQRTPASYKNVLRYLAFLRTIYGEDTRFVCGYEAGCLGYSLYHQLENFNVECVILAPTTMLEQRSKRRIKTDKRDAEIIARSLAQHNYSPVHIPTETDNQTKEFIRMRDDHKAELKKIKQQILSFCLRQGYQYDGSGNWTAKHVKWLRSLKTEGLYKEILDEYLLTYTILTDKLNRLDQRIEELASKEEYKESVSKLTCFLGIKIHTALSVIVEVGDFQRFVSARKFAGYLGLVPGQHSSGDDRNGLGITKAGNTHVRRLLVESAQSYTRGKIGYKSRVLRSRQAGNSPQVINYADRANERLRRRYYQMVLKDGKKYNIAKIAVARELACFIWGMMTDNIY

SEQ ID NO: 420696 - protein, 334 aa, unidentified
MKKRYFMGIDVAKATFDFCLLSSTEACLWRGQFSNDARGIARFLAQLPAPSRKPAQIHFALEATGVYGKALVAALHQADLAVSVLNPAQVKYFAFSVLRRTKNDTVDAEIIARFCRERKPLATRPLRPIEEQLKVLVHERESRVGEQTRERNRAKKDPFQIELPPLIRRQRQQRLKQLDKEIAQLDAAIDSLIASDESLSNQSQLLCSIPGIAAVTAAKLLSELAGKEFQSARQLAAYAGLTPAEFRSGYFLYGKTHLSKIGNAFLRKALYLPAAVARRWCKPLKPWIAILESRKLHNLAIRGAIMRKLLHIAFGVLKHQKPFNPLLVFIPKTL

SEQ ID NO: 420697 - protein, 408 aa, unidentified
MQAVHERCAGLDIHKKTVVACVLTGSGKQIRTYGTMTRQLEALADWLAAEQVSHVAMESTGVYWKPVYNLLENRGLELLVVNARHIKNVPGRKTDVKDAEWIADLLRHGLLRASFIPGRDERELRELVRYRRTVIEQRAHDVQRIQKVLEGANIKLSDVASDIMGASGRAMLERLIEGEDDPVALSQLAQKGLRKKQDQLQQALAGSIGAHQRAMLRHLLDHVKFLERQIEELDGQIQERTRPFEQVIDHLDAIWGLGRRSVEEILAEIGVDMSRWPTHRHIASWAKISPGNHESAGKRYSGRTGMGNRWLRAILVEAARNVSRNPHSYYAALYHRLSQRRGKKRAMVAVAHSLLVAIYHMIKDGTLHHDLGSDHFERLDRGQIARRAIRRLERLGYQVTIQEAAPAA

SEQ ID NO: 420698 - protein, 352 aa, unidentified
MERYVGLDSHARSCTLGVMSASGQRLKSLVVETNGSALIEAVRGIAGRVHVCLEEGTQSAWLYELLRPHVAEVVVAVAPERKGPKDDQRDAWARANELRTGSIETRVYKAPEHLAGLRNAVRAYGFAVTDVVRAKNRLKSVFLSRGMSADTSVYDAKKRPEWLKQLSSPHRELAEWLGRQLDLVVPLRDEAQRWLLTEAKRHPIIRKLATAPGMGPIRTAQVVAIVATPERFRTRRQFWSYCGLGIVTRSSADWVRDRNQKWVRSQVAQTRGLSRKRHPRLKSVFKGAATTVIAQLPDDPLHGDYERMLQSGIKPPLAKLTLARKIAAMVLSMWKHQEVYDPKRHHPSPDQA

SEQ ID NO: 420699 - protein, 368 aa, unidentified
MEIERTFVGLDVHARSVVACALDDLTGELSKARLVPENERVLVWLQQLAGPVAVVYEAGPTGYGLARFLTGRGVRCVVAAPSKLHRPSGDRVKTDAKDALLLARLLRLGEITAVAVPSLAQEAARDLVRVREDVRADLMRARHRTSKLLLRQGILWSGGTAWTGAHERWLGQQRFELPGLQAAYDTTLETVLLATSRRDRLDKTILEMAHEPQWWPTVSRLQCLRGVSTLTAFGLAVEVGDWTRFSGSTIGAYLGLVPTESSSGEGRHQGSITKTGNTHARRLLVEAAWHHRRPYRPTKTMRDRWDLAPATARARGHAGNQRLHDRWMRFNERKKRTVIANVAVARELAGWCWSLATLEAASAPAGRR

SEQ ID NO: 420700 - protein, 387 aa, unidentified
MPQPNDLSRSLIALDQNSTIIAVVELSQSSWLVGGVVPGIERQPRKKLEPSPEQLLGLLHRWRDEAVRAGRPITRIALAFEAGRDGFWLARWLEARGVEAHVIHASSVAVSREHRRAKTDRLDTELLKRGFLGWLRGERGHCSMARVPTIAEEDAKRPNRERECLVGERTRIVNRIKSTLARLGIRHFKPTLRKAAERLASVYTPEGMPLPPNALAELQRDMTRLGFVVSQIKEIEDARQKRLEQQPETGPHAMVRLLAGIVGIGVETADMLVHEVLSRPMRDRRAVARYAGLTGAPDESGARRREQGLARAGNARVRRGMIQLAWRFLMFQKESALALWYRARTADSRIGTRKTMIVALARKLVIALWRFVTTGEPLEGVVLRPVA

SEQ ID NO: 420701 - protein, 353 aa, unidentified
MRKMQEFIVKGNRIFVGLEDSKKTWRLCVRCEGMVVHTTSMPTRYEGLRAYLLKRYPDCEIAVMYEAGFQGFWLHDLLTRDGIRCVVTPPNKVSCPKDERVKTDKRDAYRLALNLETGDYTACHVPDKERREDRQISRTLSQIQKDIRAEKNRMRRFLDYHGLNGELPAGAWTDKDYLRLKDMELPHSLKVSLDAYLGVLETLFTTEKKLATELKALCEKGRYRESVSIKRSVSGVGWLSAIRFTLEWGNLDRFPTGKRFASFTGLTCREHSTGETTRRGRITGQSSEYIRSWLIECAWRAIRIDPALLATFRRVWHNSGSKKKAIVAVARKLAVRIRAIELSGQLYCMSVVE

SEQ ID NO: 420702 - protein, 412 aa, unidentified
MELLHRRCCGLDVHKETVVACLRLVSDGKVTTEVRTFQTTTADLLRLSEWLAANGCTHVAMEATGVYWKPVWHILDDGEFELVLANAAHVKNVPGRKTDVNDAMWLAELLAHGLIRASFVPDTQTQEMRNLLRTRKQLVREQSSHVLRVQKTLEDANIKLDSVLSDVMGKSGRAMIEALIVGETNPVKLAGLADRRVKASPEELREALRGRVTKHHRFLLRLHLNQIDALDAAMATLDAQVEANLGPFRTAVDLIMSVPGIKNLGAQAIVSEIGIDMSRFPSDAHLISWAGICPRNDESAGKRRSNRLRKGAPWLKTTLVQCAWAAVKKKNSYLQAQFHRIKARRGPNKAIMAVAASILTAIYHMLKDGTMYQDLGRDHFDRRSTDQQKKSLVKRLADLGYAVEIKPLAATA

SEQ ID NO: 420703 - protein, 340 aa, unidentified
MGEITTIGLDLAKQVFQVHGIDADGTTVLRKQLRRSQVLSFFSRLAPCLVGMEACATAHYWGRELAALGHEVRLMPAQYVKAYIKRNKNDAADAEAICEAVVRPTMRFVPAKTAEQQAALLLHRGRERLVRQRTGLVNALRGHLAEFGVIAPQGLRNVGKLIAVVRDPSDARLPDLARQVLEVLAAQIEQLEGAVAAVEKQLMAWHKSNPVSQRLATIPGIGPIIASAIAASVAEPGGFRSGREFAAWLGLVPRQNSTGGKHRLGGISKRGNQYLRRLLINGASANLLRSKATKADPWVIGLRRRRPSLVVAVALANKTARIAWAAMQRNENYQRMAAAA

SEQ ID NO: 420704 - protein, 351 aa, unidentified
MSRSSFSATIATLGIDLGKNSFHLVGQDQRGAIVLRLKLSRPQLTQRLANIPPCLIGMEACAGAHHIGRQLQALGHDVRLIPAQYVKPFLKGHKNDYRDAEAIAEAVQRPTMSFVAIKTPEQLDLLALHRVRSRLVSQRTGVTNQIRGFLLERGITVRQGLAPLRQALPGILGSYSDALSARIVRLIADLAEDWRQLDERIAAVSAEIEALAAQDEHCQRLMSVPGVGPIISSAVVAAIGTGAGFKQGRDFGAWLGLVPKQESTGDRTILGKISKHGNKYLRTLFVQAAHVVLVRRPHGAKLGLWPWIEAAGRRLHRNMLVIALANKLARIAWAVLARGHAYQARSAAHAM

SEQ ID NO: 420705 - protein, 417 aa, unidentified
MPSSTTLFVGTDVSQATNRTRFYDAAGVEIGGRYQSANDLPGALALAGEAVLRADTIGADEIAWALEATNLFWWHLATYLTTSPELIARKLKLYSFNPRVVAKFRESYPDLGKDDWADAMVIADRLRFGRLPAQCYLDERYQPLQRLTRYRKHLVDTIVREKQVALGYVWLKLSGYELEEEGLTNTFGATSQAILERYLTPDEIVAAPFEELVSLIAAESRGRADAEAVARAVQQAARRSYRLPAGMVEPVNLVLSSSLVTIRTLTAQLKPLGKAIAAELEAAPAQTLRTVPGLGAVLTAGIVAEVGDVTRFDNEEKLAKFAGLTWRRHQSGEFEGEDRSLTKTGNRYLRYYLVEGANSVRQHCPEFGSYYATKYKEATRHKHKRGVVLTARKLVRVVDSMLRSGQIYRPPGARQAS

SEQ ID NO: 420706 - protein, 339 aa, unidentified
MNPATVGLDLAKNVFHVHVADASGRTLDSKRLSRRELLPFFESLPSCLIGIEACATAHNWARQLQRLGHDVRLIPPGYVKPFVRRGAKNDATDAAAICEAVTRPNMRFVPIKSREDQAFLMLHRARGILVRQRTMAACAFRAHLAEYGVIVPQGRHRVDALVAKLDEIREDLPKDACFALDALVGQLNALNQQIDGIDIRLAEIHKTNSICRLLATIPGIGPIIATAFAATIPDPWAFRSGREFAAWPGLTPRQNSSGGKHRLGGITKQGDRYLRHLLVLGARTVVRYPKARSRVDGPWIEALLERRRPMVVAVAVANKLARTIWAMLSTGEVFRSAHP

SEQ ID NO: 420707 - protein, 352 aa, unidentified
MARELNSVIAVIGIDIGKNSFHVVGLDERGAIVLRQKWSRGQVETRFANMPPCLVGMEACVGAHHLSRRLRALGHDARLMPAKYVRPYSKGQKNDFRDAEAIAEAVQRPTMKFVATKTADQLDLQALHRVRERLVRQRTGISNQIRAFLLERGIAVRQGLRFLRTELPGILATRCEVLSPRMVHLIENLAGDWRRLDERIDGLSGEINALARQDAGCERLMSVPGIGPIISSAMVAAIGAGDAFDKGRDFAAWLGLVPKQISTGDRTILGKISKRGNRYLRVLFVQAAWVVLIRPKSWERYGLKPWIEAARKRLHHNVLAIALANKLARIAWSVLARGRGFEARSIATAQPA

SEQ ID NO: 420708 - protein, 339 aa, unidentified
MTVKTVGLDLAKDVFQVHGISETGRKVFNKKIKRAKLLAFFETLPPCTVGMEACGSAHHWGRELRKLGHDVRLMPAAYVKPYVKRGKTDAADAEAICEAVRRPSMRFVEIKSTDQQAFLAVHRSRDLVVRQRTQVVNMIRSVLREFGHVLPTGVEAVNRFSRSHMDGDQLDMPELANGILGTLCYQLLGLNARIEGYTRLIKQHALLDANCRRLTKIPGIGPITASAMVATIGDGSQFRTGRDLAAWLGLTPLNKSSGGKERLGKITKMGDRYLRKLLVVGMTSRALQARNHPERADRWTANILAQKPFRLATIAMANKSARVIWAVLSKGQQYRQPVA

SEQ ID NO: 420709 - protein, 459 aa, unidentified
MSQLPTLSYKGFAGSKAGLVRLRFQEEVSKSTMSEVESIQSEPEFAAFIGIDWADQKHIWYLQTAGSKQRESGELEHTPEAVECWVANLYQRFAPRPIAVAVEQSRGALVFMLSKYELFHLFPVPAQMAASMRQALYPSGAKDDPRDADLLLDLLLQHRNKLRRLSPDSEATRRVQNLVEERRKLVDEKTAQINRLTDHLKVYFPQMLEWFGRLDSELVCALLERWPALEELQKASPASLRTFFRKHRCRDRERIECRIEAIRRALPAIQDRAVIDAKSAVVKVIVQLIRILIGGIEDLDGQIEEAAAAHPDFFIFNSLPGAGPVMAPRLLAAFGSQRDRYRSAHEIQSFSGIAPVTESSGKRKWVHFRWACPKFLRQSFHEWAGHSIVQSEWARVYYQQQRSKGNTHHAAVRALAFKWIRIVFRCWQDGVAYDENTYLAALAKHGSPLSGLVAIGKTL

SEQ ID NO: 420710 - protein, 447 aa, unidentified
MKKKNVSMEVVNPNAAGIDIGSRSHFVAIGQGEEDVREFGVYHENLQALSQWLLENEIKTVAMESTGTYWQNLYAVLQSHGLEVILCNGKFTKNIKGKKSDVQDCQWIQKLHTLGLLSGSFLPDDATEQLRTYCRHRANLLEQAADTTRKMQKYLRLLNLRLDVVVKDVTGLTGLSIIDAICKGEVNPEALASFRHGNCKKSASEIAKALQSNGRKDYRFALTHEYQLYLNLQSKIAECDQEIERMLNEQINRDDNKREHFIEKKVHKRVNKNTPKNMDINLLSYQYFEGVDLLSIEGVSHSTVLTLISEVGAGIHKFPSAKQFTSWLRLSPNNKISGGKVLSNRIPKGSNRLKIALRNAANAIGNLNDTALSNFFKRIAFRKGRVSAISATARKLAVIIWNMIVKRIPYRPVAEYQFLDQKRKKITQMKKLITKFDISMNDLSFQL

SEQ ID NO: 420711 - protein, 436 aa, unidentified
MRGCRCSMIMGFTKPIEHFNLQRKKVITMNTLYVGIDVISKSNVVYLMLPNGDKHSNFSVANSHEGSTLLVKKIYSALTSHSLDTVLIGLEATSVYGDNLVYFLREDATLAPFNRKIHVLNPKQVKKFHDTYNDLPKNDYVDSFVIADCLRFGRINKEVYMGEYRYKALQNLTRARFFAVQNLVKEKQRFMNVLFKKYSTMTQEKVFSDAFSTTALAVYDEFESAEALANMDLHELTDFIIEKGKNRFPDPDAVAKAIQKAARSSYRLPKTVNDSVNQVLSISITSMKALESQIKEFDKAIKALMELLPNVLISIPGIGPVYSAGIMAEIGDINRFDNQASLAKYAGLAWKQHQSGGFEAEVTRLIPSGNRFLKYYLCEAAFSLVRCDKEYSDFYHLKYKEVNRCQHKRALALTARKFVRLVFRLLKDNRLYCPAK

SEQ ID NO: 420712 - protein, 422 aa, unidentified
MKVFNPADFAALIAIDWADRKHDICELDQQNNETTFSVISAKPEAINAWANALKQKYNGQKVAVACELKKGPLIYALSKFKHIILFTINPSTVAKYRKAFTHSGAKDDPTDAAIQLEILQQHMSKLNVIMPDTQSIRSLAQLVEYRRKLVQDRVDLTNRLSTTLKNYYPQVLDWFNEKDSMIFCDFLLRWPSLAKVKRARKQTLHDFFNLHNARYPNVNEKRINDIKQAESLTSDNAIIGPNLLLVECLVGQLKQLMLSIERFDHEIKSIYKQHNDRFIFDSLPGAGPQMAPRLLAAMGSNRERYQSSEEVQKYAGIAPVTERSGKKEWIHWRYSCTTFLRQTFVEWAGQSVRYSFWAKAYYEQQKSKGKPHNTIIRALAFKWIRILFRCWKTKTAYDESTYLEALKRKGSPLLKYAMESKF

SEQ ID NO: 420713 - protein, 295 aa, unidentified
MKKGRTAAAKQSGNFAQQKLTIGLDLGDRNSWYCVLDESGNVQLEQRVSTTARALGEVFGTMPRSRIALETGMHSPWVSRLLQGLGHEVIVAHARNVRLIGESRRKDDRLDAQALARLARMDPQLLCPVKHRSAQAQADLSLIRARAGLVRARTALVNTARGLAKSYGQRLRGCNVRNMNPEKAEGLSPELRAALEPLLAAMASVSEHIAEYNEGIEKLAQENYPQVALLKQVKGVGTLIALTFLLTLEDPHRFRKSRDVGCYLGLQPGRRNSGQSQPQMHISKEGDPYKSVNTQ

SEQ ID NO: 420714 - protein, 388 aa, unidentified
MCVVDERGRIAEGRRYGHNEPGIRALCGRLVRLQVRLVAVERPDGLLIERLLDAGLSVAAVHPNQVKASRPRYSVAGGKSDGFDSFVLAELARTDSHRFRVLVPDSDQTKALRAMTRARESLVRTRVGLANQLRDQLACFWPGASKVFSSVDSQIALAFLRRYPTPVDARGLGEQRLAAFLKRHGYPGRKPARELLARLRNGAEGRAGELELVARRQIVLALVSALEPIVARISELTIEIRHALRAHPDGPTFRSLFIDPDSWLCAASMLAEIGDCRERYPTYRALAADAGQCPVAVESGKAKHAQFRWACDHRLRDAFDKLADSSRRHNPWAADIYNRATARGASHAHAVRILGRSWCQIIWRLWHDHDTYDPNRHTARQRFIASST

SEQ ID NO: 420715 - protein, 353 aa, unidentified
MTVYVAVDFHARQQTISYCDLADGEIHRRELRHQHDDVRAFYGGFTGEVIVGFEASGYSAWFEQMLTELGHTFWLGNPAEIRRKAPRRQKNDRRDADLMLDLMLKGDFPRLHTFSPESRLVLRQLRYRHKLVKVRTIAKNSLQAIGINAGLPLKRQLLTEKGIRQLQALPLSPVLAQQREEWLELVAFVNQRVTKVEAALQQIAEQDAAVALLQTHPGIGLLTSLALRYTLMPVARFSTTRQVTAYAGLDCMEEQSSERRRMGSISKAGSRLLRYLLNEAGQTACRKDPELKRFYQRLLDRRNRPKAKVAVARKLLVRSFIMLRDQIDYAEFVRRGVAARVARHPHSLSMTEI

SEQ ID NO: 420716 - protein, 341 aa, unidentified
MKPELSVVGIDLAKSLFHLVGMDERGKIILRKRLARGEVLPFMAKLPRVLVGMEACGGAHYWARHLREQGHEVKLMAPQYVKPYVKTNKNDLRDAEAIAEAVTRPSMRFVPIKNVAQQDLQALHRVRERLMGARTALVNEIRGLLAEYGIVLPTGINAFRNGLAAKLEAEQGKLTPLSQELFGKLCAEFKKVETEVAYYDEKLQVLATTHPESQRLLTIPGIGPLTATALIAAVGDVGGFTNGRQFAAWLGLVPKQHSTGGQTRLLGISKRGDSYLRKLLIHGARATLRWARTKTDSRSQWIRGLLERRGWNRTAVAVANKNARIVWALLSRGGVYGESTH

SEQ ID NO: 420717 - protein, 387 aa, unidentified
MPASGPRPGQVAVQVSLAAIFVSLELSRSTWLITSLIPGGADKMSKHSVRSGDITELMTHLAKLRDKAQARAEVSFSIIAIQEAGLDGFWVHRVLERAGIESHVVDAASILTSRRWRRAKTDRIDGEALLRTLLAYKRGEPRVCAMVRVPSPEEEDRRRLCRERRTLVAERVAHVNRIKGLLFAQGIADYEPLHGNRRQRLEALRTGDGRPLPLYLKAQIGRELDRLELLLEQLKTVEAERNALLEPTNDVAPVAVKALAGLRGIGPEFTAMLWSECLFRSFRNRRQIAAYAGLAPTPWQSGSVRHEQGVSKSGNPRLRSTMIQLAWLWLRHQPTSELSLWFRERVKRHGGRGKKTAIVALARKLLVALWKFSSSGVVIEGATMKAA

SEQ ID NO: 420718 - protein, 427 aa, unidentified
MNLDQATREARKAPAPCILRGTGSLSLAVPRSPLASPSKAGLRSPPKAKEDDKIQRHGRPLPLRSERPRESVGRRVDFQKQPEQMRGPRARILRKAGHAEMRNPSRKEPVTPTTDTFVGIDVSKAKLDVHVLPAKRAWSIPNEDDAVRALCKELARLNATLVVLEATGGLERRLLAALLAANLPAVVVNPRRVRDFAKAHGCLAKTDALDAAVIALFAERIRPPVRPPIDAETQELAALLGRRRQVVEMITTEKNRLTANPPSKLVHRAIRNTISYLEKQLDAFDSDIDTAIGNSSVWKAKDDIIQSVPGAGPVLSRTILSCAPETGSLNRKEIAALVGVAPLNRDSGTLRGRRTIWGGRTEVRNVLYMATLAAIRFNPIIARFHARLVAAGKLPKVAIVACMHKLLTILNAMLRSNSRWQTTEVLP

SEQ ID NO: 420719 - protein, 334 aa, unidentified
MENIALIGIDLGMNSFHIHCQDHRGKAVYRKKFTRPKLIEFLATCPATTIAMEACGGSHFMARKLAELGHFPKLISPQFVRPFVKSNKNDFVDAEAICEAASRPSMRFVQPRTESQQAMRALHRVRESLVQDKVKTTNQMHAFLLEFGISVPRGAAVISRLSTLLEDSSLPLYLSQLLLKLQQHYHYLVEQIKDLESQLKRKLDEDEVGQRLLSIPCVGTLTASTISTEIGDGKQYASSRDFAAATGLVPRQYSTGGRTTLLGISKRGNKKIRTLLVQCARVFIQKLEHQSGKLADWVRELLCRKSNFVVTCTLANKLARIAWALTARQQTYEA

SEQ ID NO: 420720 - protein, 402 aa, unidentified
MTYDYVIGMDVGKYFHHACVLDIDGTQVLSKRINQNEQSLRALFSALSAYDHKVLVVVDQPNNIGRLTVAVAQDIGIDVRYLPGLAMRQLSRIHAGNAKTDIRDAYIIAHAAKNLPESLRSVDRVEEAFLQLKVLNDIDEDLARSYTRLINQIRSALVGCYPQFEQALRGQIIHRKWVLHLLARYGGPTKIKRLGKAKAAAFARRYKARNPEPVLDAIFAAISEQTVTIAGAHYAEMGVAMSAKDALLKLEHRQQIEKEVIELINDIPHTQFLLSMPGIGPKTAAQILMTAGDMSDFPSAGHLASYAGLSPRTNQSGTSIMSNSLNRAGNKKLKNALWQSSFASIRFHERSWQFYERKRREGKRHNAAVVALARRRLNVLYAMMRNHEHYHDPAPSQEDLAA

SEQ ID NO: 420721 - protein, 338 aa, unidentified
MTTIRVIGIDLGKNTFHLIGHDYSGREVFRKKLNRQKLLQLLSVHEPVIVAMEACGGAHWLARRCESYGHQVKLVPAQYVKPYVKTNKNDFIDADAIAEASMRPNMRFVSPKTELAQVCTVVRKIRTGYIRERTACMNRIGSILLEFGISFPRGHHNMKNLFQYLADNKEPVPPMLVLELKDQLDHYNQLNTWIKEQEKKLENLLKDDELLSLLQSVPGVGPMTASCCLSAVVNPHDFANGRNFAAWIGLTPHQYSTGGKSRMLGISKRGNKELRELFVHAARAVIWRDGTAERYFGSWLIDLKRRKPFNVALVALANKLARITWSVMVTHKAFEIRV

SEQ ID NO: 420722 - protein, 356 aa, unidentified
MFAGIDTHKDTLAIAVINAAGGPVIVVEVPNTLPGFEKIGQLLATYPVERIGVEGSGNYGRAVAAHLVCGGLDVREVPTLMTSRERGAQPGKGKTDEVDAVAIAKITGRETGLPPVRLTVGLAADLRALLDYREDLIREHTMVINQVHAELTGLFPGYQHQHPHLVTFAQVNAVLGMIGDDQRVRADVCRRRLRRALELTVEAREIKRRITAMIKGKTDHVAGLYGAGPIIAARFVAEVVDVSLYPNRDAFASANGTAPLAASSGRTVRHRLNRGGNRSLNRALYTMAITQIRGDTEGRAYYLRKRAEGKTSKEAIRCLKRQLSDQVFKAMRRDASSPALLPGPAIEPDDTQALVA

SEQ ID NO: 420723 - protein, 404 aa, unidentified
MYYVGIDVAKEKHYVCILDETHEFAVKPFWIYSDILGLQELLKRLANLSLDNDDFVIGIESTGAFSENLYSYITDADYKVILLNSYQTAKYRDFSTMRKVKNDAIDAYVIAELLSSNKYKESHISSEDYHSLKVLGRLKRSLDDKIKSVKREISTVMATVNPEITLVFKNIFTKTALEIIKAYPTAIELQKATPKKLTRLFRHIQGNNFNDEKAKYLIELAKSSIYRGRANEARALMIRTNIKILELLSQEKQDIEVQINALIESGISKELDAPIENLKSIPGVSDKTIAAILGECGDLRRFTSAKAFIGYLGLYPTQYQSGNTALVGTLAKRGIPIAKHALYMAAVSSVLHNKELKKIFKDKISSGKSKKEALIIISKKLATMMYSIFKYNTSYDAKRVLVSK

SEQ ID NO: 420724 - protein, 349 aa, unidentified
MNQSVKPVVTRMGIDIGKFAFHVVGLDFAGKPVFRSRFTRERLIEFLARASPTVVGMEACPGSNWLARKAAACGHEVKIVPAQFVKPFVKSNKTDMIDAEAIAEAISRPTMRFAQPKTEAQLDLQALHRVRQRLVSNKTSIINQARAFLLEYGLTISAGAAHFVRHIPSILSDDENGLTPSMRNLLQELWQEYRSIEARLLQLRRQIEAIAAADDAATRLTSVPGIGQLTATAITAFAGTGTQFKSGRHLAAWLGLVPKEFSTGGKQRLLGISKRGNPYLRKLLIHGARSCVLHLDRTRDHLGVWINQMEAKGVHRNKVIVALANKLARIAWAVLTRQSAFYLRQPQQQ

SEQ ID NO: 420725 - protein, 413 aa, unidentified
MSVTQQGVPARVCAGVDWAKDDHAIAIIDPSGEVLDRFAVTHNAAGLKSLVRRLLKAGVDEVGIERGDGPVVEALIQAEFTVLVIPPGQLKNLRSRYGSAGNKDDRYDAYILADVVRTDRRRLRPLVRDSAATTALRTTVRARRDLVEHRVAAANQLRAHLQIVFPGATSIFAAIDSAISLTFLERFTTQAKADWLSPKRLGAWLSSVSYSGRTDPEILHTRLLAAPQGTTGAEAEIHTVTTLAFVAILRSLNTQIEALAASIGEQLAIHPDAHIVTSLPRSGTVRAARLLAEIGDARGRFPTAESLACLAGVAPSTRQSGKVKAVTFRWGANKELRDAVCDFAGDSRHANPWAADLYAKARARGHDHPHAVRILARAWIHIIWRAWQDNVAYDPTKHGALQALLNNTTEKAA

SEQ ID NO: 420726 - protein, 317 aa, unidentified
MKKHSMVCAGIDTGKRKLDVALNGQAERLQVANADAGYRELIGWLRRHRVKRVGIEASGGYEQAVVNRLRRDGFLVIVFQPLQVRAYAQFHLQRAKNDRIDAALIAGCAAEAKKIHAPPDPRLAALAAQQTLIDQIVDQMARFKNYREACRDAPLRQFWNDEIKRFRGLFKRELKQLVTAIRRHPDLAERLELIASVDGIALRTATAILVRLPEIGSVSREQAAALAGVAPYDDESSDRIGERHIAGGRERLRKNIYGAALAASFHWNAELIELYQRLTAAGKDHKVALIACSRKLLVFANAVVARGTPWQPRTAVH

SEQ ID NO: 420727 - protein, 356 aa, unidentified
MRYLGLDVHTKATVWCLVDDTGEVVERGKVDTTVPGLEPLIRRLSTSDELLVGQEVGKMSTFVHDVVTAAQVRILSFNAHQLRMISASRKKTDRRDSYWIAKALQTGMMPHPVYIPTGQVRELRGLLAQRQALSAERKRWLLRARSYLEAAGYKLSRHRTVACLVETAMAGPDGLGEPLAQALERCERMEGMASGELQSLEATIRREANSIDAIRRLKTIPAVGDWVSVSIYAWVGDVGRFPNARALASYAGLVPSVHQSGETQSCGGITKQGTGQLRSALVQAGHVLMFRCRSAEAAPLQAPAKRIHTARARRKIAVVAAARHLLRIAYYVLRDGTEYDPQRLRQRGVSSAVTVA

SEQ ID NO: 420728 - protein, 451 aa, unidentified
MPGKKTRGISAGRLSTINPDAAGIDIGSTFHVVAVPSDREDRPVRTFRTFSSDLYQLAEWLTAVGITTVAMESTGVYWIPVFEILEARGFEVLLVNARDVKHVPGRKSDVNDAQWLQQLHQHGLLRGSFRPRDSVVRLRAYLRHRERLVDYAAAHIQHMQKALMQMNVQLHHVVTDITGLTGMRIIRAIVSGNHAPEQLAEFRDRRCHATEDTMREALKGNYRPEHVFALRQALELYDFHQTKVAECDVEIEAVLCGLNAQRVAPEAPLPSVRHAKGRNEPRFDARPALYTLLGADLSQIHGFGPYTVLRLVAECGDDMTKWPTAKHFTSWLSLAPGNKISGGRLLSSKTRRSSNRATALLRIAAVNIGKTQTALGAFYRRLAARTGKAKAVTATARKLAILFYNALRFGTSYIDPGVSSYEERYRQRVIHNLQRRAKSLGFTLVTTPPAT

SEQ ID NO: 420729 - protein, 375 aa, unidentified
MGEITRSAIARVGVDLAKNVIQVHAVDATGRRVTARSIKRDQFLAWCAQLPAGCLVAMEACSSAHHWARALRAIGLDARLIAANFVSPYRMEGKSGKNDMTDAAAVCEAASWPSMRFVPVKTAEQQGVMSLHRVREGLKEERTACINRIRGVLGEFDLVFGKSPKVLRARLADVIEDASNELTALARLVVQRACEHWRELDEHLHWCDQQVGMHVRANAAARRAARLTGIGELGASALTASVGDFKQFKSGHQFGAWLGLVPRQNSSGGKAVLGRITKRGDDYLRTLLIQGAKAAVMSAPKRDDPISRWLVQLSARVGWQKACVAMANKNARILWAVMTREQVFDPHHVSVKPPAKQSTRQTAAAAPPLAAACPA

SEQ ID NO: 420730 - protein, 368 aa, unidentified
MDEGTTYVGLDVHKRTIAVAVRFPDGGFDERTIPHEKRAVNRLVRKWKREAPGSIRCAYEAGPCGYGLQRDLAEQGLDCQVIAPSLIPRKPGERIKTDRRDARKLAELLEGGLLTEVHPPTEEDEAVRDLCRAREDAKEDEVRARHRLGKFLLRRGLRWGKKNWTVAHRQWLRGLRLEHPADQAIFEAYCIALDQATERVRLIELAMTDWAVQEPYATPVSWLRCFHGIDTVTAMTLVTELHDFRRFRRPRELMSYLGLIPSEHSSGGHTQRGGITKTGNGHARRVLIECAWHYRHPAKVSRALQKRRAGQPARVIAIADKAHRRLSGRYRRMTSRGKEHNKVVVAIARELVGFLWATLTVEERVAQV

SEQ ID NO: 420731 - protein, 381 aa, unidentified
MKKATRYVGLDVHAETIAIAVAEPGREGEVRSLGTIPNRPESVRKLVEKLKPANTLHFCYEAGPTGYVLYWQLVKLGVECTVVAPTLVPVKPGDRIKTDRRDALKLARCFRAGDLTAVWVPDPAHEALRDLIRARESAKKDQLRARHRLSKFLLRHGRRPGERGKTPWGTLHMEWLRGVQFEHPAQQATMVDYLAEVVHHGERIARLEQAIDDALKAAPSELQEVIAGLQALRGVAKVAATTLAVEIGNFTRFAKAPQLMSFAGAVPSEHSSGTSRRQGALTKSGNAHIRRVLFESAWCYRHRPGKGRALAKRQRDLPEPINQLAWKAQHRLHRRYAALSSRGKPAQKVATAIARELLGFVWAIAVRIEAAQSERREKQAA

SEQ ID NO: 420732 - protein, 344 aa, unidentified
MKDVRILGVDLGKNSCSIVGLDGAGRVLLRRRTRREGVIALAAKLPGCVVAMEACCGAHHLGRLLVEQGHEVRLMSPEYVRPYVKAQKNDDRDAEAIAEAATRPTMRFVALKSEAQLDVQVLHRVRDRLVGQRTSLTNQIRSILLERGIVVPQGRRSLLEALAVLSSEPDGSRLSTRVQRLLDDMLDQWRALDARIKALDDEFAEMARNDPAARRLATIPGIGVLNATALVAAIGDGRTFSRGRDLSAWLGLVPHQSTTGGRPKLLGITKRGSRYLRKLVIQGARAALPSLARTATPVGGWLRGLLARAHGNTVVVALASKLIRIAWALLRNETRFVAGGAAVA

SEQ ID NO: 420733 - protein, 360 aa, unidentified
MAKAKTLVGLDVHATKIVAAVLDAETGQLQTFSMDGDAGGAAGFCAGLPGPVRVAYEAGPTGYGLARELAKRGVECVVAAPSKIPRASGDRVKTDRRDAEHLVRLLLAGKLHAVRVPGDEEEALRDLVRAREAVRVDLMRSRHRLSKLLLRHGIRFDDGHAWTERHRRWLETVELDWAAAQATLLDARGAIDALVHRREQLEREIIGLLPACPWTVQVARLRCLRGVDTLTAVGLCSEIGDFARFARAEQLMSYVGLVPSESTTGQQRRLGSITKTGSEHARRLLVEAAWHYRKRPTVGTALTDRQHDQPPEAIAVAWSAQRRLHRTWTRLEQRAKRRTIIAVAAARELAGFAWAICQIE

SEQ ID NO: 420734 - protein, 370 aa, unidentified
MAKSTPLFVGLDVHKDSIAVAHATGGGVEPPVFVGEIGTRQADIDRLIRRLQGKAPALRFAYEAGPSGYGLYRYLTGKGLVCEVVAPSLIPRRPGDKVKTDRRDAVELARLLRSGDLTAVYVPTVEDEAIRDLCRARDAARVTLKDAKLRLKAFLLRLGLHYVGRADWNAAHKRYLAKVVCPTPAQQIVFQEGARAVDEQVDRLARIEADLQELAPHWRRYPVVQALQALRGVQWVVALTVVAELGDLTRFDNPRQLAAFVGLVPSEYSSGPARRQGGITKAGNGRARRVLVEAAWAYRHPAKVSLHIQQRIDRLPKALQDLGWKAQVRLCKRYRRLVARGTHPNVVVTAIARELLAFMWAIARAIPNRA

SEQ ID NO: 420735 - protein, 418 aa, unidentified
MRNSWTPYKFTFGGTKMYNAVGIDVSKGKSTVAVLQPAGVIIRKPFNVNHTSSELDELAKYIGSLEGETRVVLECTGRYHEPVVKALSEAGLFVSAVNPHLIKNFGNNSIRKVKSDPADAKKIARYTLDNWIELRQYSSMDNTRTQLKTLNSQFSFFMKQKVAAKANLIALLDNTYPGVNKLFDSPVRDDGSEKWVDYAYSFWHVDCVRKIGLKTFTERYQAFCKKHHYNFQPAKPAELFLASKGLIAVFPKEASYKLLIQQSIQQLNLASSHVEELRSKMNELASTLPEYATVMGMYGVGKTFGPQLIAEIGDISNFSHREALTAFAGVDPGVDQSGTHNSKSNKASKCGSNRLRKTLFQIMSTLLQTAPENDKVYQFLAKKRAEGKPYYVYMTAGANKFLRIYYGKVKECIRNLEQ

SEQ ID NO: 420736 - protein, 465 aa, unidentified
MKSKTSKTKKRKQKISIDQGWAPVNGHAAGIDIGAREHWACVPPVAAPNPVRKFGTFTADLEALADWFQECGVTTVAMEATGVYWIPVFQILERRGLQVLLANARQTKNVAGRKTDVQDCQWIQRLHTYGLLQGSFRPADAYCVVRTYLRYRDELVSARSTQCQHMQKALQQMNLPLTQVLSDVTGVSGLAIIGAILKGERDPVKLSRLVDRGVRATPAAIQKALAGDYRPEHLFVLRQAFALYHTYEEKIQACDQEIVREVAQLPDRVDLSRQPLPARKKGRKAALDQMAGQDMREALYRKTGVDLTAIEGIGPLTSLVLFTEVGPDVSRFPTEKHFCSWLGLCPDNRISGGKVLSSRTRRVVNRATDALRMAATTLERSPSALGGYYRRMKARLGAAEGVTATAHKLARIIYRLIKHGEAYVRQGMEDYEAKFRARRLAALKKTAKTMGFELIQTQALPSGVS

SEQ ID NO: 420737 - protein, 388 aa, unidentified
MQSFEGPYDAFVGFDVGKLAHRACCVLAGGAVAFNVGVANDEAAIDRVLAEAAAHGRALAVVDQRRNIGTTVVRRARAAGIEVAYLPGIAANRASSLFPGDAKTDERDAEVIARTAMGVPQALRPVPEEGALEGARRLEAQRCDLLRDRTHCVNRLRALLLESNPAFERELDCEAAWALSLMSRVGGPWQMLDAGRRRYAALTRDAPRGAADRLWAALPTATRPTEPQVKAEATLVRMLASRIAEDTALIAELAALVEAEVDGDETYRCLLTVPGVGPRTAAQLVLSVDISDFEDHDHLASYCGLVPRNRQSGTSLNSVSSSRQGNKQLKNLLIFSCSCLARGSGYYREYYERCRDRGMPYKAAIKAVARKRLKVIYAVMRDVRPYVA

SEQ ID NO: 420738 - protein, 405 aa, unidentified
MHNRQNYLYVGVDLHKQHHTAVIINCWQEKLGEIQFDNKPSAFSKFLLEVETYVSDGLSVVFGLEDVGGYGRALAKYLVDHERVVKEVNPALSFLERKSEVMIKKNDSWDAECVARILVNKFNQLPDAKPHDLFWSIQQLVSRRNALVKAQSALKNQLHIQLNHHYPSYKKFFSELDGKTALAFWKQYPSPSCLEGTNIKQLTAFLVEVSHNTCSVKKASDILKLVKEDGQTMKEYQETRDFLVRSIVRDIVFKKQEMKYIERELKQLVNILDYQLHTMPGIELVTASALIAEIGDVRRFPNANKLARFAGIAPVYFGSGGKGKTHKSKQGNRALHALFYNLAVQQVQVAKGSKLPRNPVFHAYYQKKLKEGKTKGQALVCIMRRLVNIIYGMMKHKTAYELPVV

SEQ ID NO: 420739 - protein, 338 aa, unidentified
MPLYGGIDLHANNSVVVLLNEQDQVIYQRRLSNHLPTILEQLAPYHSDIKGVVVESTYNWYWLVDGLMEADSRVHLANPAAMQHYSGLKYTDDHSDARWLAQVLRLGVLPEGYISPKAARAVRDVLRKRAHLVRQHTANVLSVQNILARNTGSRFSAKRIHEFTKADLEGLLPEANQVLAVTSSLALLDCLSQQIKTLEKAVTQSLKHTPAYEQLLTVDGIGTILAQTIVLETGDIGRFPTVGNYASYCRCVGSTKISNGKRKGQGNVKNGNPYLEWASMEAAQFAIRFSPTVQRFYQRKQVKSHLRVARKAVAHKLARAGYDLMRDLVPFEVHKAFG

SEQ ID NO: 420740 - protein, 385 aa, unidentified
MHQVESECSVLDGVVVFVAIELSKSAWLFAAQASPSGKTSSHRLESGDITGLLTLLRRLQARERQACGGGAVQVVVGYEAGYDGFWLQRRLAAEGITCWVMDPGSLQVNRRARRAKTDRLDAAMLLRALIAWCRGDRAACHMVQVPSVAREDARRTHRERQRLVVERVQHVNRIKGLLATQGINDYQPLRRDRSARLGEVRTKDGHALPPRLRREIERELQRLELVLEPLEAVEAERDTAVAAPAVDDADAAKVALLARLGGIGNELATVLVREGLYRSFTNRKEVAAYAGLTPMPFASGERHREQGISKAGNPLLRKAMLELAWLWLRYQPDSALARWFTDRVGSVRGRIRKITAVALARKLLVALWRYVTAGLMPEGARIKAA

SEQ ID NO: 420741 - protein, 399 aa, unidentified
MRKVAGIDVHKEFLEVAYRLPSGRIETKQVEYTPKGISRLIKLLRRHGITDVYMESTGDYYLPLYYALKGAGIRPHVMNAYKIRRPEPNKTDKKDAIWLLEIGESEFFSDSYVPDEDIQALRFLIRKRMKLVDRISDIKREINSILWRLGLQVAHYAKKLRSKKKRMLLLALLEGRLRPDSINDSDVKHLYDILSRPEFRAYVFVLRSRLVDLAHLESQLEEFDREIVALARKFEDTIRILMSVPGISFILAVGILAEIGDINRFPSPAHLASYAGLVPTARNSGGKRRSGRPSKKSNKYLRRYMFLAGMAATRSNSRVVREFFTRLLGRGKHYKVAVVAVARKLLCVIWYLLRRGESWCEDGYFKRPRRLPRGGRVRISVREAIAILVRAGYEVRRKV

SEQ ID NO: 420742 - protein, 315 aa, unidentified
MSDLPCFVGIDVAKAQLDIALRPSGERWSVPNDTPGVTMLVDRMQTLQPALIVLEATGGLERMVTSALATAGLPVVVVNPRQVRDFARATGQLAKTDALDARALAHCADVIRPAPRPLPDAQTQELRALLGRRQQLIGIRTAEQNRLGGVSARLTQAIEAHITWLNERLATLDNDLETLLRASPLWRDNDDLLQSAKGIGPVCARTLLLELPELGTLTRQEIAALVGVAPLNCDSGTLRGRRMIWGGRAHVRTVLDMSTLVATRFNPQIKAFYERLLAAGKVKKVALTACMRKFLTILNAMLKHRTPWQPQEVQS

SEQ ID NO: 420743 - protein, 332 aa, unidentified
MFIGIDVHKRYSQIAVLDKNGEIVEEVRVENANLDDFAQRYAGSKAALEATSNYYHIHDTLSAYLDVTVANPGELKLISDSDKKTDRVDAKQLARMLRLGSVPESYVPTDEVRQARALVRGRQKLVENRTEYANKIHGLLSDHGITREVKPLSVKGREFLAELSLPAPWDALLESYLEIIQVLTEQIESLEAEIEERAGSLKETQLLMTIPGVSYFTALTIYAELGEVNRFDRAKEVVSYFGLNPIIRESGDSRFEGSISKRGSGRVRWLLVQASYSAVHTCEDEYLSRFYNRLARKKNSKTAIVATARKLLVSMYHMLDREEVYDPPGVSA

SEQ ID NO: 420744 - protein, 370 aa, unidentified
MNKISAVNTQTIVVGVDVHKYSHTAVALDCFGSQIGLHEFTNDFLPEYVSWLDAFGNRNNPIVALEDVNGYGVHIVRKLADEGITMRYVPGILTERKRKQSIHREKSDPVDAMRVAKVILTNYEETLPAKESIANREERTTAITLDFFLNERRSLVAEKTILKNQLHAMLHQHMGDHYTDCFSKAFTPKAIGYYLKTVNPKAIHDSEASALVASIRRRLTRLKLLLGQIAEIDKAMKKAAKDSSPVAALKKNISGCGDVTACTLIAEVTSIKRFKTKSQFARYAGIAPVHKSSGNHKRLYTSPYGNRKVNRALHTIALYQISRVDDNNPGRIYFEKKLNEGKTKLWALRCLKRQLSNRVFQTLKHEYNTR

SEQ ID NO: 420745 - protein, 456 aa, unidentified
MGHARARKIPAQLVEDEEYQLRHERVAGIDIAKAKADVCTRLPPDRDGGRRASRLEEIPATAREILALAGRLLADRVELVVMEATSDYWRIWYYLLEGAGLNVQLANPAHARQLAGRPKTDRLDAQWIARLAEMGLLRPSFVPPPEIRALRDLTRTRLQLVRDRTREWQRLEKLLEGALIKLSSAVSRLARAKTARDILEAIAGGQRDPKALAALAARQITGGRQAVEQALEGMLLGDHHPRLIRIHLDHITFLDRSIAALEDEIDAALDAIPAAWGISADGVPSPDPGPDPAALTAAERLAEIPGVSPKLAIAIIAETGLDMTRFPSAAHLASWAGLAPVARQSGPRNRKPKKGQGDAYLKGYCTQAANGAANTETFLGERLRRLSRRLGGNRAKCAVGRSILVIIWHLLSDPEARFADLGPDWHERKADRDRKIRAHVSQLRAMGLDVTITPAA

SEQ ID NO: 420746 - protein, 370 aa, unidentified
MSNATTFVGLDVHARSVKACAFVPETGETIRKSFGYEPGEIASWVSSLPQPARCVYESGVTGFHLCRELNAMGVACVIGAVSKMHKPAADRGRKTDRRDAQFLAVQLALGVVTEVHVPDAECEGARDLARALADARDDAVRAKQRLSKFLLRHGFVYDERNAAGRRRNRWTGDFWAWVGRIDLGDAAAMATLDHYCERVREADAAKAALEAKVKSLAQQPRWKPTCDALKCLKGIDAVTAASIACEADGFARFATASGFAAWVGLVPSEHSSGESRFRGGITKAGNKHLRKLLVEAAWHYKGASRSPKDLAKGQAVDAATRRHANAGVRRLVDRRRAMDDAGKQSSVANVAVARELACWCWAVGRMAEGA

SEQ ID NO: 420747 - protein, 315 aa, unidentified
MEAAAVVVGIDVSKRTLEVALSDGGGFRVANNEDGISELLARLRPSGAALVVLEASGGYERAAYLALWEAGVPTALINPRDAYHFAQAHRQLAKTDQLDARGLCEFGLRMQPQPLPPPEAADEQLKALAVRRRQVIKMLAAERTRVQQAPRAVRPSVKRMVRALARELGAVDHQIEQRLRDNPRLAQRCAQLEQVPGLGPVTCAILVSRLPELGRLGPKQVAALVGVAPYDHQSGQWRGRSPIFGGRAEVRSALYMATLSAIRCNPLLRSFYHRLRAAGKPAKVAIIAAMRKLLVILNAMLKTNSPWSPPCAITT

SEQ ID NO: 420748 - protein, 346 aa, unidentified
MLHAGLDLSRKRLDVCLLTEHGELIDHITAPPDDDGVRALARRVAPFGAPVRGVIESMNGARFVHDTLQEHGWEVLIADAQRVKGLAPLACKTDKVDARVLAELSWRDLVPVIWLPDPAIRRERELARFRLHLVRHRTSLKNRIHSTLITFGKPCPVSDLFGHAGRELLDRLAIPDPWRRTVDASLILIDEIDLQVAQLTVELRRLGADHRYIPLLVTVPGVGWVIAFTIAAEIGDIARFASPTKLCGYTGLCPRVLQSGNSDRRGPLSKHGPRYLRWALFEVALHACTHPLYRDRYERTKRRLGRQRGPKVAQIDLSRRITEAIWHMLTHDQPFAPAGAPYRLAA

SEQ ID NO: 420749 - protein, 449 aa, unidentified
MNSIRFVGLDVHRESIRACIRDGNDDILSEHSLGCTRDEIESFARSRLARRDVVALEATFHSWAIVDLLAPHVGRVVVSNPLATKAIADAKIKTDKIDARVLSELLRLDYLPEVWTPDAATRERRATCARRAGLVSDVVRIKNRIHGVLAKTLVPKRKGDLFDRKGRLWLESLDLPEHARRQLESDLRLLGLAERELGIHEAELVRGAWDDPRVKLLVTMPGVDVTVALAILAAIGDVDRFRDGDRLAAYLGLVPSTYQSGERCYHGHITKRGNCKARWLLIQAAQHLAGHPGPLGVFFRRIEKHKNRNVAVVATARKLAVIAWRMLTTGEPYRYALPKPTSGKLARFRTRATGARRKGGNPKGAPRHPNYGTGVQTRTIPALPTVYAGEGVPLARPPDRLAPGERRMLEQNGAWPFVQSIQSPEVRPRKLPKNSGVQCAGAVHDATST

SEQ ID NO: 420750 - protein, 408 aa, unidentified
MTVVGIDVSKGKSMVAAMKPGGELVAAPYEVRHSDIELSRLALDVLCMEPDTRVVMEATGRYHEPVAALLHSEGIFVSILNPLLIKQSGAGSLRKVKSDPKDALKIAKYGLDNWSTLREYTPTEAIRQQLKLCERQCDLYSKNIVMLTNNLISLSDKTFPGVNELFSSPEKADGHLKWVDFYRTFWHCDCINRMSPDAFGERYKKWCKKKGYHFSADATDALYTASCGLYTTLPRDNNAKLLVTVAADQLIALRENQSKLETEMLNLCKQLPEYETVMAMYGVGKSTGPHLMAELGDIRRFPHRSSIVAFAGVDPGVVGSGKMQLSSVATSKRGSPQLRKALFQVVSTYVKRKPENEAVYQFYAKKRDEGKPFFVCTTAAANKFLRIYYARVKECLNAAESAVQTEEG

SEQ ID NO: 420751 - protein, 341 aa, unidentified
MGQASTIGLDIAKWVFQAHGADATGRVVFRKRLVRAKVLEFFAGQPPCLVALEACGGAHYWARELGKLGHTVRLIPPAYVKPFVKRQKNDVADAEAICEAAQRPGMRFVPVKDEAQQANTVVFRARDLLVRQRTQCINALRGHLAEYGHVVPQGPAHVDSLVALVEDPKSSVPESARGILQVLIRTLNALEEQLKELDGEIARRAKADPVARRLMTIPGIGPIAATAITALVPAPEGFRAGRDFAAWLGLTPLQRSTGGKHKLGAISKMGERTIRRLLILGASAVVGWASRRGAAAGSWLARMLARKPRMLVTTALANKMARIVWALLVKGGTYRAPAVAA

SEQ ID NO: 420752 - protein, 338 aa, unidentified
MTQFTSFVGVDIASTSFMACVGTTPWKLTVQPVKFANDEEGFVSFLGWLKVHNLSPEGTVVCMEATGVYSEGLAYFLHASGYSVAVEPPLNIQRKFPANASKADELDCQYIAEYACRYVDRLSLWQPRAEILEQVKVLLTTRQHFSVQLTGHKNALHALQRKKVSSELAKQAHQTMIEQIAKQIKAIDQEIRRLIDSDPTFKQTLLLLLSVPGIGLQLAAHLLIIMQENLDPRMLAAFIGICPIKHQSGSSVYSTPTSRHYGPPILRKLLYLAACSVRTHKKPFQQYFFRKAAQGKHKKLILNNIQNKLLKIACAVVRTQKPYLPNHVSINPLVLKKA

SEQ ID NO: 420753 - protein, 427 aa, unidentified
MKEQSGMIVGIDWSADSHTCYDLKADKSFKIPDSVKGYERLLNDYPEAVFVIEEANNRIGDYLLINNREVYVLPPCRSKEARKYHFSSGAKSDSLDAKAIALTFKEHPSYCLKARYSGVGAKITKLVTMYNIVSKTHSQQCNRLYSVLLRYFPEYLHIMDKQYRSNTSLKVLSICPTLTELGKVSNEELRKILNKENHRMTSGLRKKLDRIRSEGISWGDTSCEGNLIMFLANQILTLREEEERLRGEMGETLENSPYRIILSIPGVKAVIGSYIVKAYLTHDFRSYQEMQKYAGTIPFLFQSGRKSIMLMRKKCDNDLKNMIHMAAFASLKTCGWARNYYKRKRKEGKTYGHALRALGNIILKIAFSMLSKMKKYDETLFLNAKGIKITQPNNTIIPEAFTNPEYSQDAHPSLAATKDVVENLNVT

SEQ ID NO: 420754 - protein, 356 aa, unidentified
MSQKLNSAIAVIGIDIGKNSFHLVGQDRRGALVLRQKWSRGQVEARLANLPQCLIGMEACVGAHHLSRKLQALGHDARLMPAKYVRPYSKGEKNDYRDAEAIAEAVQRPTMKFVATKTADQLDLQALHRVRARLVGQRTGIINQIRAFLLERGIAVRQGLHFLRAELPTILAKRTDVLSPRMLRVIEDLAGDWRRLDERVDSLSDEIATLARQDKACERLMTVPGIGPIISSAMVAAIGTGDAFSKGRDFGAWLGLVPKQMSTGDRTILGSISRRGNRYLRWLFVQAAWVVLVKITPEGWERYGLRSWIEAAKQRLHRNVLAIALANKLARIAWAVLHKGRAFECVKTNATASQAA

SEQ ID NO: 420755 - protein, 377 aa, unidentified
MSKIRFVGLDVHADTIAVAVAEADGEVRSFGAIPNRLEAIRKMLAKLGPVKNLKACYEAGPTGYVLYWQLTTLGVACEVIAPSLVPVKAGDRVKTDRRDAIKLARSYRAGDLTPVWVPDAAHEALRDLLRAREDARQDQLRARHRLGKFLLRHGCRPPEDIKKNWTQKHMDWVKRQVSFAEPALQATFLDYVHEVEHAADRIQLLEKSIDDAVIAAPIEIREVIQALQALRGVGKIVAVTVVAEVGRLSRFPNPRQLMGYSGLVSSEYSSGNRIQRGHITKTGNAHLRRVILEAAWAYQHKPWIGGWLAKRQQGLDEETKAIAWKAQWRLCTRYKKLAAKDKNKPQIVTAIGRELLGFIWAIAVRTEAKFQTTPKAA

SEQ ID NO: 420756 - protein, 351 aa, unidentified
MVVVGADVHKQTHTFVAVDEAGRRLGEKVVKAISDGHAEAVMWARERFGADVIWGIEDCRNMSARLERDLLSAGQKVVRVPTKLMTQVRASARTRGKSDPIDALAVARAVLREPDLPVACHDKVSRELKLLVDRREVLLAQRTSAINRLRWWVHELDPTKGPKPRSLDRAKPREALRVWLDTVVSVVAELARDELADITRLSEQIDALAERIGARVRDVAPTLLAIRGCGELTAAKIVGETAGVTRFKSEAAFARHAGVAPIPVWSGNTEGRVRLSRSGNRQLNTALHRIAITQIRLNGSPGQAYYRTRIAAKDTTAGSRRCLKRHLSRVVFRALHIDDQIRNQSPQTAAA

SEQ ID NO: 420757 - protein, 388 aa, unidentified
MFQTIDQSKKALNAFEQDSTLVVIVELSQKSWLVAGIVPGVDRHPLKKFDADENRLFALIQRWKQEAIKAGREVKRIVVTFEAGRDGFWLARWLRARGIEAHVIHPTSVSVSREHRRAKTDRLDTELLKRATLGWLRGEPDHCRMVAIPTLEEEDAKRSNREHQYLVGDRTRVINRLKAALARLGIRNFNQKLRKASERLRTLVTPEGVSLPPNTLAEMERDMQRLQFVKQQIKAIEQTRFERLKKAPKTPLNMMVLLVARVLGMGIETADMLVHEVLSRDLRDRRAVARYAGLTGAPDESGARRREKGLARAGNARVRRGMIEFAWRFVRFQKDSTLAQWFRARTADARGPTRKTMIVALARKLLIALWRLVTTGEIPTSLTLRPAA

SEQ ID NO: 420758 - protein, 333 aa, unidentified
MDGTTVAVDLAKYVFEVAVANDRGQIIDRKRFGRAALKSFLETRPASRVVMEACGTAHYWGRFAQEHGHEVKLLPPAYVRPFVRRDKTDRADAEALVDAARGDRIPAVPVKRAEQQGLVALHRIREQWMSTRTARINGLRGLLREHGVILPAGARSAVLAVPALLDSATELPAVLRRVLASVREEIRALEDRIAEVDRELRNLATTDPVCVQLQTVPGIGPLAATALVATVGHIHAFRRGRQFASWVGLTPREHASGARGRRPRRLLWPRGGRAGGGAAARRRRAGQPLPRLYEWALEVRARSHFNKAIVAVANKLARLVWAVWTRDVAFVAA

SEQ ID NO: 420759 - protein, 356 aa, unidentified
MTGPKHQKEKRSMDHCAGLDVSVNETSVCIVDDSGRIIREVKVASEPGALLQVLKTGSYRFKRIGLEAGPLSQWLYSALAEASLPVICVETRHMRAVLKTQINKTDRNDARGIAQMMRAGLYRPVHVKTLRSQKLRMLLTHRKLLQSKAIAIENDLRGTLRNFGLKVGMVGTTKFEARIKELVENLPDLAALVEPLLVVRRVLREQLGILHRRLLVVVRDDEVCRRLMTIPGVGPVVALTYRATIDVPARFRNSRAVGAMLGLTPCKYQSGESDYTGGISKCGDEMMRVMLYEAAQILLTRTVKWSWLKAWAMKIARHRGMKKAIVALARRLAVIMHRIWVDGTEFRWTRQETAAA

SEQ ID NO: 420760 - protein, 438 aa, unidentified
MRKKKNKANKRIHLQSLPLINPNAAGIDVGAKEHLVAVPPDRDPQPVRTFQAFTPDLHELARWLKRCGIETVALESTGIYWISLYEVLEQYGFEVRVVNARHVKNVPGRTKTDVLDCQWIQKLHSFGLLNGSFRPDHQIRKLRTYMRLRDNLVVERTQAIHHMQKALFEMNVQLSNVISDIVGETGLRIIEAILAGERDPEQLAALCSTRIKSSRQTVAKSLHGNWDEALLFCLKTALETYRFNENKIQECDHCIERQLATFDSRAQLSQQGESLRSQLHRVCGVDLTKIPGIKEQAAQIIISEVGLDMGPWKTEKQFSSFLGLCPNNLITGGKVLRRATRKVYNRAADTLRLCAQSLTHSKSALGAKYRRLRARLGAPKAIVAMAHHLARLVYRMLRYGQNYVEKGIEHYEEKFRLQRIKWLKKEAQSLNLQLVATQ

SEQ ID NO: 420761 - protein, 347 aa, unidentified
MSNHIENGQVRVLGIDLGKSVFQLHGVDARGKSVLKKRLKRDELLEYMAQLPPRLVGMEASSGAHHWARKFQGYGHDVRLMAPQYVKPYVKRHKNDSVDAEAICEAVQRPNMRFVGIKSVAQQEILALHRVRSLAVKNRTALVNQIRGLLAEYGIVFPKSIKQARRAIVLILSDESSEMSANFRVILEDERDELAHLDERIGKYEREIEALAKAEPQCRLLMTIPGVGPITATALLASVGDVRAFKNGRELSAWIGLVPNQHSTGGKAWLTGISKRGNGYLRTLLIHGARAALRVCENKPDRRSQWAVSVSERRGANRAVVALANRMARSAWAMLVKQEAYGASAAV

SEQ ID NO: 420762 - protein, 370 aa, unidentified
MSVRRILAKTIDTDLEYEAIGIDLAKNCVSAALLTTDGEVVCIDRLDYSELEKSAQALSPTTFAMEPCTEMNYLVQKLEAWGHRCLVIGGKNVQNYVENHYSGQKTDLNDAQALAFLAQDKQLRTIKAKDIEQQKYASLTTLREQYIKQYRQTIVSLKGICQAWGLNISKGISGKARLKDLIENHAAFPEELKESLVDMVTHAQTAQKALNKITKTLEELAKSDKVCQLIQTIPGLGSICSCRLRATVGDIKRFKSPKDFPAYYGLVPRSIATGHNERKGKITHRGDRTMRSLMVQAAGSLVNMATKGKLKSKQLTKWILKKQKEKMPWGKLVCAVAAKLLRIVRAILISSKPYNPKIAGVAKCSLSKGS

SEQ ID NO: 420763 - protein, 407 aa, unidentified
MNAVGIDVSKGKSMVAIMRPFGEIVSAPFEIKHTASGINSLVELINSVEGESRIVMEHTGRYYEVLAHQLSEANLFVSAINPKLIKDFDNDSLRKVKSDKADAVKIARYALDKWQNLKQYNVMDELRNQLKTMNRQFGFYMKHKTAMKNNLIGILDQTYPGVNTYFDSPARSDGSQKWVDFASTYWHVDCVRKMSLNSFIDHYQNWCKRKKYNFSQSKAEEIYGKAKELVPVLSKDAITKLIIKQAVDQLNSASTTVESLRTLMNETASKLPEYPVVMAMKGVGTSLGSQLMAEIGDVSRFTHKSAITAFAGVDPGVNESGSYEQKSVPTSKRGSSDLRKTLFQVMDVLIKTHPQDDPVYQFLDKKRAQGKPYYVYMTAGANKFLRIYYGRVKELSLIHISEPTRPY

SEQ ID NO: 420764 - protein, 346 aa, unidentified
MTIVERDRTVIGGVDTHLDIHVAAALDPIGGVLGVESFDATPRGYKAMFEWMGAFGTVSKVGVEGTGAYGAGLGRFLRRAGVEVIEVDRPNRQVRRTKGKSDPADAVEAARAVLSGRVTGAPKTRDGNVEAIRALLVAKRSARDARLRALNQMRQLSYTGPDQLRSRLKGLSITKLVAETAAMRARASTDPVVYATKVSLTSLGRRVLSLEQELAGIDELLSHLVTTCAPEMLRLFGVGIDTAATLLVTAGDNPERLRSEAAWAHLCGVAPIQASSGKVTRHRLDRGGDRHANQALWRIVMTRLATDPRTREYMERRTKEGRSKREVIRILKRYVAREVFKELNRA

SEQ ID NO: 420765 - protein, 347 aa, unidentified
MIFYTNSHPYYCGIDLHARSLYVCIIDQSGETIVHKDIKANPEALQNLLEPYIGNIIVGVECMHCWYWVADWCEDNGIDFILGHALYMKAIHGGKAKNDRIDSFKIAKLMRGGNFPLAYHYPKEMRATRDLMRRRMHIMRHGAQLKAHVKNTTSQYNLPTNKLNLRYPGAREQMRDRFPDPAVQKSIDLDLNLIDFYNKELSSVEWYIKKQAKQHNARDFNLLKTISGVGDILALSILYEIGDIKRFESVQKFASYSRLVKCKAESAGKTYGTQGNKIGNAHLKWAFSEAAILFLRNNDSAKHYIAKMEKRMPKSKALSALAHKLGRAIYYMLRNKTVFDEKKFLAV

SEQ ID NO: 420766 - protein, 413 aa, unidentified
MEVVYERCAGLDVHKKTVVGCAIVPGAAGHPRRAIRRFETMLDELAALAWWLAEQGVTHVALESTGGYWQPVWNVLEAHGGFALLLVNARHIKAVPGRKTDVRDSEWLAELLRHGLVRGSFVPDRAQRELREVTRYRTALIEERSAHVNRLQKTLEAANIKLGSVASDVTGVSARAMLAGLVAGPAAPATLAALAVGRLRDKLPALERALAGRFGDHQRYLVPRILAAIDFLEAEIADLDARVAELERPFGAAVDRLDAIPGVGRRVAESLVAEVGPTVDRFPTAQHLASWAGLCPGNHESGGKRLSGKTRKGNRALRRVLVQAAHAAARARQTYLSAQYRRLAARRGKKRAAVAVAHSILVITYHLLLDPTVPFHELGPDYFDRRTSDATRRRLVERLEHLGFDVTLTRRVA

SEQ ID NO: 420767 - protein, 377 aa, unidentified
MKRILRIGMDVHSANYTLCAMEPVIGEDDRIFANIQVTPDYKNILMFIENLKLKLGLDNEYDIQCGYEAGCLGYSLYNQLTAANVKCMILAPTTMLTQQGQRVKTDARDALMIAQCLSYGGYHAVYIPTEEDNSVKEYLRMRDDHKLALKKIKQQINAFCLRHGYHFPATKWTIAHWKWLKNLELNEMYREVLNEYMASYEEQTAKIERFDQRIEEIAAQECYRNKVKKLECFLGIRTHTALSLIVETGDFERFAKGNTYAAFLGLAPGECSSGDKINRTGISKAGNSHLRILLIEAAGGICKGAIGHKSKALRARQNGNRAEVIGYADKANTRLRSRYYKWIRHGKVRNVAVAAVARELACFVWGMMTDNISLKAA

SEQ ID NO: 420768 - protein, 382 aa, unidentified
MRFYSKQHKYYCGVDLHAQTMYVCIIDKEARIVKQKNIKSNPAAFLKAIDKYRDDIVVSAECMFTWYWLADLCAKENIPFVLGHALYMKAIHGGKAKNDRIDAYKIAYLLRGGNIPMAYVYPSEMRATRDLMRRRNHLMRKRAELLAHIQNTIHQYNLPLFRKNIRYKGNREGLIEHFRDECVQKSMEVNLSLIDHYSWLLMKLEYYISKKAKGHDGDALFRIKSIPGIGETLSLIILYEIHTIKRFPRVQDFVSYSRLVKPSKESAGKIYGHSGRKIGNAHLKWAFSEAAVLMLREIPEVKRYKVKLERKHGKAKALSIVAHKIGRAIYYMLKRKEVFNIEKFLNKNKIQAGRAERITGAIRAEPNHMLAINHASTALTVY

SEQ ID NO: 420769 - protein, 402 aa, unidentified
MHYLGIDLHRKQMTVSLRNHNGDVLLRRQVSTRWPKLEEFRNQLYQALAAGEKYVAVVEVCGFHDWLVQWLHQDERCHQVLVVQPLGRSASKTDRRDAHGLSELLWVNRERLLRGERVQGVRTVQVPSAAEQADRCLTQTRERLVRRRTQTLNQIHKILRRRNLEWERPTKTFQTVKVRRWLKTLPLDPIDRLAMDHLLVQWALWDEQLVAADGWIGERFLANRNAQLLATMPGVSRFIGLAIACRIAPIERFPQGRSLANFLGLTPGCRSSGDTERVGSITKIGSRMVRYLLAQAIQHLLRRDGSIRAWYQRLKRRRGSKVARVAVMRRTATIMWRMLSTGEPWRCGRARSEMPEAGPRQAPGPHDGKAEQLAQSADHELAGLSTGSTSLLAGEEVAPCPA

SEQ ID NO: 420770 - protein, 423 aa, unidentified
MDILYERVAGLDVHKDTVVACVRMVADGKTTRECRTFATTTEQLVALRAWLEECRCTHVAMEATGVYWMPVFRLLDAGKFKLIVANAAHIKNVPGRKTDMNDAMWIADLLACGLIEASFVPNEEVQELRALTRTRKQLVREQTRHVQRIEKTLAEANVKLSSVISDIVGASGRRMIQAMIDGVRQPNKLAELAGRQIKATPKELYDALHGRLTDHHRFLLALHLKQWDSIDEMIRKLDVEIDQRIGRMTAEAEGNETPFRALIGLLTTIPGVSAVAAPAILSEIGPDMSRFRTAGHLVAWAGLCPGQNESAGKRKSSRLRKGAPWLKTMLVQCAWAAKRTKDSYYRAQFFRLQAKRGPQKAICAVAASILTAIYHILKHGTEHHDLGSDYFDRRPVELKASRLVARLKKLGFTVQLQPIAEAA

SEQ ID NO: 420771 - protein, 421 aa, unidentified
MLGIGIDFAEDFHVVALGRPNEGVIEVVRVDHTPAALESLVARIAALEPDPAEVRVVLETSHGALVERLLDAGYVVVPVNPDLVARRRGPARKKDDAEDARICCLIAIDRHAGLRRLIPHGDLAGELRAIARDDERAARDERRLLNRLRADLMAAYPAALVIAGDDPGAPTVLRLLERWPSEAALAEASHEDLVAFARAAHHGWPERFAERVAEALAAERFTPLPHLVRAKAATIRLAAGQLLLIGAQRRAWERRMGEILLGAPRRGRAREPLPDEHGERFPGGEIYLSFPGLGDRLAARVVGEIGDHPEMFATPNALQCYAGKAPVTRRSGKSELVVSTRLACNGHLRDAVQQWAFCSLQRSAWAREYYEGQIARGKGHHAALRALGNRWLEVIWHCLIRGTRYVEAIHVANRKRFQQAA

SEQ ID NO: 420772 - protein, 391 aa, unidentified
MFYIGIDIAKHNHEVSIIDDNGKALGKSFSISNSQKGVDKFNTYLDSFNITSENCVIGMESTGHYWINLFSFLVNLKFNVFVINPIQSDAFRKMYIRKTKNDSKDSYIIAQIMRFGEYSSSNISDENIFALRQLSRYRTSLVDECSSWKRKIISILDQVFPEYSNLFSDTFGVTSKELLSKYPLPENMLELSTEELTNLLTKASKGRLGNEKAQEIKESAKNSFGVSFAKQTFSFQIKQIINQISFIESQLKELDNEISNMLKELNSEITTITGIGDVLGACILSEIGDISRFEKASQLVAFAGLDVAVKQSGEFTGTEMKITKRGSPYLRRAIWLAATVASFKDPALSTYYKSLIARGKKHLTAIGAVSRKMCNIIFSVLKNKKAYTPNI

SEQ ID NO: 420773 - protein, 412 aa, unidentified
MEAILERCAGLDVHQETVVACVLYGELDRKPKQEIRTFSTTTKGLLALHDWLSDWECTHIAMESTGVYWKPVWSILEEQFTLILANAKRIKNVPGRKTDVADAAWIAQLLRSGLITPSFVPPADIRNMRDLTRYRRKLLRDATAEKNRIHKILQDANLKLTTYISDIFGTSGRALLESVINGEALEAHEVREKVKTSLKRKVPELLEALDGRMRKHHRMMLGLHLDHLSYVEKQLEKVESEIDRLLQPHLPAVELLITIPGIQKDAAAVILAELGNDMSCFGGDPQIAAWAGLSPGNNESAGKKESSRIAKGNKSLKAVLCQAAWAASKSKGTRLASFFYRIQKRRGQKKATIATAHLILRIIYRMLKDRVPYQEIGWDYLASSKPTVDYWIKKIEAMGFMVKLESAEASLT

SEQ ID NO: 420774 - protein, 392 aa, unidentified
MSPATVRLRIGDDAAGYTRLLALLAAHGDTTGLPVPVAIETPRGLLVACLRAGGRKVFAINPMAVARYRERYSVARKKSDALDAAVLAHVLRTDMDAHRPLPADTELAQAIAVLARAQQDAVWDRTQAHNKLRSVLREFYPAILAAFVDKRDGIMRPEARAIMTAAPTPAAAARLTKTQLVALLKRAGRKRGIEAEAARLRVVLRAGYLHQPQLVEDAYGRHTLALLRLLDAACANADELEMAAATSFALHPDATIITSLPGLAALTGARILAEIGDDRSRFADARSLKAYSGAAPVTRASGKSRYVMTRRVKNQRLAAVGYLWAFSALSNSPGARAHYDRRRETNERHTAAQRNLFNRLIGILYHCLQTGQAYDEQKAFQTSPTVALAAAA

SEQ ID NO: 420775 - protein, 373 aa, unidentified
MLTLAVGWDLHRKFSQVSLQRRNESGEIVVVERKRLDHADRDAMRQWLQQLPAGTPIAMEGAFGWQWVADLQQELGLEPHLGHPPAIRVLAKNEGKCDRQDADRLGRFWLRGILPESYLSTPAVRQLRERSRYRGSLVGIRAGVKNRVQAILHRLGLLHSFSDLFGDRGRAWLAELELPAGSRAVLDGDLELIDQLDELIGKVEQWMVENLVADETTRLLMTLPGVGLILAHVIRAEIGELEGHFASANKLVSYAGLAPLSDDSADRHGRRHVSPYCNHTLKWALIEATTGLLRSRKAPAHLRRLYERLSQRANKNLAHVAVARELCRLTYVIWKKGEPYRENSPARPGADKHASRRDGAGRDRCQVRSEQSR

SEQ ID NO: 420776 - protein, 411 aa, unidentified
MDAFCGIDWAEDHHDVALVDRDGRLLARARISDDAAGLARLLDLLAGHGDSAEDPVPVAIETPRGLLVACLRATGRRVYPINPMAVARYRDRHSVAGRKSDHGDAVVLANILRTDLHAHRPLPADSELAQAIAVLARAQQDAVWDRVTAHNKLRSHLREYYPGFLAAFAAKAGGIMRPEARVILAAAPAPADAAKLTLAQLRALLKKAGRSRGIDAEAQRLRDAFRQEQMRQLPLVEQAMGRQSLALLRQLDAACASADDLQAAAIESFNQHPDAGIITSFPGIGALTGARVLAETGDDRSRFHDAKGLKAYAGAAPVTRASGKSRSVTRRHVKNNRLAQAGYIWAFAALTASPGARAHYDRRRDAGDRHAAAQRNLFSRLLGCLHHCLATGQHYNEHIAFPARATTPAAA

SEQ ID NO: 420777 - protein, 342 aa, unidentified
MYYIGLDVHKKTISYCVKDAAGKIHIEGKIGSTRRELDAWIKTLPHPRMIAMEATIFTGWIYDHLLPHAEKVKVAHPLMLRAIAAAKRKNDKIDASKIADCLCCDFLPECYMTSTEIRDRRRTLRYRGLLVKQMVQMKNRISGLLMETGVSYNKQRLHKVGYFTELMSGNEEINCVRPLLKLSRETINRTQKLDYALVSSLERDPLLAERLKRLRTVPGVGPITALTWVLEIGDVARFQSIKQAISYCGLCGAEKRSADKVVRTPISKQRNKHIQQVLVEAAKLAPRYSHELSLIQEKEKQRGDRNRATLAIARKMVAWMVAVERRKQDFVPAEERGGTVAA

SEQ ID NO: 420778 - protein, 311 aa, unidentified
MTANVGIDVAKYKFDVAIHGDNVVKTYDNNKLGMKTFIKSLAGVNPERIVLEATGGYETELVIFLQENGFSVSVVNPRSTHDFAKVKGILAKTDKIDALNIAHFAQMFKPPIQEPISKNARLLKALNTRRRQLIKMKTAENNHKEHIADKIIKKSLDKILKVLNNEIDKIDAEIKAIVKADEAMSKRVDQLKTVPGIGDVTANMLVTNLPELGKYNKKQIAALIGVAPINRDSGTFKGKRMTGGGRREVRTQLYMPMLSATQYNPVINEFYNRLVNNGKPKMTAMVAAMRKLIVILNSMVKKNEVWMQQNA

SEQ ID NO: 420779 - protein, 312 aa, unidentified
MNTEFEIYWGIDVSKAWIDIAVENKVIRIDQTDEAIREFIDKHKAENKKILAVLESTGGYEKRAADCLSEASITVHIAHPNKVKSFAKARGRLAKTDKIDAAILKDYGSFIKLEEIRELPSKMQYQLQLFGARLAQLKDLHHQESCRRGIASEEMIENSIDVMLEIIKKQMEAVKENILAIIKSNAELKDTYEILCSMKGVGPALAMVLITDLPELGRANKKEIAALVGVAPITSQSGIKTGKAITRYGRSSIRKILYMGALTACRYNEKLKLFYKKLRDAGKPAKVAIVAVMRKMIVILNAMIASKSHFLA

SEQ ID NO: 420780 - protein, 429 aa, unidentified
MNFRPIAGIDVGKFFSEMAILSPSNEVIARMKIRHDSSSDVERAVELLKKTEKDFDSRPFVVMESTGHYHKILFHSLCKAGLEVSIINPIQTDSIKNIGIRKVKNDKVDARKIALLYRFQELKSTNIPNEDIECLRSLCRQYYKLSDELTAYKNRLTGIVDQLMLNFKDVFSNIFSKAAMAVLEEYPTPAHILKADRNKLISLIQKKSRKSLKWSTAKYELLVSKARDFAPLSIHNASNVIMLGVYISMIKTLEESLEKVLKSIRLLIAEDMAKDMPMLALTLELLQSLPGIGLLSAATILAEIGDFSAFKKPGKLVAYFGVDPSVMQSGEFTGTRNKMSKRGSRLLRRVLFTIALANIRTKRDKTACNPVLLEFYQQKCQSKPKKVALGAVMRKLVCIIFAVLRDRKPYQLRSPQEHAQMLAAKHTAA

SEQ ID NO: 420781 - protein, 352 aa, unidentified
MMLIGVDPHKSTSTATAVEPESNREVASIRIEATLREYRRLLTWAGRWAQRRWAIENAEGLGRHLASWLLARGERVVDVPTTATARVRQLSRGGGRKNDRIDAAAAACVAALQGDARPLEAEGTTDVLGLLDERRANLSQARVRAVNQLHALLRALLAGGAPRGLSAAAAAALLRTVRPAGAAERVRKQIAGDLVAEIRSLDSRLKANAEVMAELVKSSGSTLTETVGIGPVTAARLIGRSGRPSRFPSSAAFAAYSGVAPVEVASAEHARHRLSRSGDRQLNSALHIVAVTQIRTAGSLGNIYYRTKIAEGKTEREARRCLKRRLADHVWRTMIADEKRQRAKPASDSDAA

SEQ ID NO: 420782 - protein, 448 aa, unidentified
MTATSVLAVLDPLAAFVDVGSEHMHVSIAGGPPEVFGTVTGELHRLRDWLQERGVKSVAMEATGVYWLPLYGVLEAARFQVSMVNGKQTRNLPGRKTDMKDCQWGATLQAHGLLQAGFVPPAQIRRLQDYLRLRADHLSSAAACVQHQQKALERMNVKLHDVISSLVGESGIRVIQAILAGERSPERLLALCDVRIQNKKAQRVKESLRGTWAEEHLFALRQAVENWQHYQRQIAACDRQIEAVLHEMSALDQPHDKEVKTSPLKRTGANAPQIEGLHKILAKLCGGKDLTVLPAHTDYSLLQLIGEVGTDLGKWPTEQHFTAWLGLAPGSHQSGKRNGSVRRKRNRAGRLFCLMARSLARSKNIALGGFYRRLAARRGGLVANLALARKLAALFWRVMVKGLDYAESGLKAYEEQVLETKRRALCHLAKQLGRVVLPSLAELQTVKN

SEQ ID NO: 420783 - protein, 400 aa, unidentified
MRTVFGIDVSKASSEVAILVNGEKIHGYTMLNDAIGFNRLLNDLKTVHNPEIIFEATGVYSRRLRVFLEEYGYAYTQLNPLEAKKQLDSLRVRKTDKIDAEKLAHSQFILNRKPTYAQEEVYQHLRDLSRFYQNLTEDIVRAKNRLHKVLQVTFPELENLLSTPTGEQYWNLVMAFPCNEFVLSLSQSNLCEIIRQSTSKRISEKRIAYLTDKLIKLAKQSFCAVKKTSPMLEEVRYYAQELLRLSEHRQVVLDDMVALAQPLSEYDILRSIPGIAETTATSIIGELGDIRRFQSTNQINAFIGIDLRHYESGNFLAKEHITKRGNPYARKILFKCIHNIASASHTNPCHIANFYEKRKRQSTTASTKPHTIASIHRLIRTMYYLITHNKLYDYSLTQNR

SEQ ID NO: 420784 - protein, 344 aa, unidentified
MELFTLGIDLGKTTFHLVGMNQRGEVVLRKRFSRVQLLHFTANLKVELIGMEACGGSHFLGRALREQGHEVRLIPAQYVKPYVKTNKSDYIDAEAIAEAVGRPTMRFVPVKSDEQLDLQSLHRVRERWVMRRTAVVNQIRGLLLERGTTLRKGRRYVDEALPGILTGGSSKLSGAVLVLLAELKQELEQLAEKIDSADNSIEKIARENEACRRLVKMPGVGPVTATAIIATIGNGAAFRKGRDFAAWLGVVPEEHSTGGKQTLWKIPKRGNQYLRRLFVQGARAVMQHRTKQSSGLSAWLAQLMARTHQNIAIVALANKLARMAWAVLAKNEAYRPPLLAGNAI

SEQ ID NO: 420785 - protein, 317 aa, unidentified
MSTSVDVFVGIDVAKDQLDVAVRPSGESWTVAHDEAGLSALVTRLRALAPSLIVLEATGGLEVALASALATAPLPVAVVNPRQVRDFAKSTGTLAKTDRLDAQCLAHFADAVRPQARALPDAQAHELHALLQRRRQLVDMLTAEKNRLQTAASRIRPQIQVHIEWLQRQIGQSDDELRALIRSSPLWRETEDLLRSAPGVGPVLATTLVAALPELGTLTRQQIAALVGVAPLNRDSGTLRGRRTVWGGRAQVRAVLYMSTLVAVRHNPVLAAFYQRLRAAGKVPKVALTACMRKLLTILNAMLKHRTRWAPVGAQHT

SEQ ID NO: 420786 - protein, 434 aa, unidentified
MEEAEDEPLFCERAAGIDIGKQMIMVTIRVPSDRRKGGRQQETREFGTTRRQLLQLAGWLRAWGVERAGMESTSDYWKPVYFLLEREGLDCVLYQASQVKALPGRPKTDKLDCVWLAKVTERGSLAGSFVPPEDIRRLRTCTRYRRRLTQARTAEKQRVEKLLEDAHLKLSSVISDIHGVSGRDMLNAVIAGERDPRVLAEMARGRMRRKTAALEEALDCTFLTPEHVFVLSMMLRNIDHYTAQIAVLNERTAALCEPYEHQIAQLDAIPGFGATNAQDLIAETGVDMSVFPTAGHLCSWARVTPRVTESGGRRKGKSATGRGNPYIGAALGEAASSAGRTHTFLAAKYRRLIRHMPKKKAQVAIMRTQLAAAHALLSDPQAEYRDLGPGYYEQQQDARRLTRGHVRGLERLGWKVTLEPVDPGTGELTARTAG

SEQ ID NO: 420787 - protein, 306 aa, unidentified
MSLHRNVLGVDVAGGWIDVFDASNKRSIRIMNEGIGAFAASLPADAFVVFEATGGHERLLMEALGNAGIRHVRMNPRHVREFARATGRLAKTDKVDAHVLAEMGCVLDLRPTERVDDGRLRLAELVGRRDNIVAAITAETQRLAMARDPFVRRDIGRMIGVLRGRRAAIEKEIAGHISSQQALAEEAARLRTAPGIGPAIAAVLLARLPELGRLDRRAIASLAGLAPYACDSGQRRGRRHVWGGRADVRRALYLAAFVASRYNPALKAVRERMQAAGKPAKVAILAVARKLLTILNAMVRDQRNFA

SEQ ID NO: 420788 - protein, 402 aa, unidentified
MNCVGIDVSKGKSMIAVMRPFGEVVVSPFEVRHTANELSELAGLLKSLDGETRVVMESTGNYHAPVAWLLHGAGLYVSVVNAMLVHDYGNNSLRRGKTDKKDAVKLANYGLDHWLTLPRYVPEEDTRLMLKTCYRQYQQYSKVQTMLKNNLISLLDTAFPDANRLFTSPPRTDGSEKWVDFVATFWHCECVCGLSKKAFTAKYQKWCRKHGYNFSQDKALDIYASACGRFGVMPKTNTAKLLVEQAISQLQTTSAALAALKQEMQSLAASLPEYPVVMGMFGVGPTLGPQLIAEIGDVRRFHSKKALVAFAGIDAPPYQSGQIDVRSRSISKRGSASLRRTLFLVMGVLLQCAPMDEPVYQFMNKKRSEGKPYRVYMMASANKFLRIYYASVKAYLDSLEHD

SEQ ID NO: 420789 - protein, 480 aa, unidentified
MLESVMIAETERNLLVNKITTLYILMIEDYSLRDKKRKFSPSKEKPPVKIEMMHPHQIILSEEVSVDKNDDSRLEEFRQLKRDIRGSTQHLVVGMDIAKERHHAFFGTPAGKVLLHRLVFDNTRDGFEKLCFQADILKTQHGLAHVVFGMEPSSDYHKPLGEYLIEHGHGVVLVAGTAVKKNRELLDNRWDKHDTKDAANVADLVTQGKCLFYEFPSLSLRELRSLLSLKRRLKKSEQGYKVRIRNHLIAQYFPEMDAYFNYAEGLVRCLDPKKLAGLQFREFVRMVPGKQEERLGEIYAKAAFSIGCEGHPSVAFEASLLLDGLKSLHLMILETDRRIAEVCKKFPEYPCLLSIPGFGPDISAKVLGALGNPHRFENHRQVLKMAGLDLSADRSGKRTDVTPVISKKGKADLRYGLYQAALIASTRNTQFMSYFTNKLQGREKEKGIGTKMRVKLSAKMLVIAWTLMKKKEMFDPGCLG

SEQ ID NO: 420790 - protein, 353 aa, unidentified
MQKEKVIKQSVGIDCGKVELVVAFGVMLLGFEEKIISNTVFKNNAEGFKKLQKWAGKLSDPAVELVYVIEATGVYHEKVSLYLHNVGCKICVMLPNKVKSFSQTLTVKTVNDKTSSQAIAYLGLEKRLDAWQPPHPVYRELKQLTREREQLIEERTLCKNQLHAEETGAWPNKGSVKRIKQRVKLLNKQMTEIDAEITAIVSKHEWLKKKLEYVCSIKGVALLSAVIIVAETSGFNLVRNKKQLVSYAGLDVVEKESGISVKGKTKISRKGNKYLRKALHFPALVAIRHNEQMKAVYNRLLSRHGIKMKAAVAVQKKILEVVYVLWKKEEMFDQQYLKNKGQQLEVATLCELA

SEQ ID NO: 420791 - protein, 355 aa, unidentified
MLYLGIDQHSRQITISLRDENGDVVQARQVSTQPEKIKAFFEQLTRERLRPDESFVAVLEVCGFNDWLIRLLPDYRCHKVILIQPEDRKKCKTDRRDAAALSELLWVNRDRLLQGKPVRGLRQVDIASSTDQENRRLTTLRKEAGQARTRLVNTIRHILRRHNLQWGMPTKRLPTKAAIAWLKQVVLPEIDRLEMNYLLVDLEHVQQRLKELEGVIAQRCGVSKEAVIIATMPGVSYFTATSLACRVGRVERFPRANSLANYWGLTPGCRNSGEANQRLGSITKAGSGMARWLLAQVTHKVLRKDARLREWFKRIKRRRGATIARVAVMRKLATIIWHMLSKRTNYAECRALAAS

SEQ ID NO: 420792 - protein, 400 aa, unidentified
MRVVFGIDVSKVSSEVAILVNGEKVHNYTMSNDAIGFSRLLGDLKTVHKPEIIFEATGVYSRRLQSFLDEHGYAYTRLNPLEAKKQLDSLRVRKTDQIDAEKLAQSQFVLNRKTTYVQEEIYQNLRDLSRFYQNLTEDIVRAKNRLHKALQVTFPELENILSTPSGEQYWNLVIAFPCKDFVLDLSKDELSESIRQSTSKRISDKRVAYLAEKLIALANQSYCAVKKTSPMLEEVRYYAKELFRLSEQRQTILDQMVELAQPLPEYDILLSIPGIAETTATSIIGELGDIRRFQSANQINAFIGIDLRHYESGNFLAKEHITKRGNPYARKILFKCIHNIASASHTNPCHIADFYEKRKRQSQTTSTKPHTIASIHRLIRTMYYLIMHNKLYDYASTQNR

SEQ ID NO: 420793 - protein, 413 aa, unidentified
MLKIVNPICCGMDVHKSFLVACIATTNSQGVTTYVSKRFSTFTGDLRHCAAWLAEHNCKDVCMESTGKYWIPIYNILEPTCKIVLAHPKYVKAIRGKKTDKKDAKWIADIFKHDLVAGSFIPPADIRQLRDLVRYRWKLTNFTAGEKNRAQNCLTVSNIKLDDVFSDVFGKAATAITTRLLANPTKRITDVSAFRTKGMKATDEEVLAAVDGELCVEQAEKLRIIRSHMDSLDVCKANLESLILSLAEKYLPQINLVMTVPGIQSYAAIGIISEIGVDMSVFPTSKHLCSWAGLTPQNNESAGKKKTTRIGRAGAYIKPLLVQCALCAIRKKSNPEIRRRYENLKKRRGHKKAIIAIARMLLTAIYNILKKNEPYNPELYAHINTPPKQRTVSVEEAIFILQRQGYLVTPSAT

SEQ ID NO: 420794 - protein, 385 aa, unidentified
MQNTIVHHEGAASLEAARTRVKLSRANIKIGLDVHARQYVAVTQYDHLLPKAARRLSPGEFMPWVEALLGQGHSVHVVYEACGFGFSLYRQLMAAGAHCYVIAPRKLDEECSRVKTDPRDATTLCQRLSRYLEGNTRELAVIRVPSQEEEQARHVSRQRIQLVCHRQKLEAQGRSLLISHALPAPAHWWKEQTWTRLGRHLPAWVTTRLQMARPALLSLQEQINALTSELEASAPSTLPRGVGRLTSVMLTREICDWHRFNNRRAISSYTGLCPGERTSGSKRVPGSVTKRGNPRVRAALVECAWRMVRFQPNYPPVKKRLALLAKGARATGAQRKKAIVAVARHLAVDLWRIHTGRCSAAQLGLNSTETLLVRGEQKGEANAPR

SEQ ID NO: 420795 - protein, 340 aa, unidentified
MELYTAFDLHANNSYAAIIDQEGHKVAGKKLTNDSQEVLSFLKPYRKDIMGIVVESTFNWYWLVDSLMDQGYKVHLANTTAIQKYNGLKHSGDKEDAFWLAELLRLDILPEGHIYPKEERPIRDLLRKRSHLVRLRPSLILSLQNIIDRNCGTRINVKAIKKRKEDLVSPFFTGNDDLSLTGKVSKEAIDFFTTKILTVENFVEDKLELKKPYQYLLSIPGIGKILGLTIMLETGPVERFEKVGNYVSYCRKVSTRWTSNDKTKGKGNKKNGNKYLAWAFSEAAEFARRYDEKSRAYYNRKKQKTNFMVAHNALAHKLARAAYHIMKDQVPFMPDKLFTS

SEQ ID NO: 420796 - protein, 340 aa, unidentified
MKKILFIGIDFSKSKFDASLLKSMSDEEVVSGSFENNQGGYVLFLKWVSDHTRIQKEDWLFCGEHTGLYSRDLAEFLSKKNLTVWLENPYQIKCSCGIKRAKTDKIDALEIARYAYRFQDKCTPYQPVDKAIESLSLLLSYRGRLIKEKVLLEVSAKETRRVISRDTTSRFVFENSMRNIERIKKEIKAVEEKMHQILMDSPLKENYLLTVSVKGIGLVTAVALIVHTNNFSTFNTARQLACYCGVVPFEKSSGTSLNRGKHISHLANRELKTLLTLCARCAIEHDKELNVYYHKKLSEGKEYKVIINNVRNKLIHRIYAVVTHKMPYMENYLNPFRECA

SEQ ID NO: 420797 - protein, 348 aa, unidentified
MRIIGCDYHPSWQQVCWMESETGEAGERKLEHASGEAERFYRELSGSALIGMESTGNCQWFVELATKLGHTVWIGDAAKIRASDPRQQKHDRRDAALILNLLLEKRFPRIWTASSEEKDLRQLLIHRHKLVRIRAQVKNELQHLAMNQGVTKKNRLWSRAGEKVLRELPLKPWAGRRREDLLKVRAMLDEQIVPLDQAVSDTAWKNEKARLLMTQPGVGPITVMAFVLTMGDVSRFPRGKQVASYLGLIPREYSSGGKQRLGPISKQGNWFLRMLLVEAAQVAVRHDPGMRNEYLHRCHRKAKGVAKVAAARKLAIRLYWMLRTNRAYPEVVRVESSPRVPLAVRHGG

SEQ ID NO: 420798 - protein, 332 aa, unidentified
MPALLACLSGLRDKAEAREGQRYPVIAIQEAGLDGFWIHRALVSEKWITSHVVDAASIAVPRRHRRAKTDRIDGETLVRTLMAWMRGEPRVCSMVRVPAVEEEDQRRIGRERTMLVKERTLHTNRIKGLLFSVGIRGYEPNRRDRRERLEELRTGEGGPLPRHLKGQINRELDRLELVAEQIKSIENERDLCASTSDSSPQAILATLKGIGPEFASVLANEGFFRHFDNRRQVAAYAGLAPSPWRSGSIDREQGVSKSGNPRLRTTMVQAAWLWLRFQPDSALSRWFQERVSLNGGRGKKVAIVALARKLLVAFWKFAMSGVVIEGAITAKA

SEQ ID NO: 420799 - protein, 392 aa, unidentified
MVVSVGIDVSKDKHDCFIVSSDGEVLADVFTIPNTLDGFTCLLQRIRECTTPQDKIKVGLEATGHYSYNLLGFLLDNGLATYVLNPLRTNLYRKSLSLRKTKTDRVDARTIAFMLLSDAGLKPYTDTAYHNEELKSLTRYRFDKVKERAKLKSSISRLVCILFPELEKLVPTLHIASAYALLEEFPGAKQIASAHLTRLKALLESASKGHYKRDVALEIRDAARNSIGSRRPAKSLELQHTIRLIRELDVEIAEIEEQIQSIMDELHSPITTIPGLGFRMAAMILAEVGDFTRFDSPDKLLAYAGMSPSTYQSGQLKNCYPHMEKRGSRYLRYALYNATKYVCHWDPTFAAYLAKKRNEGKHYNIALSHAAKKLVRLIFAMEKSRAAYRLTA

SEQ ID NO: 420800 - protein, 403 aa, unidentified
MNAVGIDVSKGKSMVTILRPFGEIVSSPFEIKHTSSDIHSLIKLIHSIEGESRVVMEHTGRYYEALAHQLSAADLFVSAVNPKLVKDFNNDSLRKIKSDKADSVKIARYTLDKWQSLEPYSITDELRAQLKVMNRQFHFYVKQKTAMKNNLIGLIDQTYPNANTYFNSPTRSDGSQKWVDFVSTYWHVDCIRKMSLNAFVEHYQNWCKRKKYAFNKSKAEEIYTKTKELVPVFPKNEITKHIIRQAIDQLNSTSVTVETIRTLMNETASKLPEYSIVMQFKGIGPSLGPQLMAEIGDVTRFTHKGALTAFAGVDPGVNESGSYAQKSVPTSKRGSSNLRKTLFQVMDVLIKTMPQDDPVYQFMDRKRTQGKPYYVYMTAGANKFLRIYYGRVKEYLSVLPDPS

SEQ ID NO: 420801 - protein, 367 aa, unidentified
MSKSITYWVGMDVHADKIQVAVYRGDEASPVEEYESQTDSRSQLRLLKKLQGLPGELRCVYEAGPCGYEMYRYLTKNGINCCVTAPSLIPQRAGDRIKTDRRDARKLGRLYRAGELTMIYVPDEGQEAVRDLIRAREDAVEDVRRKRHQLCKFLLRHGHRYRDGKQWTQGHMRWLKGIRFEIAFLQTVFEEYALTLDQAEERVVRLTREIEAVSVRPEYLELVSALMVLRGVQIITAMTVLFEIGDLRRFASAKEFMSALGLVPSEYSSGGKVSRGSITKTGNSHIRRVLVESAWHYRHRPTVGKGIKARRAGKPLELLNIAQKADVRLNRKFRRMTDRGKRSTVAAVATARELAGFVWAIGQQAHP

SEQ ID NO: 420802 - protein, 418 aa, unidentified
METDRLENFYVGIDWATEAHAVCVLDRSGARLGQFPVPNTPEGLAGLVTRLLEQCGGNRDRLSAGIEVPHGPVVDALLDAGFSVFSINPKQADRFRDRHSPAGAKDDRRDAWVLANALRTDPKAFHRIDPDQPAVVELREWSRIDQELGRDLLAQANRLSAQMLRVAPHWLKLCPAANEPWFWALLEIAPTPGAALELRLSQVKRVLKAHRIRRLSAEDVLAVLRSSPPGTPVGVLTAVAAHVRVLLPQLRLLHGERRRAETELARCLEACRPVFPAEADGPSGVDIVLSVPGIGVRVAACLFGEAGRYLLKRDRQGFRSISGTGPITKSSGKSRLVIMRRACNFRVRDTCYHWARIAVQREPRSKEHYAVLRAKGHGHARALRGITDRAVDRLFTMLEHGETYDPNRGRVLSGHKAA

SEQ ID NO: 420803 - protein, 355 aa, unidentified
MSLPIEEREVILGVDTHLDVHVAVLIDVVGRVVATHSVPTTAIGYEQLIGWTGSFGRLSRAGVEGTGTYGAGLARYMRERGVQVLEINRSDRSRRRLRGKSDPTDAENAARAVLAGDANAIPKAQSGVVEAMRAINMARRSAVKAKTQAINQLRALLVTAPESIRTTLWKVKPEQCVARCARLQSLGETPLLKALTSTLRILARRWMSLAKELRQLDTALDELTKRAGRRLLTRFGVGPQTAATLLVTAGDNPDRLRSEAALAALCGVSPLAASSGKTTRHRLNRGGDRAANNALWTISMVRMRSDPRTRAYVARRTTEGLSTKEIQRCLKRYIVRELYPLILADLADAARPNLT

SEQ ID NO: 420804 - protein, 418 aa, unidentified
MKFIKAQKIKTINEKTLVVALDIGKKVHYGYFRTPKNKDIKPFPFYNTGQSFNRFWEKLCRFKEKHMLDEVVIGFESTGPYAEPIANYLRKKPVKLVQVNPMHTKRIKELTGNSPNKTDKKDPRVIADVILLGHSLTTVIPEGAAAQLRRLTHARERAIERRTAMNNQLQDLVFVVFPELGDIIKPSTKTGMYLIKHYPDPESIVSIDIEMLCNIVRKISRGKFGMDRVEKLYHAANESVGIIEGKEAILLETSHLVSNIEAGNRYIESLEEQMIMYLEQVSYSRSILSIKGIGNITAAGLIGEVGDFNKFKTISEVMKLAGLDLFEVSSGKHKGRHHISKRGRALMRKLLFFAAINAVKSHGIMHARYQKMLKNGTPKIKALIAVSRKLLRIIFAIARDNTQYDENYNRNHGLKLAA

SEQ ID NO: 420805 - protein, 380 aa, unidentified
MGKSSTLFVGLDVHKDSIAVAYAVEDPEIAPVFVGPIGTRTCDIDKLVRRLQSKAANLLFAYEAGPCGYGLYRHLTAKGLRCQVVAPSLIPRKAGDRVKTDRRDADQLARLYRAGELTAIHVPDPQDEAVRDLIRARYQVSRQQHRARQQLKMFLLRHNLRYAGKTAWKPAHLRFLATVKMPFPEQQWVFQEMVQVISEAGQRLARYDTEIERVVAGWRWEPVVRALMSLRGLAVLSAATLVAELGDLHRFESAGQLMSYLGLVPGEDTTGDDRRQGGITKMGNGIARRTLIEAAWHYRAPARISRGVLARQEGLPQPVTAAAWAAQTRLHHRYKHLVATGHKKPQVAAAALGRELAGFVWAIGRMVAPHPAQPPATAQP

SEQ ID NO: 420806 - protein, 351 aa, unidentified
MKKIFIGIDVSKKTLDASVIIPSQCDDQPLIKAYGKFENRRGGFRKMVAMVRKEAKGIDTSEWLFCCETTGAYDTQLCDYMAEKNIDIWREHASRIAKTRPNHGKDDRKDSQLIAEYAWRNRDKARAYVPASSSIKDLRQMFLFRRQLVEMRKQLMTRVSELKELFESNKTLSYIFRDSQKQNDRLSASIKDCENHMRELIANDAALNKSFTHVMSITGIGLVSAVAMLIYTGNFEVIDSYKSFACYCGIVPFYEDSGTSVHKREYIGHKSNKMVRVYLIQAAQSAARFNPDMVKYKERMSAMGKAYGVIVNNIANKLLRIAYSLVEHDCDFEANHEFLRAERISETVKSA

SEQ ID NO: 420807 - protein, 342 aa, unidentified
MGQIGTIGLDIAKSVFQVHGVDGAGEVILRRRLTRARLLAFFTKLSPCLVGIEACATSHHWARELRKLGHDVRLMPPSYVKPYVKRQKNDTADAEAICEAVTRPTMRFVEVKTQQQQSVMVLHGTRTMLMRQRVQLSNVIRGHMAEFGVVAPVGREGLLSLTDTLHDEADDRVPAEARHCLQMLAAQLRLVNAQILENDRQIRVSARATDVGRRLMGIPGVGPVLASAFVASVPDPHAFRSGRNLAAWIGLVPRQNSSGGKERLGGITKQGNRYLRQMLFVGAMAVIRYAERHGTRRPWLVQLLARRTTKVAAAALANKTARMVWAIMTSGQKYREPELRTA

SEQ ID NO: 420808 - protein, 347 aa, unidentified
MEHIGMDLGKRESQIAILTEGGELIEKRIRTERPRLGEVFGDRPRARILLEAATESEWVARCLEALGHEVIVADPNYAPMYAQRSRRIKTDRRDARALLSACKSGTYKFAHRTSDARRHLRALLAVREGLVRTRARWISLSRTLLRRDGFRIRSGAPESFLARVAELAVPAPLRAEIAPLLTLVAPVTDQIKALDAQLAALVRADEVLQRLTTVPGVGPVTATSFVATVDDVQRFRGAHQVQSYLGVVPQEWSSSETQRKGRITKAGNSRTRWLLVEAAWTILRGRKQSDTAPLREWAERIRQRRGGPIAAVALARRLAGILYAMWRDQTEYDPAKLRRGGAVQRAA

SEQ ID NO: 420809 - protein, 426 aa, unidentified
MGISKPAGLKSPCGEVKIVNPLFVGIDVSSKSNVAYLMKPDGSKHSSFSVQNNLGGAKLLSERIVSALGSMQLSDVVIGLEATSIYGDSLVYALREDGSLGRFQRKIHVLNPKQVRKFKEAYPDLPKNDWVDAFVIADHLRFGRIAKEVYMDDYRYQALRTLTRARFDVIQSLTREKQRFANYLFLKCSGIAQNKDIQNTSATTIALMERFETVDELANADLNELTAFISEAGRGRFADPDATAKTVQAAAKGSYRLPRTVNDTVNQAMAVSIASMRSMKEQVKVLDKAIEQQFEIIPNTLTSIPGIGKVYSAGIIAEIGDVHRFESQASVAKFAGLVWHKHQSGDFEAEHSQMIKSGNRYLRYYLLEAANSVKRCDSEFRRYYDLKFKEVNKYQHKRALALTARKLVRLVFRLLKDNRLYIPPEG

SEQ ID NO: 420810 - protein, 406 aa, unidentified
MSLRVMHERCGGLDVHKKTVVAAVEVPNHRELRTYATDTAALLRLVDWLLALNVRDVAMEATGSYWKPVYNLLEAAGIRVTLANPSHIKALPGRKTDASDAEWLCDLHRHGLIRASLVPARPQRELREAVDYRTSLIQERAAEANRIQKVLEGANIKLGSVVTDILGKSSRAMLEAIAGGTDDPEVLAAMALGKLQNKHDELVAALHGRINPHQRQMLRMQLEHVAFLDRQIAALDGEIAQRLDPFEKEIERLDTIPGVARRTAEVILAQCGADMSVFPSADHLTSWAGMAPGNHESGGKRRRVPTRKGNHALRTALTEAGQAAGRTKNTYLHALYRRIASRRGGKRAAVAVGRHILEIAYYMLRDGVDYHELGANYYDERRKASVIRTAVNRIERLGYKVTVEVA

SEQ ID NO: 420811 - protein, 338 aa, unidentified
MIVIGVDVHKQSVTAVAVDEAGRMLDEKTVPVGSEELVGWASGLAGERLWAVEDCRQLTRWLERQLLGCGEELVRVPPKLMAPERRAGRARGKSDPIDALAVARAALREPGLSRPRPGEQVFRDLKLLVDHRDDLVDERRRTQQRLRWHLHQLDPTFAVPLRMLGRSSHLERVSRWLARRDQELQVRLARELVTRCRSLTRAIVELDRELEQRTAETAPALLELPGCAAVTAAKLLAEIGPIDRFKSEAQLARHSGVAPLEASSGRVQRHRLDRGGNRQLNAALYRVAITQARYHPDARAYLERKQAEGKSRREAIRCLKRLLVRVVFNTLKASPALT

SEQ ID NO: 420812 - protein, 413 aa, unidentified
MSVTPATVPARVCAGVDWAKDDHAVCIVDADGEVLDRFMVEHTAAGLKRLIRRLLMAGVVEVGIERGDGPVIEALLAAELVVLVIAPNQVKNLRSRYGSAGNKDDRHDAYVLADVVRTDRRRLTPLTRSTPATIALRSSVRARRNLVEHRVAAANQLRAHLQIVFPGIVGLFAAIDSPISLGFLERFTTQTKADWLTPDRLAAWISKVGYSGRVPAEVLHARLLAAPRGTNHSEAESNAAVTLAFVAVLHGLNTQIAALADVIAEQLEVHPDAHIIKSLPRAVTLRAARLLAEIGDARGRFPTADSLACLAGVAPSTRQSGKVKAVTFRWSADKELRDALCGFAGDCRRANLWAADLYDRARARGHDHPHAVRILGRAWANIIWRCWQDGVAYDPDRHNALQRVLNEHTPKAA

SEQ ID NO: 420813 - protein, 316 aa, unidentified
MKNYIGIDISKSSIDVYDGKKSYKFENNERGFRETVSLVENIKETIFIFEPTGIYSYDLTEFCDKNSISCVIVSPKVSRDFARSLNVRSKTDKIDAKVLYKYQSHVEDNMVKVPKINYHAIQIQEMLNSYELLKSTIQQHKNHLESLSEGNKNSIRLSQKMIKFNEIEADKLFAKIEKLLFKDESIKRKYDAMLTIPAIGNKSALYLISFFLKYPLANAKELTALVGLDPVMRDSGTYKGKQRISKHGGQQLRNLLFLPTLASLRFNDRIKVFYTRLTTNAKSKKLAVIASMRKLILMAFSIFKSEQNYEPLYVKN

SEQ ID NO: 420814 - protein, 475 aa, unidentified
MNLKGTKKKNQVITANIFEQQELMKKAEVIREKLTASTWHELETNGKFGKNEKLSFVSDDMLILGCDVGSDTHYVRAIDTRGRELSKSAFPFSNTLEGFQGLMDWATKLAASNDKEQIILGLEPTGHYWFCLAAWLIGNGISVVQVNPYAVKQTKEIEDNSQRKDDRKDPKLIANLEKDGNFGMPYLPEKLCADIRRLSMLRDQINEDRIRDLNRLHREMKIYFPEYKDAFGKIDGAFCLEVLKVAPFPEDLVTLGVEGIRQIWHEAKLRGRGYVNATAIFENAKKSIGIQDGAKSSKLAVKWFVHRMIESNEQLTDIERRLHQMCMEIPYAENILAISGIGENTLCGILAEMGDISRFDDVKEIQKLSGLGLVACSSGKHKGETKISHRGRKRLRYWLFQAAKSAVAHADEFKELHTYYTTRKDNPLKKMQSLIVIACKILRVIFAILTKGTTYDPKKMLRDIVRPNEQSVQVA

SEQ ID NO: 420815 - protein, 412 aa, unidentified
MKDLLEISCGLDVHKEKIVACILTGPLGKPTRSEIREFSTLIPDMIALRNWIVSKNCHHVAMESTGIYWMPIYEILEDAFSGDITLLVVNARHMKNVPGKKTDMRDSEWISTLLRAGLLNGSFIPEKRIREFRDLNRYRKSVIRDITSQKNRIEKFLQSSGFRLSSFISDIFGASGRNIILHLIEHGQIDKTALDSCLKTKTRNRIDEILMSVNGTLSEHQKAFLRILMTHYDSLKKHLAEIETSLEKDMAPFALQVEQLNSIYGISTTASCAIIAEIGIDMKPFKTAEHICSWAGLCPGNNESAGKRKSTSVTKGNPYIKSMLCEIAWVIAGKRNTYLSAWYWRIKQKKGAKKAIVALARKFLFIIYTMLKQGTLFDESCFETRRKHCEQKQLSRYIRELEKHGYHVEAQS

SEQ ID NO: 420816 - protein, 310 aa, unidentified
MTNHEAFVGFDVHKETIAVAIAKGGAGGDVCGFGTIKNSKQAVALLARKLARTHGKLSFCYEAGPCGYAIYRQLADLGHDCQVVAPSQIPTKPGDHIKTDHRDAVTLARLLRAGELTAVWVPDQAHEAMRDLVRGRIAVMQSVRKARQQLQGFLLRQDLRYPGKSPWTKLHRDWLRSLTFAYPAHHVLVHELLHVIEEGQRRQQRIEQQIQALLPTWSMAPIVRAIQAMRGVSVIAALTLAAEIGDFRRFDNPRQLMAYLGLVPSEFSSGKRVTRGSITKAGSAHARRVLIEGAWAYQQRAGISKLHSKG

SEQ ID NO: 420817 - protein, 487 aa, unidentified
MAKQKRSTFERLSSGAMNRQQRRDLARRLAGNDPGLAIVHSNAGGIDVGNESHFVAVPPDRDANPVQEFGCWTADLKRMAAWLNACRIDTVAVQATGVYSIPLYDILTGHGIRVVLVNAQHTKNVPGRKSDVQECQWLMKLHTYGLLRDSFRLEEKMESVRTIWRLRDRHVKDASRSVQHMQKALTKMNIQLANVISDITGVSGQAIIAAILKGERDPWKLADLKHALVKASRDEVARSLEGNWRDDLLFELRQAVDSYYFAHQQMRDCDQRLESFLASLPARTLERPSQSAKTPTATTPPEKKARKKPKARRNEPTIDLKTELKRICGVDLTSIDGIDVITAQTILSEVGADMSGFPTENHFASWLGLTPSKDFSGGKPIGTGKRKVQNRVAMALRMAATTLLNSKTYLGSRYRHLRKQLPSFASAIKAMARYLAVLVYRLLTHGEAWVDRGAAKFEQRRAERELASLNSKARARGLQLVPITPAS

SEQ ID NO: 420818 - protein, 377 aa, unidentified
MVRTEAKLTIIFGSGQTHHHFRISVGLDVHARSVLGCALDGDTGEVFQQRLSPDHGEIVAWLGDLPGPVAVAYEAGPTGFGLARALAAAGITCEVAAPSKLIRPTGDRVKTDARDAAHLARLLHLGQITAVTIPSASQEAARDLVRAREDCRGDLMTARHRVSKLLLRQGIVYSGGTTWNRDHERWLRAQRFDNPALQLTFEAAFDAMLARRDRRTRLDDAITAMAADSEFTPVVHRLGCIRGIATLTAFGLAVEVGDWHRLTGRSIGAYVGLVPCEYSSGDSRSQGGVTKTGNGHARRLLVEAAWHHRSPYRPSEQLRGRWGLACPAARARGQAANRRLHARWRSFDARKKRSVVANVAIARELAGWCWSLAVMPD

SEQ ID NO: 420819 - protein, 372 aa, unidentified
MKKRSSSRQNPKPAAKAKRAQQSVTIGMDLGDRNSRYCILSSEGEILREGQVATTKAEMIKTFSRLGRARIAIEVGTHSPWVTRLLQSLGHEVIVANPRQVKLITESSRKDDRLDAQTLARLARIDPQLLRPIQHRSEKAQTALMVIRVRAALLSARTSLVNAARGLAKSLGERLPKCDADQMGVPQGESLPPNVQGVLEPLLKEVESLTEKIKDRDQKIEQIARENYPETTLMQQVGGVGPLIALTFVLTVENKDRFQKSRDIGCYLGFRPRRSDSGQRQPQLRITKEGDPYLRTMLVQGAHYIISRRGPDTDLKRWGLRLAERGGKRGKKKAVVAVARKLGILLHRLWVTGEVYEPLRNQNLRKERKQAA

SEQ ID NO: 420820 - protein, 345 aa, unidentified
MSRVYVGLDLGSSQFEILAMDREGVALERRSLKTSELNLRDAFSQLRQQLKCELHVHLEAGELAGWAREVIAPMVTRVVIGDPRRSAWIANDPTKNDRLDAFKLADLLRMNRVHEVYYDDAKPRRVFKQVVQHYEDLTRRQAALKVKIKARLRVQGLIRKDTRVFAASEREAILDSLANKQLRSIIKQLYDLLDATRAQQQEALLTMREMSRQFPEIGLLKKTPGVKLINACRFVAYVQNPHRFSNLRGFWRYARLGVVQQSSDGKPIGPQHLDHSGCGALKDVSRKTLEAAIRRRDNNLFKRAYEQSFARTGDATHARLSVQRKILAVLRAVWISGKPYCGDLG

SEQ ID NO: 420821 - protein, 307 aa, unidentified
MQSQTINAKYFCGIDLHKDNMFICLVDSQNKILVHKRIPANFPSLSIELGDYLSDTAIGIESTFNYYWLQDACRQNNVQFYLGHALYMRVGVHKKKDDKQDSYHIAQLMRNGNFPFSYPFPPVYRGLRELLRSRLKAVRQRASYYAQFYIKLLQYNGWSPSVEENPFRDSGKRVRYIRSISDPGLKLSFQYLHTQILTLNSSIELIEKTALEVTQKLAFQKLRLLTSVPGIGNILGMTILVETEDIRRFRSMQNYSSYCRLVHTQRSSSGKTVDSKNQKSGNVFLKWAYSQAACLAIVHSPEINALT

SEQ ID NO: 420822 - protein, 345 aa, unidentified
MKLYGGIDLHSNNSVIAIINEQGETLSCKRLNNDISVILSFLAPYKDKLTGLVVESTFNWYWLVDALMDAEFKLHLANPAAIQQYSGLKHVDDNSDARWLAEMLRLNILPEGYIYPRELRAVRDLMRKRMDIVQQSTKNLLSVQSCYMRHLGYKLSSNKIKQMAAIRKGVNTEQVHADFSSMNTALSVISNLSLIRCVQQQINAIEGAILKQTSLSPEFINLSSIDGIGNTLALTIMLETGTIKRFDSPGNFSSYCRCVKGARYSNGKKKGATNQKNGNRYLAWAFTEAANFTIRYNPTVKKYYQRKLAKTNKVVAIKTVAHKFARACYHVLKDNVPFDEHKAFA

SEQ ID NO: 420823 - protein, 330 aa, unidentified
MIKYIGLDAHSSTCTFNVTDERGREVDNTTIETNGRLLVKYLREIEGIKKLTFEECELSSWLYEILRSEVEELIVCNPVANSDYKKIKTDKMDARKLAKLLRGGFLVSVYHDGSKRERFRSLMSGYQDLVEEGVRLKNRYKSLFRKGGKKVKGESLYRDESFLEGLSRPDFKFIGTQIYQLLEKMEESRQEYLKEIIRYSKGFKEMKYLKSIPGIGRIQAAKIVSQVIDPDRFASKYKYYSYCGLVRHKRISDGKGYGSEKIWGNRILKCVYKMAGHSVLKGNSGLRKYYDYLRSKGISHDNAYNAVCRKIAAISLIVYGGRARNIMTDL

SEQ ID NO: 420824 - protein, 424 aa, unidentified
MKVTYQTCCGVDVHKSFLVATIVKTTGGIEPSYQKKRFSTFNNSILEFKQWLLDNDCHDVCMESTGKYWVPVFNLLEDEINVVIANPKWVKAVKGNKDDAKDSKWIGDLFRLGLVKGSYVPCKKVRILREYTRYRYKLVSCRSSEKNRYQNALTVCNVALDSVVSDIFGKSSTSIIDYLLEQSGTSINHEEIASKLLRSLKSKEDAVIESVEGYQMTDAQKYRVRLVRAHMDYITAEINDVDKMIENMISSNPDFENAVQFLCTIPGVKRASAITIISEIGTDMTQFSSSKRLCCWAGLTPGSNESAGKKKSVRITRAGVYLKPALVQCAHAAVKSDKSPYYKKKYDSLVKRRGKKRAIIAIARMILTAIYQMLSTGELWNPSDLYKIDMPVALVEKQKAKAIKQAKKLLQQEGLLPPDEPLAS

SEQ ID NO: 420825 - protein, 351 aa, unidentified
MIIIGCDFHTRFQKIAMVDTEIGEITKRRLEHGNGEARAFYAALPGPARVGMEATMNAQWFERLLQEYHHELWVGDAAQIRAAAVRKQKTDDRDALHILDLLVRDKFPRIWIPSPENRDLRQMLRHRDKLVRIRTSVQNQLHALAMSQGLCRKAKLWTKAGRKELEGLPLDPWASRRRWELLQLFDQLDPQIDELDKVVIQEAEKRPAAVHLMTQQGVGPVTALAFVLTVGPVERFPTSKHLVSYLGLNPSEDSSGGRQRLGAISKQGNPMMRHLLSEAAQTAVKFDPELRRDYLRLKFRRGISGVAKVAIARKLAVRLYWKLREVAQPNTAARMQGSPTSPMVEATPSRN

SEQ ID NO: 420826 - protein, 387 aa, unidentified
MPQPNDLSRSLVTLEQDSTLITVIEMGQSSWLVAGIVPGIERQPLKKLTADQDGLLQLLHRWRKEAAQTGHTIKRIAVAYEAGRDGFWLARWLRAREIEAYVIHPSSVPVSREHRRAKTDRLDTELLKRAFLGWLRGEPKHCSMAAIPTVEDEDAKRPSRERESLVGECTRIVNRVKANLARLGIRGFRPRLAHAPKRLDTLRTPEGTTVPANTLAELQRDMAHLRFVKQQIKEIETTRTKRLQQASGGGRNAMVRLLARVVGIGIETADLLVQEAFSRKLRDRKAVARYAGLTGAPDESGQKRRERGLAKAGNARVRHAMIELAWGHLLHQPDSALAEWYRRRTVHARGGTRKTMIVALARKLLIALWRLVTTGEAPAGLLLRPAA

SEQ ID NO: 420827 - protein, 402 aa, unidentified
MISVGIDVSKEKSTVCILRPYGEVVASPYEIAHTESKVKALVKFICEMDGEVRVVMEATGAYHLPLLTCLKQAGLFVSLINPLVMKKYVSSTLRKGKTDRLDSVRIANFGIDNWFKLVEYSVPEKIYAELKLLGRQYSHYVALKVASKLSLTSLLDLTMPGIKQLLSWGTRSEEPTKDKLCDFAEEFWHYDNITKKGEVHFINSYCHWAKKKGYHASETKAKKIYAMACNGIPTLPASAASTKMLTLEAVRVLREINRTLKAILTQMQELATTLPEYAIVREMNGVGAVLAPRLIAEVGDVRRFHSGSALVAFAGIDSPPYQSGSFTGTRRKISKRGSALLRKTGYEVMKCLKSIKPSQDAAVYLFMLKKEAEGKPKKVAKVAALNKFLRIYYARVMEIYDA

SEQ ID NO: 420828 - protein, 482 aa, unidentified
MAKCKNHIADFKGKRFTNEVRNLDKNKILIVPIEVAKEPHKTLVANYYGDILLQPFSFSNNKVGVELFNSSIMQVAKRIQAQRILIGLEPTGSYYENLYFSLVGMGYNVLLVNPYSVSLERRKNLNWCKTDEIDLCAIGQVLINNKATETKIHSGLWYSFKQVARLYRAEVRRRASIKNKIRTCMDRIFPGFQSKDIFSKFWCSASLLLMENYPLPTQIISLGEKRLKNFLLKHNIHLTQFSIKSLFSAARNAITLSEEDLQIHLLNLQIKLQDLKRANENIRLFAIKQAEFLVRTPAVLLLSIPYINVPSASEYAAEVGPLTDFRHARQIIKKAGTNPAKYQTGKFVATGVPITREGMSNLRNILMLIANNLTQNKYFKNWYDAFTAKGKDNNLAKVALGNKFIRISFAMMRAGCLFNPPDWDGKPDDPIEKLEKFLFENNAQHLKDKLCAIAKIQIKLHSTLHSSATVENKKNFDDKLQE

SEQ ID NO: 420829 - protein, 339 aa, unidentified
MKSIAVFVGLDYHQDGVQVCVMDGQGQVLGNRKVNNRAAAITAAVRRLGRPSAVAIESCCGAADLAEKLHQKAGWSVSLAHPGFVNRMKQNPDKTDYGDARLLADLVRVGYLPKVWLAPEEIRRLRRLVRFRGQLVDRRRNVKLRIRALLRENRLRCPWKAKAWTVRWLEWIARTEELCTDDRWLMDQHLEELAKLNGRIQEVEGRLEKRAEDDAMIRKLRTFRGIGLITAVTMRAEIGRFDRFGSGKQLARFCGLSPCNASSGERQSDAGLIRTGNPKLRNVLIQLGQRVAYRPGGRWAGLVHRLLNGGKPKNVVVAAVANRYMRWLYHQMQPEQLAA

SEQ ID NO: 420830 - protein, 368 aa, unidentified
MGIEFKIQIIMKKQILKLSLGVDVSKDNLAVCLCRLTARLAKEFEDPFEISNNLPGFKKLVKWLLKNASSPEDIFIVMESTGIYHEALVYHLYMEGFPVSVMQSGRVKRYAESLDQRSKTDALDSRMLAMLGCERELALWSPPDPILRQLKGLSRERSFLLKEKQIERNRLHALEHSVYKSKRELKRYGQRLKLIEKQLIEIEKEMEILVKNDPQMHQRIKHLESIPGISFKSAATVVGETLGFTGFTNAKQLTSYAGFDVVLKESGAYKGKTRISKKGNKHIRSALYMPVMSAIQWNPTLRKFYERVQPTKVKPMIALVAVERKLLVLMYSLWKNEIDYDPEHEQKKTARTEVLAAQDRSNLTLTSS

SEQ ID NO: 420831 - protein, 315 aa, unidentified
MASAEVFVGIDISKAQLDLAFRPEGRFAAPNDEAGFAQVLERLSAVPPTLVVVEATGGLEIPLTGVLATAGVPVVVVNPRQVRDFAKATGRLAKTDALDAQTLAHFAEVMQPELRSLPDEQTQALAAILARRRQLVEMLTAEKNRLGTARKPVRKSLRTHIAWLERELSHTDRGLAQAMRESPVWREKETLLRSAPGVGPVVTTTRLATLPELGTLTGKQIAALVGVAPLNRDSGTWRGKRTVWGGRAQIRAALYMAALVAARFNPVIRAFYQRLRAAGKAKKVVLTACMRKLLIILNAMLKHRTPWRAELVQCA

SEQ ID NO: 420832 - protein, 452 aa, unidentified
MPNQPNSSGPEYAALIGIDWGDKKHAWALQAEGSTKVEKGEIAHTPEAIQEWAMELLRRFPTGRVAIALEQSRGPLVFALSKYPHLVLYPLHPTSAANYRKIFRPSGAKSDGPDATLHLDMLAKHRDQLRPLHPDTVETRTLQLLVEDRRQLVNERTRLSNRLVADLKSYYPQVLQWFQEPCAPVMLDFLERWPGLEELQKARPTTLQQFFKQHRCRDQASNQERLRGIRQAVPATHDAAVLTSGRAAVGAAVRLLRGLTQSIQEYDRQIDRLAQAHPDFAIFDSLPAAGRVFAPRLIAAFGTQRDRYRNAAELQQYSGIAPVTEASGNQHWVHWRWSCPKFLRQTFHEWAAQTIQHCDWAAAYYQVQRDDKNKSHHAAVRSLAYKWIRIVFRCWKDRTPYHESHYQAALKRHHNQALSQSIQTSPFEMPIQWISCAGFKKLAWKNEQSLLT

SEQ ID NO: 420833 - protein, 371 aa, unidentified
MEQSSKTLSVGLDVHKDSIAVAYAPEDRGAEVVSLGTIGTRQCDIDKLIRRLQSKGARLVFGYEAGPCGYWLYRYLTGKGFACHVVAPSLIPRKPGDRVKTDRRDAITLARLMRSGDLSSIYVPGIEDEALRDLSRGREDAMQDLKRSKRRLKSFLLRQDIRYEGRASWNPAHLRWLSEVVCPTPPQQIVFQEYVRAVTEQQERLQRMERELREAVTSWRLSPVVEAIQALRGVEFTGAVIVMTELGDITRFETPRQLMSYLGLTPSEYSSGERRRQGGITKAGNSHARRALVEGAWAYRYPAKVSRHLQLRLEKLPAEVQAISWKAQVRLCKRYRQLTARGKHVNQVVVAIAREMAAFAWAIARLVPLAS

SEQ ID NO: 420834 - protein, 325 aa, unidentified
METKKLCCGIDVSHTKLDVCYQNNLGELFHLQVGNNNSGYQKIIEHTGINYHFVMEATGVYYIRLAFYLHQQCCKLSVVNALSIKRYIQMHLERNKSDKKDAAWICRYAIEQTPPYWEMPDSAYFESKQLYNTIRDYTEQIKRINNQLHSLRLLPVPSKDTIKSLEKIIVCMEKEIKQLEQKLQLLLEQWQPEQLKNVSSIKGIGKRAAAMLIVFTQGFKHTQNHRQLISFAGLAPTQYSSGSSIQGKPRIYKRGGKNLRDVLYMCSMNAMKTNTACKALYERLRANGKTGKQALIAVCNKLLKQVFAVVKNNTLYHPNYCSAKP

SEQ ID NO: 420835 - protein, 371 aa, unidentified
MSNDAIGFSRLLGDLKTVHKPEIIFEATGVYSRRLQSFLDEHGYAYTRLNPLEAKKQLDSLRVRKTDQIDAEKLAQSQFVLNRKSTYVQEEVYQNLRDLSRFYQNLTEDIVRAKNRLHKVLQVTFPELENILSTPTGEQYWNLVIAFPCKDFVLELSKDKLLESIRQSTSKRISDKRVAYLAEKLIALANQSYCAVKKTSPMLEEVRYYTKELLRLSEQRQAVLDEMVELAQPLPEYDILRSIPGIAETTATSIIGELGDIRRFQSANQINAFIGIDLRHYESGNFLAKEHITKRGNPYARKILFKCIHNVASASHTNPCHIADFYEKRKRQSQTTSTKPHTIASIHRLIRTMYYLIMHNKLYDYASTQNR

SEQ ID NO: 420836 - protein, 443 aa, unidentified
MEQSTRFVGMDVHKDTIVVAVTATGEVGKATAYGTFPNTAAGLEKLVKRLRQAGDGPIKFCYEAGPCGYGVHRSLTKMGEDCTVVAPSMIPRKPGERQKTDKRDAANLAVLHRGGLLTAVWVPDAAHEAMRDLIRARLAAVRAVRAARQQLSAFLLRHERTYPGKKTWTKAHRGWLADQSFAQPAHQIVLEECIEAVRQGEQRRDRVEGYLRAQIPTWSLFPLVQNLCALRGLDMIAGAGLAAAIGDPSRFATAPDFMAYLGMVPSEHTSGPKRRIGAITKAGDVHARTLLIEAAHSYRFPARIGRYKLAAVDAVPEAVRAIAWKAQTRLCQRYRSMMARGKLKQVVVTAIARELAGFVWSIACITSDPAVSGSTATNLYDEVTSMGYEVTTEVEEATQQIRQITPDTDHPRVPRHQLLKGTARRADRAAQTTTRPAERHVAG

SEQ ID NO: 420837 - protein, 417 aa, unidentified
MTTKAQKSKRVNKESMIVSLDIGKQSHFGYFRTPDGQDVKPFSFGNNRAGFERFYNKLCRFQKVHGLRQVLVGFESSGPYAEPLMHFLRAKPVQLVQINPMHTKRLKELTGNSPNKTDAKDPRVIADVMMLGHFLTVVVPEGAAAELRRLTQSRERAIKQRTAMINQLQHLIFILFPEFLQVIKKISSKTGLYLAVHCPTPQAVLVLGLESLSRAMRRISCGKMGNARAMQLFEAARGSVGVREASQSMLTEIDYLVEQIQQANRFVRRLEVQMLYYLQQVPYSAHLLSMRGIGPVTVAGLIGEVGDFRQFRSLAQITKLAGLDLYEISSGKHKGQRRISKRGRPLMRKLLYFAAINTVRTNGVMHEPYRRMLARGMPKMKALVAIARKLLAVMFALARDESTYKESFSHHQYQLAA

SEQ ID NO: 420838 - protein, 373 aa, unidentified
MFHFTTLFIGMDVHKESFSLCCYDMMANQFKHSTKVDPNVSYIVNYVTELRRLYGQDAEVLCGYEAGCLGFTLYHQLQAHGIPCIVLAPTTVMKEGSKRVKTDKKDADQLAKALAFRSYRPVHTPTAEDEQVKEYIRMRTDHKVALKKIKQQILSFCLRHDFRYTEGSNHWTQKHVRWLRSLNPEGLYAEILTEYLLTYEKLVDQIERYDTRIEQLAQSDNYQEKVSQLSCFIGIKTLTALSIVAEIGDVNRFATAQNFSSYLGLTPSENSSGDKERRGAITKAGNSHVRRLLIEAAQSLAKGTIGYKSKELKRRQSGNRVEVIAYADKANERLRRRYRTLVLGKNKKQNVAKTAIAGELSGFIWGMMTGRIA

SEQ ID NO: 420839 - protein, 341 aa, unidentified
MNEIKVLGIDLGKDVCSIVGMDEAGKVLLRRRMRRDSVLKLTARMPACVMAMEACCGAHHLGHMLRKQGHEVRLMSPEYVQPYVKAQKNDDRDAEAIAEAATRPTMRFVDLKSDEQLDIQSLHRARDRLVGKRTTLINQLRAFLLERGIVIAKGRRKLELRLEQLLAGEMTISRRIRALIEDMQAEWRALDARIDAFDAEFAELARTDASMKLLSTIPGIGPLNATAFVASIGKAETFGRGRDLAAWLGLVPRQMTTGGKPRLLGITKRGNGYLRRMLIHGARAALPALAKGKTPLGEWLRDLLSRAHTNKVVVALAAKMARIIWAVLSSGRPFEMSPSAG

SEQ ID NO: 420840 - protein, 334 aa, unidentified
MALKNRIIVGIDVSKDTLAASIFDGSTHEYVYLEYTKKAINKEFIKRFENLKTSVVFVMEATGIYHSKLAYWLHGAGFDVAIINPLIIKRYAQMKLSRVKTDKSDCAIIAEYGYKEELHLFKPKSKETIELGNLLKAVEDFLHQQSITRSQKHALMHQADYSKEIVAVYEKHIAYLTKEIKKLKKKIELLLKQYFTNEYKLLNTIKGVGLMSSAMIISVFDSFKNFDNAKQASSFAGIAPAPYESGTSVKKRGSISKQGSTLARKLLYMATLSGMQFNELLKAQYIRLLQNGKSKKQAIVAVAHKLLRIAFGVLKHNRPFSANYIEERKMLTIC

SEQ ID NO: 420841 - protein, 320 aa, unidentified
MVLDKIGNTLLEGETATLYSSLHERLEPYLKSSMIGLEASTSYYTLYQNFLKQGHNIKVANTIQLRQLIAKNDKLDAKRLAEMLRLGTFPCSYIPDEKIQRMRSLVQVRHSLMEEKVRCNARIQAFLDRNGVTMPPHKAFSKKWRQRLMQYMGSGIVSMELRHEYDHYIFLEKKMEQLDQELQGYAHKNWKKEYHNIQSITGIGPVIACYAIAHILPIERFSSNRKLRRYAGVVPTSKESGNKTTRGRIPKTSSRKLLRWALIQAANTIGKTNTRLGRYYRMKKKQKKNAGIAKVAVASSLIDILYKVLTTKQPYNPNTK

SEQ ID NO: 420842 - protein, 359 aa, unidentified
MLTQSNKIDFNGQHIYAGIDAHLRSWNVTIMTEELIIKTFSQNPSPEILHQFLTRNFPNAIYHTAYEAGFCGYWIHNRLSALGVDSIVVNPADIPTTDKEKVNKTDQRDSKKIARSLRSGHLKGIYVPSLKTLEDRNLLRTRGVLVRDLTRNKNRIKSFLYFRGIEIPERFKSKSTHWSKRFMSWLKSVELSEKSAQKSLNLIIESSEKLRLTILGATREIRELSQSEAYAGRVLLLRSIPGIGSLAAMTLLTELEQINRFSNFDQLCSFVGLIPSTNSSGEKENIGELTHRGNNFLRCIIVECAWIAARRDLALNKSYHEYCKRMETAKAIIRIARKLLNRIRFVLKNNLPYESSVVK

SEQ ID NO: 420843 - protein, 399 aa, unidentified
MISVGIDVSKEKSMVCILKPYGEVLLSPTEIVHTEEAVSKLADTILKLGSEVRVVLEATGAYHLPLLSIFTEKKIFVSIINPLVMKKYASTAIRKGKTDKIDSVRIANYGLDNWFHLRKHEPSEEVYEELKFLGRQYSHYIRMKIDSKLSLNGILDRTMPGIKKLLSGKRSDYPTRDKLSDFVEHYWHYDNITKLSEEDFVKSYQEWAKKKKYHASESKARKIYAMASSGIPTLSSSTPSTKILVLEAVRVLGEINKTLQNILTQLQATASTLKEYETVRAMSGVGDVLAPRLIAEIGDVRKFHSGSALVAYAGLDSPPFESGNFVGTRRKISKRGSSLLRKTGYEVMKCLKAIQPVNDAAVYQYMLKKESEGKAKKVAKIAALNKFLRIYYARVMELQ

SEQ ID NO: 420844 - protein, 356 aa, unidentified
MGETARADIIIGVDTHKHVHAAVAVDALGTRLGTVTVPVGERGYRTLETWARSLGAVRAFGVEGTGSYGAGLSRFLRAQGYAVLEVNRPDRRLRHEKGKSDPLDAESAARAVLSGQAAALPKSGTGVVEMIRHLKVARDTAVKGRTQAMLTLKAIIVSAPAALREQLDRITGKMTLIRRLAALRPGPITSTAASAKASLRAIARRWLALDEEIRSHDAHLEVLTAARAPELVQAHGMGAGTAAAMLLLVGDNPERIRSEAAFAKLCGACPIPASSGKTVRHRLNRGGSRQANAALYRVVVTRMRGHRPTLDYVRRRTSEGKAKPEIIRCLKRFVAREIFGYLCATPKPENTPPGAA

SEQ ID NO: 420845 - protein, 352 aa, unidentified
MGRYKQIRMKGKSLFVGIDLHVIHWHVTIRTEDVELFSGSIPGSWEALRKLLDRYPGSVLHTVYEAGYFGFWLHDLLVEYGAECVVTPPSLLPVEYGNKVKTDRRDSRKLAQLLAKGMLKRVWVPSPEERFHRQVIRRRRQLIGDRVRTQNRIKAELRLYGIQMPETTSKWTKAYVVNLHRIQFHDHWMQESFQRLLEEYEFLSDQIKKQTTVLQTLAEIPLYKERVKILRTVPGIGLIAAMELLLELQDMERFRRADQLAAYVGLTPSQYSSADKVRMGRITGIGKNDLRGTLVEVAWRLIGKDRAMRRKYERIKARSGSKRAIIAIARITLLRTRRMLLDNKPYVVGRAA

SEQ ID NO: 420846 - protein, 330 aa, unidentified
MKNYKEVVGIDVSKNTLDAYCHQSQEHREFINDIVGYKSLLKWVLKITKGDSVFYCFENTGYYSLKLALYLDSQKIVYVEESPLKIKRSSGIVKEKTDKLDAVLIARYAWLYREELTPSKVKGKSHLELGRLLALRDLLVRNNAGLKGTLKEMKMLLSSPTTDTGCIVLKRSIDYQEKQVRSIEDRIQAIISADASMSKNYELLTSLKGIGLVIACQLIYHTGNFTRFDSWRAFSSYCGTAPYEHRSGTSIYRKKQCHYLGDRKMKSLLSMASVSAIQHDSELRLYYNRKLAEGKDKMLAINNVRNKLIARAFAVVKRGTPYVVLQQYAA

SEQ ID NO: 420847 - protein, 441 aa, unidentified
MDTSSPSTSQAGATPEIFPTLTHYGAVDWGRGTHELCVVDPAGKIVLEQGIDDSPEAWADLRGKLAAMKAADGSAVVVGFAIETCCGPAVERLLEAGLAVFPLNPKAAERFRDRKAPAGGKSDRFDAFCFADALRTDGHGWRPLRPQDPLTAELRLLCRDEVTLIGQRTALVNQLQAALHEYYPTAVAAFDDWTKAGAWEFIKAFPTPHHLASAGKRKWEKFLHAHKLYRPETAAKRIELFNIAAKSASPNPAVTAAKSLLAITCAKQLGTLQTQLDEYRSRINELFARHPDHDLFGSLPGAGEKIAPRLLAEMGADRAVFEDHEALQCYAGAAPVTKQSGRSRFVVIRRACNMNLRATLHLWADRSRIKAPWADAYYWQKRKQGMKHAAALRCLAMRWLKILWKMWTEQSAYDGDRHLRDQLKHGSWVISLLPQPVAQSN

SEQ ID NO: 420848 - protein, 423 aa, unidentified
MMMMVAYSDSKGNQNLLEVDAFTESLQGLATTLQQAGVTHVAMEATGVYWVVVYEILEQQGFKVTLVNAKHFKNVDAQKTDVKDCQWLHQLHAHGLLRASHIAQEVYRELKSYLHERNVLQKQKSDTLNRIHKLLTQMNIKVQHLISDIEGVSGMKLLQGIASGIKDPQELLSLIDVSRLKAGKDDLIKSLRGIYKQQYVVILQNALKAYDFFKEQMRGYELLIENVLKAMLPADAEGNKPAIESKKSSVRKNQYSINLKEYLKHIIGVDVTKIEGIDEISALEIISVTGLDMNKWPSAEHFASWLNLSPGPKRSGGKIIGHEKRFTNNKATQAFRMAAQSMWQNKGSLGHLYRRLSAQKGSKKANKAIARKLAVVFYQMVKNKTEYDKNKLQTNTERQRSKRISFLQKEAIKYGYVLQNAVA

SEQ ID NO: 420849 - protein, 403 aa, unidentified
MESTAGIDLASEEHRLVAVEGDGQRLEERRYSHSEAGIVALVRRLLELGVGRVAIERPNGLVVDRLLDAGISVVPVHPNQLAAARDRYRAGGGKSDGFDAYVLAELARTDMHRLRLLEPDSDETRALRALTRAREDLVEQRVALANQLRAQLEAFWPGATRIFADVDTPISLAFLERYPSPDDARALGAKRLAGFLARNGYSGRRSPAELLARLREAPTGRAGELEIEARRTIVLALAAALRPLVEQIKLLTSQIAGALNDHADGQIFRSLFRDPKAVVTAAELLAEIGDRRERHTTSSSLEAIAGQAPVAVESGKKKVACFRWACNKTLRSAVSVIADSSRKHNPWAKDIYDRARARGHDHPHAIRILGRAWLRVIWRIWQDHEPYDPARHGSLNRLLAARG

SEQ ID NO: 420850 - protein, 343 aa, unidentified
MTKATMIGVDLAKSAFQLHATSMTGQLLFRKKLSRQNFSRFMAEQPPAVVVMEACGGAHYWAREMIRLGHEVKLIAPQYVKPFVKRQKNDAADAEAIVIAAQRPEMRFVEPKLEDQQSRAILFRARERLVHHRTDLVNALRACLYEFGHVVPQGIRYLKRIAEILDEPRSDLPDLMREECRDLLDQILEITGRIDARTGKIKALAAEADTARRLQTIPGVGPLTALAVEAFAPPMQSFRCGRDFAAWLGLVPRQFSSGGKERLGRTSKAGQSDIRRLLIIGAMSRLNWMGRKSIPEGSWLARIAARKPRMLVAIALANKMARTIWAMLTKNQDFRDSTQAAAA

SEQ ID NO: 420851 - protein, 337 aa, unidentified
MSSIAESQRECVTIGFDPHPGSHTACAVSSYGRVMDDITVVNNEDGWEVVIEWASKFPSRRWAIEGPGNRYVAEFVKQLLSAGESVYPISPSMTAQYRGRRTRGKDDEIDAGSAARVLLANEDLPLYWPMPYEAELKELTRVYHRMRGQLKSLKMSSKAMACRQAKDAMVGVMEALEVALADLKRELKAQVGRIAPSLLEHRGVGPVVAATLLAEAGRIERFPNQYHFASYCGAAPIRWQSGGSETVRVNPSGNRRLNWAAHIVALSRLGHDQRTKDYRDKKLAEGHTKRQILRLLKTYICRELYTALKIAQSTDEKKPNPQTSIRRRACGGCGKVA

SEQ ID NO: 420852 - protein, 458 aa, unidentified
MSKKQMSLEIVNTNAAGIDIGSRSHWVAIGQDAQSVREFGVYSEDIHELCEWLSQNNITNIAMESTGTYWQILFSSLVSKGFDVILVNGKQTKNIKGKKTDIKDCQWIQKLHSLGLLSSSFLPDSTTDIIRTYSRHRQNLIRQSARTVLKIQKYLRLMNMRLDVVVKDIVGLTGKKIISDFIAGERSGKKLAKNRHYNCKKPEDEIAKALQYNGRDDYMFALKHEWETYIHIQKQIDEVDLQIKKLLENIIYKDDNKKQHIASKKTYKRKNKNTIRGTDMNQIAYQYFEGIDLMAIEGVNDATIMSIISEIGLAGIRKFESAKQFTSWLRLAPNNKISGGKVLSHHLPKGSSRLKIAFRNAANSIGNLKEGHLADFFRRINYKKGRATAVSATARKLSVIIWNMLAKDIPYSPPTQYLFLDEKRKLGLVKRIQKQITKFEIQPEQLNFATSCNTTTNT

SEQ ID NO: 420853 - protein, 432 aa, unidentified
MNRLQVGIDFSQKKADFCLLFPDGQPLESHVSFANSRSGYSSAKQLLIDALDTYAFDGVDISGEATGYLWLPFFLQLSADPDLTLWNMDLFLLNPRWVKWFKKCFAEDHKCDGKDAFYITERTRTHRPDVAWSPPDCLPLRFYTRLRFHIVQNLAREKCYFSAFLFLKASSYRCIKPFSDVFGVTSRLVLTQQPTLDELADLPVEDLASHLYELSGNHLPDPLNNARKLQRVAQESFHLDQPLVLPVQRILDLTLDHIRFLEAQLEQVDYWIAAELENHPVIAQLATIPGVGPVFSSGLGAEIGGIQRFLQGQKWDKKRKRYRPRNLRDAEDAVAKIAGLWWPRADSGDFEAQDRHMAKSGNRYLRYYIIQAANLMRLHIPEYAKFYARKHKESSKHHHKRALVLTARKSVGLVVGLLHRDEPYRSKEDRRT

SEQ ID NO: 420854 - protein, 408 aa, unidentified
MEVLYPRCAGLDVHKDSVVARIRCVSEPMHDEVKTFATTTSALLELNEFLSAQGVTHVAMEATGVYWKPVWHLLEGDFELILANAQHIRNVPGRKTDVSDAGWIADLLAHGLIRSSFVPPAPIQELRDLTRTRKQLVREVSQHSSRIQKVLEDANLKLGSVLSNVLGKSGRAILEALIAGQSDPERLADLAQGTARKKRAELVEALHGRIRPHHRGLLKVHLELVGALEQALADIDATVGKALASIHESARLLSTMPGISDVTAHVIVAEIGVDMTRFASDAHLRSWAGFCPRSDESAGKRRSTRVRKGAPWLKTTLVSAAWAAVRVKESYLQAQFHRLRARRGAKKAILAVASSMLTAAYHMLKNRVEYQDLGASHFTRRDREKIILRLVRRINDLGCQVQLVPQAA

SEQ ID NO: 420855 - protein, 388 aa, unidentified
MRRSNQDRIVGLDVHPDSFAGAILQGMDPWKARVVSTSTRVALPLLEKWALRHTREEDILVMEASGNAFCVAERLRALKRKVVILESHRAGKVGKIYCATDRVDAIKIARIYLSALSPVVWQPDAKTRERREIFSAYQAVVKEGMRLKQQIKSMLNEHCVRLEKGFRLSHPSAIARLLQRRKWTPAQKMLLSQLHAGLVGARVRRQRLRHYMAQEILGEKELLRLTRLCGINLITLYGLIAAIGDIQRFANARKLSTYFGLNPTVEQSGNYEGSGALKRHGRGAIRALLVQSAKKLLQVNNPLQKWGLAIAARRGRNKAAVAVARKLCVAVWHVLQGHVIGAIERMDTLHTKLHKLATELGVPTIKQLGFQTKEAFVQKKLYLLKCYP

SEQ ID NO: 420856 - protein, 361 aa, unidentified
MKRALKDNQEAFAGQDFYIGIDVHQKQWTISVQSNQMALAKPLTVDPSAGSLSRYLQRQYPGGKYHAVYEAGYSGFWPARDLFTHEIDTIVVNPADIPTMHKERSTKTDSVDSRKLARSLENKELRAIYIPERKAEEYRLLNRYRSQLVRDETRIKNRIKAILAEFNYRVPVELEGNRWSGAYLQWLQKVKFETPYAQIAYNERLEQLAESRKRLAKVLRELKLMATQEPSIGALVKLLQTVPGVGFLTAILFVVELIDMHRFKRFDELVSYIGLAPSVHQSDERSYSGGLTKRQHHELRSRLLESAWIAVRKDPVLTLKYGQLCKRMNKNKAIIRIAKMLVSRIRTVWKTQTPYVYGVIE

SEQ ID NO: 420857 - protein, 417 aa, unidentified
MLKIVFPICCGIDVHKTFLVATIASTDRSSVTTYQTKRFSTFTKDLENLSKWLLDNQCTDVCMESTGKYWIPVYNVLELTCEVILAHPKYVKSLRGKKTDRKDSVWIADLFKHGLVKASFIPEKAIRDLREVMRYRTKLVSMKSSEKNRYQNALTVSNVQLASVVSDTFGKSAQALINQLLQQPKDTSFDVLPFLHGSLKKKAEQISESLNGSIDDIQAQKIRSCTSHMAELDSHIEDLQVAADLIASPFTAALRIIESVPGIGHLSALTILSEIGTDMSKFLSAKHLCSWAGLTPCNDQSAGKKKSTRISRAGCYIKPILVQCALAAIKDKSFPYYGQRYQVLKHRRGHKKAIIAIARMMLSVIYTLLSRGELFSKELYEESLKNPMVILSPEEQLQRLAKKFGYVVVKVHEPVPV

SEQ ID NO: 420858 - protein, 416 aa, unidentified
MNAVGIDVSSRKSTVAVLRPLGEVVCLPFDVTHDIAGLASLAEKLKALDGEPRVVMEHTGRYYEAVAKALHEAGLFVCAVNPLLIKEYGANSLRRVKTDKADAVKIARYALDNWADLRDFTPMDAIRYDLKTLNRQFQLASKQRTASANNLIALLEQSFPGIRKCFDSPVRSDGTQKWVDFAHSFWHVDCVRKQPFPAFCERYRKWCKRHAYLFKLSNAEEVYALAKRAVVLTPKSKVVKVLVQEAANQLISISRSVEVYRAEMDRLAAMLPEYPVVMAMYGVGKSYGPQLMAEIGDVRRFERKQALVAFAGIDPMPNQSGDKNVRSNKSSKRGSPYLRKTLFNVIRTYLQCAPQDEPVFQFLNRKQAEGKPFYVYMLAAANKFLRRYYAKLRDYFASLNPLQPVAPIPTILKATL

SEQ ID NO: 420859 - protein, 351 aa, unidentified
MNQISCSATSSHTLHCALELSKKSWLLAIQFPDREQPSVYSIKGGDIEKLMAKLTAARDCWAKVSGSLPVITLCYEVGYDAFWLARFLKARGIECLVIDPGSLQVNRRGRRVKTDRVDVKMLLRTLIAWCRGERHVWSPVRIPSVDEEDLRRSHRERSRLVRERTAHINRIKGLLFAQGIRDVKVKSQYKTLAVDKLLTGDGHRLSPRLASEIARELQRLAMVQEQIAEIERERDTAPTPCEATEGRRQLLLQLKSIGPAISALLSREVYYRQFANRRQVGSFLGLTPSPYSSGEEERCQGISRAGSGQVRAIMVETAWLWIRHQPKSALTRWFVERTAPSVPMMVRHLSP

SEQ ID NO: 420860 - protein, 405 aa, unidentified
MQVVYERCCGLDVHKKSVTACIITPEGKELRQFGTMTDDVLEMVDWIKQHGCTHVAMESTGSYWKPIYNLLEMENIEILVVNAHHIKAVPGRKSDVKDAEWIADLLRHGLLQGSFIPKREQRELRELIRYRRSLINERSREVNRLQKVLEGCNIKLTSVASNVMGKSAQIMIQQIINGDYEPEVLAELAQGQLKNKYDQLVKALRGLVGPHQRMLLKTQLQHIQFLDQQIAELDEEIANRMRPFEKALRLLETIPGIGRRSAEEIIAETGVNMKQFPSAAHLASWAGVAPGNKESAGKRKPSPTTKGNNALRSALVQAARAAARTKNTYLAAQYKRIAARRGANRAAVAVAHTILVIIYHILTKNQPYMELGADYFDLRKKESVVKNSIKKLESLGYQVILQPAC

SEQ ID NO: 420861 - protein, 371 aa, unidentified
MNSIVYVGMDVHKESYTLCCYCYDTDRVEYKQTIPSDYKLILKYMESMRKVYGEDATFVCGYEAGCLGYSLYHQLREHAVDCKILAPTTMAITNTSRVKTDKRDAANIARCLAFHTYSEVYVPDDEDNSVKEYIRMRDDQKLMLKKIKQQILAFVLRQGKKFEGGKTYWTIAHMKWLKALDLTGLAKETLQEYLLTYEYLIDKIERLDNRIEELASGEKYSETVKNMTCFLGVKTHTALSMVVEIGDFKRFEKAPKFAGFLGLVPSEDSSGDKVNRFSITKAGNSHLRRLLVEAAQSYTRGTIGHKSIALKQRQQGCTADVIAYADKANERLRRRFYRMTLNKGINRNVATTAIARELACFMWGMATGNIS

SEQ ID NO: 420862 - protein, 431 aa, unidentified
MTFLRQPPLAAASRGRCGVEDVVEYCAGLDVHRDTVVATVRYPVGGRRSSTTKTFGTDTAELVALGDWLVSQAVTRVGLESTGVYWKPVFYQLEDRLEQVWLLNAQHLKNVPGRKTDVADSAWIAQLVEHGLVRPSFVPPPQIRQLRDFSRHRRVLCDERTRMVQRLEKVLQDAGIKLTSVASTVLSKSGRAMLEAMLAGQTDPVALAELAKGRMRSKIPQLVDALHGNFRLDHHGVLVAQILAQVDFLDRQLADIDEHITALVADLEPIIERVQTIPGVARKCAIGMIAEIGVDMTVFPTAAHLASWAGICPGNNASGGKARSGHTRRGPIALKTVLTEAAQAAGRTKNTYLGARYHAIRARRGTFKAVGAIRHDILIAYWHIVSEGDMTYHDLGPEWVVRRRSPEYQIAALAKQIEKLGATVTVTLPAA

SEQ ID NO: 420863 - protein, 426 aa, unidentified
MNYTQNSKIAQVTEKTLVVGVDIGSETNFARAFNWRGQELSKKVFRFSNSLEGFQSFLAYLEHCKSNASAEQIIVGCEPTGHYWFNLARYLKTQHISLALVNPYHVKQIKELDDNSPKKTDLKDPKTIAKLVVDGRYSYPYLPEGIYADLREAVSSRDRIVKELNAATNRIKRWLKIYFPEYLTVYKIFSAESGLTVLEVAPLPKEVVKLGAEGVNRLWRDKKLRAVGMKRAQTLVEAAQNSIGLDGGECARMEMHLLLEDYRTKEAQLEKVTAVLEAETLKVPHAEKLLSIKGVGLITVAGFLSEVGDIRRFDSPKQIQKLAGLELKENSSGKHHGRSSISKRGRKWLRKILFQVMLPMIRNNAEFREVYEYFTTRQKNPLKGKQAIIAAGCKLIRVFYAILKRGVDYDPQKLRMDIIRPELEAA

SEQ ID NO: 420864 - protein, 351 aa, unidentified
MARTTRLIIGGVDTHAATHHAAVIDLHGRLLDDAESAASPAGYTQLLAWMRTRGPLQSVGIEGTGAYGAGLARHLHERGVEVLEVPRPDRRLRRQRGKSDPIDGEAAARAVLAGNACGAPKLATGRIEAIRMLRVARTGAVKAKTAAANTLLAVVVTAPEPLRSQLRHMSTAKLIDACLRLRPDTANLGDPAQAAKLSLRSIATRARALDAEARGLKKQLDTLTVAAAPATSAIFGLGPDTTAALLVAIGDNPDRLRSEAAFARLCGVAPIPASSGKTNRHRLHRGGDRSGNRALHIAVVVRLRYDPRSRDYASRRTTEGLSMPEIIRCQKRYLAREVFTALRADYALITT

SEQ ID NO: 420865 - protein, 345 aa, unidentified
MKHYAGLDVSVKETAVCIVDETGVICREVKVASHPEDVARVLGSPAWRIDRIGLEAGPLSQWLFSGMAEVGLPVICIETRHTKAFLKAQVNKSDRNDARGIAQMMRVNLYRPVHVKTLASQKRRALLTARKLLQEKAHAIENDIRGLLRNFGLKVGVIGVSKFDDRIHELVEGMPELAEIIAPLLTSRRHLREAFLTLHRKLLSMVRDDAVCRRLMTIPGVGPVVSLAFKSTIDIPARFKNSKAVGPALGLTPVLNQSGESHRVGRISLCGDEMMRHLLYEAAQVMLTRVQKWSWLKAWAMNIARRRGQQKAIVALARRLAVIMHRIWVDGTEFRWTREPTPAAA

SEQ ID NO: 420866 - protein, 424 aa, unidentified
MKRTQNEKILQMKSETLVVGIDVGKDTHYSRAIDNRGVELGKLLRFSNTKQGYEALDSWMQKIMQEHGKTEAIVGFEPTGHYWFTLGDHLQKEGHRLGIVNPFHVKCARELDDNSPTKNDRKDPKTIAMLVKDGRYRDVYIPEDLFQELREAVIERERLLEQEIALSNQVICWLDIRFPEFNEVFKDWSGTAAWLTLKSYPTPAKVMAAGVKGIVDTWRKGMKKPSHKKAERLIKAASESIGRMAGSEAAEASLQNLMTQYELIKQQKREIESLMQELMLRIPNASKLAAIKGIGMVTAAVIVSEIGDIHRFQDPRQIQKMAGLSLRENSSGRHKGKTTISKRGRKRLREGLFRGIITMLATNQEFRVMHQKNLTREKNPLTKMESIIALCGKLIRVMYVILTKGHDYDANKMMNDMNRSMKAA

SEQ ID NO: 420867 - protein, 417 aa, unidentified
MNVNRNEYLNLRICGIDPHKSFCKAVVVDERTLNTVDEFDFKNNRNGVLSLIERLRALDCNNVVIENTNNFSAALYITLKRHGFKVASVNPALVPKKRKKSDRIDAKWLAISYLYELVEEDYIPPAEIQYLRDLTRLRTKLVGMRSMLKNKVHALLTRADIHLSDVFSDIFGRQSIAILNSLAEGLTDAIQNLKVKRNVAMQVKDAIENSFLELLNCSVLRILLSLIQVFNEEIKRLDQMIAAHIDEHKRLKKLVKLIMSVPGVGFITAAIIVAEVGDFTRFSDAKKLVGWAGLAPQVSESAGKQRNGKITKRGSPYLRRALHEVANVITRSKSPRELYEFYKRISGRSGRYKAKTALARKILTIIYHLVVQDEHFESRHEGYKRLHERKVKQFVSLSRAGRDRLAEWSESSRQLAG

SEQ ID NO: 420868 - protein, 395 aa, unidentified
MKHILSFDIAKGKSVYCFIDELRNVIIDASLIEHKKDEFDNLFNLIKDYPNLIVIMESTSVYHLPVETYFRSKGVDTVVINPKLVKQFKDTLNKSKTDKLDCFKIARCFLGTIDNFYQKQDEYFMYSPLARQYWSLIEGQTRLKNRYRQLIDIVFPEFVLIFNDLYDDLALNFIHDFPHPVLFVNRRIDYLMNYLKEKNRTTQAYRFKNKVLKMKEFASNSLCFVAFDSYQVQNLVQVIEMIQYHKSEINKIKKQLINDMKDKELFKIINSIPGFGEFSTALFLAEVGDITRFDDKYQFISFIGIDSVTSQSGVSAYHGPISKTGCKFGRTILFNIVTTILQISAHTDKTNPIYLFFRKKQSEGKHHYKCIIACETKLCKIIYKLCSSNCLYENK

SEQ ID NO: 420869 - protein, 328 aa, unidentified
MGETARADIIIGVDTHKDVHAAVAVDALGTRLGTVTVPVGETGYRTLEAWARSLGAVRAFGVEGTGSYGAGLSRFLRGQGHAVLEVNRPDRRLRHEKGKSDPLDAESAARAVLSGQAAALPKSGTGVVEMIRHLKVARDTAVKGRTQAMLTLKAIIVSAPAALREQLDRITGKMTLIRRLAALRPGPITSTAASAKASLRAIARRWLALDEEIRSHDAHLEVLTAARAPELVQAHGMGAGTAAAMLLLVGDNPERIRPEAAFAKLCGACPIPASSGKTVRHRLNRGGSRQANAALHRVVVTRMRGHRPTLDHVRRRTSEGKAKPEIIR

SEQ ID NO: 420870 - protein, 342 aa, unidentified
MQQYVGLDVSQKETAVCVIDDAGRIVFEGKARSEPGALAKVIRKRAPHALRIGFETGAMASWLWHELKRIDLPVVCIDARHAHAALSVRINKSDPNDARGLAELMRMGWYREVRVKSAESQVVRSLMVARARLVSIRRDLENQVRSLLKENGQLFPRAIGRQFRDYVRELLSDSHPLRAIIESLLVVHERASQEQATLDARVRTLAKSDQTTRRLMTVPGIGVVTALTFRHTIDDPFRFRSATSVGAYLGLTPRRKQSGELDLTGRISRWGDRLLRTYLFEAASVLIHRTKRWSPLQAWGLRLVKRIGLKKAKVAIARKMAIILHCIWSDGTEFDWGVPKAA

SEQ ID NO: 420871 - protein, 416 aa, unidentified
MPFALPGALFFTGIDWAGATHAVCVMDAAGKITAEFTIEHSADGIATLIRRLARYGDPAGMPVGIERPNGRLVDLLLEAGYPVVPVSPNAIKTWREGEVLSGAKSDAGDAAVIAEYLRLRQHKLRVATPYSGETKALRAVVRTRDDLVAMRVAATNQLSALLDAYWPGAKAIFADVESPISLAFLTRYPAPALAVRLGEKRMTAFLVKNGYSGRRPAVELLARLHAAPAGTADETLTEALRDAVLALVAVLTALNNGVKDLDRSAAAHLGEHPDGKIFTSLPRSGQVNAAQMLAEWGDCRQAYDGPDAVAALAGCTPVTRQSGKHRDVTFRWACNKRFRRAITTFADNSRHASPWAAQIYADARASGKDHPHAIRVLARAWIRVIWPCWLTGTPYDPARHGAAAALAGRASSQFAA

SEQ ID NO: 420872 - protein, 348 aa, unidentified
MTVYIGVDFHARQQTISYLTTEDGEIQELVLLHEEPAAVRAFYEQFAGQRVVVGFESSGYAAWFEELLEELGCEIWIGHAAYIRQFAKRRQKNDRRDAELILELLHTGDFPRIHRYSRSTRAMLQQLRYRQRLVKMRTMAMNMLLFMASSRGVSMRTQLQSKRGQARLAQLPLPQPLATQRDELLNLLQILDQKISTIERWLEEQTKEDVAVQRLQTHPGIGLLTSICIRYTLEDAARFANTRKVSAFAGFDPMQDQSDERQRMGAISKQGSRWMRFYLVEAGQTARRKDADLARLYKRLSLRRGHAKAKVAVARRLLVRAFIMLRDEIDYAEFQRRGVAARSSRGTA

SEQ ID NO: 420873 - protein, 322 aa, unidentified
MTGTFLGIDVSKATLEIAGRRAGQVVPQLPASVANTDAGLTTLVPALVALAPTLIVLEATGGYERLAAAALALAGLPVVVVNPRHVREFAKAVGRLAKTDRLDAALLALFAERIRPELRARPAFDTTELSDLVQRRRQVVDMLTMERNRRALATAAVRRRLDAHIAWLEREVADLERRMRDVIEASPVWRARDDVLQSAPGVGPRVSQALIALLPELGTLNRRQIAALVGVAPFNDDSGRHTGERHIAGGRAAVRTVLYMAALVGIRHNPVLRVFYQRLRATGKAAKVALVACMRKLLTILNTMVRTNTPWCTDTATALLVA

SEQ ID NO: 420874 - protein, 353 aa, unidentified
MKCDKYMGLDVHQAMTVAVVMDAEGKVVLETMVATEAAAVLRLVKSLSGPMRVTFEESTQAEWLYELLRSHVTQVVVCDPRRNKLLSEGSKADKVDARKLADLLRTGMLRSVYHGHQATRKLKELVRAYETFSLDTQRTMNRIKAIYRGRGIATPGRGVYQARTRDQWLAKLAEPGLRQRAAWLYQQLDQLKPLRKQAKQVMLAESRAHRAVSLLRTIPQLGPIRAAFIVATVDTPHRFRTKRQFWSYVGLAVVTHMSAEYEMKAGKVVRRRKPVATRGLNRCCNHRLKEVFVSAATGGTRDESYKLYLERLINNGMRADMARITLARKIAAVALILWKKGKEFDPRELNRTT

SEQ ID NO: 420875 - protein, 421 aa, unidentified
MKNIKAKNTKTVNEKVLIATIDGGKDTHYGYYRCPDGTEGKSLPFWNNGRGFCEFWERISTAAKTHGLEDIIVGFESTGPYMEPLAQYLRGKKAVRLVQVNPMHTKRLKELSGNSPLKTDRKDPKVIADIIELGHALTVVVPEGPAAELRRLTQGRERTIASRTRLFNQLQCILASFFPEFLQVMKDVKTASAQHLLKKHPTPRDIVALGLPALTAELRKVSRGKLREDRARALFEVSNESVGIQAGRDSALLEIGLLLETIAAYDGFIEKVEAEMERQLNEIPYSRVILSLKGVGPVTTAGLIGEVGDFTKFGTISEILKLAGLDLYEVSSGKHRGKLRISKRGRPLIRKLLYLAALSTVRKGGVMHEWYKRALGRGMIKTKALVAVSRKLLRIMFALVRDHSVYVENYLQAQHQLKEAA

SEQ ID NO: 420876 - protein, 319 aa, unidentified
MSKLTLDVNCAELNIHIKITNGSEGFKLFQKWCKESGIDLKKSLVAMEYTGGYEYKLMQFCEAKKIQYSRIPGLAIKNSLGIIRGKNDKVDARRIAQYANEKHKSITPAAPINPTILGLRQFLSFRKRLVRESAGYKATLKERKEMYTVKNDDLLVRMMSKKIKKHNKLVKKLEAEMHALIQTDQKILTNYKIISSIQGIGNVNALMTIAYTENFTCFKNARSYAVYVGVVPFDHSSGTSIHGRKRVSSMANKELKQELNQAARVAIEWNKELKIYAENKRKDKPYKVVLNNVKFKLILRMFSLVKRGEFYVDNYKKVA

SEQ ID NO: 420877 - protein, 344 aa, unidentified
MLFYCGIDLHAKESVLCIIDTQDTIHFRDKIPNQINRILEVLDAFTPRPKVALEATLNWYWLVDGLQEAGFEVKLAHPFGLQVIKKAKVKTDNRDAFHLARLLRLDALPESYIYPKETRPLRDLLRRRQKTVSLRAAEYTSLHRTLLQHGIVDIPASQAKEFKAKEIEQHFEHPVIQYRCAMELERIRFYTRQVKILEEIIFGNAMEHQDFLLLQTIPGVGKLLASIILYETGDVNRFPTAKQYCSYSRVVPGIAQSSNTIRRGKGSKQGNPYLKFAFMQAASLAVRFDGPIRRFRLKHMGRRRSKARKLISVSIVAHKFAVAAYQILKDKKVFQVENMFAPYV

SEQ ID NO: 420878 - protein, 421 aa, unidentified
MNQLADTAYTVYVGIDWADAKHDIYLESADGEVMEFDCISSRPEAIAAWALELHDRFGGPIAVGVELSKGPIVSALLKYDFIELFPINTTMLALYRRAFTPSRAKDDPTDAELVVDLITRHPERFQPLKPQSVEMRKLMALVEQRYKVLSDQRRAVNRLNHALKQYYPQVLDWFREHNTALFCDFVTEWPTLQQLKRARASRVTRFFQTHNMRRKAVIERRLKAIKEGVPLTDDEAVIEPHCLQVEALVEQIRLTIRYLKRYDEAIAAITERLPDYDALFSPLPGAGKILAPRLLAAFGEDRERYPHADDLQMYSGIAPVTERSGKKTWVHWRWQCPTFIRQTFVEWAAQTINKSAWAGAYYRQQRDKGASYEVAVRALAFKWIRILYRCWQDRKPYDESKYLETLRRKGSPLLKYLANPA

SEQ ID NO: 420879 - protein, 335 aa, unidentified
MHYLYYVGLDVSKETFDASLVAFEDANEMAHRKFANSRKGICSCLHWVEKRHGIRLDDVIFCAEDMGSYISEMAVCASDRTLTFNFSLISPLVIKYSMGIARGKTDRVDARRIAEYAITHYRKIALYLPAEKELCQLRTWLILRAHLAKQRVAKLVLLEKLDYKEKFADVSIQRSMLQEEIAYAETHMKTIEREMKELIAADSNICRNYKLLTSIKGVGPITAIVMLCSTLNFTKITDHRKFACYCGLAPFEHSSGTSVRGGCHTSSMANRDIKVQLNRSALIAIRCDPQLKAYYERKVAEGKHKFSVLNAVRAKIAARCFAVVRRGTPYVALQI

SEQ ID NO: 420880 - protein, 325 aa, unidentified
MIYQVLGMDVSKETVDISIYNGSYHSHKVLKNTPRVLLSYIKKYDKQTLHLVMESTGIYHLRLAMAASEHGYMVSIVNPLIIKRYGEMKMRRVKTDKADAKLIAEYAYEQKPPLFRPASKERSQIQQLLKGLEDLHQSKSQMKNRLEAYDHGLGITPALRESITKIISTIDEQIDKLTDELNDNMDKYYPELKEKLTSIPGVGAKTASTIIAYYGEFENFQTAKQAVSFAGLNPNPRQSGTSVNRGSNISKKGHSIIRKTLYMCSLSLVRCNPEFKCYYEKMVSEGKAKKKALVAVANKILRQIFAILKYDREWTPYYSLKYKNA

SEQ ID NO: 420881 - protein, 318 aa, unidentified
MLIHYIDIAKRNFVIAVSSLSKTKTETNNPKGIAHTIEYLKKHKVALVVTESTGGLEIPAAKAIRRAGIAVIIANPRQTHQFAQSQPLTKTDAKDAKMPAFFAQMTAQKEDSQTMPYQPPTEAEEVLEALVNRRNQPADMRTAEKNRLHQVHETQVGSVKQLIAHFDRLIDELDKQIDDHTHTHFDGKDQVAEQIKGIGSITTATLMAMLPELGRLSHKRIAGLAGIAPHPREGGETKFKSRCFGGRSAVRKALYMATVAATRFEPLIRDFHQRPPSEGKPYKVAVTACMRKLLTISNARMRDYFAENDTAENGIRTA

SEQ ID NO: 420882 - protein, 357 aa, unidentified
MIYVGIDVHKRKCQSALMTEKGQILDELSFENNSQGLSILIEKLQPLGPAKAVMESTGNFWIKTYEALEAAGIKTTLSNPLKTRAIAEARIKNDKIDARTLAHLLRADLVAASYVPDKETRARRALLRHRASLVKTRTEIKNRVHNLLDKYDLRSQYSDLFGKHGLEWLRGLQLPPIDKAILNSDLQLLDALDQQILTINIEIAKIACNQDDVKLLMTMPGVDYYAAMIISSEIGDVHRFSSAEKLASWAGLAPSTRQSGNRTKRGHITKQGSRTLRWILVQAAQNSHRCDPRFQHLYQRIATRRGENKAIIAVAREMLTIQYYMLTRREQYRGMNMDRYKEKLKKLERTANSGLHQ

SEQ ID NO: 420883 - protein, 381 aa, unidentified
MRNVCGLDVHKDNVFVCIDKEKGEKIQFKTGILTKDLDALRDTLVANDVTEIAMESTSVYWMPIWRVLESDFKLYLVNPYAIKQLPGRKSDIKDAEWIATCLRKELIRGSYVPDSTIQQLRQYNRRIFDINKQSVYIQNKIDAALQRCNIRIGNYISNVGAKSYCEIVNMLSEGRTSPEDLIAKVHKRTVNKWGRETILAALEGVVNKTDCRILGQLKEELDMLRMHKAECLTMMREICMENYKEQLLNIQTMPGIGEQGAMQIIAEVGVDMKAFMTAAMLVGWAGLKPRNDESNGKFKSRSTTHGNKYLRKILIECAWGASRTQGCFFNKFSYHQTMVRKKSRQKVQVAIARKILVVIWHILENGVVYNDIFGKGKAKDQ

SEQ ID NO: 420884 - protein, 380 aa, unidentified
MSTVTTRSEQPARTLHLAFDLGNRIWKLAFATSVAHAPRLRTMSARNLAQLDTEIAAAKARFGLAPDAPVVSCYEAGRDGFWLHRALTARGLTSHVVDSASISENRRARRTKSDRLDATALARLLLRHHGGERGVWSVLHVPSVEEEDRRHLHRELFTLTRQRTRQVNRIKGLLALHGIVLAKPRGLPARQPELCDWCGAPLPPAVAARVTREWTRLRAIQRDVVALRAARRAMLARPEAATDPLLRQVEQLRALRGIGEVSAWLYATEFFSWRAFRNRRQVAGLAGLTPTMRSSGDVEREQGISKAGNARIRALAVELAWSWVRRQPASALTRWYRERFAAGGGRLRRIGIVAVARKLLIALWRYLETGIVPEGAVLKA

SEQ ID NO: 420885 - protein, 427 aa, unidentified
MKYTQNKKIEQVNESTLIIGADIAKQKHIARAQDFRGIEFGRALTFDNSRDGFIKLLNWIKNLKEEQDKQQVIFGIEPTGQYWLPLAQFLRQHGIKIVLVNPLHVKKSKELDDNSPTKNDVKDARVIAQLVKDGRYSEPNIPTEIYAELRVGMNMRDRLIEDMQCIKGRIDNWLDRYFPEFNTVFRSWEGKAALLTLESFPLPQEITDKGIEGILECWKQEIKRAVGKKRAVELLEAAKESIGLTEGLIMARQELKTLLSQYSVLKREIEQLMEQIENILKEIPGTQEMMTIPGVGIVTVAGFLAEVGNLENYHHPRQIQKLAGLNLKENSSGKHKGQTRITKRGRPRLRALLYKCTMPLVAKNPEFKALHCYYTTRIENPLKKKQSLIALSCKLIRVLFALGKKKTSYDGRKLLKDSSIILLQEAA

SEQ ID NO: 420886 - protein, 361 aa, unidentified
MSNSTTWIGMDVHKESIVVAAVNGAGTVAARWETPNTSKGKDRLATRLSEFGTVRCAYEAGPCGYDLRRFLEGKGIPCDVIAPSLIPKKSGDRVKTDKKDAEKIARAHRMGDLTAIHVPTPAQEALRDLLRAREDANEDLVRRRHRLQKFLLRQGRRHEGKNWTRDHWRWIRAQKFDDQNSETVLSEYIAAIDQEIERIGRLDAQIEQESKHPDIAPAVARLKALRGVGTLTAMTIFAELIDLNRFASPRELMAFVGLVPGEYSSGGRQWRGSITKAGNAHVRRVLVEAAWHYRHSPRGTGEAIRKRREGQPAAVIETARKAELRLYKKFTRMVMRGKRSTVAATAVARELVGFVWAIGRI

SEQ ID NO: 420887 - protein, 428 aa, unidentified
MNCNTQNVKIASITEKTLIVGIDVGSETHFARAFDWRNYEYTKKPLEFSNTEAGFMMFKAWVEDIAEKQGKTAVIPGMEPTGHYWFALGKFLQDSGMKPVHVNPHHVKKSKELDDNNPNKNDRKDPKTIAALVNEGRFSYPYIPTGIYAEIRSLSNLRFQTQEELTRIKNRIARWFAIYFPEYKDVYGDLMAVSGRMILKEAPLPEDIRILGVNGVNQIWRNAKLRGAGMKRAKILVSAAEHSVGSKEAPEAARIELKNLLNDMDVYVSRMEELLQTIEEKLKTIPYVDKLMEIKGIGLITVSGFIAEVGDIGRFDNPKQLQKLAGYAIVANDSGKHNGESRISYRGRKRLRYVLYEAAISLVGKNAEFKEIHEYYRTRKENPLKKMQSVVAVACKIIRVFYTILTKGVDYDPMKLMSDIRRPQLQAA

SEQ ID NO: 420888 - protein, 356 aa, unidentified
MTVTKAPTQLITGGVDTHQKTHHAGIVDAHLVAVADREFPATEAGYRELLDWMSGYGLVSKVGVEASGSYGAGLTRFLLAAGIEVVEVQQPEKATRHRDGKSDVLDAYSAARQAATGAARGLPKLTTGIVESIRMLKVARDGAVKDRTRAYSQLRDVVTAAPGAIHDQLITLTGPQRVKRALSLRPDPARLNDPVQAAKKSLRNLARRIQGLNTEIAETDRDLAALTKKTVPSLLAMRQVGTQTAAQMLLTAGQNINRLATEAQFAKLVGVAPLPASSGKSGTRHRLNRGGDRQANSALHLVIIGRLKNHPETQAYMRRRLAQGKTKKEAIRCLKRHLARAIYRTLRNDLKALDGL

SEQ ID NO: 420889 - protein, 347 aa, unidentified
MHNPEVGGIDVCGLDVSAQELVVMARRDGKTESHRSFPNTRQGHRELQRYLTHRRERVRVCMEATGMYGLDAALWLQADPRIELMVANPRAVKSFSRAMLQRSKTDPLDAWVLLEYAARMPFQRWQPPPAAALQITALARRIHTLTQQCAMEKNRLHAVEATATTLRAIVQDLRRSVRGLETAIAKLSREAHKILAANPELERRFLLLQSAPGIGPISALQLLGELVLIPANCDVRQWVAYAGLDPRHHESGSSVHQKTRISKVGNRHIRRALYMPALTATRFAPQLRAFYLRLQARGKCKMVALVAVMRKLLHAIFGMFKYDDPFDGAKLCPALTLAAQPEVARAA

SEQ ID NO: 420890 - protein, 420 aa, unidentified
MTNPYRWFVGVDWGSERHRVVVLDAEGALVASRNVEHTGVAQQQFLQWLAELTENRISEVAVGIEVPRGAMVEGLLERGFAVFAINPKQLDRFRDRYAVSGAKDDDRDAFVLGDSLRTDLHCFHCVTIEDPLILQIRELSRLDDDLQTDAVRLANQLREQLLRYFPSLLALNPAADEPWLWDLLEVAALPAQAAELGRSRIESVLSARRIRRLSAEQVQTALRTPALTLAPGAALAASRHALLLLPRLRILHVQRRQVAREIASLIEQLPAAIDADGHPVEHRDADLLLSWPGLGIGIAATMLGEASRGLAQRDYHGLRCYGGLAAVTRQSGKKQVVIMRYACNRRLRNAFYHWSRCSLQKDPRSREHYAALRARGHSHGRALRGVADRLLATLIAMLKTRTPYDPKLRGRGRENIPSTP

SEQ ID NO: 420891 - protein, 358 aa, unidentified
MKKYVALDVDSANIVAGVYDEQGKLIMKTHLRTQAKVIQEFFQMLSGTVQVTFEEGTQSAWLYELIQPLVAAVVVCNPRENKLLKAGNKSDHIDVDKLAKLLRLGDLKSVYQGPPSNQGLKQLVHSYEAIVEDATRTKNRLKAVYRSRGLTSKGEGIYGKAQREQWLAKLPSTEQRTRALSLFAQLDHLKQLEKAAEKVMKQEARKQPGYRWIESAPGIGDIRTAQILATAITPHRFRGKRQFWPYCGLAVVTRSSSDYEWVDGATRRKRKLIQTRGLNPNHNRTMKAVFKGAAASAIQQHDEVREYYQNLIATGMRPEMAQLTVARKLAAIVLTLWKKGERYDPKRLIKQHPAQALQ

SEQ ID NO: 420892 - protein, 391 aa, unidentified
MIYIGIDVAKDKHDCFITNSDSEVLFKAFTIANNLDGFNDLYQKIESVMDDVTKVKVGLEATGHYSYNLLGYLIDKGLPTYVINPLHTNLYRKSLSLRQTKTDKVDARTIASMLMSDVNLKSYSDTSYHNEELKSLTRYRFDKVKERAKLKTSVSRLVCILFPELEKLVPTLHIASVYAMLSEFPGAKQVANAHLTRFTNLLSEASKGRYGKETAIAFRDAARTSIGSNMPAKSLELKHTIKLIQELTSEIDEIEHEIKLIMDELNSPILSIPGINYRMGAMIIAEIGDFTRFDSPDKILAYAGFSPSTYQSGQLDGAYSHIEKRGSRYLRYALYNAAKYVCIWDPTFAEYLAKKRAEGKHYTVAISHAVKKLVRVIYHLEKTNQQYIKAA

SEQ ID NO: 420893 - protein, 368 aa, unidentified
MNSITYIGLDVHTSNYTICAYTIEKDKTFAETTIKPDINELEKYLKRLSEIQGEDSKFICGYEAGCLGYSLYNQLTAKGYECIILAPTTMPKTVNEVKTDRRDARKIAKCLAYGTYSKVFVPSNEDNAVKEYVRMRDDAKTMLKQTKQQIIALCTRHNKNYDGKTNWTQKHIDWLKHLDFGIDVLNETLTEYIITLEQLINKIERFDKRIEEIAQQDKYKENAKKIQCFRGIKAHTALSFLVEIGDFKRFPTAQQFSSFLGLVPGEHSSGDTQHRMSITKAGNSHLRRLLIEAANSYSRGVAGAKSKAVKQRQEGNVPEVIAYADKANERLRRKYIKIALRSNSNVAKAAVARELACFIWGMMNDKLS

SEQ ID NO: 420894 - protein, 344 aa, unidentified
MKRYLGVDLHRTQFVVCTRWENQEQEIRQWRIAELAKFVEQLQPEDQIAVEAMGTTARFYDAVVGRVARVVVVNPHQFKVISESVKKTDRNDAAALALYLEKDLLPEVRMKPKQNRELMHLAETRDLLVKQRSALKGKINNLLAMQGIELKREALSSKIALERVLASPVRGVVQVELRVLVGQIRSLSESIAEVDEQLEEEGQQLPGYENLTSIKGIGWWSATVLLTVIGKISDFADENKLAAYLGLVPRISNSNESERSGKITKQGNKLARTALVQCGLVAKRYSPYLQRFYERIKQRRGGGKAKIALARKLVKIVYDTLKNQWVFEDFPSFTLAAKTSQNNF

SEQ ID NO: 420895 - protein, 373 aa, unidentified
MPKYSTAFGMDVHLRSTTVCALDADTGEAVTRRFPGNPWGEIAGWMDGFPGPSLAAYESGYLGFAPQRELAGLGVECVVAAVSKIPRSAADSASKNDRNDAARMAKAILAHDISPVWVPSPEVEGIRDLAGAYDGATARLATAKQRLLAFLARRGFVYGGTTPAGNPRKYWTYDFLRWLDKVRPEDDGGVRALAALRNEVEAAAEARADLLSEYRAAVGASPIAAEAAALQSIKGCAFALAAAFSAEVGDFTRFRSGRQVTAYFGLAPSQRSSGDSVRLGGISGAGNALVRKLAVEGSWCYAAARHQPKLMPRDTGVPLEIRMHGRKGSERLLRRREEMLARGMPAAKANAATAAELVRWLWALGMMCREGAE

SEQ ID NO: 420896 - protein, 361 aa, unidentified
MSHTSAWNNATEMPAVTIGLDLGDRTSRIYEVSAAGERLTEASLPTTPSALVKYFGKRAACRVVLEVGTHSPWVARTLTELGHEVVVANPSAVYGKGRRRKRNDRMDAEFLARQGRADVKLLHPIRHRSAAAQADLALLRARDQLVQTRTGLINHVRGAVKAIGARLTRCAAEAFPRRVRAEVPEALRPALTPLLEVIGELSQRIAGYDRQLVAAIRDRHPVALRLQQPAGVGPLTALAYVLLVEDPQRFGRSRDVGAYFGLVPRLDESSDSRPQLRISKAGDVLGRRLLVSAAHYILGPFGPPCDLRRSGEALAARGGTNAKKRAVVAVARKLAVLLHRLWVSETAYDPDYLATRPPRAA

SEQ ID NO: 420897 - protein, 387 aa, unidentified
MYFVGIDISKFKHDCAIVDEFGDVITPSWSFQNDREGFSLLKELLDALDGEKKIGLEATGHYGQNLKLFLENNDFSFMEFNPLLINQFVHSKSLRKTKTDSIDALMIAQYLMTVEYKPYPPSFYTLERLKSLTRFRDNLIRQRSKQLVELTNILDKVFPEFKPFFKGRFSATALYILSHYASPEKISNMNSKSYEPLRRLSRGRFSMVDFVELKTLARNTVGSTSDYLLQEMEITIDIYNQLQSKAEEIELQIHDCVLDLAPPILTIPGIGAASAAVILSEFGDLSKFNNPSKLLSFAGMEPRYFQSGTSESTGKMVKHGSSHLRYAMMNCAQTVINNEPTFAAYYAKKRAEGKEHRVALTHVAKKLLRVIYTLQTKELSYNPDLVR

SEQ ID NO: 420898 - protein, 314 aa, unidentified
MTSILYIGMDVHTTNYTLCSYTLETQQSFGRVQVEPDYKQVLKYIEKMKEAWGNDIEIVCGYEAGCLGYSLYHSLTDHGVNCIILAPSTMASTPNERKTDMRDAEKIAKCLAHGTYSPVYVPTERDEAVKEYIRMRDKHKASLKCIKQQIIAMCYRYGKQYTKQSHWTQAHLAWLKSLRFNDPILQETFEELMIQYYQAAEKLDHYDKRILELSGEEEYVEKVHKLVCFNGVREHTALSAIVEIGDFNRFPSADRFAAYLGLVPGEHSSSTNVRRTGITKRGNSHLRTLLTESAQCYSRGQIGKKSMAWSSVKI

SEQ ID NO: 420899 - protein, 396 aa, unidentified
MMTVGIDIGARSHAVARCREGTEKAERGVLRISQDRAGFDRLDAWMARQDEPVDLVAMESSGHYWMPLAAHLRAQDIPVALVNPLSAKYFARSRLSRTKSDPADARSLALMAMHDRPVARDALEGTELRQAARFAMTLVTEQARVCQRLIRLVELGFPELGELFDDPACRTAREVLRIAPTAAAARRRRTSTLADANVGPGHRRLGTAKAEYLKGAAADSIAVPELSDEVAFEVGLLLDQYDLLEQQIADADAHVASLLDSELARRLRTIPGVGPSTCAALIAEIGDIWRFTDVDGLLASAGVHPAERSSGRKGASPETSWHMSKAGNAHLRAAAYRMAVVGITHDPVIKAHYERKRAAGKSKMNALGHCMSKALNLIWGVWRNEADWDPDWGSRP

SEQ ID NO: 420900 - protein, 340 aa, unidentified
MNHYAGIDVSLEASSVCVIDASGKIVREAKVASEPAALIAWFGSLGLELTRIGLEAGPLSQWLYAGMRQAGLVVELLETRHVRNAFKIMPVKTDRKDAQGIAELMRLGWFRPVHCKSMEAQETRAMLTARKLVQKALHEVEMSLRGVLRGFGLKVGKVAPARFEARIKELVEGHPNLAVIAASLLAVRATLRREFNGFEKRLRAMARSDTRARLLMSVPGVGTIVALTYAAAIDDPARFTSSKTVGAHFGLTPTRYQSGETDRTGRISKIGDGSVRAALYESSHIIITKPIKGCTDLKSWAMRIAKRAGMNKAKVALARKLAVIMHRMLADGTTFTTQPA

SEQ ID NO: 420901 - protein, 361 aa, unidentified
MTTNTMKTIGVDLHKTSLTATVLDPSGALLERKDLPTKCRRQIADYFASHGPDVQVAVESVGFYHWFWDTVTPTVRKLHLADPAGVRACAGRRPKTDPNDSLLLAELLREHRLPMAFVPDEPVRALRELCRHRHRLARQLALARRHLRWVGLKNNLPGPTTLTSDRAQKWLLSQDAKLNPVHRLSSRQFVDQITTLERQLADVEKVLADTVAAHAELAPTLALLQSVPGIGFITAVTILCECGDITRFNNIDELSSYAGLCPRVTQSGESAHHGHISKQGPPVLRWVLQQAAWVASRCDPNARRIYARISKRAGNKKAATALARKLLSCAWSVCRLGPPFVWPNTEPKPGRTPGSVWSFDI

SEQ ID NO: 420902 - protein, 339 aa, unidentified
MTIQSKKIAQETKSLFAGIDVGAEELILLVRKNGTSYKPQKFANTPADRARLVKKLVNMPGIIVCLEATGVYHFDLSIALHDAGVALMVVNPKSSHNFAKVLMKNSKTDAVDAETLAQYAGRMDFVAWTRPSDEKIALRSFARRIDALTRQKAAAKNQLHALSASKENPKAVLRDVGLAISQLEKRIACLSKEALALIGKHPDLERVFLLLTGIKGIAQTSAIALMGELLLLPQGLSHREWVKSAGLDPRAFDSGKSVHKKTRISKAGNRHIRSALYMPALSAKQHDPYVKAYFQHLVDNGKLPLQALCAVMRKLLHAIHGMLKHDKQFDNTRFYAIPA

SEQ ID NO: 420903 - protein, 345 aa, unidentified
MKIVGCDLHTRYQQIAMLDAETGELVERRLEHENGEARAFYAGLSSPVRVGIEATGHTRWFERMLAELGHELWIGDAAQIRAAMVRKQKTDARDAAHVLELLLSERFPRIWRPTLEERDLRQLVWHRQKLVWMRNAVGNQLHALAMGEGVCRKKKLFTKKGRVELEGLKLGPWASHRRHELLEMLDRLDESLHELDQAVQQQAEQNAEAVRLMTHPGVGPVTSLAFVLTLGPVERFKRSKQVVSYLGLNPREHSSGGRQRLGAISKQGNPMMRSLLVEAGHTAARLDAELRQDYQRLKLRRGSGVAKVAMARKLAVRMYWMLRSPASYAQLVRMQGCPRGTLVGQ

SEQ ID NO: 420904 - protein, 437 aa, unidentified
MRVLYEHVAGIDVHKDMIKVAIRSPGEKPWTRKTEILEFRTFYGVLQEMARLLRRRGVTHVVMEASGVYTDPVYYALCEQDFAEVAVVNPAHARALRGHKTDAADCRRLAELFECGLLRGSYIPPAELREVRDLTRYRMKTVQARTSEIQRLGKALESAGIKLGSVASDITGKSATAMIDSLIDGERRGAVLADLAIGRMRTAGKLAGLSMALTGRFTEHHALLCRLHRDRIAGLDAAVADLDDQIAGRAGRWQRELDLLKTVPGFGDVVAQTWLAEIGPAPHRHFASHEKLASWVTLCPGNNISARKRKHGRTGDAGTYIKPMLIQAAWNAIRPKGRLQARYSRLVRRFGGEKNPGAKKKAITAIAHTLLKIASQVLKSEVPYQDLGADFCTRRESPDQQRAYLERRLRKLYPGCAITITISPPEAVLTSTVSNAP

SEQ ID NO: 420905 - protein, 405 aa, unidentified
MNTEVFVGLDWAVHTHAVCVIDTAGAVLDRFEIAHDRVGLAELMHRLARFGQTVRIAIERPSGLIVDALVEAGHHVFPIHPNAVKASRPRYRSHGAKSDTSDAYLLADLLRTDGHRWRKLSPQSDSIRALRALVRSRDDLVATRVALGNQLQSTLEAFWPGAARIFADITSPIGLAFLQRYPSPASAARLSEAALGRFCRSQHYSGRRSPAELLARLHSAAVGRAGPLTNEAAAQLVRSMVAVLQPLVEQIGHLTRRIERFVESMPDGQIIMSFPRAGHVCAAQILAELGDVRERFPSLDQLASEAGAVPVTYQSGKTRSVAFRWACNHRLRKAVTCLADNSRHANHWARGIYTAARGRGCDHPHAIRILARAWLRVIWRAWTNRQPYDPALHVGAQELASNQGG

SEQ ID NO: 420906 - protein, 378 aa, unidentified
MRKPTRFVGLDVHAETIAVAVAEPDGEVRSLGTIPNEAEAVRKLIRRLGPASSLRVCYEAGPCGYGLYWQLTGLGVECEVIAPTLIPVKTGDRVKTDRRDALKLARCYRSGDLTPVWVPDAAHEALRDLVRAREAAKKDQLRARHRVQKFLLRQGRRRPTKMHAWTQRHVAWLREQRWELVAAQTTFDDYLAEVDHAHARVARLERAISEQVATAPAHLKAVVGALQTLRGIGEVAAATIALEVGELSRFERPKQLMAYAGLVSGELSSGEHVSRGRITKTGNAHLRRVLVEAAWAYRHRPGLNGRLRHTVEGQSAAIRETAWKAQLRLHKRYAQLSARGKLHQKVIVAVARELLGFIWAVGVAAEREVSAQSQQRAA

SEQ ID NO: 420907 - protein, 345 aa, unidentified
MRQIVRIGLDIAKRWFQVRAIDEAEKEVFNRKLPRDKVLGFFGALPRCEVALEACSSSHYWGREIERLGHRVRLISPNYVKPFVKRGKSDVHDARAICEAASRPDMRFVPVKTEEQQAALMQHTSRQLLIDQRTAVANSLRSQFAEFGVIEKRGVENLADLVRRLDENDPDIADIPQSALAVMRVLADHLRAVEAHLTLIDEQIEAERRSSATAQALETIPGIGALISAALVAHAPNPSAFRSGRDFAAWLGLVPRQNSSGGKDRLGRITKQGNPYLRRLLVLGATASLRWLHKRADPLAVWTRQLLQRRPARLVTVALANKLARIAWAIMTTGELYRREAPSIG

SEQ ID NO: 420908 - protein, 337 aa, unidentified
MLFCGIDLHSNNSFLVIIDESDKVLYSKRLPNDLQEIRAALSPYQSELFGIVIESTFNWYWLVDGLQESGYSIHLANTTAIKQYDGLKYRGDESDARHLAHVLRLGLLPEGHIMPKPLRSVRDLARKRMQLVQHRTTQILSIQTCFARQTGSSICSNDVKKLNDQLVDEMNLGSLEGLALKANLAIVHVLQAQIHGLETELSKYCRADCAFSLLKSVAGIGDVLATVILLETGNISRFADVGNYVSYCRCVGSSHMSNGKKKGAGNTKNGNAYLAWAYVEAANFAIRYSEAARKFYQRKKAKRNNVVAIKAVAHKLARACFHMLKTGEVFSVERCFT

SEQ ID NO: 420909 - protein, 460 aa, unidentified
MPIIRSNAIRIKRFRELKADLRTNRNRLLVGIDIAKAQHVAQVRRAHTRILDQQLGISNTEGGFAAFWVHLQRRQQETGCLEIVCALEPTGTYHQALATFLEGHGVDVVLVAPQVAHHNRRTLDGTWGKTDPKDAHNLGDLLERGHVLFYSLPDEPTATLRRLVRLLRHARVELAACKVRFRVTLLPALAPAGAPLPLAVIAALPAPLQGLLSAAQRRALPAGAAVLPAAFTCDLTDLAARVASVRVRLTALEAELVRVATPLPAYRLLLTIPGIGPTLAAILVAELGDLAWYSRFSQLRKLAGLDIIWVATGQWTGAARISRGGRPLLRWALYQAALGAARTAAGRAHRDRLRAKRTGDPHAFFKANVELAAKLLRLVWGVWRSGRPYDPARVGRGLAVRLAPGSPAGPTGRRGTPPADQGRSPIGEPRASQAGRSSGTPAAHPMNGPPGGATCRGRRA

SEQ ID NO: 420910 - protein, 406 aa, unidentified
MSVHAAPVTSSTVVVAVDVGKTSVALSATDAERHRLLGPVQFTMTRSALAATVCQVREVLPCPHVPVKVGVEACGHYHRPLLARSVWPAGWEVLELNPAHVAEQRRVQGRRRVKTDAFDLDAITEMLLAGHGIPVTVRDLVLGQLTAWTAHRTRRVAVRTATKNQLLSQLDRAFPGLTLVLTDVLSRKVGRLIVEQFSDPARLAALGPARFVRFAAACGLQVRRPMAERLVAAARDALMTTDAAVARRVLATDLTLLDELDREIAAAETELAMLLPDSPFRTLPSVPGWGVVRVANYAGALGDPDRWPGPAQIYRASGLSPAQYESAGRRRDGSISREGSVELRRALIDLGFGLWHCDPAGKRYAAGLKARGKRGGIIACALAHRANRIAYALVRDQMPYDPARWV

SEQ ID NO: 420911 - protein, 348 aa, unidentified
MILVGCDLHSRTQQVAVLDTRTGELVEQALAHEGGAVERFYRALPPPVTIGIETTGYTQWFHALMHQLGHTVLVGEAAKIRAMVVRKTKTDRRDARHLLDLLQHDRFPTVWIPDPDTRDRRALIAHRVRLVRMRTMVKNGLQAIALNQRLALRSALWTQRGLTQLKALALPPHTTRRRDDSLALLAWLTTRIDQLDAHIAAVASADPRVQLLLTHPGVGPLTALTTVLVLGPLARFPDSKHVVSYVGLAPAVHASADKQRLGKITKQGNALLRWVLGQAAPLAARKDDDLRRRYFSVMHRRGRPKAKVALARKLLVRLYIMLRDQIDYEEFRRRGRAPRPQQLPVAVM

SEQ ID NO: 420912 - protein, 432 aa, unidentified
MATEQERQLAAGSTEPAFAAFVAIDWADKVHYFSLRAAGTDKAERGSLENSPEAVELWACGLERRFGGRPVAVALEQRRGAVVAMLGKYSHLHLFPVHPFTLSKYREAWYPSRSKDDVKDADLLLEILVQHRDRLRRIDPDTPSMRLLQFQVENRRKLVDERTALSNRLTDVLKICFPQVLKWFDDVSSALVGDLLEKWPSLEALQKARTSALEKFLREHNCRDEEKNRWRLEEIRHAVSATHDEAVMGSAKAMVPAWVGQIAVLRRAIGALDKEIAQLAKRQEDWAIFQSLPGVGDALAPRLMAAMGTRRERFGSAGELQSFVGIAPVKEASGNSEWIHVRWACPKFQRQTFHEWAACSIPQCDWAKTFYDQLRARGKDHHVAVRALAFKWMRILYRCWVNRTPYKEDVYLASLAKRSLPMRPLASSVQMP

SEQ ID NO: 420913 - protein, 347 aa, unidentified
MGTVLKQVLGIDVAQNELVVTFGRLMDDLAVDLVAHKVFKNTENGFCTLLLWVKKYRCPEVPLRFVMEATGVYHQKFVYFLDEKGYEVSVVLPNKISNYQRTLDVKTITDKSMSECIARFGLERKLDNWKRPKTAFRNLKQLTRERNQIVDERSVVKNQLHAHQVEAFPHEGSVNRLKARIVFLNEQEAQIKKEIENEVVNDPEVSTSMRLICSIPGVGKLTAASILGETNGFELIRNKRQLVSYAGFDVIEKTSGTSVKGKTRMSKKGNVHIRKAMFYPALSAIKNNEHFKEFYKRIVERSGVKMKGVMAVSRKILELIFVLFKSGEEYRMDYEKNRVEAQLILTL

SEQ ID NO: 420914 - protein, 328 aa, unidentified
MHVIACDVSKATLDAAWFDEDNQRWFERSSIANKKPGFRQLLNWAAKYCGCAVTEIQLVVEATGVYHGPLVDFAYANGLQIIVVNPGRAAENARSHNRLNKNDKLDARGLQCFGRELKEAHQYVPHSPEIQALRALLSRLRQLDVDQQREQNRLEKCPYIAQSSSLSASIRRQLKSLAKEKTRIQQDIDQLIREHEPLKHIRQLLRTIKGIGPISSQWLLPLLYREQFNSARQLAAFLGLTPIHKTSGTSIRKKPRLSGRGNGYIRARLYMPAVCAITNDPAMKAFYQTLIKRGKTPKQAITAVMRKLVHICYGVVKNDQPYRCQIST

SEQ ID NO: 420915 - protein, 367 aa, unidentified
MAKFLIVGADVHEEYVMTKWSVDQGKVFKRAFRMTEAGQNKMIAMLHETAEKAGVKDIVFAYEACCMGFGLYDHLTDASIKCHVLAPTKIERSNKQHREKTDEKDALRMLEILRGHLLAGNTLPDVWVPDHQTRQDRAIIRQRFSLSEQCSSVKTKIRMVLKRSHVRKPKEVGKNWTKAYRKWLRDICDVEAGVLQYGDIVVLESSLRQLQSLEDEVELQDHNIKSLSETPRYKEACVKLCQIKGVGLLTAMVFLTEFGDMSRFSNRRQIGAFLGLAPSSYETGENCDRKGHITKQGSSLVRKVLSQAAWCISRNDPFFERVLKKNPKKKKIALVGVMRRTAIKMWHIALDVQKETGCFVAYSGKST

SEQ ID NO: 420916 - protein, 369 aa, unidentified
MKNNNLSVSGIGESQASIEQNNSRLLKLGLDMHYRQVTIGMQEEAGQIKAVGKMGHEAFSSWVEKKLKEGWEIHSCYEAGASGYWLHRLLMEMGVNNLVVVPKAMDQGAQKQKTDRRDAGQLCDALDRYLRGNHKALSPVAVPTPEQEEKRALIRYHRQIMADRSRYEARGKGLLCAQGIEVQGKWWQAKRWKELNSDPRLKGWMKEQLEGWRSKLLGAEQQQQKLRRRIEALAPAMLPKGVGAYSAVVLEYEMKGLGRFKNPRAVSSYTGLCPGIHSSDGRGKEGSINRCGNAVVRWNLVEMVWRLLKWQPHYEPVRQLAAGLVRSKRAKKRLVVKAARQLAIDLWRLRTGQTTPQKLGLVMQYNPIK

SEQ ID NO: 420917 - protein, 384 aa, unidentified
MNNDSIIFIGLDTHKSFIQVAVLQDHRGANIQHLGRIKSNKSAVIKLAQQLQSKYPKATLHFAYEAGPCGYWTYRLLTSLRHCCYVIAPSLIPKKAGDRVKNDKRDAAKLAKLLKAEELTPIYVPEAEDEAIRYLSRARETAMKDLKDAEFQLKGFLLRNNIQATVNDNWSKKHLRWLTDLILPHHSQKIVLQEMIITISERIQRLQRLDNELLHQVKNWRYYPVVKAIQAMRGVRLLVALGTIAELGDLRRFDHPRKLMAYLGLVPTENSSGGKTRRGSSTKCGNSRARRLLVEGAHTYKHKANLSAELQLRQEGLPKEIVDIAWQAQQRLCRRYQRLLQKGKHRSIVVVAIAREMIAYIWAIAREVVISNVDPKTRIARLPA

SEQ ID NO: 420918 - protein, 358 aa, unidentified
MRDVITVGIDAHSQVHAAAAVDLRGRVVAQLETGTDRSELGRMLTWVQSLPVPREIAVEGAKGFGRPLTLLLLAAGEQVVDVPTNLTAHGRRTSRRRGKDDEGDAIIIARVAVREDSLPRMDAAHLNTDMKLLVDARDQLVQEQIRVRNRLHALLIGLCPGYRAVTGALTSKAALQRAHGLAMKERTSEPVRAHLALVAIKRLTALGKETAELKVLIATQLRQDCHEHLLAIPGVGQLTAAKILGETHDARHFPSAAAFAAHAGSAPIPASSGNTTRHRLARGGNRQLNRALYTIARSQARWHPDARTYLARKRAEGKSAAEARRCLKRHLAAVVYRAMLRDLQAHQPPRPTTTAAAA

SEQ ID NO: 420919 - protein, 344 aa, unidentified
MKILRQVLGIDVALKELVVSLARLREDLVQEVYASKTFANNQKGFISLVSWVNKLADPGHRVQFVMEATGVYHEALAYFLSERSYDLSIVLPNKISNYFRTLDVKTINDFTSAEAIARFGLERKLDLWKKPDATLKKLKQLCRERDQIVGERTLVKNQLHAELSEAEPNSSSVLRLKKRIQFLNIQEKEVRQEIETIARSNNQLSKTIDTITTIPGVGLLTAATVLAETNGFELIRNKRQLASYAGLDIREKQSGTSVKGKATISKRGNRYLRKAMYLPALAAKRTDPRFKSVFIRIVEKHGIKMKAVVAIQRKLLEMIYTIFKTETPYQKDYQNDPKKEKQLT

SEQ ID NO: 420920 - protein, 411 aa, unidentified
MRRVIGIDIHRTFGEVVFWEDGRLRRAGRIDMTRTALEGFGKSLLTSDEVVIEATANSMGVSRVLEPFVARVIIANPLQVKAIAQAHVKTDKIDAGTLASLQAAGYLPQIWTPDASTERKRRSAARRYQVVRHRTRLKNEVHSILHAHLIPKCPHADLFNARGRAWLSAQPLPEDERAAIDRHVRELDRLAEDLALFDREIAQDAIDDPAVNRLMTITGVNLTVAAGIVAAIGDIGRFKSPQKLVSYFGLNPRVRQSGLGAAHHGRISKIGRSHARAMLVEAAWAAAKAPGPLHAFFVRIRARRGHQIAAVAVARKLTVLCWHLLAKGEDYQWARPALVANKTRAMQLQAGHPQQKGSRRGPAYAYNIKALRDREMMIAAQAERSYERFVAQWKPRRPKEARGRLSSPGHK

SEQ ID NO: 420921 - protein, 459 aa, unidentified
MRTIGLDLAVQTAHKAVVLDEGGHFCTPILTVHTRPSELSQLLAQARDGASSAEVQIVMEPTGMAWFPVAVYHARQAVPVYLVNSQEVADLRRYYKRHAKSDRIDARVLARLPRVNPDKLHRLTLPSATALACQRGCKQLDHLATQITAIKNRLQAIDRFAWTGLEEQVFADPFSPAARFFREHWYDPRQVVQVGANAIRQQWEARAVDADDGDAWVEPLLTLAQQVLTLYGTDGQFLDFGQLQAEVQRDQAWLTWLEQQHHTLRLRTVRPLYRAVHPSRNLETLKGVGQDSAAVYASFIGDPRRFSSTRLFRGWSGMVPSSAQSAENEAKGLHVTQAGPDLIKKYAYLDAEIARRYDPQIAAIYYDQMMHKGKHHKQAACACATHLLDRVLAVLRADQPYDVRDTDGTPLTGQQARAMIVERYSVPQEVRRRTGYPLGEAQSASAGRSTGRTADHVGE

SEQ ID NO: 420922 - protein, 351 aa, unidentified
MNKVTTLGIDLAKTVFQLHGVDLTGKVVWRREVRRAQLMKIVAQLEPCLIGIEACGGANYWARRFAEFGHQVKMMSPQFVKPYRKSDKNDRNDAEAICEAVTRPSMRFVAVKSVEQQDMLTMHRVREGLMKERVALINRIRGSLSEYGIVIAKDVSNLRRELPGILEDAENELTTAARQLFSELYADLGAREQRIRQLEHSIRALGSQHDVVRRLQTVPGIGYLSATALYGTVGDAKHYRNGRQQAAWMGLVPRQSSSGGKQRLLGITKRGDKYLRKLLVHGARSITTRAERTPRPPDRWLNELRERRGKPRSYVAQANKTARIAWAIMAKGEVYRAPTTAALEASAAVAA

SEQ ID NO: 420923 - protein, 360 aa, unidentified
MNATTVAVDLAKSVFQLAVADGSWKVIESHRLTRSQFERWFQNRDVSLVIMEACGSAHHWARWLNRLGIEVRLLPAAYIRAYVKRNKTDAADACALLEAARCSDIVPVRVKSLEQQALQGLHRTRSLWMSTRTSRINALRGFCREFGLAVPQGARTGVEAMSRALADPDSGIPLLIRRSMSLLIEEIRLLEVRVAQLERELSELAKQSPACTTLLSIPGVGLLTATAMVAATGGSVSHFKDARHFASWFGLTPREFSSGSTRTLGRISKRGDRYLRMLLTHGARSVLRAASVAREVGRSVDGLRTWAMAVQGRTNHNKAACALANKMARICYATLRDATPYGEPARLAKKIQRESFALAT

SEQ ID NO: 420924 - protein, 336 aa, unidentified
METVCAVVGIDVSKKKLDIALLVNGKTKAKVVDNSAEGYKLLLEWLSKAKVAKETLHVCMEATGIYYEPVALALHDAAMSVSVVNPACIKGFGHSENIRNKNDTADAGLIARYCAAMKPAPWVPPPLEQRQLRAWSMRVQALKDIRQQEENRLEANTFTGMSDVADHVKQHIAWLSAEIKKLEGDIDDHIDRHPGLKHDAELITSIPGIGGTTVARILGQLGDIRRFDSAKAFAAFLGVTPKQRSSGTSIKGRTMISRVGSMSMRAALYMPSLVACRHNPLLRRFAERLLATGMAKKAVIGAVMHKMTHLIYGVVRTGKPFDPNYLANGLAIQDGI

SEQ ID NO: 420925 - protein, 366 aa, unidentified
MKKISTVQVLGNEILQEQKQTIGVDLGDRWSFYCVLEEAGKIILEQKVATTPEAMKQTFAKIPRSLIALETGTHSPWASRLLTELGHEVLVAHAQKVELITKSNRKDDRHDARTLARLARIDPELLGPVRHRSAKAQIHLTVIRARAELVSARTALVNAARGLVKSYGQRLPKCGTQQVNRELAAGLSTELREVLEPLLQEIESLNERIKEYDERMEKIAQEVYPEVSLLKQVKGVGTQIALTYVLTIEDPYRFEKSREVGCFLGLKPGRRNSGNSEPQKKISKEGDRYLRTMMVQGAHYILGPFGEDSDLRRWGLKLAERGGKNAKKRAVVAVARKLAVLLHRLWVGGEVYEPLRNSQKAMRAVA

SEQ ID NO: 420926 - protein, 359 aa, unidentified
MQRKELSFKGQKIFIGIDVHKDSWRVAIAPEVGVVKGHSGRPSANDLLNFLKKHYPDGEYHAVYESGFSGFSTYYALQEVGIDCIVIHAADVPTTQYEETMKTDKVDAVKLVKSLKAGLLTGIYIHKRDDIDARAVVRLRKTIQKQLGGYKSRVKHLLHSNGVFFPERFSKPGSHWSKAFINWLKKEVVLLSSTRTSLDLLIAQVESIRQTLLLATRKVRELSRSERYSNDYELLTAIPGIGISVAMTLLTEIGDFRRFRNEREFASYLGLVPTSHSSGGKVSHGEKTFRGNKMLGPQIVEAAWISICRDRGLGCAYISYKKRMEPQEAIVRVARKLSNIIFSVLKTGRKYEPYQWNEI

SEQ ID NO: 420927 - protein, 316 aa, unidentified
MDVLGIDVSKADFHAYLIQDRQDAKKSFPNVPAGFRQVQKWLTNRRCTKLHACMEATGPYWEALATARYDAGIAVSVVNPSQTVFFARSQLRRTKTDAVDAQMTAQFCQQRRPDLWAPPPTEIRELRGLLRYREHLVGEAVRLEQMIAQIHVSRNLRKVHAEQLRALKKAIAMVGKQLQALVKAHSCLAKQIDALTVVSGVGTLTALSFIAKLPVDRPCDGKAAAAYVGLAPSERQSGASVHGKPRICKTGNASLRRDMYMPAMAAIRHNQILRAFAERLKARGKPAKVVLVAVMRKLIVLTFTILKQPSSEALAV

SEQ ID NO: 420928 - protein, 354 aa, unidentified
MMVLGADMHKRSHTIAAIAATTDELIEDTTIWVSDEGFLELLGWARALDDERVWALEDCRHVSGSFERFLIGHGERVVRVATKLMSDARRAGRERGKSDRIDALAVARAALREGVENLPCAQLAGIELDLRLLIDHRERLIRTRVALNNDVLWHLHDLWPELKLPVSALFSKKWSTKISRRLATAEQTARVRIARDELRRVRELTAATNGLETEIAELVGQAAPQLLDEPGFGPLTAATLLGEVAGIERFATEAKLARAAGVAPVPVSSGKTNRHRLDRGGNRQLNTTIHRITLTRARCHPETRDYIARKRAEGKTGLEAMRCLKRHLTPPHLAPPAAAPPQPSNTALTINFLT

SEQ ID NO: 420929 - protein, 457 aa, unidentified
MEKELTLEVVHPHAAGIDVGSRFHMVAVNQDKSQVREFGVYTKDHESMIAHLRMHGITTIAMESTGSYWQTLFKALQKAGFEVLLVGGNQTKNVKGRKTDVIDCLWIQKLHSVGMLSGSFLLSDVLQQLRVYYHHRIHIIEQLTKYSNKMQKALRLMNVRLDVVLAEITGVSGMAIIKAILAGSRDPAHLASLADIRVKKSREEIEAALQGSWRAELLYELKVSLQFYNIFRASLGECDHEIETILKEHQPSVPEGHTDDKDLVEKKKKKAVRKNVPSFDLSSIAYRYFNTDLFAIAGVSNSTVLCLLTTLGTDIKKFPTAKSFASWLRLTPNNKVSGGKVISSKSRGAKNEVAHALRHAANAIGNLKEHELCSFFKRVAFKKGRIAAITATARKLATIIWNMITKAQPYQRAKVEVNTQKQRLNKIRSLQHQVYRLNLTENEIKRLLSMASPSATS

SEQ ID NO: 420930 - protein, 319 aa, unidentified
MTNSLEQIKEFVGIDVSQDRLDVYLRPGGERAEFSRDRRGIARLVAWLASRERLLVVVEATGGLERMLTVALAQAALAVAVVNPRQIRDFARAAGLLAKTDRLDAYALALYGERLRPVPRPPRAAADQALSALVLRRRQLAQVVEAEHNRARRTEEPAVLASIEAHLDWLQTALAQLEGQIDARLEASPLWRERAALLASVPGVGKVTVATLLGLLPELGKLDRRAVAALVGVAPFARDSGLLKGRRTIWGGRVQVRAVLYMAALVAVRHNPALRAFYLRLLAAGKAKKLALTAAMRKLLVILNAMLRDRKPWRSPQPA

SEQ ID NO: 420931 - protein, 312 aa, unidentified
MDAGIIGIDVSKDRLDVAVRPDGEAFAVSRTGGGIDELIERLKSRSVKLVAIEATGGFETVVAAGLAGAGLPVVVVNPAQVRAFAQALGKRAKTDPIDAAVIAHFAEATNPQVRPLPDATTQLLAELVARRRQIVEMIAAESQRARHISAPRLKKSVARLRKALEKELAELDDDISDHVRGSPAWAEKEDLLASVPGIGPTIARTLIAELPELGSLDRRQIAALVGLAPWTRQSGKWRGKSFIGGGRSSVRRVLFMGALVASRFNPEISQFRDRLVAAGKPKLVAIIAAARKLLTILNAILRDRRPWQPKAA

SEQ ID NO: 420932 - protein, 354 aa, unidentified
MATPSKQNSFALASVGIDIGKDVLHLVGFNTDGKIVLRRKIRRSALVNEFEKLPSCIVGMEACLSAHFVSRTLRKLGHEPRIIPAIYVKPFIKGQKNDYNDAEAIAEAALRPNLKFVTEKTQDQLDLQALHRVRSRLVSRRTATINQIRAFLIEQGITVRTGAHALRNSLFAILENRIDEISPRMNDLIVGLNADWQELDERIETITGEIETISKSEKNCQRLMSVPGIGPIISTAMVAAIGTGDAFGRGRDFGARLGLVPRQYSTGGKTVLGRISKRGSKYLRTLFIQAAHVILMRPNNWQKFSFGPWLTEAATRLHRNRLATALANKLARIAWSVLANQKDFDTNRDEITAV

SEQ ID NO: 420933 - protein, 369 aa, unidentified
MIVIGTDTHKRTHTCGAVDALTAAARGELTAPARKASFGMLLRWARALDAERVWAIEDCRHVSGAFERFLVARGERIVRVAPKHMAGARRSSRERGKSDSIDAFSVARAALKEGIENLPRAHLDGAALDIRLLVDHREDLIAARTAEQQRLRWHLHDLWPELEIPAGALDTSKWLGIISRRLARAQQTTRVRVVCELGRQISARTSRIRELQAELAALVESYAPQLLAERGCGPLTAAKLIGEIAGADRFATDAKLARTGGAAPIPASSGNTSRHRLDRGGNRQLNCALHRLAVNKGKWDPDTAAYLARKQTEGKSRKEALRCLKRHLARRVWKLLQTPAPAAAAAATRPTTPPTITASAPTPMPCLMP

SEQ ID NO: 420934 - protein, 383 aa, unidentified
MNIHMPAGSRIIGLDLSKKTFVGCILSGEGLVKKSIFQGRMTQDEQGWNLIQRKIRQDDLVLMEAGTSTFSLARYLEAHSAAGKVVVLNPGQLRVIWMSQKKNDKSDATKIACIARDMAEEAWPTVSVPTAQEQAERSIITSYVFARKQETQLVNRLFALYNALGYPEIHRKAIRDDQAERRRLAGELLSGHPIAVQDAHMIMDQLDLVQLQIDAKLQSLRTICLDHPTQALAWLSIPGIGLINAATLTAYVGDGSRFSNAHQLLNYAGLTPKQDQSGTVDKHLGVSKKGNKAIRRNIVQGAWVVTMMKPTCPLTKYAYRKKQEGKIKQKVAVAVANKMLRTGFALLCSGELYRPMVESGYDKLEAKLQSYKLEALMKSTQQD

SEQ ID NO: 420935 - protein, 340 aa, unidentified
MNYVGVDLHKKVITACVMDANRKIVREAKLLPVEPHRIVAFFESLGEYQVVLEATSSYYWFVELLEPTAAEIVLANPAKMRVIAESTKKTDKLDARVLAEFLARDMIPRASMPTPRLRQHRALVRHRKYLRERATAVKCKIRHVLSDHNADRRDLFSAGCGKAYLKTLKLNPIDRFRLADLWSEWESIEKRLVKTTAKIKAFAKKAPRAEAEARALLKTAPGIGTVTAEAVLCELGDVRRFKNAKAVCAYAGLVPVVRQTGGKKAKDGRITKQGSGLLRWALVEASWRLVVASPQWSRTYQQIKKRNGAKRAIVAVARKLLCVLYAMLRDSQPYQSAAAA

SEQ ID NO: 420936 - protein, 351 aa, unidentified
MLIIGCDFHTRFQQIAMMDTTTGELVERRLEHGTGEAERFYATLAAPARVGIEATLATHWFEKMLTRYRHELWFGDAAEIRAAMVRKQKTDTRDARHILNLLMEDRFPRIWVPSAVERDVRHLVRHRHKLVRFRTSVMNQLQALAMGQGLCLGKKLWSTVGRQKLECLQLDPWASRRRRELLELLDQLDPSIEELDRAVISEAENRSAAVCLMQQAGVGPVTALAFVLTIGPVSRFANSKKLVSYLGLNPSEESTGGRQRLGAISKQGNTLMRCLLVEAAQTAARLDPELRRDYQRLKFRRGNSGVAKVAIARKLAVRLYWKLREAAQPNTAARMQGSPASPVVGESLSFS

SEQ ID NO: 420937 - protein, 352 aa, unidentified
MRHPKHQVTGEEDLFVGIDLHKDRWHVTIRTMDLELFSGSIPGTWEALQRVLARYHGHPLQAVYEAGYFGFRLHDRLVDRGISCIVTPPSLIPQEYGNRVKTDRRDSRKLAHLLAKGLLKRVWVPSEEELYHRQVVRRRRQLVRDRVRTQSRIKAELRFYGVLLEEPRGKWTQVYFENLRRVNFGNRWMQESFNRLLEQYEFLCAQIDKQTQLLRELSETALYQERVEILRSIPGIGVISAMELLLELQDVSRFRRAEQLAAYVGLTPSQYSSADKVRMGRITGIGKNTLRAILVEASWKLITKDQVMREKYDRIKIRSGGKRAIVAIARTLLLRMRRMLLDKQAYALQLAA

SEQ ID NO: 420938 - protein, 334 aa, unidentified
MNHYAGIDVSLECSSVCVVDASGKIICEDKVASEPEALISWFASLGVSLARVGLEAGPLSQWLFAAMRQAGLAVELLETRHVRDAFKAMPVKTDRKDARGIAQLMRLGWFRPVHCKSMAAQEMRAMLTARKLVQAKLHDVEMSLRGILRGFGLKVGKTTPRRFEGRIKELVAGHPSLEGVAAALLAVRAVLRREFDTLEKRVRSMAREDARAWLLTSVPGVGAIVALTFASAIDDPARFKSSKSVGAHFGMTPKKYQSGETDVSGRISKIGDGGEAANVILTRPVKGCASLKSWAMKLAKRAGMQKAKVALARKLTVIMHRMLADGTTFTNRPA

SEQ ID NO: 420939 - protein, 316 aa, unidentified
MAMRVSKSIVGVDVAKIELVTFQADLDLLLPIANEKSAIKRWLKTLPGATALAVEATNIYHIDLVEMAHESGFDVYIIDGFQLSNYRKSIGGRSKTDASDARLLARFLKNEGEDLRPWSPPPGVYGKLQSLLRRRAALIQAKTSLTQSWANDATLKSSFAAFVKAMERLDLLVQKKLKDVLREAGLLEQVARCLAVEGIGFLTATALVMAYTRGDFNRGDSYIAFLGMDLRVTDSGQKSGRRSLSKRGCSEVRRLLHNAAMSASRTAAWKGFYDHHRSRGKATTQVLVMLARKLARVAFALMKNQSEYQTKGRVMA

SEQ ID NO: 420940 - protein, 356 aa, unidentified
MPETNPAEVIIGVDTHKHTHAAVALTALGARLGTITVPASRRGYQELEAWAGSFGPVRAYGVEGSGSYGAGLSRFLQASGHAVIEVNRPNRQLRYQQGKSDPLDAEGAARAVLSGQADARAKPGTHAVEMIRHLKVARDTAVKSRTQAMITLKALIVSAPAALREQLEGLAGKMALIRHLAALRPGTLTSPTASAKAALRALAQRWLALDAEIKAHEAHLDALTAACTPTLRTAYGMSTGTAAEMLILVGDHPDRIRSEAAFAKLCGACPIPASSGKIIRHRLNRGGNRQANAALYRVVIVRMRSHPPTLAYVRRRMKEGKTKLEIIRCLKRFVAREIFGSLCGAKRPPKAPMPAS

SEQ ID NO: 420941 - protein, 343 aa, unidentified
MDYFAGLDVSVKETSVCIVDDAGRIVREVKVASEPEALLPVLMNPAYHFKRVGLEAGPLSQWLFSALAEAGLPVICVETRHMRAVLQARINKTDRNDARGIAQMMRAGLYRPVHVKTVRSQKLRMLLTHRKLLQSKAIAIENDLRGTLRNFGLKVGVVGKVRFEARIRELVEKLPDLAALVEPLLIVRRTLREQFCILHRRLLAIVRDDEVCRRLMTVPGVGPVVALTYRATVDVPARFRHSKSVGAVLGLTPSKYQSGEVNRTGAISRCGDEMMRMMLYEAAHIMLTRTNKWSWLKAWAMKIARRRGVKKAIVALARRLAVIMHRIWVDGTDFRWTREVAGA

SEQ ID NO: 420942 - protein, 317 aa, unidentified
MYVGIDVSKEHLDVATDDGAFSAQFANDEQGYGELVIRLQEVKPTLVILESTAQYQLEVSLMLATAQIPLAIVNPRQVRDYAKAMGILAKTDKLDAVTIARFGATVKPAAQTLPDAETLELEALLTRRRQLVGMIASEKNRLQAIFGPAKQGAAAQSVRDTLSYLTKQLKQLEKDLQKRLERSPVWKAKEDLLKSVPGIGKVTAMTLVIDLPELGKLNRKQIASLAGVAPFNCDSGKNQGKRRIRGGRATVRTALYMACLASLKHFSESTASRYERLKTQGKKSHGVAIVACMRKLLTILNAVVRDGKPWNPDLASA

SEQ ID NO: 420943 - protein, 347 aa, unidentified
MVYIGCDQHKQFCQLAVLNESGTLMEEKKFYHSDRHALQEYFSSLPPDSQMAIEASGFESWLADFAQELGIHVTLSHPLKTRAIAEAKIKTDKVDARTLAKLLQTDFLPPAYLATPEIRRRRYFLRFRLCLNRYRSSLKNRVHSLLHHLGIQAPAVTDLFGVCGRQFLDSLELDEGYREALHGYLALLDMTEARVNCLKKRLAAYVKESPEAQLLQTIPGIGVLLAQVILAEIGTLDRFSSPGKLCSYAGLVPSLHQSGQTLYHGPCPKQGNKFLRWAMVEAAQTAVRKDPLLKAFYDRIKRKKGSQKAIVAAARKMSVIVYHVLSKQEPYRYNAFPREARCECLSH

SEQ ID NO: 420944 - protein, 414 aa, unidentified
MEIVHTHCAGLDVHKKTVVAAIIVPGPKPSGYQETRTFGTMTADLLTLSDWLLAHGVTCVAMESTGEYWKPVFNMLESDFQVLLVNAAHIKAVPGRKTDVNDAEWIADLLKHGLLKASFVPPLGQRELRDLTRHRSNFVRERVNLANRVQKVLESANIKLASVATDVLGVSGRAMLEALIAGQASPAEMAELAKGRLREKREPLAKALEGRVQVHHRFVLTELLCQIDNLDETIARFDAQIEAYCAPYEEAVVLLDTIPGVARQTAEIMVAEIGTDMSRFPTADHLAAWAGVAPGNHESAGKRRSGQTRKGNKPLGVALNQAAHAASRTKHTYLSAQYRRLAGRRGKKKAIVAVAHSIVVIAYHLMQRNEPYRELGGDYFDKQRPDTTAKRLVKRLECLGYAVTLQQHPITGAA

SEQ ID NO: 420945 - protein, 336 aa, unidentified
MQIVTCGVDIAKNVFQFYGTDEQGNIIQRRLKRNQLLKFFNQLDPCLVGMEACGGAHHWARELTKQGHAVKLIAPQKVKPYVQGNKTDANDAQGIHEALLRPAMRFVSVKTAEQQDILMLHRIRAGAIKSRTALVNQIRGLLAEYGVVLPKRIENLRRQLLDVVTDQEKVSPLAQEQFYGLYEELLRLDDRIKRQDAVIKRVCQSNPDCQRLLSIPGIGPLTATALVASAGDVSAFRNGREFSAWLGIVPRQSSSGDRTLLQGISKRGDSYLRTLLVHGARAVLQHAEGKADRSSRWLKELESRRGYNKACVAQANKTARIAWALLRHNTTYQVAA

SEQ ID NO: 420946 - protein, 393 aa, unidentified
MHSVGIDIGKRQHVAAICRAGQRTADKPVLRFSADRAGLADLERWLAGHGPIDRVVMESSGHYWIPLAAALHRAAIPVAIVNPVSAKAFGKRRLQRVKSDPADARTLAALGMADQPRTREPLAGAELREAARFAMHLVEEQSRVDNKIFRLIELGFPELEQAYDDPTCISALALLRLAPTAQAVARKRVATLADANRAPGHRAVGTKKAERISALAKDTIAPPELAPQIGFAMELLIAQHDLLEQHIAQAEERVAGLLDGELARRLQTIPGVGPAICATLIAEIGDIHRFSEFDKLVAYVGVHPAEKSSGQKGGPETSWQMAKTGNAYLRAALYRMSVVGLQHNPTIKAHYARKRAQGKSKMNALGHCMKKSLAIVWGIWRGDHDFQPEPPIA

SEQ ID NO: 420947 - protein, 359 aa, unidentified
MNGNKERPQVTAGLDLGDKYSYLCLLDTDGGEVIEEGRVRTTPEALRRRFASEGPMRVAIEAGTHSPWVSRLLEECGHEVLVANARKLRLIYANKQKTDEIDAENLARLARLDPKLLYPLKHRGEESQAHLALIRSREALIGCRTQLVNHVRGAVKSFGGRLPKCPARSFHNKAAEHIPEALWPALGPILEQIASLTQRIRDYDRKLEEISKESYPETELLRQVEGIGPLTALTFVLTLEDPYRFEKSRSVGAYLGLVPATSQSGDRDPQKRISKEGDEMLRRLLVGSAHYILGPFGSDSDLRRHGQKIASRGGKNAKKRAVVAVARKLSVLLHSLWVSGEVYDPLRNTHRRERREEAA

SEQ ID NO: 420948 - protein, 406 aa, unidentified
MSAVTIGIDPHKGSHTAVAVDDQEMVLGQIRVLSNAAQTDQLLAWAAAWPERRWAVEGAAGLGHLLSQQLVNAGQNVFDVQPKLAAKVRLLESGSTNKNDPNDARSVAVAALRGKGVAPVCREDHAEVMKIWIRRRRELQRTDNRVANRLHALLCELVPGGFSGPISPAKAEKVLAQADTAGAVNAARIELAQEMIEDLRHLRQQRREVIKRLGQIVTASGTSTTEIVGVGPVVAAMVVSITGDVGRFKSIGHFAAYNATAPVEVSSGPQKIYRLSLRGNRQLNHAIHIAAVSQISHHNNPGRIYYDRKLAEGMTPKKALRALKRRISDALYRAMIADAAKQRAAHAAGPGGQSGNGSNSSAASSHPERQLFGQATPGPAKSLRPSKTTKHPQTPLTPKTRAKNAS

SEQ ID NO: 420949 - protein, 430 aa, unidentified
MEAKVLCVGIDVCSRRLEVAYCDGAGVSRGRQQSFSNTAAGVSALCDAVVATAKGLGSRLRVIAGLESTSYFHCLAAKALSQERRHRVEVHVLNPRKVKWFRHLELKDTKTDRVDAELIARFLAKIRPQPHAVLPPEWVQLQEATRTRRRCMEERSRLKNRLHRLLRSHWLGWREAMGKHFGGRTLVPLTACPSPHDARRRGASRIAQLRNTDGKRLGGVFADRFLAMAKTASSDQLPLMVRISIQDTADRILQLNTLLSRLDAAIAEELERVFADTVLLSIPGLGPVSIASILAEVGDIRRFPSKEVFIGYCGLYPIAWESGDTKLRFCMTRKGNRMLKLTLLLASGSARQANPALRSFYQRLRQKGKSARAAGGAVARKLAEIVWVTLTYNQPWSEEIAIRGIARGVEMAERHKGVSSVTQKRPVPVT

SEQ ID NO: 420950 - protein, 343 aa, unidentified
MDHYVGIDVSLDQSSVCVVDATGRIVREAKVASEPEALIGFLGGLDLRLARIGLEAGPLSQWLQAALVKAGFEAVLLETRHVKAALSAMIVKTDRKDARGIAQLLRMGWFRPVHCKSAPAQEVRALLAARKQLQAKMRDVELSLRGLLRGFGLKVGEISKGQFAARVRTLVAGHTMLERIAEAMLQAREALRVEFGKLHRAMLAIVRGDEVCRRLMTVPGVGALVAVTFTSGVDAPERFARSKGVGAHFGLTPRKYQSGETDVTGAVSRVGDAMVRTALYEAAHILLTRAVRFSALKRWALEVAKRRGMKRAKVALARKLAVVLHRMWVDGTTFRWGREAAAA

SEQ ID NO: 420951 - protein, 414 aa, unidentified
MEKQWNIVCGADIHKKFLIATILSRDGTKITKRFGMALNDLLNFKNWVIENGCEQVAVESTGTYWVPIHTVLEGSVGFIVGNAYKIKHTPGNKNDLADADWIAELCLNGMIEPSRIFPKADRDIRRLTRIREGYVNDMTREKNRIHHALDSCGIKLSSVLSDIFGKAGQSILNGLLEGRTIDDILKSINLKRIKATAEEIREAIKSSLDFTQILLIRGSLEQMEAIQKRIDEIRKEIKSRIAYRKDDLKIAMSIPGVGFTSASTLLAEIGDITDFKKPEQLAAWAGLVPSVYQSAGKLITGSITKHGSRHIRWILVQVARVIARGRNSKLKRFFLRVKSKKGSNVAVVALARKVLCILHHLLTNREMYQEEGINKKVKIDVGKEFPQQEMGLEEMITYLVRAGYEVRKGLTGGG

SEQ ID NO: 420952 - protein, 445 aa, unidentified
MTFRTIGIDLAIRGDHLAQIYDDGRPNGRAIRFRHDQPSLAAFVQTAVMGLRADDHIQAIMEPTGMSWFPVAHHLADAGVTVARVKGKRVKALRRYLSEHAKTDMADAQILAAIPSFGGPRLDPVHIPDPQSHALQRLTKQRSRFQNEIADARRRLLDLIRWASPRLEAVLPDLGTRLSLALLQKWFHPSDVLKARRTTLAKYVGAHAGGNHPRSGPFVETLITGLREAAQYAQNLHGTHIDFSELQFEIATEIENVLKKIQIVGNLEQHIADLYKHLDPQALLLSIPGVGRHLAPTLIGILQNIERFHSEKHLRGFCGLFPRRADSGGVERAGQTLTQGGNNRIKHALYLAADTVRKTDPELAELYWRLMTAKGHHHKQALCAVANRIVNRIFSVLKRGKPYEVRDREGNGITMCEAKAIILERYTVGENIRAGRRSNRIEKNS

SEQ ID NO: 420953 - protein, 358 aa, unidentified
MRAKNKELDFRNQIIFIGIDVHKKSWTITINISGQQIKTFSMNPNPEELSRYLKKNYPGGIYQSVYEAGFCGYWIDRQLQALGIKNIIVNPADVPTSNKEKTRKTDSIDSRKLARELSGENLCGIYIPTEDDEAERVLNRLRMQLTKDQTRVKNRIKSLLNYLGVHLPENIELKHWSGGFISHLDKMEFKHEQIKQTLEQLLKQLSELRKQLTEVLKLLRKSVKQNERKQKIVSHLLTIPGVGFITAVTLYTEIMDINRFKRFDEFSSYVGLAPSTHSSGEKERVIGISQRQNVHIRNLLIESAWIAVRKDPAITMVFGKLSKRMKKQEAIIRIAKKLLSRIMHVWKQEEDYVLAVVE

SEQ ID NO: 420954 - protein, 278 aa, unidentified
MDPTTTAARLFAGVDVSKDRLDVCLRWSEPESHEREEAFFVAYEDSGIDALLSRLLQERTVLVILEATGGFERTVVGALAAAGLPVVVLNPRQVRDFARATGRLAKTDRIDAAILARFAEAVRPAPKPLLDGEIRALQAIVARRRQLLGMIAAENNRLSSAPKPVAKRIKAHLRWLEKELSRTERDLEAAIENSPALGENEALLRSAPGVGPVLARTLLAGVPELGTLTHKRLAALVGVAPLNRDSGTLRGRRSVWGGRADVRAALYMGDLVAPAATR

SEQ ID NO: 420955 - protein, 347 aa, unidentified
MRFDTTQHQFYCGIDLHARTMYLCILNQEGEVLLHRNMKAAPEPFLQAIAPYREDMVVCVECMFTWYWLADLCAQEGSPFVLGHALYMKAIHGGKAQNDKIDAHKIAVLLRGGMIPQASVYPAERRATRDLLRRRMSLTRNRAELLTHVQQTNCQYNLPDIGKKIAYKANRVGVAERFPAPAVQKSIEVDLTLIDYYDQLLRDLELAIVTTAKQHDANTLYLLQTVPGIGKILSLVLLYEIHDITRFPRVQDFASYCRLVKCAKESAGKRYGTSGTKIGNAYLKWAFSEAAVLFLRNNPAGQKSLARLERKHGKGKALTVLAHKLARAVYYMLKRGTAFDMDQFLRG

SEQ ID NO: 420956 - protein, 428 aa, unidentified
MGATLMQVCISVEDREHGSNRSFGTDTQSLRDIVNWLLGHGITHVAMEATGVYWIPLFNMLVKNGIEAVLLNAADVKNYTARKTDVNDAAWLMTLMSYDQVKPSFQIDELSRALRNCTRHRMSLVSTCSDCIRRMQKTMELMNIKLTEVISDIAGPTGIRIIEAILAGNTSPRDLAALASDRCKSSKEDIAGALEGTWEDELIFILGQHYRQYLLYREQTMQLDSVIEGKLKLLVERILKMNDGEVRTVIRSKKGTPHMKNRISFDIEALSVQIWGVNLMRIEGVSGITMLSLMGELGCNFVGSFKDAAHFCSWCNLSPCHKITGGKIISSKMKKRVNPVGLTLRNCAQTLANSKSPLGDYYRRMRSKGGGKYAVCATAHKIAAIIYTMVRNQQEYDPSKVSVNDRQWLEKRIKHHEKLLKKLKSMAS

SEQ ID NO: 420957 - protein, 411 aa, unidentified
MRVIGLDIHRAFAEAVALEDGRLKRLGRVSMRRELLEKFAAALAKDDVVVVEATGNAAAVAAVIGPHVKRVVIANPKQVRIIAHAKIKTDAIDAGVLAQLYASGFLPEVWIADEETQALRRQVTRRNHVRQRSRLKNIIQSILHAHLIPACPHQDLCGRKGRAWLAAQKAPDDERLAIDRHLREFDRLGEDLKVIERDLARSALADESIKQLMTIPGIHMIVALAIKAAIGEAKRFARPQKLVSYLGLNPSVRQSGPGPAYHGRITKQGRGHARGMLVEAAWAAARTPGPLRAFFLRVRARRGQHVAAVATARKLAILIWHLLTKNESYLLARPALHARKLRDLELKAGHKPARGQKGAAHAYNIRSYREQERRFVEQAEAAYTRFVAGWNPRGPKPTPKARTGAANEERR

SEQ ID NO: 420958 - protein, 316 aa, unidentified
MNNGVFVGVDVSKGTLDVLVRPTGEYFQESNDADGIARLRQRLLELRPTLVVMEATGGYERELSIALVLGGMPVAVVNPRQVRDFAKSMNRFGKTDRVDAGVIAMFGEKLNPEARGVPEKEVRELDALVTRRQQLIDMRTAEKNRAGVAPASQKPRIKDHIRYLDAQIDAVEVELERAIQESRVWQARNELLTSVPAIGPVTASTLIARVPELGRLTSKEIAALIGVAPFAVDSGKYKGQRKIWGGRADVRSTLYMATISAIRCNPVIRAHYNQLKGRGKLSKVAIVACMRKLLIIVNAMVRTNQAWSLTPAAQTA

SEQ ID NO: 420959 - protein, 346 aa, unidentified
MDTGYAGQQVVGLDLHRRRTVMVRMTEAGERLEAVRFVSDPAVLAEQIAKAGPAPRVVVEATYAWYWVADVLDAAGAQLHLAHPLGVKGFAYRRVKNDFRDAADLADLLRMGRLPQAWIAPPPVRAQRELVRHRHKLRQLCSGIKAGAHAVGAKNALFIPRSDMFGLDGRRRLSALNLPEVFRLRLDSQLRLIDTIEQEIDELDKRIRVMFADDLGYRALLRLPGVGPVFAAILRAEIGEITRFPSPGQLSSWAGLTPRHRESDTTIHRGRITKQGSRLVRWACVEAVQRARRGTPMRTRYDQIVARRGGNAKHLAKVAAARELCECVFYALRDGHVRRLGEHGAA

SEQ ID NO: 420960 - protein, 387 aa, unidentified
MTAVVIGVDPAKRSNTIEVMDSRETVLVTARFDNTNADYRKMRTLVKRWPDRVWAVEGATGVGLHLAQRLISDGERVVDVPSKLSTRVRAIDSGHGRKNDPTDAHAVAVVGLRTKGLREVVADDQMVALRLLSERRRDLVRSRTQAVNRLHQVLMELIPAGAQRHLTAAKAKELVVTVRPRDVAGKARRQLAVDLIDDVTVFDRKIKTVDTRIQEAVAASGTHLTDIVGVGPVTAATILGEVGDIARFRTPDQFASYTGTAPLEVSSGEVERHRLSRAGNRRLNSALHVVALSNKRYDPRGKAYYERKLTAGKGSKGSMRCLKRRLADVVFRVLVQDRALVNPGGQMGATLTASAVDQIPKANTSDKPQPGFGTEATPTRRLTEAAS

SEQ ID NO: 420961 - protein, 339 aa, unidentified
MEFKRIAIDTSKHVFTLHGVDQEERPALRCELRRSQVEAFLAKQAPTEVVLEACGGSHHWGRVLSRLGHQVRLIPPQYVKPFVKRGKNDRNDAEAISEAAARPSMRSVPVKTAEQQAESIIVKHREMLVAQRTQAINALRGHAAEFGVVAAKGGRNIVALLATLAADVAIPAAAQALFVQIGAHITDLDTKIEALDRQLTERHKANPVSRLLAEIPGIGPITAITMTLMVDAGNFESGRHFAAWLGLTPREHSTGGKHRLGKISKAGNERLRQLLVVGAMAVIRFAKPGSKSASAWLLHLLERRPRKVAAVALANKMARIIWAMMARGEAYRRQPATPV

SEQ ID NO: 420962 - protein, 361 aa, unidentified
MSRRETAITTIAHPEPIRVTVGVDTHGEVHVACAINQLGRHLAITRVATTPRGYRALLAWARSLGEVDAWGVEGTGCYGAGLVRVLAAQGQMVWEVNRPDRQARRQHGKSDPVDAEAAARAVQAGQATAIPKAGDHLVEMVRGLRVARTTAAKARTQAANALRALVVTAPAELREQLRDLPAAQLASTAARLRPGPIVTTTAATKLALRLLGERYQALDGELARVDAELDRLTTQAAPELRQLFGVGPEIAGALLVAAGDNPLRLRSEAAFSMLCGASPIPASSGKTVRHRLNRGGNRQANTALYRIVVVRLRWHQPTRDYLARRTTQGLSKKEIIRCLKRYIAREVFAALQAPTLPAQAA

SEQ ID NO: 420963 - protein, 346 aa, unidentified
MKVKTIGIDLAKETFGLHGVDGRGRVVVHKRITRKHLVGFLVKVEPCLVGMEACGSAHYWGREIEKLGHTVRLMSPQFVVPYRKGNKNDPNDAAAICEAVTRPSMRFVPIKCEEQQDLQALHRVREQLIKNRTALANQIRGLLRERGIVVAQAIARLRAALPVILEDQSNRLSALMRELLGEMADRLRMLDDHLRQYDRHIERLCQQDERCRRLVKVEGVGPLVATAVVAAVGNARQFKNGRELSAWLGLVPREYSSGNRTVMLGISKRGNRYLRTLLIHGARAAARVAERKRDARSIWLSRLKLRGGPNVAAVALANKNARVMWALLARGDSYRVRTSMHSAAAA

SEQ ID NO: 420964 - protein, 385 aa, unidentified
MDNCTTYIAMDTHKKQHAVAVLDRKTGEIRQFSVQNTIKDISKMVKRIAREAPATLKFCYEAGVCGFTLQRRIEKMGHQCIVIAPSLVPVKPGDRIKTDRRDAKKLLVHFAAGQLTEVYPPNAEQEAARDLTRVRYSAMVNLKRSRHQLQKFLTRNGYIYNTGKNWTQKHQQWLRALEFDQPDLREVFELYYVEWQHCIQRLDTLDNQLEQLAQRPEYRQAVGLLRCFKGIDTLTAITLITEIFEFGRFESPKALMSYLGLTPSQYSSGERRQLGAITKTGNSLVRRLLAESSWHSRHRPGIGKELKRRRKGQPQWAIDIADRAMLRLHQRFWRLTRQGKPQNKAVIAVAREFAGFIWAMMRQHQSQDKSQRVSRHTGSAQVKTA

SEQ ID NO: 420965 - protein, 413 aa, unidentified
MMNSLFAGIDVSARSNVVYLMKSDGSKHSSFSVQNNRPGAIMLSDKVCSVMANERFDNVVLGLESTSVYGDNLVTFLREDHALSKFNKKIHILNAKQVNKFKGAYSDLPKNDYVDAFVIADNLRFGRITSEVYMDDYRYKALQNLTRARYFAVQNLIKEKQRFLNFLFLKFSELAAPGEDKVFSDTFGATSLAVIEEFDDIEEIAYMPLDKLIDIIREKGKNRFPNPEATAKALQAAARGSYRLPKTINDSVNQVLSVQISSVRALETQIKAFDRAVGEQIKLIPNTIESIPGIGPVFSAGIIAEIGDISRFDNQASVAKYAGLAWSQYQSGSFEAENTRLIKSGNRYLRYYLIEAADSVRKRNSEYADFYSLKYHEVNKYQHKRALVLTARKLVRLVYALLKTNRLYMPPGK

SEQ ID NO: 420966 - protein, 351 aa, unidentified
MACKTDATVARTIGIDTGKNTLHMIGLDERGAIVLREKVSRGRIAARLANVPQCLIGIEAGMATHYVARELLALGHEVKQVPPAYAKPFRQGHKNDFRDAYAVAEAVQRPSTRCVPVKTEDQLDLQALHRVRSRLISERTAVINQIRSFLLERGIPVRQGLRFLRRQLPDILATRTDVLSPRMARIIEDLIGDWSRLDERIESVTDEIEALARSDEGCRRLMTVPGIGPIIASAMVAAIGNGAAFAKGRDFAAWLGLVPKQMSTGDRTILGRITKRGNRYLRTLFMQGARVILLRPTNWAKHSFGLWLNASARRLHHNVLATALANKLARIAWTVLAQGRSYEARVKPAAV

SEQ ID NO: 420967 - protein, 318 aa, unidentified
METAAVFVGIDVAQARLDIAVRPSGEQWTSPHDEAGIAVLVTRLQALGPTLGVLEATGGRELALAGALAAAQVPTAIVNPRQVRDFAKAIGQLAKTDALDAQVLARFAEALRPEPRALPDAQAQELAAVLTRRRQVVAMLTAERQRLSTLLPAVRPRVEAHGRWLRQELRALDAELQERIRPSPLWCEQAALLRTVPGVGPVLALTLLAHLPELGTLDRKPLAALVGLAPRPADSGTRRGRRVIWGGRAQVRATLYMGTLVAVQHNPVLRRFYERLLAAGTPKKLALVACMHKLLLILNAVLRQRTPWQPPASPAQSS

SEQ ID NO: 420968 - protein, 417 aa, unidentified
MEVLYPRCAGLDVHQANVVACMRLAQGARAAHEVRTFETTTKGLLELGDWLRESDCTHVAMESTGVYWKPVWHVLEEEFELVLANATHIRNVPGRKTDVNDAMWIADLLAHGLIRGSFVPPAAVQELRDLTRTRKQLVREVARHVQRIQKTLEDANIKIAGVISDILGASGRAFLEALIAGETDPEKLADLARGRLRASRAQVVEALRGRVHDHHRFMLKLHLGQVNALQGAIGQIEARLGERLEPFREDMKLLVTIPGIRDTAAQVMASEMGMDMDRFPTADSLVSWAGMCPRSDESAGKRRSTRIRKGAPWLKTTLIQAAWAAVRTKDSYLRALFLRLKARRGAMKAIVAVAASMLRSAYHMLRRRVPYQDLGAAHFDARNRTRAASRLLKRLKELGIEVLQTRVVEPVPVAVSF

SEQ ID NO: 420969 - protein, 315 aa, unidentified
MSTPCFVGLDVAKAHLDLAVLPTGEQWQVANTPDAFPALVTRLQALAPTLVVLEATGGYETAVLSALAVAGLPVVAVNPRQVRDFAKALGILAKTDQLDAGVLAQFADRVRPPVRPLPDEATTELAALLTRRRQLLDMLTAERHRLAQARPAVRRNVQQHIRWLEQRVRDLDDDVTTRIHQTPVWRAKEDLLRSVPGVGPVLARTLLADLPELGRLSRRALAALVGVAPFNRDSGRLRGRRTIWGGRAKVRAALYMAALVAARRNPLIRAFYHRLLAAGKPKKLALTACMHKLLTILNAMVRANTAWRHTVAQTT

SEQ ID NO: 420970 - protein, 406 aa, unidentified
MSMSERVCGVDVHRDLLVATILNESSKETKRFVNDANDINNLKEWLKTHECRQAVMESTSIYWVPLYLALEDAGFDVMLANAHQVKGIPGRKTDQSSSEWLAHLLRGGQVKPSYVPEKRVRELRELTRLRVKLVENRTAFKNRCQKVLNRVNIRLGSRLSDVFGKAGREILEGLMDGKTVDAILERTENRWLRKRADEIKTVARGALSESDIFILKECTEMVAHLSEKILRVEARIELLVDGQSVEIVSSVPGVGKRSAAAIVAEIGDAKRFSDGKKIASWTGLAPSVYQSAGTFVTGAITKMGSKWLRYVMVEVAHVAVRVRDSRLRAFYLRVKARKGEKTAIVAVARKMLTIIWHLLVKGEKYVEEGFGKTVRTRRAVFGGHVSLEEMAAVLRGAGYVVSGPSG

SEQ ID NO: 420971 - protein, 475 aa, unidentified
MNVKGTKKKNQVVTANIFEQQELLKKAEVIKENLTASTWRELETNGKFDKNEKLSFISDDMLILGCDVGSETHYMRAIDTRGRELSKSVYSFNNDYEGFQSAKEWAVKIAAEHNKSQIVLGLEPTGHYWFCLATWMISNGISVVQVNPYAVKQTKEVEDNSQLKDDRKDPKLIANLVKDGNFGMPYLPEKLYGELRRLSMFRDQLNEDRIRSINRMHREMKIYFPEYKDALGKVDGAFSLELLKQAPFPDDLVALGEDGIRKIWHDAKLRGRGYSRAGEILQYAKASVGIKDGATAGKTAVKWFVQKILELDAELAVIENQINQKCQEIPHAVNILEISGIGENTLSGILAEMGDISRFDDVKEIQKLSGLGLVACSSGKHKGETKISHRGRKRLRYWLFQAAKSAVAHAEEFKELHMYYTTRADNPLKKMQSLIVIACKLLRIIYTILKNGTVYDPKKMLMDIRRPEKKEAIAA

SEQ ID NO: 420972 - protein, 338 aa, unidentified
MYYTGIDLHKFTSFLTTVDSSGTIVKQDNLKNVAHNFVQYFKSIPGEHQTTVESTMTWYWLNDLLTSLKIPLVLAHAKYVKAIAYAKVKTDKVDSHTLAQLLRMNFIPVAYKISNDKRTLRDALRARLKIVQRHTSVTNSMHLLLAKYNYDSPTQLTGIPEFQYEQLSEVEALLNEQMLDLEKQLYPFLIPNDDIQRLLWIPGIGKMNAFTILLEVDDISRFPDIKNFFSYCRLVPSARNSGGKSKQRSSKDGNKYLKVAFSDAAVHAVQYYPVIRKYNSSLARKKNKQIAKTIIAKEIASIVYYVLKYKTNYNNIFKGKELEHTKSLQWPRITSPYA

SEQ ID NO: 420973 - protein, 353 aa, unidentified
MITIGVDAHKRIHVALALDEAGREIGEWRGPNSQAGWRDLLQWARGFSGERHWGIEGAWGYGRCLAQHLVERGEAVYEINPRWTAAGRQRARKPGKTDRLDARAVALFVRQEAPLLPVVQLEDDSAILELLSTERNQVLAEIVRLRNQIHALLAHIDPEYQSRLPALKSRSGLAVLEAYDAPGHHPVQLERVAGVRRLARRLALAVAQLDELTERIRAGAQTRFSPLTRLCGVNLLTAGMLAGALGPGRRFANDAQLAAYAGVAPLEASSAGLVRHRLNRGGNRRLNAIVHRIALTQAHHSPEARAYLERRASEGKSRREAIRALKRFIVRAIWRLWLECEPASAALSIATAA

SEQ ID NO: 420974 - protein, 319 aa, unidentified
MAQIATIVGLDVAKDKIDACIRSASAERTFANSAEGHRELLSWLCEHSVGRAVMEATGGYEQSWAKLLDKAGVAVAIVDPKRVRHFAKSAGCLAKNDPIDARMIAWFGETFTELPGKPRDEARQALEQLVTARLGLVDLEKRIGNWDEHDQPAEVGKAYRAVLKAIATQVAKLEAVIAARLEHTAELAERAAIIRSTPGLADTATAGLVAFMPELGHVDNQAAAALLGVAPYDDDSGDRRGQRHIKGGRHKLRKLLYMPIVGAATQHNPVLKAYYERLLARGKLKKVALVACMRKLITILNTMLRRGEKWDPAKQAALA

SEQ ID NO: 420975 - protein, 347 aa, unidentified
MKHYAGIDVSLNSSSVCVVDESGKIVREVKVASEPVALIHCIQSFGVRVERIGLEAGPLSQWLYGALRECELPVELLETRHVKAALSAMPVKTDRNDARGLAQLMRLGWFRPVHCKSMAAQEVRALLTARKLVQSKLYDIEMSLRGILRGFGLKVGPTTSRSFAARINHLASGHPSLKMVAEALLSTHAAALCAFKNLEKNVRQISRADTRVRLLMSTPGVGPVVALTYVSAIDDPKRFTSSKPVGAHFGLTPKKYQSGETDINGRISKVGDSSVRAVLYEAAHIILTRPIHGGALKSWAMRLAKRAGMKKAKVALARKLAVVLHRMWVSASTFDFEKANGCTRAAA

SEQ ID NO: 420976 - protein, 349 aa, unidentified
MNNIITIGMDLGDKFHIAVVFDSDGKELKIGKVTNTKISIGKFFKPYKSAQVAIEASTHSPWISRLLNEMGLTVYVGNPRKLRCIWDSIDKSDAKDARMLGMVCRLEPRLLHPIHHRSSQAQADLTTIKSRDMLVKSRTQLINHVRGIVKANGDRLPKCSATSFANRCGAHISKKLWSAMAPLFEIITQLNNQIKELEKEIEQLSIKKYPETKYLRQVPGVGPITALSYVLYIEDPARFTKSRQVGPFLGLTPRRDQSGDVDKQLSITKAGNKYLRHLLVGCAQYIMGPFAPESSLRLHGLAIAARGGKNAKKRAAVAVARKLAVLLHRLWITEKEYQPFYSIHNKQAA

SEQ ID NO: 420977 - protein, 328 aa, unidentified
MAKGITICAGIDTGKYKLDIALEGASEQLQVDNTPADHNVLADWLRRHRVKRVGIEASGGYEQPVVAALRRKRFVVVVFQPAQVRAYAKFRLQRAKNDKIDAALIAACTAAVKTIHAPPDPRLVPFAEQLTMIDQIGEDIARLKNRLETCRDPRIRQTWSEEITRLTKCRNSELKALVAAIRQHRDLAERLALIESVDGIGLPTAVATVVRLPEIGRITREQAAALAGLAPYDDDSGEYVGIRHIAGGRQRLREALYSAALPASMRWNPQLIALYRRLIAAGKEHKRALIACARKLLIFANTVVARGTPWGRTAPALATTSHAQRAVA

SEQ ID NO: 420978 - protein, 387 aa, unidentified
MPLAADLPAQTQPVPRPAQVLYVSLELSPSKWLVTSLLSGTGRMSKHLVIGGDGNALLRLLAALRTRAEQRAGAPVVIVAIQEAGLDGFSVHRLLEANSVESWVVDPASVAVPRRMRRAKSDAIDGETLLRTLLAFRRGEPRVCSMVHPPSVEEEDRRRITRERRTLLRERIEHTNRIKGLLMGQGVTGYDPLGKDRWARLESLETRDGHALPPRLKAEIGREIERLELLARQIRQVEAERDALAATVPEVAASPAALLLRLKGVGPETATLLWLEGLFRTFANRRQLAAYAGLAPTPWLSGRIRREQGISKAGNPRLRTAMIELAWLWLRHQPESALSRWFGERVRAGGGRNRRTTIVALARKLLVALWRYLVHGQVPDGAVLKPS

SEQ ID NO: 420979 - protein, 343 aa, unidentified
MQIVRVGLDLAKYVFEVHGVDGRGKVVLRKTLRRDAVSSFFANLPSCLIGMEASNGAHYWARVLSGLGHEVRLISPQFVTPYVKSNKNDRNDAEAICEAVGRPTMRFVPAKSVDQLAVQAVHRIRSRLVSGRTRLANQIRGVLAEHGVIVARNIAKLRQNLADIVGNRGNGLSDLVRALVGELQQELADLDRRITTYDRRIRELYRGSEVCQRLGQIEGIGPLSATALVAAVGDRQGFKNGRQFAAWLGLVPKQRSSGGRDRLFGISKRGDRYLRTLLIHGARAALGGAGGKQDPRSRWLGKLRQRRHPNIAAVALANKNARIAWALLSTGQAYDPGLTVGSA

SEQ ID NO: 420980 - protein, 338 aa, unidentified
MNYMGIDHHMQYSHITLLDEKGEKLKSGRVANFRSELENFLSGIEEVKAVVEAGRSSYTMVDVLDSMGIDVTIAHPKEVKAIAKAKIKTDKRDSKILAHLLRTDLIPEVYKRSRENRSYQRTLRQRVFYVGSMTRVKNRIKALLSQQSEDIRGEISRVKNIFGREGLAVLKGLDLPEGEKKLINALLITFRHMEERIKESSALVEELYEKLPFARLIHTVPGFGKFLSVLVAVEVADVNRFEDLGKFHSYAGVIPSTHSSGGRTYHGKIVKEGNRGLRWAAVEAVWPAIRADFDLRCFYERLKKRKGANSAKVATARRLLTIIYRMLKENRPYIPYKR

SEQ ID NO: 420981 - protein, 421 aa, unidentified
MKNTAARKLKQVPKGYLIVGVDPHKKKHAAVAITQDFTIRDRFKFDNTREGLEFLLRRVRAEMLKYDCRGVMFAIETGGHYWRNVAYYLDEKGIPFRFINQYTLKRRREGKDLNRRKNDYRDSEVAAQLLCTGEFVESTIPQGVYAELRTAHNAYRRLVKERTRIINLVKGLLDGLFPEFTQVFKDPCGLTALSVLSIGSIPGVIAGMTGEEFVATIEAKHRGRLMRKKLMALHYAARSSIGIAAGAKSLSSEISFLVEKHELIRGHICIIERTLVKLVDETEEGKYLLSIRGLNYIAVAGLLAELGCFKSYRSAKQMIKMAGSNPTESESAGKKRSRTPMSKQGRPVLRYCAWTAVIPMLRFNSDFRAWAKQRRERPAHANPLGGREIVGAALNRLLRLSFALVKNQTYYRSPQLVQVTG

SEQ ID NO: 420982 - protein, 318 aa, unidentified
MTHTSDPVEASPTVLGIDVAKATCTIHDLASRATFTCANTKTALRKALRPFRNHTLAVCETTGGYERCVLDVLYALGVPACRADASRIKAFIKSHGGRAKTDPIDARWIARYGAERSESLPRLTPQPKAVEALAAAAQLRADFVDQRAAAKNRLKAPTAKPVRAFIALQIRQLDRLIAALDRRIDALFAAAPDLNQRRQRLQAITAFGPVVATTLIALVPELGSLSRRGSASLTGLAPHPRDSGQTRKPGRISGGRARIKPLMFMAAMVAARRHSRLSAFYQRLIQAGKPKRLALAAVARKLVVIANAALKPPIQELN

SEQ ID NO: 420983 - protein, 355 aa, unidentified
MSQEKYIGMDVHQATISVAVMDAGGKLIMECLLETKAATIVEFIRGLHGTLWLTFEEGTSAAWLHDLLKPHVNRLVVCDPRKNALLKDGNKSDRIDARKLAELLRTNQLKPVYHGEHGVRTLKELGRSYLTLTKDVTRVMNRIKALYRSWAIPCAGATVYAPRHRAEWLAKIAEPGVRVRAERLYQQLDLLQPVRLEARRELLVESHKHAAVKLLRQIPSIGPIRSALLVALLQTPHRFRTKRQLWAYSGFAVETHDSGEYRYVRGKLQRNRERITVRGLNDNHNKDLKNLFKSAAISASTRPGPLRDFYVARVEKGMRPTMARLTLARKIAAISLTIWKKGVEFDAQQLHRQAA

SEQ ID NO: 420984 - protein, 450 aa, unidentified
MSPLALDVVTKTGKTPVLGRMLSKYVGRKTSSIENDITKARNHSRQRGNIMRVVFGIDVSKASSEVAILVNGEKIHGYTIPNDAIGFNRLLEDLGTVYQPEIVFEATGVYSRRLQAFFEDNSYAYIRLNPLESKKQLDSLRVRKTDKIDAEKLAMSQFILNRKPSYVQEALYQELRDLSRFYQNLTEDIVCSKNRLHKVLQVTFPELENILSSPTGKQYWNLVMAFPCNSFVLELDDAALRAIIRQSTSKRISEKRVTYLVDKLTKLANQSYCAVKKTSPMMEEVKYYAGELLRLSEYRQSVLEKMITLAQPLPEYEILLSIPGIAETTATSIIGELGDIRRFHSANQINAFIGIDLRHYESGDFLAKEHITKRGNPYARKILFKCIHNIASASHTNPCHIADFYEKRKRQSQVTSTKPHTIASIHRLIRTMYYLITHNKLYDYTSTQNR

SEQ ID NO: 420985 - protein, 343 aa, unidentified
MQTITTIGFDIAKSVFQVHCVDAEGKVILRRQLKRRYVLAFFQKLPPCLVGIEACASAHHWSRELQALGHTVRLMPPAYVKPYVKRHKNDATDAEAICEAVTRPNMRFVATKTPEQQSCLTLHRTRHLFIRQQTMVINAIRAHLAEFGIVAPVGRNGVEQLLSVAADSNDKRLPDVARACVTALGAQLQTLKAQILEFDRMIMAWHRSSEASRRLDDIPGVGPALATALVASIADPKVFRSGRDFSAWIGLVPKQNSSAGKDRLGSISKRGDRYLRSLFTTGALAVIRYAKIHGTRHRPWLTALLTRRPTKVAAIAIANKIARMAWAIMAKGERYKEPAALAA

SEQ ID NO: 420986 - protein, 334 aa, unidentified
METLYFLGIDISKKKFDAALTIDGKQFHEAQIENTPAAIQLFFRDLKKQLSSLNRLTVCLEHTGIYCLPLLNFLVKHKIRVSVEPALQIKQSQGMTRGKNDQADAKRIALYALKNCENLRFWQPQRHCIQRLKALLVLRERMVKMKVQLEVPLHESREFVATSIFKQTLANCQKTIRALQSDIKGIEKEIDTLVSNDEQISQQCRIATSVPGVGKITALNMIISTQEFSRIQDAKKFACYAGVAPFEHSSGSSIRGKTRVSKMANMTLKKLLHLAAMSAIQCNDELRIFYKRKVDSGKNKMSVMNAVRNKLISRIFACIKDKRIYQKVYQHALV

SEQ ID NO: 420987 - protein, 379 aa, unidentified
MNEATRFLGLDVHAETIAVALAEPGRGEVRSLGIIPNELTAVRKLIQKLGKKNLRACYEAGPTGFALYWQLAELGIECEVIAPTLIPKKPGDRIKTDRRDALKLARCFRAGDLTAVWVPDQAHEALRDLVRAREAAKYDQHRARQRLSKFLLRTAKRPPSGTPWTIKYVEWIRALRYEHVAQEATRIDYLAEVDHASERILRLEKAIDDAVKQASPTIQAVIDGLQALRGVGKLSATTMAVEIGSFSRFTTAKQLMAYCGVVPSEQSSGNSRRQGAITKTGNAHVRRVLFESAWACRHRPNLGAKLKERQRTLSATTNEIALKAQHRLHRRYLALTARGKPSPKVLGAVGRELLGFIWAVAVQIEQEHAAAAKSKKLAA

SEQ ID NO: 420988 - protein, 468 aa, unidentified
MTADKKLWRNRKERKQWGRRLQSEDPGLAVIHPHAAGIDVGNGSHYVAVRPERDPKPVRRFECFTADLRRLADWLQSCGVETVAMQSTGVYWIPLYEILEERGFEVYLVNARHTKNLPGRKSDVQESQWLLKLHTYGLLNNSFQPPAEIRALRTYWRQRGEHVAEAATCIQRIQKALTQMNLQLANVISDISGLTGQAIVRAIVAGERDPRKLAAFRDPRIQASEEEIAKSLEGNWRPELLFVLQQELEMYDTYQRRIAECDLQLQKHLASLTDSVPPRPPEVEPETKKGKRAKPAKNAPRFDLSYELQRITGVDLTRIDGIDVMIAQTLLSEVGVDMTCWKTEAHFASWLGLCPDNRVSGDKVLRRGTRHVVNRAANALRQAANALIRSRSYLGAQYRRLRTKLGAPKAITAMAHRLARLVYRMLKYGQRYVDKGTEYYEQRYRNQQVQLLRKNATKLGFQITEARA

SEQ ID NO: 420989 - protein, 348 aa, unidentified
MRFYTKTHKHYCGIDLHARKKYVCILDSEGTVLVHREISCNPESFLRIVAPYREGLVVGVECMFAWYWLADLCRGEKIEFVLGHALYMKAVHGGKAKSDKIDAHKIAVLLRGGMFPLAYAYPPEMRATRDLLRRRNFFVRKRAELMAHIQNTVTQYNLVPLGVDLGVEENRHEVAQLFHNPEVRKIIEIDVAMIDAFDDVLNVLEPDIEKTARQHNQQALKLLRSIHGVGKVLGLVMLYEIHDINRFPTVQDFSSYCRLVKCAHESAGKKKGTGGSKIGNVHLKWAFSEAAVFFVRHNPPAKIMMEKLAKTHGKGKAISILAHKLARAIFYMLKHNVPFDRERFLATA

SEQ ID NO: 420990 - protein, 347 aa, unidentified
MRFYTTQHPFYCGIDLHARTMFVCILDQGGNVLVHRNMKTDPEAFLKAIAPYRQGLVVAVECMFTWYWLADLCADQGISFVLGHALYMKAIHGGKAKNDKIDSQKIAQLLRGGMLPQAYVYPAKMRATRDLLRRRMHLTHKRAELLAHVQNTNSQYNLPAIGKKIAYKANRDGVAERFADPAVQKSIEVDLALITYDDALLGNVELSILKTARHHDANTLYLLQTVPGIGKILSLVLLYEIHDINRFPRVQDFLSYGRLVKCSKESAGKRLGTSGAKIGNAHLKWAFSEAAVLFLRDHPAAQKYLARLEKKHDKGKALTILAQKLARAVYYMLKCKMAFDTETFFQR

SEQ ID NO: 420991 - protein, 393 aa, unidentified
MQSVLAIDVAKGKSMVTLINSCGEVLIEPYEINHSIKDFSNLLNRIKQLKLDNISVIMESTGIYHRPVERFFLENNFKVYTINALYSKMYKRNLRKTKTDKLDCLSLSELYFTNNFKQYIRPDNIYLNMNALARQYFALDQLCANLKNRYKNLVYLCFPEYELLFKKEAIYSDIALSFIANYPHAEIIANTRIDHLQHYFKNNNYKRWKQKPTLIKEAAKNSYPSVSKGDEIVSDLSQLAKLIRSYQSEINSIKLKLINYGKQTKYFTAINSIFGIGEFTASIMIAELNDINRFNNIKELTAYCGLDPSIKQSGKSINIHGPISKSGNKYMRKLLFVSCLNIIRLSSKCHVKNDIEIYYRKKRNEGKHHYAAMIACTTKLLRQILALCKQLDK

SEQ ID NO: 420992 - protein, 378 aa, unidentified
MSTTQIVPQGKNTTIQGQLYMSFELGDKSWKLTASDGRRGPSRFSVHAGDTAAVLDCVRRAKERYQLEPQAPVHSCYEAGRDGWWLHRWLSGQGIGNLVVDPASIEVNRRARRAKTDRLDGDKLLVMLRRHHAGERVWSAVHEPTPEQEDARRTHRELARLTQERTAHTNRIRSLLVLHNLRVPVIVGGRDWAAWWERHREQVPPVLRGEIERESARLALVRQQFKVLEAARRKELAEGKHPLVAQLARLRAIGHKGAWVLVKEVFGWRRFANRRELAGSLGLTPTPYDSGGSQIEQGISKAGNKRARTMLVELAWRWLQLQPDSLMTQWFNRRFAGGGKRMRRVGIVALARRLAIALWRYLEHGEIPAGASLKPAAA

SEQ ID NO: 420993 - protein, 369 aa, unidentified
MTFYTLKAAPAASAVELKNNHKSTKAKRILVGCDVHLRGYQGARKVDEGAIGVVDNFRSEEALLLYIEKQRQQAEQVVVVYEAGPLGYTLYRKLRATGVLCYVCAPDSTQQRKKRRKNNQIDARSLTSKLFNYLNGDQHALQLARVPSEAQEQQRMASRQHDQLVEERKRLGAKGNAMLLSQGIGSWSNWWRPKAWSQLSRVAPQWLLERLQIWVDVLKILDEKISQAKAALARACSGPRPKGVGALSLMQLQSEVLDWSLYSNRRKIACLAGMVPSEWSTGDKETRGSITKVGVPALRRIIVEMVWRMVLFQPQYKPVQKWQEVLKGPNPALKKKAVVAIGRQLMVDLWRLQTGRVTAQDLNLIMVEN

SEQ ID NO: 420994 - protein, 338 aa, unidentified
MKTYAGIDLHSSNNYIGIINEEDQRLYGKRIPNELERVLMALEPFKDTLQGVVVESTYNWYWLVDGLQEHGYKLHLANPAAIKQYEGLKYTDDKWDSFWLAHMKRLNILPEGYIYPKQHRAVRDLLRRRLLFVRHSTSHILSLQSMITRNLGFKMSGNVIKKLKGKEVEGMFDSSNLVFMAKNNIATIQFLKKIIKDIAKKVKSQVKLRKEFNRLLTITGIGDILGLTIMLEVGDIKRFAKVGNYSSYCRCVKSARFSNGKKKGENNKKNGNKYLSWAYVEAANFAIRHSVKAHSFYQRKKAERNGIVAIKALSNKICRASYYIMRDRVSFNEEMLFR

SEQ ID NO: 420995 - protein, 339 aa, unidentified
MKKVFIGIDFSKLKFDAAIYSVDTKAIVSSEVFDNEQSGYVDFLQWVKENTRCQKSGMLFCGEHTGYYSGNLSVFLFESGYDMWLVSGLEMKLTQGIKRNKTDRVDACKIAEHAYRYQDKVVLFQPVSKALDEIRELLSYRERLVETRKVLTTSAKEMKRVKDNASCDYIYRDSIEYIKTLNASVRDCEKRIEALLKQDISLKTNYKRVSSVVGIGLVNAALILVATDNFTKFENPRKFGCYCGVVPFEHSSGTSVRGKTRVSKMANRHLKTKLTLAAQNAVRFDPELKEYYQRKRSEGKNNWLVLNNVKNKLIHRIFAVVRDGQMYEKQYVHPLKQAA

SEQ ID NO: 420996 - protein, 338 aa, unidentified
MSIETLGIDIAKNVFQLHGVNRGGRLLLTRRVKRDQLLQVIAQIAPCTIAIEACTGAFYWQRKFEELGHRVKIVSPQYVKPFVRRQKTDGNDAEAICTAARQGHMRFVPTKTAEQQDIQALHRARQRLVGHRTAVVNQIRGLLLDRGIAFPKSITRARQMIPDILADAENELTDLAREAIAEIHDLLVDLDRRVASFDKKIQRVFRSCEACQRIARIKGVGPMTATAVVAAIGDGAEFKNGRHLAAWVGLVPRQHSSGQRTVMLGISKRGSQHLRTLLVHGARAVVRSASSKTDPFNTWVNQLHQRRGFNRATVAVANKNARIIWAVLRSGEVYHAAH

SEQ ID NO: 420997 - protein, 353 aa, unidentified
MKPNSQMTLDKYFRQCVGIDVSKDKFTACLFMYDMASDVGCCTESIDFPNNKTGFNQMVKWSRKEAQKGFLLTYLMEPTGSYYEPLAYHLHKIGLTLYVVLPNKARSFCEYEGIKTKTDAMDARCLALLGCKNQRLRPWQPPKAIYRELRQLTRLRASLTKMQTQILNHIEAIDHMESVTSEVCKSYKKLLSSIQKQLEQNEQAIAAKVAQDKELEARIKRIATAKGIRSNTVTCIVAETQGFHLITNRKQLTSFAGLDVVAKQSGKDDPKHKISKKGNAYIRAALYMPALSAAHCNRQMTQSYSRICEKHPDTKMIGVTAIMRKMLLLVYTLWKSGEEYDETRDKAHVQINN

SEQ ID NO: 420998 - protein, 343 aa, unidentified
MTHFVGLDVSQKMTAICVVDNVGRRIWRGQCPSVPEQIGGLVRRHAGDDARIGIETGAMTPWLVHELRNLGLEVVCLDARHARAALEMRINKTDQNDAEGLAQIVRTGWYRSVHVKSFDSHRARALLGARTQLIGMTTRLSNHIRGVLKTFGLLPGAMRGLPFDRKVEALLLDRSDVALIVRPMLVAWRQLREQIAVFDKAIRVLVRLNSSCRLLMSVPGIGVLSALAYVSTVEDPGRFSRSRSVGAHLGLTPRQYQSGEVDRSGRISRCGDTLARTLLYEAAVVILTRLKKASSLKDWGHAIARRSGNGKARVAVARKLSVILHSVWRSGQPFRWSEHAGAA

SEQ ID NO: 420999 - protein, 366 aa, unidentified
MEFGVRVVDATWRREDQAMLHLGIDLHQYQITIVMLNDAGEVVQRATVRTKPPAIDEFLASVNAMARPAGGYRAVIESCGFEHWLVEKLKIHECSLTVVVQPLKRARHKTDKRDAASLAELLWVNRERLQDGQRVHGIRQVLIPSETDRQDRMLTNHQIEIGRQQTRVINQIKSILRRFNLMHDCPTKGFKTKKARAWLRTLDLPEVDKIVLDLAIARWELIEQQLAQIELEVERHAEQHAAAQVLKTIPGVGNLTALALASRIGPIERFPRPASLANMFGLTPSINDSGETTGRLGNITKNGHPNVRYLLGQMVSHLARKDRTIREVRRKIRKRRGSKTALVAVMRRVACRIWHMLQTGEAYRVT

SEQ ID NO: 421000 - protein, 324 aa, unidentified
MDLDSGEVFRGRIAPADRAQLRQWLDRFLERTDVAFALEGCTGWRYVVEELHRAGITAHVAEPAETAARRGPKRRAKTDRSDAQLLRDLLLEGRIPESWIPPQPVLEARALVRLYKDLLDERTGWLQRVHASMFQMGVPDLDVSTMSAAGRERITAAELSAATRTAVDVAMRQVDRLTAEMTMVREQIHAIGRRQPACRALQAAHYGIGPLTSVVIWAEMGDTRRFRSSDDAVRHAGLDVTVYSSDGRRSAGHLARQGPPMLRWALYEAAVYAGRPSSPDHAYFQQVKARLDGQLALLSMARKLARRCHHTLRNLDDQVLAPAA

SEQ ID NO: 421001 - protein, 379 aa, unidentified
MALKIVYKICCGIDVHKTFVVACIASTDSKGVTTYEHHRFSTYTKGLKDLLQWLLKHNCKDVCMESTGKYWIPVYNVLENDCTIVLAHPKYVKAIRGKKTDKRDAKWIADLFKHDLVAGSFMPPADIRQLRDLMRYRFKLTCFMSSEKNRLQNCLTVSNIQLGNVVSDTFGKSAQAILDKLLENPADTSFDLEPLVYKSLKKKLPELRDAIDGYITPEQAGKLKVIKAHYENLESRKAELEELILALAAPYQQELAILQTAPGIRSDFTAIGIISEIGTNMEAFPSAKHLCSWAGLTPTNNESAGKKKSVRVSKAGCYIKPLLVQCANAVITSKKHPEIRNRYLRLKKRRGHKKAIIAIARMLLTALYHMLKNGENYNA

SEQ ID NO: 421002 - protein, 313 aa, unidentified
MKKTICGVDVSKAKLDVCIEPAHRLASFNNDTAGIAELAKFCREHKVDLVVMEASGGYERHVFIELWEQDISCALTNPRSVRRYAEAMGILEKTDRIDASVIARFADAKGLAPTPLPSQTQLRLKALVARLRQVTDDLTVQKQRRSSMFDNTEMQASVDEVIALLKRQSRSLEGEIASMIDDDPLWAKLADTWRELKGVAGRTVARLHAELPEIGTLSNKAIAKLAGLAPLANDSGKRKGKRPTRGGRAGVRSILFLVAAIVARYDKNIGTFKERLVKAGKEKMVIRIALARKLLVILNAKARDARAQYANAT

SEQ ID NO: 421003 - protein, 346 aa, unidentified
MLYAGLDLSRKRLDFHLLDGQGATVERGATPPDADGLQRLTERVARHGAPVRAAIESMNGARFVHDRLELAGWQVEIADAHKVKGLAPLACKTDRIDAWVLAELARRDLVPAIWLPDALVRAERERARWRLHLVRHRSSLKQRVHAVLLTHGKPCPVSDLFGVRGRQLLARLDLPEPWRGTIEASLRLIDELDREINDCERELRRLGANHRYVPLLCTVPGISWVLAYTIAAELGDISRFPSPRKLAGYSGLCPRVYQSGDRDLRGPLAKQGPRYLRWALTEAATHACTHPAYRDRYQQTKARIGKQRGAKVAQVDLARKLAEAIWHMLTRNQPFAPAGATDPLAA

SEQ ID NO: 421004 - protein, 387 aa, unidentified
MSQANDLSRSLIPFEQATTLVAVVELSLSSWLICGAIPGVERQPLKKIVPDGTELLRVLDRWRDEATRNGRIIARITVAFEAGRDGSWLARWLSSHGIEVHIIHSNSVAVSREHKRAKTDRLDTAMLIRVFLGWLRGERGHCTMVMVPTIEEEDAKRPSRERENLVGERTRTINRVKSALVRLGIRGFKPQLRKAPQRLEALRTPEGSPIPPNTLDEMRRDLTRLALLREQIKAIEQDRLTRLAQARRTGPNAMVRLLASISGVGIETADMLVQEVLSRNLRDRRAVARFAGLTGAPDESGSKRREKGLTKSGNARVRRGLIQLAWRFLLFQKDSALAQWFRSRTDGVRGARKTKMIVALARKLLIALWRMVTTGEVPHGVVLRQAV

SEQ ID NO: 421005 - protein, 472 aa, unidentified
MPDSIFKTTGTNLRDVLASHDLGEILYTSIDVAKYNHSAMVVNFFGDVIIPKFDFPYNDHGINFLKKKMQIAQKQTRATKLFLGLESTGHYHENLVASLTASGYDVQVIRPIDSKNERDNVHAKTDAIDLAAIAKVIISNKGTRSHMPGPIYYNLQRASRTHRQLTHQETRTKNIITFVLDKTFTGLWNPKDSIFSDKWGKASLLFIENYSTPQQATKLGTKRLAAFFRKHDTKLGMDTAKKIIQLAKITPARSLEEMESDIKALKAHIQVLRTFMLAISEQKKQMVKFLIQTPGTYLLSVPGIGVVYASDFTAEVGDIHRFAHARQITSLAGTAPRKHQSGEVDKTNLSTSHKGKNHLRVTVNQMALSLNSHCPEYHSYYSKKHFQYKDAPGKARTATANKFIKLAFAMMRNETLYYPRTGNPLMTEKQHYQEVWDKMKPKLTPYLCDDIPQDNYLTRIQHELEEKYGINT

SEQ ID NO: 421006 - protein, 352 aa, unidentified
MRKYYVGMDVHKLSIAIAILDAYGKLVSRAVIETTTEAVRDFFRNLRGEIHLTFEEGNHAAWLYDIVEPLVKRVVACNPKANRIEGSRNDRVDAVKLAELLRLNGLKPVYHGEHGTRTLKHLMRSYECLVKDITRVKNRLKALYNSQAIKQRGRELYHASKRESWLQKLSNPGQRSRAELFFQELDELKVIKRAAQKAMVAESKRHPAYRVLSTVAELGPVRIAQIIPTEETPWRFRSKRPFWNYSGLAVVTRSTADHEFEDGRVRKRQKQVIQTRGLNPDYNRRLKSIFKSAATHASNCGAYREYYEGLLQTGMRAEMARLAVARKLSATVLAVWKSGESFDAGRILRKAV

SEQ ID NO: 421007 - protein, 338 aa, unidentified
MDRQYVGIDFHRRRSVIVRLNSAGERLAVARVANDPFEFASAIAAAGDAPAVVIEATYGWYWVVDLLQDLGATVHLANPKALNWGERCVKNDVVDATDLADMLRMGRLAHAWIAPAATRELRELVRYRAKLVQLRSGLKAQVHAVMAKEGVLPGTLDMFCQRGELQLDAMDLGRNYAVRVQSLRELIGHYDRDIVTLERDIHQHLRGDRGYQAVQAINGVGRTIAAILVAEIGDVSRFPTPAHLCSWAGLTPRHHESDTKTRRGKISKQGSRLLRWALIEGISRYHGGDVLKHSYQRIAKRRGTNKARVAVARKALTLAYYGLRDGEIRCLAPAQEAA

SEQ ID NO: 421008 - protein, 347 aa, unidentified
MNFYTQQHKHYCGIDLHARARYVCILDEQGTKLVHKNLPTTPEAFLRLIAPYREDLVVGVECMFTWYWLADLCSQEGIAFVLGHALYMKAIHGGKAKNDKIEAHKIAVLLRGGMFPQAYVYPSEMRATRDLLRRRCHLARKRAELLAHIHNTNSQYNLPEIGKRLANKSNREDVADHFPDPSVRKAIEVDVALIDQYDQLLGEVELYLTRSAKAHDVQPFARLQSVPGIGQILALVILSEIQDIARFPRVQDFVSYCRLVKCAKESNGKRFGTSGKKIGNVHLRWAFAEAAVLFIRQSQPGKEYFAKLEHKHGKAKALTVLAHKLGRAVYYMLSREQAFDLKRFVTA

SEQ ID NO: 421009 - protein, 329 aa, unidentified
MMGSKSRMQGKAMPEPNATPVYAGVDVCKEWLDVYVHPSGQALRVSNDRVGLKRLKRVLAAFPVARVVMEATGKLHRAAQRSLHAAGLAVAVVNPLRARLFAEAAGTIAKTDAVDARLLAVMGAALEPAETPPPPAALEEVCELVNARTAATAERTALSNRLATAATSFLRTELRRRRDACQRHVERLDAEIERRILAEPGMARRYAILCSIPGIGPVTAAIFIAGLAELGACSAKQAASLAGVAPVANDSGDRSGRRAIRGGRMPVRNAAYMAALSASRHNPDLAAFAIRLQRAGKRPKVVLVAVMRKLIVLANTLIAQNRLWSPIAP

SEQ ID NO: 421010 - protein, 440 aa, unidentified
MDELNRNRLEEFRQLRQEIRHSEEYLIVGIDIAKHRHHAFFGTATGKTLLRRLVFSNDHEGFRKLLDQAEALRVRHGLKKVVYGMEPTANYHKPLGEYLITLGRTVVLVSGVTVKQNRESMDGRWDKHDVKDSANVADLISQGKCLYYEYPSAELRGLRGLLSLKRRLKKQEHGYRVRIRNHLIAQYFPEMDRDYERLGAAGLSIVRWCFPGSQMTALDIEPFIERVTSGRIRMEQRRRLEAIWETAGKSIGCDAVPGVDHEAKVMVEGLRQIREVIKETEEKIQELCEQFSEYPYVLTIPGFGPDVSAKVLGAIGDPDRFQNGKQVLKMGGLDLSADRSGKDSDKAIPEISKRGKADLRYALYQAALIASHKNRDVMIYYTNKLRGREREKGIHNKMRVKLAAKLLVIAWTLMKKKEKFDPTYLNVGLKNFRFRREKPE

SEQ ID NO: 421011 - protein, 529 aa, unidentified
MVTTKKSRTKRKSGRSKKFSLAVLGKPTGIIQPRVQAVGPERFGIVAVDCAKLRSKWMLVDFYGNVLIEPQQLEHNRSAFKRAVAQLQAAQKEHRLGETIVCVEMTGIYHKPVFRAFRNAGFETRLVHPFASSHYRMPEHGDIKTDDNDLIAIFRATVNGFGLLQPTADDIYTELQILARHRRDLVRKKSKLQCQIRHHVHRCLPGFADLFDGDDLWSQVTPVPLLRAIAIHGGTPAAVREAGVDGMTKWLKDAGVRFHKKTLERIVVWAANAADADEMARSYTRVWNVLLDDWSAKRLQIQPIEKDLAGLLAKTPYILLLSHPGINVVSAAQLAGEMGPIEHYASAKAINGRAGLFPSRYQSDEVDRGGNLTRFRNAKLRAAWMLIADNMCKCNAYWMAKAELWKAGGVKPRDIRARIANRMTRTVFTMVSGRQIYRHPSRLDRGYIIDKLMAFHREHKTGPAVIVRDLKHAAEQIPKSAHADEAVRVEAARRKASRSRQRGPQELGELLVGVLTRLGVQAADEIDSP

SEQ ID NO: 421012 - protein, 349 aa, unidentified
MSKEHVSYAEKRVYIGIDVHRAFFVASCVCEGVVVKRCRMPSKSAAVLALITKYFPGSIVMTCYEAGYSGFWLHRELTLAGISNIVVHAAHVEVESNRVKTDKRDSQKLAEQLFAGRLRGIRVPSPDEEDLRLLTRTREQTVRKRRRVQVQIRMRLHQFGLVPETITGVLRPQHVVALLKDIQAHALKATLELLLDEWLYLAAKIKALDKKLLEQAAKDPLDAIYRSVPGIGPLIARILSFELGDMSQFANERALFSFTGLTPGEYSSGDKIRRGTISRQGSSRIRYILVEAAWKAIRKDTVLREFYERVGARRGKKRAIVAVARKLIGRIRAALKANKNYEIDYKKAA

SEQ ID NO: 421013 - protein, 324 aa, unidentified
MSGTEMIAAGIDVAKATLELSIGAVGKTSTFGNDPEGHAGLLQTLRDSGREVSLVVLEATGRLELEVACLLQAEGYAVAVVNPKAARDFAKSIGALAKTDAIDARVLAQMAATLANDPRLLARHVRALPSEERRELDALVGRRRQLMTMLVAERLRLMSAHPKVRASLGAMCAALEAQIADLERRMAEHIAEHEAATAALLRTMPGIGPTSAACLIANLPELGRLNRQQISALVGVAPFANDSGTHRGRRSIRGGRFELRRVLYMAAMAAIRHANPVIAPFYERLRAAGKCHKVALVACIRKMLPILNTMLKTGTKFDPAIHRS

SEQ ID NO: 421014 - protein, 323 aa, unidentified
MNHKVGNDNTVARFIGIDVSKQWLDVACLPERETRRYGNDCAGLEQLCTWIVPLAPELIVMEATGGFETNAATALAAGGLALAVVNPKHVRDFARAFGILAKTDRIDALVLAAFAQKVHPPVRPLPDEERRELIDLVDRRRQLVTMRAEEKTRLTQATPAARQDIKEHIEWLNERLRRLDIDLTAKLRSSSLWKTKEQILTSAPGVGRVTVATLVARLPELGTLNRRAIAALTGVAPFARDSGQHRGRRMIWGGRADVRNVLYMATVTAARINPVIRSFYLRLKQAGKPAKVALTACMRKLLTILNTMVRNNQPWQIPPTQTI

SEQ ID NO: 421015 - protein, 312 aa, unidentified
MEKSSLLFIGIDVAKDQLDVAFSNGTKPQCVRNDSRHLKRLMEELCSLSPALVLLEATGGLERPLVYALEAADLPYRIANPRLIRDFARATGKLAKTDQIDARVLVEYARKIRPEARKLADPERQVLRELVLRRRQLLDMKAQEENRLRTAPKPVAASIRAMIRVLEREIDKLERQTDHFIDQHPMLIAETELLESVKGVGPILSRTMCGLLPELGRANHKQIAAIAGVAPFNCDSGHFRGKRSCWGGRADVRRILYMATVIAVRFNPKLKAFYEKLRLAGKPFKTAIVACMRKLLVLLNAMMRDFYAAQSA

SEQ ID NO: 421016 - protein, 344 aa, unidentified
MEIRTIGIDLGKTVFHLVGVNARGEVVVRKKCSRTQLLRFTSNLPACLIGMEACGGSHFLGRALKEQGHDARLMPAQYVKPYVKTNKNDYIDAEACAEAVTRPRMRFVPIKSDDQLDLQSLHRVRERWMVRRTAVINQIRGMLLERGITIAKGRRHIEESLPRILEDADNKLSGALRVLLSELRREMQYLHRQIEECNKLIDRVVGELEQCKHLVTVPGIGPITATATVAAIGNGAAFKRGRGFAAWIGAVPGERSTGGKQKLTGISRRGNKYLRKLFVQGAHTVLLQRTKQDPGLSMWLAKLVSRKRPQVATVALANKMARIAWAVLSKGEAYRPALAAQAAA

SEQ ID NO: 421017 - protein, 344 aa, unidentified
MSEVIIIGLDIAKHVFHAHGADERGRAIFSKRISRGKLLDFFAAQPSCMVALEACGGAHHWARQLTQLGHEVRLIPPAYVKPFVKRQKNDAIDAEAICEAAQRPSMRFVAVKSEQQQAAGLVFRTRDLLVRQRTQLINAIRGHLTEYGWVAPKGPSHVTMLADLIEEEEMARSLPEAAHAMFRLMLDLFASLNGKIADLDKEIARRAREDEVSRRLMTVPGIGPISATAIAALAPPVETFAKGRDFAAWLGLTPVQRSTGGKQKLGATSKMGERTLRRLLIIGSSAVVQQASKRGAAKGSWLEQMLARKPRMLVTVALANKMARIVWALLVKREVYRAPVAANA

SEQ ID NO: 421018 - protein, 480 aa, unidentified
MIRSVGIDLSRTGSHQVRCLDEQAKPCDSFSFDSTLEGLENFEKRVFSNGDTPTIIFEPTGLAWIPMAVYLRARHPECQMVKARLQKVAALRRYLRSYTKSDRVDGVTLAKMPFIDAEQLDEAYLPPAEYHSLQRLTRQRERLMKSITIRKNRIGSIVNGYLPGLRKAFSDEWSDRARLFYRQRLNPFTVVRDGKSALNTFLLSVKAKDAQTESHRVYQACQKLAEFYEKSKAAGMIDEDFFDDLQDEIACELRLMETEEAEVERVSVRIEELYGHLHPSDYLRSIPGIGVRTAQVFLAIIGDPHRFRSQSAFANWTGVVPGARQSAGTEGKGLRMTKAGPSMMKRALFQAGDIARRYDPQLAHLYYREMVHHGKTHLQAMGAVMSHLGARIMAVLREGRPYELRDSQGKLLTKKEAMELIRSAYKVPEETRQARRRRKPNEGRLTSRRTREAAKAPQSGPLIPPPKTVYCGEELQSIAN

SEQ ID NO: 421019 - protein, 416 aa, unidentified
MTNPLLVGVDVHRQSNTVAVMNSQGVEVAPRFRVANNLPGTQEFVRQVAQLMVAGSFDALAIAAEATGWYWFHFFQTLSQDPHLQQWPLTLYPFNPRVTEGFKRAYIDLDKTDPSDAGVIADRLRFGRDLPAPWQLDDTYLPLRFLTRYRYHLIHLLAREKAYCLAILYLKASEYNLPDEERRPFANVFGAASRAVLQEFASLEEIAALPFAELVEFIDRHGKRRFADPAENARKLRRVAAESYRLPEALRPPIQAILGWSLQHISFLERQIKRLDTAIAAQMATIPQTLETIPGIGPVFAGGILAEIGGPARFHYQEHKVAKFAGFKWRKTRSADFEADETRLTRTGNHYLRYYFCEAANAVRMRDREYAAYYDRKYHEVHTHQHKRAIVLTARKLVRLVVALLNTNQPYRARRN

SEQ ID NO: 421020 - protein, 345 aa, unidentified
MEIRTIGIDLGKTVFHLVGVDVRGEVVVRKKCSRAQLLRFTSNLRECLIGMEACGGSHFLGRALCEQGHHVRLMPAQYVNPYVKTNKNDYIDAEAIAEAVTRPSMRFVPIKTDDQLDLQSLHRVRERWVVRRTAVINQIRGLLLERGITLRKGRQHLEASLPCILEDADSKLSGALRVLLTQLQWEVQYLGRQIEESDKLIVRIAGELEACRRLVAIPGIGPLIATATIAAIGNGAAFKKGRGFSAWLGVVPGEQSTGGRQKLTGTSRRGNKYLRKLFVQGAHAVLLQRTKQASGLSAWLADLVTRKRKQVATVALANKMARMAWAVLFKGQAYRPPLLPQAVPA

SEQ ID NO: 421021 - protein, 429 aa, unidentified
MKTTQMIDSVSSATPFVAWIGLDWGDKEHAFCLSCPDSPTIQSGKFRHSAETLHGWLQDLAQRFGGRPVALALESHQGALLHVLTQYPWLTIFPVNPVTSARFRTAFVPSGAKDDGPDARILLDLLRRHQDKIRPLDWEDENTRKLSGLVQARRDTVDRRTQAVNQLTGLLKTYYPQTLELVGDDLSAPLALQFLRRWPDLISLKAARLSTLRHFYYGNHVRRPELVEKRLQRIQQSVALTTDDAVLSVCLLQLKLLLELIGSFNKHIARFEEAIETAFASQADAVLFKELPGAGPALAPRLAVAFGSDRTRYPDAASFQKYAGLAPVREKSGGQLWTHWRWQAPVFLRQTLVEWAGQTVVWSPWAKNYYQRMKAKGKKHHVILRALAFKWSRILWKCWFTRTPYNEHIYLKSLTRKKSPNLPPTAALV

SEQ ID NO: 421022 - protein, 425 aa, unidentified
MLAVGIDWSEEFHLVALGRPDEGVFDVRRVEHSPKAVDALVARIAQLEPDPAEVRVVLETRHGLLVERLLDAGYVVVPVNPDLVARRRGPARKKDDAEDARIACLLALDRFERLRPLIPHGEQAGELRTIARDDERASRDERRLLNRLRQDLIATFPAALEIAGDDLGAPSLLRLLERWPSAEALRQATREELVAFARACKHGWPERFADRIQAALAGDHFQPRPYLVRAKTDTIRLSAQQLLAIGNQRRVWERRMGELLLGAPRRGRAKQPREDELGQSFPGGEVYLSFPGLGDRLAARVAGEIGDHPSQFESPNALQCYAGKAPVTRRSGKSEHVVSCRLAYNRHLGDAVQQWAFCSLRSSPWAHAFYDTKRAAGKSHHAALRALGNRWLEVLWHCLQRGVLYDEATHTANRNRALQPLAEAA

SEQ ID NO: 421023 - protein, 390 aa, unidentified
MDVLYQSCAGIDVHQANIVVCILHGPLTSTRPKREMATFDTTTKGLRACHDFLSQFHVEAIGMESIGVYWRPVWHALCDDFKLILAQPAHMKAIPGQKTDKKDAHWIAKLTRIGLLPRSFVPDETIQELRELTRQRKHYVESRNRETNRIHKILQSGGIKLTTYIEDIMGLSGRNLLQLLVDGTPITPRIVHQSVYTSLKKKVPQLLEALDGYFSDHHRFMLKQSLEIYDFYQKQIELLEERMNVYLSQYEKHVEILDSIPGIDVITASVIISEIGVDMSQFPTAGHLASWTGLCPGNNESAGKKRSTKIRHGNSYLKKCLCQAAFAVKKQKGSPLADRFYQIQSRRGSQKATIALAHQLLKIAYILLKEQITYPEFLAQKKTTRDELVA

SEQ ID NO: 421024 - protein, 342 aa, unidentified
MPPSAFKFVPFKFSQICGLNRSNKVMFNRQVRRNKLLIEVLNAKPDTIFIESCYSATYWARLFQSHGFEVRLIPPQHVKAFVKGNKNDRHDALAIAEAGLRPNVHYVPVKTEEQQEIQILHKIRARYVRERTSITNQIRGFLSDYGVIIHQGHAKLKKALPLIIEDASNSLTHKIREYLNHMHQEMLEKTEQIKTIEYEIEQLSKQQKEYDHLIELPGVGLLTASAVVAKIGDAKQFDSARGMAACLGIVPGHQASGTRITMQKITKRGDRYLRTLLIHCGRCVVNRYSNTEDPLKQYAMRIKERRGKNIAAVAVAHKLVRIMWSMLVNNTAYNPNFALTRK

SEQ ID NO: 421025 - protein, 370 aa, unidentified
MGNRSMFVGLDVHKETIDVSIAEGERHGEVRHYGVIKSDLEPLDKVVRALRAPGRRLHVVYEAGPCGFGIHRHLTNRGEDCVVVSPSMIPKRSGERVKTDRRDSQMLARLHRAGELRAIYVPDDTDEAMRDLVRAREDAVVVGTQAKYRLKAFLLRQGRRYPGREGWTLPYRRWLTDLSFPSGAQQVALQEYRDAIAETEQRIDRLTEQLRQLAPAWRWAPVVNAFQALRGVSFITGVSLVAELGDLKRFRQPRELMAYLGLVPSEHSSGPRVRRGAITKAGNPHARHLLAEAAWAYQGKPRIGRKHADRQEALPKVVCDIAWKAQLRLTARFRRLVARGKAKPKVATAIARELTGFIWAIAQEVSPALQ

SEQ ID NO: 421026 - protein, 369 aa, unidentified
MTARADRRGNVVGVDPHRHTLSATVVDERGGIVATGHYKVSGDGHRGLEAWALSFGPVVRWGIEGASGLGRHTSMYLCRQGHDVRDVNPTRTAERARGRFQGKTDALDSERIARETLAHPELPAAFKRAGEDSGPDETTELLALWHKERRSLLKTRQHLLNEADALLGDLPDELRGRLPQSKAVRPRLAALHRRRRAWPAVTALRLRLLDQHWVAILELDRRDREITGELAKLVASTGSTLDQLHGLDTRSVAELLVEVGDPRRFTEGGFGRFSGTAPLPASSGEGAGEPIRHRLNRGGNRRVNAVLHRMAVTQLRCDERAQAIRDQARRRGHTQREAVRVVRRHLAAVVYRRMIRDLKARPGASRVAA

SEQ ID NO: 421027 - protein, 338 aa, unidentified
MKTYAGIDLHSSNNYIAVIDEHDQRLYKKRLPNRVDEVVSALVPFKETLEGVVVESTYNWYWLVDGLQDNGYSVHLANPSAIKQYEGLKHTDDQWDSFWLAHMLRLQILPEGYIYPKDKRPVRDLLRRRLLFVRHRTAHILSLQSMITRNCGTQMSSGAIKRLEQADAEILFNHPHLVLAARNSIETIRFLKARIQSIEKEVKSVITLREEFKSLLTIPGIGDILGLTIMCEVGDIHRFPTVGDYSSYCRCVKSERLSNGKKKDENNRKNGNKYLGWAYVEAAHFATRFSPHAQAFYQRKKAKRNGIVAIKALSNKLARASYYIMRDQVPYEAEKLFR

SEQ ID NO: 421028 - protein, 467 aa, unidentified
MEAQVLEGLKQINLFAAGIDIGSGENYLAVPAHAVKEGEPTVRCFGVSSPEHDAAVEWLRGCRITTVAMEATGIYWITLYDKIEAAGMKVVLVDPHSVKAMPGRKSDVLDCQWLQQLHTYGLLRGAFRPDGATRRLRTLTRQRGELVAASASHQEQMQKALIEMNVQLHRVVSDIDGETGLRIIEAIVAGERDPQVLVKLRDPRIRKSTVAEMEAALQGHYREELVFVLAQNLESWQFYRRQLEACDQRILRTLESFPLAAPKPVSPVPPKPVAVDSKPGKTYVLKNKSIGRGKNAPTVDLVGVLQRICGVNLMAVTGLNVLSVLMLLGEIGVDMSRWRSAKAFCSWLGLCPATKISGGKVLSRRSRRVVNRAAILLRVVAVAVGRSDTWLGRFHRRKKAHLGAPKAVTATARKLACIVYHMLKYQDAFVPINEAAYEAKAKAQRLERLRREAKQMGLQLVDLEKAA

SEQ ID NO: 421029 - protein, 432 aa, unidentified
MRPNAGGVDIGATEVFVAVPADRDTESVRSFPTFTQDLHLLADWLQQCRVDTVAMESTGVYWIPLFQILEARGIEVHLVNAQHVHHVPGRKSDVLDCQWLQYLHSVGLLRASFRPEQAVCEIRSLMRHRDNLVQMACVHVQHMQKSLDQMNVQIHHVISDITGVTGLAIIDAIVDGKTDPKELAKLRDHRIHASVETVTKSLVGDYRREHIFTLKQSLEAYRYYQQLIVCCDQEVQRRIQEFGDKSDGAAAPSDSSATDTPDASGFDLKSYLERIFGVDLTAIPGFQSLRLQTLLSELGANLSKFPTEDSFCSWLNLCPKDGTSAGRRIRGPRIKTTNRVANAFRMAAQSLHRNQSYLGDYYRSQRARHGALKATKNTAHKLARIFYHLVTTRQPYDETVFAKLEARNQKRRFQKLQTLARQMGYSLLEANA

SEQ ID NO: 421030 - protein, 337 aa, unidentified
MKYCGIDLHSNNSVVVVSDEEDRMVLQKRLPNDLAQILAALEPHQHELAGVVIESTYNWYWLVDGLMDAGYQVHLAHPAAIKKYEGLKHSGDFADAAYLAQLLRLGLLAEGYIYPRAERGARDLARKRMQLVRYRTAQILSIEGILMRQTGARMKGEAVKRLTAEQVDAFAFAPDVALAVEANRAVSQALGQQIEALERRLKERVSLRSEYRLLKTVPGIGETLATTIMLETGSISRFAQVGNFSSYCRCVDSLRESNGKKKGEGNTRNGNKYLAWAFVEAANFALRYCPQAKSFYDRKKSKTNRVLALKALAHKLARACYHMLREQKPFNVHLCFG

SEQ ID NO: 421031 - protein, 385 aa, unidentified
MVKGSIVDTSFGEASAASRAERRRQREIGCSLVNETGIERDPRCRYGTSPNSRRNRRPIRPTSSHLQDWEQTMTEPLFIGIDVAKDTFHVASCPAAVNISLPNNSTGTQQLIKTLKAYTISLIVLEATGGYERPIVADLLEADFKVVVASPRQVRDFARGIGEFAKTDPIDAAVLARFAQVVQPKPKPPSSPETGELADLVRRRKQLIDLRVQETNRSQLALHPKIRKSVRKMIKTLDYQIAELDRIIEEHIKSDDEFRKKDEILRSTPGIGPGTSAILLSQLPELGQLNRQEIAALVGVAPYDFKSGRFAGKSRIWGGRKDIRCALYMAALCATRFNSVIHRFAVRLAEKGKVFKIVITACMRKLLTILNTMIRNQTLWRPENT

SEQ ID NO: 421032 - protein, 414 aa, unidentified
MNEERLWFVGVDWASVDHVVRLSDAHGTKVGERSFKHGGEGLSELATWILDLTKAPPDAVHIAIEVPHGPVVESLMERGFHVNSINPKQLDRFRDRFSPAGAKDDSRDAWVLCDALRTDPRCFRRLVTLDPVLVELREWSRIAEELRHDRNRLGSRVRELLWRYFPQLLELTEDVTAPWFLDLWRLVPTPDKAARVRETTVAKLLKRHRIRRITASQVLETLRAAAIPVAPGTINAATAHIDTVAMRLDVINRQITRAETQLDTLTERLALKEDAEPGQDNEQRDVTILRSLPGVGRIVLATVLAEASDALQRRDYHALRCLSGVAPVTKRSGKSRIVIMRQAVHVRLRNSVYHWARVAVQHDPRSRAKYAALRARGHGHGRALRSVADRLLAVACKMLTTQKTFDPKLAAQTA

SEQ ID NO: 421033 - protein, 435 aa, unidentified
MEMLTKCACGLDVHQATVVACLLTLRDHGKVEKQMRSLGTKTRELVELRQWLEAEGCTHVAMESTGVYWKPVYAILEEGPFELTVANAQHIKHVPGRKTDVKDAEWIADLQLHGLLKPSFVPPKLIRQLRDLTRYRRKLVESRSAERNRLLKVLETANIKLSSVASDVFGVSGMLMLGKLAEGKATPAGMAQLAKGRLREKIAELEPALEGRMEEHHRYLLQLQLRRLRDLDQDLKELDARIQAKLQPYQQEMDLLMGIPGVDWGGAAVIMAELGPDLKAFPSASQVSCWAGLAPGNHQSAGKRRNARVTKGNVHLKTALVEAAHAAARQGDLSAGQILSRQRPARRQASGGHGRSQNSGGGLPYAFQKGPLQGSGRCVSGYAQQAPTHAKLDPALRTPRLLRHRTITSCLIRRCNRQERHFHSRDTEVTEKRRR

SEQ ID NO: 421034 - protein, 353 aa, unidentified
MKAVCGLDVHKDSVYLCILSEFGELIEKVFGVLTYQLEEMRDLMLHHHVIEVSMESTSVYWIPIWRVLSPHFKLNLANPYFIKQLPGRKSDVKDAQWIAECTMKELIRGSFVPPETIQQLRQYDRRIFDLNEEIVRKLSKLDAVLQRCNIRLSNYVSNVDSKSYKAVVRAISQGTTDPEELVKLIHGRIINHHGIDVITASLKGVVSLAEIDMISQLRDELDMAEAHKEKCQARMLEICEREFPEELRRLQTIPGIKERTATSLIAEIGTDMNKFETANHLASWSGLKPRNDESNKKIKSRSITHGNVYLRKTIIECAWAASRTKDCFFSRFSFHQTQVRKKNKMKILIIILI

SEQ ID NO: 421035 - protein, 477 aa, unidentified
MTTFPLTDHAGPVPIRHQYYAGIDIGYKNHTVAAIPVEAFGGRKPDTWQRAPVCKFSSDASGFEDLQRYLDKRSVDPNDFLVVMEPTGGNYGLSLLFYLLGKSYKVVQVDNSAVGKYQELLAKETKTDPVDARTMARMGFIHEVIGQEFRIREVRQATEAQVALRILVMDYIRVQADVVRRRNQLQQVAAVGFPELKTFFKHSPTSATACAILAAFATPADIVSAGTEQVRRVLLEARAYTLAHHSDDLVALAKATIGVPLSERMRLRQTWLLEQIGTLEAQREQLLAQMEQASASHPYRPLIESLPVRSPIWTASLIAAIGDIAHFETPNEFRAYMGWFPMLDHSGKSANGTKLANRGVRLARRALGQMVFVLLTPRTADNPFRIYHQRLVARGMKPLKAVGHDAAKLATVLYYMLKTDRPYDEARHRRRMKLPQAQAAVVRPLDVPLEVLDAQVIEEQRHGYASDEIPQDEGAPL

SEQ ID NO: 421036 - protein, 381 aa, unidentified
MEISPSPAAPATDPQPATLFVALELSKAKWLVGLHSPMADKVSRHTIAGGDAPALLTLIGAARRRAEAGLGGTVRVVTCYEAGYDGFWLHRLLVAHGIANQVIDPASLLVNRRARRRKTDRIDLAGLLRTLMAWHRGEPQVCSMVRVPSPEEEDQRRRGRERERLVKERVQHLGRVKGLLMTQGVRDFQPARRGWRDRLEALRTGDGRPLPDCLKAEIARECRRLALVDEMLDELERERDAASDGKAPQQAALLTKLRGIGPTSAHLLAGEVFHRDFANRRQVAAYLGLEPSPWQSGQVDQDQGISKAGNRRARWVAIELAWLWLQYQPDSGLSRWFKDRVGVARGRVRRIMLVALARKLIVALWRYLASGVVPEGASMRA

SEQ ID NO: 421037 - protein, 363 aa, unidentified
MVESTTVTVGLDVHARSIRLAAVRADELLEERTLPYDEEAVERLLHRWPVVRCCYEAGPTGFGLYRHLVERGIDCAVVAPGLVPQRPGDRVKTDPRDARKLARLLAGGLLEPIHVPSPELEAARDLVRAREDARLDRMRDRHRLSKFCLRHGRLLPTTAWTITRRKWLSEQRLDYAAEQITFDSYLHAVDLVDARIEALERAIRETAEQGPWRQLVARLRCLRGIDTLTALALVAEIADFSRFHTAEEFMAFVGLVPSEHSSGEHRRQGAITKVGNSHVRRLLVESAWHARRRPKVGYELARRQRGQEAVVIERAWRCQQRLYQRWQRMAGRGKPQQKIVVACARELAGFVWAIATEQPLRTT

SEQ ID NO: 421038 - protein, 404 aa, unidentified
MKGPIVSIDVSKGKSDYQAFKDLNVKYTGSRSIKHNKEGFDEIVNLVREMEKKLETEVCVVYEATGVYHRVLKKVLEDNNIKQFIINPLLSAKTRKNDSLRSPKTDKLDPKSIAKTYYSHSLHNSHKPETIYHELRELSRYYEDILVHIRKDKFSFRAQLDVVFPGYDTLFDDLYSPVSLTIIEKYPHPEMLQKKKINTVSKVIQSKTCHRQAASDTMADKAIEYSKTIYSGCDKDDIEVLILQRFIKKLKEDMAEAERTIGEMIKLAQELPDFSIIKSIPGIGDNLAARIIAELGDMTRFKKKNELVAFAGLDPRISESGQDDGDHMHITKKGNKRLRCLLYLAVTCSIRLKRDDNSIKDFYIKKKQQSNPMCSKAAETACASKLVRIIYSMCKTGELYQYNK

SEQ ID NO: 421039 - protein, 360 aa, unidentified
MRTKVNENLFNGQPFYVGIDTHKKSWTVSIFGEQYEHKTMSQNPDPVLLASYLKRNFPGGDYHAVYEAGFSGFGACRELRKLGVNCIVAHPADVPTSTKEKLQKTDPVDSRKLARSLRSLEFEGIHIPDPKLEADRALVRQRFRAVKDLSRTKNRVKSLLFQFGIDIPERFSSAQTRHWSKEFLNWLKALSIQEASLKQTIDNYVHIGESQRSYLLVLNRQVRALSQTESYKGNYLLLITIPGIGLTTAMHILTQLGDIRRFESLDDLCNYVGLVPKMHGSGEKMKTGKMIKRGRKELKIMLIEASWEAVRKDPALMAKFNELSLRMNKNKAIIRIARKMLSRIRYVLSHHEEYQMGVVC

SEQ ID NO: 421040 - protein, 351 aa, unidentified
MLYLGVDYAKKFSVATLLDEKGNLVKRGTLSNRGAEFERFLAGYQDVVAVVEAGRNWHVMVDILQPLTREVKLAHPYKTRLIAEARIKTDHIDSESLAHLLRTNLIAEAYLRGAESRKQQRILRSRCFYVRLRTKLKNRIHHLVDGQPEEIRLQIPKVSDLFGKAGRSWLKGLRLQQPDQDMLQELLTLEEHLSGLVAQSDKLIAQLFEENQAAQRIKTLPGFGEFLSVLVAVEIADIHRFRSAKHLASYVGIVPSTYSSGGTTRHGKITKLGSKWLRWALVEAAIHAPLTSKALKSYSGRIRRRKGTKAARLAVARKLCHIIYRVLTENRHYYEDLQMRSRPQLVNSAAK

SEQ ID NO: 421041 - protein, 356 aa, unidentified
MARTNVSSVQQFVKGFEAHPFFIGLDVHKRSYHLALRRIDGKTVTLVCPADPSGLVGAIQRLCIRVDGVAYEAGPTGFSLARALRAAGIQTLMAAPSRIPRAVSAGAKTDRLDCIRLADYAAKGLIRSIAVPTPEQEAKRSLQRRRQDIVDARRRCKQRIKSFLLFLGLPEPKPSIRWRRGTAEALRELPMDPHARLTLESLLRELTFYDQELREVQEQLRQMGRQQEHLMSCLQSVPGVGDVVATTFMVELFDPERFERAEEVASYLGLAPMVRHSGEKTPSGRLRPAGQTRLRSLLIEAAWMWRQYDPYARTLFNRFLGRMGIAQKAIAAVARKLAIILWRLYVEGRPYRLAVI

SEQ ID NO: 421042 - protein, 359 aa, unidentified
MRTITIGVDLAEQVFSVCAADAAGRIQERRELRREAFIQWLPSVPEGTVVAMEACSGAHHWARRCQDYGLQPRLIAAQFVAPFRKSRTAKNDRNDAEAIATAARQGNMRFVPIKSVDQQIRLSWHRVREGYKAEALATSNRVRGLLAEVGVIVAQSEAALRRALADLDSLPIPLSLSELLRNVEAHQQQLRERIAQCDLRIQSHAKADEACMRLQAIIGVGPLTADAVVATIGSAHDFKNGRQFAAWLGLVPTQHSSGGRSRLGRISCRGDGYLRTLLIQGARSSLQRAKAVAWEKATPEQRWIQDIERRLPFGKVLVAIANKHARQLWAMLAHGERYDAEAWLKHPMATAGAFAEGIE

SEQ ID NO: 421043 - protein, 367 aa, unidentified
MKQQTSATSETLIKDRMIIDFTGKTIYVGIDVHQKDYQVAKVYDGIYLGNHRMAANGDLLINHLHSRYPGAEFKCVYESCAWGFNLQRKLTAAGMQCMVVHAADVSTSDKERKRKTDKVDALKLARNLAAGELKAIHVPDETIQKERNLIRYRAKLVGDINRSKNRLKSLLKYQGIGIPAQYAKNNWSRNFLVWVEEQATKDKLLGDTLLLMLEQMKLLRQLLLKTEKKLRELRNGKYESKVKLATSVPGIGPTTAMLFLLEVGNVRRFKGFDALNDFVGLCPDTNSSGETARDCGITARRHKQLRSAFIEAAWQAIRIDPVLMNSYQELTKRMRGTHAIIRIARKLLRRLRAVLLTGVEYQIGVVA

SEQ ID NO: 421044 - protein, 406 aa, unidentified
MELAALHKRVIGLDVHQAQITACAIIEEFDGTMRIEQRQFGAFKRDRRALAEWAAALAPDELVMESTGIYWKSPYAALEAVGIRARVVNARHVKHVPGRKTDVGDAQWLATLARAGLLRASFVPPAALRELRLISRQRQKLSGQLSSEKNRLHKVLTEGGIRLGVVVSDLHGQSARTMVKAIIAGQSPHQVLKLASRRLKASREELFDALQVELTGSHCFVLDELMQHIEEIEARIARFDARLLKGLASEKNALTLLQTLPGIDLIGAAMLLVEIGTDMDAFGSAGRLASWVGICPGNNESAGKHKSGRLRKGNSHVRRLLCEFAHAASRTRSVFQSKFQSLIVRRGHKRAIVALAHKLLRTIFFMLKRREHYRDSTTDYEALSVQRNAPRWIKALTRFGFIPAPG

SEQ ID NO: 421045 - protein, 354 aa, unidentified
MTSTKYIGMDVHKESISIAVMNAAGKIVMECVIETKANTILQCIDGLRGDLHVTFEEGTSATWLYDLLKPHVSELIVCDPRKNASMREDDQNDKIDARRLAELLRIDHLSPVYHGEHGLRTLKELVRSYLTVTKDLARVKTRVKAIFRSWAIPCNGKEVYASCHRAEWLEKINEPGVRRRAEFYYQQLDALRVLRQGVRRELVAESKKQKAWKQLCQIPAIGPIRAAVLLGILQTPHRFRAKRPLWKYSGLAIETCSSADHHSINGQLQRSKKNSVRGLNRNCNHDLKNLFKGAAVVASSKPGPFQEFYTALVAKGMRPELARLTLARKIATIVLIVWKKGVCFDANHLKPQTA

SEQ ID NO: 421046 - protein, 363 aa, unidentified
MIKHRSFVGLDVHARTVEGCVLDADSGVITHRKLPAATPGIVGWVAALPAPQIATYEAGPTGFGLARQLKAAGITCLVAAPSKLQRPSGDRVKTDARDAEHLTKLLQLDQIVAVHVPTIEQETARDLVRAREDTREVLMSARHRLSKLLLRHGLVYDGGSAWSRPHDRWLREHRTSGTAAFTTAFDAYYESTVQAVARRDGLDKAIEEMAANSEFTPLVTRLGCLRGIAPLTGFSLAVEIPQWDRFTGNTIGAFLGLVPSEHSSGQSRFQGSITKTGNLHVRRLLVEAAWHHRRDYRPTTRSVMQPRWDRAPVAARLRGQAGNVRLHRQWVAFTARKKEPVVANVAIARELAGWCWSLAVMDD

SEQ ID NO: 421047 - protein, 381 aa, unidentified
MAQKRRARQHCNKACPPRVFIPWMRREVLMVAVMIGIDPHKGSDTAVAIGPGEKLLGEIRVRACPSQAAQLVAWAAAWPERAWAVEGAGGLGYLLAQQLVAAGERVLDVPPKLAARVRLLEAGDTNKNDPNDALSVAVAALRSRAPRPVIAEDHAVVLKVRAKRHRDLARARNQAACRLHAVLCDLVPGGIRKEITAGQAARILDEVTSAGAVAEARCELAAEFLADIRRLDAQLRETKKKLAAAVKAAGTTMTKIFGVGPVIAGTIIGDVRQVSRFPSRDHFAAYNGTAPIEVSSGNRKTHRLSLRGNRRLNHAIHMAAITQIRHRHSDGRAYYERKLAEGKTHKEALRCLIGGLSVPRPGWPGCGSPVAPGDGLVAEPL

SEQ ID NO: 421048 - protein, 412 aa, unidentified
MYCGIDWAEKHHDVALVDADGKLVAKRRIADSVAGFAELTAMLADAGDGDEWPIPVAIETSRGLLVAALRASGRLVYPINPMAVARYRERHSVSRTKSDHVDAMTLANILRTDAHMHRPLPADTELARAIAVLARAHQDATWRRTRAGNELRSLLREYHPGFLAAFVGGSATNLATADARAVLAIAPTPAAAATLTKARIVAALRRGGRKRAAAKLAERLHQDLRRPQLRQDPMVEEAMGAQVLRLLATLNTECDSVDQLGDAVAAAFAAHPDYKIITSFTGLGDLTGARVLAEIGDDRSRFADARSLKAYAGSAPVTRASGRSLSVTHRRVKNNRLAAAGFVWAFVASAHSPGASRLYYHRREHGDRHAAALRNVFNRLIGCLFHCLQTGQTYTEVTAFPRPGTQSESLAA

SEQ ID NO: 421049 - protein, 322 aa, unidentified
MNASHGRRAVSEVFVGVDVSQAQLDVSLRPAGTLLSYPNTCSGIEELIQALGPLCPTLIVMEATGGLERDLIAHLHAQSLPGVVVNPRQVRDFARSVGRLAKTDQLDAAILSRYAEAIRPPVRQLANDLQQQLRAWVERRRTVSDMLVAEQHRLQRTRDVEVRSDIEAHIEYLKGRRTFQDNQLETLLAQPAFEAVATQLQDIPGVGRILTATLLAHLPELGKVNRKEIAALVGVAPYNRDSGKLRGVRRIWGGRPEIRPVLYMATVASLRVNPTIRAKYDRLVAEGKPKKVVLTACMRSLLVMINAMCRTHAPWCPPVLAA

SEQ ID NO: 421050 - protein, 349 aa, unidentified
MKYIGIDHHKQYSVVVVMDEKGTIINKGRFPMKRASIKEYMMGIKGEDGEETKAVLEASYGWEFPYDVLSEMIDEVILAHPLKTRAIAEARIKHDLLDAQTLAHLLRADLIPQAYAPSLEVRSTRSLLRFRAFLTRFKVSTKNRIHALLDRHHIEDAGFNKLKDKFGKRGRAFLSTVTFPGYDTLVLKRSLELLDTIEEIIKEIDKILEKILAEDPIAQLLDTIPGLGTFYSLLIRYEIGDIHRFPSAKKLCAYVGIVPSLSSSGGRSYTGRITKQGNRLLRWAIIEAVYPAIRKDAELRLYFERIAARHGKNTAKVATARKLLSIVYRIWTDNRPYQYREKAVALFCH

SEQ ID NO: 421051 - protein, 327 aa, unidentified
MAAATGAVQDKASFPASPAGLDRARTWIAHRAGQQAALVVIEGIGSYGAGLSDRVLAAGFPVAEPSVMGSADRRGVGKTDDLDAARIARSVLSVDIDRLRRPRADGSRVAMRVLVVAREQMTCERTRAVNALTALVRTVELGVDARKSLAYSQIKEIATWRARPEDATTATYRAEAVRPAKRIRALDAELVDNRKSLDALVKTNAPELTAAVGVGAVVAATVLIAWSHAGRVRSEAAFASLAGTCPVPASSGNTVRYRLNHGGDRRLNRALTTIVIVRMRVDPQTRAYVERRRGEGRTTKEIMRSLKRYVTRQLFRTLAAAHPILVS

SEQ ID NO: 421052 - protein, 426 aa, unidentified
MNEVESSRLKQFRQLRKEIRGSKDHLIVGIDVAKDNHKGFFGTARGKTLFKRLAFENTREGFKRLLIQTEAVKAQHGLKKTVFGLEPTANYHKPLGEFLIKGSHGVVLVSGVAVKRNRELLDGRWDKHDTKDSANVADLISQGKCLFYDYPSLPLRELRSLVSLKRRLKKQEHGIRARIRNHLLAQYFPELDRYYGQSQSDALSIVRWCVNPSVIAGMDYGQFARLVAPQRRSLAQQKRLTAIWEKAVHSIGCEAGEALEFEATVMVEVLEHIRDALRATDQKIEGICLQFPEYRYLLTIPGFGPDVSSKVLAAIGNPFRFTTGAQVLKMAGLDLSANRSGKTMDAATPVLSKKGKAYLRYALYQAALIASTRNKHFIVYYTHTLRGREKEKGIKTKMRVKLAAKLLIIAWTLMKKKEPFNPEYLK

SEQ ID NO: 421053 - protein, 422 aa, unidentified
MKNSTASKLRQIPEGYLTAGVDPHKKKHAVVLRTQDAMVHSRFKVGNSRQGFNELLERTGWCMRRVGARGVIFAIEAGGRYWRPLAYFLDANGIPFRLVNPFTLKRRREGDDVDRRKNDYHDAETAAELLRTGAFTETRLAEGTYAELREAYHAHHRLGKEITQNSNLLGSLLDGVFPEFCGVFRDVDSKTALAVLEAYPLPRTIAAMTLKEFQDAMLKRCKGMRIMRKKLAAIHEAARESIGIKAGSGAVASEVSMLVERLRLLQGQKEKSAWLLVGLEESLPESRLLLSVNGIGHITVAGLLGELGPIRNYQNAKQLVKMAGINPVQSESAGKRGGRTPMSKKGRPLLRHCLWEACTGLLRYNASFKSWFEGLLERPVHGHPLNKREARGAMCRKLLHLVFSLVKNGTSYRTEEMVSATV

SEQ ID NO: 421054 - protein, 326 aa, unidentified
MEHELHYIGIDTAKEKLDVDVLRPDGRHRTKKFANTTKGHDELVSWLKGHKIDHAHICIEATGTYMEPVAECLYDAGYIVSVINPALGKAFAQSEGLRNKTDTVDARMLAEFCRQKRPAAWEAPHPLERALRALVVRHQALTDMHTQELNRTETAREVQRPSIDAHLLWLEAELKRLEKQIKDLTDDDPDMKHRRKLLESIPGIGEKTSAVLLAYIGLKDRFAHARQFAAFAGLTPRRYESGSSVRGASRMSKAGHVSLRRALYMPAMVATSKTEWGRAFRDRLAANGKKGKGILGAMMRKLAQGAYGVLKSGVPFDASRHNPVAA

SEQ ID NO: 421055 - protein, 333 aa, unidentified
MAMQEVIVGIDISKRFIDVAFRCPDGKTLTSRFDGSVQKQFEGIVDYLNQNGLFSTKFVMEATGVYHLPLTYILVKNGYSVFVDNALKFKRFAQMRLIRAKTDRSDACLIAEYGATQEIRPFTIPETNQIQIKQYVQAVQDLQQLKTDMLSRVEALEIHPNKNTVLLEMWEEQITGIRAQIKQLNHKISKLAESWQPEAYSNLLSIPGIGPLTAGAFIGQFGSFESFENANQVAAFVGLNPSIYQSGSSVQSKRGISKQGHSYLRRLVYMGAWMAKECNPPCKALFQRLLLKHGSKKKALVAVAHKLVRQAFGVVKNRAPFEASFAENYVNVT

SEQ ID NO: 421056 - protein, 391 aa, unidentified
MVCVGIDVAKDKHDCCILDSDGTIRADCITIPNNMDGFKQLLQTIRDCTKKSDKIKVGLEATGHYSYNILGFLLDNDLAVYVMNPLHTNLYRKSLSLRKTKTDRVDARTIATMLLSDVDLKSYTDTAYHNEELKSLTRYRFDKVRERAKLKQSVSRLVTILFPELEKLVPSLHIASVYALLSEYPGAKQISEIHLTKLTNLLATASKGRYGKDKAIQIRDAARTSIGSVMPAKSLELKHTIKLIRELTSEIDEIEVSIQKIMDELNPPILSIPGVGIQSAAMILAEIGDFSNFESPDKVLAYAGCSPSTYQSGKLTNCYAHMEKRGSRYLRYALYNATKYVCYWNPVFAEYLAKKRAEGKHYNVALSHATKKLVRLIYALQKSGKAYLTAA

SEQ ID NO: 421057 - protein, 404 aa, unidentified
MPSIDSTPNRFIGLDIHKHYFVAIGVDHQLNQIFGPHQANIHHLEQWAEKNLTKQDAVVVEMTTNTYSVYDALLPLVHSVTVVHPPHVALIVRAQVKTDKKAALSLAQLHAAGLLPSVWIPPVEIRQLRALIAHRRKMVRLVGTAKNRLHAFLQRHRIQPPGDFSLFDPMLKDWWKVQPAAEIEKIVVQSDLETLEFAQQQVEKLDQRINEIAAKNETVPLLIQLPGIGPLTALTIIAAVGDIARFGSAKKLVGYAGLGARVHDSGMAYTTGRITKAGRRDLRRAMVDAANHTVDKNPFWRAQYQQLEKRLGRSKAIVAIARKLLVAVWHIWSKEVADRHADPVKVARSYFGFVYKTGVRNLPEKQTALGFTRKQLDRIGIGMDLKEIPWGSKRFKLPPSQLRK

SEQ ID NO: 421058 - protein, 331 aa, unidentified
MQKKEFFIGVDVSKLTLDVAVHGSKNHIRISNNSEGFKQMVAWLKSLKIALEDCWFVLEYTGGYEYRLVQFCHAKKITFTRVPGLQIKKSLGMQRGKNDKIDSKRIAEYGYEKREKLQQSKACNPAITRLKQLLTQRSGFVNDKKAHEHRMKELLAMMEFKAKDPIIRYYKQGVNFAIKMIVKTEAEIKKVISKHEAMSRNFALITSIPGIGNVNGWMTIAYTENFESFADGRTYGAYIGVVPYEHSSGTSIRGKSRVSHMANKPLKADLSMAAKASVQHDPEMKQYYERRIIMGKRHMGIMNEVKFKLVLRMFAVVNKGEVYVKNQKLAA

SEQ ID NO: 421059 - protein, 348 aa, unidentified
MLIIGCDYHPSWQQICWLEKETGETGERKLEHSSGEAERFYRQLPGPVLVGMESTGNCQWFMELLGSLGHELWVGDALKIRAADVRQQKHDRRDAALILKLLLEGRFPRIWVPSGEEKDLRQLLIHRYKLVRLRAQVKNELQHLAMNQGITKKRKLWSQAGEKVLRELPLKPWTSQRREDLFRIREMLNEQIDRLDRAVVEAAEKNERARLLMTQPGVGPITSMAFVLTMGDVARFQRGKQVASYLGLIPREYSSGGHQRFGPISKQGNRFLRMLLVEAAQCAVRYDPQFRNEYLHRCHSKAKGVAKVAAARKLAIRLYWMLRTNKGYPEVVRAESSSRVPLVVRYHG

SEQ ID NO: 421060 - protein, 374 aa, unidentified
MAILVWVMRWTPHHRHRIVPDLMCFKRLSQNGVSIMNNNSVISVDIAKNIFQICHLNEHNKVTTNKKVSRNKLLTSILNLDSKQVVMEACYTSNFWGRLFERHGLTVKLIPPHQVKPFVIGNKNDHNDAVAIAEASRRPRAKFVAVKSLEHQDIQSLERIRERLIKNRTALTNQTRGLLAEYGITIKPSLKQLRSAIPLALEDANNQLTVISREFIQALFDELKDLDQRISDNEKSSAQQLESNDDYRRLQTIPGIGPVISRSIICAINHVQQFKDGREMSAWIGLTPKQHSSGDKSKMLGISRRGNQALRKHLIHGARSVVRWCEGKSDPLSLWLQKLLKTKHKNRVVVALANKLARVAWAILAKNESYKLNP

SEQ ID NO: 421061 - protein, 377 aa, unidentified
MHSEYIAAYIGLDVHKETLAVAIAAPERLGEVRYYGTINNEAQAVRRLFQKLQGLYGNILSCYEAGPCGFGLYHQLTAMNIKCQVIAPSRIPKSPTDRIKNDHRDAISLARLLRAGELTPVWIPDLTHEAMRDLIRARAAAKRDSRVARQRILSMLLRTDKRYAGKHWTGKHRTWLANQSFSQPSQQIAFQHYCQSLEQIEDRILQLDQEISRLLPEWSLCNLVCQLQALKGVGQLIAITLVAELGDFSRFSNPKQLMAFLGLVPGEYSSGNSIRPRGITKVGNSELRRLLYEAAWSYRTPAKVGAWLIYYRPDSVTQYSKDIAWKAQQRLCSRYRTLTAKGKKSQVAITAVARELTGFMWDIALAAQSSFSQQKQN

SEQ ID NO: 421062 - protein, 403 aa, unidentified
MNAVGIDISKGKCMVAILRPFGEVVASPFEIQHTAHELRRLVERLKSLEGETRIVMEHTGNYYLPVAMHLHEAGLYVSVVNAILVHDYGQNSLRRVKTDKKDAVKIASYALSHWLDLPQYAPEEDVRHMLKTCARQCNQYVKQSVMLKNSLIALLDQTFPSVNMLFSSPPRKGDGHEKWIDFVGKFWHCECVNSLSKNVFTQRYQKWCKRTGYNFLSTKAAAIYDFACIQVSTLPRSTFAKQLITQAVSQLNSLSETLALIRQQMLSLASGLPEFPVVMAMQGVGNVLGPQLMAEIGDVRRFNRKQSLVACAGIDAPPFQSGAFEAQSTGISKRGSSSLRKTLFQVMDCLLKHAPSHDAVFQYLDKKRGEGKHYYVYMMAGANKFLRIYYARVKEHLGSLAVQ

SEQ ID NO: 421063 - protein, 423 aa, unidentified
MDILYERVAGLDVHRDTVVACARIMVDGKAERECRTFAATTEQLVELRRWLEESRCTHVAMEATGVYWMPVFRILGDGAFDLIVANAAHIKNVPGRKTDMNDAMWIADLLACGLIKRSFIPEEKVQELRALTRTRKQLVREQTRHVQRIDKTLAEANIKLGSVISDIMGASGRRIIQAMIEGVRQPNKLAELAGKQIKASPKELYDALHGRLTDHHRFLLGLHLKQRDDLDETIRKLDAEIAQRIECMEAEVDGSKTPFRHLIGLLTTVPGVNAVAAPAILSEIGADMSRFQSAGHLVAWSGLCTGQNESAGKRKSSRLRKGAPWLKTMLVQCAWAAKRSKNSYYRAQFFRLQARRGPQKAICAVAASILTAIYHILKNGTEHHDLGAAYFDRRPTQAKASHLVSRLKKLGFTVQLQPIAEAA

SEQ ID NO: 421064 - protein, 352 aa, unidentified
MQHFIGSDMHTRDQVVAWIEEGTGEIKKRRLEHEGKGVKEFYAQFPRGTVVGIEATFPAHWFERLLGELGHELWVGDAARIRASEVRYQKTDARDAELLLDLLRTGRFPRIWVPSLAERDLRQLLVHRMKQVRARTQVKNQLHALAISQGVCRKGKLWSVKGRKELESLALLPWAARRRKELLETLDRLDEQIRELDRAVEEAGREREEVALLRTHPGVGMVVSLAFVLTVGPVERFSNSRKLVSYGGLNPRENSSGGRQRLGSISKQGNSMMRWLLVEAAQTAARLDPQLRRLYQRLKKQKTSAVAKIAVARRLAVRLFWMLRTRNNYTQLVHMSGSPSSAVVPPTAEPNS

SEQ ID NO: 421065 - protein, 347 aa, unidentified
MKFYTKLHDFYCGIDLHARILYVCILNREGEKVLHKKIKAEKSALAALISPYLGNLVIGVECMHCWYWVSDLCAEQNIEFVLGHALYMKAIHGGKAKNDKIDSYKIASLLRGGNFPLAYNYPQAMRSTRDLLRRRTKLVRHGAQLKAHIVNTNSQYNYPALELHMKNPSVREIFRHRFEDEAVQRNINFDLAILDSYAKELKYLEYFIERKAKQHRPDYYAQLRTIPGIGIILAMTILYEIGDIERFESVQTFASYCRLVKCKAESAGKTYGSSGNKIGNGHLKWAFSEAAVLYLRGNDKARRYLNKLQKRMSKAKALSVLAHKIGRCVYYMLKHKTIFNNERFLNA

SEQ ID NO: 421066 - protein, 342 aa, unidentified
MSEIITVGLDLAKNVFQVHGADGSGQAALRKKLRRDQVLAFFGQMPPCVVAMEACGGAHFWGREIGKLGHEVRLIPPAYVKPFVKRQKNDAADAEAICEAAQRPTMRFVPVKSEETQGAAMVFRIRELLIRQRTQAINALRGHLTEFGQIVPQGAANAAKLIAIVEDPDSGLPVDAISTLKVLVAALGHLEAEIDKLDAEIARRAKENEVARRLMTVPGIGPLIATAIAVLAPPPETFRKARDFAAWLGLTPRQHSTGGKQRLGATTKMGERSLRRLLIIGANSVIIKRHVHASALPGTWLGGMLTRKPPMLVRVALANKMARIVWALMAKGGVYKSPAAAA

SEQ ID NO: 421067 - protein, 348 aa, unidentified
MKESLFAGIDLHSNNLMIGIVDQDGKRLKHQKLDCNLQQVVDFLKPFQPRFKSLAVESTYNWYWLVDGLRALDYPVALANPAEIEQYSGLKHANDKSDAYFLAELQRLGILPTGYIYDPELRPVRDLLRRRMNLVQQRTALLLSFKSLYSRTTGGALSLSRLKSMDEAEVKTLYEHPANGLIATIQKEHIAQLDESIERIEQAVLKSARALPCYQRLTTLPGIGRILGMTITMEVGEIERFEAQGNLASYCRTVDSKRLSNDKKKGANNAKCGNKYLAWAFVEAANFAKRYDDQCRQWFDRKAAKTSTVIATQALACKLAKAAWHMMAHDTDYDAKRMFPELAQRQRK

SEQ ID NO: 421068 - protein, 333 aa, unidentified
MSKITLYVGLDYHQRAVQVCVMNGRGEILVNTVARNVAEEVVAAAAAAGARVEAGIEACTGAANLADELLKLGWHVRLAHPGYVQRLKQSPDKHDWGDARLLADLIRVNYLPTVWLAPVDLRDLRYVVRYRQQLVMQRRSAKQRVRAILRDQRLTGPGNPWTIAWREWLEQKAPLLPQSRWVLQHLLGQLDQLKKEISEVERHLQELTLGDPLVQRLLKLRGIGLVTAVTIRAEIGQADRFQSGKQLSRFCGVSPRNASSGERQADAGLIKAGNPQLRAALIEAAHRLKHFDPRWEAFAKRLSTRGKPYCVIIAAIANRWVRWLYHQMKTVSA

SEQ ID NO: 421069 - protein, 353 aa, unidentified
MHRYIGLDAHAQSCSLGVRGSTGKRLGLQVVDTNGAALKDAIRAIPGIRHLCMEEGTQSAWLYELLEPEVDDIVVIVPEKRFGSKDDARDALSLAEDLRVGAIKRRVYKRVGPYSELRAAVRSYMQLRSDVQRAKSRLKAIYLSRGLHMEGTKVYQRKNDTWDRQLPPAQRRSVEILRVELGALTDLWAEAEERLLQASRKHPIVQTLATAPAIGPIRAAQIVAVVLAPHRFRTKRQFWAYCGLAIVMRSSSDWVKDRHGHWVRAQTSQTRGLNRNRQPLLKEVFKSAAHQVATQMTKHPLHHAYMRLIEGGMKPELAQLTIARRLAAAVLAMWKHEEVYDPERHCMQMTAQA

SEQ ID NO: 421070 - protein, 409 aa, unidentified
MDQLIERCCGLDVHRDTVAACVRVPGPNGKQRHEVRTFGTTAVELLALRDWLEAHGVTHVAMESTGVYWKPVFYVLEEAFTCLLVNAAHIKQVPGRKTDVKDCMWIAQCLEHGLLRGSFVPPAAIREIRDLTRHRKVLIQERTRAANRVHKLLEDAGIKLASVATNILGVSGRAMLEALVHGTTDAEVLADLARGKLRKKLPALRQALAGRFRPHHAFLVSQLLAHVDYLDEAIATVSEEVEGRLAPFAAQLTQLDTIPGINKRTAEVIIAELGVDMSCFPSDRHLASWAGICPGNNESAGKHKSGKTRKGNRWLRMTLIEAAAAATRTKDSALQARYRRVMRHRGHKKAVVAVAHAMLRAVYHLLAEGTTYREPGTAYYDRRHTHRVTRRAIQLLERQGYRVVLEPAA

SEQ ID NO: 421071 - protein, 352 aa, unidentified
MIVLGADMHKSSHTITGVAAATGEMLGDKTSSVGARGFDQVLQWARALGVERVWALEDCRHVSGSLERFLIARGERVVRVPTRLMANSRRASRERGKSDRIDALAVARAALAEGIQTLPTAELAGPELDIRLLVDHRERLVRTRCALNNTLQWHLHDLWPELELPGSSLFYGKWSTRIARRLARAEQTMRVRIARDELRRLREFTQAINALESEITELVGHVAPQLLTEPGFGPLTAAKLVGEIAGAERFATDAKLARSAGLAPIPVSSGRTDRHRLDRGGNRQINAAIHRVAVTRARCHQETIEFVARKKAEGKTHREAIRCLKRHLARRIWQLLRAPHPVSETTPQPSTP

SEQ ID NO: 421072 - protein, 338 aa, unidentified
MKTYAGIDLHSSNNYIGVINESDKRLYGKRLPNDIDLILGALEPFKSTLQGVVVESTYNWYWLIDGLEEKGYKLHLANPSAIKQYEGLKYTDDKWDAFWLAHLKRLGILPEGYIYPKKDRPGRDLLRRRMMFVRHRTSHLLSLQSMIDRNLGIRISSNKIKKLTGAETEQLFKSEYLRFTAIQHLDAINFFKTKVNNIENEILKVAKLRNDYKLLTTTPGIGKVLALTIMMEVGSIKRFLQVSNYSSYCRCVASKRLSNGKKKAENNSKNGNRYLSWAYVEAANFMRRFCPDAQRFYQRKEAKTNKIVATKALANKISKATYYIIRDQVPFDKNKLFK

SEQ ID NO: 421073 - protein, 402 aa, unidentified
MSNYFAGLDWASKTHALCVIDERGGVVERFDIDHDAGGLTELRRRLRRFGSPPVAIERPSGLLVDTLVDADFTVVPIHPNAVKASRPRYRSHGGKSDASDAYVLADLLRRDGHRFKALSPQSDEIRALRALVRGRDDLVATRVHLANQLRTLLESFWPGAAAVFADIDSPIALAFIERYPTPESASRLGPKRMAAFCAQHAYCGRRSPDDLLARLQEAPSAVSAETEMEAKGELARCVARTLTRLVEQLRLLSSRIEHLVASLDDGRILMSFPRAGRICAAQILAELGSVRERFATDAQLAAEAGVAPVTYESGKSKAVTFRWACNHRLRAAITCLADNSRHVNAWAAHVYANARARGDHPHSIRILARAWLRVIWRAWTDRKTYDPMQHRAAQLLLKAAGG

SEQ ID NO: 421074 - protein, 415 aa, unidentified
MEVVHPRCAGIDVSKRDAKVCVRVQGGHGRKTSSTVTTWGAMTNQILALKDYLAEQRVTVAVMESTSDYWRPFYYVLEADFEVLLVNARDVKNVPGRKTDVSDAAWLADLGAHGLLRASFVPPEPIRQLRDLTRARTHITQERTREVQRLEKLLESAGVKLSSVATDITGVSGRLMLQALIDSQGTADPAAMADLAKRRMRSKIPELTEALNGRFTAHHAFLTRLFLDRIDVHTKDIAALSERIGELMKPFLPARDLLESIPGFSQIIAEIVIAETGGDMTQFPTAAHLASWAGVSPGSNESAGRVKSTKTRPGNRYLKGALGVAALNQARSNKTYFSARYRRLARTRGPMKAIVAVEHAMLTAAWNMLTNAEFYRDPGADYYTRHDPAKAKARAVKQLEALGYRVTVQPLEQAG

SEQ ID NO: 421075 - protein, 331 aa, unidentified
MKKKPFIIGIDVSKSKLDIYIYQLEKHFVVSNDPKGYAQMLEIIITECKCKTKDLFFCFENTGRYSKPLCALFSSDGISFLMSPALDIKKSMGMVRGKNDKIDSKRIANYAYEKYDKLKPTTLPNNNILQIKSLLSLREKLVRQKTACKNGICDLTDCFKDGENQLIIDIQKRLINNLNIEIEIIEKKIKEIINDNDDLKKNFNLVKSVDGIGDIIAFYFIAFTNNFISFSNPRAFACYCGIAPFESSSGTVKGKSHVHNYGNKQLKSLLNLASMSASNRKGELAIYYQKRVSMGKNKMSTLNIIRNKLLYRVFAVVKRGTPYVDLYKFAS

SEQ ID NO: 421076 - protein, 362 aa, unidentified
MTINAGVDLHKTQFTVFVKQSGNQFEQYSTEEDGYKKFLTRIQRWKKNGMTVRIGVESTGNTRYFKNRMEQAGAEVVVINTLKFKVVNESVKKTDRHDAATIAEFLEKDMLPESRLCSEESEQIRRLLKVRTTLVRTMVMVKNQIHALLTGLGMKDSRATLQSKRGRQKILDTLRKADNELVVQPLFETIEQLEKSVKSIESELEKLTEGDRTVELLMTIPGCGKIGAWTIRAFTDDISRFASAKKYSSYAGLVPWVQNSNETIHHGKITKRGPEELRTALVQVVMGMRRCRSTVSWRLMERYSEMKRNKGSGKSIIATARKLSTIIWCMLNTDQEFDPSLMIDRQLIRKADSMRTTASQSA

SEQ ID NO: 421077 - protein, 367 aa, unidentified
MTSVALCTGPIHLGLDVSKNKIAVGILRPDEVSPDTEVIFNDEASTRRLIGRFPDRGRLRVCYEAGPSGFGLYRLLSSMGVACEVVAPSLIPKAPGDRVKTDRRDCRRLARLHRAGELVAIRVPTEAEEAVRDLCRARADLVCDRTRTRHRLSKFLLRHDRIWRDATAWTVKHEQWLVGQRFDDPALRTTYGHYRASLAARDAELAAVEADLAHWFSHGPFAEAVTRLAAYRGVAQLGALTIASEVGDWRRFPAARTFMGFTGLVPSEYSSGESVHRGHITKAGNAHLRTQLIESAWAYQHRPNLGLTLRRRQQQVTPATAARSWTAQQRLCARFRRLGARKTSRNVVTVAVARELAGFLWAEMTTD

SEQ ID NO: 421078 - protein, 344 aa, unidentified
MQITTIGLDLAKNVFQVHGANERGKVVLRKQLRRDQVAAFFANLPSCLIGMEACGGAHYWARKLQALGHTVRLMAPQFVKPYVKSNKNDVADAQAICEALTRPTMRFVPIKNVEQQTVLSLHRVRQGFIKARTAQANQIRGLLAEYGLVVPQGISYIALRVPDLIEDANNELPGAFRQLIDRLLEHLKLLDRQVDEIEAQIKAWHRDDEISRRLEQVPGIGPITASALVATVGDAKNFDNGRQLAAWLGLVPRQHSTGGKAKLLGMSKRGDAYLRTLLIHGARSVIYRATQRNDPGSWLVKLTMRRNANVAAVALANKTARIVWALLAHDREFRPDYTPAVAAA

SEQ ID NO: 421079 - protein, 411 aa, unidentified
MDILHARCAGLDVHKDFVTACVLSPGEGSEPIKHLEQFGTTTQELRRLSQWLERAQVTHAAMESTGVYWKPVFNILESSCELVLVNSRQVRNVPGRKTDPADASWLARLLRHGLVEASFVPERETRELRDLCRMRTTLVRESVQTGNRLRKVLEDANIKLDSVASDSLGVSGRSMIEALVQGETDPIVLAELARGRLRAKRPELALALEGRVTRHHQFLLGEWLRLLHFVEEQIARLEAQIESHMPPFEAAATLLLSMPGVDRTTACALLGEIGQDMTRFASARHLASWAGVCPGNNQSGGRRMSGKSHRGNRWVKGVLTEMAWAATRTKNTYANALYRRLMIHKGKKRALVAVAHHLLEAVWHMLTLGAPYRELGSDYFDRLDRDRLKRNLVRRLQKLGYTVDVQPVSAA

SEQ ID NO: 421080 - protein, 364 aa, unidentified
MQYVSNNTELSSHEETRCQFNGSTGVIKLGIDVHQQFYVVVLQEGGTNPKPPQRFRKEGFLHWAARLKQHGGEVHAVYEACGFGFGLQRALGALGIQCHVVCPQKLDEHNKRVKTDRLDAKALCLKLDRFVQGNRDALALVRIPSEKEEQLRAIHRQREQLVKARKQLEAQGRSLMVNQGMEPVRSWWKQHRFVALPVPTWLKKLLANSQPILLALEQRIRALTVQLQSGADPDQPRGLGAMSSVLIDREIGNWHRFNNRRQVGSYTGLCPGEHSSGNTRLQSCVTKHGNPRLRAALVELAWRLVRFQPNYRPIVKWNAVLRKGALTTGAARKKAIVAVARQLAVDLWRIRTGRVSAQKLGLIN

SEQ ID NO: 421081 - protein, 418 aa, unidentified
MSTERTAPTRFIGLDVHKYYLIAVGVDAQLNEVFGPVRVPLTHLLPWAQKNLSPEDAVVLEMTTNAFQLYDDLVPYAGAVTLVHPPHVALITRARVMTDKIAARLLARLLVAGLLPPVWVPPQAVRDLRALLAQRTKLVRLSTQAKNRLHSTLHRYHLAAPAGEPFAPAQRPFWLELPVTPLERVRLQSDLATLTFAQGQVDALEETLAGLAAQDDRVPLLIQLPGISLVSAMTILAALGDVARFPDARHLVGYAGFGVCVHDSGLSHRTGRITKAGRRDLRFVLVEAAQTAANTHPHWQAELERLEPRLGRNKAIVAIARKLLVAVWHVLTERCADRYAEPARLARKFLQFAYVLGKDNRPNRQLAAEFVRDQLDRLDLGHDLVEVPRGKRPVPLPPSKKLFLKVPAKVAIPELVAV

SEQ ID NO: 421082 - protein, 346 aa, unidentified
MIIVGCDFHPAWQQIAVLDSDTGEISEQKLINGNGEAEQFYRRLPTASLIGIEACGNSQWFVDLLQRLGHEVWIGDSAQIRASYVRKQKTDRRDAMHILKLLIEGRFPRLWTPNAEERDLRQLLVHRHKLVSIRTRVKGGLQHLALNRGLQKKSKLWNVAGQKALRELPLDTWAACRRENLLGLLASLDQQISKLDTAVERAAEEHPQARLLMTQPGVGPITSLAFVLTLGEVSRFKRGKQVASYLGLIPRERSSGGKQRLGAINKQGNSFMRTLLVESAQSVTRLDPGFRKQYLHRCHRMAKGVAKVAAARRLAVRLFWMLRTNTQHPEIVRIESSPTLAVVSES

SEQ ID NO: 421083 - protein, 343 aa, unidentified
MKIIRVGVDLAKNVFQVHGVDRDERSVWKRKLKRDEWIKVLLEKIEPGCVIGMEACGGAHHWARLLQAQGYTVKLIAPQFVKPYVKSNKNDANDAEAICEAMSRPNMRFVPIKTVAQQDTQAVHRIRTGLMEQRTAKVNQIRGLVSEYGLVAPIRVSYLRSAIPEWLEDAENGLTSQFRRLLNGLWSDLQSLDQRVKELDREIVEIAAADPLANRLQQLRGVGPIGATAMLASVGDASQFKNGRQMAASLGLTPKQNSSGGKERLLGISKRGDAYVRSLLIHGARSMVNASKSKDDRLSQWVTRIATTRHPNVAAVAMANKTARIAWAMIRKGTDYQPELAAA

SEQ ID NO: 421084 - protein, 400 aa, unidentified
MRVVGMDIHRSFAQVAILDDGSIVSERRVELVRDRFLRFAASLRRDDEVVIEATGNSTAVERLLRPYVKRVIVANSRLVKPIAWARVKSDKVDAATLARLHAGGLLPEVWVADDSTTVRRRQIAERMGVLAQLVRTKGRIQAILHANLIPKYDGHLFGSAGRKWLAQLPLASEERAMIGRYVAELERVTAQLAELDKTLAQQSLDDPRALRLMTIPGVSSVVASTILASIGDIQRFPTPEKLSSYFGLTPRIRQSGDHPARHGRITKQGNSDARRMLVEAAWSAKLAPGPLRAFFARVHKKRGAPAAAVATARKLTVMIWHILSSGQDYAYARPSFTAMKLRRVELKAGAAKAYGKAGRGHDYWIKEVRDREAEYVERAERAYERMVGVWKQNPQRVARE

SEQ ID NO: 421085 - protein, 351 aa, unidentified
MDYRVYCGVDFHARQQTICCLTAETGVMSTHELKHQNKAELKAFYSQFSGPVLVGLEASGYSPWFEQLLEELGHEVWLGDASEIRRRARRRQKNDRRDAELILDLLIHNEFPRIHRPTPTSREILRMLRYRHKLVKMRTIIKNSLQALSIQSGLSLRARLFTQAGLEQLRAVPMSPVMQYQREQWLQSLEPLNQRIVEAAHWLQQQAAGDARIERLRTHPGIGLLTGLGLVHTLAPVTRFSNQRKVAAYVGFDPKERSSGEKKRYLRISKAGSRVLRFLLVEAAQKACKGDPELKRFYLRLSHRHGKPKAKVAVARKLLIRSYILLRDGIDYAEFNRRAVAARLARETASA

SEQ ID NO: 421086 - protein, 365 aa, unidentified
MKKSSTAATRSNKNLQGKLTIGLDLGDRSSWYCVLDEAGKVVSEKKLGTTPKAMKEVFAAMPHSRIALETGMHSPWISRLLSELGHEVIVAHARNVRLIGESRRKDDRLDARTLARLARIDPQLLCPVRHRSAQAQADLTVIRARASLVRARTALVNTARGLTKSYGERLRGCNPRNMDTEKAQALSPELQAALGPLLQALESLSERIAEYNQQIEAIAQQSYPQTALLKQVKGVGTLIALTYMLTLEDPHRFRKSRDAGCYVGLQPGRRNSGQSEPQMHISKEGDPYLRTLLVQGAHHILGPFGADSDLRRWGLKLAERGGKNGKKRAIIATARKLAVLLHRLWVSGEVYEPLRNTKRTISVAA

SEQ ID NO: 421087 - protein, 337 aa, unidentified
MGIDVAQDELVVCLGRLQEDFTQECYARKSFANTPKGFDSLTDWVARQTQSGTPVRYVMEATGVYHEPLAYYLEGNGHQLSIILPNKISNFFRTLDVKTVTDQTAAEAISLFGLSRTLNDWRRPKAIFKKLRQLTRERNQIIDERTVVKNQMHAEKAEAEPSKSSLARIRKRMDLLNRQEKEIRAELNMVLDLDQEVKNLVMLICTIPGVGILTAISVLAETNGFELIRNKRQLTSYAGLDVREKQSGTSVKGKPKISKRGNKYLRKAMHMPALAAIRHDDRYKAIFARLVSKHGIKMKAVVAVQRKLLEMMFTVFKKGSAYDKQYLKLQAEGMEEG

SEQ ID NO: 421088 - protein, 454 aa, unidentified
MREAINKKTNIMNTSHPYDLIIGLDRSDKKADLHLITPATGQRRAQTIDTAPEALWEWLLELRQQHPQARVALCLEQPAVHLIAFLEAYEWITLYPINPITLQKFREAFVTSRAKDDAKDAQYLAELLLTHHAKLKPWAPEDSPTRAVQQLVFHRRAVVNERTGLTNRLIALLKQYFPQALVLCGEDLWRPLATRFLLKRSSLQAVQKAKPATLKQFYYLNGSRSAKRLEQRLALVQKAVPVTDETALIESFALRVQLICRQLQLVQQTLTYYEKQIAAAYAAHPDREIFASLPGAGPVLGPRLLASLGSQRERFGTAADLQHYTGIAPVTKRSGGSCYIHRRYLCPKFHRQSFHEYAKASLLSSRWAAAYYLQQRTKGSPHQTAVRALAFKWQRVIFRCWQNRTPYQEAIYEAALRKSGSPLVALFDRVELGKSPFKNPVKNPKKTVDGLPQR

SEQ ID NO: 421089 - protein, 419 aa, unidentified
MKSTNELTHYAGFDWAKDHHEVVMVDRSGKIVAAFRFDHSVGGWEQFRQQIKPYAALGVAVETRSGAAVEELLRSDCTVFPVQPRAAARYRERKAPSGVKDDQLDAWALADALRLDGHTWRALGPEDPLIQELRLLCRDEVSLIEQRTALVNQLRAALGEYYDAALQAFDDWTLPAAWALIVQFPTPAALSAAGKRKWEQFLHVHKLWRSETAPKRLELFARAGDWKRNEAVTRAKSRLAVSLARLLQTLEHQLEDYRTAIEVLFAKHPDHDLFGSLPGAGRKLAPRLLSEVGADRARFNTPQSLQCLAGTAPVSFQSGQIHRVMMRHSCNAHLRHAVHLWADCSRAVCGWAQAYYQAQREKGKSHACALRCLGQRWLDVLWKMWQMRATYDSELHARNQQKHGSWVIQILTAPKPQTV

SEQ ID NO: 421090 - protein, 377 aa, unidentified
MATTRTVLRDQLTAKPGDLFMSFELGDKHWHISIGGERRSVSHYIVEAGHTEEVADCIAKAAARLHTARVHSCYEAGRDGWWLHRWLTELGVDNIVVDPASIEVNRRARRAKTDRLDADKLLAMLVRHHRGERVWSVLREPSPSDEDARRAHRELQRLTHERIAHTNRISSLLVLHNLRPRIVIGGRDWPAWWNANREQVPPTLRAELEREAARLKVVKEQVRAIEAARAKELAEGKQPLVAQLVRLRAIGAKGAWVLVKEVFGWRHFANRRELAGSLGLVPTPYASGDSEIEQGISKAGNRRVRALLVELAWSWSRLQPASALTQWFNRRFAGGGKRMRRVGIVALARRLAIALWRYLQTGEIPIGARLKPTGSGI

SEQ ID NO: 421091 - protein, 403 aa, unidentified
MNNVAGIDVSKGKSMVSVLRPFGEVVAKPFSIGHTGSELKELADYLKSLDGETRVVMEHTGRYYEPVARFLHEEGVFVSAVNPKLIKDYGNNTLRKVKTDKADARKIARYGLDNWAELRQHTPMDTIRMQLKTLNRQQSLYAKTKTMMKNNLIALLDQTYPGVNALFDSPVREDGSQKWVDFATAFWHVDCVRNMSLTAFAERYRKWCKRHGYNFSQSKAVEVHTGAQDLIAMLPKDALTKTMVRQAIDALNAVSASLERLKAEMQALAAQLPEYPVVMAMHGVGDSLGPQLMAELGDVARFTHRNAITAFAGVDPGADQSGTHEAKSTRVSKSGPPELRRALFLVMDCLLKTQPQDDPVYRFMDKKRAEGKPYLVYMMASANKFLRIYYGRVKEYLASLEEN

SEQ ID NO: 421092 - protein, 366 aa, unidentified
MQETLTRVKTDKKLFIGMDLHKNTSTLCVKDKEGKEILSQKILTDKNSVREFVNKVKEQSSDLSLVMEPVSQWYYYADLIEKMDVDVHLAHPMRVKAIAAARIKTDKIDAEVLADLLRSNLLPEAYFSSVDVRGWKEQCRFRASLLNLRTQVKNKVHAILFKHALKHNFSNLFGKGGRAWLSSLKFNEPFKTNLEKYLLLVDQLTELVAQAEQMIQTTVVGNPQANLLISIPGISYCSALTIMGEIGDINRFSSAKKLQGYAGLVPSTYSSGDKQIHGRITKQGSKWLRWIMIEAAYHQERCKKIPGFGSYYVSMKKRRGTKTAATATARKLLAVVWRLLKDNRPYEVSAPHCRKSGTLAPNLSSI

SEQ ID NO: 421093 - protein, 323 aa, unidentified
MGAVVNQIQSSSVSPLFVGIDVSGEFLDVACHESTEYFRVTNSPEGIADLINRLLPLKPQLVVLEATGKLERAVLEALCQSGLPGVAVNPKWVRDFAKSTGRLAKTDRIDARVIAHYGAAVKPAVRPLNDDQTQQLQALILRRAQLIEMLTAEQNRRKRAHKAALASIDELIRFLQQRIKDADHDIDSFLRSNELWCKTEVLLRSAPGIGRATAATLIAFLPELGTLSGRQIASLVGLAPFNVDSGSYQGQRHIKGGRHIVRRALYMACVAAQRANPQIKAFCDQLRARGKKTKVAFVAGMRKLLTQLNAMMRDAIPWNPPKA

SEQ ID NO: 421094 - protein, 389 aa, unidentified
MKIFVGIDIAKLNHFAAAISQGGEIILEPFKFTNDADGFQLLVSKLESFDKNSIIIGLESTAHYGDNLVRYLVAEFYQVCVLNPIKTCQMRKNNVRKTKTDKVDTFVIAKTLMMQDDLRFITFFDLDMMDLKALGRFRQKTIKQRTRLKIQLTTYVDQVFPEIQYFFKSGLHQNAVYALLKEAPSPKEIASMHMTHLANLLKVNSHGHFTKEHAKELRVLAQKSVGANDSAISIQITQTIQQIELLDSQLEKIEAEMTDIMKFNDSVIMTIPGIGYINGGMILGEIGDIHRFSNPNKLLAFAGLDPSVYQSGNFQAKTTRMSKRGSRVLRYALVNAAWNVVRNNATFKAYYDAKRAEGRSHYNALGHCAGKLVRVIWKMLTDEVEFNLE

SEQ ID NO: 421095 - protein, 341 aa, unidentified
MAQKLSVLGIDLAKQIFHLVGMDVHGTIVVRKRLYRAQGMTFIAQLPPTRIGMEACGGAHDWARRFREHGHEVRLMAPQFVTPYRKANNNDLRDAEAIAEAVTRPTMRFVPVKSVAQQDLQALHRVRERLMKARTALINETRGLLHEYGIVVPQGASTFRTHVLEQLAREVTKLTPSGLALFQQLLEELAALDARVATYDAQLAQVAQTHPVCQRLLTIPGLGELTATALVAAVSDAAQCKNGRQFAAWLGLVPRQHSTGGKARLLGISKHGDLYLRKLLVHGARSCLRWVDRKPDRRSPWVRSLMARRGWNRAAVALANKNARVAWALLSTEQVYRTAAA

SEQ ID NO: 421096 - protein, 416 aa, unidentified
MNTVPTPTSYRVLIGLDWGDAQHAVSLLPPEGSIERSTLQQDPADLDRWFKELRARFPDTQIAVAVETSKGPLVYALLTQSFFTIYPIHPATSARYRTAFRPSGAKDDAPDADVLLDLLRGHRDKLVPLTADDTATRKLAGLVEARRKMVDRRTGSVNALKHLLKSYFPLSLKVGGEDLYAPLMLDLLTRWPDLASLKAARPGFLKKFFYDHNVRRPGQVEKRLEQIKEALPLTTDEAVISVAVSEVQALVDELNVIQKHIGKLEGQIAEAFKAHPDSNLFRDLPGAGPALAPRLLVALGSDRSRFPDPQSLQKYSGIAPVREKSGSRCWTHWRWNAPKFLRQTFHEWAGQTVVWSQWAKEFYAAQKQAGKRHHAILRALAFKWQRILWKCWQTRIPYKEEIYLAARLKQLQAAKA

SEQ ID NO: 421097 - protein, 337 aa, unidentified
MKVTSFVGVDVSKNTLDVAICHEANPEKFSHQQFNNTLAGCKKMLTWLKKQSPDLGESYFTIEHTGWYTLLLCGFLQEEQLTFGLYAPLHLKRSLGLTRGKTDKIDAQRLAYYAFLHRHALKTTQLPSATLLKLKNLFAFRDRLVKTQASLKVTISDLRATAKLIDNKFIIKESEKQLKLVEHQVKHTEKQIQTTVQEDKEMQKHYQLLRSVPGIGLVTAAALILTTSNFTAFSDSRKFASYCGVAPFEHRSGTSFRGKTRISQYANKRVKALLTNGANSAIQHDEEIKAYYQRKIDEGKPKMVVINAVRVKIINRAFATVRRGTDFVKMRQYPKAA

SEQ ID NO: 421098 - protein, 421 aa, unidentified
MTQPYGNTGGVTLVAIDVAKRQNAVLIQLPGGARKKLTVTNDLQGYRELAHLLKKLKVPCKIGFEATGNYHRTLAFYLRQPGFDLELISSVAASRTREAMFNSWDKNDPKDAQVILHMLQTGLTQTYHDPLVHRINDIQELSKTYCQVSLRKTRVQHSIMTHYLPLYFPEAAKYFHTSRAEWFTALLMTFPNPAAVLKHSQAGFIKAAQVVSGRKVNKAAWLKDFYETARESIGLPVPEESEAVRMFRLVLQEHQDLCRMRRAIEARAELYLKDNADYLRLRTIPGVGAVIALIILAEAGDLRRFSHYKKFLKYCGLNLSTQQSGAFRGLSKLSKHGNSRLRYAFWVAGISAIRMRENTFRRKYENYIKSDPLNPDLKRKAYTAVAAKLARVAYGLVKSGHDYRCYHEPSVPSGIILSTSR

SEQ ID NO: 421099 - protein, 385 aa, unidentified
MYQLSGSTQAALDYNSTIIGALELSEKKWVLAVQVPGVSRHSRHVLEAGGDGLASFVERLKARCAAAGRKIARVILTHEAGRDGFWLARFLARRGVEVHVIQPSSLPVDRRARRAKTDIIDVEMLLRTLMAWLRGEPRVCSMVPIPSEADEEARRAYREREDLTGERRSIVNKIDGILATLGIKGYKALRRDRREQLNCARQPGGDPIPQKAKARIERLLDRLDLVLKLIDQVESTRDAVLKKDAPADEAERMIRSLTDLRSIGPDFATLLVREAFVRQFRNRRALGGYVGLGGTPFSSGGSEREQGIGKDGNRRVRAAMVELAWMWLRWQPDSALSVWFRARVGAMGGRIRKIMIVALARKLLVALWRYVKDGVIPDGAKMKAA

SEQ ID NO: 421100 - protein, 369 aa, unidentified
MAKSITYVGLDVHKDTIAVALAAAGLRGEVREHGKIPNAPGALRALAVKLAAAGRELRFCYEAGPCGYGVQRQLTEAGHECAVVAPSLIPRKPGERIKTDRRDAINLAKLHRAGELTPVWVPDQAHEAIRDLVRARQAAVRTLRQARQQLSGFLLRHGRHYHRPAWTQLHRRWLASLKFDQAVHHIVLEDGIAAVEAAMARRDRLETHIEAVLPEWSLAPVVEALQALRGVRLVAAATLVAELGDITRFTNPRQLMAYLGWVPSEHSSGRTRHQGGITKAGNGAARRMLIEAAWSYRFPARISRELLLRQERQVKPIRDIAWKAQERLCRRYRKLARAGQQPTVITAAIARELAGFIWAIAKQVQPMAT

SEQ ID NO: 421101 - protein, 330 aa, unidentified
MKNYSDVIGIDVSKLTLDAHIHNRVVHRVFSNTPKGYKALLSWTETYLKEQVYFFCFENTGHYSTNLSVYLSENDLDYFEESPLAINRSSGVVRGKTDKLDSAMIARYAWLYKEELVLSSPKEQDIQELGRLLSFRDQLVRDRTGKMSSLKEMQTLLSSPSTDDCCNIIKKTIHYLTKQIIALENHIKNLMSKDESLQKNYELLNTLKGVGLVLSCQLLYHTSNFKRFDSWRQFSSYCGVAPFEHSSGTSIHRKNRIHHIGDRKMKTLLTLASVSAIQCDQELKQYYNKKVSEGKPKMVAINNVRNKILSRAFAVVKRGTPYVVLQKFVA

SEQ ID NO: 421102 - protein, 340 aa, unidentified
MLYIGLDVHKEFCQACVIDESGRALSNERFSSTNEELDRFLGRFQDAKFVLESTGIWEFIYEGIERRGFEAVLAHPLKVRAIAEARVKTDKVDAETLAQLLRADLIPRSWIPPKDIRDLRQLVRQRAYLVRQASRFKNRIHAEILRRGVRRPENLKTPFAQRSIRWMRSLDIPTVTSCLNCLESVQAQIAEMNVQLQDEFNRRPDAQLIATVPGIGFYGALLILAEVDDVRRFCHPEKLCAYAGLVPTVSQSASSVKYGSISKDGSAYLRWILTESVYVHTRHDSGSQLSRFHARVAKRRGRRVATVATSRKLLRIIYWMLVRHEPFHSHGFNPVKRLHS

SEQ ID NO: 421103 - protein, 422 aa, unidentified
MLEQASDDEQIITRVAGLDIGKASLVCCARVPGVDKPGRRLQEVRTFTTMTGSLAGLAQWLGGLGVTRVVMEATSDYWKPVFYLLEAYGFEVWLVNARDVKHLPGRPKTDKLDAVWLCKVAERQMIRPSFVPPPPIRMLRDLTRYRVDLVAQAGAERNRAEKLLEDAQIKLSVVVSDLFGVSGRLMMAALIGGQRDPHTLAELARTQLRRKIPALREALTGHFTEHHAFLLGKMITRVEQIEADIREVDTRIEAHLAPFAPAAARLCDIPGIGPAAAATIIAEIGVDMTRFPTPAHLAGWARFAPGVNESAGRRKGRGSTGHGNRYLARVLGQIAVSAARTDTFLGERYRRIARRRGPSRASVAVGRSVLTIIWHLLSNPETLFHDLGSDFYLNHTSTERRKRNHIRQLEALGYRVTLDLAA

SEQ ID NO: 421104 - protein, 348 aa, unidentified
MADIDGVAGIDAHKHTHTVVAVDETGCQLACRTFTTTTAAHLELLRWAETVSDQRLWAVEDCRHVSRRLERDLLGAGERIVRVPPKLMADTRRAARTYGKSDPIDALAVARAALRESDLPTARLDGPERDIRLLVDHRDDLVAERSRIMSRLRWHLHELDPAWAPAPRSLDRPKTWTAIEARLAGVDGLVARIARDLVGRCRQLTIDINALTVEITALVTPLAPTLLAIVGCGPLTAAKIIAETAGIGRFRSANAYARHTGTAPLPVWSANRTRHRLSRTGNRQLNAALHRIALTQARWHPGARALLARRRAQGDSNREAFRILKRRLNDVVYRALHADQTATLTHAA

SEQ ID NO: 421105 - protein, 364 aa, unidentified
MTSVQFVGLDVHKDTVDATVMSGKSGTPDFEKRYTNSPKVVQRLFKSLQQRGPVAAAYEAGCMGFELQRMLKGMGVECLVIAPGKMPRFTSDRIKTDRRDARTIAKLLKNGEVTPINVPTPEDEATRDFLRAREDLKQDSGRAKQRLMKFLLRHGYTYRGGSYWTMKFARWLSELQFALPLLKETFDSYRLKVLELKDQMRLLDERVVAIAVQKQYAQRVARLRCFRGIDHLIALALVVEVGDFRRFATAASFMAYLGLVPREMSSGGSRRQGGITKSGNGHLRKLLIEASWHYRRKPSVSKRLRERREGQPVELIAYADRAMNRLHQKYIKIVVRGKTKQTAVTAVARELAGFVWGTMTGKIS

SEQ ID NO: 421106 - protein, 323 aa, unidentified
MLRRAQGVNRKKAMEIFVGIDVAKAWLDIAVHEQEEAFRTGNDDIGIVSLVKRLKKLKPTLIVLEATGGFEMLMVAELTHTGLPVVVVNAKRIRDFARATGRLAKTDKLDAKVLAHFAAAVRPALRSLRSEEEEQLTALLTRRRQVLDMLTVEKNRLVTVRAKMRSEIDAHIQWLSRSLKELDHEIKDFVAGMPVWKEKDALLQSVPGVGPVTSATMLGMLPELGKLNRQEIAALVGVAPVNKDSGKKQGKRRVYGGRADVRSVLYMAALAAKKFNPVIRKFYERLIKHGKEKKVALTACMRKLLVILNAMMHTNQPWRTQAA

SEQ ID NO: 421107 - protein, 392 aa, unidentified
MIFVGIDVAKDKHDCFISNSDGEVLYKVFTITNNLEGFHDLYQKISSVMVDASKVKVGLEATGHYSYNLLGYLIDKGLTAYVINPLHTNLYRKSLSLRQTKTDKVDARTIASMLMSDVNLKSYSETSYHNQELKSLTRYRFDKVKERAKLKVSIARLINILFPELEKLVPTLHMASVYSLLSEFPGASHVASAHLTRLTNLLSKASKGHYDKDTAIHFREAAKNSIGSVMPAKSLELKHTIKLIQELTTEIDEIETAVKRIMDEEIRSPILTIPGISYRMGAMIIAEIGDFHRFDSADKILAYAGMSPSTYQSGQLDNGYSHMEKRGSKYLRYALYNATKYVCHWDEAFGAYLEKKRSEGKHYNVALSHAAKKLVRTILAMEKSGQAYKATS

SEQ ID NO: 421108 - protein, 356 aa, unidentified
MAQNYKKDFNGQNIFVGIDVHLNTWSVSVALPGGYLKTHTQKASAKELFEHLKKNYPNGTYHAVYESGFSGYSTCYALRELGVDCMIVHAADVPTTQKEKVTKSDPTDSRKLARSLMSGELEGIYVHSKDNLDDRGLLRHRTILLRLLGGIKSRIKHLLYNNGVSYPEEFAQKSKHWSRRFIIWLQHDVQLLSETRITLDLLIEELLYFRARIFDVNKKIRTLALADRYREQYENLISIPGIGAIVSMCLLTEIDDIWRFSNQRQFASFLGLVPVMQASGDNCYVGEKTFRGNKYLGPKIIEASWITIRHDAELASKFGHLCNKGMKRNKAIVRIARKLSNIIFTILRRNRKYACR

SEQ ID NO: 421109 - protein, 418 aa, unidentified
MNSTKTKKIKKINEKTLLVALDIGKKIHYGYFRTPKNKDTKPFRIYNTGQSFKKFWKRLSRFKEEHMLDEVVVGFESTGPYAEPIVNYLRKKPVKLVQVNPMHTKRIKELTGNSPNKTDKKDPRVIADVISLGHSLTVVIPEGAAAQLRRLTHARERAIERRTAMNNQLQALVFVIFPELGDIIKPSTKTGMYLIKNYLDPKSIVSIGIETLSNIVRKNSRGRFGTDRVEKLYSAAKESVGITEGKKSILLETSHLVSNIEAENRYIESLEEQMIVYLEQIPYSHSILSVKGIGNITVAGLIGEVGDFKKFRTISEIMKLAGLDLFEVSSGKHKGRHHISKRGRALIRKLLFFAAINTVKSHGIMHTRYQKMLDNGTPKLKALVAVSRKLWRIIFALARDNTKYVENYDSKHEFKLAA

SEQ ID NO: 421110 - protein, 423 aa, unidentified
MISAVLECCAGIDVGKKWIAVCVLKGPANGDAQAEIRRYQTTNQCLEQLCEWLVECGCTHVGMESTGEYWRPIYNVLEEATDLEIILANSQQVKGLRGHKTDPSDAHWLAHLLRHGMIRPSYIPPLPIRQLRDLTRRRKQLVRSGAQERNRIQKILEDANIKLGSVLTDVFGLSGQLMLDKLLEGEATPEEIADLAQKRARKKIPQIRASLEGHRMNALHRRLINLSLDHMAFLEEQISTLDEEIVQHIQAHGLEKPYQLLQTIPGVKEEGAASLLAEFGPDMEVFGNAKKLSSWAGVAPGNNESAGKKRRAAALRGNPWVRSTLTEAAWSASRKKDSEFKDHYDGWKGRLGHKRAIVAVAHSLAETVFEALSTGQPYTKPGTDPMSETKAAHLIRHHTRRLKTLRKRLKPQYQRHERQHATP

SEQ ID NO: 421111 - protein, 366 aa, unidentified
MQVVHEVCCGLDVHKKTVTACVVWATGRRRQTREFGTFTRELLELSDWLRASGVTHVDLESTGVYWKPVWNLLEGQFEVLLVNAQHIKAVPGRKTDQKDSEWIADLLQHGLLRASFVPPTPTRELRDLTRYRASLTQEINRIANRIQKVLEDANIKLASVATDTLGASGRAMLEAIVNGEQDSQRLAEMSRGLLRNKIPQLQQALEGRVTAHHRFLLRELLDHHYFVESKMKRIEQEVAERLGPFQSEVARLCTIPGVDRVTAWGLLAEIGLNMKQFPDAQHLASWAGLCPGSHESAGKRKSGKIRKGSLWLRRCLCQGAWAVSTKKNNYLSALYRRLERQGERKSPRRRLEQDSDESEEHISPPA

SEQ ID NO: 421112 - protein, 482 aa, unidentified
MHRLATNKCAITHDVYRFTFEPAGALEITNEYSGLAVAPAHLYCFRRSQAGMSHTLNLAQWSVVMEKQDQLPFAAYVGIDWADKKHDFCIEIPAEGTQEFDVIPHRINLIDQWVRTLYARVKGPIAVAIELTRGPLISALQMYDFIVIYPVNPGSLAKYRQAFVPSRAKDDPTDAALAVDMLRRHPERFKPLRPQSADMRALITLVEQRRQLVGERVRLTNRLRAALKQYYPNALEWFDHVDTIVFCDFIVKWPTLVQAKRARVATLKRFFHEHNVRFPSVVEARITAIKEAVPLTKDDAIIVPYRMKAQAVVEQLKLLLGSIKAFDVEIDLVATRHADYSLFRVLPGAGPSLAPRLLVAFGEDRDRFASASEVQMYSGIAPVTERSGKKHWVHWRLQCPRFLRQTFVEWAAQTINKSYWAGEFYQQQRDKGCTYQAAVRALAFKWIRIVYRCWQTGIPYDEAKYLKTLERRGSPLMVKKTA

SEQ ID NO: 421113 - protein, 337 aa, unidentified
MDYFAGLDISMDETHICVVDREGMVIHESKAASTAQAIAGELAKAPSCRRIVFETGRMAPILFHGLSQLGLPVVCVESRQAHQALKSLATHKTDRNDARGLAHLARTGFFKPVHVKSLSAHALRSLIVARKKLVGQRVTLENQIRGLAIVFGIRLPRALTAAFIDQALKTSEGVAGLSAAMRGLIAARTAVMTAVAAIDADMRRMARASAACSRLMTIPGVGQLTALAFVAAIDEPSRIRRSRDVGAYLGLVPRRYQSGEVDYVGGISKCGDRRVRTLLYEAANVMLTRYKGQLKLKDWAFAIAKRSTMRKARVALARRLAIIMHAMLRDGTEFASA

SEQ ID NO: 421114 - protein, 344 aa, unidentified
MKITTVGIDLAKNVFQLHGVNEFGKTVIKKHIRRDQVAEFFVNLPACLIGMEACGSAHHWARKLQGFGHTVKLMAPQFVKPYVKTNKNDAADAEAICEAVARPNMRFVPIKNIEQQAVLSLHRVRQGFVKARTAQANQIRGLLSEFGLIVPQGIGYIASRVPELIEDASNELPGSFRLLVQRLLDHLKELDRQVDELESQIVKWHRQSDASSKLAQVPGIGPITASALVASLGDAKNFDGGRQVAAWLGLVPKQHSSGGKQNLLSISKRGDTYLRTLLIHGARSVIYRAQQKPESCSWINGVVNRRNKNVAAVALANKNARIVWALLAHDREFRSDYAAAKAAP

SEQ ID NO: 421115 - protein, 325 aa, unidentified
MLIIGCDYHPSMQQIAWVDTKTGECGGRRLMHQAEAEEFYRALKGKQVRIGMEATGHSRWFERLLAELSFEVWIGDPAQIRAKQVRKQKNDRRDADHILKLMLKDDFPRIWAPTPENRDLRQLILHRHRLVGMRTRVMNQLQAVAMNEGIRCKKGLWTAKGRKQLESLSLLPWTSRRRQELLELLDQFDPNVEKLSQAIEQEAEQIPEVKLLMTHPGVGAITALAFVLVIGTPERFGCGKQVASYLGLIPCEDSSSERWRLGHITKQGNALLRFLLGQAAQSVARCEEPWQQQYAHLKMRRNKSIAKVAMARKLAVRLFWMWRKE

SEQ ID NO: 421116 - protein, 372 aa, unidentified
MAEKVARSRRMSKELRLVDNEVAFVGVDVHKKTYAVCVWTEEREAVASWVQPARPALLAERLEPVRAQIAWVVYEAGPTGYALVRHLRSGGFRTDVIAPSRTPHAPGRSGKGDRRDAAQMAFLAAKGMLTRIQVPTREEEADRQVVRRRNQLGRELRRTKHRIKSFLLQHGLPGFEHWSRAALEALDALALGPHLRFCLDSLLADYAHLRAQLAAADAHVAELARTERHATAVELVRRVPGVGPTVAMTVCTELVRPARFDTPQQVASFTGLAPCVRQSGERTRSGPILKTGNRVLRSLLVEAAWQWVRHDPAAKALYRHLAAATATPNKAIVGVARHLIILLWRILTTGIVYTPPPSASADGEPLEPHEDS

SEQ ID NO: 421117 - protein, 371 aa, unidentified
MRTEYFITLDTHCRSSDACVKTTTGKLVKRERLATTIPALADLVRSVKRPRHLCFEEGPLAGWLYRSLRDEVDEVIVCDPRRNAYIGKDGDKYDPIDAEKLNDLFRAGLIRQVHQTDCPTRAGFKQLVSAYHAAVRNRVAQANRLIALGKRWGLLWNTQMLLQADAVAHLQKQLTSAAAPSCVLTILEHSLAGVRQAVESEEALHAGLAKIAGKDELCRRLMALPGVREIRAATFVAYIDTPFRFKSKECLWKYCGIGLRRAKSGDGPELLKVEQHANHRLRGVVIGAAEKAIEMIHNLWDRQRDPDSHSTAKETDDENIKPFAAKYGRWLQNGRSPANARRNLARLFATCAWAMWKTGEPFHPEWIDQAS

SEQ ID NO: 421118 - protein, 414 aa, unidentified
MDIIYTSCCGLDVHKRTIQACVRRMDKSGKIHHEVRAFSTMTGDIVALADWLGAQEVTHVAMESTGVYWKPVYNILEGDFTILLVNARHVKNVPGRKTDVKDSQWLAQLLQCGLLKGSFIPDRPQRELRDLTRHRSQLVAERTAVANRIHKVLEDTNIKLGSVATDILGTAGREMIRALIAGEKDAEKLADLARKRLREKIPELRLALQGHVTDHHRFVLGELMDHIEYLERQIDRFSARIEEISHPFRKTIEAVAQMPGFEKRSAENVIAEIGTNMGQFPSAGHLASWAGMCPGNNKSGEKSKSSKTTKGSRWLRCALTQAAWAATHKKGSYFQAKYRRLVGRRGKKRALVAIGHSMLVTIYHILKFQVEYQDPGSDFFDKLNSEKLVKHHINKLKSLGYNVTLTEPQQQEAA

SEQ ID NO: 421119 - protein, 415 aa, unidentified
MYYVGIDIAKSFHVISVIDDEETKVINKPFKINNDAKGFEKLLTILESVTLDKSEFTIGLEATGIYGENLQEFLKSKSYLVKLLNPFQTTRYREQITLKKVKNDEIDSLVIALLLKSGKFSSGYITDDEYQSLRTLYRNRATIQADMKDVKKRILTQITVSFPEFEGFIKPFTVSGLALLDKYPTAHHYKHSSVDRIMKLFRHIQGNNFTQSKALQLLELSKESIYSGKAKDARAIAIRSSIRLLQMYLSELDIIEAEILSLLQSSSVDITVDEAGTEIQKTDTLLSNLKTIPGVAEKTIAALISECGDLSRFPTIPKFIGYLGLFPNENSSGNSKHVGHLSKRGSPLAKHALYMSAVSCLIHNTQLKQLYDTKRSQGKSKKEALIAVSRKIATIIYSIFKYNVPYDPSRVFAKS

SEQ ID NO: 421120 - protein, 313 aa, unidentified
MSELYVGIDVSKDRLDVAFSDGRYEAVNNDAVGRRRLSEQLSTQAPQLIVLEASGGYERGIAGELSAAGLALRVVNPGQVRHFAKAKGLLAKTDRLDAQVLWQFAQQMQPESRAIPSEELQELRGLIERRRQMVEMLTMEQNRLRLARKTVKRSHLRIIRALKQQLDEIDEDLGKLLREHGVWREKVQLLESVPGVGELTSLKLLATLPELGTLNRKEISALAGVAPYNRDSGHWRGQRSIYGGRPMARSALYMSALVGCRHNPVLRVFYQRLLQAGKRKKVALVACMRKLLTILNVMLKEGRSWDPQRAAKA

SEQ ID NO: 421121 - protein, 350 aa, unidentified
MNATTVAVDLAKNVFELALADARWKIVERAGLTRAQFERWFDNRKVDRVVMEACGSAHHWARTLRARGIEVRLLPAQYVRAYVKRNKTDAADAQALLEAARANDIRPVAIKSVEQQALQALHRTRSGWMSTRTRRINTLRGFCREFGLVVPEGAATGLACMARYLADPHSGLPELLRPSMRLMIDEIRLMEARIGQLEQALSQIAKHSPACQVLQSVPGIGLLTSTAMVAAVSDPRSFASGRRYSSFLGLTPREYSSGNTRYLGRISKRGDRYIRMLLTHGARSVLRAATVAHRAGRPIDRLKSWALAVQARTNHNKAACALANKLARIAWAVWVKQEKYQSASIAALSV

SEQ ID NO: 421122 - protein, 350 aa, unidentified
MRTRHCVRWSSEQRYAQCRTADEGQEVREFYAQLPRPVLLGIEAIGPMQWFLQLLDELGIECRVGDATRIRAAEPRKQKHDRRDAELILKLLVENRFPAIWRPSKEQLDLRALLLHRHHWVRLRTQIQNALQAIALANGLRRGPSLWSYDGQAKIAFLPLPPHASYRRSMLQALYRKMEEEIEQLTAQVAEQAEQRSGARLLMTHPGVGPVTALATDVFLGDPQRFADGKALASYVGLIPREYSSGAHQRLGALTKQGSPFLRFLWNEAAAHAVRRDPDLQRFYRRKLVQKGLGKSRVAAARKLGIRLWIMLRDQIDYQEFCRRGQKQSGAVCAGMLEVGYGANCHRPVD

SEQ ID NO: 421123 - protein, 391 aa, unidentified
MSQYFVGIDISKYKHDCCIINAADQSIVAKFTIRNDKDGFNELLTSLQSLSTPEDIRIGFESTAHYALNLELFLEKAHHSFMEVNPVLISEYKKSTSLRRTKTDSIDCESIARWLMTIEYKPHSKGFYHAYSLKSLTRLRDRLIRQRSFYLVKITNVLDHTFPEFKPFFQERFSKTALYLLENYGSAEKMARMNSASYDNLRRISRGKFTPQKFIELKALAANTVGVNNSIFDTELTCLLTLYKEAANQISVLEAQITELIEEVHPHYMSIPGIGPISAAVIYAEYGDISNFSSPAQMLAFAGLEPGISESGTEYHKGRMVKRGSSQLRYTLMNCALPLIRFDVTFATYYAKKRSEGKPHRVAISHVTKKLVRVIFALERQNTDFVAAALR

SEQ ID NO: 421124 - protein, 359 aa, unidentified
MQTQRKELNFEGQNIFVGIDVHLKSWNVSIFTEDLFHKTFKQPANAATLSNYLKLNFPNGIYHSVYEAGFSGLHAHYELTNLGIHNIVTNPADVPTTDKEKRRKTDKVDSNKLARSLRSNELKGIYTPSQDILEDRSFVRVRSSIVKDQSRLKNRLKSMLYFYGIEFPLEFQKSNTHWSKRFMVWLKTVQLKSHSGNMALAMLIKEAEQLRALLLEVNQELKLMSLSEKYAKNMEFIRSVPGIGLVTGMHFMSEIETINRFENDDKFAGMIGIVPDCHSSGDNDQIGEITPRGNVYLRSALIESSWIAVRIDPALSKAFSDYCKRMEPNKAIIRIARKLSNRIYFVLKNEKKYETRIVK

SEQ ID NO: 421125 - protein, 450 aa, unidentified
MSNGNGVSRGDRNRNARLDRLRALVPVTNAIVGIDLADKKQMIVVCDHDSKVLARRTYRCRTWDLGTALDWAHERAAAKGFAGMTVSCEPTGHRWRVLAQLAADRSMPFVCVQPAVSSWSRRAEDLTHDKTDEKDAVLIARLTAQLRCYEPEPVDETWGRLRHLGARREQLITESSGQVQQMRDLLECVWPAALECAQQPFRSRTWIAALTVIVDRDGGQFDRTRRLGLARFEQAVLREISKRGGQKPCRRIARSVFAALADPAGVIAHRAGALERVQLLLEDWRTAHHRLADTEQRMIGVLDELGLTGLVTSITGISAVGAAAILAQTGDPRRFATARALVKHAGLAPREKLSGTFTGRTKLTGQGRPGLRLAAWRAVWGAQRANPVYGARYRHLTTREHNRLKPTQAQTVIAAAILRHLHAVISTGQAWDPSIATHGTRSAIRTTAAA

SEQ ID NO: 421126 - protein, 361 aa, unidentified
METSVVYVGMDVHKESITMAMITDGSSAVITEKIENRDEKIRRFLKKASKYGEIKACYEASSCGYVLWRKLNKWGYSCDVIAPSMVPKSPADKIKTDKRDATALVKLLKANMLCCVAVPTTEREIDRTLVRLHDQKSQDVKRNKHRILKFLQTRGFAYEGRNFSPPFRSWLKSLPLAKQDRFVLDEYLASFEYEESRLDEVDRQIIGLSNKDIYSEKTDRLKTLKGIDTLSAMVLLTEIGDFTRFESPRQLMAYAGLVTSENSSGEKRRQGKTGHGGNRHIRFILIEAAWHYRHRPSIGKNLMKRQEGQPAEVISYSMKAQQRLYKKYWKISSVKSNQKAVVAVARELTGFIWGIATGNTN

SEQ ID NO: 421127 - protein, 312 aa, unidentified
MYYIGLDVHKKTISYCVKDASGLVHQEGKIGATRRELDGWIKALPQPRIVAMEATIFTGWIYDHLLPHVAQVKVAHPLMLRAIAAAKKKNDRIDAGKIADCLRCDFLPECHMAPIEIRDRRRTLRYRQLLVRQMVQMKNRISGLLMETGVEYNKRRLHKVGYFGELLSTNEEVKESIRPLLKLSRETIVRLQKTEYALVSSLQRDPLLAERIRRLRTVPGVGPITALTWALEMGDVSRFRSVKQAISYCGLCGDEKSSADKVMRTPLSKQRNNISNECWWKPPSWHRERIINWRSSMKPKSRKEMRIERRWP

SEQ ID NO: 421128 - protein, 450 aa, unidentified
MSVIEAEGESDQVVERVAAIDVAKASAMVCTRVPHPSLSGRRSMRVWEVRSTTNAIIALAEQLVTEGIERVVVESTSDYWRPFLYLLEAHGLTVWLVNARDVKQVPGRPKTDKLDAVWLAKLNERGMLRRSFVPPVEIRRLRDYTRLRVDLIQDRSRQVQRLEKLLEDALIKLSSVVSDITGVSARAMINTLIAGERDPRLLAELARGPMRGKRAALVEALTGRFDDHHAELAQMLLDEIDALTAKAERLTLRIEEMISAIPAAHPPADRGPGAGVAVSDPSSAPLSVVARLDEITGVGVHAAHAIIAEVGLDMTQFPTAAHLVSWSKICPRTIQSGPKRRSGKTGTGNPYLKRALGEAAAAAARTDTFLGERYRRLVRRRGKLTALVAIERSILVIVWHLLTDPSARYHDLGADFYARRINKNRRVRTLVHQLEALGHHVTLQPIAVAE

SEQ ID NO: 421129 - protein, 319 aa, unidentified
MAQNDLIVVGIDVAKNKVDACIRSLSLRQVSPSTERGRCELIAWLRGHGVGKAVMEASGGYERGWAKALRQAGIEVRIVDPKRVRNFANSAGRLAKNDTIDAEMIAWFAETFDQAPGQPHDAAREELQKLVRARQGLLDFQTRVQNQDEHEVPMPVQKMHARMLKRVDSEILKLEAAIAAMIKAVPRFAELAEIIESVPGLARTTAANLIAGMPELGQVSNKIAAALLGAAPYDDDSGGRRGQRHVSGGRRKVRNAFFMPCLGAATQHNPVIKQFYQRLLARGKEKKVALIACMRKLIVILNTMIARGEKWDASRFALS

SEQ ID NO: 421130 - protein, 456 aa, unidentified
MIAAVVERCAGIDVGKRFLKVCVMTGPLKEEPAFEIRRVECTQSGYEQLQQWLQSEEVTKVVMESTGPYWVPVFNMLEPMVAVILANPVEVKNRKGHKTDAQDAWWLAHLLRHGMIRPSFIPEKSTRDLRELTRRRKKLIGMVAQERNRVQKQLEYGNVKLGNELSDVFGLSGQLMLKALVDEDKTPEEIAELAQGSLKKKKKEIVEAIRGQRLSATQKELIRSSMRHMVFVELEIRQLDGLIAGLIESAGQQKQYELLQSIPGIKQEAAANVLAEIGPDMKQFPDAAHLSSWGGICPGNNESAGKHKSRHTTHGNPWFRATIIECAWSASRKKGSAFEALYLRLKPKLGHKRALVAVGHALVKAVYYVLATGEPYRETIPVELTANQRRRIVRHHTRRLHRLGVWLPDEKLTPLQEWYATHCTPTLDPPAPKRRGRKPKPPAIVDESSRSGAAQK

SEQ ID NO: 421131 - protein, 387 aa, unidentified
MSELFNPRTPATAFDHTTTLVTVLELSGKSWEMGGSVPSVSRRPLRKIDTRNIGAVIKTIEQWKSEANKGGSPVSRVVLGYEAGRDGFWIARALREHGIEVYVMHPASIAVERRGRRVKTDRIDVDLLLRTLLSWLRGEPRACTMAPIPSEAEEDMREPGREREALVAFRLKIENQIGSLLIRFGIDDFRPRLKKAAQKLETLRTCDDRPLPPKTMEKLQRLMAQHRLLSDQMKEIEAARQQVMMVANPDRIERMIQLLVHLVGLGVETATALVHEVFSRQFRDRKALAAFVGLTGTPFNSGGSTREQGISKNGNPRIRRIITQLMWRWIRFQPGSALTRWFEERTGGAKGRIRKIMAIALARKLLVALWRYVETGVIPEGVRLASA

SEQ ID NO: 421132 - protein, 365 aa, unidentified
MFYLGIDQHARQITISLRDDSGDVVQARQVSTQPEKVHAFFQQLTRERLCDGASFVAVLEVCGFNDWLIRMLQEYHCHKVVLIQPEDRKKCKTDRRDAAALSELLWVNRDRLLQGKPVRGVRQVDIARGTDQENRRLTTLRKEAGQARTRLVNQARHVLRRHNLQWQMPTKRLPTQAAIAWLKQLALPAIDRLEMDHLLTDLEQVQRRLKGLERVIAQRCGVSEEAVLLSSIPGVSYFTATALACRVGRVERFPRARSLANYWGLTPGCRNSGEATQRLGNITKAGSGMARWLLAQVAIKVLRKDARLREWYKRIRRRRGSTIARVAVMRKLATIIWHMLSKRKSYAECRAVAGTGAEEREKQEC

SEQ ID NO: 421133 - protein, 338 aa, unidentified
MFIIGIDPHKGSHTAAVIDGDEHVVAVHQLRADRRQRDRLLKFAAPFVPRVWAVEGATGVGSLLAQQLVGAGETVVDVPPALSARARLLDAGRKDKTDEHDARSAAIVALRHRDLRVVALDDHRQVLRLLARRHHQLTAGRTRAICRLHAMLAEMIEGGLARNLSATTADSALRRFQPIDAIGHERKRLAAELLDEVQRHDAALRELHCHIVHAVAAADTSVTDVHGVGPIVACYLLGYSGDVRRFPSAGHYARYNATAPIEASSGPNVRHRLNPNGNRQLNHAIHIAALGQISHDTPGRAYYQAKQAQGKSRKEAMRCLKRRVSDAVYRQLRAETDH

SEQ ID NO: 421134 - protein, 346 aa, unidentified
MEYIAMDVHKKYTWARVENEKGDKLYECKLSHSHGTIENFVKRWTGGSAVAVETVGNWYWVVDEIEAGGGKPQLVNARLAKLMMGSVNKSDKLDAKGMNRLQRTGTLPTVWIPPSSVRDARELPRTRMVLSRQRTQLKNRVHATLGKYGYRVEGASDAFGKKGRQIVAELMAKLPPHTDQALRRVLDQLDHVCENLKWIEEKMIEVFVPCPETTWLKTLPGVGDILAVVIWTEIGTIERFSRAEQLASYCGLVARENSSGGKIRFGAVRRDVNVYLKWAFVEAANSSVLNRERCGYDHISRLYERIKTRRGHGKAKVAVARHLSEASFWMLKKGEPYREPMSSTQR

SEQ ID NO: 421135 - protein, 311 aa, unidentified
MTSQYAGIDVGKAELHVNVYGQEKVKVFANSHTGIKHLGHWLKQNKVGLAVMEASGGYERQAAEELRRAGIPVSVVNPTYVRRFCQGMGSLAKTDIKDARLIAHFASVKQPKAQAARTQAETQLEELVERREQLTEMLGMEKNRHSNAPQSSLNSIQEHISFLQTEIQAIEEQIDKLTENTPEWQSRLAIMQSFKGVGKIIAITLLAELPELGYERREVIAALAGVAPINHDSGKMRGKRRVYGGRSRVRRVLYLAAMVGMRHNPVIKAFYERLISAGKPKKVALVACMHKILTILNTMLKKGEMFSPVYP

SEQ ID NO: 421136 - protein, 348 aa, unidentified
MLADQLDYMVGVDPHRDSHALAVVHVVSGAVVFEANIAACSEGYADALRLVEEHGAGRRAFAIEGTGSYGAGLTRFLAGRGERVLEVGRLRRERRSGGKTDALDAVRAARSVLAQERPATPRAGGERQALQALVAAREGAVNAKRAGLCQLRDLLITTPEPLRSELRPLTRARLLQRLAATRPDGRRDPELRGSMLALRSIARRILQLTAEERELAREIETITRKLAPQLLDQPGVGPHAAAQLILSWSHRGRIGSEAAFARLAGAAPIPASSGQTIRYRLDRSGDRKLNRALHMILVTRKRSHPATIAYIERRLQEGKTRREANRCLKRYLARNLYRLLEHGAPLAT

SEQ ID NO: 421137 - protein, 343 aa, unidentified
MREIATVGLDLAKQVFQAHGADAQGQTLFNRKLRRSEVLSFFEKLPPCVVGMEACGSSYHWAREIGALGHEVKILPAQYVKPFVTRGKTDAADAVAISQAMKRPDIRSVPVKTAGQQAATMVLRTRTFFVRQRANAVNALRGFMAEFGLVANRGIANFGKLVAALPERGDASIPPAARLMLDEIVTEIEALTARIERIDDRIAAHAKQDEDIRRLMAIPGIGTLTASSIQAHVPDPGCFKSARHFSAWLGLTPRQNSSGDKQRSGGISRMGNADLRSLLYIGAMGVLNAARRYGTRSEWLRRLMDRRPLKVVAVALANKNARVVWALLTKGGSYHVPAELVEK

SEQ ID NO: 421138 - protein, 342 aa, unidentified
METRHIGIDLHRNNFTCCVRLENGRNYLSAWKLEALPQFVKKLRATDEVAVEITSNTRLFYEAVVPHVARVVAVNPIQFRVISQSVKKTDPNDARNLALYLAKGLLPEVRMKEKTQAQIASLTQTRDTLVKLRTALKNKVNNILSAHGINLKKEALSAEKKLNEVLAMQFDPMVRTELKVIVEQIRSLNESIVELEKTIAEEGQKLPGHKNLTSIKGIGPLTGSILLSVIGNIHDFPEEGKLAAYFGIVPRVSNSNETERSGRITKRGSKLGRTALVQCALIAQRYSPYLKRFYEKTKARRGTGKAIIALARKLLGIIYRTLKNNWVFADFPNFVLAEKAAA

SEQ ID NO: 421139 - protein, 455 aa, unidentified
MNKKVKSKKQQNDQATTLQLGIIYSGAAGIDVGSMNMMVSYPGAEGIQTVEEYGAYTEDLHAMANQLKESGITHVCMEATGVYWMAVYEILEQYGFKVTLVNARHYKNVDGQKTDVKDCQWLQQLHAHGLLRASHIAEEQYRELRTYIHERGVLQKQKSDTLNRIHKVLTQMNIKVQHVISDIEGVIGMQIVERIAAGVNTPDKILEGLKTDKLKARKQDLEKSLKGIFKPWYIKVLKQHLTAYHFFKKQMLAYETEIEATLKILLPSQAEQIAIEKKTVKVRKNQYHFNLKEYLHKIAGVDLTEIDGLDENTVLTIIAVVGLNMHKWPTAEHFTSWLNLSARPKKSGGKTIGHQRRFTNNSATQAFRMAAQTMWQQKGMLGHLYRRLSHTKGTKKAIKAVARRLAVIFYNMLKKQTAYDSKIVVLDEAKIKARKITRLQKEAEKLGCRIEILAA

SEQ ID NO: 421140 - protein, 417 aa, unidentified
MKSAPSTLPEEPPNGLACGIDWARDDHAVAVVDARGRQVHRCTIEHSAAGLRALLALLGKRGVSEAAIERPDGPVVEALLEAGVTVVVISPNQVKNLRGRYGSAGNKDDRFDAFVLADTLRTDRARLRPLVPDTPATLALRRACRARKDLVSHRVGVANQLREHLKRVFPGAVGLFADLDSPISLAFLGRFDCQDRADWLSPRRMAAWLASAGYSGRTDPAVLHARLAAAPRGAAGEHGAAEAHVTRALLAVLVTLTEQIKALNTQISEQLALHADQHVFTSLPRSGRVRAARLLAEIGDCRARFPTPESLAALAGAAPSTRQSGKIRTVAFRWACDKQLRDAVTDFAGDTRRASPWAARLYDDAIARGHDHPHAVRILARAWLFVIWHCWQDGTAYDPARHKALQRILAEQNPKAA

SEQ ID NO: 421141 - protein, 319 aa, unidentified
MVQRKELNFEGQNIYIGIDVHLKTWHVSILTESGCLKKHSQQSSAQALFEHLKKHYPNGNYLSAYEAGFSGFSTYYSLLDFGIECLPVHAADIPTGQYESVMKTDAIDSTKIARALKSGLLRGIYIPKKEVLDDRNVMRLRITLKRQLSGYKSRVKHLLYNNGVIYPECFQNSKSHWSKRYLKWVHEDVQLLSESRNSLDLLLRQVELFRKSLLEITRLVRTLSRNGRYGEAYENIVSIPGIGMITGMCLLTEIGDIHRFRNERQFASYLGLVPTSHSSGEKTSHGEMTFRGNKRLGPLLVESALVAIRQDRALAAAYE

SEQ ID NO: 421142 - protein, 364 aa, unidentified
MLIIGCDYHPGFQQIASVDNETGELVERRLGHREEAEKFYLELKQQNTSVRVGMESSGHSRWFERLLHELGFELWIGDPAEIRTKRVRKQKTDRQDAQLILQLMLENRFPRVWVPDAENRDLRQLLWHRHRLVQMRTRVMNQLHVVPLNEGLRRKKALWRPAGRKELESIALAPWASRRRQDLLDLLDQLTPKIQELTCALEEEVEKRPVTRLLMTHPGVGPLTALAYELVIGTPERFHCGKQLASYIGLVPEEKSSGDRRRLGHISKQGNVLLRFLLVEAAQVTVRSHQEWRNKFFHLAMRRGRKIAKVAMARKLAVHLYWMWRQGCDYGQTQKLGSHAGEPGNPDGVQSNTDVMIGHPAPSK

SEQ ID NO: 421143 - protein, 327 aa, unidentified
MYVCILDEHGTKLVHKNLPTTPEAFLRVLAPYREDVVVGVECMFTWYWRADLCQKEGIAFVLGHALSMKAIHGGKAKHDQIDAHKIAVLLRGGMFPQAYVYPSEMRATRDLLRRRCHLARKRAELLAHSHNTNSQYNLPEIGKRLANKANREEVADHFPDPRVRKAIAVDVSLIDQYDQLLGEVERYLTRSAKTDDGQAFARLQSVPGIGQMLALVLLYEIHDIRRVPRVQDFVSYCRLVTCATASSGKKLGTSGKKIGNGHLRWACAEAAVLFLRQSQPGKAYFATLEHTHGKATALTVLAHKLGRAVYYRLSREQPFDLTRFVTA

SEQ ID NO: 421144 - protein, 322 aa, unidentified
MAMLSYCGIDVSKDCLDVAVLPDGECFSVCNDTAGWAELVERLRSFSIAAIGIEASGGYERGVMRALLAAGMPVRQVNPFRLRQFAKASGVLAKNDPIDARMIASFVAIMPTRPAQRHAPAIERLTEMLAIRRQLSAEKVAAENASRLLENAMLRRLSRRRIARLTADIDTLDKHLLAIVVSDAALGHRYELLPSMPGVGPLLACTLIALLPELGTMSRKQVAALVGVAPYAFESGTLKGKRCIWGGRAPVRHMLYMAAMSASNWNPALRAFHARLKGAGKLPKVAIVAVMRKMIIALNAMVRDDVAWADRHRGRHPMPTAR

SEQ ID NO: 421145 - protein, 339 aa, unidentified
MLIIGCDYHPSMQQIAWVDRETGECGERRLLHRAEAESFYHALKGKQVRVGIEATGHSRWFERFLAELNFELWIGDPAEIRAKRVRKQRNDRFDAHHILKLLLEGTFPRIWVPSAENRDLRQLVWHRHRLVGMRTRVMNQLQAVAMNEGIRRKKRLWSEKGRQELESLSLMPWTTRRRQELLQLLDQLDPNVDQLSQAIEQEAERMPEVKLLMTHPGVGPITALAFVLVLGTPERFGCGKQVASYLGLIPCEESSSEHWRLGHITKQGNKLLRFLLGQSAQSAARCEEQWHRQYAHLSMRRNKLIAKVALARKLAVRLFWMWRRGWDYQQLKKFGSHAG

SEQ ID NO: 421146 - protein, 345 aa, unidentified
MQTMYYIGLDVHKKKISYCVKDGSGHLHAEGAIPAARSDLDRWMKTLPAPWTAAMEATIFTGWIYDHLKPHAAALKVAHPLMLRAIAAAKKKNDRIDAHKIADCLGCDFLPECYMASTEIRERRRTLRYRNLLVHQAVQLKNKISGLLMEAGVSYNKQKLHKVGYFQELLATNPDINEGLRPLLRLCRETLVRLQKTESALVRSLQRDALLAQGVRRLMTIPAVGPITALTWALEVGDVKRFSSIKKAISYCGLCGAEKSSADTIKRTPISKQRNKHLQSVLVEAAKMAPRLSSELALIYDREKQKGNANRATLAVARKLVAYLVAIDRSQRDFLVVEKENCAAA

SEQ ID NO: 421147 - protein, 391 aa, unidentified
MINIGIDVGKFKHCATVLDDSTGEVLIKPFFLTNNRKGFDLLYSKTKQFIHRKHSVGMEDTGHYMINLTNYLLDKKFTVKYINPRATCLRRKGLGISAKNDRKDALLIAEMLSEKRFWRSISVRSIENSKFRDITRLYHQLQEQQNQDMNRLQRALDIVFPEANSLSWTRYSKAYMKFLSTYPSASSIALEDIRILRKALKTEGRGRQCKVTAEEIRELAKNSVGEDIISIDLEVTSIIAIINTREEQIRMLEKKIEEFSHKLNSPIISIPGISHISGMTILAEIGDINQFQNTGNLISFAGMDPLVYQSGKYDAAHMPISKHGSRYMRKALYQAVFTVCKYSPTFHDYYTKKRNQGKSHRCAQGHCARKLLRVIYKLLSTNSLYDQNHIQ

SEQ ID NO: 421148 - protein, 377 aa, unidentified
MHSENIAAYIGLDVHKETLAVAIAAPERLGEVRYYGTINNEAQAVRRLFQKLQGLYGNILSCYEAGPCGFGLYHQLTAMNIKCQVIAPSRIPKSPTDRIKNDHRDAISLARLLRAGELTPVWIPDLTHEAMRDLIRARAAAKRDSRVARQRILSMLLRTDKHYAGKHWTGKHRTWLANQSFSQPSQQIAFQHYCQSLEQIEDRILQLDQEISRLLPEWSLCNLVCQLQALKGVGQLIAITLVAELGDFSRFSNPKQLMAFLGLVPGEYSSGNSIRPRGITKVGNSELRRLLYEAAWSYRTPAKVGAWLIYYRPDSVTQYSKDIAWKAQQRLCSRYRSLTAKGKKSQVAITAVARELTGFMWDIALAAQSSFSQQKQN

SEQ ID NO: 421149 - protein, 347 aa, unidentified
MQILSLDLGKNKTVGCDYERESGKHRFKTAFSTRAGLSQLVKEVKPDRVVIEVCSIAGWVCDLLREMGIEVQVANTSDDAWRWRKVKKKNDRSDALKAAQLSAVNQIREVHIPTIDVRQWRALIAFRQQLVQRRTRVKNHVRDLLLREGQILPRGGKCWTQLGVGELEAMAQPLSEVGMNELWRGELAIELRQLRAVQEEIEVAEEKLDAIGAADPRVRLLRTIPGVGPRLAEAIVALLDRPERFRKSSEVSAYIGMVPKELDSGETQRRGKITRHGSRLVRSLLVEVAWAGLRHNPWVRETYQRISGGKKSRKKIAIVAVGRRLLVRCWAMLRDGTSWQWPAAKVT

SEQ ID NO: 421150 - protein, 347 aa, unidentified
MSITMIGLDTAKSVFQIHAVDETGRAVLKRKLQRSELFAFFEKQAACTIALESCGAAHHWARVLAGLGHEVRLIAPEAVKPFVKKGRKNDAADAAALCTAATRPDVKFVAPKTLDQQGVLALHTARSLLVKQQTMLGNAMRGLASEFGLIVPKGIGKRRELMELVDADETVPARARQAVSRLLDHCDDLAESILTFEAEIIAHARRDDTARRLATIPGIGSITASLIAATVGDIGLFKSARHFAAWLGLVPRQHSTGGETRLGRITKTGNREIRTLLVLGATSMVYRAPQWNSTTGAWIRGVMERRPARLATVALANKTARIAWALMTRKEVYRPKGHVATAAAAAV

SEQ ID NO: 421151 - protein, 348 aa, unidentified
MNHYAGIDVSLECSSVCVVDASGQIVREDRIESEPEALIGWFASVGFEIARIGLEAGPLSQWLYAQMQEAGLAVELLETRHVHDAFKAMPVKTDRKDARGIAQLMRLGWFRPVHCKSIEAQDIRVLLTVRKLVQSKLYDVEMSLRGTLRGFGLKVGRTTPKRFEGRIRELVAGHPSLQVIADALLAVRAVLLREFNGFEKRVRTLARANTQARLLMSTPAVGPIVALTYAAAIDDPARFKSSKTAGAHFGLTPRKYQSGETDRSGRISKIGDAAVREALYQAAHVMLTKPVRGCSELKSWAMRLAKRAGMNKAKVALARKLAVIMHRMLADGRPFNPTSRTQPAVATA

SEQ ID NO: 421152 - protein, 440 aa, unidentified
MGTQPAAALTETWGVPAPTGLLYLGIDIGRRKHLAVAIPELRMWDGSWERAPVRTIATTALGFRGLTSWLVELGAPPDMVRVGMEPTGGWYGRTVAAWLERHGYRVDWLQNFALHDRRHLMIGKQTKTDALDARLIARLLFERERLGLKGGFLQGPPRNTDAIRMLVRNRARLVEQRTRCRNQLTAIEDVLFPELKDFFRKSVTSSSARLLLESFPTPDHVAAANPADLHRVVVRQGHAGALAARLMDLQVAAADSAGLTTDTDAILHTQEWLLYQLRLVDAQIEQVEAAIGAVLEQWSHQDRVVLASLPAMTLVRQAVLLASIGDIACFRDDRQLRKLLGWYPEARESGSSLSKHRLGRSGNRMARHEVWLWAWELIAPAHANTPFRDYYSRLRARGMVGRVAMGHLAGKLISVLFHCLRSGIPYDPQRHARDLGIVDT

SEQ ID NO: 421153 - protein, 358 aa, unidentified
MQRNKISFKGQKIFVGIDVHAKNWEVAIAPEVGIVKRHSQKPSAKELFDFLKKNYPDGDYQSVYESGFSGYSTYYALKEVGIDCMVIHAADVPTTQYEEVMKTDRVDAVKLVRSLKAGLLKGNYIPEKQYIDDRSVVRIRKTIQKQLSGYKSRVKHLLHCHGVEFPERFSKKQTHWSRAFITWLMNDVRLMSDTRASLDLLIRQVEVLRGTLLEATRQLRMMSQTERYKHRHDLLRTIPGIGIIVTMSILTEVCDVKRFHNENEFAAYLGLIPTSHSSGEKTVHGEKTFRGNKQLGPMIIEAAWITISRDAGLGAQYFQYKQRMEPQEAIVRIARKLSNIIFSVLKNEKEYVPYQTGN

SEQ ID NO: 421154 - protein, 314 aa, unidentified
MNNTEIQTPVNVGVDVGKANLDIALHPSGQFYTVPNTEAHIRQFVRILKNYEVERIVVEASGRYEHALVQACDQAGLPIIIVNPISVRRYAQAIGVLAKTDRIDAQIIAQYAATLKPEYKPIPDKTSQKIKDLLVRRSQLLEMSTMEKNRLQILPRSLHRSIKSLLRMLQNQIETVTLQIEQEVAKVDQWRTKIEIMTSVPGVGKVLAYTFVSELPELGSLNRKEIAALVGVAPINRDSGKLNGKRRIQGGRHRVRTVMFMAMLSSIQCNPVFKRFYERLKAQGKIPKVALIACIEKDDCGTQYHDQKSGILAR

SEQ ID NO: 421155 - protein, 347 aa, unidentified
MRFYQPSTEFYCGVDLHAKTMYLCILDRHGAIHLHKNLRTEPDAFLHAVAPYRASLVVAVECLHCWYWLSDLCAQEGIPFVLGHVLAMRAIHGGKTKNDKIDSEKIARLTQGGLLPQAYVYPAAQRGLRDLLRRRMRLVRLRAELYGHVQTLYRQANRHLTGAAAKAAAADAALPEPFADAAVQRNAEADLEMAGHYDAIIRDLEQHVLSATRTNRAKELCLLQSIPGIGPILALTLMYEVDSIDRFTTRQQFCSYSRLVYPRQESAGKQSGCKGRKMGNAYLKWAFSEAAVYAARFYPRIGAYLHRLESKYGPGKSKSLLAHKLGRAVYHMLRKGTVFDEDKFLRG

SEQ ID NO: 421156 - protein, 417 aa, unidentified
MYERCAGIDIGKDIIAVAVRAPGEGPDGRKTIKRTFKTFYGVLRECARWLTGQGVTHVAMEATGIYSMPVYHALVAHGEFEVLVCNAGHVKNVPGRKTDLSDAEWLAQLLECGLLRGSFIPPADIKAARDVIRYRRKLIEHRTSELQRLGNVLQDAGIKADSVASSVTTKSVRAMVEALIDGERRPAVLAQLAKGSMRSKIPDLTRALEGRFDDHHALMCRLHLAHLDQLDEMIARLDDQIEQMMQPFCAQRQLIASVPGIAMHGAAAVISEIGADPAPWFPSAEHLASWVGLCPGNHESAGKRHHGRPRKGNQHLAPVLVECAWAAVRTDGYLREYYRRQVHKFGGFRSPSAKKKAIVAVAHKLIVIIWHVLATGRPYQDLGADYFTTRIDPEKERRRLIAKLEAQGFKVTLEPAA

SEQ ID NO: 421157 - protein, 393 aa, unidentified
MICVGIDVAKDKHDCFILSSEGEVLADVFTIPNNAEGFDTLLQTIRRCARPEDKIKVGLEATGHYSYNILGFLLNEGLDTYVINPLHTNLYRKSLSLRKTKTDRVDARTIAAMRMSDVDLKSYTDTAYHNEELKSLTSNRFDKVRERAKQKQSVSRLVTILFPELEKLVSTLHMASVYALLSEFPGGKQVSEAHLTHLKAVLYDASKGRYGSDMATTLRDAARCSVGSVMSAKSLELRHTIRLIHELDAEIEDIEAAIQSMMGEIQSPITTIPGMGVRTGAMILAEIGDFSRFDSPDKILAYAGMSPSTYQSGQLSLSGTYSHMEKRGSRYLRYALYNATKYVCLWNPTFAAYLAKKRAKGKHYNVALSHAIKKLVRLIYALEKSKWPYSTAA

SEQ ID NO: 421158 - protein, 347 aa, unidentified
MAHFVGLDVSVKETSVCVVDDAGTVLCERKVPTEPDDIAVLLTSVGGEYVRVGIEAGPLSQWLVNGLAEAGFPVVCVETRHMKALLTAQQINKSDRNDARGIAQMMRVGLFKPVHVKTLAAQEHRMLLTSRKLVQRKLMDIECDMRGTLRNFGLKVGMVSTIGYEARIRDLVEGFPRLAAIVEPLLTVRRVMRQQLAALHKMLLNIVRHDPVCRRFMTVPGVGPVVALTYRASVDQPHRFLHSRAVGAHVGLTPKRHQSGETDYDEGISKCGDAMLRTMLYEAAQSMLTHSQKWSWLKAWAMRVAQRRGMRRAVVALARRLAVILHRMWVDGSDFRWSKAATAVTAS

SEQ ID NO: 421159 - protein, 354 aa, unidentified
MIIVGCDYHPSFQQIAFVDTETGELKEQRLTHREGAEEFYRALAATGQQVRVGMEASGHARWFERLLAELQFELWMGDASEIRRKRGRKQKTDRQDAQHILSLLRKDDFPPIWVPNWENRDLRPLLWHRHRMVQARTRIMNQLQAVALNEGLLCRKKLWRERGRRQLEAFPLAPWASRRRLDLLELLDRLNPTITELSQAIEREVEKCPAAQQLMTHPGVGPLTALAFVLIIGDATRFQCGKQVASYLGLVPLEDSSGNRRRLGHITKQGSSILRFLLVEAAQVTVRSLPEWRRKYAHSMMRRGRKTAKVAMARRLAVRLYWMMRQGWNYQQRSKLGSHAGQPGNRDGVPSNIE

SEQ ID NO: 421160 - protein, 351 aa, unidentified
MTQQTATEAIATIGIDLGKTTFHLIGMDARGRIVLRRKVSRGQLLPCLANVPVCLVGMEACAGAHHIGRQLAALGHDVRLLPAQYVKPFLKGHKNDYRDAEAIAEAAQRPTMRPVPLKSAEQLDLQALHRVRSRLVGQRTAVINQIRGFLLECGIAVRQGPAGLREALPTLLAQRTDVLSPRMIHLIEDLAGDWHRLDERVDAITRDITALARQDVGCQRLMGIPGVGVITASAMVAAIGTGAAFAKGRDFAAWLGLVPKQISTGGRTILGGLSKRGNRYLRTLFVGGAQVLLQRPRRWDGHGFGRWLAAARARLHRNVLAAALANKLARIAWGVLSHVNGYDPEFAARTA

SEQ ID NO: 421161 - protein, 397 aa, unidentified
MLAVGIDVSKSKSTVAIIRSDGTVLSKPHDFSHTISDITQLTALIHSYQEETKVALESTGHYHYPILKALLEAGFTVFVINPFLVKKFMDNSIRKGKTDKKDAVRIAHFVLEKSYQLRPYSPTDQKYEDLKFLSRQYSQSVSMKVKARVQLSNLLDEIMPGIQNIIPISSRYLENTLFFDFVEKYQSYEKISQMGEKRFVNSYIAFAQKHRCRGSQKKALAIYQAASDGIITRSPDVTTSLALSQCLLMLKQASSSADLLLRQMQSIAYTMPEYSIVRSMYGVGDRLAPILIAEIGDVRRFTSAKALNAYAGNDAPPYQSGQFEGTNRHISKRGSAYLRKACYEVMHSLKVHKPENDPVYQFIIKKESEGKHKTVAKMAGVNKFLRIYYARVMELYK

SEQ ID NO: 421162 - protein, 343 aa, unidentified
MEHYVGLDVSLKQTSICVVNQAGSVVREGIVDSEPEAIAAFVRSKAPGVVRIGLETGPTSTWLWTELKQLGLPVICIDARHAKAVLKMQINKSDRNDAAGIARIMQTGWFKEVRVKGLDSQSVRALLTSRALLVKIKRDLENQIRGLLKNVGRVIGRAKFNVFAARAEELIEDRSELIAVVGPLLKVRKAIEQQIDDLDRKVLKLARYDAQVRRFMTVPGIGPITALCFKATIDDPTRFRRSRSVGAYVGLTTRRHASGEIDWTGRISKCGDAMLRSYLFEAAGVLLTRVPKWSALKAWGMRLAKRNGLRKATVAVARKLAVILHRMWIDGTEFNCSKKELAA

SEQ ID NO: 421163 - protein, 451 aa, unidentified
MSARKLSQEKRMKLPKHLKHINLHAAGIDVGSRSHFVAVPEGATEEPVREFSSFTDDLHLMADWLIACDITTVAMESTGIYWIPVFEILENHGLDVKLVNARHVKNVPGRKSDVLDCQWLQQLHSYGLLAGAFRPAEQICTLRAYVRQRMNLVRYAASHIQHMQKALAQMNLQLANVVSDITGMTGMRIINAILNGERDPLVLARMRDPRCKNSTETIARSLFGNYRPEHLFSLKQAVDLYAFYQRQIDECDHQILAQLSSFDADDSGSDPKSELPVTIGEALQQMTGVDLTRIDGIDSNSALKIIAEIGTDMSRWKSAKHFASWLGLCPGTKISGGKVLSSKTKLVANRAAMTFRMAAFTLFRSKSALGAYLRRQRSRLGAPKAITATAHKLARLVYAMLKYGTDYVDAGQEYYEERYRTRVVQNLKRKARELGFELIEISGLEPKTATT

SEQ ID NO: 421164 - protein, 341 aa, unidentified
MKKFIRIGLDLGKNYFQVHGLESESGAAMTRKLSRAKVLGLFAGLAPCRVGMEACGSAHYWARELAALGHEPVLIAPAYVKPYVKRCKSDAADAAAICEAMSRPNMRFVPVKSADQQAVLMLHKTRELLIEQRTMSVNALRGHLAEFGLVAAKGIEHVGELRALAHEDGRLPRIAKAAAGQIGRHLDEIDASIQAIEGEIAKEHAQNQMSRLIDEIPAFGPLVASAIAASVPDPTVFRSGRDFAAWLGLTPRQDSTGGKTTLGPITKKGNPYLRKMLVVGARSVLHVAHKRKGALAEWIVKMRANKKERVAAVALANKLARICWAMMSSGECFRGEIYAKA

SEQ ID NO: 421165 - protein, 346 aa, unidentified
MEHYAGIDVSLELSSVCVVDTQGKIVKERKVASEPEALVDFFGSLGLAVTRIGLEAGPLSQWLHAGLKRAGFETVLLETRHVKAALSAMTVKTDRKDARGLAQLIRMGWFRPVHAKSMGSQEVRALLVARKQLLGRLIDVELSIRGILRGFGLKVGPVTRKGFEARIRELVTGQATLERIAGTMLSARAALKAEYEKLHKTVLAIVREDAVCRRLMTVPSVGPLVAITYKSAMDDPNRIAKSKAAGALFGLTPKKYQSGEKDVTGGITRTGDEMVRTVLYEAANVLLSRITRFSKLKRWGMDVAKRRGAKRAKVALARKIAVILHRMWVDGTVYRWNEATPIAAQV

SEQ ID NO: 421166 - protein, 344 aa, unidentified
MTYYAGIDVSLRTVNICVVDDDGEQVAETKLSSDVQEIIAYLDELECGIDLIGLEAGTLAQYLTYGLQAADFDVVCMEAQQVKAALSAMRNKTDKHDARGIAQLLRSGWYSQVHVKSMESHHIRMLLTSRRAVLDKCIDLENEIRGLFKIFGIKLPPKLGHGSFDKAVRAVIEADEKLSHALLPMLDARLVLYETFRVLDNRTRHLAWGDEICERLMTAPGVGYVTALTFKSGVDDPTRFKRSRTVAAHFGLTPRRSQSGEFDFDGHISKAGDAEVRRTLYVAANSVLTRSSRWSSLKAWGMKLKKNRGHKKAVVAVARKLAVILHRLWIDETQFQWGIERVRS

SEQ ID NO: 421167 - protein, 377 aa, unidentified
MDEPTRFVGMDVHKATIVVAVTATGEVGKALSYGTIPNTTAALEKLVRRLRTAGSGALKFCYEAGPCGYGVHRTLTRLGEDCMVVAPSMIPRRSGDRQKNDKRDASALAVLHRGGLLTAVWVPDPAHEAMRDLIRARQAAVRMVRAVRQQLSAFLLRHERSYPDGRRTWTKVHRGWLAEQSFPQPAQQLVLQESIEAVRVAEQRLDRIDGHLRAQLPSWSLFPLVQNLCALRGVDVIVGAGLAAAIGDPSRFATAPAFMAYLGLVPSEHSSGQRRRIGAITKAGDIHARAMLVEAAHSYRLPARIARRKLKAVEAVPEPVREIAWKAQTRLCQRYRQMMARDKLKQVVVTAVARELAGFVWAIACATSDPPTHRAIN

SEQ ID NO: 421168 - protein, 344 aa, unidentified
MGQVSTIGLDTAKRVFQVHGVDEAGAVVLRRQLRRTEVLKFFGKLPRCVVGMEACAGAHYWGREIAALGHEVRLMPPTRVKPYVKWGRKSDKVDAAACCEAVTRPSMRFVPLKTVEQQAALMTHRVRQLLVEQRTRLGNAIRAHMSEVGIIAAKGEAGLAALLAMIGNPKDQHVPAVVRPILVPLVEQWRSAGAQIAELERQILAWHRSNPDSRRLATIPQYGPILSSAMAATIGDAARFDNGRACAAWIGLVPIQNSSGGREHLGGISKTGDRYLRQLLVLAATGMVRRARAHPEDHPWFAGLLERMPPKKAAVALANKLARIGWAVLRHQTPYRATPALEAA

SEQ ID NO: 421169 - protein, 351 aa, unidentified
MKYIGLDCHKQYDHATMIDTETGEIKAKRLAHIKEDFSDFIGDRAGTRMVIESCRDWSRTYELSEDLVEEVILAHPLKVKAIASAKIKTDAIDSRTLAQLLMADLIPQAHLRKAENRIKQRVIRHRAFMVVMRTRVKSRIHDSVDSQLLPPDVLKAKPINLFSKKGMKWLTSLEWARDEDKKLVESHLRVMEAINQEISITNDMVKEIYEKDRDAQLLTTIPGIGVTLATLISTEIDGIERFRSPSKLCSYAGLVPSTHSSGGKTYHGKITSEGNRWLRWALVEAALPASYGDAEIKERLETLRAKKRANVAKTAMARWLLKVVYHVLKGKRPYITAYNNQKKARAAFYFA

SEQ ID NO: 421170 - protein, 336 aa, unidentified
MYNFIGIDVSKLTLQIYIEAHDTSIEIDNNEKSLKILYRDLQKLYTNNKPFVFIYEPTANYSVALTKFCAINKIYTYVVNTYVSSNFSKSLGNRNKTDISDAHMLFNMQMMIDKKEITVPIINPIVESLRELVGYYRFLQKQKTAFKNYNEAASVNKSSSYILADIKKNIARIQKEQELLIAKAQKAIDDDKTLKEAFEHITSIKGVGALVGILLLHLFLNYPHANRQQITALLGLDPITIESGTSIKKRSRISKKGLSMYRGVIFYSILSTVRFNEEFKAYYEHLKNRNKHTTSAQIAVMRKLILLAHSLYKNNVDYNPEQFKLKKSIRKEMCAA

SEQ ID NO: 421171 - protein, 324 aa, unidentified
MIDGILGIDVCKNTLDVSISSYTKVRTKSFTNSPDGWRHLLDWLIAQKIQRVHACLESTGRYSLGIACALYEADHVVSIINPAQIRDFVRTKLGRNKTDGVDASHIREYCELFKPSPWAPPSEAHRRLGELQTIRSGIIAGLTEWKNRKNSGIVDAEAQALADATILHFTSQIGAVDKAIALAIENDSDLRSKRDLLLSISGVGDTLAGVVLAELPGPDVLHSSGEVVAYAGLNPRQHQSGTSVDRATRISKIGNAVLRAALYMPALSAMRYNPAIVALVTRLKSRGRLKPKQIVVAAMRKLLVLCFGVLKTGKPFDPAIAMGC

SEQ ID NO: 421172 - protein, 407 aa, unidentified
MTCVGIDWADETHQVCILDEQGRTLDSFGIAHGRKGFELAHAKIAKYSAPAEVRVAIETRDSLFVDFLLELGYALYFLNPKQTNRLRDRYRMSDSKSDAFDAYVLADAVRRDPEFFNALSALDELSLRLRLLTRTREGLVGRKVAVVNEITAHLKRYFPVARELFGGVDNAQTIAFLLQYPTYEQARTVSEGRITALLVKQAKISPAIAARHAARARALLKEPQASPSASVTRAYPCAVKSLLRQLQSILVELDALDAEIAHNYKDHPNKELLDSLPGVAGTLGPVLAAELGADVQRFAGLRALKAFAGTCPVTKQSGKWHSIHIRRACNGHVRRALHLASRSALRSTHWARELFDRLRREGKSYGRSLRAVGDQLIEILYVLLLRRVRYDETYHLRMKALHGKTCS

SEQ ID NO: 421173 - protein, 360 aa, unidentified
MQISDVSEGTTTIGIDVSDKYSRLCVLDGTGTVVEEGRVATTGAAFRRRFSTVPRARVALEAGAHSHWISRLLAEAGHEVIVANPRRLRLIYENDKKSDRVDAEWLARVARLDATLLAPIRHRESPSQAALAVLRARDALVRSRTQLVNHVRGTVKIAGVRLPQCSTQSFVKHVAPTLPANLSVLLAPVLAVIDTLSREIRGYDRQIAAMADASYPETKRLRQVPGVGPVTALTYILTLDDPRRFASSRAVGSYLGLRPRQQDSGGDEPQLPITKAGDGAVRRLLVGCAHYILGPFGPDCDLRRWGLALAQRGGKSAKKRAVVAVARKLAVLLHRLWVTGATYEPLRKGAAAPSGALEMT

SEQ ID NO: 421174 - protein, 364 aa, unidentified
MKRKVYVGMDVHKETIQIAYLTSNTKEMVKEQQIKHNEVHIKKFINKLKTEWNEIHCCYEAGVTGYPLYRYLKSLGVNCILVGPGKIPRQSSDKIKTDKRDAIKLARLLRSGDLESIHVPSEEDEAVRDYLRSRDSLRLDLGRNRQRLMKFLLRKGNVYSTTKYWTVSHYKWLNNLHFENEILHETFNDYYSRVRVQEENLKAMDQKIQEIAKSEAFRERVGILRCFRGVDYLTAMFLLSEVNDFRRFKTAGSFMSFLGLVPGEYSSGSKRKQTGITKTGSPRLRRILTEAAWQHRFPGTGSKIVAARRTGQPALVVALAEKASLRLHKKFRNLQLRGKTPQVMITAVSRELSGFLWAAMNLVA

SEQ ID NO: 421175 - protein, 314 aa, unidentified
MKRAVEIFVGIDVSKAWLDMAVHEQKEMDRFSNDEVGIVGLGKALKKLKPRLVVLEPTGGFEMLVVAELSRAGVPVAVVNGKRVRDFAKATGRIAKTDKLDARVLAHFAAAIRPEVRSLRTEEEEQLTALLIRRKQILDMLTVEKNRLVTVRAKMRSDLEAHIHWLSNHLKELDQEIEEFVKGSPLWKEKDTLLQSVPGVGPVTAATLLGMLPELGLLNRQEIAALVGVAPFNKDTGGKQGKRRIFGGRADVRSVLYMAALSAKKHNPFIRKFYQRLIQHGKEKKVALTACMRKLLVILNAMVRSNQPWPLQLA

SEQ ID NO: 421176 - protein, 416 aa, unidentified
MQKKDYVEFEQVVERGCGMDVHKETVVVTIRGKGIKTVTKSYSTFTSSLIKLKEWLNKHGITHVAMESTGVYWKPIFNVLGDDFEILLVNARHVKNVPGHKTDKRDSRWLAKLLLSGLLKGSFIPERPFRELRDLTRYKKKLTNQVAADKNRFLKILEDANIKLSMVLSDVFGVSGTKMINHILAFDKFRPEELMQYVHGRVKASREDIKEALTGYVTVHHKFMMRTILGNIAKIESTILEIEEHLDKVLEPYKLEKELLETIPGVGPDVAIGIIAEISTNMEHFPDHKHLASWAGMSPGSNESAGKNKSGRTTFGNRNLRGFLAEGGWAASRTKNTYFSAKYKSLVGRRGKRRAIIALGHKILIAAYFIIKDKVEFKELGEEYLNNFRRDKLIAYYKKQIEKLDPGLESDREVAA

SEQ ID NO: 421177 - protein, 395 aa, unidentified
MADGIRWVGLDVHAHESTIAIFDQGTGELSTARMVGRPHQLLERLMEVPVPARMVYEAGPTGYGLARRARAWGIEMSVCAPGRTERRPGDRIKTDKRDAVRLARLLAAGELAIVTVPSLERERLRDLVRCREDIRADLMRARHRLGKFLLRREVYWEGPGRAWSRAHRAWLAGLRFVDHASQVTMADYLHAHDVLVARRDRVEAELEKLVIESPCAQAVGRLRCLRGIDTLSALGLCAEIGEWERFDHPDRLSAYLGIVPSEHTTSSQRRQGSITKAGSTHARRLLIEASYHYRRQPGVGELLERRQRDQPPEVINIAWSAQRRLHARWRQLKDARKKPNGVVAVAIARELACFCWEIATWSGSHPDPVPPASLPAGDPLTQTRSIPPKQEPAIA

SEQ ID NO: 421178 - protein, 310 aa, unidentified
MFSYPAGIDVSKDSLQVQVDLLDVGVSCPNAEGDFPGLISWLLLHQVGRVLLEATGGYERNVMKALQTAGFEVIRINPCRAKSFAKAMGQQAKTDPIDARLLAQFAAVIKSANSRITSVEQDDLRALVQQRENFVQQRDDDKRRLKTASSEAVKPALQNHIDYLCEAIKLIEKLIRQSAESLDREKVTHLRSVKGIGLVTAASVMAYLPELGEVGRHQIAALAGIAPYNDDSGTHEGKRYISGGRFAARRALYMACWSVIRYQPDFNARYKALREKGKCAKVALIACMRVLLVRLNAMIRDGSEWKGLVA

SEQ ID NO: 421179 - protein, 309 aa, unidentified
MKQSVVYIGVDVAKANLDVAWAAASRRFPNDRNGHTALVVWIKQSAAPVQLICEASGGYEQALLESLEQNNLAVTLVQAIRVRQYARAAGILAKTDTIDAKVLAAFGAAMQPKPTPPFSAEQKRLRQYEAQRRHLGKVLLAEQNRLAQVSCAELRSLSRSLISKIKKQIDTLDTGIANLIAQDQVLCVKAQKLTVISGVGARTAALLLAQMPELGQLNRGEAAALAGLAPFNHDSGSIRGKRAIFGGRRALRSGLYMAALSAARYNPILSSFYQRLRAKGKPHKLALTAVMRKLLLALNSSLKPQPILA

SEQ ID NO: 421180 - protein, 418 aa, unidentified
MKKHNNSGKKSEPTSKRAKTRGPVQRDTKEVLAELVGKLKEKLDPKKVAATSAGEKHQQGELRPNLDRLTVGVDLGDQWSHYCILGLEGETLAEGQLRTTQEDIAEFFQALNGARVVFEVGTHSPWVQEVICGWGHEVLVANPRLMEGSKRRKRKNDRIDANKLARLGRVDPQSLHPMQHRSREVRQDLVVLRARDALVAARTELINATRGLVKSMGSRLPKCSSPSFAQKVEETVPVELRDALLPLVRMAAALSDCIQGYDEKIEKLGREKYEHTALLRQVKGVGPITSLAYVLTLENPDRFVKSRDVGPYLGLVPKQEDSGESQPQLGISKAGDTMMRRLLVGSAHYILGPFGPDTDLRRYGLRLCERGGKNAKKRAAVAVARKLAVLLHCLWVSGEVYEPLRQGMSATMTPAAAA

SEQ ID NO: 421181 - protein, 376 aa, unidentified
MRTISAETPNTEVAVILGVDTHLDFHVAVALDHLGRRLGESSVPTTPKGYERLLRWAAGFGSLRCVGVEGTSSYGAGLTRHLRARGIEVLEVERPKHRRRSSRRNLQKSDPSDAERAARAVLAGEASGVPKSADGCVEMIRTLRAARRSAMKARTQAANQLQALRVTAPEQLRNRLRGLSTKELVRVAARFRLAGDPTDVPAATKFALRSVARRYETLSAEIAELDAHLGRLVEQAAPELVALPGIGTDNAATLLIVAGDNPKRLASEASFANLCGVSPVEASSGKVVRHRLNRGGNREANRALYMICLARMRRDPRTQEYVARRTQEGKSKREIIRCLKRYLAREVYRVLIFCGARSSPTGPRDEAHIDAKSYAA

SEQ ID NO: 421182 - protein, 338 aa, unidentified
MKKAPTLATFCGCTGMGIDVSKATLEVVGIAGAEVWRMEIANSEPEIERLAQALNAGGYRDKLICEATGHYHLLLGLVFARHGLDLRIINPLQSSKHQKSRVRKTKTDAVDGYVLATMCASERDLPEAASLQPEHVLARLKQGQLHALDKQLQRLGRSVSTYRETYAQLGLAPGASAAALERIVTELKTVQRQLQKELELLLAHAMADRNDMDKLRVLPGFSPMVAGLVGTAFNRQARSERSWVAYAGLDVSVRQSGTWRGRGKLTKRGNSYLRKRLYCAAWGAVMNYAEVRTYYDRLKAAGRNHVEALCIIARKLLRIAYAVLVKGKDYDHTIAFAS

SEQ ID NO: 421183 - protein, 355 aa, unidentified
MSIPSSKREVILGVDTHLDIHMGVLISSTGKLLGELPTETNTAGYQKLLKWAQSFGQLNRAGVEGTGTYGAGLTRVLREHDVTVYEVNRPDRSRRRLQGKSDPIDAENAARAVLAGRAVAIPKEQSGAAEAMRIICVARRSAVKAKTQAINQLRALLISAPDDIRARLLRSKPEDCVAACARLRSLGETPHLHALTISLRVLAKRWRILAEEIKEHDRALDELTAQHAKRLRQQFGVGPQTAAILLSVAGDNPERLRNEAALAALCGVNPLPASSGKTVRHRLNRGGSRTANNALWTIAMVRMRSEPRTRAYMARRECEGLSTKEIHRCLKRYIVRELYPLILADLTESSGYYLT

SEQ ID NO: 421184 - protein, 454 aa, unidentified
MRKPRVIPDEDHEVVYERVAAVDVAKASGVVCMRLPDPARPGRYANQIWDNVPATRARIGELGRELLRHQVQMVTLESTSDYWRIWYYVLESTGLAVQLVSASQAKNLKGRPKTDKLDAMWLARLTQWGMLRPSFVPPAAIRAVRDFTRARTDLVHERTRVLQRLEKLLEDAMVKITSVASDGLKAKSVVAMVAALIAGERDPRTIADLAKGPLRGKKDALAEALDGMFDSHHGVIAQALLDQVAFLDQRIAQMEAGAIEALAQVEESWGVDATGETGPGRGTGPDSRVLAAVYRLAEIPGVSVWLAIVIIAEIGLNMTAFPTPAHLVSWMGLCRSAAQSGTRHGKGKQKKGNSYARAAAGQAAIGAAGTATFLGQRYARIARRRGGAIAQVAVARSIMIIVWHLLADPAARYRDLGPDWHATHVNRDKKIRNHIRGLQALGLTVAITDDEHAA

SEQ ID NO: 421185 - protein, 390 aa, unidentified
MPKYQDLSRSLAAFDQNSTLVAVIEMGSEGWLVGALVPGLKKDPRKKLSPDKQSLLALLHRWCAEAAKAGRAIKRVCVAYEAGRDGVWLARWLREQDIDAYVIHPTSIPVSREHRRAKSDRLDLRLLLRAFLGWLRGEPGHCSMVAIPTVEEEDGKRPLRERETLTGDVTRLINRMKSLLVTHGIRNFKVTLKKAGEKLAELKTAWGEPLPPESLAELQRSFERLRQAKQQIAEIDKARRRRLEKAPEAGVHPMILILARVYGVGLMTAESLVREVLYRNLRDRRAVARYAGLTGSPDESGKKRREQGLAKAGNGRIRRALIQLAWRLLRHQPESALVKWYRARTGDGRRDTRKVMIVALARKLLVAFWELVTNGTVPEGMRLHPAKVAG

SEQ ID NO: 421186 - protein, 415 aa, unidentified
MARVFEAVFERVAGLDVHKAQVTACVRVADAAGQRVAHLAEFSTTVTGLLALADWLKSYGVTHVAMEATGVYWLPVWHILEDDFELTLCNARHVKNVPGRKTDVSDAQWLCQLMEAGLLRGSFVAPKPQRRLRALTRYRKTQIAERQREANRLHKALEDTGIKLDCVATDILGKSGRAMLDALVAGTTDPDVLADLAQGKLRAKIPALREALQGRFEPHHALIISAILSHLDFLDEHIGQLSEAIEAELGPTGQAAITLAATITGVAARTAEAMVAEIGTDMSVFSSAGHLASWAGRCPGNDQSAGKRRSGHRRNGSKFLGIALQEAALAATRAKGSYLQAQYQRLKPRLGHRRALGAVQHSMLVAYWHMFTTGETYRELGGDYYQRRDPERLTKRLIARLQSLGHEVTLTPAAA

SEQ ID NO: 421187 - protein, 415 aa, unidentified
MDVLHERAAALDIGKRDLKACVRTPHPSRRNARQSEVRTFDTTTNSLLQLRDWLVAERVSIVVMEATGDYWRPPFYLLEDVLNVILVNAAHAKNLPGRKSDVADAVWLAQLAECGLLRASFVPPEPIRQLRDLTRYRSTLLAERSREAKRLEKELEDAGIKLSSVATDILGVSGRLMLQALINGERDPVVLAELAKARMRRRIPDLIEALVGNFGEHHAFLCRLHLQRIDQITATIAELSTRISEAMAPFRDQLRLLDGIPGIGPGVAEIIIAETGGDMTRFPTAGHLASWAGVCPGMNESAGRHKPGHTRHGNRWLTGALGTAAMAAARTKDTTFIGARYRRLAGRIGRLKALVAIEHTIITAVWHILSATTEYHDLGGDHHLRRDPDRARHRAIRALNQLGYTVTLNPIQGAA

SEQ ID NO: 421188 - protein, 361 aa, unidentified
MNTPTLKTIGVDLHKTSLTATVLDPAGGVIERRDLPTKCRKQIAAYFTAHGPDVQVAVESVGFYHWFWDTVKPTVRKLHLADPAGVRACAGRRTKTDRNDSLLLAELLRENRLPMAFVPDEPVRALRELCRHRHRLARQLALARRHLRWIGLKNNLPGPTTLTSDRAQKWLLSQDAKLNAVHRLSSRQFVDQITSLERQLADVETVLADTVAAHADLAPTLALIQSVPGVGFITALTILCECGDLTRFDNIDELSAYAGLCPRVTQSGESAHHGHISRQGPPVLRWVLQQAAWVALRCDPNARRIYARISQRAGNKKAATALARKLLSYAWSVCRQGRPFVWPNSENKSGPVPGTVWSYDI

SEQ ID NO: 421189 - protein, 340 aa, unidentified
MEKRYIGIDLHRNRFTCCIRLENGRTYLSEWALKDLDRFVKKLRASDEVAVEITSNTRLFYDAVAPHVSRVVVVDTNQFRVISQSVKKTDPNDARLLSLYLAKGLLPEVRMKDKQHGQLASLTQTRDTLVKQRSALKNKVNNILSARGLNLPKEALSSEKKLAEVLELPFDEIVRIELRVIVEQIRSLNKSIAELEKTIGEEGSKLEGHKGLSSIKGIGKITGAILLSVIGDVNDFPDEGRLASYFGIVPRVSNSNETERNGRIHKRGTKLGRTALVQSALIAANYSPYLKSFYERVKARRGAGKAIIALARKFLGIIYRTLKNKWVFEDFPNFVLVEGS

SEQ ID NO: 421190 - protein, 341 aa, unidentified
MEHYVGLDVSLKLTSICVVNQTGSVVREGVVDSDPEAIAAFVRSNALVRIGLETGPTATWLWTELKRLDLPVICIDARHAKAVLKMQINKSDRNDAAGIARIMQTGWFKEVRVKDLDSHAVRALLASRALLVKIKRDLENQIRGLLKNLGLVIGRAKFNVFAVRAEELIENRPELIAAVRPLLVARKAIEQQVGDLDRKVLTLARHDVQVRRFMTVPGVGPITALCFKATVDDPTRFKRSRSVGAYVGLTTRRHASGEVDWSGRISKCGDRMLRMYLFEAAGVLLTRVPKWSALKAWGTRLAKRNGLRKAKVAVARKLAVILHRMWIDGTEFNWSTKKAMA

SEQ ID NO: 421191 - protein, 369 aa, unidentified
MSSVASRAGAIHLGMDTSKKTIMVATLMPGEQIPVTERIANEEAAVRRFIARLGDPSQLRACYEAGPGGYDLYWLLTSMGVACEVVAPSLIPKGGSDKVKTDRRDACRQARLHRAGELTPVRVPTRAEEAVRDLVRVRAGLLADRKRAQQRLTAVLMRHGCIWCHGSYWTGAHRAWIAAQRFTEPALTAAIAHYRAALDTREAELAAIEAELAPWAHREPLAGPVARLGCYRGIAELGALTLASEITDWRRFPAARAFMSYTGLVPAEYSSGERTRRGHITKAGSEPVRTTLIEAAWAYQHGPAIGATLRRRQAGAAPGTLARSWKAQRRLHARYRHLISRGKAPGEAVTAVARELAGFAWAEMTADPA

SEQ ID NO: 421192 - protein, 347 aa, unidentified
MKITAVGIDLAKSVFQIHGVDERGKVMVRKQLKRAEVAKFFANLPPCLIGMEACASAHYWARKLMAFGHTVKLMAPQFVKPYVKTNKSDARDAEAICEAVQRPNMRFVPVKTPEQQAVLALHRARQGFVKARTAQANQIRGLLAEFGIVIPKGIAHLAKRIPEILEDGENGLPGNARQLFAGLLEHFQELHQRMAELEKQIVLWHRSNEQSCKLEKIHVIGPITASALVVSIGDAKSFKNARQAAAWVGLVPRQHSTGGKDRLLGISKRGDVYLRTLLIHGARSVVRQAESHADRATSWLKGVLDRRHKNVAAVALANKNMRIAWALLAKERDYESNYAAAPNVAQA

SEQ ID NO: 421193 - protein, 348 aa, unidentified
MYYIGVDYHKHYSYVVVKNGQGEVERRGAILNSKEQVQQFLEPYRPGKAALEATRNWGLIYDWLEEILDDVALAHPLRTRAIAEARIKTDKISADILADLLRADLLPRAYVPGRETREIKNILRQRMFFVRLQTMVKNRIHTILDRHPEVFSEAQELSDLFGATGMEWLKQVTLSGEDDQLLASELELLELLKKKISESNDVVKELGKQDKRARLLRSIPGIGPFFSVLILYEIDNISRFRDPKKLCSYAGLVPSTYASGGRVYHGRITKQGNKWLRWALIEAVYPAIRADAELYAYHERIRLRKGANAAKVATARRLLTIVYRVLSQGRFYQRKKRRQDSPVALVTS

SEQ ID NO: 421194 - protein, 454 aa, unidentified
MSKSAMQRDEMMSLDVVHPNAAGIDIGNATHYVAVPPDRDAEPVRTFECFTEDLNKMADWLAQCGIVTVAMQSTGVYWLPVYEILVQRGCEVFLVNARHTKNLPGRKSDVQECQWLMKLHTYGLLNNSFRPTEEICVLRTYWRQRDDHVKSASASIQRMQKVLTEMNVQIANVITDISGVTGMAILNAILRGERDRYKLAELADPRVKASKEEIAKSLEGNWRPELLFVLRQQMQIYGAFQKRIEECDEALASHLMTMEDKAEPGSKPQTPKAGKKAGGNAPQFNLRGELYRISGIDLTRIDGINVMIAQTIVAEVGLDMSKWPTEAHFASWLGLCPDNKITGGKVYHRGSRHVENRAATAFRMAATSLWRSKTYLGAKFKRLRANLGAPKAITAMAHTLARLVYRMLKYGQDYVDKGMEFYQQRYQQQQINWMQKKAKDLGFVISLTPTPAKN

SEQ ID NO: 421195 - protein, 319 aa, unidentified
MSKTVLGIDVAKKKLDVALMFNDKSLLKKFDNTPKGFNLLAGWLASLHIERVHACLEATGPYSEAVAEFLHERGHLVSLVNPLRIKSFAKSDLQRNKTDEADARTIAAFCLVKDPDQWHPLPVEIKKLQALTRRIESLERMLGVETNRLELASDTVRPSLERMIISLKQEIDNVRRLIKEHIDNHPTLRQQSELLQTIPGIGEKTATLLLGEIEFCQFDSARAVAAQAGLTPQRSQSGSSLDRTRLSKLGNGRIRKALYFPAICAVKYNQIIKLFAQRLARNGKTPMQIVCASMRKLLHIAYGVIKHNRPFDPDLAFYI

SEQ ID NO: 421196 - protein, 345 aa, unidentified
MEITTIGLDVAKNVFQVHGIDAAGKVVVRKALRRAQLLPFFRKLSPCLVGIEACGTSHHWARELIGLGHEVRLMPPAYVKPYVKRGKNDAVDAEAICEAVTRPTMRFVAVKSREQQSALSLHRARSLLVGQRTQLVNMMRSMLAEFGIAIPEGLEKALSMARQIVEGEVDTGLPVEATMVVAMLSQQVIDTHVRLREIDKSLGALQRSDDLARRLSTIPGIGPVGATAFAASVTDPHQFRSGRQFAAWLGLTPLQKSSGGKDRLGRITKMGDKYLRKLLVIGATALVRYAKYKPDTADPRLLAWLAKKPVRVATVAMANKMARVIWALMTRGETYQARHNPMLAG

SEQ ID NO: 421197 - protein, 392 aa, unidentified
MIYIGIDVAKDKHDCFITNSDGEILFNPFTISNNREGFETLFQRIKSVAEDFSKIKVGLEATGHYSYNLLGFLLDKGLPTYVINPLHTNLYRKSLSLRKTKTDKVDSRTIATMMMSDVNLKSYSDTSYHNEELKSLTRYRFDKVKERAKLKSSVSRLVCTLFPELEKLIPTLHLASVYALLSEFPSADAVANAHLTRLSNLLSESSKGRYGKDTAVMFRDVARSSIGSHMPTKSLELKHTIKLIQELTVEIDEIESAIKRIMDEQIQSPILTIPGISYRMGAMIIAEIGDFSRFDSADKILAYAGMSPSTYQSGQLDNCYSHMEKRGSRYLRYALYNATKYVCHWDKSFGAYLEKKRSEGKHYNVALSHATKKLVRLIFAMEKSGKTYLPTA

SEQ ID NO: 421198 - protein, 428 aa, unidentified
MHGKDYNKQIAKRQRIKRTTLVIGMDIGNEFNAMCLMNKEGEVLGKYPQIYNSRKGFDFFTKAIEAMKKKKGFRDVLIGMEPTGHYWRKIAYFAKERGYEVRFVRTTALRHQRELDESSSAKSDVRDAVTIANITREGKYIDTVIEDGVLRQLRTLAHVRERIQRYNTGSKHALRAVLDDYFPELKDMFWSMKSKGLWAVLENVPFPGNVIDLGLKRLTELIAKSTRRKESAAKKAAEIYQAARETVGLKQIGVADRYRVEMYLEEVKRSEAQLKDIEQEMGKLLEEVPYAKNILSIPGVGVLSCAVFLGELGDPSNFKHPKQIIKYAGYDPQENDSGQSIGRKRISKKGRWMLRKYLYFMSMRAIYRSEFFREYYEGKLKSSNRFGQPLKKKEAICAVAIKLIKVIFALLRDDRMFTAKVHELALAA

SEQ ID NO: 421199 - protein, 344 aa, unidentified
MKITTVGIDLAKNVFQIHAIDGHGKVALKKQLKRDKVAEFFVNLPPCLVGMEACGSAHHWARKLESFGHTVRLMAPQFVKPYVKTNKNDAADAEAICEAVARPNMRFVPIKTVEQQSVLALHRARQGFVTARTAQANQIRGLLAEFGLIIPQRIVSIAKCVPELIEDASNELTGTFRLLVDRLLEHLKELDRHVKELESQIKKWHHTSAASCKLEKVPGIGPITASALVASIGDAKNFDGGRQVAAWIGLVPRQHSSGGKSTLLGISKRGDTYLRTLLIHGARSVIFRAQQKVDKSSWLHKLLERRNPNVAAVALANKNARIVWALLANDREFRSDYTPAVAVA

SEQ ID NO: 421200 - protein, 417 aa, unidentified
MSQEYRRCCGLDIHKETVVACVLPADANRDEPPRRKVFATFTRDLIRLRCWLKQCKVTDVAMESTGVYWKPVWNVLEGHFDVLLLANPGQVKALQGRKTDHRDARRVGEFLQDRRLDPSFVPPRHVRERRDLTRYRAHLKQDRNRIHNRIHRALEESNIKLDCVASDILGTSGRHMIEGLIDGKFGPEFLADRARKRLREKIPQLKQALRGTLTDHHRLLLRELLADLDALDAKVARLEAEIAARLQPHSDLIERLCTVPGIDVIAAWTILAEIGSDVNAFSDADHLVSWAALCPGNRQSGGKRISGHTRKGNRYLRSTLCQAAWAGSRTKDTYLSALFFRLAARHGVKKATVAVAHQLLRIAFHIIRDGGRYRELGGNYFDRLHPERTRKRLIRRLEGLGYRVILAPPDNPGHNTA

SEQ ID NO: 421201 - protein, 403 aa, unidentified
MLFVGIDWSDRSLDFHARSAEGRVAAEGRVEPNLAGMSELFARLEQHAPPSEVGVAIETAQGAWVQALLDRGYAVYPVNPKSAERFREALSAAGNKSDRIDCKVLAMMLAALHHDLKPLRPDAPDIVALRIACQDRVRLVEERTAKLNELLAVLKLYYPAFLGLFGGLDSAIALEFLQEFPVQRAMRSLTPKRLRSWLQRHAYTRMSRVDELERRLVEPTLPVAEHLQTAKAALIRYLATSLLALKAEIAQREEQITNHFDGMPEADWIRSLPGAGPNLAPALPACVGRDPNRFADVAAARALMGTAPVTRASGRSRVVLFRRGCWKFARRTLQLFADRSRRCCTWAQALYEKQRAAGRGHHAALRAVAHRWLKIILAMRRTGTPYNEAVFIHSQRRHPTQPL

SEQ ID NO: 421202 - protein, 370 aa, unidentified
MNHVTSIGLDVHARSVTAAAFDPMTGEITARRFGNDPSEIAGWILGFEAPKAVYESGVTGFHLCRELRALGVDCVIGAVSKMQKPASNKQVKNDRADAQFLARLLSTHNVTEVFVPDTETEAMQDLTRALEDAREDLIRGKQRLTKFLLRHGWVFGGTREDGSRVGYWTKAHWRWIREVELGDMASQETLDYYISEVRHLEGQKKELEKLISIHAGGTRWKPRVDALCCLKGIDAMTATSLVVEAGVFSRFDSASAFAAWLGLVPSEHSSGETEHRGRITRAGNKHARKLLVEASWHYVNALPTRKAPRPGTEVPLHIENHAARGTKRLVERRRELHRRGKKPVIANCATARELACWVWAIGRMCEGTLD

SEQ ID NO: 421203 - protein, 348 aa, unidentified
MDVATVGIDLAKSIFRLHGVDARGVVVLRRQVTRKQLLPFMARLSPCLIGMEACAGGHYWARELSKLGHTVKLMSPHFVAPYRKSQKNDGNDAEAVCEAVGRPSMRFVPPKTTAQQDVQALHRIRAQLIKWRTGLANEIRGLLGEYGIVLRKGMAPLRRVLASIIEDERELLSPFFREMLREMRERLRFLDTRLQEYDRRVECVFSKDERCRRLAQVEGVGALVATALVAAVGNAREFRTGRELSAWLGLVPRQHSTGGRTVLLGITKRGDRYLRMLLIHGARAALRWVERRRDAPGVALTRLKTRRGPNVAAVALANRNARVLWALLARGEDYRPRGRRRLECVQAS

SEQ ID NO: 421204 - protein, 416 aa, unidentified
MDRIVDRPGALDVHKASVTACVRVWEGGELTEHLVEFKTTVHGLLALRDWLEALGVQRVAMEATGVYWKPVWAVLEDRFELMLVNARAVKQVPGRKTDIKDAQWLCQLLEAGLLRASFVPPKPIRTLRNLTRYRKATIQDRNREAARLHKLLEDTGIKLDCVASDILGVSGRAMLNALVSGTTDPQVLAELAKGKLRKKIPALREALVGRFEDEHALVVSQILAHIDFLDEAIDRLSDEIEERIAPFALQRELLMSIPGVKQRTAEVLIAEIGVDMSAFPTPKHLASWAGICPGQNASAGKRRSTKTRKGSKWLRATLAESANATARTKGSYLAAQYGRLYARRGHAKAITAVGHSILTAAWHMLQTGELYRDLGGDYFTRQDPDRLTRRLVRQLEALGHHVTLTPKEHEPEPLAA

SEQ ID NO: 421205 - protein, 366 aa, unidentified
MDTIYIGVDFHARQQTICYLKTETGELVTCELKHQDKEVVRAFYAQFSGQVIVGLEASGYSPWFERMLEELGCQVWLGHATEIRRRARWRQKNDRRDAELILDLMLHNEFPRLHRPAVQSREVLRMLRYRQKLIKMRTMSKNSLQAIALQAGLAKGSRLFTKAGQQELGTAEMSPVLHWQREHWLQLMEPLNQQLLETMVWFKSQSKDDDSITRLRTHPGIGLLTSLCIVHTLQPVSRFRNTRKVAAYAGFDPIERSSAERKCFLGISKAGSRLLRYLLVEAAQTAVRKDEDLKRFYQRLADRRGRPKAKVAAARKLLIRAYIMMRDEIDYAEFRHRAVAARLARRSQGPANVPEVLIGQPASPEQ

SEQ ID NO: 421206 - protein, 315 aa, unidentified
MEIFVGIDVSKETLDVSVRPSGERRRTANDEKGWGELAAWLGSLSPTLIVAESTGGYERGVVIALSDAALPIRVVNPMHVRSFARATGRLAKTDPIDAEVLAHYAEACRPQLRPLPDAEAREMAAVLARRRQLIEMRTAEKQRLAQAPLAVKKRIERHIVWLEREIARVDEDLDDWLRGSPIYHELGDRLASVPGVGPQTVLMMLLNLPELGTLNRKQIAALAGLAPMNRDSGIARGRRVLFGGRAQVRAVLYMAAVVASRHNAVLRAFYEKLLASGKKPKVALVACARRLLTILNAIARSGVPWNPAFAEASTS

SEQ ID NO: 421207 - protein, 377 aa, unidentified
MRKNIRFIGLDVHGETIAVGVAEPAGEVRSLGVIPNRPESVRKLLKKLGPASSLRACYEAGPCGYVLYWQLTQLGVHCDVVAPTLVPTKSGERVKTDRRDALKLARSYRSGDLTAVWVPDPEHEALRDLVRAREAATKDHLRARHRLQKLLLRRGLRPPEKMKSWSTRHMTWIKSLRLEPAALEATFLDYLSEVEHASERIERLERAIDQAIAAAPPATRAVIEGLQALRGIARISAATIVAEVGMLSRFQRPKQLMGYTGAVSREHSSGDRIRRGAITKTGNAHLRRILVEAAWSYRYRPAVGATLRVRQRNLSAEVKEISWKAQHRLHYRYARLLGRGKPKQQVVTAVARELAGFVWAVGVQVEKQLARGELRAA

SEQ ID NO: 421208 - protein, 403 aa, unidentified
MLFCGVDWASDHHDVCLVDEGGATRWRGRIAHDPAGIERLRQAIAEHEPDPAQVAVGVETSHGLLVGALVEAGYVVYPINPKAAERFRDRRKPSGGKNDQLDAEVLAQAVRTDRTSLRALLPDSALASEIATLARDRHALVREHTRLLNQLRSALGEYFPAATLAFDLDADSTLAFLERYPTPEAAAKLTAFQIAAFLRARRANRDLAAKAAAAKEALRAPALRARPEIARAKARLVRVVCVQLQSLRPELAAYARELERLLKMHPEGELFLSLPGLGTILASRVLAGTGDNPARFHSAAGLCAYAGTAPIVLQSGRRAVVKARSACPKELRDAVQQWADQARRPARSAWAAQFYQRHRDRGHNHNESLRALGNRRLELLFDLRRKGIRYDEAVHAANIRWAA

SEQ ID NO: 421209 - protein, 403 aa, unidentified
MNSVGIDISKGRSTIAVMRPFGEVVISPFEVRHTGSELSKLAKQLKSLDGETRVVMEATGNYHASVAKLLHNAGLYVSVINAKLVHGYGNNELRRVKTDRKDAVKLANYGLDRWLTLPRYIPEEDTRLLLKNCYRQYRQYSKVQTVLKNNLISLLDTVFPNANRLFSSPIRGDGSEKWVDFVAEFWHCRCASEKSERAFTSKYLRWCRKHGYNFREAKAHTIYAEASGHIGVMPKSETTKLLVEQAVAQLRATSTALAALKQEMQSLASVLPEYPVVMDMFDVGPTLGPQLIAEIGDVRRFYSKKALVAYAGLDAPPNDSGDVTGRHKSMSKIGASSLRRTLFLVMSVYLQTAPLDEPVCQFMDRKRAEGKPYRVYMMASANKFLRIYYATVKAYLESLEHTA

SEQ ID NO: 421210 - protein, 352 aa, unidentified
MAKQLPLRQCLGIDVSKNQLQVNISNQESDQRIRVIASTRFENTAKGLEKLCVWVSRHRVVGIEFRVVLEATGVYHESATYFLHEKGFEVAVVLPNKSKAYARSLNAKSKTDSIDAKILAQMGLERKLESWAPASQNMRRIKRLCRERVALQDQKTTALNQLHAKNSEHKPEAKSQQRSKKLVQFLEKQIGQVENDIQSAINTDPALKEKIDQICLLKGLGWLTVATIIAETDGFALFKNKGQLVSFAGYDVIQHESGSSVMGSTRISKKGNRHIRRALHFPALMAVRHEAQFKDLFERVFNKSFIKMKAYVAVQRKLLVLIFTLYKNNAAYDPHYYLNNQPKQNRQELSPA

SEQ ID NO: 421211 - protein, 344 aa, unidentified
MISAVLECCAGIDVGKKWIAVCVLTGPANGDAQAERRKFQTTNQCLERLAEWLVECGCTHVVMESTGEYWRPIYNVLEEATEMEIILANAQQVKGIRGHKTDPEDAHWLAHLLRHGLIRPSYIPPLEVRQLRDLTRRRKQLVRNGAQERNRILKNLESANIKLGNVLTDVLGLSGQLMIDKLLEGNATVEEIADLAQKSARKKIPQIRAALQGHRMNDLHRRLINLSLDHMAFLEEQIRLLDQAIMEHIRTHGMEKPYQLLQTIPGVREEGAASLLAEFGPDMAVFGSAKHLSSWAGVAPGNNESAGKKETGSHVTWQSLGTLHVDGSRLVSLAQERIGIQDGL

SEQ ID NO: 421212 - protein, 430 aa, unidentified
MGLIEPTPMPPERDAQATAYHGYVGIDWGSQQHQVCVLDRDRHVVGERVVDHDGSSLAQLATWLWALSAGHPQRIAVAIEVPRGAIVEGLIERGFHVFAMNPKQLARFRDRHTMSGAKDDRRDAFVLADAVRTDQPSFRRLQLDAPQLLLLRELSRAEETLLEEFRRSANRLRDQLHRFYPQMLHLCSGADEAWLWDLIDLAPTPAHAALLSKEQIQRVLKAHRLRRVKATEVLTCLQASALPVAPGAAEAAQAHGAFLLPCLRVLAEQLRSCAQQAEALLHTLAEAPDETGGPSDVAIVQSLPGVGRKITAWLFAEAAQPLTERDDQVLRTQGGVAPVTKHSGKRRQVVMRRGCNPRLRHALYHMARVAMQRDAYFGGVYEALRAKGQRHGQALRHIGDRLLRILIAMLHDRTCYDATRSRREPVVQMR

SEQ ID NO: 421213 - protein, 346 aa, unidentified
MLYAGLDLSRKRLDFHLLDGEGETVDVGATPPDADGLLGLTRRLDRHREPIRAAIESVNGARFVHDRLELAGWQVEIADAQKVKGLAPLACKTDRIDAWVLAELARRDLVPAIWLPDPRVRAERERARWRLHVVRHRSSLKQRVHAVLLTHGKPCPVSDLFGVRGRQLLAQLGLPEPWQGTIEASLRLIDELDREISDCERELRRLGADHRYVPLLCTVPGISWVLAYTIAAEIGDIGRFASPRKLAGYSGLCPRVYQSGDRDLRGPLSKQGPRYLRWALVEAATHACTAPVYRDRYQQTKARIGKQRGAKVAQIDLARRLSEAIWHMLSRGEAFAPKGATDPLAA

SEQ ID NO: 421214 - protein, 340 aa, unidentified
MNCSAAVGVDIAKSVFQMHYIDPTTGEVVSISIKRAHFLQRFANRAPCLIGMEACGSAHHWARQLIAMGHQVKLMPAQFVKAFNIRNKSDAADAKAIWLAVQQPCKAVAVKTEMQQAMLALHRQREQLVKFRTMQINGLRGLLSEFGEVMGKGRAAMIKAMPDALARIEERLPKVLIDTLREQWTRVEKMDEEITAIERRMREWKKDDRAVKAISEIPGVGLLTATAAVAMIGDPKAFKSGREFAAWAGLVPKQTGSGGKINLHGISKRGDAYLRTLMIHGARSVLTHAKEPGPWVEQIKKRRPPNVVVVALANKIARTIWAVLAHDQPYDKRYSSMKPV

SEQ ID NO: 421215 - protein, 465 aa, unidentified
MKIYVLGWLGAIKLYPYNAPGSVLFFMEPYRKEHIMHNKNYISVGIDVGSAFSFMTILAPDETVILKPFKITHNNKDSLERAVSEIKKAEELYSLESRTFLESTGIYHFPLFCYLVDCGFNASIINPIITHSTKNGNIRKVKNDKIDSKGIAKLGLSKDIPVSQFPAKLVLELRSLTRKYYDLTDERSAHINKLKGDLHTVFPQYLDVFCDVTGKTSTMILRQYGTPDKILRGHKKTMIEKISKASRKGLAKASERYEKLCAAANAAKTFGCQIDSIYFNIFLTLDLVEKLDSALDSILNRIRQLITFNKNEKFIQQIKLLNTIPGVGFLTAVTIMCEIGDFSAFRNPKQLFAYFGLDPEVNESGKFVGTQLHMSKRGSRIARRAIFAVALASIRTKRNGEGINPYLRKYYELKSGQKPKMVAIGAVMHKVCNIVFAVLRDEKAFELRSPEEHCKQYQRPALAAA

SEQ ID NO: 421216 - protein, 405 aa, unidentified
MINTGIDWSDKHHDLCILSETGETLDSFRISHSQDGFEQAHRRIAKYANPEQVRVAIETKDSLLIDFLCELGYTLYFLNPRQTDRFRDRHRMSRSKSDSFDAYVLADAVRTDAHLFNALSPLDEQSLRLRVLTRTREGLVSRKVAVQNEITTYLKRYFPVALELFGGIDNLEAIDFLLQYPTYDQARSVSKIRIASILSNKAGISKAIAQRHAQQAHDKLKDTQPVPAASVSRSYPLAVKSLLRQLRSILEEMDALQDDIRDNYDKHPNKDLIASLPGVADTLGPVIAAELGTDISRYANIETLKAFGGSSPVTIQSGKFRSVHFRRACNGHLRRALHLAAQGAIRKAQWARKLYDRLRAEGKSYGRALRSVADQLLEMLYVILARRTPYDEAYHLRMKALHGSA

SEQ ID NO: 421217 - protein, 356 aa, unidentified
MTSSTKYIGMDVHKESISLAVRNAAGKIVMECVIETKANTILQFFDGLRGDVQVTFEEGTWAAWLHDLLKPHVTKLVVCDPRRNALLLDGNQNDRVDARKLSDLLFMNKLKPVYHGDHGLRTLKELVRSYLTITRDLGRVMTRVKAIYRSWAIPCSGKQVYTARHRAEWLGKINEPGVHQRAEFYYQQLDALRSLRQTVRRELLAESKKHKAWKRLCQIPSIGPIRAAVLLGILQTPHRFRTKRQLWTYSGLGIEVHSSADHEMEKGQLRRKKKHVEIRGLNENCNHDLKNLFKGAAVVASTKPGPFESFYAALVAKGIRPEMARLTLARKIAAIVLIVWKKGVCFDAHHLKPQTA

SEQ ID NO: 421218 - protein, 422 aa, unidentified
MHEERRWFVGIDWASQEHVVSLCDVQGKKIGERKFDHGGTGLSDMIAWLLKASGGEAGEMHVAIETPHGPIVEALLERGFNVYSINPKQLDRFRDRFTVAGAKDDSLDAYVLADSLRTDTRLFRKLNIVEPLIIELREWSRIDEELKVQRVRLANRLRDQLWRYYPQMLELADDLGADWVLDLWEAAPTPEKAARVREAAVARILKSYRIRRFDAAHVISELRKPALSVAQGTTEAATAHIRVVVEQLRLVNRQLAAAGQQLDRLCKELAGPIGGEDGENVPGQRQEHRDVTILDSLPGVGRTVLVTMLAEASDALQRRDYHALRNLCGSAPVTRRSGKSRIVMRRRACNRRLSNAAFHWGRTAIQRDPASRAKYDALRARGHGHARALRSIIDRLLYVACAMLEKRTLFDPSRAQNKNAAA

SEQ ID NO: 421219 - protein, 527 aa, unidentified
MATATQKRNRKSNKPTKTNPSRYIGKPAGVIQARIREAGPQHFAVISVDCAKARSVWMICDYYGKVLVEPTPVEHQRGAFDAMIGQIHGAFKEFNITDSIAAVEMTGVYHRPVQAALRKAGFDTRTVHPFASKHYRKPLHPNLKTDENDLEAIFHAAINGYGLSLLPVDPVYQSLQALSRHRVNLVKQRAKLQVQIRILIHQTMPGFADLFIQHHFFKKSIAIPVAKAFPSAAFIAKAGTFKIAESLRKQKVRFQQPTIERIVAWSKIAAEPSDLQAMLSVQWQQLIALWELLTEQIGSTEREMAGFLVRTPYVLLMSVRGINVVSAASLAGEAGPIEHYASPRAINGRAGLYPSRYQSDQVDCQGGLARVANRRLRAACMMVAKNLIKCHPYYRGLSAYWEKQKVDPRDRHVRIANRANRMVYQLVGGRQIWRGKGVDREAILSKLREFHRDHHSDLEQMIADMNEAFLWLPKSTYASEAKPLAELAAKKRCGPQPIGDLLINLLLRLGVGTADPLESQSSEALES

SEQ ID NO: 421220 - protein, 346 aa, unidentified
MRSDLSIGLDVSLDQTSVCVVDESGRTVWRGRCKSTPDAIAATVQRHAPDVARVGLECGQLSTWLFHELKARGLPVVCIDARHAKAALSLKINKTDANDAYGIAQIVRVGWYKEVTVKSMDTHAVRALLAARTQLVCQLTTLKNTVRGILKTFGLIMPPGSGRQFERRVREMIDEHAVLTLVLTPLLATLDTLRLQIAKLESAVGKKARADQVVRRLMTAPGVGAVVALAFTSAIEDPARFRRSSSVGAYLGLTPTRHQSGEVDRAGRISRCGDGLVRSYLYEAACTLIKRCKRPCALRRWGLSLIDRVGSKKAYVAVARKLAVILHQMWRDSSTFRWDEERLATV

SEQ ID NO: 421221 - protein, 352 aa, unidentified
MIIGCDFHPSFQQIAFLDEETGECGERRLRHREEAVQFYGSLAGRRVRVGVEATGNDRWFRKLLSEVGHELLVGDASAIHASAPREQRTDKRDARHILRLLAENRFPAVWQPPAGNEEQRQLLLHRCRLVRMRTRIKNQLDSIAKSEGLTGSRSWSSKRRQQIEVLPLKGWYAERRADLLRLLDALELQIKPLDKAVEAAAEQNGEARLLMTHPGVGPVISLAYVLTIGDWQRFPRGKQVASYLGLIPSEASSGKHQQRMGHITKQGNTLLRWLLVETATTAQRYDACWHQQYVRLSLAKHHGVAKVAIAHKLAVRLYWMLRSGQDYGQIMERGSHARQSGCPVGRSKRPIE

SEQ ID NO: 421222 - protein, 333 aa, unidentified
MTVQTDKFSAGIDVGAEELLLVIRKNGTSCKPQKFANTPVAHARLAEKLSKLPGIIVCLEATGVYHFDLSIALHDAGVALMVVNPKASHNFAKALMKNSKTDSVDAETLAQYAERMDFVAWTRPSNEKIAIRSFARRIDALTRQKTAAKNHLHALAASQETPKAVLRDVKLAISQLEKRIDRLAKEALILIEKQPDLERVFQLLTGIKGVAQTSAIALMGELLLLPPGLSHREWVKFAGLDPRTFDSGKSVHKKARLSKTGNRHIRTALYMPALSAKQHDPHVKAYFQHLVDNGKKPLQAVCAVMRKLLHAIHGMLRYDKPFDNTRFYAIPAE

SEQ ID NO: 421223 - protein, 398 aa, unidentified
MSKDLNDVTPSMGEGTTLYVAVEVSDKSWVIGISSLADPARVGMHTLGPTDTDGLMAKIEKACSGAEDTPRVLLTYEAGYGGFSLARYLGKEAPWIDVVVCDPASLEVVRKAKRVKTDKIDARRMVRALRAWDQGEAEALSVVRIPTVIQEDAKRLLRHRERLVKERTGLGNTIKGLLKLQGIYGLDPRRSSFRADLAEVRTAYGTPLPPGLYDEIVATHDRLLLVMTQLDEVEEKKAAQIKQAVIVPVRGLSDEQADPAVSAPVAALLVLLKGIGPNDALLLQNEVLYRDFRNRRELGSWAGLAPVPWASGGVENDQGISKAGQPLVRKHLVQMAWRWLRYQPDSAITIWFKQRCGTRRDRLMRKRAIVAVARKLLVALWRYARTGLVPTGAVLARS

SEQ ID NO: 421224 - protein, 275 aa, unidentified
MDEDRAVCVGLDTHKAKIAVAVAEPGRSGEVRFRGEIANRPEAVRQLLERLAEKHGRLRVCYEAGPCGYGLYRQIAALGHDCTVVAPSLIPRRPGERVKTNRRDALTLARLLRAGELTGVWVPDPTHEAMRDLVRARTAAMEAVRRARQQLQGFLLRHGRVFTGRKAWSPAHRRWLAGLRFEHPAQQIVLQEQLDVIDEAERRRDRLEAQIRELVPGWSLAPVVAALQAMRGVAFLSAVVLAAEVGDFSRFATPRQLMAWLGLVPSEHSSGPRVE

SEQ ID NO: 421225 - protein, 353 aa, unidentified
MWIIGCDFHPRYQQIAALNQATKEFMERRLSHEGKEATIFYESLPSGALIGMEATCTAQWFERLLERCGHTLRVGDAAQIRASVVRKQKTDTRDARHVLDLLVSDRFPSVWIPTPAERDARQLLLHRHTLVRWRTMVQNQLHALARNQGILPHTTFWTRTGRQQLESLALDPWAARRRQDLLAQLDQLNPQIEELTRQVQQEARRRAESTALMNQPGVGPIVSLAFVLTLGTAKRFPRGKQVASYLGLNPTEHSSGGTQRLGHISKQGNRMMRWLLVEAAYIAVRKDPQLARVYKRLAFRRGRKIAAVAVARKLAVKLYWRLREVQEQQNVPPAPMQGRSGSGLVKAVSSPSV

SEQ ID NO: 421226 - protein, 389 aa, unidentified
MKIFVGIDIAKLNHFAAAISSDGEIILEPFKFTNDADGFQLLVSKLESFDKNSIIIGLESTAHYGDNLVRYLVAEFYQVCVLNPIKTCQMRKNNVRKTKTDKVDTFVIAKTLMMQDNLRFVSFFNLDMMDLKTLGRFRQKTIKQRTRLKIQLTTYVDQVFPEIQYFFKSGLHQNAVYALLKEAPSPKEIASMHMTHLANLLKVNSHGHFTKEQAKELRVLAQKSVGANDSAISIQITQTIQQIELLDSQLEKIEVEMTDIMKFNDSVIMTIPGIGYINGGMILGEIGDIHRFSNPNKLLAFAGLDPSVYQSGNFQAKTTRMSKRGSRVLRYALVNAAWNVVRNNATFKAYYDAKRAEGRSHYNALGHCAGKLVRVIWKMLTDEVEFNLE

SEQ ID NO: 421227 - protein, 315 aa, unidentified
MDRQESVYVGIDVAKDRLDVALLPAGESLAVGRDSAGLEALIERLGQLGPALVVLEATGGYEQVVSAGLAAAGLPVCVVNPRQIRDFARATGKLAKTDRLDALAIARFAQAVKPPARPLPDEQAQMLGELVARRRQVIEMIGMESNRLRQAKAKLVRRSIERLLAAFQAQLTALEAELDETIRGTPIWREREELLTSVPGIGDTTARAILAELPELGRLDRRQLAALAGLAPFNRDSGTRRGERHIRGGRASLRAALYMPTLVATRCNPPIRATYLRLRAAGKKPKVALTACMRKLLVILNAMLRDATPWQSPTA

SEQ ID NO: 421228 - protein, 287 aa, unidentified
MGQEKYIGMDVHQATVSAAVRDRNGNLLMECILETKADTLVEFVQGLHGTLSLAFEEGTLAAWLHDLLKPHVNRVVVCDSRKAALLRDGNKSDRIDARNLSELLRTNQLKPVYHGEHGLRTLKELGRSYLTVSKEMTRTMNRIKSLYRSWAIPCAGTTVYAPRHRRQWLAKISEPGARMRAEHLYEQLDHLQPIRMRARRELLQESNKHAAVKRLRQIPSIGQIRAALLVALLQTPHRFRSKRQIWAYSGFAIETHDSGEYRYVRGRLQRNRERITVRGLNRNKGGH

SEQ ID NO: 421229 - protein, 315 aa, unidentified
MAMPIAITQPIVGVDVAKDELVIYHAESDRLETIPNTKAAIKKWLKALPAPVDVAIEATNTYHQEFADLAYAQGCVIYIIDGYELSHYRKGVKVRAKTDALDARLLARYLNNEGHLLHPWVPPSPLYCRLISLFRRRAALVQARVSLKQSWANEPLLEAAFKSQINAMQRLETLLEKTIQTQLEQAGLGHQLKRCMKVEGIGLLSGARLIASFQRGDFRNADAFIAFLGLDLRIADSGKKKGRRCLSKRGDPEARRLMHNAAMSASRTAAWKGFYEALRARGFSTTQALVALARKLARVAFALLKNQSEYLPKGI

SEQ ID NO: 421230 - protein, 373 aa, unidentified
MCCVFFFVFLMIRRPPRSTQSRSSAASDVYKRQTMYYTGIDLHKKTSFITTINERGQVVKKNNLKNIPSLILKYFDDLAANTRIVIESMSSWYWLYDLLTGKGMDVIISNPAKTKAIASAKIKNDKVDSHMLAQLLRADLIPESYVSSMDTRKLKELLRHRNRLVRDTVRMKNRIHALLMKNNLQQPCSDLFGKKGLSFLYSDIDLPDYHCEQLKTYLSLYESIKTEVDHLTKRIYAMAKTSPVANLLTTIPGIGPLVAMVIVSEVEDIERFPSYQNLSSYAGLVPSLDSSGSKERMGRITKQGSPYLRTALVESAQVIARLKNCRLNIFFRRRIVRSGYAKAVTATAHKILQIVYYVWKNQTPYLEEYNVCG

SEQ ID NO: 421231 - protein, 382 aa, unidentified
MMPMTRPIESTAPSAGMLMAFELGQRSWKLGFTVGMGQRPRVRQIPGGAVDALATEITRAKKRLGLSADAPVTSCYEAGRDGFWLHRYLVAMGVTNYVVDSSSIEVNRRARRAKTDSLDLAGLLSLLARYALGDQRAWRVVRVPTVAEEDARHLPRTLEALTQDRTRLVNRLKSLLATQGLSLPINAQFLKRLSAARLWDGAPVPPGLQERLTRTWTQLEEVDGQMRDLKALHLTRPEQLPPATSRALAQLLTVRAIGPIGASVLATEIFGWRRIRNGRELGALVGLVPAPYQSGQIDYDQGITRAGNAHVRRVMVQLAWGWIRHQPDSALTHWYQQRFGGGGTRVRKIGIVALARRLLIALWRYLETGAVPDGAQLKPIVV

SEQ ID NO: 421232 - protein, 415 aa, unidentified
MEIIYPRVAGIDVGKREVAVAVRTPGEGPGQRRQRIRKYRTYYQVLREMVAWLVEQGVTHVTMEATGVYWKPVFHALCEAEQIEVLLVNARHVKNVPGRKTDVKDSAWLAQLLECGLLRGSFIPPKEIAAIRELTRYRKKLIEERTRELQRLSSVLEDGGIKIDSVASSITTLSARDMIEALIAGERDPRVLAELARGRMRNKIPDLTMACAGRFGDHHALLARMHTDQIDHLATMIGVLDHRIEEVTDPFAEQLKLLQSIPGIGERAAQVIISEIGADMARFPTAAHLASWAGLCPGNNESAGKHKTGRTRKGNAEVRTILTECAWSAGRTGTYVGAQFRRLHRRFGKMGGGKAAIAVAHTLIVIIWHVLHDRASYLDMGSDYFTRYHNPEARKRRLVHDLQSMGYEVTITPAA

SEQ ID NO: 421233 - protein, 355 aa, unidentified
MNSVKYVGLDVHQSTISVAVLNGEGKLIMQSVLATQAAAILDFMHGLRGSLEVTCEAGTHSAWLYDLLHRHVARLVVCNPRKNALLKSGNKSDAIDARKLAELLRGGQLSPVYHGEHGTRSLQELVRSYTALTEDTTRVMARLKALFRSQAIGCAGQKLYGTRHRGEWLSQLSEAGLRRRAELLYQELDSLQLLRRQARQEVMLECRQHAAAKLLRSVPFLGPLRAAVLIGRVQTPHRFRSKRQFWAYCGLALETRSSADYRFQQGQLVRSQKPVLIRGLNFHHNHTLKNLFKSAATTASAMPGPFREFYEARLAQGIAPAKARLTLARKIAAIALSIWKKGEPFHAQHLKPQAA

SEQ ID NO: 421234 - protein, 456 aa, unidentified
MKEKELSMQIVHPNAAGIDIGSKTHWVAVDQIPGNVREFGVYTRDHQRLIDHLKSNQITSVAMESTGSYWQTLFHALQKAGFEVILVQGNQTKNVQGKKTDVLDCMWIQKLHSLGLLSSSFLLSDYLQTLRSYYKHREHLIEQTAMYMNKMQKALRLMNIRLDVAIRDLAGKSGRAILDAILAGHRDPNYLASLAHFRVKKSPDEIAAALHGNWREDLLFELRSCLAFYDAYRKEILICDQKLQTIMLDFIPEAEALTLDSNPAEKPIRKQVNRNSPSFNIRHLAFAHLKIDLFQIPGVSHSTALCLLCNMGNDIKRFASAKRFASWLRLVPNNKLSGGRIISSKTPKGKNAIALALRQAANSIGNQKEHPLTPFFKRIAYRKGRNAAITATARKLAVIIWNMVTKAQPYREPNFELLLEKRKHAQVRNIKSRLFRLNLSDSEMMELFQKTSFPST

SEQ ID NO: 421235 - protein, 431 aa, unidentified
MANLAVPAPRPRVRQPHGRERVRYYLGVDWADQTHAVWVVAADGTKIAAHTVPHTAEGLSEWGRELDQWRAQGIELWAAIERREGRVVDFLLDHGVVVYPVNPKALDRARDRFRQSGAKDDPFDARVLADFLRTDHAHLQALQPSSAAAQELKLLTEDYQRQIRQQTRLVNQLTNTLKAYYPRALEIAELTTTLAQEFLQAYPTPESLTGLTERTWQRWARAHRLSDARARELWGVLQQPQLPVPAHVVRAKARMMRSLLEQLPPVVAAVADYRRAIEDFFASIPPAQWARTLPIGEHGITAPTLWARLGDAPGRWESFRHLQAQAGAVPVTKRSGKQQRVVQFRHACDKALRYVVEHVAFLSLRSSEWARAYYQQQRARRHSHRQALRALGAKWLKIIFVMWERQVPYDERYHLAMMTRQQLRQRQGKIA

SEQ ID NO: 421236 - protein, 459 aa, unidentified
MILRMGIDIAVRAPHQASLADERGELLWSGHRFRTTVADLDALWARLPKEFQAAEVTVVMEPTRNAWVRLAAWFRRQGARVVLVSAERSSDLRAYYAKHTKSDRLDSVLLARLPLLHPEGLHPQRGLGPGDPLRRATKMHSTLVKRRTTSIARLDALLEILGPDWHAAFSADLTNKTPLQFLAAGYADPHTVCRLGRARLTRFLYRHSRGAFGEIHAERILAAARASLDLWGEDICFPDLAEDIAVEARLALALTAEVKELDERIAVLVRDRDPHGIITSAPGVGAITGAVILGRLGDVSRFQSLSAVRAFSGLVPSLDASGVSGRHGSPTKRGDHLLREALFISANQARRLDPTLAAKYHRLMIDGKHHNSALCHIATTLLTRVAACWRAQTPYQIRDADGRSISAHEARAIISERYSVPTKIRQARTTTGMGRRSKESLSAPSTGPSNTHAKHTGAA

SEQ ID NO: 421237 - protein, 334 aa, unidentified
MHYVGIDLHKRDLVVAVETERGPVRKPRRFACRDEAEILARFKALRPFEAVIEASSSYRWLYERLAPLGSVVLAHPLRLRAIVAARAKTDKLDAAMLARLLRADLVPRAYIPPARYQTLREMTRARARLACAATSAKSQVHSLLRAANVHPPFKKVFGPRGRRWLAGLDLGPSAGFVRDELLRRLEHYRRETKALDEHLDGMAERFPEAAALEVLYGIGRYSALLIVAELGEPERFRHRGQVGAYAGLTSRVHQSGGHDYHGGISKQGSGWLRWILGQAAIKIVRRDRRLQNFYTRVRKRSGRNKARVAVARKLAEICWVRLRRWHREQAATRH

SEQ ID NO: 421238 - protein, 325 aa, unidentified
MGIARLLDQQQPDNMNKIPTTALTEEVSKNNGPKGSKTKQIFLGIDAHLRSYQVAIKRDNGAIQAAQRFGLSELLLYAHKQLQWAEEVYAVYEAGPLGYALYRQLKELGIKPYVSAPECLEQGKRKTNKLDARKLCSRLYSYVQGDKEMMRVVRVPSVELEQMRIESRQYDQLVKMRKALSMQARSLVLSQGCGTKNGSWWRPIAWAKWSQLLPPWLVKHLELWQKNLQLLDQQISECKIALIKSFKEALPKGFGAQSMCQLDREIGDYQRFNNRRQIGCFGGLVPQEYSTGAHQRLGSITKVGSPRIRRLSVEMAWRLVRFQPN

SEQ ID NO: 421239 - protein, 353 aa, unidentified
MDNGSRYVGLDVHRDTISVAVCDSRGKLLLERVIPTSAAAVLELLELLRGKLHIAFEEGTSAPWLVGLLQPRVAQVLVCDPRKNDRRGSKNDRIDARELADLLRCGRLWPVFHQDCGLTSLQQLARTYLVLTKDQTRVMNRIKALYRSWAIPCAGQSCYSLRQREAWLAQLPNSAVRGRAQTYYLQMDHLQALRQQVRTQLLREGRKQPALRLLHQIPYIGPMRATLLIVFIQSPHRFRTKRQFWAYCGLGIETHDSGEYRFRQGQLQRKRQPTVRGLNRNHHHLLKYVLKSVAARCCSGSGPLRDFAQTLLDQGMRPEMVRLTVARKIAAIVLVLWKKGVAFDAHYLKSQAA

SEQ ID NO: 421240 - protein, 355 aa, unidentified
MRYLGIDVHITTTVWCLLDEHGEIVDRGKIPTSFEGFNSLVTKIGGPDQLVAGQEVGKMATFVYDVMTKLNVELKSFNAYHLRMIASSRKKTDKRDAFWIAKALQTGMTPHPVYIPTGQVRQLRRLLSRRAALVCERNAWLVRARSYLQAEGNSPKGGRTVSALMTVAMADPLGMNSELHEAVELCERMEKAIRDELAVLEKTLLEKAKMIDDVQRLTTIPAVGIKVATVIYAWVGDVTRFPDARALASYAGLVPSVHQSGASSYNGHITKQGSSELRRVLAQAGHVLLWRCQNADSIPLKRIAERVHTSRGRRKIAVVAAARHILRLAYYILRDRTTYDPSRLAPPTEEVADAA

SEQ ID NO: 421241 - protein, 426 aa, unidentified
MNTTTKFAATIGLDWADQKHDLWIRPADGSKAQHLRLEQTPEALHEWVAKLRERFGNRPIAISIETSRGPVISALMAYDFIVLFPVNPKAMKDYRAAFSVSGAKDDCTDAQLLEELVRLHRDKLKALEPDTELTRMLAGLVENRRHLVDERTRMVNQLHSILKTYYPLAETLLGRQMNQPIAADFLARWPDLESLRKAGPEKLRAFCYQHNSRNSVKIEERLAALKKATALTVDQAIINPARLLVTALANILKPLHQAIARLDQEIEQAMNQHPDAPIFRSFPAAGSALAPRLLVAFGTNRDRFENADEVAQFYGLAPVVVQSGNSKTVHIRYRCPKFGRQTFHENAGCVAKMEPWARCYYAQQKEKHDDKHHQACRSLAFKLIRIYFACWKNRTNYDASIYLRALEKQGSPLFKKVEIPTPPHGE

SEQ ID NO: 421242 - protein, 480 aa, unidentified
MAFLSKQVTELSDERYFGVDLAKRETQLAVLNSSGEQVFAKRFDTSREQFLALASELREGDTLALEVTTNSTAIARLIRENSKAKLIVSNPIKTKVIAQAKIKTDKIDARVLAELARVGYLPEVWLPDEDTESLRQFISDRTSLVRRRTESKNTVHSVLHRNLVRQTRTDLFGTSGRQWLETLIAGTAPDAMLIPELDRMRIGSLLNEIDRIDALVADLESVIASYIALHPHLKEQLDRLMSVPGINLVTGVGIMAAIGDVRRFPDKKKLAAYFGVVPSTKQSGDSSRNGRITKQGRSEARWLLIEAAEALRKSPGPMRALYTRIYKKRGHNIAVVAVSRKLIELVHHLLLNKEDYIYRLPRLTQEKRARWRYLARRKLGVAIKSAVVRAGSRSALYGTGIGIQGRKLKSQIAKQAAVNAERLYQAIVEQRRVKLADPSIASIAASDLIFDPTRPTETDWEKILTTATASMLKKRRPKNN

SEQ ID NO: 421243 - protein, 348 aa, unidentified
MKNKSFVGIDITKNVIDVSIFREDTNIKMFPHEVFNNTRKGFGDMCSWLKKSRVVLSQALFGMEFTGCYSLDLEKFLTSKNYSFCMLSTRIVKHHPMGTIDKRDRNDSAKIADFLYRYDGTECAKPYKLPSKAMQQLKQLVNERKFLVEQRTNFMNRMQMFETKEDSAMYESYIKKLNHDIEKIDQEECELMSKEEDVFDTFQNLLTIPGIGFVNATNIIAITRNFTAFDTARQYARYVGVAPCSHTSGTSVKWRARPSAHCNGQVKADLSMAALRAVEYDVEMQMFYNRKLGGRKDSDTKRKALNAVKFKLICRMFAIGKQKRKWEVLNTSDDRKNLHIEKSKASEL

SEQ ID NO: 421244 - protein, 320 aa, unidentified
MTILTSPTVVGIDVAKAEIVVYREDLKITQAIDNNRQAVGRWLKTLPAQSSIALEATSLYHLDTVEVAHEMGHRVYVVDAYRVSHYRESVGQRAKTDPCDARLLARYLSSEQGRLRIWSPPPQAYKVLKSLLQRRAELIKLRVSISLSWSSEPLLQESLALLLESYEQAEQALQQLLRKVSREAGITENIKRCKAIEGIGELTATGLATAFMRGQFASSDAFIAFLGMDLRAKDSGKKNGLRHLSKKGDAELRRLAHNAAMAACRSPAWRPYYESYLARGLAKTQALVILARKLCRVAFALMKNQSEYQPNLRLQGFPAT

SEQ ID NO: 421245 - protein, 358 aa, unidentified
MRTKNKELDFRNQIIFVGIDVHKKSWTITINISGQQIKTFSMNPDPVELSKHLHTKYPGGIYQSVYEAGFCGYWIDRQLQALGIKNIIVNPADVPTSNKEKTRKTDSIDSRKLARELSGENLSGIYIPNEDDEAERVLSRLRIQLTKDQTRVKNRIKSLLNYLGVHLPENIELKHWSGGFITHLDKMEFKHEQIKQTLEQLLKQLSELRKQLTEVLKLIRNSVKQNERREKIVRHLLTIPGVGFITAVTLYTEIMDINRFKRFDEFSSYVGLAPSTNSSGEKERVIGISQRQNVHIRNLLIEAAWIAVRKDPAITMVFGKLSKRMKKQEAIIRIAKKLLSRIMHVWKHEEDYVLAVVE

SEQ ID NO: 421246 - protein, 355 aa, unidentified
MNSEKYIGLDVHQATIVVAVTDSTGKLVMESILETEAATILQFFAGLRGNLAVTFEEGTWSAWLYDLLNPHVEKLVVCNPRKNALLKDGNKSDRIDARKLAELLRGNQLKPVYHGENGVRMLRELSRSYLAIVKDLSRVMNRLKAVYRSWAIPCAGRDVYYRRHRAQWLDKIREAGVRRRAERLYEQLDMLQHLRQQARRELLAESRKHAITARLRQIPYLGPIRSALAVALMQTPHRFRTKRQLWAYSGLALETRISAEYRMVEGQVRRSKKLLSIRGLNKDHNHDLKGLFKGAATMASVRPGPFQDFYQASLAKGIKPTMARLTLARKIAAITLTLWKKGESFDAKKLKSQAA

SEQ ID NO: 421247 - protein, 311 aa, unidentified
MEHSHFVGIDVSKNHLDVHVRPTGDSFRVPYDDAGLVTLVEHVRPLAPAVLVLEATGGYEVPVAATLASAALPVAVVNPRQIRDFARATGQLAKTDTLDARIIALFAEAVRPAARPVPDEQAAALGERIARRRQLVDMLGAEHNRRRLLRDRRLQRHLDAHIAWLEEALRRLDQDLTTLIRSTPVWRETDDLLRSVPGVGPVTACTLIADLPELGRLDRRRIAALAGLAPIARDSGAFRGRRMIMGGRPHIRRVLYMATLTAIKHNPAIRAFHQRLVAAGRPGKVALTAAMRKLLTILNAMLRDRRPWQPA

SEQ ID NO: 421248 - protein, 344 aa, unidentified
MGEVITIGLDIAKSVFQVHGVDGLGAVVIRKRVSRARMLEFFAGLPRCLIGIEACPAAHHWARELQAIGHTVRLMPPSYVKAYLKRSKNDANDAAAICEAVTRPSMRFVAVKTKEQQAALMLHRARQLLVRQRTMLSNAIRGHLSELGIVSAKGRNGTDELLEIIGKDADSRIPLAARSVLKVLAAQYSAIGAEIASISKSILVWHRSCEPSRRLEEIPGIGPIVATALVAEISDWKAFSSGRGLAAWIGLVPKQHTTGGRDKLGSITKQGNRYLRWLLVNGAMAVIRYAQKHGTKKHPWLGRLMARRPTKVAAVALANKIARMAWAIMVRGERYREPALLLAA

SEQ ID NO: 421249 - protein, 327 aa, unidentified
MEREYIGIDLHKAFFQACAISATAERRWEQRWPTTPLGITAFLTRCSASSHVAVEASSPTWAFVDRIVEQVGAVHVVDTRKTRIKAGYAAKTDRLDAQRLADALRRDSIVGIYYPPPAIRDLRELGRYRCHLARLQASLKQRIHALLLRQGVSAPKALFTQRGTRWLDALQLPGWAGSELRGLRHVLTDVRGQLVPILAAIRTVAATDPIARVLDHAPGFGPVFSVTLRAEIGTITRFPDGRHLASYAGLVPRVAQSGRRQWSGRITKVGSPWLRWTLVEAAIHQFRRPDAFGRWARRLAVKIGMLKARVAVARALCGEVFAAWPRP

SEQ ID NO: 421250 - protein, 366 aa, unidentified
MKKIITVARNRSEIFKQQQLTIGVDLGDRISYYCILDETGNVILEQSVPTTPKGMQQVFSKISHCRIALETGTHSPWVSRLLTQLGHDAIVAHARNVRLITESSRKDDRLDARTLAKLARIDPELLGPVRHRSAKAQIHLTAIRARATLVSARTALVNAARGLTKSYGERLPKCGTEQMNREIAKGLSPELRDVLEPLLGEIESLNERIAEYDRRIEQIAKEVYPEVALLKQVKGVGTLIALTYVLTLDDPHRFRRSRDAGCFLGLRPGRRNSGMSEPQMHISKEGDFYLRTLMVQGAHYILGPFGQDSDLRRWGLKLAERGGKNAKKRAVVAVARKLAVLLHRLWVSGEVYEPLRNNHEVVSAVA

SEQ ID NO: 421251 - protein, 358 aa, unidentified
MAITTIAHARPTRVTIGVDTHGDVHVAHAKDQLGRRLETVSIPTTPTGYQDLLAWARGLGQVQAWGVEGTGSYGAGLARYLGKAGQVVLEVNRPDRAARRRRGKSDPVDAEAAARAVQAGEVTIVPKAADGQVEMLRSLRVARTTAMRARTQAVNALRSLLVTAPAELREQLRGLSAVRLVRCAATLDPGRLTSPTAAAMLALRTLARRYQALDAEITALDSELDQLTATAAPGLLALFGVGPDVASALLIAAGDNPRRLRSEAAFSMLCGSSPIKASSGKTTRHRLNRGGDRQANAALYRIVIVRLRWHQPTKDYMARRTTEGKSKKEIIRCLKRYVAREVFAVLGEMNQADPATAA

SEQ ID NO: 421252 - protein, 372 aa, unidentified
MDERIKFFIGLDAHKESTSVAVCEATREPARFAGTIGPDMRVLLKLLAKAGDPAQVSVVYEAGPTGYGLYRELRQRGYRCEVVAPSLIPRRPGDRVKNDRRDCARLAELSRAGELKAIWVPDEAHEALRNLWRAREDAVNMRLKTRQQLKAFLLRQDRRYPGRTSWTKSHERWIAEQRFDHEADRIVLAEYQLAVDSAEQRVQRLTIALTEAVQGWRFEPVVAALRALRGIDTVSAIGLVCEIGDINRFASARQLMGYLGLVPSEHSSGNSVRRGSITKTGNAHARRLLTEAAWNYRFPARLSRDLRARSQALPEAVRAQAWKAQLRLCSRFARLSSRGVQINKVCVAVARELSGFIWAIARQASPAGQTIH

SEQ ID NO: 421253 - protein, 399 aa, unidentified
MKQRAPGKSGARTRGAAKRPKARETCGSLEAAGKNLPCSRPLVLRATKPVTEQGSLHGRRRKSPDTCKSQKVLATQGREKPSSSRTKVIVSNVGIDVSKLRLEVAVRPSGERFSVCNDEEGLRELVKRLEEIHPERIVLEPTGGYERGAVIELARAALPIVVVNARQMRDFAKATGRLAKTDRIDADVIAQFGEAIRPELRPLPDEAHRTLEAMVTRRRQLLDMRGDETRRKHTAPRVLHASIDSVIEFLTRQIDDVDGDIEKLMRSTPVWREADDLLRSVPGVGPVLAATLTAFVPELGKLNRKQIAALVGVAPLNDDSGASKGKRRTWGGRAPVRAVLYMATISARQANPALKTFHDRLIERGKPKKVAIVATMRKLLTLLNAMARSGRTWTPQLTG

SEQ ID NO: 421254 - protein, 328 aa, unidentified
MDRISVGIDVSKTALVIAVHPRRERWTTETTPVAIEALVTRLQTLGPAIIVVEATGGYERALVAACATAGLPIAVVNPRQVRAFAQALGRTAKTDDIDADVLAEFGDRVQPAVRAIADGETQALAALVARRRQLVEMIGMERRRLEQAPPTGPITRDLRNHIRWLERRVSDVDDDLGSAIEASPVWRVSEDLLRSVPGIGPTTARTLLAELPELGRLDRRAIAALVGVAPFNCDSGQYRGQRHIWGGRATVRAALYMAAVSASQHNPILATFYRRLRAAGKPAKVALVATMRKLLTMVNAMLKHQCHWNAEVASTPASQTGRARAATA

SEQ ID NO: 421255 - protein, 363 aa, unidentified
MKQLSKKQPRTANRKPRRIAGLDLGDRYSHYCVLTQDAELIEEGKLQSTEAALRKQFADEPRMRIALEAGTHSPWVSRLLEGLGHEVLVANPRKIRAITASESKNDRNDAEKLARFAACDPKLLSPIRHRSPERQQDLNLIHARSSLVRARTGLVNTLRGLVKSAGGRLPACSPQSFPDKMRTAIPPELQLACKPLVEQIAHLNLAIAGMDRQVEALGDKHPEIRLLRTVPGVGPIVAACYALTLDSPDIIQDNRQAGAFLGLRPRQSQSGDKNPQHGISKTGNTCLRSLLVQAAHYILGRFGPDSALRRWGLGLAARGGSRGKKRAVVAVARKLAVLLHSMWRNRTPFAPFPQPSTHASVAA

SEQ ID NO: 421256 - protein, 382 aa, unidentified
MSAERVNDCYVALELSQRTWLIGFLLPGTDKVQIMTVAGGDAEALLSALGRIESLAGTRLAAECTMVSMRVCYEAGYDGFWLARYLIDRGIDTTILDPSSFLVSRRGRRVKTDRIDVEAMVFTLKAYLLGDRSVCRPVRLPSVAEEDAKRLSRERTQLKRERTRHVNRIRALLVLHGIRSVPGLWGGRWKEALSNIRTGDGRELGRFIFRELCRQFERLDLVHSQLKSLEKERIQACETEGAINDSGKIRVLKQLDGIGEVGATQLVAEVYHRTFKNRKHLASYLGLSPSPYSSGEVHRDQGISKAGNKQARVMLVELAWCWLKYQPQSELTRWYRARFSGHGSRSGKVGIVALARKLAIAFWRFIEDGVVPEGATLAVATK

SEQ ID NO: 421257 - protein, 361 aa, unidentified
MALARTAPCRPMGWLIDSVPPPSGTLAVWFDRGMQVDRLEVRMPTAHAPSQRARGRPMILIGIDPHKSTHTAVAIDSSGNKIAHRRFPVNAGTFGQLMAWSQRWPERRFAVEGARGLGRGIAQQLAADGEHVVDVPSTLSARARMLATGGGRKTDAADALHVAHVALFRPDLRQVRSEDQATILRLLTERRDDLVNERTRLLNRLHVLLRDLVPGGAPIDLSAEKAAQLLRRVRPVTATDCCRRDLARDLLADLRRLDRAIKDNEHQMRDAVDASRTTLTNLPGVGIVLAAKILGHVGNIDRFPTEHHFASYTGSAPLEASSGNNTRHRLNTGGNRSLNCVLHIIATCQIRDIGVESRIVV

SEQ ID NO: 421258 - protein, 416 aa, unidentified
MDVVHERVAALDVSKKDAKVCVRVPGARKGTFTREVTTWGSMTGQVLELREFLLDKNVTLVVMEATGDYWKQFYYLLEDALPVQLVNAAHAKNLPGRKSDVNDAQWLAQLAAHGLLRGSLVPPPPVRELRDLTRLRSKLTNDRSKEHQRLEKLLEDAGVKLSVVATDILGVSGRLMLGALCAGTAGPEAMAELAKGRMRSKIPELREALTGRFTSHHAFLTRLHLQVIDGFDAAIAELEARIEVVMEPFRPLIDLLLTMPGIGEKTAQVMVAEAGAVIDCFPSAACFASWAGLAPGSNQSGPKTKPARTRHGNTYLKGALGIAALSVSRSRGTFLSARYHRIATRRGPMRALVATEHSMATAMWHMLTQGVPYLELGGDYYTRREPERAKARITAQAEALGLAVTFSPIEPDTASQ

SEQ ID NO: 421259 - protein, 409 aa, unidentified
MDVVYRCCAGLDVHQATVVATVRRPAADGTRESVTATFGTMTPDLLGLREWLQASGVTHVALESTGVYWKPVYYALEDSLTLLLINMHAVKHVPGRKTDVRDSEWLAQLLEVGLLRPSLVPPPAIRELRDLTRYRTQQVRDRAQEVNRLCKVLEDAGVKLSTVATNVLGVSGRAMITALVDGRTDPDALADLARGKLRAKIPVLRRALQGRFRAHHAVVVTHILAKIDFLEETLADLTREIDERLRPFDTAMTGLDTIPGVNRVTAMAIIAETGADMTRFPSASHLCSWATLCPGQNESAGKRHSGRTRQGNRYLKGALIQAANAAAHSKQTALHALYVRLRARRGHKRAIVAVAHQILTIAYYIMRDGATYQELGPMYFEQRTREHSIRRHVQRLEALGLTVTVTEAA

SEQ ID NO: 421260 - protein, 391 aa, unidentified
MVFVGIDVAKDKHDCFILNSEGTVLADVFTIANNRIGFETLLSRIQSCSQGESKIKVGLEATGHYSYNLLGFLLDSGLATYVINPLHTNLYRKSLSLRRTKTDRIDARTIAMMLMSDVDLKSYSNTAYHNEELKSLTRYRFDKVKERAKLKSSVARLVNILFPELEKLVSSLHIAVVYALLSNYPGASYIANANTEELAETLCTASKGRYTKSKTAEIQVAAGVSIGSKMPAKSMELKHTIALIRELDKEISEVESAIDKITSQMDSPIFTIPGIGRHMGAMILAEVGDFSNFASADKLLAYAGLSPSTYQSGQLQNCYAHMEKRGSRYLRYALFNAAKYVCLWCPTFSAYLEKKRSEGKHYNVAISHASKKLVRLIFAMQRSGKAFLADY

SEQ ID NO: 421261 - protein, 481 aa, unidentified
MKSKSQEKTKKAPCHPTRGHWHEMNRKQRRETMRRIQSDDLSLEVVHPDAAGIDIGNESHYVAVPPTRDTESVRRFGCTTAELKAMAGWLKQCRIRTVAMQSTGVYWIAVYDILEQAGLEVYLVNARETKNLPGRKSDVQESQWLMKLHTYGLLRNSFRPSQEIRTMRTYWRQRNDLVRAAGRHIQRIQKALTQMNLQLANVLSDLSGVTGQAIIKAILAGERDPHKLAAFRNWRVKATHEQIARSLEGNWQEDLLFVLKQEQDGYEFCQQQMAECDRRLKQYLQQREDRSQGASLPEEKRKERLKKKKGNAPQFDLRTELFRMSGTDLTQIDGIDVMTATTILSEAGWDMSKWQTEHHFVSWLRLCPDNKVSGDKIIGKGRLPTNNRITNALKMAASSLRTSNTYVGAQFRRLRTKLGAPVAIKAMAAKLARLVYRMLRYGMQYVDQGATFYEAQHRNLQIAHLKWKAAKLGFRITQLAA

SEQ ID NO: 421262 - protein, 347 aa, unidentified
MRFYTQSHRYYCGIDLHARWMYLGILDPEGEVLLHRNLRAGPEAFLKAVEPYRQDLVVAVECIFSWYWLADLCAQHGIEFVLGHALYMKAIHGGKAKNDRIDSQKIAVLLRGGMIPVAYVYPPEMRSTRDLLRRRTYLMRKRAELLVHVQNTNSQYNLPEIGKKIAYRANRSGVAQRFSDPAVQTSIAADLSLIDFYDTLLNRLELFITSQAKQQNHHSFYLLRSVPGIGKILALTLLYEIHDISRFERVQEFVSYCRLVKCSRQSAGKNYGFSGKKIGNVHLKWAFSEAAVLFLRHNPEGQKLLARLERKDGKAKALTILAHKLARAVYFILRREKTFDLTQFLAA

SEQ ID NO: 421263 - protein, 338 aa, unidentified
MPRYIGVDLHTNCFTACVVDGRAKQTFRDYKLAEIAQFVARLRSRDQVAVEATGNTRFFCDQLAGKVQRVAVVNPRAFEVVKRSASKTDKRDAANLALFLSKELLPEARKKDKGQAALTSLVQTRDKLVKQRTALINKLHALEVSHGRQMYKERCASEAGLESVLADRWETVERVEVEVIVAQVRSLNAGIKRLEGEITEQESKLEGHQNLTSIKGIGRTSATILLSVIGDIADFDSEAKLASYFGIVPSVRQSNETRHTGRITKGGSKLGRTTLVQCTLVAIRYSPYLKKYYDRLKARRGAGKAIIATARKLLGIIYQTLKNKWVFVDFPNFVLAKE

SEQ ID NO: 421264 - protein, 355 aa, unidentified
MERYIGMDVHAASSTLAVISEKGRKLRDFPVETNGQALVEAVRMIPGHKHLVFEEGLQSAWLYETLSPHVDEIVVAGITESRGPKSDKRDAYGLAEKLRVGNLDKSVFKAPREFTRLRELSRIHMTLVGDVVRVQSRIKSLYRARGIFVTGVNVYRVRHREEWQRQLCSSAQTRATRLYDHLDFLLEQKKQAEADLLREAKKHPIVRILETAPGFGPVRAARLVPIVVTPHRFRTKRQFWSYCGLGIVTRSSSDWVRTADGGWIKTRVPQTRGLSRQHNRFLKHIFKGAATTIVTQRNKDPIYERYQRLLDGGTKPTLAKLSLSRMIAATVLRMLKNEEEYDPARGGPSTTTREG

SEQ ID NO: 421265 - protein, 420 aa, unidentified
MNSRSVSQFTAFVGIDWADAKHDVCVQAAASEQRNFDCFAHQADRIEQWAYSMHRRFGGPIAVALELAKGPLVYALQKYDFFVLFPINPSTLAKYREAFKPSRAKDDPSDAELALELLVRHPERFKPLKPQSVEMRKLLSLVEQRRRLVDDKTRLTNRLSAALKQYFPQALDWFEQRDTVLFCNFVTRWPTLIQVKRARKASLEAFFKSHNARSHAINEMRIEAIKAATPLTQDAAVVTAHRLQAQVLVDLLRLTLQAVDRYDAEIANIASGLPDYALFRELPGAGPALAPRLMVAFGEQRERFLGAAEVQKYSGIAPVTERSGNKHWVHWRRQCPTFVRQTFVEWAAQTITQSFWAGAYYRQQRDKGSSHQAAVRALAFKWIRIVYRCWQTRTPYNESTYLNALKCRGSPLLKQLAATT

SEQ ID NO: 421266 - protein, 336 aa, unidentified
MTIIRIGLDTSKHVFQLHGVDETEQPVLRRQLRRSEIAKFFAKLAPTRIGLEACGASHHWARVLRGLGHEVMLIPPQYIKAYVKRGKNDAIDAEAICEAMSRPTMRFVPVKTAEQQAALTMLGVRDLLVKQRTMLINAVRGHAAEFGVTAAKGPQQVLELLRRLASGEGVPALAREMLAMLAGQIEAVNAKLKAIEARLMAWHRQDQTSQCLATIPGIGPIGGVSFALKVPDAKVFRSGRHFAAWVGITPREDSTAGKHRPGRISRAGDEDLRRLLVLGATAVIQQAKAGRASPWLLELLARKAKKVAALALANKMARIIWAMMVSGETYRRPTVA

SEQ ID NO: 421267 - protein, 365 aa, unidentified
MSTITIGVDLAKRVFSVCAVDATGHVQRRQDLGREAFLSWLAQMPAGTVVAMEACSGAHCWARQCLAHGLQPRLMAAQFVTPFRKNRTAKNDRNDAEAIATAARQGNMRFVPVKDVDQQARLSWHRVREGYKAESPAIGNRLRGLLAEFGIVVAKSDLALRRTLTELDQHAALPDEFKELIRSLAAHWVQVRTAIDACDARIDAHARMDERCVRLRAIVGIGPITADAVIATLGWAKDFRNGRQLAAWLGLVPTQHSSGGHTRLGAISCRGDAYLRTLLIQGARSSLQRAKAVSVERCTPEQIWIRQLDGRMAFGKVLVAIANKHARQLWAMLAHDVDYDPHACGKHPMAPRPAGKHATTVAAMV

SEQ ID NO: 421268 - protein, 424 aa, unidentified
MDAKDQNSWEQRRYYMGLDWAKQEHAIAVVDGDGRIMVETRIKHTAEGWHRLREKLVALAGPDLSFVAATIETNRGPVVERLLELGCAVYPINPNAAQCYRARKAPSGSKTDRLDALSFADALRTDGHGWRQLNPEDPKTQELRLLCRDEMSLIEQQTSLVNQLQQALHEYYPAALEAFDDWTSPSSWAFIERFPTPQALKKAGKRHWEKFLHTHRLYRPETYAERLEIFAGATEFCGSDAVTNAKSMLAVSLAKQLRLLEQQLKAYRERIEALFQDHRDYGIFASLPGVGEKLGPRLLSEFSDDRDRFPAYEGLQCYAGTAPVSFQSGQIHKVRFRYACNKNLRAAVHLWADLSRKKCAWAQVYYQQKRLEGKSHACALRCLGQRWLKILWKMWQTKTPYDEQMHTRNQIKHGSWVLALTASK

SEQ ID NO: 421269 - protein, 422 aa, unidentified
MNEQEPVVYNVYVGIDWADKKHDVCICPRDSDTREFDVIRHCAEDIDAWVKGLHQRYEGRIAVAVELSKGPIISALQKYDFIDLFPINPATLAKYREAFQPSRAKDDPTDAQLAVDMLLRHSEHFKVLKPQSVEMRALATMVEQRRSLVSEQGRITNRLRSALKQYYPQVLEWFEHIDTPLFCAFVKRWPTLTQARRARANTLKQFFHEHHMYREDVVERRRKAIKAASPLTLDEAVIVPYRMQVLVLVEQLELMFKAIDQFDDEITKLASQHPDYAIFRPLPGAGPSLTPRLMVAFGEQRERFSSAADVQKLSGIAPVTERSGQKHWVHWRLQCPTFMRQTFVEWAAQTINKSYWAGAYYRQQRDKGSTYQAAVRSLAFKWIRILYRCWQTGVAYDESRYLKALERRGSPLVKNREMLESA

SEQ ID NO: 421270 - protein, 396 aa, unidentified
MRNDVTIYVGIDFSKEKFNACLLMEQGVMGESEFPNTKTGYLKLTKWVKNTSELGRSFDSSLVLFCGEHTGTCSIGLCEYLYAKGMKIWLESALKIKYGSGLKRIKDDKADAEMIAYYAKRFYEPGSCALFEPDSADLKTLRTLYQFRNRVVCDRVAIGNRISSGAFDCSTLVRNRMVKHHKEAQKDEKDIEKEMVKLMETSEELASNYQILISFKGIGPITAAALIIYTSNFKKFDNPRKFACYCGIAPFGKQSGTSINTKPHVSRFAHIGIKAAMVQACKSAMQHNAVIKAYAQRLYAKGKHEGIVMNNVKNKVMHIIFKMIQTQTLWEQEYQQKHTKECKAIPGKNGIGATEAAPIINATLKTSSSVVECTFLEKHSFQKNSKKTSNFSCVET

SEQ ID NO: 421271 - protein, 346 aa, unidentified
MTIVETRAVTGGVDTHADVHVAAALDSIGGLLRVQEFPATPGGYAGLLGWLGGFGAVCLVGIEGTGSYGAGLARHIAGAGVRVVEVDRSDRQDRRRRGKSDPLDAISAARAAQSGRARGAPRGRDGTVEAIRVLMVAKRTARSGRTQTINQARSLVLTGPDDLRVRFAHHATAFLVAGLAGLRPRPGATVGYATRIALRELGRRAEFPGGQLERLDELILPLVTAHAPGLLALCGVGPDTAALLLIAAGDHLARLRSEAAWAHLCATAPIPASSGKTVRHRLNPGGDRRANHALWRIVITRMSSHPPTRAYVDRRSKEGLPETEIIRCLKRYVAREVYPHLRPPAS

SEQ ID NO: 421272 - protein, 393 aa, unidentified
MERPMSQPFDASRSLTALEQDSTIIAVIEMAQSKWLVAAVVPGIKRQPLKKLDADAVLLLKLLHRWRKEADQAGHPIRRVVVAYEAGRDGFWLARWLRMRSVEAYVIHPNSIAVSREHRRAKTDRLDTELLLRALLGWLRGEKRHCSMVAIPTIEEEDAKRPNRERDSLVTEQTRIGNQIKAILTRFGIRKFRLKLRKAEQQLKELHSAEGLLLPENTRAELFRHLARLHIVREQIRAIEKARLQKLEANRDRKKSPYAMVHLIARVVGIGVETADMLVTEVFSRQFRDRKAVARYAGLTGSPDESGKRRREKGLARAGNARVRTGMIRLAWRCLRFQNGSALAQWFQTRTADGRGNTRKTMIVALARKLLIALWRLVTTGEMSDGIVLRPAS

SEQ ID NO: 421273 - protein, 333 aa, unidentified
MRPEWILECLASNDKHRTYEKMTELTIGIDISKALLDVATYPEEQFQQFTNDAKGHKALVKWLGALNVKLIVFEATGAYHRELEQFLDQRGYPFAKVNPRQARRFAEATGRLAKTDRVDSLMLAKFGELLQPSQGESKSQTLVELAELLVARRALVKDRTAAKNRQHNLVSPLLKRQANRRLKQIDADIKFIDEACITLVRADQQLNHRYNILLSIPGLGSLTAIIILAEMPELGSMDKRQTASLAGLAPVTRQSGKWKGKSFIRGGRANLRQALYMPALVAIRFNQEMAAKYKTMTEAGKPAKVAITAIMRKLIITANSLLRDNREWSKISA

SEQ ID NO: 421274 - protein, 361 aa, unidentified
MFTERTSVGLDVHARSVVAAAIDGVTGEVFRARLTPSNEQVVGWVQSLPGSSAATYEAGPTGFGLARAMAAAEIRCEVAAPSKIQRPAGDRVKTDARDAMLLARLLRMDEIVAVAVPSVEQEDARDLVRAREDVRGDLMRSRHRVSKLLLRQGIVYYGGHAWTGTHLAWLRAQHFDTPGLALAFDAEHEAVLAAEARRDRLDEAIGAMAADSQFTPVVRRLGCLRGISTLTAFGLAVEIGDWDRLTGASIGAYLGLVPTESSSGQSRSQGSITKTGNTHARRLLVEAAWHHHKPYRTPGATMRARWELAPAASRARGHAGNRRLHERWLRFTERKKRPVVANVAIARELAGWCWSLAVMDP

SEQ ID NO: 421275 - protein, 355 aa, unidentified
MTSTKYIGMDVHKESISIAVLNFAGKVVMECVIETKASTILQFIHGLRGDLQVTFEEGTWAGWLYDLLKPHVTELVVCNPRKIALLKDGSKSDRIDAHKLADLLYMNKIQPVYHGEHGLRMLKELSRSYLTITKDLGRVMNRLKALYRSWAIPCAGTQVYAPRFRSEWLSKITEAGVRRRAELYYQQLDALRLVRQQARKELLAEARKHRATKLLRQIPGIGPLRAAHLVALMQTPHRFRTKRQLWNYSGLGLETHDSAQYRVVEGQLQRSKKPVTLRGLNDNHNHDLKDIFKGAAMRASTAAGPLHDFYEALLAKGRKPTMARLTLARKIAAITLIVWKKEVRFDANYLKQQAA

SEQ ID NO: 421276 - protein, 413 aa, unidentified
MEVVHPRCAGIDISKKDAKACVRIQGRGRTRTRATVTTWGAMSNQILALRDHLLAEHVTCVVIEATSDYWKPFYYLLEDELDVMLVNARAVRNMPGRKSDVSDAAWLADLGAHGLVRASLVPPPPIRQLRDLTRARTVITRERSREAQRLEKLLEDAGVKLTSVVSNITGVSSRAMLEALIEGEQNPAAIAELVHPRMRPKIPALIEALTGRFGEHHRFMTRLFLDRIDAHNADIARLDARIEAAMEPFRGVRELLMSIPGISRIVAEVFIAETGADMSVFPTAQHLASWCGVCPGSNESAGKVKSTSTRPGDRYLKGALGIAALSVVKRKKTYFWAKYQRITVRRGPMRALVSVEHAMVVAAWHMLTNGEFYREPGLDYYTRRVPAKAKARAIRQLESLGYKVTIEPLADTA

SEQ ID NO: 421277 - protein, 344 aa, unidentified
MDHFAGLDVSVKETSICIVDDAGKIVREVKVASEPEALLAVLKNPAYHFKRIGLEAGPLSQWLFSALAEAGLPVICVETRHMQAVLKAQINKTDRNDARGIAQMMRVGLYRPVHVKTLRSQKLRMLLTHRKLLQSKAIAIENDLRGTLRNFGLKVGMVGKVKFEARIRELVENLPDLAVLVEPMLIVQRTLREQIVILHRRLLAIVRDDEVCRRLMTTPGVGPVVALTYRATVDVPARFRKSKAVGAVFGLTCAKYQSGEVDRNGRISRCGDEMMRVMLYEAAQSMLRSKKWSWLKAWAMQIARRRGMKKAIVALARRLAVIMHRIWVDGTEFRWTRERATAAA

SEQ ID NO: 421278 - protein, 463 aa, unidentified
MRKVRKVAGQRGKKGKKRVDVTANLEILHPNAAGIDVGNAQHYAAVPVGRDPQPVQTFGSFTADLHRLGQWLRACKIETVVMQATGVYWIALYEVLESYGFKVYVVNAKHTKTLPGRKTDVWECQWLQKLHTFGLLNNSFLPPEEIRVLRSYLRQRENLVAGAGTCIQQMQKVLTQMNVQLANVLSDLSGKSGLAILKAILSGERDPYRLAALADRRVQASRQEIAQSLEGHWREDLLFVLRQVHDLYFFHLDSIAECDGRIEAHLQTLESKVDLASQPLPEPTPLPHRKHIPQTNLQQELYRITGVDLTRIDGIQVQTAQVVLSEIGVDMTRWEDEHHFASWLGLSPNHEITGGKVIRRGTKKVLNRAASALRLAAQTLHHSQSYLGAKYRRLRAKLGAPKAITAMAHQLARLIYRLLRFGTQYHDKGMEHYERQYRQNQMNWLKKQAAQLNMQLVPNTGVA

SEQ ID NO: 421279 - protein, 339 aa, unidentified
MKLYTGFDLHSTNNYLAIIDEKGKRVYKRRLRNDPESILTTLMPHKDNIAGMVVESTYNWYWLVDLLMEEGYKVHLANPAGIQQYKGLKYSDDKHDAFWLAEMLRLGILPEGYIYPKEKRPIRDLLRKRGHLVRLRTSLILSLQNTISRNNGFRMTANDMKALKTDHVAPLLQHNEDLALVGQVSKESIDFFTRKIREVEGVVLKRIRLEDPYTSLLTVYGIGKILGLTIQLETGPIERFKKPGNYVSYCRKVSSKWISNNKKKGKGNVKSGNKYLAWAFSEAAELARRSYPEARAYYNRKMQKTNRMVAHNALSHKLAKAAYYIMKDGVSFMPEKIFV

SEQ ID NO: 421280 - protein, 463 aa, unidentified
MAKKTTTSRKGKSKAGKNVLERINLNAAGIDIGANFHLVAIPEDRAEENVRKFGPFTSDLHQLADWLTEHHIETVVMESTGVYWIPVFQILEQRGFEVKLVNAAHVKNLPGRKSDVSDCQWLQQLHTYGLLNGSFRPKDEVCVLRSFLRLRDTLVKDCSSHVLRMQKALTEMNVQIHRVLSDITGYTGMAMIRAILAGERDALKLAQMKHPLVKASTQQIVKALEGDYRAEHLFALQTALELYDAYQLKITECENKIEQQLEQFDSKLDFEQVLEQSGALKTRSAQVRRQLQRQAHLSSVCGVDLTRLPGLSTLAVEVIISETGLDMSCWKSEKHFCSWLKLCPDNRISGGKLLSSRPRKTKNRAAAMFRLAAQGAMQSKTAIGAFIRRLKARLGAPTAINAGAHKLARLFYRMLKFGATYVEQGQAYYEHKYKDRLLRNLSKRAKEFGFQLTPLEPATDLVS

SEQ ID NO: 421281 - protein, 463 aa, unidentified
MKDKSPTRRRKAPKAVTLPPQLAHVNLCAAGIDVGSQSHWVAVPVDLAPAEPVREFGHFTADLESLADWLVSIGVTTVVMESTGVYWIALFEVLEERGLEVLLVNARHVKNVPGRKTDVLDCQWLQQLHTYGLLRGAFRPPEQVCALRSYLRQRAMLVSGAASHIQHMQKALTQMNLVLHTVVSDITGVTGMKIIHALLDGERDPLVLAGFRDRRCQHDEATIAKALQGHYREEHLFALRQSVELYEFYHQQISACDAAIEYQLQQFDSQTDEPITPPPRLRKAVGNALRFDARSELYRMTGVDLTRIDGLDAATALVVIAEIGLNMSRWPTAKHFASWLHLCPGNHVSGGKRLSGRSKPGVNRAANALRMAAASLHHSKSALGAYLRRQKARLGAPKAITATAHKLARLVYSMLKYGSEYVDAGQDYYEQQYQQKVVKNLRRRAQAMGFELVEIGPAAPAVT

SEQ ID NO: 421282 - protein, 438 aa, unidentified
MKVLYERVAGIDVHKKMIKVAIRSPGDKPWTRKTEILTFRTFYGVLRAMARELRRRGVTHVAMEASGVYTDPVYYALCEEDFTEVLVVNPAHVKALKGHKTDAKDCARVAELLECGLLQGSYIPAMELKEVRDLTRYRTKTVQARTSEIQRLDKALESAGIKLGSVASDITGKGPTAMIEALIDGERRGAVMADLAIGHMRTAGKLADLSMALEGRFTDHHALMCRLSLDRVKVLDAAVADLEMRIAATTAPWQREISLLKTIHGFGDAVAWAWIAEIGPAPHQWFGSHEKLASWASLAPGNYISAGKRRHGRTGDAGTYIKPMLVQAAWSAIRTRGRLQARYNRLVRRMGGPKNPAAKKKAIVAIAHTLLKIAYTVLKTGIPYQDPGEDFYTRRETPGRRQAWLESQIQKLHPGCTVTITISPPPDPVPEAALTPGA

SEQ ID NO: 421283 - protein, 346 aa, unidentified
MTIVGGLDVHRQQITFDYVDNDGVVHWGQIRPATRKTLRRWLGEHCPNGDGEFALEGCTGWRYVSEELAAAGTVAHLGDPAETAALRGPKKRAKTDRADARLLRTLLLEGRFPESWIPPAHVVEMRTLGRLYCALMDERRAWQQRIHAQVFHQGCPPIRALLSESGRGALTTAELSMAGRQYVDTALRRIDELTDEIDPLRTQLVSFARRQPGCRALQARHYGVGWLCAAIIWAEIGDARRFRSSDQVVRFAGLDVTVYSSAGKRSPGHLSRQGSPELRWAAFEAAKCAARPGSPDYAYYHRVAAGPGGKTPALAVERKLLRRCYHTLRDLGDAALAAPVPDHKAA

SEQ ID NO: 421284 - protein, 388 aa, unidentified
MIKHDLEESNGGRTVVGIDPCSEFLQLAILAPKKATEFKKLPLSPSITEEIAKSTDPRTNQIAIESYGSYGKLFVYDLLRKGYDVREVNPHISKKLSGLYSEEHSDQRDAESLAKALLLIPDLPKISITEKKQWLAKLTRTRKKLVKDLNGYLNRLHIALTESYGVVYKSLFKTLFAKKALKFFEDNPTINDSLSDKDARKRLGEEKWYLLKQAGRWKDSFYLETLRTEIRGFIEIIKSIDNTKLPIEEKIHETADQVEEMRILRTFPGIGGIAGATLLSEIGDIDRFGKESYLSAYCGVSPVIWQSGTGRIRTKRRKRYSRRLKGILYFISLSQIRLNPESRAYYDRKIKEGKTHWQAMNALSRQLIKIIYYMLKHKKPYQRNTLVN

SEQ ID NO: 421285 - protein, 374 aa, unidentified
MNEPTTYVGMDVHKKDIFVALLAPGTEEPIEWTLRNEPRAVRRLARRLHREATGALKCVYEAGPCGYTLQRQLLGLNVPTDIVAPSLIPIKPGERIKTNRRDARKLVFAARAQMLTMVRPPTESEEAVRDLCRCREDAREDLTRARHRLSKMLMRRGFVYRVGRNWTQRHRQWLRSLQFEDLATRIVFEDYFTVVEQGEERVRALEGRLEEIAQEEPYCERVGWLRCFRGIDTVTAMTILAELHDFRRFDDPRRLMSYLGLVPSEHSSGEKTRRGAITKAGNGHARRVLVEASWHYRHQPAVGLKLRRRRDGQPREIIALADRAQRRLNRRFHRLVLASGKTSQQAVVAIARELVGFLWAALYLYPATQAKVAV

SEQ ID NO: 421286 - protein, 332 aa, unidentified
MLTESGYRERHPQQASAKTLFDFLKKHFPDGEYHAVYESGFSGFATYYALKEYGIDCVVTHAADVPTTQYEEVMKTDKVDAAKLARSLRAGDIRPIYIRERENIDDRSVIRIRKTIQKQLSGYKSRVKHLLHCNGVEIPDRFASPGTHWSRAFIKWLKEDVVLLSPSRLSLDLLVKQVETIRQTLLDATKSIRRLAQTDRYRNNYELLMSIPGIGVSVAMCILTEIYDVKRFRNENQFASYLGLIPTCHNSGEKTASGEKTFRGNKHLGPMIIEAAWIAIYRDYGLGMAYARYKQSMKPQEAIVKIARKMSNIIFSVLKNSRKYEPYRWDKE

SEQ ID NO: 421287 - protein, 329 aa, unidentified
MNVAGIDVAAKSLTVVTLLGETLGKARELANDAAGHARLVKQLAAARVERVCLEATGSYHLDLALALDAAGIAVMTVNPRAAKSFAAALLARHKSDAVDAGVLAQFARRMPFAPWTRPSASALELRACARRLNALVEARTQAKNQLHAARQSLTTPAVVLEDIETSLAQCDAQIAKLRAWAQAFAAADPELGAIFALLTSVKGIAAASAIRLMGEILVLPPDLRAKQWVAQAGLDPRQASSGTSVAKKPRLSKAGNRYLRQALFMPALSAVRHEPQVAAYFRHLVETRGLKKIQAICAVMRKLLHAIHGMLASRQPFDGSRFYTPATAA

SEQ ID NO: 421288 - protein, 411 aa, unidentified
MERVNPRSCGLDVHKASVTACIRVAQGEQVVQEIRTFATDGAGLSALRDWLESQRIDQVAMEATGVYWKPVYYALEECAAVMLVNAAHVKQVPGRKTDVADSAWLAQLLEHGLLRASFIPPQPIRDLRDLTRYRKSLQEEHSRVANRLEKVLQDAGIKLSSVASDILGVTGRQILAALAGGHSSPEVLAELARGRLRQKKQELREALRGRFREHHAFFLGRLLIDLDNLEESMTEVVARIEELLRPFAAELELVCSIPGVKETVGPVLLAEIGVNMQCFATPAHLASWARLCPPHNESAGKRRRGKWSGHNRWLRTALIQAANAASRKRNCALAAIYYRLRARSGHNHAIFVLARHILELAWLLLSRRTRYHELGATYFETRRREQAKRRSLNQLKRLGYNVTLTPIPQAA

SEQ ID NO: 421289 - protein, 348 aa, unidentified
MTIVEDARAITGGVDTHADVHVAAALDPIGGLLGVGEFPATAAGYARLLGWLGEFGTVCLVGIEGTGSYGAGLARHITAAGVRIVEVDRSDRQDRRRQGKSDPLDAVSAARAAQSGRARGASKGRDGSVEAIRTLMVAKRSAAGERTRSINQARALVLTGPDDLRARFAAHTPAALVAGLASLRPRPGGDVAGHATRVALRELGRRAQFLDSQLDRLDELIVPLVTARAPGLLAVYGPGPRTAALLLIAAGDHPGRLRSEAAWAHLCGAAPIPASSGKVARHRLNPGGDRQANHALWRIVFTRLGSDPATRAYAERRTAEGKSKAEIIRCLKRYVAREVYRYLRPAAR

SEQ ID NO: 421290 - protein, 428 aa, unidentified
MSYRIAGIDVHKKMLAVVVSNVEVESEFQFERRMFGGNPEQLRLLAAWLLEQEAEEVVMESTAQYWKPVWGALERYWKPIREKREGAKRRSGTLHLAQAQSNRGQRGRKKDFVDAERLVKRLVARELTLSFVPDVEQRLWRAVTRKKYQLRRDLVRLNNQLESLLEETHIKLSSLVSDLLGVSARRMLKALADGETNPAALAALAHQRLRATPEQLCDALGACTELKPVYRRLLKMTLEHLQILEQQIGQLDQELATLLHPHQDAVQRLAEVPGFGVDSAQQIIAEVGPAAATFPSEKCLSSWVGACPGDEESAGVNYSHRSPKGNRHMRRLLNQAANAAVKVKGSIFEVIYRRCVPRLGHNQAIGVIAHRQCRLIWLILHNGVLYEERGPAVTTLSKYKRTWRMIRQLRQLGYRIESPNPQPSQAQA

SEQ ID NO: 421291 - protein, 367 aa, unidentified
MTERTRFLGLDAHARTIAVAVAEESGAPAEHGVIPNDPSSVRRLVGRLGGPRVRLVACYEAGPTGYELHRQLQGLGVECMVVAPSLVPIRSGDRVKTDRRDALKLARLLRSGDLTPVWVPDEEHEAFRDLVRARADAKVDALRAKHRLSKFLLRRGVRPPHGVRAWTERHWSWLGEIRLEEPSAQIVLADYLSVVRAAEERVRRLHAALHTAVPDRHRPLVAALQAVRGIAFLTAATIVAEVGDLRRFASAPQFMAYVGVVPSEYSSGASRHRGRITKAGNAMLRHVLVEAAHHSRLQPRVGTTLRGRQQAAPAAVVELSWRAQVRLHHRYRHLSARLGRPKAVTAVSRELAGFVWAVGQQLEVPAA

SEQ ID NO: 421292 - protein, 328 aa, unidentified
MKVMYERVAGIDVRKDMIKVAVRSPGDKPWARKTEILTFRTFYGVLRAMARELRRRGVTHVVMEASGVYTGPVCYALCEEDFTEVAVVNPAHARALKGHKTDARDCARLAELSGCGLLQGSYIPAAGLKEMRDLSRYRMKTVQARTPEIQRLAKALESAGIKLGSVASEITGKGPVAMIEALISGERRGAVMADLARGRARTAGKLADLSMALEGRFTDHHALMRRLHLDRITAPDAAVADLEARIAATAADWQREIGLLKTIPGSGDIVAWAWIAEIGPAPHQWFASHRKLASWVSLAPGSNVSAGKRKHGRTGDAGCGVPKLDQST

SEQ ID NO: 421293 - protein, 403 aa, unidentified
MIFVGVDWAEDHHDVCLLDEQGANLGKRRVPEGLDGSRQLQELIAEHTEGPEQVVIGIETDRGLLVRSLLAAGYQLYAINPLAVDRYRDRHATSGAKSDTGDAKLLADLVRTDRHNHRPVAGDSELAEAIKVLARAHQNLIWSRQRQLNQLRSTLREFYPGALAAFRDDLGSADAIALLERAPTPYRGRSISQAKILSALRKAGRERNLEQKTAEIQAQLRAPQLQMPNSVAQAYGHTVSALVLVIKQLNLQLRELEQELNQGFEMHPDAEIYLSLPGLGNVLGARVLGEFGDDRTRYSDAKARKNYAGNSPITKASGTKQVVLKRFACNRRLADACHLWAFCALKASPGARRYYDQLKARGKTHRQALRALANRLVGILHACLQHRQPYREEVAWPPLAAAA

SEQ ID NO: 421294 - protein, 375 aa, unidentified
MSNVRFIGLDVHAETIAVAVAEPNGEVRSLGIIPNRAESIGKLVKKLGPIEHLRVCYEAGPTGYVLYWQLAALEVRCEVVAPTLVPVKPGDRVKTDRRDALKLARSYRAGDLTPVWVPDAAHEALRDLVRAREAAKKDQLRARHRLSKFLLRQGRRPPAATKAWTQAYLAWVKSVRFAHAAQEATLLDYVHEVDHVAARIARLEQAIDDAVKTAPVPTRAVIDALQALRGVALVTAVTMVSEVGDFTRFARARQLMGYSGAVASEDSSGTRTYRGAITKTGNAHLRRVLIEAAWCYRHRPAIGATLRKRHAAVDEEVKAIAWKAQHRLYARFRALTAHGKPRQLAVTAVGRELLGFMWAIGTTVHKKQRASTIAA

SEQ ID NO: 421295 - protein, 353 aa, unidentified
MRGIFEGGCDYHPGFQQIAFVSTDTGKVGERRLEHTEEAEQFYREVGKHGEVVRVGMEASGHARWFERLLHNMQFELWIGDAAEIRTKRVRKQKTDRQDAQLILQLMLENRFPRIWVPDAENRDLRQLLWHRHRLVQMRTRVMNQLHVVALNEGLRRKKALWRPEGRAELQALSLAPWAGRRRQDLLDLLDRLTPKIHELNGKLEQIVERRPVTRQLSTHPGVGPLTALAFELVIGTPERFACAKQIASYVGLAPSEESSGDRRRLGHISKQGNVLLRFLLVEAAQVTVRSDAQWRSQFFHLAMRRGRKIAKVAMARKLAVELYWMWRRGWDYRQMQQLGSHAGEPGHPHGVQ

SEQ ID NO: 421296 - protein, 390 aa, unidentified
MHVVAHQPEAPGAIRSDLGAIFVSLELSRSTWLITSLSPCAGEKMSKHGVAAGDIGALLARFSEFKQKVFARTGKSFPIIVIQEAGLDGFWIHRVLQSEGIESHVVDPASIATSRRRRRAKTDRIDGEALLRALLAYKRGEPRVCAMVKAPTPEEEDRRRLSRERKTLIGERVEHVNRIKGLLFCQGVSDYEPLRRDRRQRLDELKTGDGRALPDHLKAQISRELDRLELLLEQINAVEAGQNTLFAAAKAEAPTPAPVTMLLDIKGIGPEFASILWMEAFFRSFANRKQIAAYAGLAPTPWQSGAVNCEQGVSKSGNPRLRTTLIQLAWLWLRHQPQSALALWFKERVTRNGGRFKKTTIVALARKLLVALWKYVTAGIVIEGAVMKAA

SEQ ID NO: 421297 - protein, 302 aa, unidentified
MTTIYTGLDIAKLNLQLHLAGRIHDLPNTAAGHRRLLKLLACQPGAHVVCEATGGYERDVVAALHEANVAVSVLNPARATGQRAKTDDIDAAVLTAYGQALQPNPTTPRTEQEQQLAELVRRRVQVLEILVGQRQQVERLTLPALRRQAQSLIRRLERDLEQIEEQLKALRTQVATLHERAQKLEAITGVGAITALGVLAELPELGTLNRRQAAAPAGLAPHPRESGQWHGRRSIGGGRAPVRRALYMAALVAAHSNHQLKEFYQRLRAAGKPAKVALTAVMRKLIVLMNHILKNPNFALQN

SEQ ID NO: 421298 - protein, 359 aa, unidentified
MKIVGCDFHPSWEQVAVFDPETGEVEERKLLHGDGEAERFYRELESPALVGIEACGNSQWLIELVERLGHVVWVGDAAQIRASYVRRQKTDRRDAGHILRLLMENRFPKLWTPSAEQRDSRQLLIHRHKLVEIRTRVKNGLQHLALNRGLQKKSSLWSVRGRAYLEKLPLEGWTARRREDLLGLLGELNKLVAELDEAVKLAADQHPQARLLMTQPGVGPITSLAFVLTIGDVSRFRHSNQVASYLGLIPSEHSSGGKQRLGSISKQGNRFMRQLLVESVQTVNRLDEGFRKQYAARCHHKPKGVAKVAAARKLAVRLYWMMRQNVGYPEIAHIESSPRVPLVGASQTEGLVGRSRIQQ

SEQ ID NO: 421299 - protein, 388 aa, unidentified
MEWDGEMSTVAARVHPLVQARALSKLLNPISNGDAPMSYDYHIGVAYHKAYTHLVVQDGGGKVLRSGKVKNDPRSLGNFLAPYLENSHAVMGASRNWTVMYDWLDELCDDVVLAHPLKVKAIADARIKTDKIDATILAHLLRADLIPESYVPCEAARELRQALRERIFFVRLRTMVKNRVVTIFDRYPEQTRALREMSDLFGKIGRGQLELLSVSTIDREHIDRALAFIDDINQRIREAEKTIRRFSKDNADVKRLKTIPGVGEFFARLIAAEIDDVSRFRSAKKLAAYAGLVPSTYASGGKCWNGRIIKAGNKWLRWAFVEASIPAMRAEPALKFEYERLKATKGANRAKVAVARKLLTIAFQMLRDQRDYERRDALERPSDPSRLS

SEQ ID NO: 421300 - protein, 310 aa, unidentified
MEACFVGIDVSKDRLDVHLRPSGEAFAVARDGKGLEDLVARLQGLSCELVVLEATGGFETTVAAALAAAGLPLAVVNPRQIRQFAGAIGRLAKTDALDAEVIARFAEQVRPPARPVPDAAVQALGELVTRRRQLIEMMKAESNRRLQLTQRRLIKGADRLLAVLQKELSELEQDIDDQIRGTPAWREKEDLLASVPGVGSIIARTLIAELPELGTLGPKPLAALVGLAPVNHDSGKSRGQRHIRFGRASVRSALYMAALTAKRCDPTFKAFAQRLRDKGKPKKVVVIAVARKLLTILNAILRTQQPWRHA

SEQ ID NO: 421301 - protein, 409 aa, unidentified
MKLYVGIDVSSTDLYTCIMDQEGTTCAQFKADNHLLGATFLRDQILLWANKRQPSEILIGMEATSVYSWHPAMFFHQQEELKSWNVKVFTINPKLIRKFKEAYTDLDKTDGIDAWIIADRLRFGRLKVTAVMQEQFIALQRLTRMRYHLVHQLTREKQYFLQHLFYKCSSFTQEVDSSVFGHAILELLLESFSLDEISQMDVQQLADFLRQKGRNRFADSECIAKSIQKAARSSYRLSKCVEDSIDLLLGLSIQSIRSLQTQMKELDKAITRHLEGIPNTLQTIPGIGPVYAAGILAEIGQIERFDNQAALAKYAGLTWSKHQFGRFQAEETSLIRSGNRYLRYYLVEAANSVQRHDASFRTYYRKKYEEVPKHQHKRALVLTARKLVRVIDALLRNGQIYTPRKGEDR

SEQ ID NO: 421302 - protein, 388 aa, unidentified
MPQTPNDLSRSLTALEQTTTLVAVVEMSQASWLVAGMIPGLERQPLKKIAPNEAALLSLLQRWQEEAIKICQTIRRITVAYEAGRDGFWLARWLCSRGIEAHVIHPTSVAVSREHKRAKTDRLDTAMLIRVFLGWLRGERGHCGMVAVPTLEEEDAKRPSRERENLVGERTRIINRMKSALVRLGIRGFKPELRRAPQHLEKLRTPENVPIPLRTLEELRRDMARLAMVRAQIEAIEQIRLQRLEQAPQDVAHAMVRMLANIIGVGVETADMLVREILAKELRDRRALARYAGLTGSPNESGSKRREKGLAKSGNARVRRGLIQLAWRFLRFQKDSALAQWYRTRTEGAKGARKTSLIVALARKLLIALWRLVTIGEVPQGIVLRQAT

SEQ ID NO: 421303 - protein, 361 aa, unidentified
MLYAGLDLSRQRLDVHVLDEEGRTVEVTAVHPDADALRALAGRVLRHGQEVSAVIESMTGSRFVHDQLELAGWDVAIADPVKAKGLAPLAAKTDKIDAHVLAELARRDLVPEIWLPDPSVRAERERARFRLHLVHHRSALKCRIHATLMTFGHPVPVADLFGTSGRRLLAGFELPEPWARTLATSLAMVDELDERIDECGRELARLGADHPYIPLLLTVPGVGPLLAYTIASEIGDIARFASPKKLTGYTGLCPIVRQSGNHDFRGPLAKNGPKYLRWALVEAATHAARDARYRDRYERNKKRPGSPARRQSCPCRHRPSAGRSHLARPHQESTLRPGRPRNAAGRLTTLHRIGPPAQPPI

SEQ ID NO: 421304 - protein, 387 aa, unidentified
MRVAAHRAEAPSAICVDLGAIFVSLELSRSKWLITSLSPGGGEKMSKHMVAGGDVAGMLSCFAELKRKAQARTGRCLPIIVIQEAGLDGFWIHRVLQAEGIESHVVDPASIATSRRRRRAKTDKLDGEALLRALLAYKRGEPRVCAMLRAPTPEEEDRRRIVRERKALTNERIRHVNRVKGLLFGQGVSGYEPLRSDRRKRLEELKTGDGRPLSPNLKAQISRELDRIELLLMHIKDVEEARDTMLESAQAVAPAPKLLLNLKGIGPEFAAVLWSEGLSRHFDNRRQVAAYAGLAPTPWQSGIVDHEQGVSKSGNPRLRSMLIELSWLWVRHQPQSALTIWFKERVKQNGGRFKKSTIVALARKLLIAIWKYVNAGVVIEGAALKAA

SEQ ID NO: 421305 - protein, 338 aa, unidentified
MKVYAGIDLHSSNNYVGIIDEEDRRLYQWRLPNRLEYILPALEPFKESMEGVVVESTYNWYWLVDGLEEEGYKVHLANPSAIKQYEGLKHTDDKWDSFWLAHMKRLNILPEGYIYPKAERPVRDALRRRLLFVRHRTSHILSLQSAITRNLGEKMSAREIKNLEASDADKFFDEPFLALVARNHISTIGFLGTKIKEIEKAVRSHVKLRAQFEYLLTMPGIGDILGLTIMLEVGDINRFPTVSDYSSYCRCVKSERVSNNKKKGEGNRKNGNKYLAWAYVEAANFAKRHYQEPQSFYQRKKATKNGIVAIKALSNKLARASYYVMRDQVAYDMNQLFR

SEQ ID NO: 421306 - protein, 453 aa, unidentified
MNELITQTKSPKNPLPSQPPEPAPAAKPILCWVGLDWADQKHCLVVRTEPTGPAQTHHLEQKPEKLDEFFLGLHGRHPQGRIAVAIEQSRGPVLYALMKYDFLVLYPVNPRTLADYRRAFKLSGAKDDPLDADLLCELIARHADRLRPLVLEDESTRKLRLLTEARRGFVEERTGLSNRLGATLKCYYPLGYELVGEDLASPMAQEFLRRWPNLARLQAAKAATLRAFFYAHNSRSEDKINARLAAIGAARPLTEDPALVEPLQLQMQRLVAHLRTVQQTINQYDEQIGLVFATHSQAWLFAPLPGAGPVLAPRLAAVFGTIQANFPEALGLLCFTGVAPVRRQSGNQEGVHFRYARPIFVHQSIVEFAKCSIAKCPWARLLYEQALRDGKSKWMAIRELAFKWLRILWRCWQSRQPYDETKYLRSLQRDGVQLYRSLYEALPPLPTTTVNKS

SEQ ID NO: 421307 - protein, 343 aa, unidentified
MQAVTTIGLDIAKSVFQIHGVDAAGNVIVRRQLKRRYVLPFFQKLPACLIGMEACASSHHWSRELTALGHTVRLMPAAYVKPYVKRQKNDAADAEAICEAVSRANMQFVPTKTVEQQSCLLLHRTRHLFIRQQTAVINAIRAHLAEFGIVAPVGRNGVEQLLDVVADTSEKRLSEIARACVLALGAQLRTLKVQILNFDRQIMAWHRSNEASRRLDEIPGVGPALATALVASVADPKTFRSGRNFSAWIGLVPKQHSSGGKGKLGSISKQGDRYLRSLFTAGALAVIRYAKIHGTKHRPWLTTLLARRPTKVVAIALANKIARMAWALMARDDRYREPFVLAA

SEQ ID NO: 421308 - protein, 438 aa, unidentified
MSTIAFVGLDVSQDDASVCFLLADGSEPAPRWTIPNTQPGAEALATSLVMLAQRYQIDQLRIGMEATGLLWWHLACTLKDAPALCPFAPRLYALNPHLIKTFRANYGALPKSDHADAFLIAERIRFGRQLPSPFQLDARYAPLQRLTRFRCHLAQNLAREKSYFLSFLFLTFSTYGQIAPFGDPFGATSSAVLEEFTTEELAQQSLEDLAAYLHQKGRGRFADPDALAATLQRAARDSYRLDKVLQEPLRLVLGTTLATIRSLQTQLKTLDKTIAQELAAIPQTLASVPGLGPVWTAGLVAELGDITRFDDEAAIAQYAGLTWETRESGQFQAEDTELTKRGNSYLRYYLVEAANSVRQHCPEYTQYYAAKYAETPKHAHQRALVLTARKLVRLIDVLLREGKRYLAPTERPARGEATPPHHARPARQRRNKPALAVD

SEQ ID NO: 421309 - protein, 441 aa, unidentified
MAMRTQDEEIVFPNAAGIDVGASSHWVAVPRRSTDDPVREFGAMTDDLNAMADWLIACGVDTVALESTGVYWIPVYEVLEQRGLTVWLVDARQMKYVPGRKSDVQDCQWLQKLMTLGLLRAAWRPKGEVCTVRAVTRQRDVLVAEQASWVQRLQKALVQMNIQLTEVLTDVMGVTGQAIIRDIVAGERDPKALARHRNDRVKASAAEITKALTGNWRDEHLFVLGQALAMYDDIGRHLGQCDAKLQALLTELGQSEVDLGKAPRAGSKLRQEFDVRQILANWAGVDLTRINGLGLAAAMKILSEIGTDLSRFETVKHFCSWLGLCPGTKISGGKVLSAKTKRSANRVRQALKMAAMSLWHSDSALGAFYRRMCSRMDKPSANTAVAHKLARMVYFMLTRGEAFVDKGQQHYEEQQRQRSVAALKRRAAALGFEISPTMTPA

SEQ ID NO: 421310 - protein, 399 aa, unidentified
MAGFDVHRRQITVDALDTATGEVSRGQIESTPAAVEEWVAGFAGRVVHVAVEACTGWLFVSRALERCGAIAHLAEPVETSALRGRKRRAKTDRADARWLRQLLCEGRLPEAWLPPEHVRQWRSRARLRNTLVAERTSWTQRIRATLYHHGVAGAPDELRTLAGRRFLAGLELPVDARERIKTALEIIDLLDAQLAELERDLRELARRQAGCRALMAQYGMGEICSLVTLCELGDVTRLHASRQAVRMAGIDIGVHRSDRHAQLGKLTRQGSAPLRSALFEAAQSASHRGSPDYHDYHALKARELSHTRASLTIARKLARRSYHILRALGPAALDPPDHRSDQAHQSPMRSKRAASSRSDRGTHAPRGGPRKTERPQSLHRNDRSTIKSPAANARGRGPR

SEQ ID NO: 421311 - protein, 344 aa, unidentified
MIIIGCDFHPSWQQIASLDTETGEIEERKLMHATGEARQFYEGLVGAVRVGLESMGNSHWFVDMLAEMGHEVWIGDAARIRASQVRKQKTDRRDAAHILELLVKDSFPRIWTPSREERDQRQLLIHRYKLVTLRARVKNELQHLALNQGMQKGRSLWSKSGQKQLLDLPLEFWAGTRRKNLLELLKQMDQQMVVLDQAVKKVAEENEKARLLMTQPGVGPITSLAYVLTLGDEARFQRGKQVASYLGLIPREYSSAGKQHLGGISKQGNRFMRMLLVEAAQIAVRFDPGFRKQYLHRCHHKPKAVAKVAAARKLAIRLFWMLRTHTPYPEVVRIESSSRVPLAG

SEQ ID NO: 421312 - protein, 341 aa, unidentified
MQIRSVGIDLGKTTFHLVALGDNGKVLLKKKFTQKQLIAFTANLQTTLIGLKPCSGAHFLGRTLREQGHDVKLIPAQFVKPFVKSNKNDFLDAEAIAEAVDRQNMRFVPIKTDDQLDLQALHRVRNRLITRRTSVINQLRAFLLERGLVFAKSPSKLRERMPEILENADEDLTPRMRNLLALLWNEWKDLEQQLVELNHEVEQIALCDAACTRLRQIPGIGPLVATAIVAAIGNGAAFHKGREFAAWLGLVPKQYSTGGKAKLYGISKRGDNYLRKILIHGARAVVLRSKRERIAMGAWMTSLETRAPRNVRVTRNNLGPLTRLCLAFAFALIHLSLCRSH

SEQ ID NO: 421313 - protein, 409 aa, unidentified
MTATNQFAAHVGLDWADKKHDVCVQFKNGERVFHVIEHTAEALDIWLTELHQKVKGRIAIALELKKGPVVYALQKYPFITVFSVHALSLARYRQAFSPSGAKNDPQDAELALELMLRYPQKIKAIEPDNADIRLLQQLVEQRRLLVEDKRRFVNRLINTLKQYYPLPLEWFSHRDNSLFCELIIRWPSLQQLKRARSDTVRHFMNAKGGPAVAYTEQRVASIANAIPLTTDKSVIEANALMATALASQIKLAGDLIRTYDERIESLFGTLPDAELFKSLPGMGPCMGPRMLAALGDNRDRFNSAEEIQNYAGIAPVTERSGQKSWVHWRWQCAKFVRQTFVEWAAKTVNSSYWARLYYQGLREKEKSHQSAIRALAFKWITIIYRCWKTKLGTMKRSICWLSKRDTRPY

SEQ ID NO: 421314 - protein, 415 aa, unidentified
MALKIVYKICCGIDVHKTFVVACVASTSDKGITSYESHRFSTYTSGLKTLLQWLLDRNCKDVCMESTSKYWIPVYNILEKGCSIVLAHPKYVKAIRGKKTDKKDAKWIADLFKHDLVAGSFMPPSDIRQLRDLMRYRFKLTCFKSSEKNRLQNCLTVSNIQLGNVVSDTFGKSAQAILDKILENPEDTSFDLEPLVFKSLKKKLPELRDAIDGYITPEQAGKLKIIKAHYESLESRKAELEELILALAAPYQQELTILQTAPGISSNFTAIGIISEIGTNMEAFPSAKHLCSWAGLTPTNNESAGKKKSVRVSKAGCYIKPLLVQCANAVVKSSKHPEMRNRYLRLKKRRGHKKAIIAIARMLLTALYHMLKNGENYNPELYQKTDLPPVDREITIEQALMLIRNQGYKIKSATT

SEQ ID NO: 421315 - protein, 341 aa, unidentified
MDHIGIDLGGRESQVCVRNSAGAITEEARRPTTELSRWLANRAPARVVLETCTEAFRLAGVAQRHGHEVRVVAATLVRALGVGQRGLKNDERDARTLSEASCRIDLPSVHIPTVVSQEVKAICVSREALVRMRTLLVNRVRSYLRSRIGARLRATPDTLPAKVRQALLDDPEGLPAHLERVLVVLETLREQIAQADLELKVLARADVRMRRLMTVPGVGPVTAARFVAALDDVDRFPNAASVASYLGLIPGENTTGFRAKRTRLTRAGAPQVRWALGQAAWSLYLHRPHDPMVQWAKQVAARRGAQVAIMALARKLAHVLYALWKHGTTYDPARGARPAAA

SEQ ID NO: 421316 - protein, 355 aa, unidentified
MDSKKYIGMDVHKESISIAVMNGAGKIVMECVIETKASMILQFFDGLRGDLQVTFEEGTSAAWLYDLLKPHVSKVVVCDPRKNASMKEGNKSDKIDARRLAELLRLNHLNPVYHGEHGLRSLKELVRSYLTITKDLGRVMSRVKAIYRSWAIPCTGKQVYAPRHRAEWLGKIGEPGVRRRAEFYYQQLDGLRTVRREVRRELLAEGKKHQSWQRLCQIPSIGPIRAAVLLGILQTPHRFRTKRQLWTYSGFGIETHSSADHRSVDGQLQRAKKPISIRGLNRNCNHDLKNLFKGAAIVASSKPGPFQEFYAALLTKGIRPEMARLTLARKIATIVLIVWKKGACFDAQYLKPQTA

SEQ ID NO: 421317 - protein, 372 aa, unidentified
MPQSSTLYVGLDVHKESIAVAYVAQEHGAEVISLGTVGTRQCDIDKLLRHLQSKSPQLVFVYEAGPCDYWLYRYLMKKGYVCWVVAPSLIPKKPGDRVKTDRRDARQLARLMRSGDLTPVYVPAVDDEAIRDLSRAREDTLRDLKAAKLRLKAFLLRHDIRYTGRANWSPAHLRWLSEVVCPTPAQHIVFQEYVQTVTEQTERLQRLEHELHEQVKTWRFQPVVEALQALRGVQFTVAVTTVAELGDLTRFDNPRQLMNYLGLTPSEYSSGARRQEGSITKTGNTHARRALVEGAWAYRYPAKVSRHLQLRLENLPKAIQAISWKAQVRLCKRYRQLLAKGKNANQVVVAIARELSAFMWAIAKQVTVSPKD

SEQ ID NO: 421318 - protein, 391 aa, unidentified
MDAVDQQPAAPAPRRPWGVAGIDPHKRTFTVAVLDERGGLHGVASFDTSDQGLAAALAWLGAGEFELDRVGVEGSAWLGNQVAAFLAAAGYDVREVQASRTAERRRRRRRAKTDAEDAQAIARETLAHPDLPPAGKQHAPDPDWDELVALRNQRRSLVAQRRRLLNEAESVLVGLPLVVRAVLPATRQVRPQLRALAHGAADQLELTGADRVHLAWLATSTADVARLDQRIGQLDERIPAVLARHCCTLTEEVGIAAVGAMELLVEVGDPTRFATEARFARWCGAAPVAVSSGEGDGEPQRHRLDLGGNRRVNSVLHTMHITQARCHQPAKDYLRGKRVEHKTAREARRAHKRLLANVVIRRMWADHQRRRSRTSPTGQHQRPLDKGASSR

SEQ ID NO: 421319 - protein, 310 aa, unidentified
MCYLGIDVSAETLDLAVFGGETWQSPNDDAGIAALVPRVVALQPTLVVLEPTGRFHRWLTAALTHAGVPVAVVNPRQVRAFARSTGELAKTDRLDAQVLARFAAQLQPPVRPLADEATLELAALVDRRRELTAMLVAEKQRLPLARASVRPSLAAHIQYLQRALKETDHDLDRWIKDSPLWREQDALLQSVPGIGKTIARSLLAQLPELGHVSPKAIAKLVGVAPLAQESGKWRGPRRCWGGRAEVRTLLYMATLTSIRCRSALATRYERLRAAGKPPKVAITACMRSLLVTLNTMMRTGQHWAAPLPTA

SEQ ID NO: 421320 - protein, 337 aa, unidentified
MYVGLDVHKKICYGTVMDEKGKIAKQAKFTNDSESLKEFMQDLDEALVVMEAGYCWQPIYDQLENSGHTVKLAHPKEVKAIAKARAKTDKIDSETLTHLLRADLIPESYVPPREIRELRDMVRRRAFLVGMRTMLKNRIRAELAKRAIRPGRPLWSRKGRELLRGLGLEAVDQVMPVMAALDKQIAHMSLDLRRMCGEDPRARLLTTIPGVGYYIAVLLVAEIGDVRRFPDSEKLCSYAGLVPTVRRSGGSTHHGGITREGSRWLRWALTQAVHAHLRHETNLTRFYGRLAAKKPKQVAVMATARKMLKTVYWMLWNNEPYHPGPGVVDPVHRCRVI

SEQ ID NO: 421321 - protein, 401 aa, unidentified
MTSVRSRAWIGVDIGKTHHWVCAVDETGKRLLSCKVLNDEAQIIEVIAEVSELAAGRVWAIDILGTPSALLVALLAKAGEQMRYASGRVVAAMSTAYAGEGKTDAKDAYVIAETARIRADLSVVDTDTDLVRTLGVLTGHRADLVADRVRMINRLRDLLTSVFPALEREFDFASCKGALVLLSGYATPEAIRRMGEARLSRWLRQRRVRGYADVAARAVAAAQTQHTVLAGQDVAASIVAELANSILAQHERLKLLEQQIQDTFAQHPQAEVIESIPGFGPVLGASLLVAAGDLSAFPTAGHLAAAAGLVPVPNDSGRRAGNLHKPRRYSRPLRHALYLSAQSSMMRAGPNRDYYLKKRDQGRTHSQAVIALARRRIDVLWALLRDNRTWTATPPARAQAA

SEQ ID NO: 421322 - protein, 354 aa, unidentified
MNSQNCDYTGQDLYIGIDTHARQWKITVQTRNLILRTLSINPKPKDLMHFLQKHYPGAHYKSVYEAGFCGFWIHRQLLDYGIENIIVNAADVPVRHKEKDRKNDKIDSRKLARELSKDNLIAIYVPAEAEQQLRSLCRVRFKIVQNLTRVRNRIKSHLYFNGIDLPRRSETAHWSARFIAWLESVEFSHQPGKDCLDLYIEELKEHRARLLKITRLLRHYARQTHLSPLFEVLYSVPGIGFVTAVTFMAEIMDIARFRTFDHLASFVGLVPSMSSSDNNTTEKGLTKRRNRYLRHLIIESAWVAIRKDPVLLAKFENLCGYMKKQEAIVRIAKKLLSRIRYVWLNRQSYGIGVD

SEQ ID NO: 421323 - protein, 346 aa, unidentified
MQDTTIAVDLAKSVFELAVSQRPGKVAERKRLSRGQFSRFVRESEPATFVMEACGTAHFWGREAQARGHRVVLLPPHAVRPYVLRNKTDGADAKALLEAVRNETIRPVPVKSVDQHVLGALHRLRSTWLATRTARLNTLRGLLRELGFVIPVGAGQVVPHVYALVSDAESGLPDALRAVFADAAREIGELEERVRAVERQLESLAGESALVARLRTIPGVGLLTATALAAFVGDVHRFPSGRHFASYLGLTPRESSSGLQRHLGRISKRGDPYLRMLLIHGARSVLCHAKRSPREGDRLRRWALERERARGHNKAAVALANKLARIVWAVWRNECAYRKATELTNS

SEQ ID NO: 421324 - protein, 326 aa, unidentified
MEHELHYIGIDTAKEKLDVDVLRPDGRHRTKKFANTTKGHDELVSWLKGHKIDHAHICIEATGTYMEPVAECLYDAGYIVSVINPALGKAFAQSGGLRNKTDTVDARMLAEFCRQKRPAAWEAPHPLERALRALVVRHQALTDMHTQELNRTETAREVQRPSIDAHLLWLEAELKRLEKQIKDLTDDDPDMKHRRKLLESIPGIGEKTSAVLLAYIGLKDRFAHARQFAAFAGLTPRRYESGSSVRGASRMSKAGHVSLRRALYMPAMVATSKTEWGRAFRDRLAANGKKGKVILGAMMRKLAQVAYGVLKSGVPFDASRHNPVAA

SEQ ID NO: 421325 - protein, 334 aa, unidentified
MARCGIDVAMKSSSICITDGRGVVLLERAVTTDEAGLRGVLGGRRRMHCVLEAGPLAEWLAGVVEGLGHQATAIDPRKAYGVIRTKKKTDRLDARDLAKMSRTGWYTAVHRKSAEARAMRTFLQARQGLVQTALAQGSRVRGLLRAHGIKLGQVKESQFAWEVRRLALEKGKNLWLMLEPLVEVRRQALRGAEQMRRQVVRQAAAEPVSQRLMTVPGIGPLTATAYVATIDDPHRFRLSDQVSAYIGLVPSVEQSGELELHGHITKEGDGLLRGYLVEAAHVLLTRKRGTCRLKRWGLKLAKKKGHGKARVAVARKLAALLHHLWITGTTYKAA

SEQ ID NO: 421326 - protein, 338 aa, unidentified
MKITTIGLDIAKSIFHLCCVNKMGRLLKKKQLKRKQVLPYLAKLEPCVVVMEACGGANYWTREIKAFGHEVKLIAPQYVKPYVKGNKNDYNDAEGIAEAAQRANMRFVPIKTVAQQDIQNFHRQRERLKKERTALVNQVRGLLAEYGIVINKGGSAVREGLPDILGDADNDLTPLSRELFAELLEELQLLDQRFGECEKRMHVINQEHAVCRRLDDILGIGPITASATYAAAGDGKDFVNGRHFSAWIGLVPGQHSTGGKTTLLGISKRGNAYLRTLFIHGARAVLQHSANKTDRFSLWAQALLERRGHNKACVAVANKMARIAWVIMAKGETYRVAT

SEQ ID NO: 421327 - protein, 337 aa, unidentified
MVYGAIDLHMRYSQIRIIDAAGAVLRDQRVPTTRERLTAAFAGFGAMRILLETGTESEWVAQAVAAAGHEVVVADPNFAPMYGERRRKVKTDRRDVAALAEANRRGWFRATHRVSAAQRAVRQVLRTRRLLVQQRSSTIALLRAVLRQEGYRLGGGSTERVGARLAALDLPAALTATLAPLCRMLTMLTTEIAALNTQTQALATADPVTRRLQTTPGVGPVVALTFRAVVDDVARFGHAGQVSAALGLVPREDSSAERRQRGHITKAGPRELRSLLVQAAWSCWRSGHSGALRAWTDQLAARRGKRIAVVALARRLSRILYALWRDGATFEARTSAA

SEQ ID NO: 421328 - protein, 341 aa, unidentified
MEEYIGLDVSMKETAVAIRRDGVRVWRGKCASDPHVIAELIRKRAPMVKRVVFETGPLSVWFYHALRAEGLPVICIDARHAKAALDMATNKTDANDADGLAHLAEVGFFREVRVKGFDSMLARTLVAARTRLVHMTTELSNQIRGIMKTFGLVVPAGKGSVFEKNVRDLVSGHHDLAHIVLPLLDAWKGLRSRAADLGRQLVADARQSQACRILMSIPGVGAITATSFATAIEEPENFRKSRSVGAWIGLTTRRYQSGEVDYDGHISRRGDRHLRGLLYEAASVILTRSSKQSSLRTWGLQLRERIGFKRAAVAVARKLAVIMHTMLKTGEFFNPTAGVAA

SEQ ID NO: 421329 - protein, 310 aa, unidentified
METKLFVGVDVSKDSLDVAIGPQKDIITFANDQKGVDSLVKKLRRIDAQLTVFESTGGYELLATSCLAEAGLPVVIVNPRQVRNFAKATGILAKTDAIDARVIARFAEAVKPEVRPLKDRQTSELTALVTRRRQIIEMIVAERNRLRLANKRNKKDIEEHIRWLKRRLDKIETDIGKMIQSSPIWRCKDDILQSVPGIGPVTSASLICDLPELGVLSPKKIAMLAGLAPLNCDSGKYKGRRRIWGGRACVRSGLYMATMAAIRCNPAIKGFYQRLIATGKCHKVAATACMRKLLVIVNAMLRDQTLWQQN

SEQ ID NO: 421330 - protein, 423 aa, unidentified
MDILYERVAGLDVHKDTVVSCVRVATGGQTQRECRTFATTTEGLTALAAWLEESRCTHVAMEATGVYWMPVWKILGQGDFELIVANAAHIKNVPGRKTDMNDAMWIADLQACGLIKPSFVPPEEMQELRSLTRTRKQLVREQTRHTQRIQKTLAEANIRLDSVLSDPMGASGRRIIEAMIAGVRQPGKLAELASKQIKATPKELYDALHGRLTDHHRFLLELHLRQWDGLDAAIRNLDREIGQRIDRMDAQIGTGKVPFRALIDLLDTAPGVSTVAAPAVLSEIGYDMSRFPTAGHLLAWAGMCPGHDESAGKRKSSRLRKGAPWLKTMLVQCAWAAKRKKDSYYRAQFFRLQSKRGPQKAICAVAASLLTAIYHMLKYGIEHRDLGADHFDRRPTELKAKRLVAQLAKLGFAVQLQSIAQAA

SEQ ID NO: 421331 - protein, 454 aa, unidentified
MMKGKKNRTNTHKKRLQQHLEHVNLYAAGIDIGSREHYVAVPPSLDEDSVKKFGCFTPDLEAMADWLVKIGITTVAMESTGVYWIPAFEILESRGLKVILVNARHVKNVTGRKTDVKDCQWLQQLHTYGLLHGAFRPEDDYVSLRAYMRQRETIVSHLASKIQHMQKALRLMNVLLDNVVSDITSQTGMAIIRDILSGIRDPKELAKNRDCHCKNSAEIIAKSLVGNYRDEHLFALKQSVELYDFYNAMLDECDQVICQYLSTLRTQADASEKPAQKKRKKCNSNALRFDASINLYELCGVDLTAIDGMEEHGLLKIIAETGIDMSKWATENRFTSWLGLSPNNKISGGKVLSSSSIKTKNRAKQAFKMAAFSLSNSRSGLGAFYRRLRARIGAPKAISATARKLAVIFYKMLKNKTEYRKQSQEEYDELHKSRVLKQLKHKAKLFGMELIASE

SEQ ID NO: 421332 - protein, 341 aa, unidentified
MWIIGCDFHPRFQQIAFVNTEGGECGQRRLEHRGEAEQFYRSLAGQAVRVGMETGGSSRWFERLLGELGQELWIGDAAKIRAAETRKQKTDARDAEHLRQLLCSGQFEKMRIWIPPAENRDLRQLLWHRHRLVQMRTRVKNQLRSLATSEGMERKPGLWSQAGQKQFQALELAPWAQRRRQDNLELLSELLHRTDPLDQEAAQQAAQHPEAVRLMTHPGVGPITALAFVLVIGDPARFPNSKKLASYLGLIPREDSSGGKQRLGHISKQGNALLRGLLVEAAHVAVRHEAQWKRDYHRLAMRKNRSIAVVAVARKLAVRLWWMWRRGVDYAQLSASGSHAG

SEQ ID NO: 421333 - protein, 361 aa, unidentified
MKKNSKKASVVTEPRRTVGLDLGDRFCHYCILDQAGEVMEEGRMKTEESALRKHFANEERMRMAMECGTHSPWISRLLEKLGHEVIVANARKLKAVTGEQVRNDRRDAEQLAQLAYTNPKLLRGIRHRSAERQRDLTVIQARATLVRARTMIINATRGLVKSAGGRLPKCSTESFVSKAKPHLPAELAELIGPMVNQVEFLTEQIAKLDQQIEALGKRYPEIRTLRTMPGVGALVAATYVLTLNGANAVRHSRSAGAFLGLGPRKKQSGDSDPQCGITHAGNSYLRSLLVQSAHHILGHRGPDSALRRWGLKLAGSGGRRGKKRAVVAVARKIAVILHCLWRTGKSYQAFPQGPVAAPSQV

SEQ ID NO: 421334 - protein, 341 aa, unidentified
MNQVSTVGLDLAKHIFQLHGADSAGAVVFRKKLRRGQLLAFLATLPPCTVAMEACGSAHYWGREIAKLGHTVRLIAPAYVKPFVKRQKNDAADAEAICEAAQRPTMRFVALKSANQQAAAVVFRTRDLLVRQRTQTINALRGHLTEFGVIAAKGPVHTSKLIAALEDPTSDLPQAARGILAVLVEELRSLDERVAVLDREIARHATENPVARRLMTIPGIGAVTAAALTALAPPAPMFRRGRDFAAWLGLTPLQRSSGGKERLGKTSKMGERSLRRLLIIGASAVARWAARKGVPAGSWLGRMLARKPPMLVRVALANKMARIVWALLAKGGVYRAPVAAA

SEQ ID NO: 421335 - protein, 342 aa, unidentified
MESAVTMGLDLGKSVFQVHGVDAGGVVVVQRRLTRSKLLAFFAKQPACLVGMEACAAAHHWGRELRKLGHRVRLMPPRYVKPYVKRQKNDAADAEAICEAVTRPNMRFVEIKTCEQQGTLVLHRVRLMLMRQRVQLSNAIRGHMAEYGLVAPAGRNGLQRLIAILDNPDDERVPAVARASLAQLVCQFGLLNGQVLENDRRVRSSARATELGCRLMEVPGVGPVLASAIVATVPDPAAFKSGRNLAAWIGLVPRQNSSGGKEKLGGITKQGDRYLRQLLVAGALAVIRYAQRHGTKRPWLVHLLARRTPKIAAVALANKMARMIWAMMMTGERYREPTVAAA

SEQ ID NO: 421336 - protein, 394 aa, unidentified
MTIYIGIDVAKRFHIAALVDEDGQPITQLRFDNNASGYQHFFACIDRYRDRGEPVIGMESTGHYGAALRDRLVEHGYTVQVLNPLKPNRFRDFYLQPVKNDARDAFVIAQMLRFGERQPYVPAPPPLRALTHLVRYRAALTQARARMKNQLRAILDEVFPEYQQESLFANLFGASSLAVLRRFPTPACLLAAPEAELVSLLKQSSRGRLGEERARQLRQAASRSVGSTLAGQAYATVLPDLIAGYQALEERIATFTARIEAELNTTEQTLTTIPGVGLVLAATILAEIGDVTRFPSSDHLVAYAGLAVGESQSGQGATRRFLSRRGLPQLRGAFFQAALAAVRFDPHLGAYYQRRVKSGLPRRQAIIAVARKLVRITYALLKSGAPYQPPEPEP

SEQ ID NO: 421337 - protein, 369 aa, unidentified
MAETTEAFVGIDVAKLRNAVAVADAGRDGEVRFYGEVDASPESMRRLAAKLAGKHERLHFCYEAGPTGYGLHRLLTGLGHSCVVVAPSLVPRKPGDRVKTNRRDALSLARLLRAGELTPIRVPDTAHEAVRNLVRARAAAVKDVGLEKRQVGAFLLRHSRLFPRKKNWGARYRSWLETQSFEHPADQIVLQEGIESVRLAEERLARLDRAIGEFLPTWSLAPLVEALQALRGVDLVTAVTFVVEVGDIRRFESPRQLMGYLGLVPGERSTGETVRRGSITKMGNARVRHLLVESAWTYRHPPRVGKAKLPKLERVSPKVREIAWKAQSRLTARYRALTARGKKTTVTCTAIARELAAFMWAVAREARPA

SEQ ID NO: 421338 - protein, 397 aa, unidentified
MIAVGIDVSKSKSTVAILNGDGSIRAKPFDVHHVADELQALVDYIKRTSEPPTILMEPTSHYHYPLLKAFTEAELPVCLINPYQMKKYGDTELRKAKTDKRDSLRIAQYALEKSYSLIPYTPQDQKYEDLRFLSRQYSQRISTLTVAKVQLLSLLDETMPGITTILPLKSRDPDNCVLLCFIKRFKSFDVIRKMGKTRFLDSYQVLVKKTKDRFAGSKGLAIYELVLNSVTTRGENPLSAMTQDQCVDLVSTSQKAADEINLQMRIIAETMPEYKVLRSMAGVGDRLGPIILGEIGDIRRFHSGKALNAYAGNDAPPYQSGQFESRNRHISKRGNPALRKACFEVMQALKLTKPQDDPVYLFLLKKEQEGKPYNVAKMAAVNKFLRIYYARAMELYK

SEQ ID NO: 421339 - protein, 369 aa, unidentified
MLRPRQQAKLARGVKDEEQAMSPKLNAAIAVIGIDIGKNSFHVVGLDWRGAIVLRQKWSRGQVEGRLANLPPCLIGMEACVGAHHLSRKLTSLGHDARLMPAKYVRPYSRGQKNDFRDAEAIAEAVQRPTMKFVATKTAEQLDLQALHRVRERLVRQRTGIINQIRAFLLERGVAVRQGLRFLRAELPRILATPCDVLSPRMVRVLEDLAADWRRLDERIERLSSEIEALARRDAGCERLMSVPGVGPIISSAMVAAIGAGEAFSKGRDFAAWLGLVPKQISTGDRTILGKISKRGNRYLRVLFVQAAWVVLIKPKSWQRHGLKPWLEAAKRRLHHNVLAIALANKLARIAWSVLAHGRTFETSKIHAA

SEQ ID NO: 421340 - protein, 434 aa, unidentified
MKSDFAAFVAIDWADQKHAWMLQTASSTARQAGTIDHTPEAVAIWASELRLRFDGRSIAVAVEQSRGSLVFMLSKYEHLVIFPVHPTTLANYRKSFRPSGAKDDPNDAALLLDLLTLHYDKLRRRQPDTPETRTLQFLVEERRKFVHERTRCSNRITSHLKLYYPQVLEWFDEIGSNIAAEFLERWPSLDKLQRARPATIERFFVDHNSRNAESIARRLDQIRKAVPATTDSAVIASCAAAVIAWAALLKQLVLTIESYDKNIDALARQHPDYALIKSLPGAGPALTPRLIAALGSQRDRYQTAHELQCYSGIAPVVASSGKQRWVHWRWCCPRFLRQTFHEWALHSVAYSTWAREYYDRQREKGKRRNTVIRSLAFKWIRILFRCWKDRTPYNEATYQQAIAKRHPNKAKGAQAVDLRWKKIAGFSKIMAVSA

SEQ ID NO: 421341 - protein, 344 aa, unidentified
MNKLSRVGIDLAKNVFQLHGVDRHGKAIWRRRLTRDKWLRVLLENIEPGSEIGMEACAGAHHWARQLQAKGFTVKLIAPQFVKPYVKSNKNDANDAEAICEAMSRPSMRFVAVKTVEQQDIQATHRIRSELIGQRTAKGNQIRGLIAEYGLVAPIKMARLRVAVPAWFEDAENGLTDRFRGLLSGLWNDLITLDRRVTELDHEINMIAQSDPVAKRLQQLRGVGPMVATALVATVGNAKQFSNGRQMAASLGLTSKQHSSGGKDRLLGISKRGDAYLRSILIHGARAVIQTARLKDDRLSQGVTSIAERRHPNVAAVALANKTARIAWAMLKYDMDYDPDYIAA

SEQ ID NO: 421342 - protein, 339 aa, unidentified
MEYGAIDLHTRRSQIRIIGEDGAVIVERRIDTRAPELARVFGGRPRMRILLETGTESEWVAQALEQLGHDVIVADTTYAAMYGSRSRRVKTDRRDVAALADACRRGIYRLAHRVGRATQIRRQHLRTREHLIRVRTQTINALRAILRQAGQRLPSGSAATITRRVRTLELEADLQGVIAPLVETLERLAPVMVAADRWVRDTAAADPIAPRLMTVPGVGGVVALSYQAALETPERFGGDAGRASAYLGLVPSEHSSGEGHRKGAITKTGPRMVRSLLVQAAWTLWRQRRRVGHLYAWVEQVAARRGRRIAVIALTRRLSRILYAIWRDQTVFRCEATVA

SEQ ID NO: 421343 - protein, 361 aa, unidentified
MMVVGVDTHKSSHAMAAVAADTGLLASEREIAASDDGHRAALSWARALETERVWAIEDCRHVSRRLEQALITAGERVIRVPPKMMGQSRRGERESGKSDQIDARAVARAVLREGVERFPAAFLDERALEIRLLADHRSDLIAERTRQINRLRWHLVDLCPELEADIPARRLGNAPALDRIARRLRRVECSARTRVALELVASIRAISRQTNGLQSELRSLVMAYRPALLAEQGLGVLTAATLIGRTAGAERFPTDAHFARQAGVAPVPVSSGRTDRHRLDRGGDRQLNRALHVIAITRARIDPQTRAYLQRKRLTGRRTVRPYAASSATWRAASTASSCCPLPTPTNGHGFSSMPQFPCPA

SEQ ID NO: 421344 - protein, 310 aa, unidentified
MKKNSIPASEIPELTIGLDLSDRSFQFCELNAKGEIINQGQLKLDPATLRKYLAAQAKARVALETGGQSAWVKQVIEELGHEAVVANARELEAVTGRSHRTDHHDARQLARLARVDRALLNPVELRGSAEQVDLFVIRARAVLVEARTRLINFARGVTKTLGRRLPGSASHRFVERVREAVPEVLEPALSGVLDVLQEITAQIEDYDGKIEALAIERYPQTGCLKQAPGVGTLTALTFVLTVGEPGRFAHSRDVGPFLGLVPRRRQSGEQDPHLRISKCGDRYLRKLLVQCAHVAMGPVRSGLRVAQVGA

SEQ ID NO: 421345 - protein, 346 aa, unidentified
MEQYVGLDVSLKLTAICIVDRTGKIEREGVVASDPEAIAAFVKSHAPHVARIGLETGATSTWLWTELNKMELPVICIDARHAKAALKMQINKSDRNDAVGIARIMQCGWYKEVRVKDLDSHAIKALLVSRALLVKIKRDIENQIRGLLKNLGLVIGRAKMNVFAVRAAELAEARPELAAAVEPLLKAREAVGRQIADLDRKVMRLARNDAQVRRFMTAPGVGPITALCFLATVDDPTRFKRSRSVGAYVGLTTRRYASGEIDWTGRISKCGDKMLRSYLYEAANVLLTRVVKWSTLKAWGVRLAKRSGLRKAKVAVARKLAVILHRMWIEGTEFKWSSKEVANQPA

SEQ ID NO: 421346 - protein, 451 aa, unidentified
MRSKRQASSHLEPINANAAGIDIGSQTHWVCVPADRSAENVRSFGSFTTDLYALADWLQECQVETVAMESTGVYWIALFQILETRGFEVKLVNAHHVKTLPGRKSDVLDCQWIQQLHSYGLLSATFRPDYQFCFFQAEVGKRDNLVRSACVHVQRIQKALTEMNVLLHQVVSDITGATGMAIIRAIVAGEHEPQILATLRHPRSRRSATEIAQALQGDYRREHLFILQQELALYEAYQVQLAACDAQIEQCLSTFEITSEIALPVAGSPRRKPQDNQPAFDLQTHLERISGVDFTQIDGMGALTVQTVLSEIGLDASRFPSVKHFTSWLGLCPGSCITGGKVKNSRTRRVVNRAANAFRMAAVAAGKTRSALGAFYRRLRTRLGAPKAVTATAHKLARIFYRLWSSGGTYDDPGVNYYEQRYQEQIVKGLRKKAQAMGFDLVATPSTQIVS

SEQ ID NO: 421347 - protein, 355 aa, unidentified
MSQEKYIGMDVHQATISVAVTDSRGKLIMESILETKAATILEFIQGLHGSLSVTFEEGTSAAWLHDLLKPHVTRLVVCDPRKNALLKDGSKSDRIDARKLAELLRGNQLTSVYHGEHGMRTLKELGRSYLTITKDLTRVMNRIKALYRSWAIPCSGTSVYAPRHRAEWLDKIPEPGVRLRAERFYQQLDLLQPVRQQARHDLLTESRKHHAVKLLRQIPSIGPIRAALLVAQLQTPHRFRTKRQLWAYSGFALEIHDSGEYRYVRGKLQRNRERMTVRGLNNNHNPDVKNLFKGAAISASTHPGPMYDFYVALLEKGMRPTMARLTLARKIASITLTIWKKGVDFDATQLHRQEA

SEQ ID NO: 421348 - protein, 310 aa, unidentified
MDCYIGIDVSKATLDVASLPDGESWTVTNDVLGLAELTPRLVALAPSLVVMEATGGFEMLAAITLAKAGLPIAVVNPRQVRDFAKAMGQLAKTDALDAGILADFAQRVRPAPRPLPDAAAQLLDSLLTRRRQIVEMLTAEKNRLGFARGPVKRDISQHIRWLEKRLANVEGDLQDAVASSPLYQAKADLLRSVPGIGPVTTLTLLATLPELGHLSRHQIAALVGVAPMNRDSGTLRGKRMVWGGRAPVRAALYMAALVGIKHNPVLREFYQRLRAAGKPFKVAVTACMRKLLTILNAMLHQNRRWDPQHA

SEQ ID NO: 421349 - protein, 349 aa, unidentified
MRGTVHMQVITIGIDLAKQVFHVHGVDANDKVVFNKPLRRSQVLPFFAKLAPCLIGMEACASAHYWARELKKLGHDVRLMPAKDVKAYVKRNKNDSVDAAACCEAVRRPTVRTVPVKTPEQQARLMQHRVRDLLVRQRTQAINGLRSHLAELGIVAAQGYDGLKMLLAIIADCSDARLPDDARASLSALVAQISSCQVEIGAIEKRLLAQHRKNEDSKLLETIPGIGVLGASAIVATVPDASIFKTGRDFAAWIGIVSREDSTGGKQRLGPISKQGDRYLRRILVVGAFAVIRQARAHPEKYPWLTQLLARKPAKVAAVALANKTARIAWAVLTKKEIYRSRPITVALA

SEQ ID NO: 421350 - protein, 393 aa, unidentified
MIYVGIDIASEKHDCCILGEHNKKLESFSFSNTRDGFISLLAACKKYAEPEQTKIGLESTGIYGDNLRDFLRRNGYEIRTFNPLLIKKSMQATTLRKTKTDKSDASFLASYLARELPDPDPQISYHISELKSLTRARFSVVGACSKAKTQLKALLVQVFPEFHTAFSDVFGVAAIAILRKYPTAKKLSAAKKTAVAKILSEASRHRLGEEKAAMLIDLAKNSVGCHSETKALEMQYYLDQIELNTAYIRRYEAAIREIMNEIDSPITTIPGIGLVLGAMILAELGDVTRFATPEKVLAFAGLDPSIYQSGKYTPASGTMVKRGSPQLRWALLMAARSTIVHNPNIAIYYQKKLSEGKHYNVICSHIAKKLVRILYSLLKKNTPYSLFYPQISA

SEQ ID NO: 421351 - protein, 398 aa, unidentified
MTESSDYESVQVFIGVDVGKDTHHAVAINRSGKRLFDKALPNDENKLRSLISDLKQHGQILLVVDQPATIGALPVAVARSEGVLVGYLPGLAMRRIADLHAGEAKTDARDAAIIAEAARTLPHALRTLKLADEQIAELSMLCGFDDDLAAQTTQASNRIRGLLTQIHPALERVLGPRLDHPAVLDLLQRYPSPEKLASLGEKKLAAQLCKLAPRLGKRLAADIAQALAEQTVVVPGTNAAAVVLPRLALQLITLRKQRDEVALAVEQRVLAHPLYPVLTSMPGVGVRTAARLLTEVACRAFASAAHLAAYAGLAPVTRRSGSSIRGEHPSRRGNKALKRALFLSAFAALRDPLSRAYYTRKMSQGKRHNQALIALARRRCDVLFAMMRDGTFYTLQAS

SEQ ID NO: 421352 - protein, 413 aa, unidentified
MDRLIERVAGLDVHKASVKACVRVPAERPGERQSQTRTFRTTTAGLVLLRDWLASHAVTVVGMESTGVFWKPVYYLLEDEFQCWLLNARHLRNVPGRKTDVADAAWICQLVEHGLVRPSFVPPKPIRQLRDLTRYRKALIHERTRETQRLAKVLEDAGIKLACVASDTLGVSGRAMLEALVAGTTDPQVLAELARGQLRKKLPALREALEGRFGPHHALLVGEMLARIDQLDESIQRLSVEVARVLVPFSPLVGLLLTIPGVDRRTAEVVLAEIGPDMGRFPSSAHLASWAGVCPGNHESAGKHYSGRTRKGSKWLRTALVQAANAAARSKDTYLAAHYQRIKGRRGHHKAIVAVAHSILVIVWHLLTGNQPYSDLGGDYFVKRHHSEAYKNRLIRQLERMRYKVTVEPADPT

SEQ ID NO: 421353 - protein, 329 aa, unidentified
MKKEWFVGIDVSKKWLDVAIFVENSDLKGFIHTQVDNDKQGYRELLRWLKVHDVDAFTCTYGMEHTGFYSDGLQHFLDKKGCKYTMLEPAVIKHYPIQPREKNDRLDAAKIADYLFRFKDTIKMGRVPDNTMEELRNLHRERKFYVEDRVCYMNRKQVVGKEEAKRLDKMIAMLDKQIYSIEEKIREIIRNDESLMENYRYLTSITGIAFVNAVNAIVITQNFTAFKTARDYASYLGVAPHTKTSGTTVRWKPKPRKHCDLTAKADISQAAKIAVVHDVELKQFYERKCNGKEDADTIRKAMNAVKFKLVLRMFAVVKQKHSYRQFTTI

SEQ ID NO: 421354 - protein, 325 aa, unidentified
MTDSSSGPAALFVGIDVAKEKLDLARSDTDAILTVANDPDGIARLVESLRSTIPTTIVIEATGGLEQAVLNALLDADLPVALVNPGHVRHLARGLGILAKTDAIDARVLVEFARLASPRLAKKRSANQVELDALITCRRQLSRVRADQTNRRSATTSRSALKAIDAVLKTLDKQIEDLDRQIRKLIESDDDLDSIDKLLRSVPGVGNVLRSTLLAELSELGKTDRRQIGALVGLAPFNHDSGHLHGKRSIRGGRTSVRSVLYMATITAIRCNPVIQKFARRLQQTGKLNKVVITACMHKLLALLNAMIRDNLTWDQLNAVKNLDI

SEQ ID NO: 421355 - protein, 360 aa, unidentified
MIVQGTSVGLDVHALSIVAHAVDEETGKVARARLCPDHGEVLGWLHQLRAPVRVAYEAGPTGFGLARAIIEAGMECTVAAPSKLQRPAGDRVKTDARDAAHLARLLRLGEITAVRVPNREIEAVRDLVRAREDARADLMRVRHRLSKLLLRQGIVYSGGTPWTYAHEEWLRRHRFDDVHLKAAFDHGFDAVLTATAARDRLDEQIMVVAASPRFADPVNRLGCLRGISALTGLALTVEIGDWSRFTGSSIGAYVGLVPCEYSSGNSRAQGSITKAGNTHVRRLLIESAWHHRKSYSTSGPTLRARWAKVDPALRARGHAGNRRLNKRWRSFTERGKNPLVANVAIARELAGWCWSLATMQ

SEQ ID NO: 421356 - protein, 347 aa, unidentified
MLYAGLDLSRKRLDVHVLEENGATKEVTAVSPDGDALRTLVASTARWGEPVRAAIESMNGARFVHDTLELAGWDVEIADAHKVKGLAPLACKTDRIDAWVLAELARRDLVPAIWLPTPGVRAERERARFRLHLVRHRVALKNRIHATLIAFGHPCPVSDLFGTAGRELLDHLEIPEPWSGTVQASLELIEDLDRRVAACERALRALGASHPYVPLLMTAPGIAWVLGYTIASEIGDISRFSTPKKLCGYTGLCPRVHQSGGKDHRGPLAKNGPKYLRWALIEAATHAARHPAYREHYERTKQRLGKQRGSKVARVEVARKLAEAIWHMLVTNRPFAPAGPTRSALVA

SEQ ID NO: 421357 - protein, 342 aa, unidentified
MEYYAGIDVSLEYSSLCVVDGTGKIVREGKVASEPAALIGWFDSLGFGLARIGLEAGPLSQWLYAAMKQAGLAVELLETRHVRDAFKAMPVKSDRNDARGIAQLMRLGWFRPVHCKSMGMQEVRAVLTARKLVQTKLLDIENSLRGILRGFGLKVGKTTARNFAGRIQELVKGHPNLEAIGEALLSVRAILLREFNTFEKRVRAMARSDARTKLLMSTPAVGPIVALTYASAIDDPARFKSSKQTGPHFGLTPKRYQSGETDRSGRISKIGDAAVREALYQAAHVMLTKPVKGCSQLKSWAMRIARRAGMSKAKVALARKLAVILHRMLANGTPFNAAAAAA

SEQ ID NO: 421358 - protein, 367 aa, unidentified
MIHVGMDVHVRNSYLHVTDADGQVLKRGRCGNSLGELTDFLDPLDVEAMRVCLESTTNSRAIQQFLRQYGHQAGIDLTAEVLDARKLRVIAESVTKCDRLDAKVINELSRSNLDLPTCYMPDDEEFALREHLRTRTDLVRIRTMLKNRVHAVLHRRGIQTPRTGLFTMAGREFLDRLEIDEAGRTILDRYLAEVDHIDRTVDASTRTLRELGRRPRWAKPAALLQTMPGVGLITALTILAELGDLARFHSRASVANYAGLVPVIRDSDGKRYRGGITHRGSSHLRHVMTEAAWMAVPRAPVYHDLFERVASRRGKAKAIVAVARRMLEDAWTMLRKDEAFRYDAARTSGPIARNSPSGRKLASSVAG

SEQ ID NO: 421359 - protein, 415 aa, unidentified
MKVVFPTCCGVDVHKTFVVATIITTPADSLQPHYQKKRFSTFNSDLNRFADWLLEHNCLDVCMESTGKYWVPVFNILEKRGIRVVIANPKWVKAVKGNKDDTKDSKWIGDLFRIGLVKSSFIPDMDTRILREFTRYRYKLVSMKSSEKNRFQNAFTVCNVALDSVVSDMFGKSATAITDYLTSDESFDPEHCVSLLQRTLKKKAEQVLESIEGFSIADEQKARIKIVREHYDFIEKLIAKVDTCVNEMVAKYEGEINLLCTIPGIDRRSAITIISEIGTCMSQFGSSKRLCCWAGLTPGNNESAGKKKSVRISKAGVYLKPALVQVAHAAVKDKNNPYYKLKYERIAKRRGKKRAIIAIARMILTAIYSMFCTGEVWNPVDLFKIDMPEHLKEQQLAKAIKQATRFLEKQGLSVA

SEQ ID NO: 421360 - protein, 344 aa, unidentified
MKNSNVIGIDLAKNVLQVCKVSKHGELTVNKAISPRKLKELLATSPPSIVAMEGSGSCHYWGRLAKAFGHEVRVINPKKVKAFLQGQKTDANDALAIAMAATQFGVRFSLIKDEEQQTLQTLETSRKFLDKELTALNNHIRAYVYEYGITINRGRKSLRETISLVLDDLDTRLPRCLKNTLRLLWERYQLTLAQLKETKKVKAALVKQIEPCKRLLALESVGEVCAAMLYANIGDGKEFKNGREASACIGVTPKQHSSGGKTHMMGINKKGGNKELRAALYQGALSVITHLPAEPQTVKQAWLIELVKRAGVKRACIALANKTVRTAWALLATGESYQPVLLSK

SEQ ID NO: 421361 - protein, 342 aa, unidentified
MQKTIGLDIHKKFIYAVVLDSSGDLLLEKKVRNDPYELDKFFKGIDKDSKIALESCSCWEYIYDYLTDKGFTNLVLANPSRVRLIATSRKKTDAHDARVLADLLRTNMLPTSYAPSTVIREQRQITRHRASLGRLKGIVKNKIHAILIRNGINQESSDVFGQEGTRYLMSLDLSVVDRYQMDQYLELIRHYDIQIRKTEARIEEYVEYTPQVRLLMSIPGVSFYSGLSITGEIGDIKRFSSAKKLTCFAGLNPSVSQSGDRCYTGHIAEQGDSHLRWMLNQCANIAIMHDSTLAKIYQRIKKRRGHNIAITAVARKMLCLIYTMLTHNIKYQALQIHKAKAS

SEQ ID NO: 421362 - protein, 334 aa, unidentified
MLELLPPLPPGAVCVGVDVSKDKLDVHVDNAKKPFSVPNTPAGRGKLIARIRGLPLARVVVESSGGYERPLLFEMLEADLPGSHVNPRVVRDYAGSFNQLAKTDPVDAKVLSCFGRERQPRLFTAEDKLRHMLQDLNRCRRQLLEQITALKNQAESALHPSAVKVLSNSAAALEEQLEVIDRDVQAEIDKLPELKRRQELLLKVEGIGPVTSRTLVIELPELGRIDRRKLAALVGVAPLNDQSGTSDNPRTTRGGRPHVRSALYMAALTGSRCNPVLAPYYKRLTESGKPAKVALVACMRKLLTHLNAVVAHDGQTRNVPDGGEPAPGDGGEKE

SEQ ID NO: 421363 - protein, 355 aa, unidentified
MNSVRYIGLDVHRDTISAAVLNESGRLIQQSILATRAAAILDFIGGMRGTLHVTFEEGTHSSWLYDLLSRRVTRLVVCNPRKNALMKSGNKSDAIDARKLAELLRADMLSPVYHGEKSAMEVQHLARSYALLTEDTTRVMARIKAVFRGQAIACAGKKLYGKKHRDEYLAELGTGALRRRAEFLYQELEAVQQLRRQAKRDMIVECRKYPETKLLCSVPFLGPVRAAVLIGRVQTPHRFRTKRQFWAYCGLALEMRDSGEYRMVDGQVERRKRPAQIRGLNWNHNHELKNLFKAAATSASACEGVFREFYLGLLKKNMQPEMARLTLARKIAAIALKIWKKGEAFDAEHLKLQAA

SEQ ID NO: 421364 - protein, 433 aa, unidentified
MSNFFYSPVIGIDVSADFSYTAILAPNGDIYKKSFKIKHDLNGFNHLVNEIKKVEEEFNMKTAIFMESTGVYHLSLFHYLNKYFDNTFVINPLVTKSNKNGDIRKVKNDKKDALSIATIGKFQNIKLSQQLSLDIFLLKNLVREYYKLTDTSSTFKKKLSADLRVIFPGYNTIFSDSTSKSSIELLSQYPTPQSILEAPKENIIKIFLNSSKKGIIWSENTYSKLFKVANEAKIIGLPLDGLAVKIASSITLIKTIQSEIDTLLQKINNFIQSETFPESIRANIELIDSIPGIGQLTAITIIAEIGDIDGFLKPKHLVAFFGIDSSVNQSGNFKGDNNKISKRGTRIGRRALYSVALASISNNRNGVPINKVLLDYYQINLKGKKPKIALVAIMHKIINYIFAVLRNQTPFEQRDPKIHKQMFLENNSLNKVA

SEQ ID NO: 421365 - protein, 359 aa, unidentified
MTSNMQCMYVGLDVHKNFIQGCVLDNEGKVILEHKFKNEHHSMDLFLSNIQPDSKIALESCSCWQYVYDYLSDAGYKNLVLANPSRVRLIATSRKKTDRHDAKVLADLLRMNMLPESYAPPLDVRYDRQITRHRLSLVRLRADVKRKVNALLLRHGYQHEYSDLFGKAGMQQLYSLDLPMCDRFEFDNYLKAIDFFTEKINTTQDRVEDFVKYNPQARLLMSIKGIDYYSALMISAEIGDVRRFNSAKKIISYAGLNPSISQSGERCHVGHISKQGNNNLRWILVECANIAIMHDSNLALFANIAIMHDSNLALFYHKIKKRKNHKVAIIATARKLLTIIYAMLMSNRNYVPQKKCKAS

SEQ ID NO: 421366 - protein, 350 aa, unidentified
MLIVGCDYHPGFQQIAFVDMETGELQERRLAHPEEAEKFYRELAASGVKVRVGMEASGHARWFERLLAELQFELWMGDAATIRAKRVRKQRTDRHDAQHMLNLLLGGRFPRIWVVSWENRDLRQLLWHRHRMVTMRTRIMNQLQAVAINEGLRCKKRLWRERGRKQLEAFPLARWASRRRRDLLELLDRLNPTITELTQAIEQEVEKYPEAQRLMTHPGVGALTALAFVLIIGDVERFRCGKQVASYVGLVPTEESSGDRRRLGHISKQGSSLLRFFMVEAAQATVRSDPEWRSKFFHLAMRRGRKIAKVAMARRLAVRLYWMWRQQWDYEQWKAFGPHAGQPETGIGVQ

SEQ ID NO: 421367 - protein, 320 aa, unidentified
MMAQNEVVVVGIDVAKDKVDACIRSLSQRQTFPSTAEGQRALIRWLRKHKVGKAVMEASGGYEREWAKALRNAKIEVRIVDPKRVRSFAQSAGRLAKNDAIDAEMIAWFAETFDEARGQAYDAAREELVQIVNARQALLEQQTQMQNRCEHTVPIPVRKMHERLLKAIALEVTKLEAVIAALTKASPHFAETAEIIESVPGLGKITSAGLIAAMPELGQVSNEAISALLGVAPYDDDSGKRQGERQIKGGRRKVRNLFYMACMGAATQHNPVLKTFYRRLIAKGKKPKVALVACMRKLIVILNIMIARREKWDAGRYAVG

SEQ ID NO: 421368 - protein, 366 aa, unidentified
MKKYTVSHSVTAAPAAARLEINKSGSMLKLGLDIHREKFVVAAQYDHATPRPPRGFAPAEFVPWVEARLREGFQVHIVYESCGFGFALYRALLQAGAHCYVIAPQKLDERNTRVKTDGRDSRALCLRLDRYLAGNKDSLAVIRVPSEEEERARHWSRQREQLVHHRQKMEAQGRGLLISHGLPAPAHWWKPQSWSRLGKLLPAWILPHLELYRPALLAFDQQVRTLTIELEKAAPAALPTGLGALSSVVISREICNWQRFKNRRQVSSYTGLCPGEYSSGTKRVPGSVTKHGNRRLRAVLVELAWRMVRFQPRYHPVQKRLAVLAKGARATGAQRKKAIVAVARQLAVDLWRLHTGRCTPTILGFK

SEQ ID NO: 421369 - protein, 368 aa, unidentified
MKTQNTPSVVSTSTPVVSSGFTLGLDLGDRSHYVCVLDAAGEILQEGPVPNDRVALAALLTHYPAATVALEAGTHSPWISRFLTGLGATVIVANPRKLHAISRHERKCDRRDAQMLARLARVDPALLHPIQHGTAQAQHDLLGLKLRDALVRTRVNLINAVRFTLKSLGHSVRNPSSESFHRTVLADIPADCRPVVQPLLTVLAQVTEKIKVMERDLVRRSRKDYPVTQRLQQIAGVGPLTALCFVLKIGDPQRFSRGRDVGAYLGLCPRRDQSGGTDKQLRISKCGDGLLRRLLVSAAHYVLGPFGPPCALREHGQRLTGAGSAREKKRAVVAVARKLAVLLLSLWKHGTDYEPRATTAPALVMVPA

SEQ ID NO: 421370 - protein, 270 aa, unidentified
MDHHSEPVRFVGIDVAKRHVTVHVRPDAITFSCTTDTQGLADLLTRLQPLEPTLIVLEATGGYEAIVAATLAQAGLPVAVVNPRQTRKFAGAIGRLAKTDTIDAADIAHFAEAIRPTPRPMPDQQTVQLRALLARRHQFVVMAGAEQQRHDRADNPLTRRSCAAMLRSLKAEITRIERAIDTLITASPIFCAKQDLLKTIPGVGDIVARIFIAELPELGAVDRHKIAALVGLAPMNQPRQRPDARRATYQGRATTDPHAAVRRLSVRHPA

SEQ ID NO: 421371 - protein, 328 aa, unidentified
MVYVAVDIGKRRCVTCVMGEDGSILDTSSYPNTFLDASLYAKQIVDRYGSECKAVVESTGNMCMKTYEAFESNGVEVKLANPVKTRAIAEARVKTDKLDSKILAHLLRADLIAECYVPSRDVRLSRALLSHRVNITREQTRMKNRIHSLLDKYDLECKYDDIFGAHGMRWLHTIQLNGHDHEILQSLLRELIFLQDEEETANSTIAKDALHSQYVPIIMSMTGFNYYSASVLAAYIADVSRFPSPSHLVSWVGLCPSVYQTGESLYMGRMKGGSRKVKWIMIQAANTAIRSDPRMKAYYERKLRRHHHNVAVTHVANKMLRIIWHMLR

SEQ ID NO: 421372 - protein, 341 aa, unidentified
MLYIGLDVHDKYTQIQAIDEAGFLAMTETLPTTAESLGSFLNQLPGSAAVSIEAGRNYWWITQLLNSHSSVNEVKVVDPRRSRILAEEFSVRSGYGRAKNDRIDAEMLAEIHRQGMSPAIYLPTEEQLEWRTLVRHRMGLVQQSTSAASRLQGLLSMHGVRTSTSSLVDDFQAQLESLQSLPDYARSVLQHLLVQIHLYQKQIKHCERRLAKCLPPSHPKIKLLMSAPGIGIVLARIILTEILSISYFKAPNYLMSYAGLAPVENVSGGKKGVIQLNHHCNYYLKYAFIQAAHTARHHPKYRKKYNQDVKRHGKTRAKTNLARRIIKAVYWMLTRQEPFHS

SEQ ID NO: 421373 - protein, 321 aa, unidentified
MSNKKTCRNSIGIDVSKQWLEVAVHKSAYHFRCPNDPQKFPDLIAELISLRPARIVLEATGGLEKPLLQALRSVALPAVVVNPRQVRNFANALGLLAKTDRLDAHVLAHFGAALEPPLRPIKAAEDEELDALMGRRNQLSDMLGAEKNRRGSAATAAARADIEAHIEWLEQRLKALDKQLKDQLKRSVAWQQKDKILQSVTGISFVTSVSLLADCPELGQLNRHQIAKLVGVAPLNRDSGKQRGTRHIFAGRAQVRAKLYMATLTAVRCNPVIKAFYQRLIARNKLKKVALVACMRKLLTIINVMVRDNKLWNATALPVST

SEQ ID NO: 421374 - protein, 362 aa, unidentified
MTVRTVNNLPAATHGETVRCLFAIELSKQSWVIGFNTPLSEKISRRTLSGCDWKGLLELIEDVRARVSREMDRAVAVMSCYEAGYDGFWLHRQLEAHGVRNYVIDPASLQVDRRARRVKTDRIDAERLLRSLMAYLRGEPKVWSVVRVPSVAEEDARRLHRERDRLVLERVQHVNRIKGLCALHGIYDYHPLRPQATARLEQLRTAQGGELPPRLKSEIKRELHRLELVVEMIATLEAERDAIVEDEASTHLNAEKIQNLHKLKAIGPEFAAVLVGEIFHRSFDNRRQLASYVGVTPSPFQSGSMAHEGGISKAGNRKGRTTGIELAWLWLRYQPDSDLSIWFRARVGIMKGRIRRIAIVVR

SEQ ID NO: 421375 - protein, 415 aa, unidentified
MLKIVYPTCCGLDVHKSIVFACIAATDGNGITTYREQKFKTFTNALRELAQWLVDNKCKDVCMESAGKYWHPVWNILEPTCNLVIAHPKYVKAIRGKKTDKKDAKWIADIFKHDLVSGSFIPPNDIRQLRDLTRYYRKLVGFNTGEKNRVQNSLTVSNIKLDDVFTNVFGKSATAITEHLLEHPGEYFDVTPFVDGRCKTPIEEIQAAVDGVICPEQIEKLKVIRSHIKNLELCKANLESAVLTIAEKYLPQINLVLSVPGFRDPFVAISIIAEIGVDMSVFPTDKQLCSWAGLTPQNNESAGKKKTTRISHAGTYIKPLLVQCAVAVSKSEKHPEIRNRYFALRKRRGHKKAVIAIARMLLTAIYHILRKNEPYNADLYCKSDKPPVNRQVSLDEAIFILQRQGFIITQPQVVK

SEQ ID NO: 421376 - protein, 445 aa, unidentified
MARKTKKQRLTIVHPHCAGIDIGSREHWVAVDPQVCEQPVRCFTTFTDDLLTLAAWLKSLGVEVVAMEATGVYWIPLYEVLDAQGFDVYLVNSRATRQVSGRKSDVLDCQWVWQLMSHGLLKGAFRPADEVCSLRSFVRQRAGKVQEQSRCIAHMQKALTQMNIHLDNVVSDLMGKTGSAILRRIVAGERDPQQLAKWRDRRLRADEATVARSLHGNWRGEHLFALAQALAHYDFIDEQISACDQQISQALRALPTLCEEPAPKPVKSLRSAHRTAAEQKQLHQALHIAMGVDLSAIPTLGIDTVLVLAGEIGPDLSRFPTERHFCSWLSLAPPTHISGGKPVSGRKLKTFNRAGQALRQAASNARRSESYIGASHRARLARMDTAKAIKATAHQLARLIYAMLTKGQAYVEQGMEAFEARSQERQLRALQRKAGKFGLALTEAA

SEQ ID NO: 421377 - protein, 350 aa, unidentified
MQRYLGLDVHAASSTLAVISESGKRLQTQVLETNGRALVEAVRRIPGRKQLVFEEGVQSAWLYEILSPHVDEAVVAGVTKSPGQKDDRRDAYGLAERLRTGTLERRIFKAPRHFAMLRELARTHRAIGRDLVRVQARLKSVYRSRGIRTPGRAVYAKTHRERWQQQLPASARATAGRLYEQIDFLVALKERAEQDLIAESRKHPIAPLLETTPGLGPIRVARLLPIVVTPYRFRTRQQFWSYCGLAIVMRSSSDWVRTPDGRWVRAQVQLTRGLTRQHNHDLKDVFKGAATTIIVQAPDDPLYHDYQRLTEAGTKPNLAKLTLARKIASTALALGRRRSPTARSIAAHPR

SEQ ID NO: 421378 - protein, 367 aa, unidentified
MKKGSTAAAMQSRKISRQQLTVGLDLGDRNSWYCVVDEGGQIQREQRVRTTAKALQEVFGAMPRSRVALETGTHSPWISRLLQELGHEVIVANARKVRLIGESRKKDDRLDAQALARLARIDPELLCPVKHRSAQAQADLMMIRARAGLVRTRTGLVNTARGLAKSYGERLRGCNVRNMNPEKAEGLSPELQRALQPLLAAIESVSERIAEYNERIDKLAQESYPQVALLTQIKGVGTLIALTFLLTLEDPHRFGKSRDVGGYLGLQPGRRNSGQSEPQLHISKEGDPYLRTLLVQGAQHILGPFGVDCDLRRWGLRLAERGGRNGKKRAIVATARKLAVLLHHLWVSGEVYEPLHNSSRVPVAAAA

SEQ ID NO: 421379 - protein, 355 aa, unidentified
MATPASRIDREIDEEVILGVDTHKDLHVAAVASPVGRTLATASFPATTAGYRQLVSWARSHGTVARAGVEGTGSYGAALARHLVVEQITVIEVNRPDRAQRRRRGKSDVIDAEAAARAVISLRATARAKAGNGPVEQIRIYKVAKDSAVKARVQATNQLKSVLITAEPAVRQSLTGLSAKALIERCAELDDRTEGGNAAVVYTLRTLARRIQHLAAEIAELLARITSMIKTCAPALLDQYGVGPDSAAVLLVAAGDNPHRLGSEAAFAALCGVSPIEMSSGKTSRRRLNRGGNREANAALFRIILTRLRVEQRTKDYVARRTAEGRTKRGIIRCLKRYAARQLFRIIHAALTPAT

SEQ ID NO: 421380 - protein, 431 aa, unidentified
MKGGDLVKNNFMSTLFVGIDVSSKTNVLCALDFQGDKLLNLKALNNQPGAESILDSILDCLNSSGLEYVVIALESTSFYSTHIANFLSSSAELLPFKPLVYCLNPKSVANYRKSFIDIDKTDPLDAFVIADFARCGRITSEPWRGAQFLALQRLSRHRLHLVECVTREKTYMVSNIYLKFSELAVLDKDEKPFSDTYGATSAAVLTEFLSLDDITYSSIEDLVAFVSAKGKNRFSDPYETARLLQKAARDSYRLDQVLYEPLNTSIASSFNLIKAFDAEIKVVDKAIEKTIKGINPVEYQSLTSIPGIGPVLASGILAEIGTIASFGSHDSLAKYAGLTWRVTQSGDYSSDDTRMTKTGNKYLRYYLIEAANSVRNHVPEYRDFYNKKYGEVTTHCHKRALALTSRKLVRLIFGLLTKNQIYSSGKVGEIQ

SEQ ID NO: 421381 - protein, 386 aa, unidentified
MQKLNDLSRSLTALEPDGTLIAVIEKSLSSWLIGGILPGVERQPLKKLAVDESALLKLLHRWREEAEKAGHRIERIVVAFEAGRDGFWLARWLKARSIEAYVIHAASVAVSREHRRAKTDRLDSELLKRAFLGWLRGERDHCKMVAIPSIMDEDAKRPNRERESLIGEQSRIVNRMKAALIRLGIRGFNPKLKRAAGRLDGLHTPEGEPIPPNTLAELRRDMERRRLVSNQIRRIEQARLQRLEQEPDDGPHAMVRLLARVIGVGIETADMLVREVLSRNMRDRRAVARYAGLTGSPDESGRKCREKGLARSGNARVRRGMIQLAWRLLMFQKNSALAQWFRARTENARGTRKTMIVALARKLLIALWRLVHEGVVPDGIVLRPAQ

SEQ ID NO: 421382 - protein, 409 aa, unidentified
MNKVTVFTKYVCGIDLHARKMSCCVMDLKGNIVGKRNMRCEFNKLLEFINPWLSSITIGVESTYNWYWLIDALKEKEIPCHLGHALYIKRMSGKKHKNDPVDARELSDLLRSNRFPEAYAYPREMRTGRDLLRRRHHLVRKRAGALTHFQNTCTQHGYLKVVKADVHRKSTRRSIPEFTNDTILKQILISDLDYIESLDSIIDGVEKGIITNACKHNKTHYKLLQTISGCGPITSLTVLYETHIIGRFASQQCYSSYARVVRAENTSNGKDYGRTSHDKIGNPYLKWALSEIGSHLVLHSNLVQQWYQKQVTKHGKGSAMARLRHKLAVAIYHMLKNNVGFDEHKLLGIQKEQVSTPAHNWQETSGKSSKPHSVIGKVPVPSLKRGNRKRKTGRISLRTTGKGKVRTIC

SEQ ID NO: 421383 - protein, 333 aa, unidentified
MAHFVGLDVSVQETSVCVVDDVGKVLCERKVRTEPEDIAVLLTSIGGDYVRIGIEAGPLSQWLVSGLTEADLPVVCVETRHMKALLKAQQVNKSDRNDARGIAQMMRVGLFKPVHVKTLVSQEQRMLLTSRKLVQRKLMDIECDMRGTLRNFGLKVGVVSSIGYEARIRNLVEGFPRLAAIMEPLLTVRRVMREQLATLHKLLLNAVRVDPVCRRFMTVPGVGPIVALTYRASVDQPHRFIHSRAVGAHVGLTPKRHQSGEIDYDGGVSKCGDSMLRAMALRSRAVDAHPQQEVVMAEGLGHAGCSAARDAPCHRGSRQAPRGDPAPHVDRRH

SEQ ID NO: 421384 - protein, 398 aa, unidentified
MSRIWTGIDSGKGHHHGLVLDADGKTLLSRRVANDEPELLKLIGDVLDLADAREVTWAIDMTGGEPALLLALLINHGQEVLYMPGRLVNRASDGYRGEGKTDARDAYVIADQARMRRDLRPIRPGDEAAIELKLLTGRRADLVEDRTRAVNRLRGTLLSMFPALERALDVTNTGPLRLLTGYQTPAAIRRAGVTRLTKWLANRKVRGARALAEAAIEAAERQYTAVPGEKTIAKLVHTLAEEVMALNEQVSEMDKLIEGRFREHDLADIVLSVPGIGTVLGAEFLAAVGGSLDEFDSPDALAAFAGVAPAPRDSGKVSGNLHRPITYHRRLQRVFYTSALVSVRCDPNSRKFYDRKRAEGKKHVQAVLALARRRVNVLWALIRDRRCYQVAPPVTTAA

SEQ ID NO: 421385 - protein, 393 aa, unidentified
MFIVGVDIAKRSHEATVIDDNGSKIKKPFNFKNDSSGFHSLLSVLESISLDPDDFIIGMESTSHYWLALYSGLRKKGYTVHVFNPIQSNALREMYIRQVKNDDRDCFVIAEVIRFGRYSEGGMPPSNIYELREMCRARFFMVDAVADLKRKAIALLDQVFPEYETLFTDIFGLTSSELLRNCSTPEEIMAIETDRLCEIISVPSRKRFGMKKAEEIKSLAENSFGIVQEFDAFGCLIKQYMEHIRFSEQQIATLDERIAALYSSFDTYLSTIPGVGPVLGATILSEIGDISRFSSAAKLAAFAGIDPTVKQSGEFVGTRNHMSKRGSPYLRRALWQASTIAVRCDPVLKEFMAKKRAEGKPYMNAVGHVTKKMANIIYAVLRDNKPYYIRNNI

SEQ ID NO: 421386 - protein, 354 aa, unidentified
MIIIGVDFHPEFQQIASVDTDSGEFQEKRLAHREDAEAFYRALAAAGKKVRVGMEASGHARWFERLVAELQFELWIGDAAEIRTKRVRKQKTDRQDAQLILRLLLEDRFPQIWVPSWENRDLRQLLWHRHRMVQARTRIMNQLQAVALNEGLRCKKRLWGEHGRQQLESFRLAPWASRRRRDLLELMDRLNPTIAELTQAVEQEVEKCPEAQRLRTHPGVGALTALAFVLIIGKAERFGSGKQVASYLGLVPLEESSGNRRRLGHITKQGSSVLRFLLVEAAQVTVRSVPEWRSKYLHLMMRRGRKIAKVAMARRLAVRLYWMMRQGWDYQQWIKFGSYAGQPGNRHGAQSNTE

SEQ ID NO: 421387 - protein, 452 aa, unidentified
MAKRSKKRCEQLPILHPHAAGIDVGASELFVAVSADRDPQPVRSFPTFTRDLNALADWLQQCGIRSVAMESTSVYWIPVYQILESRGLEVCLVNAQHVKNVPGRKTDVSDCQWLQYLHSVGLLRASFRPPGFICAIRSLWRHRSSLIQMAAEHVLHMQKALDQMNLQIHRVLNDITGMSGLRILDAILAGERDPVTLARLCHGGVKNSEDTIAKSLEGDYRPEHLFALRQSLAAFHYYQQLVVEGDQEIQRQLGSLETAITAQPAVPKRTKASPYQRGRYEPKAFDLRHELYRIFGVDLTNVPGISAITAQTILSEIGTDVSRFRNASAFASWLGLCPENKISGGKVLYTKSRRVRSRLATALRMAANSLHHAKDYLGEFFRRITRKLGKPQAITATAHKLARIVYHLLSTKEAYNETVFHRCDEEVLRRAQFRLRRQAAQLGFQVIPLQNG

SEQ ID NO: 421388 - protein, 409 aa, unidentified
MAKLLRGIRKFYFSGVLCMLICGIDIGKFRHEACLIDESGKQLSKPLKFTNTTDGGERLLEYFGKYNQDNKVIAIGMEATGHYHLSLYCFLFDRGYQVNVINPIQSDAIRNLFLRKTKNDAKDSFLIAETIRIGRFSSTPLADEDILSMRQLCRHRMDLVDYIADQKRKIIGVMDRLFPEYQHIFSDMFGKTSTELLNKAVTPEELLAIPTAELCELLKKHSRGRFGEAKAEQLRSAAKSSFGITIATTAFTMQLRQLLEMIELLEGQLVELEAEIGEYLRKMDTYITTCPGIGEVLGAIILSEIGDITRFPEPKKLVAFVGVDPSVKQSGEFVGTQNKMSKRGSPHLRRAFFLAANVAAFRDPVLSAYYQKKRAEGKHHYTALGAVSRKLICIVYAVLRDNKPYTPHF

SEQ ID NO: 421389 - protein, 343 aa, unidentified
MSAHYFIGLDIHKKMIAYCVKTVDGRLVDQGMVDADRKSLHEWAANLPGPWVGAMEATIFTSWVYDFLLPYAVNLKVAHPEMLKAITAAKKKNDRADAERITDLLRVNLLPECTMLPPEIRELRRVLRYRNHLVRTAVKMQNKMCGLLMEVGASYNKRRLRGKRYFHELLEKVSEIPPSVQDLLVLSRAGFEMFQESQKRLIQSLRTDALIRERVCRLMTIAGVGEVTALTWTLEIGDPLRFGSIRQAISYCGLCSAQRESAGKEHRSPISKKRNKHLQTILVEAAKIAPLWNPQLASVHQRDLKKGNRNRATLAVARRLVAYMMSVDKNQKDFALRGEQKAA

SEQ ID NO: 421390 - protein, 342 aa, unidentified
MEITTIGLDLAKNVFQVHGIDANGKVVVRRRLRRAQVVNFFAALPPCLIGLEACGTAHFWARQLIGLGHEVRLMPPSYVKAYVRRGKNDATDAAAICEAVTRPHMRFVPVKTEDQQAALMLHKARELLVRQQTMLVNALRGHMAEFGMIAPQGRGKVEDIIAVIEDAEDESIPALAKAALGPLVAQLRATEAATASLNAEIKAWHKGNEASRRLATIPGIGFLSASAIAATVPDPSFFRSGREFAAWLGLTPRQNSSGDKQRLGRISKQGNRYIRRLLVIGATSMLRRTRAKSAPGADWVNSLLERRPPRLVTVAMANKTARIAWAVLAKRESYRAPAVATC

SEQ ID NO: 421391 - protein, 409 aa, unidentified
MQLFVGVDWAEDHHDLCVMDTAGKVRAKGRVSDDLAGIARAHDLIASAVPAEVDDDEVEVVVGIEIDRGLMVRALVTAGYRVLAVNPLSVDRYRDRARVSGAKSDPGDARVLADMVRTDAHQHRPVAADSDLAEAIKLVARSHQSAIWSRRRLANQVRSALREFFPAALVAFDDITHPDAIAVLSIASTPEQAKRLSRSKIAAALRRGGRQLNIDRKAEQIQAALRTEHLTQPPVVADAYGAIVTSLVKVIASHSTQIAELAEVLEDHFGQHPDATILRSLPGLGVVTAARVLAEFGDDPTRYDSAKARRNYAGTSPLTVASGTRRTVRARHIRNRRLADALHWWAFNAISRSPGARALYDRRRAAGDTHSGALRVVANRLIAILHGCLRTRTPYDEDTAWAHRNDLAA

SEQ ID NO: 421392 - protein, 372 aa, unidentified
MQQDSAVFVGLDTSKMKISVALAEEGRQGEVRFLGDIDHTQEAVRRLVTKLAGKYHRLLFCYEAGPTGYGLQRQISELGHDCAVIAPSLIPKRPGERVKTNRRDAMTLARLHRAGELTRIWVPDPGHEAVRELVRAREAAMEDLRAKRQHLQSFLLRHGRVFTGRKPWTRAHARWLAELAFEHPAQHVVLHEYRQAIEDAEARLERLTRQVAEVVSCWSMAPVVEAYQALRGVALLTAVTFVAEIGDVRRFQTPRQLMAYLGLVPCEHSTGERVRRGSITKAGNTRARRVLIEGAWTYRFPARLSRLLQERQAGLPKVVRAIAWKAQVRLCGRYRKLMAAGKRQTVVTTAIARETAAFLWAIGREVEPRLAA

SEQ ID NO: 421393 - protein, 351 aa, unidentified
MKYYTTTTEFNCGIDLHARQMYACLMDRQGRKLVHTNIQGNDFGYFLQKVEPYRHDLTVVSECTFNWYWLADACEAAGIQFVLARALYAAHIHGGKNKNDRIDSEKLAHLLRSNLIPPAYIYPSERRPIRALLRQRMSYVWHRAELMTHLSMNQTAQNCVPAQKGGHNRDVWQERILAQTPNPYHQLAVRCDMDAIRTYDALINKLDGTITLYARHHQSRDYTLLQTVPGIGDVLAMTILYEIDTISRFPTVKDFTSYCRLVKGSVASAGKLKGLTGGKMGNAYLRWAFGEAAVICKRSHRLLSPYADRLVAKHGTFKGNAILANQIARAVYFMLQSGQAFDPERVIKTSI

SEQ ID NO: 421394 - protein, 313 aa, unidentified
MERSLFVGIDVAKDHLDVHAVPTDAAFRVTHDAAGLATLCERLVAWAPTLIVLEATGGHEVTVVAALASAGLPVAVINPRQIRDYARATGQLAKTDALDARILAKFAAAVRPEVRPLPEPQTRALDEAVTRRRQLVEMLGAEENRRRLVRDRRVQGQIEAHITWLKRAIKELDRELQATIRASPLWRDAEAVLRSTPGVGPVMTTTLLAELPELGQLSRHKIAALVGVAPLNRDSGQFRGRRMISGGRASVRRVLYMATLSAIRRNPVIKTFYDRLCANGHPKKVACIAAMRKLLTILNAMLRDGRRWHAQIA

SEQ ID NO: 421395 - protein, 479 aa, unidentified
MIVETERRLVGIDLGIASSHTVRVLTGDGSEVCRRRCEPTAASLAMVAAAALAGAPAGTGLEVIMEPTGPAWLPVAVYFLQRGHRVYRVSSAKASALRRFLSRHAKSNGIDADTLARLPLMDPAGLQPLELPEAARAELERRVRATDRLTQEAATHKVRLKDFVRQLLPMTPLRGDLCRADLAVLERTGGHPDRILGLGRRRLTAIIVGASNDHLGAERADDWLESATRSSELYAKHAAFAADALADDVLTELRLLTAIEGELARHAAARERAYCAVDSKQLARSLPGVSTIGAPALVALMGRPGRFEHGDQFRSYSGLAPRASETGDTDRKGQVMSKAGPGLLRTTLVRAADTARKQDPQLARVYHAQMTERGAPHIKALCVVAAHLAERSLLVMKRGTAYVVRDVDGTQVSPEEAKVIIATRYTVTEEQRARRRSKKTRKAPQKVLEAHVEARRPSSPVMVTDRGAVASAVGTARAS

SEQ ID NO: 421396 - protein, 345 aa, unidentified
MKITTIGIDLAKNVFQVHSVDEHGKAVFNKALKREQMAGFFVNLPACLIGLEACGSAHHWARKLQAMGHTVRLMAPQFVKPYVKTNKNDAADAAAICEAVTRPSMRFVPIKNVEQQSVLALHRVRQGFVKVRTAQGNQIRGLLAEFGLIVPQGIGHITERVPELIEDACNELPGAFRLLMDRLLEQLKELDRQVRELEAQIVAWHRQSDLSRKLEQIPGIGPITACALVASLGDAKNFKDGRQVAAWLGLVPHQHSSGGKQNLLGISKRGDTYLRTLLVHGARSVIYHAQNKGQGSAECAWVNGVVQRRNKNVAALALANKNARIVWALLAHDRCYEPGYTRESA

SEQ ID NO: 421397 - protein, 339 aa, unidentified
MAILFVGIDLAKNVFAVHGVDDHGKAVLVRPTVQRAKLHELIASLPPCTVGMEACSGAHHWARLFKQHGHTLRLMAPKFVSPYRMSGARGKNDAADAAAICEAVQRPNMHFVPVKSEDEQARLCVHRVRQGFVEQRTATINRLRGLLSEFGIILPQKAATVRREATAHLEDLPGWANTAVGDSLSEVHRLDERLAEYDRHVSLMAANDERSRRLMQLQGVGCTTASALVSTIGDAHDFKNGRQLAAWLGLVPGQYSSGGKARLGSITKAGDRYLRTLLVLGAKSVLAAAKNKGDRLSRWALALQARRGYWRTIVAIAAKNARMAWAVLAKAESFKPIET

SEQ ID NO: 421398 - protein, 387 aa, unidentified
MPKASAQPEVPAAIQINLTAIFVSLELSRSTWVVTSLSPGAGEKMSKHTVPAGDVPALLLRFDELKRKAKARTGTSFPIITIQEAGLDGFWLHRLLKSEGVESHVVDPASIATSRRRRRAKTDRLDGEALLRALLAFKRGEPRVCAMAVPPNPEEEDRRRLSRERKTLVAERVEHVNRIKGLLFSQGIASYEPIGRDRRKRLDELTTGDGRPLPDNLKSAITRELDRLELLLDQIKTVEAKRDALLAELRTDTPPLAGKMLLDFKGVGPEFAAVLWTEGLFRHFDNRRQIASYAGLAPTPWQSGSVSHEQGVSKAGNPRLRTTLIELAWLWLRNQPTSALSLWFKARVEGGRGKKTTIVAMARKLLVALWKYVTFGVVVEGAVMKNA

SEQ ID NO: 421399 - protein, 414 aa, unidentified
MLKIVYRICCGMDVHKSFVVACIASTNDQGVTTYKSKRFSTFTGDLRRCAAWLSENNCKDVCMESTGKYWIPIYNILEPTCNIVLAHPKYVKAIRGKKTDKRDAKWIADIFKHDLVAGSFIPPADIRQLRDLVRYRCKLTNFTTGEKNRAQNCLTVSNFKLDDVFSDVFGKAASAITTRILENPTAKITDVSGFRTKGMKASNEQVLAAVDGEMCEEQAEKLRIIRSHMDSLELCKLNLESLILSNAEKYLPQLNLVMTAPGIQSFAAIGIISEIGVDMSVFPTSKHLCSWAGLTPQNNESAGKKKTTRISRAGAYIKPLLVQCALCAIRAKRFPEVRSRYLALKKRQGHKKAIIAIARMLLTAIYNMLKKNEPYNPELYRKGDRPPAHREVSVEEAIFILQRQGYLVTAPTTA

SEQ ID NO: 421400 - protein, 407 aa, unidentified
MNLNVGIDVSKLKLDYCGMDSNKQVCFQGEVTNTPKGAGHIRDEILKRSQQADQIIIGMEATSVYNFHPTLFFEQDDRLNQLNVTVVTLNPKVTHRYSKLFDDDKTDTVDAFHIADFLRIGRYQVPVTRDEKHIALQRLTRERYHLVHQINDCKNHFLNNLYYKVNTIDTVFPTSVFGSTMLSILSDEKYSLDDLVQIPLSALTDELNHLSHGRFGDAKSVAKALKKAIRSSYRLSKTVADSVDQVLAMYANQLRMLNQQLKLLNKSISDLCSVISGADSLQSIPGIGPVYAAGLLAEIGQIDRFPNDASLAGYAGLSWQRSQSGNHERQLTPRTKSGNQYLRYYLVEAANSVRRYDPTYARYYQKKFREVPKYQHRRACVLTARKLVRLIINLLTEHKLYTPPKLV

SEQ ID NO: 421401 - protein, 362 aa, unidentified
MKADNNTTSFFEKVLLFIGIDVHKAKWVVTLRTYDLELKTFSMMPSAEELEKFLLKNYPGADYRIVYECCFSGFWIYDYFSKKGYKIIVTPTNRIYKDGSTIKTDKIDSRKLALQLSRELLREVLVPAKRIREYKYIFRIYDKQKMRQGQILRQIKAILEQKNHPLKWARWNKGLLEKLKVIKFEDNLFDLKFGNLLKEYEYLVSQIKDSEKIIEQIKESASGGDELGKRINILEKINGIGIISSVRMCLYLFDKKDRFESSEKLNHYLGLTPSERSSGDKIVRGRSGMCGNRQLRSIIIQLAWMTVRKDGSLLEKFDKVYKASGSKQKAIVAVARKLMTKIFAAIQKEEDYRINVRTVSAA

SEQ ID NO: 421402 - protein, 421 aa, unidentified
MEEITEEPVALVERVAALDIGKATLMACVRVPHETKPGARLQEVRTCTTTTRSLLGLRDWLVCQGVTRVVMEATSAYWKPPFYLLEDDIAECWVVNARDARNAPGRPKTDKLDSVWLAKLAERGMVRPSFIPPRPQRQLRDLTRYRRTLTHERTREMQRAEKLLEDAQVKLSSVISNIFGKSGRDMLAGLIAGQRDAYALAALARGKMRAKTSLLAEALTGHFTEHHAFLLTMMLARTDALTAQIDTLTTRIEQAIAPFAHQVAQLDEIPGIGTIGAQEIIAEIGTQMSRFPTAGHLVSWAKFAPKARQSAGRSKAATTGEGNPWLGGTLGEAAISAARTSTFLASRYRRIVKRRGKKRALVAVGNSILTIAWHLLSDPDTRFTDLGPYWHDHLAPLRRKRQLIAELERLSGMKVTLQQSA

SEQ ID NO: 421403 - protein, 359 aa, unidentified
MQRNKISFKGQKIYIGIDVHAKTWEVCVLTESGYKERHPQQASAKTLFDFLKKHFPDGEYHAVYESGFSGFSTYYALKEYGINCVVTHAADVPTTQYEEVMKTDKVDAAKLARSLRAGDICPIYIREKENIDDRSVIRIRKTIQKQLSGYKARVKHLLHCNGVEIPERFARPGTHWSRAFIKWLKEDVVLLSSSRLSLDLIVKQVETIRQILLDATKSIRRLAQTDRYRNNYELLMSIPGIGVSVAMCILTEIYDVKRFRNENQFASYLGLIPTCHNSGEKTASGEKTFRGNKHLGPMIIEAAWIAIYRDYGLGMAYARYKQSMKPQEAIVKIARKMSNIIFSVLKNSRKYEPYRWDKE

SEQ ID NO: 421404 - protein, 359 aa, unidentified
MEQRRFVGIDLGKRTYELKIIGSGGKVTGTNGLTSLAGRKALYRKLMPADRVALEVCSLAMVMAKEMGKEVGCEVVLLNPSQIALIYRSLKKNDKEDALKLARLVQKYTNEELPKVELPSEHEENIRQILTELRQLTHDRTREINRLHAIFLERGITEMKKKDLATACKRNESIKLLKGMSLLEAQRCLKRLELIDEQLEEVEKSLDAEIEGDKNVEKLMEIPGVGKQLASSYIAFLGDGSRFSNASAIGAATGLVPRLDISSTIVRLGHITKCGNRNLRSLLILAAWTHVRARNAGALKEKYLYMTQVQSKGKKIAIVAVARKLAELMYTILKNGTSYEKRTSPAISTKKLADEALAS

SEQ ID NO: 421405 - protein, 346 aa, unidentified
MTHKTIIGVDLAKHLFQVCIVNHKGTLKTNMTVTRAKLLAFMARQPPALVVMEACCGAHDWARRFRALGHEVRLLAPQYVVPFRHGQKNDPNDALALTEAGRRPSMPSVPVKSAEQQDIQAWHRVRERLVKNRTALVNQIRGLLLEYGVVIPQGLSRVRQRLPGILADTDNGLTLAFRVLLQSLGHELSDLDASVAEVTQRLTHISHELEACQRLQEMDGIGPLNATALVAALGNGHDFRNGRQVAAWLGLVPRQYSSGGKTRLAGISKRGNSYLRCLLIHGARSVVSRARTKTDATSMWIRQLVGRVGMNKACVAVANKMARVAWALLHTGEHYRKPEKLQGQVA

SEQ ID NO: 421406 - protein, 445 aa, unidentified
MAESAITATSEVEWAAFVAIDWADQKNFWRLAPAGSGRQESGELLNTPEAVEAWAADLQQRFGGRPVAVCLEQSRGRLVYMLTKYSHLVLFPVHPTTAARYRKTFCPSGASDDPSDTASLLDLLLRHREQLRQLQPDTRETRLLHFLVEERRRTVDERTRLSNRLTDCLKLYFPQMLEWFDKVASPVVGAVLERWGNLEQLQRAHPGTLRKFFHEHNCRGKELIEKRIADIAQAMSATKDEAVLEAGVMMARGLVAILATLRSNIAVFDKRIEELVHTHPDSTLFASLPGAGPALVPRLIVALGTHRDRYRSAFEIQSYSGIAPVKEASGRSAWIHCRFICPKFLRQTFHEFASHSIGQSEWAKAYYQHLRQDEKKDHHAAVRALAFKWIRIIFRCWKDGRPYDEQAYLQSLRRRGSRLSASLGPSTRIEWKTVASFQKLSQKNA

SEQ ID NO: 421407 - protein, 329 aa, unidentified
MKIDEVLGIDVSKLTLDCHLHRSKVHMVFDNNLGGIAKMLEWALESEDKENLLIVFEHTGLYSHLLIKSLASSAYLFQVVPGLDIKRSLGIARGKDDRADAKRIALYGYRLREEIMPLRSCSKSLDLLKRLMSMRKKLVVQKAGHMTTLGEQKRVLDQEENKTLFQVQKEIIAMLNKQIAQLEKEMDKLIEQGPELRELYRLLTSVKGIGGVTARFLIVQTSGFSTFKSWRKFASYCGIAPFPNSSGTSVRGRTKVSHLANKEGKTLLNLCATSAIQSNQEMRAYYERRVREGKNKMSTLNIIRNKLLARAFAVVQRGTPYVDTMRYAS

SEQ ID NO: 421408 - protein, 388 aa, unidentified
MLLDHPSDGPAAIRTQIGAIFVSLELSRSTWLVTSLSPGKGEKMSKHGVEAGDLADLLKLFAELKCKAQGRTGEIYPIITIQEAGLDGFWLHRALQQEGVESHVVDPASIATPRRRRRAKTDRLDGETLLRTLLAYKRGEPRVCAMVVAPTPEEEDRRRLCRERKTLIAERVEHVNRIKGLLFAQGTFDYVPLRRDRRKRLEALRTGDGHPLLPHLKAQIVRELDRLELLLNQIAAVEREQDALLAASRPAGEKTASDPSAMLLNLNGLGPNFAAVLWSEVFWRQFANRRQVASYAGLAATPWRSGGIEREQGVSKAGNPRLRTTMIQLAWLWVRHQPQSALTQWFKANSVRGKKRTIVALARKLLVALWKYVTAGVVIEGAVMKTAA

SEQ ID NO: 421409 - protein, 345 aa, unidentified
MTASVASHNQIFIGIDVGSASFEAAWHRGGSTQYQNRPDAIAAFVARLSAEKQIIRIAVEPTGGYEKPLVKALRGAGLPVEMVHTSRFAAYRTLIGAKAKSDTSDARLLAAYAAAPEEVRGRKAGHVVLPQDDVREQLAELAARRDQLKHMIHAETCRLSTVRSRSIRDDITAHLQALRQADCKTYDAMMQLVRQRDELRNAKRLLQTIKGIGDKTALTSIAAVPELGLISNKAAAALVGVAPFVRQSGTMRAPAHIRGGRAAVRNAFYMAAVTAQPSQPRPGPVLRSPDRSGKAGQGRPRRSDAPPGRLRQRRTQIRTALERGPNHLTRDTVDSGLAVSHPSRL

SEQ ID NO: 421410 - protein, 421 aa, unidentified
MPNIEIGVDSMVKENFIYVGIDLHKETHTAVMIDCYNQKLGEITFPNRPAAFPKLVTKVKKCNTDGKEVVYGLENAYGYGRALAVWLIDKGYLVKDVNTAISHRQAKHRGAMYRKSDSDDAKAIALATLNMLDKLPDACPNDAYWSLGQLVHRRDNIMKQRTRLVNQLHEQLCIAYPSYKQFFNDISRPTALYFWEHYPSRKYLKGKSVEDLRAELVPVSHNKCSTKTREKILDAVASDKVKNIDYQDARDMVTLSIVSDLQHYDSQLAEVDKMLEQMYKMLGCTLTTIPGVNVITAVKILAEIGDIKRFSNANKLAQFAGIAPLHLSSSGKGKDVATKQGNRRLQATIYFLAIQMVQVSSKGTPRNSVVRAYYEKRKAEGKTSQQALICISRRLISIIYGMLKHGTEYRMPVVESAGENR

SEQ ID NO: 421411 - protein, 432 aa, unidentified
MKIFVPVAGVDVSKRFSDLCVLSPDNNVLLRQKIYHDMVSMKLAEKKLHEIELECGARPVVVMESTSHYHLILFQFFTDAGFEVVVVNPIQSGALKNINVRKVKNDRVDAYRIAMLYRLKVLRPSQIPTSSLRGLRLLTRQRSELKSDVARFKNRMTAYLDQIFPGYGEVFSDVGGSASRAVLHMCPTPEKLLNADGSLLAKVICEAGNKGPKFGAEKAAKLREAAGSAQVIGVRSASNASLIKNVLDIIEGLLAAIQRIEGEIKELVTQDTRLDEDVKLLCSIPGIGFSSAVVIAAEMGDISLFRKPKQLAALGLDPGERQSGTFKGRKNKLSKRGSPQVRAALHMAAVSSVSRNRDGTYRNPVLAEYYERKCAEKPCKVARVAVMRKLSNIIYAVLRDRKPFELRTPQEHMALLAAAYGDNMHSGSQLPP

SEQ ID NO: 421412 - protein, 459 aa, unidentified
MKKMKIPSAPSLTTMQPNAAGVDIGAREIYVAVPADRAAAHIRCFGTFTDQLRELVQWLRECRIDTVAMEATSVYWIPLAEMLEEAAIAVCLVNPRHVKNVPGRKTDVQDCHWLQYLHSVGLLRAAFRAPVEVRPIRVLWRHRDALVRQSAWQVQHIHKALDQMNVQIHHVIADITGATGTAIVEAILAGQRDPAHLAALRDKRLRADVPTLIRALTGDYRAEHLFCLQQAYEGYKFARAQIVTVETEVHRLQTALCQLAPEPPLREPAGEAVPPPTRKARRVGGKNAPGFPVASLLQQLCGVDLTTIPGLSAPTLQGVWTELGSSLAAFPSAKHFASWLSLSPDNRISGGKKLSVGTRATANRVAHILRVAAQGVGHAHNEIGEFHRRMRARLGGAAAVTATAHKLARILYACLRSKCPYDPSRHDLNSPLRRSKVLAKLRVKAENLGFQLVELQTAN

SEQ ID NO: 421413 - protein, 333 aa, unidentified
MENIALIGIDLGKNSFHIHCQDHRGKAVYRKKFTRPKLIEFLATCPATTIAMEACGGSHFMARKLAELGHFPKLISPQFVRPFVKSNKNDFVDAEAICEAASRPSMRFVQPRTESQQAMRALHRVRESLVQDKVKTTNQMHAFLLEFGISVPRGAAVISRLSTLLEDSSLPLYLSQLLLKLQQHYHYLVEQIKDLESQLKRKLDEDEVGQRLLSIPCVGTLTASTISTEIGDGKQYASSRDFAAATGLVPRQYSTGGRTTLLGISKRGNKRSELCWFSVPGIHTKLEHQSGKLADWVRELLCRKSNFVVTCALANKLARIAWALTARQQTYEA

SEQ ID NO: 421414 - protein, 391 aa, unidentified
MLICGIDIGKFRHEACVIDESGRQLAKPLKFTNTTDGGERLLEHLVKNNPDNKVVVIGMEATGHYHLSLYCFLFDKGYQINVINPIQSDAIRNLFLRKTKNDAKDSFLIAETIRIGRFSSTALADEDILSMRQLCRHRMDLVDYIADQKRKIIGVMDRVFPEYQHIFSDMFGKTSTELLNRAVTPEELLAIDTKELCELLKKHSRGRFGEAKAEQLRNAAKGSFGITVATAAFSMQLRQLLEMISLLENQLTELEEEIGEYLRKMDSYITTCPGIGDVLGAVIVSEIGDISRFSEPKKLVAFVGVDPSVKQSGEFVGTQNKMSKRGSPHLRRAFFLAANVAVHRDPVLSAYYQKKRAEGKHHYVAVGAVSRKLICIVYAVLRDNKPYTPHY

SEQ ID NO: 421415 - protein, 322 aa, unidentified
MSVKVLGIDIAKQKFDVALLAEGKIKNKTCRNSTEGFETLKVWLEKQGIQKVHACMEATGNYGEDLAVYLYEVGHIVSIVNPARIKGFAQSELVRTKTDKLDAGVIARFCLAMKPEPWIPPAPEIRSLRALVRRVDSLIDMRSQEKNRISTAHESVKVLINEHIAYLDKEIEKIRKQIADLIKQNPQLKQRKELLDSIPGLGKATVPHLLAELDNLDKFTHVREMVAFIGLAPKETISGSSIKGKPRLCKIGNARLRKALYMPALVSIQCNPVMIAFYNRLKEKGKNGKVIVCAIMRKLVHVIFGVLKSGKMYDPNYKPTLA

SEQ ID NO: 421416 - protein, 345 aa, unidentified
MPIVGGLDIHRKQITFDYLDTVTGEVRRGQIAPADRVHLRAWLARFAGRDDVAFAVEGCAGWRYVAEELAAAGITAHLAEPADTAFARGRKRHAKTDKTDARHLRMLLAEGRLPECWIPPARILECRALLELYNDLRRERTAWAQRIHAVLFHQGAPQLGEGALRTEQGVAGLRAAAAAHLSPAGQLQVATALEVIDGLEARLHAVRHQLLDAARHLAGAKVLAARLYGVGPVTGLAITCWLAGAGRFSSSRQAVRFAGLDITVSSSDRKGPPGKLSRQGPPVLRWAVYEAGKAHARTSAPDHRYYAAVKDRKNSKRACLSEARKILRQAHHILAELGDDALAAA

SEQ ID NO: 421417 - protein, 482 aa, unidentified
MKRIVRRCCGIDVHKKSVTVCVLPPPSRLELGVRKRVFRTYTRDLRQLRTWLKNCQVTEIAMESTGQYWRSVWNVLEDDFAKLILVNPQHIKGLQGHKTDPKDAEWIANLLETGKLKGSFVPPRPVRELRDLTRQRVHVLEDLNRVKNRVEQLCQAGNIKVSSVATDLFGASGRSMLKALVEGKRDAAWMADYAKGKLRGKKRELELALEGTFTDHQRWLLNSELQQVESLEATRRAIEQEVEGRMIQFAEPVRRLRTIPGIDSITIWTLIAEVGLDMSVFADAQHLASWAGLCPGNHESGGRRMSGRTRKANRYIKRAMCQAAWAAAHQKGTYLSAFYKRMAVRRGHQRAVLALAHHMLVVVYNVLCRQEEYVELGADYYDQRNRPKVVSRLVKRLTALGYYVTLQDGGAIGGHGADVDQHLMAASWPRPKPPAVSAQAIDSTPVVDRSPIPNRKRGRPCKCAERGIVCSHGRSPEVNPMN

SEQ ID NO: 421418 - protein, 318 aa, unidentified
MNVIGLDISKDTIDVTLITAKGEIDYIKIGNSHEGFEKLIGWIKTKRVRKIAISMEATGVYYEKAAEHLSAVYTVYVINPLKIKDYAKSQFSHTKTDKADSKLIADYTKRHLDKLKSFSPSENPTLYKLINLLQQLKQQKHESQNRLHAAKDPFIRSTHESIILLLSKKIDETSKRIDSVIKQQKSLNAEYKNLQTIPAIGKDTAAILLRHLTDKTFETANQFVSFAGLSPKIEQSGTSVNKKGRLSRYGHRQLKRALFMPALVAYRINAFPQLVKNLEAAKKPKMVVIVALMRKLAKIAFYIHKAKTPFNKARHQTV

SEQ ID NO: 421419 - protein, 429 aa, unidentified
MQPGDIDVWLGLDVGKSSHHACALDHDGNTILDTPVDQDEKQLRRTIVKLQRRGTVLVIVDQPNTIGSLPLTVARDMGARTAYLPGDAMRKAAQLLPGGSKTDRRDARIIASTALRMPETLRDCEPDDETMAALRLLSGWDEDTAHELTRTVNRLRGLLLHLHPALERALAGDRIKSDTALGLLEHYKGPDGLRRAGAARIREYARRHGLKGTAITDAVADAIGEQTVTVPGTRAAESLIPQLVSDLRRLRDRRTDISRQVEELLADAPLLTVLTSMPGIAARTASQILLAIGGDIGRFKDAAHLAAYAGIAPVTRQSGTSIHGERPARGGNKRLKNALFQTAFAAIRLDPESRAYYDRKRAEGKRHNAAVMCLARRRCNVIYSMLRNGTLYQPGGTHTTTTTPPRTETTPAHAPRPRQDTTHPGTRRT

SEQ ID NO: 421420 - protein, 321 aa, unidentified
MDKEPESGDVYVGVDVSKARLDVAVWPSQQAFGDTNDAAGIARLAERIAALKPKIVVLESTGRLEVPAALEFGERGVAYRIVNPRQIREFARAMGKLAKTDRIDAVILSRWAESAKPEPKPLPDAERRELRALVTRRAQLIENLTREKNRLLGETVPHVRKSIKDSITWHERQIARLDKELDQFMKDSANFSGQSDRLQSVPGVGPVLTRMIIACLPELGTLNRYKIAALVGVAPLNRDSGKSSGKRFCWGGRIEVRCALYMAALVGMRHNPIIKALYERLRAKGKPAKVALVACMRKLLTILNAMMRDQTCWRQTSPAEA

SEQ ID NO: 421421 - protein, 362 aa, unidentified
MNKKKMTTTQDPKPLAPDQVDPCGTEVSAEELIVALCRKGVQEPLKSFPNTPEGHREIGRYLARPGRLVRVCLESTGIYGLDLALALAAQAGIQVMVANPRAIRHFAQALMERNKNDRVDAGVLQEFAARMPFEPWQPPSRPALHLCAVARRLEAITDLCTAEKNRLHASTATQALPAIICQDLKKSIRFHQRAAQRLTREALKIISTDSNLQERYTLLVTMPGIAQTSALRILAELVMISSDLDVRQWVAYAGLDPREYSSGTSVHKKARISKAGNRHLRRSLYMPALVAVRRDPHLRAFYEHLLASGKVKMQALVAVERKLLHAIFGMFKHQQAYDGTKLYRLPDRLAPASSAPVRTEAA

SEQ ID NO: 421422 - protein, 339 aa, unidentified
MLLYAALDLHSNNNFLAVINNEGKRIDHKKLPNDPKLILEALRPHQTETDGVVVESTYNWYWLVDTLMEAGYQVHLANPSAIQQYSGLKHVDDKHDAFWLAEMLRLGILPEGYIYPKEERPIRDLLRKRGHLVKIRTSLILSLQNIISRNCGFGLKVNDVKCLKEDRVHPLLEENEDLALAGRVSKETIDFLTRKIQAIEVVIVKRIELKEPYKYLLTLPGIGKVLALTIMLETGALSRFAKVGNYVSYCRKVSSRWVSNEKTKGKGNKKNGNKYLAWAFSEAAEFARRYHAEARAYYNRKMQKTNFMVAHSALAHKLARAAYYVMRDQVPYQPEKLFA

SEQ ID NO: 421423 - protein, 345 aa, unidentified
MESMYYIGLDVHKKTISYCIKDASGKVLREGKIAATRGELDNWMKTLPQPWSVAMEATIFTGWIYDHLLPHAAQIKVAHPLMLRAIAAAKKKNDRIDAGKIADGLRCDFLPECHMAPTEIRDRRRTLRFRHLLVRQRVQLKNRVSGLLMETGVSYNKQRLHKVGYFRELLSSNEEIHSNIRPLLKLSRDAIVRLQKTEYGLVSSLQRDPLLADRIKRLRTVPGVGPITALTWALEMGEVSRFPSIKQAISYCGLCGDEKSSADKVIRTPLSKQRNKHIQRVLVEAAKLAPRENHELALVYETEKQKGNANRATLAVARKMVAYLLAVDRGKRNFVPAEDHGAVAA

SEQ ID NO: 421424 - protein, 382 aa, unidentified
MAGTEPHAWGTDLMDDITFVGLDVHKATVCIAVAEGGRGGDVRQLGVFENRPEILSKVVSRLSKGGRRLSFCYEAGPCGYGLHRLLTGYGHECVVVAPSLIPMKAGDRVKTDRRDALMLAKLHRAGELTAIWIPDAAHEAMRDLVRARATAVRVLAKARQHLQGFLLRHERIYRGARAWTLAYRRWLSTVHFEHPAQQIVLQDYIHAVQEAETRRERLTQQIEELLPNWSMAPVVAALQAMRGVALIVAVTVVAEVGDFRRFANPRQLMAYLGLVPSEHSSGRSVRRGGITKAGNALARRVLIEGAWTYRMSARVSRKLHDRVEGLPAAVRDIAWKAQLRLCARYRRLAATGRPKVVVTTAIAREMVGFIWAIARLAQPALV

SEQ ID NO: 421425 - protein, 401 aa, unidentified
MESPIVSIDVSNGNSHYMCFIKNNKRFGKVKKIDHDIEGFKRLLEDIQKLEAETNEKVCAVFEATGVYTKPLERFLSKNSIKTYMINPLESARKRKEEIHNKKTDNLDPISISKVYYDKEEMMELKKKDETYNWLRKKNRLYEDQLNHLRKYKVTFQNQLSICFPGYLDLFKDGYSDIPMTILKKYPHPDLLKNKKAETVARYLEKNTCHTHKVSLEYALKIIEFAKKTYPGCEKDDVEVEIFKILLDKVIETQRECEKTLNEMITVASTLEEYRYISSIDGIGPNLAARIIAEIGDIEEFKSREALVAYAGLDPHIYQSGDQDGKHLKISKKGNKYLRCLLFLAVGCSIRGAKDNPVNRFYQKKKQQSNPLNSKAAKTACTAKLLKIIYGICKNKTTYER

SEQ ID NO: 421426 - protein, 485 aa, unidentified
MARKNRFRLPTVTEAMPVTNPRAAGIDVGSRMHAVAIPAHLSAEPCRTFGCTTPDLQEMAAWLCSVGITTVAMESTGNYWVQPLRILEAAGLHVILVHPEYARQAKRTKYSDLDDSLWLQQMHAYGLLPASFLPPALFQRLRTLWRHREKLIGLQASCLQRIQNTLELMNVQLHKAVTDISGLTGLRIIRAIVAGEHNPAQLALYRDPHIHCSFDDLVKALTGDYREEELFVLRQLLAGYDFYQQQLDACDAEVDAFPHTVAASLPPPVPDEPAPPPVPAEPAPPAPVPAVPARGKASVRPASALRKRPSKHEPTRYDWHALLTKLCGVDATRICGLSVLLVLAIIAEIGTDLTPWESVKRFTAWLGLAPDHRVSGGKVLKRHTRRGKPHAAHPFYVAALAAAKSQTPLGEFFRYQKARIGGAKALTATARKIAELYYSLLTYGPDFVEHGQQVLQHQSQERKRRKLARLARELGVTIVEPAVAA

SEQ ID NO: 421427 - protein, 423 aa, unidentified
MSYRIAGIDVHKKMLAVVVADVEVHSEYEFERRRYGSNPEHLRLLAEWLMEQQVEEVVMESTAQYWAPVWGALERYWKPTYQKREGAGPMSGTLHLAQAQSNRGRRGRKKDFPDAERLVKRLVANELILSFVPDAEQRLWRTITRRKYQLTRDKVRLQNQLEALLEEVHIKLSSLVSDLLGVSARRMLKALAEGETDPTALAAMAHKLLRATQAQLCDALGACAELKPIYRRLLNMSLEQLQVIEQQISQLDQEMANLLSPHQDAVKRLAEVPGLGVDSAQQIIAEVGAQAATFPSAKQLASWVGACPGDEESAGVSKGHRSPKGNRQMRRILNQAANAAAKAKGTIFEIVYRRLVSRLGHNQTIGAIAHRLCQLIWIILHRNVRYEERAPSVNARSRQRRTNKMIRELRNLGYRIEPVAIPA

SEQ ID NO: 421428 - protein, 355 aa, unidentified
MTASYDYHIGVDYHKSNSHLVVQDSSGKTLRSGRVKNDRQSLGGFLEPYRENSHAVVEATRNWMVMYDWLDDICDDVVLAHPLKVKAIADAKIKTDKIDATVLAHLLRADLVPEAWAPSDKARELRIALRERMFYVRLRTMTKNRIVTVFDRYPEQAALLKKLADLFGSAGRVQLAELKVSPIDRIQIDRGLAFIGDINERIKQSEATIRAMTKANADVKLLKTIPGIGEFFARLIDAEVDDIGRFRTPKKLAAYAGLVPSTYSSGGKTYHGKIIKQGNKWLRWAFVEAVAPAIATDPQLRAQYEHLKNRGTNKARVAIARKLLTIAFHILRDQRAYQRRGTSTMEGASMISRSS

SEQ ID NO: 421429 - protein, 362 aa, unidentified
MRIIGCDLHARQQTLAMLDTTTGEVVEVSLKHEGNNVREFYSSLPRPVRVGIEATGSMQWFLNLMEELGIECLVGHPAQIRAAAPRKQKNDRRDAELILKMLVEGRFPAIWLPSKELQDLRALLRHRHQWVRMRTRIQNALQSIALANGLRRGTALWSHDGQSRIASLPLAPHTAYRRSELQAMYEKFEAEIEKLNQRVEEQACKRPGARLLMSHPGVGPITALASEVFLGDPTRFADSKALASYVGMIPREYSSGGRQRLGGLSKQGNPLLRFLWGEAGAHAARKDPELQRFYRRKLVQKGLGKASVAVARKLGIRLWIMLRDQIEYNEFCRRGQKQQKSSDACVGMPETRYGAKSHRPID

SEQ ID NO: 421430 - protein, 483 aa, unidentified
MSKRSQTMKKHKKTKPKPEAPKPLHEPEPDAAGIDLAATEIWVAVAPDRCELPIRRFGAFTQDLMAIVAWLLECGIRTVAMEATGVYWIPLYQLLSDAGIKVCLVNARHVKNVPGRKSDVRDCQWLQYLHSVGLLRASYRPDQAVCSARSIYRFRQNLLTQCAEHLQHMQAALDQMNIKLHHVIDDLSGVTGMAIIGAILNGEREPLRLAKYRDTRIKATEETIAKSLEGDWRSEHLFVLRLAWENGKHVQEQIKKCDQELMEYTRQLEASTIVAKPIVPIKIVSLDAEPGAPELNAIPAVRPSKPRRKTSKNEPDGPWREELHRFFGVDLTVIPGISILTGITLMTELGNDLSAFKTPQHFSSWLCLCPDNETSAGKVLHNSTRCSQNRVRQALRMAASSLHHDKSYLGEKYRRLRAKLGAPKAITAMAHKIARIIWYLITHQVPFDMSIFAAIEQANQKRRLKGLYSVARQMGYQLIPIAA

SEQ ID NO: 421431 - protein, 344 aa, unidentified
MQITTIGLDLAKSVFQVHGIDAAGQVMVRKSLRRAQMLPFFAKLPPCLVGIEACGTSHHWARELIKLGHEVRLMPPAYVKPYVKRGKTDAADAEAVCEAVTRPTMRFVPVKSPEQQAALSMHRTRDLLVKQRTQLINMIRGLLAEFGVDIPKGMERALLMARQIVDGKAPEVPIEAAKIVATLSQQALDTHVRLREIDHDLAVWLRGSDVARRLMTIPGIGPVGATALAAAVTNPHQFRSGRQFAAWLGLTPLQKSSGGKERLGRISKMGDKYLRKLLIVGMTALVRRAKYNPGKIDPRLADLLTRKPTRVATVAMANKTARVIWAIMARGETYRPGHRPALAV

SEQ ID NO: 421432 - protein, 424 aa, unidentified
MNCNQNFKISQVTEGTLVLGIDVGSNTHYARAFDWRGLELSKVFKFKNSFEGFQSFVLWVNDLCCKYNKSKVIAGLEPTGHYWFSLGELLKENNITIAIVNPYHVKQSKELDDNLQTKNDSKDLKVIAKLVIDGRYSFPYIPEGIYGELRVADKLKNDITQQIISIKNKIHRWLSIYFPEYEKIYSLIDSKSGFLLLKETPLPKDIVELGSEGIVERWKQTKLRAVGLDKAKKLEEAAKKSIGCKNITSSARFEIKLLIEDYEYKQNQLNSITEELNKLCEKIPMIKEIAEIKGIGIATAISFVAEVGDIRRFKSAKQVQKYAGLALKENSSGKHKGLTRISKRGRKKLRTILFRATIPLIGFNKEFSSIYNYYIERKDNPLKKKQALTAICCKMIRIFFTILSKGIKYDETKMLHDIKRPVAA

SEQ ID NO: 421433 - protein, 356 aa, unidentified
MGGYYLGLDIHKRFSQVAVMDQQGVVVEQKRVEHVDREGLREYFRQYAGSEVALEATVGWAWLADELEALGLKVHLAHPAGVPLIARSRLKDDQVDAKVLAQLLRTQFLPECYLAPPAVRERRRALRARLGLVQMRTRLKNRIHGALLSQGLFSELTDLFGKKGRAWLRTLELPPVSRKNVDRWLLLLEVINQLLGEAESDLRRWLGDNQQVKLLMTIPGIGQIIAWTLFAEIGEIERFPRPSKLAAYAGLVPYTRQSAGRLWQDRLCKQGNAFLRTAMVEAAWVAVRCDPQWRARYESLRRRMDAQSAIVVIARKLLQVAFLVLSQRRAYRPFPLRRPPRLSTLSCAPGSASRAP

SEQ ID NO: 421434 - protein, 364 aa, unidentified
MKTLHYVGMDVHKETIDVVVFRGDERGPFLERTILNQVGVIRKLFKKLMEGGSVIACYEAGCMGFGLQRMLEEMGVASIVASPGRVPRRPTDRVKTDRRDARRLSEQLRARTLEAIHIPSRDDEAVRDYLRAREDVRLELVKTKQRLQKFLLRHGYVYESTRYWTGRHDRWLRGLEFDKGMLKEVFEEYYFMIGELTEKLRLMDRRIEEIALSEPYAVRVGRLRCFKGIDYLTALSIICEVGDFRRFSHAESFMAFLGLVPCEASSGEKRRQGGITKSGNTHLRKLLIESSWHYRYRSAPSKRLTDRRKGQPAEIIAYADRAMRRLQWKFLRLIMKGKTKQAAVTAVARELAGFVWGMMVGQTA

SEQ ID NO: 421435 - protein, 366 aa, unidentified
MTSVSSAAGLIHLGMDTSVKEIVVAVLRPGEEVPVVDRIPGDEESVRRLIGRFPDRRLLSACYEAGPGGYELHRLLASMGVACDVVAPSLIPKGSSDRVKTDKRDSVRLALTHRAGLLTPVRVPSPAEEAVRDLVRARGDLLDDRKRMQQRLNAMLLRHGRVWRGGKKWSYAHRAWVDRQVFDEPALAEAFSLYRGGLEAREAELTAAGARLAAWAAREPLAGPVARLGCYRGIAQLTGLTLAAEVVDWRRFASARAFMGFAGLIPTEYSSGSRSRRGHITKAGPEGVRTALIEAAWAYRYRPAIGATLHRRQAGQPPETLARSWKAQQRLHAKYQKMTARGKPPGVAVVAVARELAGFVRAEMIT

SEQ ID NO: 421436 - protein, 395 aa, unidentified
MLPLVFVGIDVALDKHDCCILGSDGAVLREFQFTNDRNGFERFLSTVTGFCAKRDLADAKVGLESTGHYSINLTNYLLAKRLSVKIFNPLHVNLLRKAQSLRKTKTDRSDARFLAKLLFSDDSKPYSQPLYHISELKALTRNRYRLVQMRSKLKVSISRLVTVLFPELPNAVYSINQKSSYALLLEFPTAKSISGAHITRLTNLLSANSHGRYKRDKALEIRELASRSIGLDSRATGFELRQAIRLVQGVQEEIDTLDDEIGKMMREIDSPVLSIPGVGYVLGAILLAEIGDIENFDNPAKLLKFAGLEPSVYESGKYKASDTPMVKRGSKYLRWALLQAARLVAYRDKTFAAYMAKKRGEGKHFFVATSHVAKKLVRVLFHLLRSGDPFAPIPL

SEQ ID NO: 421437 - protein, 349 aa, unidentified
MNVEHYIGFDVHKKTVSYCVKASDGTILDEGKVAAKRGMLREWAAKRTQPWHGAMEATLFSGWIYDTLRPFAVELQMGHPAMMKAIGAAKKKSDRLDARKISDLVRCNLLPTCYVAPPEIRELRRILRYRNLVVAQAVRLKNRMGGLLMETGAEYNKQRLHGEKYFSELLDQLKEVPESVKDLLRLSRGALDLFERTQRQLLVRLENDPLLAERVTRLQSIRGVGIVTALTWALEVGDPRRLSSIARAVSYCGLTSALLSSADKQQRGPISKQRNEHLQTVLIEAAKLAPRWNPQLAAVHDRELQRGHRNRATLAVARKLVAYLLAVDKSGKPFQTASTAARPSITSAA

SEQ ID NO: 421438 - protein, 421 aa, unidentified
MKGARGIKVGVVKEGTLIATVDIGLTTNTGYCTTLDGRDTRPFKFDNTKEGFEKFWCLIMANKNRLGCDEVLVGYESTGPYAEPLVHYLANKQVKIVQVNPMHTKKMKEVNDNSPLKTDDKDPRVIADIIRLGHTLTIIVPEGEAAYLRRLNNARERHVGEQTALLNQLQQLVFLIFPEFKRVLKNMKGKTAQYILKRYTTPERIATLSKEVLGEQMRKRSMGQFGVPEAESLIGLARETVGVKEGRGGIFLDIRHILMQLEAEERFISEIEAEMGATLERIPCSDRLLSIKGLGTVSVAGLIGEVGDFSKFRTQSEILKLAGLDLYEISSGKRKGQRRISKRGRGLLRKILFYAAIQMIRKNGIMYDYYARLTGRGMERMRALIAVARKLLRIIHALVRDNRDYVGQYQAGERRMIEMAA

SEQ ID NO: 421439 - protein, 344 aa, unidentified
MKITTIGLDLAKSVFQVHGVDASGQVVIRRSLRRGQLLPFFARLPSCLVGMEACGTSHYWAHELIKLGHQVRLMPPAYVKPYVKRGKTDAADAEAVCEAVMRPTMRFVPVKSPEQQAALSMHRTRDLLVKQRTQLVNMIRGLLAEFGIDIPKGLERALLMARRIVDGEAPDVPMEAAKIMSTLAQQALDIHVRLREIDRDLLVWQRGNDVARRLMTIPGIGPVGATALAASITDPHQFRSGRQFAAWLGLTPLQKSSGGKERLGRISKMGDKYLRKLLIVGMTSLVRRAKYNPKTVDPHLADLLARKPVRVATVAMANKTARIVWAIMVRGETYRAGHRPALAT

SEQ ID NO: 421440 - protein, 325 aa, unidentified
MIDGILGIDVSKNTLDASMSSCNNRVRARSFANSSDGWCHLLDWLTTQKIRRVHACMESTGRYSLGIACALYEVGHIVSIVNPAQIRDFARTKLGRNKTDGVDAAHIREYCELFKPKPWAPPSVAHRRLGELQTIRSGIVAGVTEWRNRKSSGMVDAVAQSLADVTISHFTSQLEAVDEAIAQTIDNDWDLRRKRDLLLSISGVGETLAGVMMAELPGPDVLRSSAEVVAYAGLNPRQHQSGTSIDRVTRISKIGNAVLRAALYLPAMSAMRYNPAIVALVARLKSRGRLKPKQIVVAAMRKLLVLCFGVLKTGKPFDPAIAMGC

SEQ ID NO: 421441 - protein, 309 aa, unidentified
MEVFVGIDVSKDRLDVHVLPSGEGFSVTHEAEGVSGLVERLKGLSPVTVALEATGGFEVVAAGMLASAGLPVVVVNPAQVRAFAQALGRRAKTDPVDAWVIARFVEATRPPLRPLAAAEQQLLSDLATRRRQILQMLTAERQRLSRTLEPRLKKSLMRLIRALEKELGQIDTDIDQAVRASPVWRRKADLMQTVPGVGKLTARALLAEMPELGSLDRRQAAALAGLAPFTRQSGRWRGKSFIGGGRPQARGALFMAALSASRFNPPLKVFHQRLIAAGKPKLVALVAVARKLLLIINAILRDQTPWKAA

SEQ ID NO: 421442 - protein, 345 aa, unidentified
MQITTIGLDLAKNVFQVHGVDAEGTVVVRRKLRRTQVREFFVGLAPCLIGMEACGTAHFWARELIAMGHRVKIMPPSYVKAYVRRGKNDAADAAAICEAVMRPHMRFVPVKTEEQQAALMLHKTRELLVRQQTMLINAIRGHMAELGMIAPQGAAKVKDLIAVIQESEDQSIPALARAALQPLVRQLHSLDEQVETFDREIKAWHKTNETSRRLATIPGIGILTAAAIAAMVPDPSFFKSGREFAAWLGLTPRQNSSGGKDKLGRISKKGNTYIRRLLVTGATSMLRYARAKTAAGADWVNGLLQRRPARLVTVAMANKTARIAWAVMVKGENFRVPVRPMTEAA

SEQ ID NO: 421443 - protein, 359 aa, unidentified
MEQIKELDFSGQRIWVGIDVHLKRWRVSIMVGDLYQKGFSQQADVQQLINYLHKHYPKGDYVCCYEAGFSGFWAYEELVKAGIACKVAHASDIPTTDKEKRQKTDPRDSRKIVRELSKGGIEGIYIPHREALQARSLVRARYKIAKDSQRAKNRIKSHLYFYGYHRGIPAELGYWSKRYINYLSELASTNRDQGLVLLIEELNQLRQLQVRALKQLRQLSRCEPYQELVVLLKSVPGVGLLTAMVILTELIDINRFKKLDHLCSYAGLIPQTSSSGESQRVGSMTKRGNTQLKKALIESAWVAIQRDPALALAYQKAKNRYASNDSQAKNKTIVKIARKLLNRIRFVWKNRQEYETGKP

SEQ ID NO: 421444 - protein, 332 aa, unidentified
MTNANATDCIFAGIDVSKCKLDLARTGIQQVATFSNDPAGITQLVEVLRQTPPKLVVVEATGGLERPLLDALLEANLPVHLANPKHVRYYALSLGILAKTDPIDAHVIERYAAQLSPRLLQKRSEKQTELEAMVTRRRQLLNLRTQQGNQLEATRSKLARKSIQAVLKVLEKQISSMNRQIRKLIESDDDMDDIDKLLRSVPGIGNVASATLLCEMSELGTLDRRRAAALVGVAPFNHDSGKNKGKRVIRGGRASVRNVLYMSALTAIRCNPIIQTFAGRLAKAGKLPKVIIAAAMRKLVCIINAMVRDGLSWDQLDIVKKFNSLKSVPSTI

SEQ ID NO: 421445 - protein, 422 aa, unidentified
MSNVQSTQSPAVLVAIDIAKLRHDVLIEAPGWKRRKRLVLLNTAVEFRRLADYLHSLQMPVHIAFEATGNYHRPLAHFLLSQGFHLELIPSLAVARTREAMHNSWDKNDPKDAQVLLHLLRTGVTQRYHDPLVNHTHDFQELSLTYAQVSLEKTRMQHRLLTHYLPLYFPEIERHYHASRSLWLLDFLQAFPTPATITSLNREQFVQSAWPIIGRKVAKRRLLEDIYHRAQCSIGLPVAEDSEAVAMFRVLLNEMSRLCKLRQELEQRADGYLGDNDDFRRLKQIPGIGPILALTILAEAGDLRRFRHHRQFLKFCGLDLATQQSGQFRGATKLSKYGNARLRCALWMAGTIAVKQRENSFREKFERYIRKDPLSADRKRMAYVAVAAKMARVVYGIIKSGTEYRCFHEAAAPSGRAVSVGP

SEQ ID NO: 421446 - protein, 363 aa, unidentified
MSNISTTTDRNKLTVGLDVGDRYTQICVLDENGEVMEEGRVATSPRAFQQRFAALPPARLILEAGSHSLWAHRLLGQLGHEVIVANPRMLRFIYGNDSKNDRADAGYLARVGRLDPDLLRPITHRSEESHAHLVLLRSREILVRSRTRLISHARGLVKPFGVKLPHCGAQVFATKVREHVPDILLPALGPVIDIISILTEQIGDLNDKIETLARESYKETALLAQVPGVGTLTSLAYVLTIEDPGRFSRARAVGSYLGLRPRQDESGTLKPQLRITKAGDSFLRHLLVECAHHILSANSQDTDLKRWGLKLAERGGKAAKKRAAVAVARKLSILLLRLWTTGEIYEPLRGAPGRGEPELVPSS

SEQ ID NO: 421447 - protein, 415 aa, unidentified
MDEQTKSSAGLDWAKDEHVLCILEEPSGRVLLERRFTHQEQAINELCRELVHRGVERLAIERPEGVLVERLLEAGIVVIAIHPNQLKASRPRFRASGARSKSDSFDAFCLAELARTDHHRFRALIPDSDETKALRALTRARENLVGTRVALANQLRAELEAFWGGAAVLFSEIDSSISLAFLKRYPSPKDASRLGEKRLESFLSKNRYWGGKSVLELLERLRKAPKGRAGKAEIEARREAVLTLVGTLEALVERIKHLEEKIAKAVRAHPDGEIFLSLFVSHKSTLTAASLVAQIGDQRGRYPTNEALAAAAGMSPVAVESGRRKVASFRRACDKRLRRALATLAESTLHHNRWARDIYLRARERGCDHAHAIRILGRAWVRVIFRMWRDGLPYDRARHGGLQRLRSAEGLPQGV

SEQ ID NO: 421448 - protein, 339 aa, unidentified
MREVSTIGLDLAKNVFQVHGVDAAGETVVRRVLRRARVVVYFAQLPPCLIGMEACGTAHYWARELGKLGHRVKLIPPAYAKAYVRRNKNDAADAAAICEAVSRPSMRFVEIKSEAQQAAAGIHKVREMLMKQRTMLINALRGLMAEFGIVVGTGTRHVGELTAILVDPEEHRIPALLKDGLRRMAETLRGLERQLQGIDKQIVDWGRGNTTCRHLITAPGYGPILSSAMAAIVVNPAVFRSGRDFSASLGLVPRQDSTGGKVKLGPISKRGNGYLRRLLVNGAMSVLNSKRAKQDPWLVKLLANKERKVAAVALANKMARVGWALMMRQEDFRTTSVAG

SEQ ID NO: 421449 - protein, 344 aa, unidentified
MEYFVGLDVSLRSCALCVIDGRGKVFMERELRCEVDDIAACLEAFPHPIERIGFEAGALSQHLFFGLQDKGFDIVCMEARQVSAALSAMRNKTDKTDAKGIAQILRTGWFSPVHMKSREAHGLRALLSTRKALLKKTMDLANEVRGLLKIFGVRLPRTVKHGSFDGLVRPMIEMDEVLAHAIIPLLDARAALFQHYLELDRRVKRAASQDEVCMRMMTVPGVGPIAALTFKAAVDDPSRFKRSRTVAAHFGLTPRRFQSGEHDNPGRISKAGDRDVRATLYAAANALLMRTMAGSQIKSWGMRLMRTKGRRRAVVAVARKLAVLLHRMWIDNTEFRQEQVGGKA

SEQ ID NO: 421450 - protein, 315 aa, unidentified
MKTRQYIGVDVSKAFLDVSMDGETALRYTYDEAGLTRFLMEITRATAHACVVMEATGGLERALVIALSEAQIAYCVVPPDRVRYLAKALDWAKTDAIDAKLIARYGQSAMPVPQRMTDKHHRALVDCRARRKQLVRMMTSEKNRVQRNNALEASHQRILNALTAELKTIDIQIAELIDSNARVKRIHDTLMDVKGVGQVTATTLVAELPELGTLSGKKITALVGLAPKNRDSGTLKGKRFIQGGRAAVREALYMATVSAIRHNALIKPVYLRLIDNGKPAKVAIVAAMRKLLIYLNVLIRDNISWSELKLNNTKA

SEQ ID NO: 421451 - protein, 418 aa, unidentified
MEVIHPRCAGLDVSKRDAKVCVRVAGRGRAGTKSSVTTWSAMTNQVLALREHLIAERVTLVVMEATSDYWKPFYYLLEDGPFELMLVNARHVKNIPGRKSDVSDASWLAQLGAHGLVRGSFVPPAPIRVLRDLTRTRTLITRARSAEVQRLEKLLEDAGIKLSSVASDITGVSSRAMLEAMIAGQDEPAVLADLAMRRMRSKIPALTEALTGRFTEHHRFLARVHLDLIDQHTAAIDELTARIEVVITPFRRVRDLLITIPGISDGVADVLIAETGADMTRFPTAEHLASWAGTSPGSNESAGRVKSTHTRPGDPYLKGALGVAAMSIARHNPTSGYLGAKYRRVASRRGPMKALVAVERAILVAVWNMITTDTTYQDPGADYFIKRNPTRARQRAIDQLTKLGYDVTLSPMESAIAQ

SEQ ID NO: 421452 - protein, 387 aa, unidentified
MAAVVIGVDPAKRSNTIEVIDAAETVLLTARFENTREDYRRMLALVKRWPQRKWAVEGATGVGLGLAQRLVADGERVVDVPSKLSTRVRAIDTGHGRKNDPTDAHAVAVVGLRTAGLREVTVDDEAVVMRLLSQRRRDLVRSRTQAVNRLHQALMQLIPAGARKKLTVDKAKELLATVRPRDAAGKARRQLAADLIDDVAVLDRKLDAVDKRITEAVKAAATTLTDIVGVGPVTAAAIIGEVGDVARFTTADRFASYTGTAPLEVSSGDVVRHRLSRAGNRRLNNALHVVALSNKRYDPRGKAYYERKLTAGKGKKGSLRCLKRRLSDVVFRTLVEDRARANPGGQMGATLTASAVDQIPKANTSDKPQPGFTTEATPTRRPAKAAS

SEQ ID NO: 421453 - protein, 350 aa, unidentified
MLIIGCDYHPGFQQIACVDTDTGELSEHRLVHREEAEQFYRKLQEQKSKVRVGMESSGHSRWFERLLHELGFELWIGDPAEIRTKRVRKQKTDRQDAQFILQLMLENRFPRIWVPDAENRDLRQLLWHRHRLVQMRTRVMNQLHVVALNEGLRRKKALWRPAGRNELESLKLAPWASRRRQDLLDLLDQLTPKIQELTRALEQEVESRPVTRRLMTHPGVGPLTALAYELVIGTPERFHCGKQIASYVGLVPREESSGDRRRVGHISKQGNVLLRFLLVEAAQVTVRSHPAWRSTFFHLAMRRGRKIAKVAMARKLAVHLYWIWRQGLDYGQLQKLGSHAGEPGNRHGVQ

SEQ ID NO: 421454 - protein, 324 aa, unidentified
MKQAHSELFIGIDVCKDRLDIADDSGSPIWSVANDDAGVSTLTARLKSLKPALIVMEATGGLETLPYAALTAAGLPSVVINPRQARDFAKAVGKLAKTDAIDARVLARFGAAVKPAVRPIKDDKAQELAALVTRRRQLIAMLTAEKTRLKQAPKWIRKDIKAHIQTLEQRLLKLGAEIAKNIKNTPGWKEKDDLLKSVPGVGDVLSMNLLANLGELGTLNRREIATLVGVAPLNRDSGRCRGRRMIWGGRAEVRAALYMAALSASRYNPVIKAFYQRLILKGKKPKVALTACMRKLLVILNTMVKNKTTWNPGQFYILDLNHGC

SEQ ID NO: 421455 - protein, 370 aa, unidentified
MDERIKFFVGLDAHKDSIAVSACEAGREPARFVGTMGPDVNGLLKLLAKAGDPAQVSVVYEAGPTGYGLHRELCRRGYRSHIVAPSLIPRRAGERIKNDRRDCLRLAELSRAGELKAIWVPDEAHEAMRNLWRAREDAVGMRLKTRQQLQAFLLRHGRRYPGKTNWTKSHERWIAEQRFDHDGDRIALAEYQLAAQAAEQRVERLTTALTEAAKGWRFEPVVAALRALRGIDTVCAIGLVTEIGDISRFGTARQLMAYLGLVPSEHSSGNTVRRGSITKTGNAHARRLLTEAAWSYRFPARMSQQLRQRSCDLPEPVRNHAWKAQQRLCGRFARLSSRGVQVNKVCVAVARELAGFVWSIAHQASRAQTH

SEQ ID NO: 421456 - protein, 428 aa, unidentified
MNCNTQNAKIASITEKTLIIGIDVGSETHFARAFDWRNYEYSRKPLAFSNNEAGFMEFKAWMEDIAEKNGKDVVIPGMEPTGHYWFALGAYLQDNGMRPVHVNPHHVKKSKEMDDNNPSKNDRKDPKTIATLVNEGRFSYPYIPTGIYAEIRSLSNLRFQTQEEITRIKNRIARWFSIYFPEYKDVYRDLEAVSGMMILKTASLPADIKKLGVEGVNKIWREAKLRGAGLKRAKTLVAAAEHSVGSQEAPDCARLELKNLLNDFALYNGRLEELLQKIQEKLSEIPYIDKLLEIKGIGLITVSGFIAEVGDIRRFDNPKQLQKLAGYAIVKCSSGKHEGESRISYRGRKRLRYVLYEAAISVIGKNAEFKEIHNYYQTRTENPLKKMQSVIAVACKVLRVFYTILTKGVDYDGAKLMSDIRRPQLKAA

SEQ ID NO: 421457 - protein, 410 aa, unidentified
MEVLHLRCAGLDVHKKTVVASVRLAEENKVTTEVKTFATTTAGLLELSDWLSANDCTHVAMEATGVYWRPVWHVLSDGEFQLVLANAAHVKNVPGRKTDVGDATWLAELLAHGLVRASFVPDGQTQELRTLLRTRKQLVRERSRHTQRIHKVLEDANLKIDAELSDMLGKSGRAILAALVAGETDPVRLAALAHRNVKSPQAKLAEALRGTVTSHHRFLLKLHLQQIDGLDASLGSLDREIEANLAPFRVAVDIVSTHPGVNELSAEAIVSEIGVDMSRFPTAGHLLSWGHLCPRNDESAGKRRSTRLRKGGRWLKSTLIQCAHAAKNKRGSYYEAQYLRLRSRRGPQKAICAVAASILTAIYHMLQNGTVYQDLGADHFSRRSKDAHARSLLRRLEKMGYAVQMTPVVV

SEQ ID NO: 421458 - protein, 379 aa, unidentified
MKNDLLFVGLDVHAQSITIGLAPGDGTQARLYGGIAHDLHALEKVFAKLRKAHPGVELRVCYEAGPTGFVLARRLGQLKVSCTVVAPSLIPVRSGERIKTDRRDALKLARLHRAGELTAVHVPEASDEAMRDLCRARTDAVQDLRRGRAQLKAFLLRNGYRYTGKSAWTEAHRRYLRELVLPHPAQRVVLEDAIAMIGGAEERIARLEEQMAALLPSWPMQPVVAALMGMRGFALVGAMVLVSELGGAWRFAHPRQLMAYLGLVPTENTSDQKRRQGGITKTGNSHARWLLIEAAHHYRLSPKVSKELSVRQQGLSREIKACAWKAQTRLHQRMMQLQARGKQRNKVTVAVARELVGFVWQIFQLMAPRMGPEVAAAKP

SEQ ID NO: 421459 - protein, 430 aa, unidentified
MKSNTQNAKIEAITEKTLVLGIDVGSEMHYARAFDYRGIEYSKKPFKFSNTEAGFVTFKEWILDLKERHEKDKVVPGMEPTGHYWFNLGKFLQDNEMKPVLVNPHHVKKSKELDDNNPTKNDRKDPKVIAGLVREGRYMIPYLPDGVYADLRTASNIRFQLQAELTRIQNRISRWFNIYFPEYKTVYGKPDAKSGMLILKAAPLPEDILTLGIDGVNQIWRDAKLRAVGKARAKTLIEAAEHSVGSKEGAVSARMEIRMLLEDYESRNTRLQEVMVLIEELIRKIPMAEKLLEIKGVGIRTVSGFLAEVGDISRFNNPKELQKLAGLALVENSSGKHKGETTISRRGRKRLRYLLFEVAMSLVSKNQEFRELHNYYITRRLNPLKKMQSLMAIAAKLIRVFYAMLTKGVDYDPKKMVSDIKRPAVYLQAA

SEQ ID NO: 421460 - protein, 371 aa, unidentified
MTEAVKYIGLDVHKETIAVAVADGERGGEIRYVGTVPNEDDAIRKLVKRLTGSGATLSVCYEAGPCGYGLHRLLTKLGQSCIVIAPSMMPRRPGDHVKTDRRDAMTLARLLRAGELTAIWVPDEAHEAVRDLIRARRSAKEDATGAKQTVKSFLLRHDRRFGGKAAWTKMYWRWLSEQRFDFPHQQLAFEEMQKRVLEAQARVNRLETALGDAVEGWRFAPLVRNLQALRGIQLVSAATLIAEVGDLTRFDNPKQLMAYVGLVPSEHSSGARTQRGRITRAGNGQARTMLIEAGWAYRLPAREERRYRERVADLSDEIQAIGWKAQVRLCQRFRRLAATGKPQPKVTTAIARELVGYAWDIARRVSPAVPG

SEQ ID NO: 421461 - protein, 345 aa, unidentified
MTQYKRIGIDTSKAIFTLHGIDQEDRPILRINLRRAQMIPFFKKVPPTDIAMEACGGAHYWARVLIALGHKVRLIPPQYVKPYVKRGKNDRNDAAAICEAAGRPGMHFVPVKSVAQQAQGMVLKVRESLVGQRTVLVNALRGHAAEFGVIAGKGLGKIGPLLAAVEQEVVIPSAAKDMAALLGKQIADLDTKIKEIEVNLIATHKANPVSQRLATIPGVGPITALTLAIEIDPAAFESGRHLAAWAGLTPKENSTGGKQRMGGISRAGNERLRVLLVVGATSVINAAMKPGSKLMTDWLRALLHRKPRKLAAVALANKMARVAWALMARGEVYRRSDAITGAAAA

SEQ ID NO: 421462 - protein, 334 aa, unidentified
MDMALTAWLGIDIAKQKFDVALNWNTRRRAKVFRNDAEGWQALLRWLKDLGIDQVHACLEATGRYGDDLALHLHDAGHRVSVVNPAQIKHFGRAKLGRNKTDRADAALICDYCRLFEPAAWTPPSAALRQLRDLVRTREALTASRVEWTNRRNSGQGSAAADAAMAGVIARLEAEIVALDQAIEDAIGQNEDLRARHDLLISVPGIATHTAAVILSEMPGPEVLRTAREAAAYAGLNPSHRQSGSSLDGPSRISRIGNATLRAALYFPALAAIRWNPLVAALRQRLKDQGRLKPKQIVGAAMRKLLHLCFGVLKTGKPFDPNHASATDKTAATT

SEQ ID NO: 421463 - protein, 358 aa, unidentified
MQAQRKELNFEGQSIFVGIDVHLKSWNVSIFTENLHHKTFNQPPKAEVLSEYLKINFPNASYLSAYEAGFCGLWVHYKLKELGVNNIVVNPADVPTTQKEKMRKSDPIDSNKLGRSLRSNELDEIYIPRPETLEDRSLVRIRSTIVKDMVRIKQRIKSMLYFYGIEYPVEFQNSNTHWSKKFLKWLKEIELRYPTGTAALGLLINEAELQRKLLLEATTKIRVLSKTEQYSKNMELITNVPGIGLITGMEFLTEIENINRFENSDKLAGLVGIVPNCSKSGEISKDGEMTSRGHSFLRKGLIESSWIAVRVDPALSLAYYNYCKRMEPNKAIVRIARKLLNRIYSVLKHQKKYVTGIV

SEQ ID NO: 421464 - protein, 354 aa, unidentified
MIIIGCDYHPGFQQIASVNTETGELDERRLNHREEAEEFYRNLKVRSLRVRVGMEASGHARWFERLLIELQFELWIGDAAVIRTKRVRKQKTDRQDAQLLVKLLIEDRFPRIWVPDAENRDLRQLLWHRHRLVQMRTRIMNQLHVVALNEGVRRKKALWRPAGRSELESLILAPWAGRRRQDLLDLLDQLTPKIQGLTRALEEEVEKRPVARRLMTHPGVGVLTALAFELVIGTPERFHCRKQIASYVGLVPSEESSGDRRRLGHISKQGNALLRFLLVEAAQVTVRSHPQWRSKFSIWPCGAGERSPRWRWLGSLRSTCTGCGVRVGTMSSGRSSVRTRESPEIAVVCSRSPA

SEQ ID NO: 421465 - protein, 292 aa, unidentified
MAATTGQNAIAVVGIDIGKNSFHIVALDDRGAIVLRQKWSRSQIEVRFANMPPCLIGMEACVGAHHLSRKLKAFGHDARLMPAKYVRPYSKGQKNDFRDAEAIAEAVQRPTMKFVTTKTAEQLDLQALHRVRERLVSQRTGIINQIRAFLLERGIAVRQGQRFLRTELPRILATPPDVLSPRMVRVIEGLTEDWRRLDQRITELSNEIEELAKRDPACVRLMGVPGIGPIICSAMVAAIGTGDGSSKGRDFAAWLGLVPKQISTGDRTILGSISKRGNRYLRVLFVQAAWVG

SEQ ID NO: 421466 - protein, 344 aa, unidentified
MVTTIGIDPHKATHTAVAINDAEQMLGELTVPADRYQTARLVEWTSQLDGDGRLWAVEAAGGLGYLLSQQLIGYGEHVIDVPAVLASRVRVLSSGKSDKNDPNDARSVAIAALRQPGLARVRPEDHAQVLRMLAKRHHELTSLRTQAVCRLHATLMQLRPGGMPKRLSTKNASRMLGGLRSLDAVGEQRRLMARKHLGDIRRLDRDIAANKTLIRQAVTTADTLVTDVFGVGPIVAAFLIGYSGDPARFVSADRYAAYNGTAPIEVSSGGKTRHRLSRRGNRKLNHAIHMAAVTQIRFDTPGRVYYDRKIAEGKTKKEALRALKRRVSDAVYRKRVTNQQPATS

SEQ ID NO: 421467 - protein, 356 aa, unidentified
MDKVIREGAVRVGVDLAKRVIQVHAVDRTERVLTSRALPRDKFVEWCVRLPAGCIVAMEASSSAHHWARKLAALGLDARIISAQLVEPYRMEGASGKNDANDAAAICEAASRPKMRYIPVKSVEQQSMLCVHRLREGLKEDRTACINRIRGLLAEFGLVFPKGPRELKAVLSNVLEDAGNELGTLARLTLQRAQAQWRELDEHLAWCDERIDAHGRQNPDVQRAATLTGIGPVTASAAIATVGDFKQFKNGAQFGAWIGLTPRQRSSGGKNNLGGITKRGDTYLRTLLVQGAKSALMTAHKRQDKISSWVVALRERSGWQKAVVALANKNARILWAVMTRGEAFDPNHLSLKPTGT

SEQ ID NO: 421468 - protein, 466 aa, unidentified
MVLRMKHTSNKKKTPEEGSSNSLPVLFPDTAGIDIGSKSHFVAVPSGCDPMPVREFLTFTADLHKMINWLKHCGIKTIVMESTGVFWIPAFELLESNGFEVKLVNARHVKNVSAHKTDVLDCQWLQQLGTFGLLKVPFRPNDSILPLRAYLRQRDMLIKSAAEHIQHMQKALTQMNLHLHNVISDITGKTGMLIIRSIVAGVRDPKVLAALRDGRCHNPEEVIEGSLTGNYREEHVFALTQALQMYDVYSERIFECDSKIEKAVKGLETKCDSRKIAQLNEVSKPKGKGRKSLKKHEYSFDARLELIRMTGVDLTLIPSIGVSTALTIISEIGLDMTRWPSAKHFASWLGLSPGNKVSGGKRLSGKTKPCANRAAIALRMAANSLYNSESAFGAFLRRMKMRLGSPKAITALAHKLGKLIYIMLKYGLEYVEKGVEFYEAMYKKRREASLKRKAEELGYNLVPIAA

SEQ ID NO: 421469 - protein, 412 aa, unidentified
MKEIADKVGGLDVHRDTVVACTRVREPDGMVTLSKETFNTTRKGLEDLARFLIDAGVSTVVMEATGVYWKPVYYTLEGLFPQLWLCNAQHVKNVPGRKTDLSDAEWLADVAAHGMVRPSFVPPPEIRELRELTRYRKTQVDARAREIQRLEKVLQDAGIKLTSVASAVWSASSREIIEALIAGERDPAVLAQMAKSRMRAKIPQLEEALYGHFGAHHAFVAKQTIDHIDYLDAAIEALTQEICERLVPFESAVALVSSIPGISATTAQVIIAETGGDMSRFPTAEHLCAWAGLAPASYESAGKRRSAGTRHGSPALKRTMIEAARAAARTKGTYASAQYARIARRRGPNKAAVAVANSMLNVVWHLLTNGELYQDLGADYFESHNDPTVQVKRLTKRIEALGFDVTVTERVA

SEQ ID NO: 421470 - protein, 355 aa, unidentified
MESTKYIGMEVHKDTISVAVVNSAGKVVMESVLETKAATILQFIRGLRGNLLVTLEEGTWAAWLYDLLKPHVSKVTVCNPRKNALLKSGNKGDRIDAQKLAELLRNGSLSAVYHGERGLRTLKELSRSYLTITKDWTRVMNRLKALYHSWGIACSGTQVYAPRHRAEWLSRIKEAGVRSRAEFTYHQLDGLQALRQAVRRDLLAESRKHEASKLLRQIPGIGPIRAALAVALLQTPDRFRTKRQLWAYSGLAIETHGSGEYHYVDGQLRRSQKPVVLRGLNQNHNHHLKWIFKSAAVRASSSAGPLHEFYEGLVAKGMKLAMARLTLARKIAAIILIVWKKGVRFDGEHLKPQAA

SEQ ID NO: 421471 - protein, 417 aa, unidentified
MFKIFRKNCCGLDVHKTWIYACIGITDTNGLTEYKQARFSSFSKGLKELTAWLAKYSCTEVCMESAGKYWIPVFNILEKSCFVTLAHPKYTKPQKGNKTDRKDAKWICDLFMCDMVKPSFIPTPEIRHLRDLMRYRFKLTNMLSGEKNRAQNCLTVSNLKLDDVFSDVFGKSSRSITNYMLDHPGETFDVTPFVDKRCKTPIPEIQAAVDGAISPEQAVKLRQCLAHIDELEAHRKEIEQEILRIAEPFSAVLDFLYTLPGLDKNPMTAIAILSEIGPDMSVFPSSKHLVSWAGCCPRNDQSNQKIKSRRISRAGSYLKPLLVQIANALIKSKKHPEFKERYHRIKARRGHKKAVIAVCKMLLTAIWNMLAKLEPYNPEGFLEHRPVNEDKVLTKAQALELLRKRGYTIKDELPLTE

SEQ ID NO: 421472 - protein, 359 aa, unidentified
MIVIGVDPHKQTHTAAAVDRQTGELLGELTVRGNEEGHARLLEWARELGGERGFALEDCRQVSCRLERFLIGRGEPVVRVPPKLMAGARRSARSRGKSDAIDALAVARAAIREPDLPEAHLEGASRELRLLVDHREDLVCERTRIQNRLRWHLHEIDPELEPSRRSLGTLKVLDGLGRRLARRPQSVQVRIARELVAHCRELSRQADRLEREIETLVRREAPQLLALPGCGALTAAKLVGEVAGIERFRSDAQLAMHAGVAPLDVSSGRQQRHRLNRAGNRQLNRALHTIAIVQKRTYAPAKAYIARRQADGKSNKEALRALKRQLARRVFNILHLIAARANNPQRIQTSTPPQVPCLT

SEQ ID NO: 421473 - protein, 461 aa, unidentified
MSRRPAPNKPVRIEVMPCVFPHAAGLDIGSTEIVVALPPERADETVRAFGTFTPDLEALVAWLLSLGIDTVAMESTGIYWVPIYDLLEQHGITPYLVNVRHVKIVPGRKSDGNDAQWLQKLHMLGLLHSSFRPDAEILALRTLVRYRAEVIQHRAPHILHMQKALLLMNLHLSVVLSDITGVTGQAIIRAIVAGERDAARLAALRNPACKASVAEITKALTGTWQAGQLFVLQQALSLFDHYTERIVACDGEIERLLATMESRGEEDAPLPDLPPAKAKSKTKNAPAASTRAPLARIVGVDLVAVTGLSASSVQTILAEIGTDMTRFPTVKHFASWLGLAPHNDISGGKVLRSRTMKVVNRAAQAFRQAAQSVARSNTAFGSYFRAMRARKGPQQAVVATAHKLARTVYYMLLRGEPFHEESVAAYDERRQEREIRQLARRAKKLGFTLTEIAPNPTEATT

SEQ ID NO: 421474 - protein, 412 aa, unidentified
MDETRVGQIASWVGLDVGKQDHHATVISAAGERLFELAVGNDEAQIERLLDLALESGPCALVIDQPGSIGSLAVCVARRRGVPVAYVPGLVMRRASELYPGEAKTDRRDSFVLADTARTHARRLHWLEVDDQTLERLRLLGGYDDDLAHDVNRAANRLRDMLLAISPALERVLGPRLDHPVARALLARYPTPTALRAAGRRRLTPLAKRHAPRLGPRLVDDIQAALAAQTVTVPAEETAGRVIRELAEELDRLADRRDRLAQEIEQIFTSHPQAPVLLSIPGIGARTGARILTEIGDINRFPTAGHLAAYAGLAPVTRQSGSSINGETRSRRGNHRLKNAMWLSAFCSLHHNPSRDYYARKRSEGKQHNAAIVCLARRRCDVIHAMLRTGLSYGEPPGPARPAPQPGVALAA

SEQ ID NO: 421475 - protein, 372 aa, unidentified
MNYNTVYVGMDVHKESFTFCAYTIDAEKGSHFQRTEADYKNVLKYLEFLRTVYGNDANFICGYEAGCLGYTLYHQLTEHDVNCVILAPTTMLEQRSKRRIKTDRRDAEIIGKCLAQHNYSPVHIPTATDEETKEFLRMRDDHKLALKKVKQQILAFCLRHNYRYDGNSHWTAAHIKWLKSLNPEALYKEILDEYLLTYTTLSDKLERLDKRIEELASKDEYRESVKKLCCFIGIKTHTALSVLVEVGDFQRFASAQNFASYLGLVPGEDSSGDGQTRLGITKAGNRHVRMLLTEASQCYARGQIGFKSKELKSRQAGNSPQVIAYADKANERLRRRYYKMVLGKSKKHNVAKTAIARELACFMWGMMTEHIA

SEQ ID NO: 421476 - protein, 416 aa, unidentified
MNAVGIDVSSRKSTVAVLRPLGEVVCLPFDVTHDIAGLASLVEKLKALDGETRVVMEHTGRYYEAVAKALHEAGLFVCAVNPLLIKEYGANSLRRVKTDKADAVKIARYELDNWADLRDFTPMDAIRYDLKTLNRQFQLASKQRTASANNLIALLEQSFPGIRKCFDSPVRSDGTQKWVDFAHSFWHVDCVRKQPFPAFCERYRKWCKRHAYLFKLSNAEEVYALAKRAVVLTPKAKVVKVLVQEAANQLISISRSVEVYRAEMDRLAAMLPEYPVVMAMYGVGKSYGPQLMAEIGDVRRFERKQALVAFAGIDPMPNQSGDKNVRSNKSSKRGSPYLRKTLFNVIRTYLQCAPQDEPVFQFLNRKRAEGKPFYVYMLAAANKFLRRYYAKLRDYFASLDTLQPAAPIPTILKAAL

SEQ ID NO: 421477 - protein, 402 aa, unidentified
MTESPTRFFGLDIHKEYFMAVGVNVQREVIFGPQKVSNYQLDIWASRLLTPQDSVVLEMTTNTYLFYDTLMPYVHSIIAVHPPSVALVTNAQVKTDKKAALALAQLHAAGMLTGVWIPPHEVRDLRALIARREKMVHLSTMAKNRLHSLLHRNHLVLPEKPFDPEQRTWWENLPISATEQFLVRSDLETLAFARKQVEQAEECLKKESAQDERILLLVQLPGVAMLTAITILAAIGDISRFSTAKKLVGYAGLGARVHDSGMTHATGRISKAGRKDLRRAMVNAANHAIEHHVHWKKEFERLEPHLGRSKAVVAISRKLLVAVWHVLSKEVADRFADPRDVASSFLRYAYRVGVRNLPDEQPALAFTRDQLDRLGVGKDLKEIPWGSKRFKLPPSKILHEKE

SEQ ID NO: 421478 - protein, 404 aa, unidentified
MQVLYQRCCGLDVHKKSVVACVIAPEGRDTRTFGTMTADLLALTDWLLGKGVTHVAMESTGVCWKPPYNLLEGTGLELLVANAQHIKAVPGRKTDVRDAAWIAELLQHGLLRGSFIPDRPQRELRELVRYRTQLIRERARAVQRIQKALEGANIKLASVASDVLGVSGRAMLQALAAGEADPASLADMAKGRLRTKRTELEAALRGLMGEHQRMLLQSGLRHLDFLEEETRRLDAEVAGRMAPFRKELEALDGIPGCARRTAESFLAEVGADMARFPTHRHLASWARICPGTNESAGRRGSGWTGHGNPWLRSTLVEMAHGTTRSRSYLGAQHHRLAARRGKKRATVAVAHSILVVAYHVLRDGTPYHELGRNYFDEREREEVARRAVTRLERLGFTVTVEPAA

SEQ ID NO: 421479 - protein, 315 aa, unidentified
MEYLGIDVSKRSLRLALLRRDGKYRDRTLENTPRGFGQLAQWLEKWSSEPVHVCLEATGPYGEAVAEYLHEAGYRVSIVNPARVKAFAQSEGLRTKTDKVDARLIARFCQALEPEPWQPAPPRVRQLQALVRRLDALQQMRLQEEGRLEGAHPTVAPEIRSHLDYLDKQIQHLRQQIRELIDDDPDLRQQARLLASIPGISDITCAWLLAEVRFERYDNARELAAYTGLTPREFQSGTIKGKPRLCKRGNARLRKALYMPALAAIRCNPLVRNLAERMRKRGKQGKVIVAAAMRKLIHIAYGVLKHQTPFLEQGA

SEQ ID NO: 421480 - protein, 360 aa, unidentified
MRKAKPPLRKDSAMRILALDLGKNKSVFVDYLAGNGQRDFGKIDTNAPQIEKLLRRCVPDQLVIEACPAAGWVCDLAERLKVPVRVANGNDERWRWKTVKEKSDRKDALKLAQLVEMDSLPTVHVPKAAVREWRSLINYRHGLVDRRTAIKNSIRSIYERQGLRLPCAQRAWTQAAVEELKREASQAGPEQLWLFQVGCELKQLENVQQQIEEVETKLEELADKKDSVKLLKTAPCVGPRLSEAVAAILDDPHRFRNGRQVGCYAGLTPRRWQSGESDRQGRISKAGNRLLRELLVEIAWLGVRNKTWMLAVYERVLRGSDKRKKIAIVAVARRLLVKLWAMLRDGTEWKDPAPAALAAS

SEQ ID NO: 421481 - protein, 509 aa, unidentified
MITIPAVRERCAGIDVGKRGLAVAVMTGPADKEAAIETRWLGTTVPELETLREWLIREGVTSVAMESTGSYWIPIKNILENGLEVVLVCSKKHHPKKGEKTDFRDAIQLAHLHRHGMLTGSYLPERGIVELRDLTRRRKKILGNLAGEKNRIQKTLEVANVKIGNVMSDVFGISGQEMLEALLSGREIEPEQIAGMAKRTLRTKIPQLVEALKGHQLNEHHRWLIQQSIDHIVLLDRQMEQLEDRIMEKIKPYQKQFDLLSTLPGVKDLNAASILAEIGPDMSVFPSDDQLCKWAGRCPGNNRTAGKSKSGRVKKANKFLSSALRQAALGAVRIKGCIMRRKFERWAKRMGGKKANVAVGRSLLKVAWHVLKNGAPYREPDPYVMHELEKQKLVHHHAKRLRALGAEPGAVEAIVQQLLCPDVTPGEAAAAVQEVGAAEETRVSAPGKPCRRVGRVSKARGEPSLGKLGFRARPARKRSSLVSRPCEESPMPTNRDRPLQQKGSDGDSA

SEQ ID NO: 421482 - protein, 334 aa, unidentified
MENIALIGIDLGKNSFHIHCQDHRGKAVYRKKFTRPKLIEFLATCPATTIAMEACGGSHFMARKLAELGHFPKLISPQFVRPFVKSNKNDFVDAEAICEAASRPSMRFVQPRTESQQAMRALHRVRESLVQDKVKTTNQMHAFLLEFGISVPRGAAVISRLSTLLEDSSLPLYLSQLLLKLQQHYHYLVEQIKDLESQLKRKLDEDEVGQRLLSIPCVGTLTASTISTEIGDGKQYASSRDFAAATGLVPRQYSTGGRTALLGISKRGNKKIRTLLVQCARVFIQKLEHQSGKLADWVRELLCRKSNFVVTCALANKLARIAWALTARQQTYEA

SEQ ID NO: 421483 - protein, 371 aa, unidentified
MNHVTSIGLDVHARSVTAVALDSITGEVRSQKFGYSPAEIAGWILQLDSPKAVYESGVTGFHLVRELREMGVDCIVGAVSKMHKPASDRRKKNDRNDAEFLARQLMAHNIVEVFVPDVETEGARNLSRALEDVRDDLTRAKHRLTHLLIRWGYAWNEFNEDGKRRGSWTHAHWEWIRGIELPDAAARESLDYYISEVRHIESQKKAIEKRVAQCASRPRWRDRVEALRCMKGIETVTAFALTVEAGVFSRFDSARAFASWLGLVPSEHSSGERASRGGITKAGNSHLRKLLVEASWHYTRATKERKRSLYDESVPASISNHAAVGVKRLVERRRHPSCELRKRPVVANVATAREPACWIWALGRMSEGALA

SEQ ID NO: 421484 - protein, 332 aa, unidentified
MNIVSTVGIDLAKNVFSVHAVGQDGTVILRRTVSRAKLPELVAQLPPCVIGIEACSGAHDWARRFAAFGHIVKLMAPKFVIPYRKSGKNDGNDAEAICEAVRRPNMRFVPVKSVEQQSDLSLHRVRQGFIEERTATLNRIRGLLTEFGHVVPLKAVELYRRVPELLEVLPPRVATCARDLLEHASRCETKAREYEREIKIHVRSHALARRARTRAGIGPITASAVVATVGNGRDFKNGRQFAAWLGLVPGQYSTGGKTRLGHITKRGDPYLRKLLVMGARTVLQRAARLTDPLSRWAQAVRIRRGYHRACVAIAAKNARVVWALIAQEPAAA

SEQ ID NO: 421485 - protein, 312 aa, unidentified
MDMIYVGVDVSKDRLDVHILPQGEAFAVARDGKGLAELVERVQALGPERIAVEATGGFETVVAAALAGASLPVVVVNPAQVRHFAQALGRRAKTDPIDAQMIARFVEATKPEVRELPDEATRLLADLVARRRQIIEMIVAERNREKRVAVKRIKKSIVRLIAALEKELAEIDAEIDAGVRGSPAWREKEDLLASVPGVGPITARTLIAELPELGTLDGKRIASLAGLAPFTRQSGQWKGKAMIGGGRATVRSALFLAALTAARHNPALKAFRERKAAQGKPKMVALIAVARKLLTILNAILRDKRPWRPEIA

SEQ ID NO: 421486 - protein, 377 aa, unidentified
MSTVRFVGLDVHAETIAIALAEPGGEVRSVGVIPNRPESVRKMVRKFGPAGGLRVCYEAGPTGYALYWQLTALGVHCDVVAPTLVPVKAGDRVKTDRRDALKLARSYRAGDLTPVWVPDAAHEALRDLVRAREVAKRDQLRARQRLGKFLLRHGRQRPTTLKTAWTRGHVEWIKTAVHFEQPAQEIVLADYVHQVEQVAARIARLDAAIAEAARTAPPRMRAVIAALQALRGVAEVAAVTIVAEVGELSRFQRAPQLMGYSGLVPSEYTTGARRRTGSITKTGNAHVRRVVVEAAWAYRWRPAVRYELRKRHAGLSPGVTDIAWKAQHRLHRRFQRMLARGKNQPQIVTAVARELLGFIWAIGVMVETETRKTDRAA

SEQ ID NO: 421487 - protein, 327 aa, unidentified
MKETHICVMDRDGKVALEAKTATSAAAIAATLAKAPTAQQIAFETGRMATTLYHGLAALDLPVVCIESRHAHQALKSLATHKTDRNDARGLAHLARTGFYKPVHVKSLPAHAVRALIIARKKLVGQRVTLENQIRGLALVFGVRLPRGLSPAFAEQVTSGSSEVPALAGALRGLLAARNALLGAIAAINRDIKRLVRSSEACQRLMTIPGVGHVTALAFVAAIDEPDRFRSSRDVGPYLGLVPRRWKSGEIDYTGSISKVGDRRVRTLLYEAANVMLTRYRGDLALKDWALRIGKRSTMRKARVALARRLAIIMHAMLRDGTDFQVA

SEQ ID NO: 421488 - protein, 443 aa, unidentified
MNTSHPYDLVIGLDRSDKKADLCLIDTRTGQRRAEIIDTAPEALWEWLLELRQQHPQARVGLCLEQPAVHLIPFLEAYDWITLHPINPITLQKYREAFVTSRAKDDTKDADFLADLLLTHHAKLPVWAPEDSATRAVQQLVFHRRAVVDERTGLSNRLIALLKSYFPQALILCGDDLWRPLATAFLLKWPSLQAVQKAKAATLKQFYYLHGSRSAKLVEQRLALIEKAVPVTDEKAVIGSFALRVQLVCRQLQLVQQSVSEFDRQIAAAYAAHPDRMIYASLPGAGPVLAPRLMASMGSQRERFAAAENLQHYTGIAPVTKRSGGSCYIHRRYLCPKFHRQSFHEYAKESILWSRWAAAYYLQQRSKGSPHHTAVRALAFKWQRIIWRCWQDHKPYDEPTYEAALQKNGSPLVALFDRVELGKSPFKNPANKLKKSVDGLPQR

SEQ ID NO: 421489 - protein, 368 aa, unidentified
MKKRITFVGLDVHKSSIDVALADADRNGEVRHYGTIGGGLDDLDRLVKKLLSPDKELHFVYEAGPCGYEIFRSLTEKGFDCAVCSPAHIPKSPAGRVKTDRRDALMLARLHRAGELTYVFVPRADDEAMRDLTRAREDAKKAQRVAQQQLSGMLLRLGFRYPRDHWTKAHFGWLADQKMPTPSQQVVFQEYIHAIKETTDRVARLTKQIEALVPSWRMAPAVNALQALRGVSLLVAATTIAELGDLTRFENPKKLMAFLGLIPSEHSSGERKKRGGITKTGNGHVRKVLVEAAQAYSHPARITRLLLKRHEGVSQDVLEIAWKCQVRLCARFRRLMARGKSRNAVVAAIARELAAFMWAIATRTPIAV

SEQ ID NO: 421490 - protein, 401 aa, unidentified
MQDTQQHGAVDVFVGVDVGKGQHHAVALDRNGKRLYNKALPNDEVKLRALIAELKTHGRLLFVVDQPSTIGALPVAVARAEGVLVAYLPGLAMRRIADLHAGEAKTDARDAAIIAEAARSMPHTLRSLRLADEQLAELTMLCGFDDDLAAQVTQTSNRIRGLLTQIHPALERVLGPRLDHPAVLDLLERYPSPAALAGTSEKTLANRLTKLAPRMGKGLAAEIVQALSEQAVTVPGTQAATIVMPRLAQQLAALRQQRDEVAAEVERLVLAHPLWPVLTSMPGVGVRTAARLLTEVAHKAFASAAHLAAYAGLAPVTRRSGSSIRGEHPSRRGNKVLKRALFLSAFAALRDPVSRAYYARKIQQGKRHNQALIALARRRCDVLFAMLRDGTLYQPKSAPNA

SEQ ID NO: 421491 - protein, 355 aa, unidentified
MYGLKHQKEKRSMDHFAGLDVSVKETSVCIVDDTGRIVREVKVASEPEALLQVLANPAYHFKRIGLEAGPLSQWLYSALAETGLPVICVETRHMRAVLKAQINKTDRNDARGIAQMMRAGLYRPVHVKTLRSQKLRMLLTHRKLLQSKAISIDNDLRGTLRNFGLKVGMVGKVKFEARIKELVENLPDLAVLVEPLLVVRRVLREQLGILHRRLLAIVRDDEVCRRLMTIPGVGPVVALTYRATVDVPARFRNSKAVGAVFGLTPSKYQSGEISRTGAISKCGDEMMRVMLYEAAQIMLTRTNKWSWLKAWAMKIARHRGMKKAIVALARRLAVIMHRIWVDGTEFRWTREVAAA

SEQ ID NO: 421492 - protein, 388 aa, unidentified
MYYVGIDISKYKHDCFITNQFGEIFFEDSISNNQEGFAKLIATLDGLDHSQEIRIGFESTGHYGNNLKLCLENAQHSFSEYNPVLLKAFAKGLSLRKTKTDKIDARTIARFLMTAEYKPHTSKFYHMYSLKSLTRHRNTLVKQRSLYLVKITNLLDHVFPEFKPFFGERISKTALHILKKYGSAHAISRMNIRSYDELRCISRGKFTTGKFFALKDLAKATVGHSNELLDFQLQSVLRLYQQLVNEVDDVESKIVSLVSVINPPILSIKGVGSISAAIILSEFGDVKRFNSPNAMLAFAGMEPAHYQSGQSEQKGRMVKRGSSLLRYALMNIALPVVQHNFVFAEYYNKKRNEGKPHRVALSHVCKKLIRVIYTLEAQSLAFDPNKLR

SEQ ID NO: 421493 - protein, 343 aa, unidentified
MDHFAGLDVSVKETSICIVDDTGKIAREVKVASEPAALLAVLTNPAYCFKRVGLEAGPLSQWLFSALAEASLPVVCVETRHMQAVLKAQINKTDRNDARGIAQMMRVGLYRPVHVKTLRSQKLRMLLTHRKLLQSKAIAIENDLRGTLRNFGLKVGMVGTVKFEGRIKELVENLPDLAILIEPLLIVRRALREQIVILHRRLLAIVRDDAVCRRLMTTPGVGPVVALTYRATVDVPARFRKSKSVGAVFGLTCSKYQSGEIDRNGRISRCGDEMMRVMLYEAAQSMLRSKKWSWLKAWAMQIARRRGMKKAIVALARRLAVIMHRIWVDGTEFRWTREATAAA

SEQ ID NO: 421494 - protein, 311 aa, unidentified
MAQHDQFVGIDVSKARLDVCLWPQNEACVFANDRDGLRALIRWLRRVRPHAVGFEASGGYERALLTALCEADLPARRVNPMRVRQFARAAGILAKNDRIDAAAIAHFCAALPQREVVHDPARAMLGELVTARRQLCEERTRCANQAEQTASALLRRIAAQRIKRLSAEIALVEVEIARLIADHPELAERNAIMRSVPGVGPTTAATLLAFMPELGAMSARQAASLVGVAPFDCESGAFRGKRRIAGGRKPPRDALYMAALVASRRNTTMAAAYHNLKNAGKPAKVALVAIMRKLITALNAMIRNKQKWAAA

SEQ ID NO: 421495 - protein, 343 aa, unidentified
MVHYVGLDVSLKQTSICVVNQLGSIVREGVVDSEPEAIAAFVRLNAPGAVRIGLETGPTATWLWTELKQLGLPVICIDARHAKAVLKMQINKSDRNDAAGIARIMQTGWFKEVRVKDLDSHSVRALLASRALLVKIKRDLENQIRGLLKNVGLVIGRAKFNVFAVRAEELIEDRPELIAVVRPLLKARKAIEQQTDDLDRQVLKLARHDAQVRKFMTVPGVGPITALCFKATIDDPTRFKRSRSVGAYVGLTTRRYASGEIDWTGRISKCGDAMLRSYLFEAAGVLLTRVPKWSALKAWGMRLAKRNGLRKAKVAVARKLAVILHRMWIDGTEFNWSKKEVAA

SEQ ID NO: 421496 - protein, 362 aa, unidentified
MKEKKTRFIGIDLGKRTYEMAVVGKGCKVAMSNGKTTAEGRQKLYRKLHPTDKIALEAGTLAFIMAKEIEASVGCRVYVLNPYRLSIIYKSMKKTDKEDALKLAHIIEDFQEERLPLVTVPSDKEIERRKILAGYCRAQQGRNREINRLHALFVNQGITSIVRKDLAESEQRKESIKVLNGLDREEAEYLITILELHEKRLEALEKKMKIATENEEMIQRLQEIPGVGPMVSFAFSAHVGAERFENAGQLSNYLGLVPRVYMSGDTVRYGSITKRGNGYLRALLVQASWALIRTKKGGKLKTRFEYMTIEKAMGKKKSIVAIARRLAELMYVLMRDGTRYETRPFIRNNEVVKDISGIKFCA

SEQ ID NO: 421497 - protein, 423 aa, unidentified
MEVIHPRCGGLDVHKQTVVACVRLTSGGKVTREVKTFETTTSGLLLLLKWLTDMGCTHVAMEATGIYWKPVWNILSDGDFELVLANAAHIKNVPGRKTDVGDAVWIADLLAHGLIRSSFVPEEEIQELRELLRTRKQLTRQQSSHTQRLQKILEVANIKLDSVITDLVGKSGRAMIEAMIAGETNPAKLAALADRRIKASPEQLREALRGRVTDHHRFMLRLHLDQIDGADATIQEIDQQVTAVITRMDQEVVAGQATFQSLIALLIAIPGIDVLSARVILSEIGLDMSRFPTAGHLLSWGGLCPRNDESAGKRRSTRLRKGAPWLKALLVQCAWAARRKKGSYFQAQFLRLRGRCGPKKAACAIAASLLTTIYHMLKDGTQFQDLGADHFDRRSTEVRAKHLVGQLAKLGFEAKLTPFARAA

SEQ ID NO: 421498 - protein, 356 aa, unidentified
MKEYISFDSHKHYTLMEREGIQSAVARQQRIEHAPGAIRKALEGCESGTAVAVEATGNWYWIVTEIEEAGLRPLLVHPRKAKLMMGMINKTDKLDVHGLNRLQRTGTLPTVWIPPAALRDLRELTRVRMVLSSQRTRLKNRISSALAKYGRSVEGYSDPYGTKARQTLAQRLTQLPPQTQWATTMLLAQLDFIESQIAEQEQRLKQLIEATPEMRLLMSLPGVGVILAAVLWLEIGARERFASAERLASYAGTTPRVHASGGVVRYGRLRPDVNRYLRWGFVEAANSVAVNHVRCPQRHVSELYRRLKIRKGHAKSIGAVARHLAEATYHVLSRGEPYREPTVGGTIQGGVRAELS

SEQ ID NO: 421499 - protein, 340 aa, unidentified
MDITTLGIDVGKNTFHVIGTNRAGKSQLRQKFTRQKLAEFVAKHPPCLIGMEACPGSQHLARKFEEYGHQVKLMPAQFVKPYVKSNKNDFNDAAAIAEAVRRPTMRFVTTKTAEQHDLQALHRVRERLVRSRTGIICQLRSFLLENGIAVRTGRAALAKALPDILEDAEQPLSDRMRALIHSLREQWLFLEEDIKKISKELEAIARSRDDCRRLLTIPGVGPLVATALVASVGNGRQFKRGRELAAWLGLVPREHSTGGKQRLLGISKRGSSYLRKLVIHGARSCYLNMNRSQHRMGLWIDEMANRGAHRNVIVVAVANKLARICWAVMRDGSVYHCAKA

SEQ ID NO: 421500 - protein, 335 aa, unidentified
MNKFKYYIGIDVSKLTLDVTVLYETVNSTKSEHYKIKNDEKSIAQFVKKQFGNFPKEEFLFCFEDTGIYSLPLAYYLNDNELACWQRPAIEIKRSRGITRGKSDKIDSKDIAFYAFTQKYKFRPNKLSIKEIQQLRLLFTEREKVLKSLSSFEKTSENEDFMEKEVFASVSSVNKIIVAQLQKALKAIEAKMLAIISSEDALNQQFKLMTSIPGIGMQTAVYLLIATKGFSAFENWRQLACYAGVAPFPYQSGTSINGRNKVHHFADKKLKSLLNMCAIVAVRYDKELKAYYERKVAEGKAKMLVINNVRGKLLARVFAVTNRQTPFVNTQKFAS

SEQ ID NO: 421501 - protein, 465 aa, unidentified
MKKKTSKSEKEKRKISIHEAWEQINPDAAGIDIGSREHWVCVPPGRAEKNVRKFGTFTCDLEALADWLKECGVKSIAMEATGVYWIPVFQILEGRGFAVMLVNARQTKNVAGRKSDVQDCQWIQRLQTYGLLRGSFRPRDLYCVLRTYLRYRDELICARSTQCQHMQKALQQMNVQLPQVLSDVTGVSGLAIIKGILEGQRDPATLAAMVDSRVRASQATIQKALVGDYRKEHLFELKTAYELYHTYEEKIQACDKQIVAETAGLPDQVELSLKPLPARKEGRAARKDKMAGQDMREWLYKKLGVDLTAIEGIGIATALVILTEVGPDLSGFPTEKHFSSWLGVCPDNRISGGKVLSSRTRRVINRVSDALRIAATSLERSQTAMGAFYRRMKAKLGAAEAVTATAHKLARIVYRLIKHGENYVRQGMDEQEKKYQERKLFTLRKTATAMGFELVARQAVALPVS

SEQ ID NO: 421502 - protein, 304 aa, unidentified
MFGIGIEVSKAMLDVAVHEEQFRQFSNDQRGFASLIRWLKKWPIKQVVLEASGGYERAALEALHSAGLPLVRINPARARRFAQGTGRAAKTDRIDATVLAQMAHLLSLTRYVPPAPWQQRLAEFAQCRRHLVQMRVSEMQRLRRVVDPDLIAMKQRPIAQLSEDLKQLDKTIAKQLEGQAGWRDIGSIKGVGPILVSTLACELPELGSLGGKAIASLVGLAPMNRESGTWQGQRRISGGRAVVREALYMAALTAIRYEPKLRDFYAGLKAKGKASKVALVAVMRKMLVILNARKRDAEVALGVP

SEQ ID NO: 421503 - protein, 344 aa, unidentified
MYYYAGIDVSLECSSVCVVDGTGKILREAKVASEPEALIAWFRSQGLALERIGLEAGPLSQWLYAALREAGFAVELLETRHVRDAFKAMPVKSDRNDARGIAQLMRLGWFRPVHCKSIEAQETRAVLTARKLLQSKLRDIENSLRGVLRGFGLKVGKTTELTFAARIRELVAGHPGLELVAKALLEAHAVLRREFNGLDKQTQKLARSHPQARLLMTTPSVGPIVALTYASAIDDPKRFRSSKATGALFGLTPKKYQSGQTNYTGRISKIGEASVREALYQAAHVMLTKPVKNCSALKSWAMRIAKRAGMRKAKVALARKLAVILHRMLADAKPFNPTANAAAT

SEQ ID NO: 421504 - protein, 307 aa, unidentified
MANHVTKITLGVDAAKDHHVIYNWQTSQTTELPNEIGDIRTWLKTFHGPVRIAIESTSDYHLVLVDEALALGYEVYLVNPRQLAHYREAVNVRNKTDPIDAWLLARYLEHEVDQLRPFQPRDPRAQRLWRLVLRRATVVKSRQQLQQSFAEVGVSIRGVLGQFKNLLARIDRHILTLIRELGWWSDYRYCLSIPGIGKSNASALVAAYHRGAFSGSDAFISYLGLDVRIRESGCFKGRRKLTKRGEPELRRLLFCASHAARHYHRFAEYYQRQLDKGLSKIAARVVLARKLARIAFTLMRNEEIFMK

SEQ ID NO: 421505 - protein, 361 aa, unidentified
MLEQKNELNFEGRNIYVGIDVHLRQWNVSIYVEELFHKTFQQPAEPMALNHYLRQNFPGGQYHSAYEAGFCGFWAHHKLKELGIDNIVIHPADVPTTQKEKVQKTDAVDSRKIGRSLQKGELKAIRVPTKETYEDKSLLRARKSLVKALSKSKNQVKSMLYLFGIRMPERYMRTSAWTRNFSRWLKEEAIKGFSQESGRESLLLTVEKVERLRALLLRANRDLRELEKSDLYRHRMELLRGIPGIGLITGLTFLLEIEDIGSFNDTDQLAGFAGLVPKCHGSGDEEGKGEMTFRGQNNLRIELIESSRISVGRDPALGMAYLNYCKRMDANKAIIRIARKLLNRIYYVLSKDRKYETCVVK

SEQ ID NO: 421506 - protein, 454 aa, unidentified
MDGEKKEDKKALEPMQVVYPNAAGLDIGSSEIMVAIPPDREGETVRGFGTYTPDLKQLADWLREKGVTHVAMESTGVYWIPIYELLEERGFEVIVVNARHIKNPPGRKSDVKDCQWIQRLHSYGMLSGSFRPGADMCTLRAYLRHRDNLIEDRAKHIQYMQKALLQMNLQLGQVLSDLTGKTGLEILRAIVDGEHDPVTLAKLRHGRCQHSQEDLIKALTGHYRKEHLFVLKQALEMYDTFSQRLLECDQEIEGLLEEIKPDLPEDFLPLPPDPKSNSHCKNAPSYDARTPMYELARVDLVSIPGMNENLVQKILSEVGLDMSRFPTVKHFCSWLGLAPHNAISGGRVLYSHTLKNHNRAGQAFRLAAQAVSRGKTVYSEFYRRIRSRSGSKEAIVATAHKIARTFYFMLVRRQPFREIDLEDYLQAQREKEIRRLQAKAVRLGFYLQPVVVSS

SEQ ID NO: 421507 - protein, 314 aa, unidentified
MRETTPATFVGIDVSKHRLDVFVRPTGEHSVSAHDDEAVAVLLRRLLELRPALVVLEATGGLQPRVATELAAAGLPVAVVNPRQVRDFARATGRLAKTDRLDAETIARFAEAVRPPARPLDDVASTALKSLVARRRELVAMRVAETNRLGATGVERVRRSLLAVIEALEGQIAALDGDIDQQVKDSPAWRAREGLLRTAPGVGPTTARTLIAELPELGELTRRRIAALVGVAPFNRDSGQLRGRRTVWGGRPGVRAALYMAALTAIRCNPLFAAAYWRLRERGKPAKVALTACMRKLVVIPNAMLRGRASWRPA

SEQ ID NO: 421508 - protein, 366 aa, unidentified
MASVSHLAPIHLGLDVHRDTISVGILEPDQQVPEVDRIPHDEPSVRRLVGRLGDPRRLRACYEAGPTGFELARLLHSMDVGCQVIAPSLIPRAPGDKVKTDKRDCRRLARLHRAGELVAVRIPTVQEEAVRDLCRTRADMVADRTRARHRLSKFLLRHGRVWRGGATAWTHAHERWLLAQQFDEPALAATYAHYRVVLESRDVHLDAIQADLAGWYDRPPFAEQVARLSAYRGVTRLGALTLAAEVCDWRRFAQASQFMGFCGLVPSEYSSGQRTARGHLTKAGNAHLRAQLIESAWSYQHRPGVGIQIAGRQQGLDPQVIARAWAAQLRLCGRFRRLAVRKTSKNVVVAAIARELAGFLWAEMTA

SEQ ID NO: 421509 - protein, 365 aa, unidentified
MGVPTMAQARTFVALDVHVSGTVAASIDRESGELRRRRLSGSAAEVVEFVAGLPGPVRVTYEAGPTGFALARRLEAAGVSCVVCAPGLIPRGPSDRVKTDRRDAERLVRLLIAGELHAVAVPSIEAESLRDLVRAREDLRGDLMSARHRVSKLLLRHDVRFEGTERNWTGPHLRWLAGVRFAQPGTQAAFDDYRGAVEALIVRRTELERLIAEQLPASPCAQTARRLMCLRGVDTLTAAGLCAEIGDFGRFAHPEQLMSYLGVVPSEHSSGTRRRQGSITKSGSQHARRLLVEAAWHYRQPPRVSEPLRRRQAGADPMIVALSWKTQRRLHRVWSRMEQRGKRRTIIAVAAARELAGFCWAVATA

SEQ ID NO: 421510 - protein, 410 aa, unidentified
MSVLEVALDPATVIVAVDPGKAFHRVWLSNGAGLLADPMSLPVSREGISQLEVALNKHGPDAPVIAIEATGSLHRPWVAELERRHPGSVRLFAPSETKSARVQLGSGRFKTDDRDCAALTYMARQGAGRRYGRQASVEALRAAVRHRRGLVADRKIAQQRLHDQLNTLCPGLSAPAGHGRSLALETPTGLAVLACAAAFAGRAPQLRSLRCRAQGRLTTSTAQYWLHRWRGCLPPPADADQRALRLGRDLDRYRRLRADIDALDVEVGALLAETDGQILTTLPGVASIRAAAFAAHSLSIERYPDAEHLYSATGLAPALYQSATLNRRGRISRQGLAEHRDALMGIAWGLAQNSPAFAERDSQLRARGMAPIQARVALARHACRLAYRLLRTQQPFDEQRYRRGRLSGER

SEQ ID NO: 421511 - protein, 345 aa, unidentified
MKDVTTLGIDLAKNVFQLHGADERGKKVLSRRVQRSRLLEHIANLPPCLIGMEACGGSHYWARKFREFGHEVKMMSPQFVKPYVKSNKNDAADAEACCEAVTRPTMRFVPIKEVAQQDVQALHRVRSRLMKQRTQLTNQVRGLLAEYGIIIAKGIASLRRKLPDILEDAENELTPESRELFQDAYDELLVLTQKIDKYEKKLDTMAKTDESCKRLLTIPGIGAKTATAFKASVGGAEVFTRGRQLSAWLGLVPKQNSSGDKIRLGKISKRGDRYLRCLFVHGARAVLKTVKKKKDPYSLWIKELIARCGFNKAAVAVANKNVRIAWALLRNETVFDARYTEKKDD

SEQ ID NO: 421512 - protein, 352 aa, unidentified
MKHFIGCDVHTRNQVVAWIEEETGEIKKRRLEHEGQEVKEFYAQFPQGTVVGIEATFPAYWFERLLGELGHELWVGDAARIRASEVRYQKTDLRDAEDILDLLRTGRFPRIWVPSLEERDLRQLLVHRMKQVRARTQVKNQLHALAISQGVCRGRKLWSAKGRKELESLALLPWAARRRKELLESLDRLDEQVRELDKAVEEAGRGRPEVALLRTHPGVGMVVGLAFVLTVGPVERFPNSRKLVSYWGMNPRENSSAGHQRLGSISKQGNTMMRWLLVEAAQTAARLDPQLRRTYQRLKKQKTSGVAKVAVARRLVVRLFWMLRTRHNYTQLVHMSGSPSSAVVPPQGEPTV

SEQ ID NO: 421513 - protein, 392 aa, unidentified
MYIVGIDIGKNHHEASIVSPEGKQIGRSLRFATTHKGADSLMSFIFKNIGNSPCVFGMEATGHYWYPIYSFLKAKGYTIYVINPIQSDSLRKMYIRQTKNDSIDSFLIAKVIRFGQFGTTSMADENILAMRQLCRYRDSVISSRTEIKLRIGTIMEQIFPEYEKQFSSLWVSTSMGILEKYLTPENIENAPIDELFEIIKDKSHNRLTRAKAISIKEAAADTFGIKIAQDAFSFQLKQLIDRMNFLDKQIEALDCQILEYYEKFDCYLHTIPGIGIIGAATILAEIGDISRFKNSSSLIAFAGIDPTVRQSGEFNSTHNHMSKRGSPYLRHAIFLAATTCSFHNSPLNAYYKKKRDQGKHHLTATGAVARKLTTVIYAVLRDSKPYEPKMFC

SEQ ID NO: 421514 - protein, 404 aa, unidentified
MKGPIVSIDVSKGKSDYQAFKNLNVKYTGSRSIKHTKEGFDEIVNLVREMEKKLETEVCVVYEATGVYHRVLKKVLEDNNIKQFIINPLLSAKTRKNDSLRCPKTDKLDPKSIAKTYYSHSLHNSHKQETIYHELRELSRYYEDILVHIRKDKVAFRAQLDIVFPGYDTLFDDLYGPVALAVIEKYPHPEMLQKKKINTVSKVIQSKTCHRQAVSDTMADKAIEYSKTIYSGCDKDDIEVLILQRFIKKLNEDMAEAERTIGEMIKLAQELPDFSIIKSIPGIGDNLAARIIAELGNMTRFKKKNELVAFAGLDPRISESGKNDGDHMHITKKGNKRLRCLLYLAVTCSIRLKRDDNSVKDFYIKKKQQSNPMCSKAAKTACASKLVRIIYSMCKTGELYQYNK

SEQ ID NO: 421515 - protein, 418 aa, unidentified
MTDTDYAALIGLDWGDQAHAIALHVQGSPAIEKSILPHSAESLQDWINALRTRFGGRPVALALEAKHAPVVHALMQVEFITLYPVNPKTSACYRLAFNPSGAKDDIPDADLLLDLLRLHPDQLTPWHPDDVQTRKLDGLVQARRAAVNLRTQLSNSLTTLLKAYFPQAFELVGEDLFSPLACAFLLKWSDLISLKAARPNSVRAFFHAHNVRRPDTIQKRLQRIANAKALTTDDAIVSVSVMSCRLLAGQLRKLGQSIKLYDLQIQQTFADHSHAHLFRNLPGAGPTLAPRLLVAFGTRRDRFPLPDNLQMLSGIAPVTEKSGQRKWVHWRWNAPRFLRQTFVEWANQSIHYSSWAAAYYAQQEKRGKRHQAILRALAFKWIRILWKCWMVNVPYDEARYLKHLASKNSSLLNVTYAK

SEQ ID NO: 421516 - protein, 407 aa, unidentified
MLKIVYRVCCGMDVHKSFVVACIAATNEQGVTTYKSKRFSTFTGDLRRCAAWLAENNCKDVCMESTGKYWIPIYNILEHTCNIVLAHPKYVKAIRGKKTDKRDAKWIADIFKHDLVAGSFIPPPDIRQLRDLVRYRWKLTNFTTGEKNRAQNCLTVSNFKLDDVFSDVFGKAASAITARILEDPTEKITDISGFRTKGMKATDEQVLAAVDGEMCAEQAEKLRIIRSHMDSLELCKLNLESLILSTAEKYLPQFNLVMSAPGIQSFAAIGIISEIGVDMSVFPTSKHLCSWAGLTPQNNESAGKKKTTRISRAGAYIKPLLVQCALCAIRAKQFPEVRNRYLALKKRRGHKKAIIAIAGCSLQLSTICSRKMSLTILNYTGRQTGLPHIVRFLLKKQFLFFNGRVIW

SEQ ID NO: 421517 - protein, 343 aa, unidentified
MQTIATIGLDIAKSVFQVHGVDAAGQVVIRRQLKRRYVLAFFQKLPSCLVGIEACASSHYWSRELQALGHTVRLMPPAYVKPYVKRQKNDMADAEAICEAVTRTNMRFVPTKTPEQQSALMLHRTRHLLIRQQTSVINAIRAHLAEFGITAPIGRRGIEELLRVVADPSDNRVPELVRACLAALGSQLLGLRKQILQFDRMILAWHRSNQTSKRLNCIPGVGPLLATALVASVADPKSFRSGRNFSAWIGLVPKQHSSGGRERLGSISKRGDRYLRGLFVAGALAVIRHAKLHGTNHRPWLTGLLARRPTKVAAIALANKLARMAWALMARGERYNYPVALMP

SEQ ID NO: 421518 - protein, 359 aa, unidentified
MGELSKVGMKTVGLDLGDRSSHFVVLDAEGQQVEEGRVATGDKALRKRFSGCERMRIALETGTHSPWVSRLLKDCGHEVIVANSRKLRLIYENRRKNDRVDAMYLARLARLDPQLLSPITHRGPQAQRDLALLRSRDALVEARTRLINHARGLVKSIGQRLPRCSSEAFPRKVLGTIPDSLKPGLLPVLEMITSLTAQIKALDRRLDALAQEFYPETKLLRQVTGVGPITSLGYVLILEDPGRFRKSRAVGSYLGLAPGSNKSGQSDPQMRITKEGDALLRRLLVGAAQYILGPFGPDTDLRRFGLRIAQRGGKNAKKRAAVAVARKLAVLLHHLWRCGEVYEPLYQETRKAARLGKIA

SEQ ID NO: 421519 - protein, 310 aa, unidentified
MDPIIAGIDVSKDKLDVHLLPIEQAFAVPRTGAGIEELALRLAALEPKVVAIEATGGFETIVAAGLAGAGLPLVVVNPAQIRAYAKATKRHAKTDRIDAAVIAEFARATRPEVRPLPDAATRLLADLVARRRQIVEMMAAEGQRGRRVDHKRVAKSIARVRKTLEAELAELDQEIGDQVRGSPLWREKEDLLVSVPGVGPVVARTLLAELPELGRLDRREIAALAGLAPFTRQSGRWRGKSFIGGGRASVRTVLFLAAMTAARYNPQLKAFRDRLVQAGKPKMVALVAVARKLLTILNAIIRDNRPWQPA

SEQ ID NO: 421520 - protein, 356 aa, unidentified
MQHTILNFINQHFFVGIDVHLKQWKVTIRNNSIELKTFSMNPSPRELFQYLQKHYPGGTYHLVYEAGFCGFWIQRSFTELGIQCIVVHPADTPTSSKEKVHKTDPVDSRKLARELENGSLKAIYVPQVASEQLRALMRLRFRLVQQQTRTKNRIKGFLRVNGISIPAVHLTNPRWSGAFILWLKSIQPSHDAGRYTLGNLIVQLEQTREHLSNVLKQLRREAKSKNLASTVEAIDSAPGLAFITTMTLITEIIDIRRFSRFEPLCSFVGLVPSVYASGETSYTRGMTFRHNQYLRPLLIEAAWTAVRKDPAMTLRFNELCKTMSKQMAIIRIAKKLLRRIFHLWKQQDRYVYALVA

SEQ ID NO: 421521 - protein, 346 aa, unidentified
MSYSTTVGVDLAKNVIQISVVSSRGKELSNRSLTRKKFAEFLGKQKRSLVAFESCASAHYWARAAQRHGHEARIIPAKAVAPFRQGHKTDSNDALAVAEAARRPNIKEAPMKTVEQQGLQAIHRSRELLIQECTALSNHLRGLLMEFGIVIPKGFASLLKAVPEILEDGENELPDLYRPTLHRMYSRLMELREDIEAMTKEVDRLAKAHPICSRLMALEGVGPIGALLLYATMGSGAAFSGSREFAAYLGLAPKQYSSGGKTNIVGLSKKIGNSRLRSVLILGARAYVYKLNEPKSSKDKWLKANIERNGECRAAIALANKNVRTAWAMVTQGTEYQRRVQLEMAA

SEQ ID NO: 421522 - protein, 350 aa, unidentified
MMIIGCDYHPGFQQIAYLNSDTGELHECRLGHKEEAEQFYHDLRTRGLPVRVGMEASGHARWFERLLAELQFELWIGDAAAVRSKRVRKQKTDRQDAQLLLPLLMENRFPRIWVPDAENRDLRQLLWHRHRLVQMRTRVMNQLHVVALNEGLRRKKALWRPAGRAELEGLSLAPWASRRRQDLLDLLDQLTPKILELTRRLEEVVEKRAVAAHLRTHPGVGPLTALAFELVIGTPERFQCAKQIASYVGLVPAEESSGDRRRLGHISKQGNALLRFLLVEAAQVTVRSQPQWRSQFFHLAMRRGRKIAKVAMARKLAVELYWMWRRGWNYNEMQQLGSHAGEPGNRHGVQ

SEQ ID NO: 421523 - protein, 344 aa, unidentified
MSVVSIGLDLAKSVFQLHGVDASGHAVLRRKLARGALIAFFTKQPRCLVAMEACSSAHHWARELVRLGHEVRLIPPQYVKPYVKRNKTDAADAEAICEAAGRPSMRFVPIKTLEQQSVLVLHRVRALLVRQRTAAVNAARGLLGEFGLVVGMGIRKVDELRRRMDKLEPELLPDEARAAIGCLFDHIDGLGERIDAVEARVIAWHKSSEVSQRLASAPGVGPMTATALVAAVGDGKQFQSARHFAAWLGLTPRIQASGGKERIGRISKGGDRYLRALLIHGARAVVGTTFRKDVMPRPWLTALIGRRPVNVAATALAHKTARALWAMLTRAETYRRPSEIAAAA

SEQ ID NO: 421524 - protein, 368 aa, unidentified
MKKYITFVGLDVHKNSIVVALADAGRNAEVRQYGTIGGGLDDLDRLVKKLSSPNKELHFVYEAGPCGYDIFRSLTDKGFDCAVVSPAHIPKSPADRVKTDRRDAMTLARLHRAGELTYVFVPRADDEAMRDLTRAREDAKKAQRVAQQQLGGMLLRLGFRYPKDNWTKQHFLWLADQKMPTPVQQVVFQEYINTIHETIARVERLTQQIQLLAPNWRMAPIVDALQALRGVSIIVAVTTIAELGDLTRFDHPKKLMAYLGLIPSEHSSGQKRRQGSITKTGNGHARRVLVEAAHSYRLPARVSRVLLKRQEGLSPEVTELAWKCQVRLCARFRRLVAKGKNHNTVVTAIARELAAFMWAIANQTPIAV

SEQ ID NO: 421525 - protein, 353 aa, unidentified
MVEIIGGIDTHADTHTVAALDELGRLLGHATFPTTPIGYADLHHWLVGYGEVIAVGVEGTGSYGAGIARHLHTTGVRVLEVDRPDRRTRRRNGKSDPLDAISAARAVLAGTATGTPKQRDGAVESIRALRVARRSAVKSRTAALNALRQLVITAPDELRQHLSGLSETALITTCARLRPGRDIDALADPTHAAKTALRRLARRCQHLSEEIAEADADLKDLLTQTAPRLLEQFGVGPEVAGQLLVTAGDNPHRIRNDAAFAALCGANPLPASSGRTDRHRINHGGDRAANSALYTVAIVRMRHHQPTRDYVTRRTAQGLTKRDIIRCLKRYIARELLPLIREALPTPPPLDDL

SEQ ID NO: 421526 - protein, 330 aa, unidentified
MEFIGCDVSKLALDLAWRDRSESRWVMAECLPNQASGWQRVLQWAEALLAVERSQICVIMEATAVYHLQFALYLHAQGVKVLVCNPGRAAQYSRSQNQLNKSDRLDARSLQRYGSGLERPHWFQPDHSHIQQLKSLLGLLDQLDRDQLRWHNRLEKATSQAAAETVLKAIQRQLRNSRREKDRTQQAIDELIHAHADLRHTQRLLCSIKGVGTQTSQRLLPLVHGDRFGSARQLAAFLGLTPCHRSSGTSLRKPGQLSGRGNAALRAKLYMPAMTAARFNPELKALYTRLTARGKAPKQALTAVMRKLVHLCYGVVKNQTPYRENYAALS

SEQ ID NO: 421527 - protein, 401 aa, unidentified
MSKKNTRNALDTSLSYAVIGLDLAKADCAVAAVPCSDDELGLIDRMDYESLFEQAEKLEPTLFAMEPCCGYSQISLRLQNMGHEVKVISRHAVKNWIATHKSNQKTDLNDATALAKLALYDHDLQPIRVKNVEECRIASVQAIRIQLRTQATKSLVCFKSLCQCWGIVIRRGSLNTKKMAEAVAAVEKLLGAEAASSLMILRDAYKFTMKQINALDKLLDALVEANEQARTMKTVLGIGTQTAARLAVTTGDIKRFPMPRSYVAYFGLAPRNIITGHSGTPSPSKRGALKPVSSRGQGKVSRRGDRVARSFIIQGAATIYMLYCKDMLPECQLRRWLHEQIKRGKPYGKIIVSLAAKLLRIVWALLTYGEKFDSHKAGVPRSVLAAMEKPLKHDAAAESAA

SEQ ID NO: 421528 - protein, 346 aa, unidentified
MSIVGGLDIHRKQLTFDYLDTDTGELHRGQLAPADRSHLASWLGRFDGGGETTFAVEACTGWRYVVEELRRAGAVVQLAEPADTAAARGRKRRAKTDRSDAKLLRELAAGGRVPQCWIPPFEVLEYRALLECYHDLRREHTGWVQRLHAACFHQGVAALGADTISTVDGRARLRRIAAAELSPAGQVQITVGLSMLDTIEIHLDELRRQLVGIARHQRGAKTLTDRLYGVGPITALALCCWLGGGEHRFRSSRQAVRFTGLDITVYSSDGKRSPGHLSRQGPPVLRWCVYEAGKSHARTSAPDHDYYTGVKDRIDGKRAALSEARKLVRQAHHILTELGDTAFDPI

SEQ ID NO: 421529 - protein, 437 aa, unidentified
MPPPAGQLLFGGFRPGFFMLSAGHSKVDMGWSGVGRGRNLTTDMTTTNTQSDTANPTAPQGKKAHQLIKLGVDVHWREHVVVRQIDGTSPQPAQRFTPEAFVAWVAKQVQQADVVHCCYEAGPFGFVLHRRLVALGVKSLVVRPRNWDEYGQKVKTDRRDALALVSCLDRYVAGNTEALTVIRVPTEAEERSRSVGRQRQQLLEHRKRLAAQGLSCARYYGHDLPEEWWRAKKFAALRDELPEFLVGLLAGLQPLALLAHEQLAALGAAIESAQSQELPTGLGALTAQLLDREMGDWTRFKNRRQVASYTGLVPSEHSSGERRQRGAITKHGNPRTRHLLIETSWRLQQFQPDYHALKSRRAALDQAKRKGDASSRKKLCVGLARQFIVDWWRIRTGRTTPAKLGLQMSWPSAHVLKGKAPPAAAPAAVVPVQPAAA

SEQ ID NO: 421530 - protein, 385 aa, unidentified
MDNCTTYIAMDTHKKQHAVAVLDRKTGEIRQFSVKNTIKDVAKMVKRIAREAPAELKFCYEAGVCGFTLQRRIEEMGHQCSVIAPSLVPVKPGDRIKTDRRDAKKLLGHFAAGQLTEVYPPNAKQEAARELTRARNSAMENLKRIRHQLLKLLTRHGYTYNAGHHWTQRHLQWLRAIEFDQPDLREVFDIYYVEWQHCIQRLDTLDKQLEQLAQRPEYRKIVALLHCFKGIDTLTAITLITEIFEFGRFDSPKALMSYLGLTPSEYSNGERRQPGAITKTGNSRVRRLLVESSWHYRHRPGIGKDLQRRRKGQPQWAIDIADRTMLRLHRRYRRLVERGKIPNKAVIAVARELAGFIWAMMRQHQLQDKSQRLSRHAGIAEVKTA

SEQ ID NO: 421531 - protein, 345 aa, unidentified
MEKGITIGMDLGDKKHQICILDKAGKIITEEAIDSKRATTTKFFKRYRGAVVAMETGTHSRWVSQIAETEGLEVLVGNARKLRMIWQSRQKSDTRDAVMLARIARMDPALLCPIHHRGEQVQMDLEIIRARDLLVRERTRMVGHVRSVVKNMGERLAPSSAASFGHKAKIPEALNEALKPMLEMIRELTKKIRAYDLMIKEAAANKYPETEQLRQVGGVGPLTALAYVLTLEEPERFAKSRMAGAYLGLVPRLDQSGQIDKQLRITKHGDGYLRRLLVGSAHYILGPFGPDCDLRTFGLKLMQRGGKNAKKRAVVAVARKLAVLLHALWRSGQQYEPKRRQQAAA

SEQ ID NO: 421532 - protein, 408 aa, unidentified
MGKARRTITPTRYTRFCGVDVAKQRHVACIIDRDGNMVARSLSFTNDSEGFERFLARLKDVGGPRRVMLAMEATGHYWYSLHDFLVRHTYGVAVLNPIQTAQQAKKGIRKSKTDKIDARHIATLLKNGDYRPALVPGELAMSCRQLTRLRSSLIQQGVRTQLLLKARLHPVWPEFDTLFAAPFRTTGRKLLLAAPTPTDLLAMTPGELTELVRTASRGKFGAARAEKIRQSAVCSVGMKRGLEGSRICIRSLLTQLEAVDSARKELESRIVEVAEHIPAYVLTLPGADPIKAASLFGETDPIETFRSPAQLVAFAGLEPTVFQTGNYDAPRRAISKRGSPYLRRTLWLMAMGALQHDSDLREYWLRRRREGIHYLNIVTAVAAKLARVTWRILTDRRDYLPLRPATER

SEQ ID NO: 421533 - protein, 356 aa, unidentified
MTASYDYHIGVDYHKSYSHLVVQDSSGKTLRSGRVKNDRQSLGGFLERYRENSHAVVEATRNWMVIYDWLDDICDDVVLAHPLKVKAIADAKIKTDKIDATVLAHLLRADLVPEAWAPSERSRDLRVALRERMFYVRLRTMTKNRIVTVFDRYPEQTAQLKTLGDLFGKAGRIQLSQVNVSEIDRIQIDRGLAFIGAINERIKQSEATIRAMTKANPNVRLLKTIPGIGEFFARLIDAEIDDIARFRNPKKLAAYAGLVPSTYSSGGKTYHGKIIKQGNKWLRWAFVEAVTPAIASDPQLRAQYEHLKIRGTNKARVAMARKLLTIAFQILRDQRAYEPRGESIITEGASMKSRLS

SEQ ID NO: 421534 - protein, 330 aa, unidentified
MTMTPTQQTYNHVVAFEVSKEALVVHTLPTDEQCTIANKPQSVRRLLKSQLKHNRKQKLGPILIVCEATGGYERHVLDAAIDLGLPVHRAHGARVRFFARYCGLIAKTDPIDARVLAHYGVKTDKLRLYVPPPPETAALRALHARRTEIQQMMIAETSRLDQAHHKSVVKSLKAHIAQLKSALEAIEDEIAQLVRDNASLKKKVELMRTVIGIGPVSAMILLAYLPDIGSLTKGEVARLSGLAPINNDSGKKRGARHVEAGRTAIRRALYMAAVVAMRTNPVIKRFADRLRGKGYPFKYVAVAVMRKLVVILNAVLRDGQPWKGAQAACA

SEQ ID NO: 421535 - protein, 351 aa, unidentified
MVIIGVDYHPSFQTIAFLVEETGECGEQELNHSDGQVEKFYRDLKQRGIRVRVGMEATGYSRWFERLLAELGFELWIGDPAEIKAKRVKKQKTDRNDARLLLRLMLENNFPQIWVPSPENRDLRQLLWHRHRLVQMRTRIMNQLQALAMNEGKRWKKKLFSEQGRAQLEKLALAPWASRRRRELLELLDRMNPTIEELTAAAEQEARKRPEALRLMTHPGVGPLTALAYVLIIGTPERFHRGKQVGTYVGMIPSEDSSAGKQRLGHISKQGNSLLRFLLVEAAQAAARINPEWRRRYIHLAMRRHKSIAKVAMGRKLGVRLYWMWRNGCAYSPSFEFGSYVGQLGTGHGVK

SEQ ID NO: 421536 - protein, 402 aa, unidentified
MADKQKRFVGLDVHKHYVMVGAVNRLQEMVLPPRKVSMAEFEAWARKNLRPTDEVVLEATTNAWYIYDLLEPLVERVVVCHPPQVKLIAAAFVKTDKKDTMTLAKLLAVGMIPAVWVPPQPVRELRALINHRQRLIGQQTRTKNRLRSLLQRHHFVPPEGDLFSAAQRSWWNKLDLNPSEKLRARQDLIILDQLAPLISEVETEIERLSVTEPWAEQTPYLLQLPGIGLITAMTILGAIGEIERFPTAKKLVGYAGLGARIHSSGQTHRTGGITKQGRKELRAVLVEAAWTAVRYDQHWQEQFERLADRIGRQKAIVAIARKLLVIIWHVLTAKAADRRAEPQQVARYFIRWGRQLRVKTTQGLKASEFARQQLDKVGLGQELQRVPYGAVTYSLPPSATTT

SEQ ID NO: 421537 - protein, 341 aa, unidentified
MKRFIGVDLHKNSFTVCYMQRKGECGLETFKVSPKDIEAFKKTLTKQDEIAVESTGNTGYFAREIKESVSKVRIINPIQFKIISESVKKTDEHDAVTIARYLSKGLIPEVRMRSKEEAKLASLIGTRDKFVKLRTTLKNKIHNILNASGVVTTKEMFSGDKGLNKVLSMNLDDADIFELRIIIDQIKSLNKAIDEINKELTDRGKKLAGHKNLTSITGIGDLSATILLNTIGDVSDFADDKKLAAYFGIVPRVAVSNETSQYGRITKRGNKIARTALVQSTLIAIRYNHYLRRFYLKLKAKKGSGKAIIATSRKLLTIVYRTLKNDWVFEDFNRFKLAVSV

SEQ ID NO: 421538 - protein, 413 aa, unidentified
MEVLVERCAGLDIGKADLKACVRVPGPRGGRRQQIKTFATTTGSLLRLREWLSEQGVTVVGMEATGNYWKPVYYVLEDTVEVQLLNAAHMRNVPGRKTDVSDSAWIAQLVEHGLVRASFVPPRPIRRLRDLTRYRAALTAERTREKQRLEKLLEDAGIKLSVFVSDIFGVSGRAMLAALVEGERDPEVLAAYARGRMRPKIPLLVQALTGSFGAHHAFLCRTMLSRIDSLDATIGAVTAQIEAEIAPFQAIADRLDTIPGVNQRTAQVILAEIGADMAQFPTPARLASWAGMCPGNNESAGKHFSGRARKGDRWLRAALGEAAAAAAGTRDSYCRAQYHRLAARRGKKRALVAVGHSLLVAAWHVIHDDVSYQELGALHFLTQVDPARQTRRLVTQLQQLGYQVQLRPASGSG

SEQ ID NO: 421539 - protein, 421 aa, unidentified
MRGLRTKRVNTVREGTLIATVDIGLASNTGYCTTMDGRSTKSFRFDNTKEGFEKFWCMTIASKNRFGCDEVLVGYESTGPYAEPLVHYLANKQVKIVQVNPMHTKKMKEVNDNSPLKTDDKDPRVIADIIRLGRALTIVVPEGDAAYLRRLNNSRERHVGERTAFLNQLQQLVFLIFPEFKTVLKDMKGKTAQHILNRYTTPERIGTLSREALGEEMRKRSRGKFGIKDAESLIGLARETVGIQEGLADIFMDIRHILMQLEAEERFIAEIEAEMGATLDRIPCSARLLSIKGLGTISVAGLIGEVGDFSKFSTQSEIMKLAGLDLYEISSGKRKGQRRISKRGRSLLRKILFYAAIQTIRKNGIMYEYYTRLTGRGMERMRALIAVSRKLLGIIHAIVRDNRDYVGQYQAPERRVLKKAA

SEQ ID NO: 421540 - protein, 415 aa, unidentified
MANPLFVGLDVHSRTNRVCLMDQAGEPWGRRFSVANNRPGSQLLAVRLLEALRQGEFDSLRLAAEATNWYWFPLFQTLQQDPLLNQWPVALFALNPRLIAKYKETFSDRDKTDDSDAFLVADRLRLGRDLPAPFQLDAQHLALRFLTRYRYHLVKDLVREKNHCLSILYLKASEYRQGHPFSDVFGATSQALLQEFATLEEIAAMPLEELVNTQDAKGKGRFPDPAQVARELQQVSQDSYPLDSQLQQPINYVLNWNFQLVNFLERQLQRVNTAIAEAMGQIPHTLDTIPGFGPVYSAGIIAEIGDVARFDHDEAKVAQFAGLHWRKTASAKFQAEDTRLTKRGNAYLRYYLCEAANAVRMRDAEYAAFYQRKHDEVPKHQHRRAVVLSARKLVRLVVRLLTTNQPYRPRSVPGG

SEQ ID NO: 421541 - protein, 455 aa, unidentified
MKRKNATMEIVNADAAGIDVGSRSHFVAIGQNEKDVKEFGVYAEDLHSIANHLLVNGIKTVAMESTGTYWQNLFSTLQDAGLEVILCNGKFTKNIKGKKSDVQDCQWIQKLHSLGLLSGSFLPDAATEQLRTYCRHRSNLIEASASTSKKMQKYLRLMNFRLDVVVNDVTGLTGLAIIESICKGEQDPKTLSDLRHGNCKKSKEEIEKALHWNGRTDYLFALQQEHDLFKVLQSKIEQCDKEIKKTLNQQISVDGNKKLLKTDTKVHKKANKNAPKNIDINQLAFQYFGGIDFMAIEGVSHSTIIALMSEIGPDGFNKFETAKQFASWLRLCPNNKISGGRVLSSKIPKGSNRLKIALRNAANAIGNLKDTHLSNFFNRISYRRGRHAAVSATARKLAIIIWNMVVKKIPYSPPNTYEFLDQKRKRKVQEMKKLITKFAISPVEIGFEDISLSTT

SEQ ID NO: 421542 - protein, 366 aa, unidentified
MTSMLHSAQSSQADADDTEVILGVDTHKDTHVAAVLNPVGVLLDSRCFAATAAGYQQLLGWVQAFGTPRRAGVEGTGSYGAALSRHLQTAGVQVLDVNQSDKATRRRRGKTDAIDAEAAARAVLAGRATATAKTGDGPVEMARLFKLAKDAAVKSRTQAINQLKAVLVAADPALRESLSGLSSRVLIRRCAQLDTGVPTDATSAAAWTLRLLAHRIGCLTKEIDDLNASITAAVTAHTPQLLEGNGVGPDTAATLLITAGDNPQRLGSEAGFAALCGVSPVEASSGKTQRRRLNRGGDRQANAALYRIALSRLRWDHRTRDDLDRRIAEGKTPREAIRCLKRYIARELYQLITKPQPTPITNPSAT

SEQ ID NO: 421543 - protein, 356 aa, unidentified
MDSTKYIGMDVHKEATTIAVMNSAGTLVMESIVETKAATIVQFFEGLRGQLCVTLEEGTWAAWLYDLLKPHVTKVVVCNPRKNALLKAGNKSDRIDARKLAELLRAGLLSAVYHGQTGLRTLKELGRSYLAISKDLTRVMNRVKALYRSWSIPCGGASVYAPRHRKEWLSKITEPGVRRRAELFYQQLDGLQKLRQEARCDLLAESRKHGATELLRRIPYIGPIRAALLIALMQTPHRFRTKRQLWAYSGLALETSISGEYHYVQGQLRRSKRPLALRGLNQNHNHDLKSIFKGAATKAGSAKGPFHDFYSALLAQGMKPTMARLTLARKIATITLLVWKKGVCFDAQQLKRQVSV

SEQ ID NO: 421544 - protein, 348 aa, unidentified
MTIVDAPRPVTGGVDTHLDLNVAAALDLVGGLLEVAEFPATAAGHRRLLGWLAGFGPVARVGVEGTGSYGAGLARHLRAAGVEVVEVDRPNRQARRRAGKSDPLDAIEAARAALSGRACGAAKTRDGNVEAIRALVVAKRSARSAKIQALNQIRHLSFTAPEELRARLKDVSRHQLAARAAALRPRQREGADPVMAATKTALQILGRRVLALDEEKARLDALLAGLVTQTAPQLLTLFGVGVDTAATLLVTAGDNPGRLRSEAAWAHLCGTAPIPASSGKVTRWRLNRAGDRQANAALWGVVITRLRNDPRTQAYMTRRLAEGRSKPEVIRILKRYVAREVYRHLPRP

SEQ ID NO: 421545 - protein, 400 aa, unidentified [sequence omitted]

SEQ ID NO: 421546 - protein, 344 aa, unidentified
MKLFIGLDVSLAKTAVCIVSEHGKIVKEAEVGSDPAALTQFALEQQGEIAMIGMEAGPLSQWLHRGLTEAGLEVVLMDTRQVKGALKAMPIKTDRRDAEGIARLLHLGWFRPVHCKSVSAQEIRALLGARKSIQQGVIALEMSLRGLLRNFGLKVGAISKGRFDARIQELVASNTTLVAATEPMLGARATLRHELARLERHVRSLAQDDPTCRLLMTMPAVGAVVALTFKSAVDDPARFSSSKKVGPWVGLPPSRQQSGERDVTGGITKAGDAHLRRALCQAATVMMNRGRGSWLRTWASRVAKRRGTKRAMVALARRIGVILHRMWLDGRNFRWEGAPEPIHA

SEQ ID NO: 421547 - protein, 433 aa, unidentified
MKPPPEQPAPEWLVHRAFGGLDWASQKHNVIVVDPHGKVVEDFEIEHSALGWKKFRERLAPYGAIPFAIETSQGTAVEQLLEAGMKVYPINAKSAKSYRERKAPSGVKDDRLDAWSFADACRIDGQGWRALRPEDPLVKELRLLCRDEVSLIEQRTSFICQLRHALAEYYPTALEAFEDWGSVSAWMFVQRFPTPQLLQVAGKRAWEKFLHARHLWRTESGPRRIELFSHATELSGTVPMANAKSQLALSLISMLFALEKQLGIYRKRIDELFGRHPDHDLFGSLPGTGPKLAPRLLSEIGDDRERFEDGPQALQCLAGSAPVTRRTGKCKVRANPDRWPCHQRWACDKHLRHAMHLFSEHTLRQCVWAQIYYQHHRQKGSSHADALRRLTQRWLKIIYRMWMDRTPYDPMLHHHHQLKHGSWVFELKTTNCK

SEQ ID NO: 421548 - protein, 310 aa, unidentified
MEQIFVGIDVAKDRLDIHVRPSGESFTVARDGEGLVVLVDRLKQIAPALVVLEATGGFEITVAAAVGSAGLPLAVVNPRQIRDFARATGKLAKTDALDAAAIAHFAQAVHPEPRPLPDAQAQELGELVARRRQVIEMMVAERNRARLLQSKRLKKRIDQHLATLQKELTEIETDLDDTIRGTPIWRENEDLLKSVPGIGSATARTLLADLPELGALGRKQIAALVGVAPLNRDSGAWRGKRTVWGGRANVRTALYMAALSASRWNPVIAAFYRHLRSLGKPPKVALTACMRKLLVMLNAILRDRRPWQNA

SEQ ID NO: 421549 - protein, 327 aa, unidentified
MEREYIGIDLHKAFFQVCAITSTGERRWEQRWPTNDAGIAALLARCSGQSHLAVEASSPTWAFVDRVVGHVGAVQVVDTRKTRIKAGYAAKTDRLDAQRLADALRRDSVVGIYYPPPGIRDLRELGRYRCHLARLQASLKQRIRALLLRQGVVTPTALFTHRGTAWLDLLVLEGWTGSELRGLRTVLADVRRQLVPVLTAIRTVAAADPIAQALDRLPGFGPVFSVTVRAEVSTIARFPDGPHLASYAGLVPRVERSGGRQWSGRITKTGSPWLRWTLVEAAIHQFRRQDEFGRWARRLAVRTGILKARVAVARALCDEIFVAWPRS

SEQ ID NO: 421550 - protein, 409 aa, unidentified
MKKRSMFVGMDVHQHSIDLTVAESGHDGTVTHFAAIGGDLAALDGAITTLRARGAELHFVYEAGPCGYGIYRHLRQAGLQCAVVAPAQVPKKAADRIKTDRRDSRTLAIQHRAGALRPIYVPDEDDEAMRDLVRAREDAIHSRRRARQRVNSFLLRHGRSYPCGKKNWGARHRRWLAEQYFDRVAQRITLEEYVGAADEGDARVTRLTEQIAALLATWRWRPVVEALQALRGVSLIVAVTVVAEVGDLTRFTPRALMAFLGLVPAEYSSGARRRQGGITKTGNAHVRRVLAEAAHAYRATPALTQFVRRRQQHLPQAIRTVGWKAQLRLCGRFRHLTAARKHPHKVRMAIARELTGFMLDIARRVASPASGNAAAAAPPDSIILRRRPRPTAAPGSVRARAARPAARAH

SEQ ID NO: 421551 - protein, 408 aa, unidentified
MDVVYSHVCGLDVHKKNVVACIITPDHKEIRTFSTMTEDLLALIDWIKSHGCTHVAMESTGSYWKPIYNLLEMERIETLVVNARHIKNVPGRKTDVKDAEWIAGLLRHGLLKGSYIPSRPQRELRELIRYRRSLMDERAREIQRIQKVLEGANIKLSSVASDIMGKSGRLMIEAIIAGETDAAVLSELAQRRLKAKKADLQKALHGLIGPHQRLMLKTQLRHIDELDKLIEQIDAEVKKRMDPFEEDLERLDTIPGVGRRSAEHILAEIGADMDQFPSAAHLCSWAGLAPGNNESAGKRKSGKTTKGNQKLRTALIESARAAARCKDTYLSSLYHRIAARRGANRAAVAVAHRILTICYHLLKNKQTYIELGPHYYEERKRTHVARQAIRKLEILGYKVVVEEMDQTA

SEQ ID NO: 421552 - protein, 408 aa, unidentified
MELLHPICSGLDVHKDSVVACVRTQVGARGQSETRTFGTCTTDLLQLCDWLQESGCTAVGMEATGVYWKPVWHILEGSFELILANAGHIKNVPGRKSDVSDAAWIADLVAHGLIRPSFVPTPSGQQLRDLTRTRKQFVRQRAQHTNRIQKVLEDANIKLGSVVTDVLGASGRAILDALVDGITDPEHLADLASPRIKAGKQKLTEALRGKVTAHHRFLLRMHLEQVDATDRAVREIEAQIEALTSPFDDAVERLTTIPGVSRTAAAVIIAEIGLDMSRFPSAAHLVSFAGLCPRLDETAGKKRSTRLRKGSNWLKCTLVSCAWAATHTKDTYARAQYYRIRTRRGHNKAVVAVAAGILVAVYHMLTRGTAYQDLGPTYFDTRNKERTAKRLQRRLEDMGYQVALTEAA

SEQ ID NO: 421553 - protein, 329 aa, unidentified
MCSSHNVTEVIGADISGRAIVLAWRSSQRPCLSITNSRAAILAWLKHLPEGCVIGMEATGRLHHLLADLAAAHGHTVYVVNPKHLSEYAKGVGQRGKTDPLDAAVIARYLDRERDQLHPYTSPSALQRKLRDLISQRAALVRHTTALKQSIEATGNEFNRALKRAHQAALKSLSTLLAEMNNELKRTIAANTLLESKRKLLQTITGVGFMNSVALTHRFDRTPFANSDAVVAAYGLDPRPRDSGNQVGKRRLTKQGNSEDRRLIYLAAQSACKTKLFSPIYRALLAKGFSTTEAILIIARKLLRIAFALWTTGTSFDPQKVGKNTCKKP

SEQ ID NO: 421554 - protein, 375 aa, unidentified
MEGAPRLDTTTFIGLDVHARSIKAVSLDVMTGEVRAATFGYDAGAVAEWVRSVDPRARCVYESGVTGFDLQKRLSGLGVDCVVGAVSKMIKPSADRRRKNDRNDAEFLARMLSVGNVVEAWVPDDECEAARDLTRALEDARDDLSRSKQRLSKFLLRHGLVFDERTPTGRRKGNWTRAHWSWIESIRFAERADNDVLAYYVDAVRRAAEEKARLEGLVEAEARKPRWRKRVDSLRCLKGVDTASAADLVFEAGEFSRFRNARSFAAWVGLTPSEHSSGESDRRGAITKAGNKHLRKTLVEAAWHYLTCSGRPKGLAKGQAPDRGARRHAAKGVRRLVERRESLLARGVHGNKANVATARELACWVWAVGLMAEEA

SEQ ID NO: 421555 - protein, 416 aa, unidentified
MTYRIAAIDIHKNVWMVVVATAAAEVADTAGEALEFICRQFGTGAQERQHLVSWLQRHPVTEVVMESTAQYWKPIWLELEPHFQKLHLAQAQSNRAPRGRKNDFRDAKRLARRLLAGELSLSYVPEPEQRLWRMMTRGKQQLVRERAGTRNRIEAFLEEIQIKLASVISDLLGASGRRILKALSEGETDPDKLAQWGDERLKCSQAELADALRGHPTPTHIAMLKLFWERVELLDRQIGDYDRLAAQALKPYQEAVLRLAEVNGFGVDSAQQLIAEVGVLADAFPSAGEFSSWVGTCPGSNVTAEENHSSRSPKGNKFARRILTQAAQAAIKKKGSHFQNVFRRFVGKLGYQGAVWVVAHRLTRLVWLILNKQVRYVEQGEDTNPKAKQRRAQKLTRALRRLGYEVSLKPIQTAQA

SEQ ID NO: 421556 - protein, 453 aa, unidentified
MTHKPAPAFDETRRNVAGIDIAGHADHYVCGPRRDDGGHDIARFGTTTAELHKLLVWLKERGVESVAMESTSVYWIPVADLLEANGIEVVLVDTREVRMVPGRKSDIKDCQWLQRLHSCGLLRGGFRPPENIAAVRTVLREREGLTGMRTQCLQQMQKSLDQMNIRVHHAVSDIDGKTGMAIIAAVVAGERDPVALARLRDPRCGKGEKEIAEHLTGTWREEHLFNLEQAYRMLRFIDERIAEYVTKAAAMLRALAAASGKPPPPAPPAGEELSRKDTRDAEAKGDLQRIIGFDMTKLPGIGYDTAAVVLCEIGPDFTRFPTERHFAAYIGLAPSLGKSAGKNVRQRKRCRNTSRAGRALRMAASTLYRSQTELGAFFRSVARRTDRKTAVKATARRIAHRIYRAVRYGAAYLDRGAQAYESRMRERTLRTVRHLIKSQNINELELSSAFAAV

SEQ ID NO: 421557 - protein, 396 aa, unidentified
MVQIWAGTDIGKTHHHCVVLNAEGERLLSRRVLNDEPELLALLADVLALDEDVVWAVDVADGMAALWISVLLNHGQHLVYIPGLAVNRASAGYRGMGKTDAKDATVIADQARMRRDLTVLQSDDEQAIELRVLTSRRAALERGPHPQDQRLRGQLTSIFPALERVLDLTNVGPVILLTGYQTPAALRRTGGKRLVTWLRNRSVRSPEALTEAALEAAESQHTAVPGEKITAQVIHTLAKEVMSLNEQISEIDKLIAARFRDHELAEVISSMPGIGPLLAAEFLAATAGDMSRYGTADRLASLAGVAPVPRDSGNISGNLHRPRRYHRGLQRVFYTSALISIRSCDDSRRFYERKRAEGKRHTQAVLALARRRVNVLWALIRDGQCYQPNLPVTVTA

SEQ ID NO: 421558 - protein, 456 aa, unidentified
MTPPPPVLPGLQTGNRGMRPRAPVSDRPVASPLAGSSLPLEGEPIVSLTESSFYVGIDWAAETHAVCVLDSAGRVAAAFTITHTGDGFAQLLRRLSRLTQDPVDVPVGIERPDGRLVDALLEAGHPVVPISPNAIKAWRDGEVVSGAKSDAGDARVIAEYLRLRAHQLRPATPYSAQTKALRTVTRTREDLVHLRVAATNQLAALLDSHWPGAKAVFTDVASAISLEFLTRYPTPLAAASLGEKRMAAFCAKHGYSGRRPAAELLARLRQAPEGTTDEVLCEALRDAVLGQVTVLRALNTALTNIDRSVSAHLGEHPDGEIFTSLPRSGRINAAQVLAEWGDARAAYDSPDAVAALAGLSPVTKESGKHRAVHFRWACNKRFRNAMTTFADNSRHASPWAAHVYETARARGHDHPHAIRILARAWTRVIYRCWLDGVPYDPARHGNAAALATTQAA

SEQ ID NO: 421559 - protein, 338 aa, unidentified
MIVVGLDVHKHSLTAVAVDELGRPLAEQTSAVSGEAVLEWADSLQEERLWALEDCRHVTRGLEQTLLSAGERLVRVPPRLTAPERRRGRSRGKSDSIDALAIARAALREPRLEGPRPEEPLLRELKLLVDHRDDLVAERRRCQQRLRWHLHELDPSLQVPLGALDRSLWLDRIARRLARCEQTLQVQIARELVGRCRSLSRSSAELQRQLEERSQRLAPGLLALPGCGALSAAKLLCEIGPIARFRSDAQLARHAGVAPLEASSGKRRRHRLDRGGNRQLNCALHRIAITQGRVHAPAKAYLERKQGEGKSRREAIRCLKRQLARTVYTTLKSESALT

SEQ ID NO: 421560 - protein, 356 aa, unidentified
MSHNIQYIGMDVHKEAIVIAVLNGSGKLVMESIVETKANSILQFIQGLRGELHVTWEEGTWAAWLYDLLKPHVHQVLVCDPRRNALLKEGNKSDKIDARKLADLLRTGMLRSVYHGEHGLRTLRELGRSYRTISQDLNRVMNRIKALYRGWSIPCAGTQVYAPRYREEWLHKLEHAGVRRRAELLYQQLDGLQTLRRTLRPELLAESRKHKASKLLRQIPCIGPIRAARLIALMQTPHRFRSKRQLWTYSGLGIETRDSAQYRFVRGQLQHAKKPQQIRGLNQNHNHEMKEIFKGAATRASCGVGPLRDFYLSLLAKGMKPEMARLTLARKIAAIALTLWKKEERFDAEQLKPQAA

SEQ ID NO: 421561 - protein, 352 aa, unidentified
MEIIGLDLHKRETQLCRRQSDGRIVDERIPTSRARFTQTFGALAPATILLEASTESEWVAAHLEQLGHTVIVADPNFAPMYATRSRRIKTDKRDARALMQACALGAYRPAYRLSPARVHARAALAVRDTLVRTRARVITLLKTLVRREGLRVPTGTSRTVAARVAALDLGATAPALGAELAPLLALLPALNTQIAALDATLAAIALDDPVVARLATAPGVGVVTAVAVAATLDDITRFPSAHAVEAYLGLVPSEYSSADRRHLGHITKAGNARARWLLVEAGWRILRSKQPETAALRAWGAAIAARRGNRIAAVAVARRLAGVLYAMWRDGVPYDAAKLARGQRGVPRSPTA

SEQ ID NO: 421562 - protein, 344 aa, unidentified
MKVLKQVLGVDVAQKELEVTLGRMYDDTTIELYAHSVFKNTENGMLKLSEWVNKLTDKEIKVRYVMEATGVYHQKLAHYLEEKQEEVSIVLPNKISNYMRTLDIKTVTDKTCSEAIARFGLERKLESWKKPKDIYRVLKQLTRERRQITDERTIVKNQLHAEEAEAIPNSQSVVRLHRRIEFLNTLEKEIKDEIKINIKKDDNLMTDINNICTIPGVSVLTAATVIGETNGFELIRSKKQLTSYAGLDVKEKLSGTSVKGKPRISKRGNRYLRSCLHLPALSTIKWDDNFRDQYARIVAKQGIKMKGCVAVQRKLLELIYIIYKTKTVYDKDYESKKRASAQMV

SEQ ID NO: 421563 - protein, 353 aa, unidentified
MAIVVALDVHRKQITYKTLDRETGEVERGRIAPAARAEVRAWLARFAGCEAEFALEGTTGWRFVVEEIERAGHRPHLADPAETAAKRGRKRRAKTDSADCDLQLRLLCAGELPESWIPPAHILELRTRVRMRKTLIDQRTAWQQRLQAQLFHQGVPAGLRPRTRAGREALARAELSPAGRELVSLALRMIEAIDRELAPLDRDLHAFARRQPGCRALIARLYGVGPVSATAILAELGDARRFARSDDAVRHSGLDVTVYQSDVKRAPGHLSHEGPELLRWALFEAALSAARAGSPDHAYYLQVAERIDHNRACLSVARKLCRRAHHILRELGDEALAPVEGDPHAEEAIAAAA

SEQ ID NO: 421564 - protein, 444 aa, unidentified
MAMRKREREREDLVFPNAAAIDVGASSHWAAVPPHSTDAPVREVGAMTDDLNGLADWLLACGVDVVALESTGVYWIPVYEVLEQRGLKVWLVDARQVKYVPGRKSDVQDCQWLQKLMSYGLLRAAFRPAAEVCVIRAVARQREVLLTSQASWVQRMQKSLVQMNIQLTEVISDVMGQTGQAIIRDIVAGQREPKILAKHRHRRIKASEQDIVRALTGNWREEHLFVLKQALAMYDDIAKHLRECDAKLQTLLSERSANSVELGKAPRAGSKARGEFDVRQQLANWAGADLTRINGLGLDSVMKILSEIGTDLSRFANVKHFCSWLGLCPATKISGGKVLSARTKRSANRVRQALKMAAMSLSHSDSALGAFYRRLCGRMDKPRANTATAHKLARMVYFMLTRGEAFVDEGQQRYEEQQHQRSVAALKRRAAALGFQLNPVGAAA

SEQ ID NO: 421565 - protein, 391 aa, unidentified
MIYVGIDVAKDKHDCFITNSDGEVLFKSFAISNNQEGFETLFQKIQSVSHDLTQIKVGLEATGHYSYNLLGFLLDKGLTTFVINPLHTNLYRKSLSLRQTKTDKVDARTIASMLMSDVNLKSYSDTSYHNEELKSLTRYRFDKVKERAKLKTSVSRLVCILFPELEKLVPRLHMASVYAMLSEFPGAKHVASAHLTRLTNLLSEASKGRYGKDIAITFREAARASIGSNMPAKSLELKHTIKLIQELDSEIDEIENEIKIIMDEINSPILSIPGINYRMGAMIIAEIGDFSRFDSPDKILAYAGFSPSTYQSGQLDGAYAHMEKRGSRYLRYALYNAAKYVCHWDPTFAQYLAKKRAEGKHYNVAISHAVKKLVRVIYHLEKSNQQYIKAA

SEQ ID NO: 421566 - protein, 416 aa, unidentified
MSTYFNQVYDDNRWWISRYQTLEREVNLMIYVGIDIAKLNHFASALSSDGEILIEPFKFTNDNDGFHLLLSKLSSFEKSNIIIGLESTAHYGDNLVRYLVAENYKVCVLNPIKTSVMRKNNIRKTKTDKVDTFIICKTLMMQDSLRFVTYYDLDLMNLRTLGRFRQKTIKQRTRLKIQLTSYVDEVFPELQYFFKSGLHQKSVYALLKEAPTPKEIASMHMTHLAHLLKVTSHGHFDKEMAQQLRVLAQKSVGASDSALSIQITHTIGQIELLDSQLERVEAEMTEIMKFNDSVIMTIPGIGYINGGMILGEIGDIHRFSNPSKLLAYAGLDPSVYQSGNFHARKTRMSKRGSKVLRYALVNAAHNVVKNNATFKAYYDAKMAEGRTHYNALGHCAGKLVRIIWKMLTDEVECNLD

SEQ ID NO: 421567 - protein, 316 aa, unidentified
MSNYIGIDISKATLDVYNGKKSYKFENNETGFKEILGLVEDIKNVIFIFEPTGVYSYALTDFCSKKNINIVMVGPKESRDFARSLKVRSKTDKIDAKVLYKYQSHIEPSMVKVPVVNHQGIKIQEMLNVYENIQSSKQTFKNQLESTSKSDKYLLQTLNKIIKDLDKEALKLFNKIELILLKNKEIKAKYDAISTIPSIGQKSALYLTAFFLKYPTANAKEITALVGLDPVIRDSGTFKGKQRISKQGGQQLRNLLFLPTLCAIQHNDRIKAFYDRLIANAKTKKLAVIASMRKLILMAFSLFKSKGVYQPLIVID

SEQ ID NO: 421568 - protein, 350 aa, unidentified
MKKYIGMDVHKATTVIAVINESGRIITEAVVETSPAAILDFISSQRGCLHVTFEECAQAAWLYDMLRPHVADLLVCDPRKIARASNKGDKSDARRLADLLRTNALTPVYHGEQTTTGLKELAQGYTCLVEDRTRVKNRLKALFRARGIACEGSGVYSLDERKQWLAKLDSPAVRARADRLCSELDCLEWLSTEAELDLRAEARKHPAGKILRSIPGIGFVRAAVIIGVAGTPHRFRTKRQFWSYCGLAVRTVASSEYRMLEGKVVRSSKRPLVRGLNRNYSRALKSVFKGAAKTVASGQWSSLFEAMVANGTPESLAYLTLARKIASVTLALWKRGERYSQKKMKIVHAA

SEQ ID NO: 421569 - protein, 414 aa, unidentified
MFAVGVDVSNGRSTAAVLGARRKVVMKPFEVPHTVDGFASLIEKLRGLNGEARIVMEHTGRYYEAFAMSMYRAGFFVSAVNPLVIRDYREGVDVRKVKTDRADALKIAQFALDKWEILPQYTPMDTIRYDLKTLHRQFQLSSKTRTALNNNLIALLEQSYPGVNRYFDSPVRPDGSQKWVDFVDTFWHVDCVASLSRSAFVERYRKWCRRHGYNFSEQKALELHADARQKFPLVPKSDTCRLLVKEAVAQLRAVSRTVETYRAEMNRLAAQLPEYETVMAMTGVGKSMGPQLIAEIGDLRRFAHQKSLVGFAGTDPIKDDSGDRVSHSKPSSKRGSPYLRKTLFVVMTILLQLQPQDDPVYQFLDKKRSEGKKYYVYMTAGMTKFLRIYYGRVRDCLKAKGLWEQPRLESDSSD

SEQ ID NO: 421570 - protein, 417 aa, unidentified
MARVFEAVFERVAGLDVHKAQVTACVRIPDADGQRVAHLAEFSTTVPGLLALADWLKSYGVAHVAMEATGVYWLPVWHILEDDFELTLCNAAHVKNVPGRKTDVSDAAWLCQLMEAGLLRGSFVAPKPQRRLRALTRYRKTQIAERQREANRLHKALEDTGIKLDCVATDILGVSGRAMLDALVAGTTDPEILAELAKGKLRAKIPALREALQGRFEPHNALIIGAILSHLDFLDEQINQLSDAIEAELGPTGQAAVTLAATITGVANRTAEVMVAEIGTDMSVFPSAGHLASWAGRCPGNDQSAGKRRSGRRRKGSKFLGISLQEAALAATRVKDSYLQAQYQRLKPRIGHRRALGAVQHSMLVAYWHMFTTGETYRELGGDYYARRDPERLTRRLVARLQSLGHNVILEPLPQAA

SEQ ID NO: 421571 - protein, 334 aa, unidentified
MENIALIGIDLGKNSFHIHCQDRRGKAVYRKKFTRPKLIEFLATCPATTIAMEACGGSHFMARKLEELGHFPKLISPQFVRPFVKSNKNDFVDAEAICEAASRPSMRFVQPRTESQQAMRALHRVRESLVQDKVKTTNQMHAFLLEFGISVPRGAAVISRLSTLLEDNSLPLYLSQLLLKLQQHYHYLVEQIKDLESQLKRKLDEDEIGQRLLSIPCVGTLTASTISTEIGDGKQYASSRDFAAATGLVPRQYSTGGRTTLLGISKRGNKKIRTLLVQCARVFIQKLEHQSGKLADWVRDLLCRKSNFVVTCALANKLARIAWALTARQQTYVA

SEQ ID NO: 421572 - protein, 428 aa, unidentified
MEVRFPRCAGIDVHKRTVVACRIVLTDDGEWLRETRTYGTTTEDLLRLSDWLAAGDCTHVGLESTGEFWKPVFNLLEGSFVVWLLNAQRVRAIPGRKTDVRDAEWIAELLRHGLAEPSFIPPRHQRELRELTRQRTNFVRGRATLVNRVQKVLESTNLKLTAVVSNIAGVSGRAILAALLAGEEFDDRLFLADLAKGKLRQKRDQLERALRGRLQPHHRFLLTELLAQIDGLDATIARFDAEIARLCAVNEEEAVIELLDTIPGIGRAMAELLVAEIGVDMGKFPTADHLAAWAGVAPGNNESAGRQRSGRTRKGNAWLKTALVQAAHGAARMQQTALAAQYRRIAARRGARRAIMAVAHRLLVIAYHVIARREPYRELGADYLERRRPTAIVDRLVQQLRQLGVTVTIMPDEQRVTPLTAAPLTATP

SEQ ID NO: 421573 - protein, 345 aa, unidentified
MNVTTIGIDLAKDIFQVHGVNEHGKPILRKQLKRHQIVAFFANLPGCLIGMEACASAHFWARKLQTLGHTVRLMAPQFFKPYVKTNKNDVADAEAICEAVARPNMRFVPIKNVDQQAVLALHRARQGFVRARTAQANQIRGLLGEFGLVMPRGITSIAQHVPQLIEDASNELPGLFRLLIQRLTDHLKELDRQVAEIETQIKAWHHASDASRRLAEIPGIGPITASALVASIGDGKCFSNARQLAAWLGLVPRQHSSGGKPTLLGISKHGDTYLRTLMVHGARAVVRYCANKDDAFSGWLHRLLTRRHKNVAVVAVANRNARIAWALLTQGTAFRSDYAPSAAAA

SEQ ID NO: 421574 - protein, 437 aa, unidentified
MRRVIGIDIHRTFGEVVIWENGLTRHEGRVEMTRTALEGFGRQLKKTDEVVIEATGNCMAVSRVLSPHVKRVVIANPLQVKAIAHAHVKTDKVDAATLASLHAAGYLPEIWTPDAATERMRRLVARRYQVVRHRTRIKNEVHAILHAHLIPKCPHADLFNKRGRDWLTRQPVPEDERAAIARHVRELDRLGEDLAVLDRDIAQDAIDDEAIQRLLTITGVNLTVAAGLMAAIGSIDRFNSPQKLVSYFGLNPRVRQSGLGPAHHGRISKAGRSHARAMLVEAAWAAAKAPGPLRAFFIRIRARRGHQIAAVAVARKLATLCWHMLTKGEDYHWARPSLVAHKRRAMELAAGQPQKKGNKRGASYAYNVKDLRQQEARIAEHAEKSYEQFVATWQPRPPKNSGGCAIASNRQGLNRLPGDASSRHATLRHEVDRTREK

SEQ ID NO: 421575 - protein, 461 aa, unidentified
MIRRLVGVDLGIASAHTVRVLAEDGREVCRRRCEPTVDSLARVEAAALAGTPAGTVLEVVMEPTGPAWLPVAVFFTARGHLVFRVSSAKAADLRRFLSRHAKSNGIDADTLARLPLVDPAGLHPLELPGAEAAALDRRVRVTDRLTVLAARHKTRIKDLTRQLLPCSPLTGELGVADLAVLERWADPRALLAAGPARLTALIVKASHGKLGAERAQQWRAAAAAAVELYADHPAIAWTDLAAEVGTEVRLLRATQAELAGHAQERETAYRYTDLGGLARSLPGVAEVGGPVLVAGMGRPGRFGSGAAFKSYTGLAPRASETGNTDRKGQPMSKAGSSLLRTTLIRAADNARRQDPQLARIYYTQMVERGAEHLKAVCVVAGALAERAWAVMNRQMPYVICDIDGTPVTPEQAKRIIARDFTVPDEVRRRRRSSKTPGRKPAQQPTTSSKGGRPLSKPHTAA

SEQ ID NO: 421576 - protein, 426 aa, unidentified
MSGVETGGQEPQFAAFVGIDWADQKHVWCLQARDSTKRETGELEHKPEAVEAWVGQLCQRFGNRPIAVAVEQSRGALVFMLTKYEPLHLFPVTSTTSARMRKALYPSGSKDDPRDADVLLELLLQHRDKLRRLSPDTDATRRVQNLVEERRKLVDEKTEQSNRLTSHLKIYFPQMLDWFEHLDTELVCALLERWPTLEELQKVPPAKLRVFFSKHHCRDQELIEWRMLAIRQSIPAIGDRAVIEAKSTFVKVIVQLIRTLREGLADLDEKIEEAAAAHPDFFIFESLPGAGPVLAPRLLVAFGSQRERYHNASEVQTYSGIAPVMEKSGKKEWIHFRWACPKFLRQSFHEWASHSIGYSVWARNYYQQQRNKGQDHHAAVRALAFKWIRITFRCWKDRVAYDESKYLTSLARRGSPLAAAATAKTL

SEQ ID NO: 421577 - protein, 426 aa, unidentified
MAVVMIGVDPHKASHTAVAINAAEEPLGQLRVRASAVQAERLLGWAQAWPERAWAVEGAGGLGHLLAQQLLSAGERVLDVPPQLAARVRLLATGNVNKNDPNDARSVAVAALRSAQVREARRDDHGTVLKVWSKRYKDLGRTRTQVACRLHQVLCELVPGGVSGEITAGQAGQVLASITPAGAVQAARCELAAELTEDLRGVDIRIRETRKKLAEAVRAAGTCLTRLFGVGPVIAAAVIGDVRAVSRFASRDNFASYNGTAPIEVSSAGRKVYRLSRRGNRRLNHAIHMAAVTQIRYRHTQGRAYYDKKLAEGKTGKEALRALKRQISDAIFACLQEDARRAAAAAGKSPGGQPGNHSATRAAGSHPDHRLFGPATPGPATHPTTTAPFPAPLPSRASEGPGPGPGAARPRSGAGRASWARPPTSR

SEQ ID NO: 421578 - protein, 391 aa, unidentified
MIYVGIDVAKDKHDCFITNSDGEALFKSFTIPNNREGFENSFQKIQSVSDDLNKVKVGLEATGHYSYNLLGFLLDKGLPTYVINPLHTNFYRKSLSLRKTKTDKVDAHTIASMMMSDVNLKSYSDTSYHNEELKSLTRYRFDKVKERAKLKSSVSRLVCILFPELEKLVPQLHMTSVYALLSEFPSAHAVASAHLTRLTNLLSESSRGRYGKETAIIFRDAARNSIGSNMPAKSLELKHTVRLIQELTSEIDEIENEIKIIMNEINSPILSIPGINYRMGAMILAEIGDFSRFDSADKILAYAGMSPSTYQSGQLDNCYSHMEKRGSRYLRYALYNATKYVCHWDESFGAYLTRKRAEGKHYNVALSHAAKKLVRTIYAMEKSRQAYKHVA

SEQ ID NO: 421579 - protein, 392 aa, unidentified
MYIVGIDIAKRKHEAAVIDGEGTVIIKPFSFTNNCSGYNRLLAMLAKAKLPLDEVSFAMEATGHYWLALFTRLQKEGFRVQVINPVQTNSIRSFYIRQAKTDPRDALLIAEVIRFGHFSESTLHPENIYELRELCRGRHAIVSMQADVKRKVVALLDQVFPEYETAFTNMFSDTSMAILQTCPTPKELSEMPLEELCHLIEVSSHKRFRMAKARELQELARNSFGFAMAGDVFSTMIRLYAKHLDFLKQQVREMDCKIAEIMDTLDTPITTITGIGPTLGAYILSEIGDISRFSSAAKLAAYAGIDPTMRQSGEYNGVRNRMSKRGSPYLRHAIWLAASSAVLHDPALKLYFQKKRDEGKPYVASVGHACRKMVSIIYAVMRDNKAYTPCIP

SEQ ID NO: 421580 - protein, 359 aa, unidentified
MKKRLSRKQMFFNKINLTKDDDVYVGIDAHKESYSVAIWLNDAPAIDFVMPADNTKLVKFLEKVRIGLKMVVYEAGPTGYTLARYLQKAALPIKVVAPSKTPRQSERDSKTDCLDARTLAKYAAKGLLRAIAIPTRQQEADRQLTRTREQMVSKQSRVKLQIKSFLLQYGIKQPPSLRAWSANAVRELNALKLSKQLRFCLDVLVEELQFLQNQLTMIEDQLKEIFGRQRHAQKVDLLQTHPGIGPVIARQFNAEIFAPKRFKHKTELAKYVGLSPTIIQSGQSLRDGPITKTGRPELRSNLIQGAWIWIIRDPKAHKTFLRILHNTGNKNKAITAMARRLAIHLWKMVCDNKPYINAA

SEQ ID NO: 421581 - protein, 351 aa, unidentified
MISVSVENSEGRPHDKVYRNGRTFVICVFSVVDENGTEVNQAKIATNGLLLIEYLRSIKGVKKLVFEECELSAWLFGILYGEVDELIVCNPTRNQQYKKAKTDKLDAQNLARLLRGGFLTPVYHDGSKTEHLRALMSGYQDIADTGVSIKNRYKSLFRKAGLPAWGTKLYDDSSLLEDLPRPDQRFVGHSFYRLLEALEKEREQYIGAIKKLGRIFPEIKLLKGIPGIGDIQAAKIVSQVISAQRFKDKHKFWSYCGLVRHRMESGGHVYGSRRGWGNRILKCVFKMAAKSVLTGENELRAYYDELRAKGTSDKSARSAVSRKLAAIAIGILKTRRPYDETLILRRAEQAG

SEQ ID NO: 421582 - protein, 430 aa, unidentified
MKSNTQNAKIEAITEKTLVLGIDVGSEMHYARAFDYRGIEYSKKPFKFSNTEAGFVTFKEWILDLKERHEKDKVVPGMEPTGHYWFNLGKFLQDNEMKPVLVNPHHVKKSKELDDNNPTKNDRKDPKVIAGLVREGRYMIPYLPDGVYADLRTASNIRFQLQAELTRIQNRISRWFNIYFPEYKTVYGKSDAKSGMLILKTAPLPEDILTLGIDGVNQIWRDAKLRAVGKARAKTLIEAAEHSVGSKEGAVSARMEIRMLLEDYESRNTRLQEVMVLIEELVRKIPMAEKLLEIKGVGIRTVSGFLAEVGDISRFNNPKELQKLAGLALVENSSGKHKGETTISRRGRKRLRYLLFEVAMSLVSKNQEFRELHNYYTTRRLNPLKKMQSLMAIAAKLIRVFYAMLTKGVDYDPKKMVSDIKRPAVYLQAA

SEQ ID NO: 421583 - protein, 312 aa, unidentified
MTKIICGVDVSKRRLDAYVVPSGAFESFDNDATGIAALATFCHRHGVALAAMEATGGYERVPFLLLWEAGIACGLTNPRSVRCYAEAMGILEKTDRLDASVIARFAVAKELRPTSPPTQSQQRLTALVARLRQVTDDLVVQKQRRSSAMNAEMTTSIDEVIALLKRQARTLEGEIASLIDDDPLWSQLDAALRTVKGVANRTVARLLAELPEIGIYSNKAVVKLAGLAPIAHDSGAKTGQRHIRGGRAGIRSILFLVADIARRFDASLAEFHQKLTKAGKPKMVVRIALARKLLVRLNAKARDARELYALAT

SEQ ID NO: 421584 - protein, 371 aa, unidentified
MSNTIICGMDAHDNTLTNRIGVNRETPETKTVRNTQDGRQGLFRHLKDLAQKNDGARIVVAYEASPLGFGIYDDCVEAGIECHILAPTKMPKAPKDRKKKYDERDAQRILELLRAHVLAGNDLPDIWIPDHQTRDDREIVRTRLNVGQKLTALKTRVQMLLKRNKVVKPKDVGKSWTKSHRKWLEGLELKPGARIALSSYLRQIANLDEEIKILDKEIETLAETDRYQLPAEALVVQIKGVGLLTAMVYLTEIGDMRRFSNRRQVGSFLGLVPSSNESGEDSDRKGHITREGPARVRKVLCQATWSRVANDVEEARVYYRIVNKNPKHKKIAVVASMRRLGVLMWHIAWDAQVKAEVFKDVQNKAAYAQTV

SEQ ID NO: 421585 - protein, 401 aa, unidentified
MPAVWAGIDSGKRAHHCVVIDQAGEMLLSQRIDNDETVLLEIIATVTEIADGHEVVWATDLNSGGAALLISLLVDHGQQLLYIPGRIIHHAAATYRGEGKTDAKDARIIADQARMRTDLQPVRDSDQISVDLKLLTARRLDIIHDRVRAINRLRATMLEYFPALERAFDYSKSKAALTLLSTYQTPGALRRMGVTRLAAWLKARGCRNSATVAQKAIDAAREQETTLRTEIVAATLVSRLAAVITAIDADLVDLDKTITARFNEHENAEILESMPGFGPILAATFLANTGGDLRSFENPDRLASVAGVAPAPRDSGRISGNHHRPRRFNRRLLRTCYLAALSSLKNSPASRAYYDRKRREGKNHKQALLALARRRINVLWAMLRDHTLYQEPAEIPMLKTA

SEQ ID NO: 421586 - protein, 322 aa, unidentified
MSKVIGIDISKQKFDVCFLEGQTKTSDVFTNDLAGFKKLAKCISTSDHAVMEATGPYFLKLATYLVDSGHRVSVVNPLVIKHYSRMRLSRAKTDKKDAYLIACYGQGEKPPLWNKQEEHIMQINQGLTLLQGFEKQVTMSKNQMEALSVLPYCDKVALNALRSVISCLEKQVLKVEKHLQEVVTAHYQDTYKALQTIPGIGPKASLLLIAVTGNFEKFTNSRQLISYLGLSPRIYESGTSVKGKAHICKMGMSKARRTLYMCSWTAKFNNPQCVELYQRLKEKGKPEKVIKIAVANKLVRMAFAVGKNLSTYDKNYQAKVCF

SEQ ID NO: 421587 - protein, 417 aa, unidentified
MNTDLSQYTAIIGIDWADAKHDICVQTADSDAREFSRISHKVDKIDEWAQRMYQRHGGPIAVAIELSRGPIVSALQKYNFFVIYPINPTTLAKYREAFNPSGAKDDPTDAELALDILLKHPDHFAPLNPQSVEMRTLMALVEQRRTIMNDRVRITNRLRNALKQYYPQALDWFDRIDTPLFCDFMKQWPTLAQVKRARRATLQKFFHGHNMYRKPLIEKRFEAIQSAQPLTRDEAVITPYRLQTLTLVDQLVVTLNALQTYDREIGTLASQHPDIELFSCLPGAGPQLAPRLLVAFGEQRDRFASAAEVQKYSGIAPVTERSGNKHWVHWRWQCPTFLRQTFAEWAAQTINKSYWAGLFYYQQRAKGCTHQAAVRALAFKWIRILYRCWKTRTPYDETRYLKALKDRGSPLLQAQTA

SEQ ID NO: 421588 - protein, 453 aa, unidentified
MSKKKRKRKRKVTDLDALEQINLNAAGIDIGAEEIFVAVPKGRDAESVRSFPTFTVDLHRMADWLEMCGIETVAMESTGVYWIPLYEILEEQGFDVNLVNARHIKNVSGRKSDVLDCQWIQQLHTYGLLQPSFRPPEQICAIRSLVRHRDMLIRYRSSHIQHMQKALVLMNVQLTNVLSDITGMTGMKIIRDIVAGKRDPEVLARHRDRRCKKSRSEIVKSLEGNYKREHVFALKQALELYDFYDRQLRACDVELEAMYNEFEPSDGPGTEPPARTTKRRKNQPYFDLARSLYRLTGVDLTEVDGLDTMTVQTIISEIGTDMSPWPTVKHFTSWLRLAPNNKVTGGRVRSRRTQPTQNRASTAFRVAAQSLARSDSALGAFYRRMRARHGAPKAVTATAHKLARIVYFMLKRREPYRDPGADYYEAQHRARVIRNLQRRAAKLGMRLEPVAAT

SEQ ID NO: 421589 - protein, 347 aa, unidentified
MEHYAGIDVSLDSVSMCIVDAHGKILKEAKVACEPEALIAWLAEHGTPMARIGLEAGPLSQWLFAGLKAAGLPVELLETRHVRAAFKAMPVKTDRKDARGIAQLMRLGWFRPVHCKSLPAQEVRALLTTRKLLQAKRHDVEMSLRGVLRGFGLKVGPTTPKTFAMRVQELVAHHDTLRTIAEALLKARAVLAQEFKAIEKRLAALARTNAPTRQLMTTPGVGAIVALTFASAIDDPSRFRSSRRVGAHFGLTPRKHQSGETDVTGRISRIGDHGVRVALYEAANVILTRAVRGSDLKSWALRVAQRAGMKKAKVALARKLAVVLHRMLADGTTFMASKVAQSAAGAA

SEQ ID NO: 421590 - protein, 340 aa, unidentified
MSAITIIGVDLAKCFFQLHGAKADGSVAFRKKLSRGRFLSFLAEQPPCVVGMEACSTAHGWGREIEKLGHTVRLIPPIYVKPFVKRQKNDAADAEAIAEAASRPTMRFVAVKSEEQQARAMLFRTRDLLVRQRTQLINAVRGHLAEHGVVAAQGPAHLKRLADAVVDEPSPLPAMVRELGKLFLEQIDVLDTRIGELDKKLRTVAGQAETTRRLQTMPGVGPITAVAVETFAPAMGSFTRGRDFAAWLGLVPRQHSTGGKQRLGKVSKMGQRDIRRLLIIGAMAVVQAASRSGAPKDSWLARMLAKKPRMLVAIALANKMARGLWAMMTKQENYRNPAAV

SEQ ID NO: 421591 - protein, 347 aa, unidentified
MRFYTRQHKYYCGIDLHARTMYLCVLDQTGEVLLDQNIRCDPRIFLRTIAPYRDDLVVAVECIFTWYWLADLCAREQIPFVLGHALYMKAIHGGKAKNDRIDAHKIATLLRGGMIPEAYVYPPEMRATRDLLRRRLYLVRKRGQLLAHIQNTHHQHNLPEPTRKIIYRSNRAGIADTFTDPNVRKSIEADFALIEVYDRLIRELELHIVRTVKEHDPDSFLRLRSLPGVGKILALTILYEIHDIHRFPSVQDFASYARLVTCAQASAGKRLGTGGRKIGNAHLKWAFSEAAVLFLRQNPPGQKLFQRLQRKHGKGKALSILAHKLGRATYHMLARSTAFNMEKFMAA

SEQ ID NO: 421592 - protein, 429 aa, unidentified
MNYNTQNAKIASITEKTLIIGIDVGSETHYARAFSWRNYEYSKKPFAFSNDEAGFAAFKEWMDDIAEKHGMEVIIPGMEPTGHYWLNLGAYLQEQGMKPVHVNPHHVKKSKELDDNNPSKNDRKDPKTIAGLVNEGRFSYPYIPTGIYAEIRNLSNLRIQTQEEITRIKNRMARWFSIYFPEIKDVYRNPDAVSGLMVIKQAPLPCDIRELGVEGVNKIWRDARLKGAGIKRATTLVTAAEHSIGNTEAPRSARKEIRNLLEDYEGYKKRMDELMEEIEKTLSEIPYIDKLMEINGIGIKTVSCFIAEVGDIGRFDNPKQVQKLAGYAIVADSSGKHNGESRISHRGRKRLRYALYEAAISVIGKNKEFKEIHSYYRTREKNPLKKMQSVIAVACKLIRIFYTILTKGVDYDGQKMLKDIVRPEIQPAA

SEQ ID NO: 421593 - protein, 316 aa, unidentified
MDDKHTVHGVDVAKAELMIGHGETETLLRIENTPQAIAAWLAQLPTGSWVAMEASGHYHQMLAHMAHAAGMVVYVLTPQLIKHYGRAVRMRGKTDRLDAQLIARYVLHERSKLRIWEPPSPGADALSRLLVRRQALVNARQMLAQSLSGLAELKAPRQALMASFKRMLTQVELLMRTEIARVPAMAALHRRLISIVGIGPIVAAQLVASLTALRFTRADSFIAYTGLDPRPDDSGQRRGRRRLSKRGHGLLRCLLYNAGMAAARSKLFKPTYLQLRARGLQSTEAIVILARKLARIAFALYQSGTTFDAQRHVKTA

SEQ ID NO: 421594 - protein, 355 aa, unidentified
MTSTKYIGMDVHKESISIAVRNAAGKIVMECVIETKASMILQFIDGLRGDLQVTFEEGTWAAWLYDLLKPHVTKLVVCDPRKNASMREGNQSDKIDARRLADLLRLNHLHSVYHGERGLRSLKELVRSYLTITKDLGRVMSRVKAIYRSWAIPCSGKQVYAPRYRVAWLGKITEPGVRRRAEFSYQQLDALRAVRQQVRRELLAEGKKHPAWKRLCQIPAIGPIRAAVLLGVLQTPHRFRSKRQLWTYSGFGIETQSSADHRSVDGQLKRVKKQSSIRGLNRNCNHDLKNLFKGAAIVAASKPGPLQEFYSALLSKGLRPEMARLTLARKIATIVLIVWKKGVCFDAQHLKPQTA

SEQ ID NO: 421595 - protein, 368 aa, unidentified
MEEGIKFFIGLDVHKDSIAVAVAEAGRAPARLVGGIGQDIGKLRKLLSRHGQPGQMHVVYEAGPTGYGLQRELTRLGYRCEVIAPSLIPKRAGERIKTDRRDGIRLAELSRAGELRAIWIPDPADEAIRDLARAREDAVNARTQARHQLKSFLLRHEVRYPHKTSWSKTFYRWLGTLSFAGSGAQTAFTEYWQAVTAADERVARLSAALGSSIEGWRFESVVSALKALRGIDQVSAIGLVAEIGDINRFSHPRQLMSYLGLVPCERSSGERITRGSITKTGNAHARRLLTEAAWNYRFKPRIGYRAQRRAEDLPRAIREIAWKAQLRLNARFARLTARGVQANKVCIAVARELAGFVWAIASARQLNN

SEQ ID NO: 421596 - protein, 347 aa, unidentified
MEKLIRIGMDTSKQVFQLHGVNAAEEPVLRRKLRRKEMVAFFQGLEPTMVGIEACGGAHHWARMLQEFGHQVKLLPPKYAKAYVKRGKNDAADAEALCEAMSRPTMRFVAAKTAEQQAAQMLAGTRDRLIRRRTQLTNAIRGYAAEFGLIAARGVDKIEPLLARLHTEPTLPALARELFAWHAKEYAQLQAQLEAIDAKLMAWHRQNEPSRRLVKIPGIGPIGASLLVMKVAQPEAFRSGRHFAAWIGLTPKDHSTAGKTRLGAITRAGDEALRSVLVVGATAVIQQVRRGKGHPSTWLVELLKRKPPKLAAVALANKMARIAWKLMVSGQPFNPAHVIATAIDAAA

SEQ ID NO: 421597 - protein, 428 aa, unidentified
METPVSNLEVGAWVGLDWADQRHEIRLQAAGSDVSESFTVEQKPEALHAWIAQLRARFPQGRIALALEQSRGAVIYALMNYDFLLLYPVPPKALARYREAFFSSGAKSDPADADLLLELLRTHRDRLRAWQPDDALTRQLRLLVEHRRRTVADRTRLTNRLTALLKTYFPQALDWAGDLRSLAACEFLRAWPSLQAVERASRSELRRFYHDHRRLSAEELRKLFQEIDHTQPLTRDPALVNASALMAQTLVEQLGAVIAALARLDQALVELFGQHPDQELFSGLPGAGQALAPRLAAAFGSDRHRYQSAEEIQQFSGIAPVTESSGKMHWVHWRMACPKFLRQTFQEFAAASVKNSLWARAYYEQQRRRGASHHAAVRALAYKWIRILYRCWKTHTPYNEAVYLEALRRRHSPLWLAAGSLSIREAQA

SEQ ID NO: 421598 - protein, 400 aa, unidentified
MHLTANISIPQKNFIAIDLHSDNAVICERRNALNKAGELVGKNIWCGRMCIRNGLDNFIKALLPYCQDFDHVAVVESTYNWYCLADAFEERGWLLRIADPSTVSQANLKSSDDRTDAQYLAERLRVGSLKHYLPLSYSNRALRDLCRYRMAMVQDCASLKIKLINLYRNQLSKNLCVADLLERCRPHMQPNYRFNPDILEEFKNPNIRLRVAFEVSRIAMLEEMIEECNAEIQKQCKDQELVKLCKTIPGCGPVLSAVICTEIGTMQRFKSAGDFVSYCRLCSTSKLSNGKSMGLGNAKNGNAYLSWAFTEVAQYASRNPVIREILQRLLRKYGGLRVKAIRTLAAKIARVTFYVLKNKQPFNAAKCFGMELTKSIKKKLAHKPLREDAAVVLPTVAGQA

SEQ ID NO: 421599 - protein, 396 aa, unidentified
MPQIWAGVDIGKEHHHCVVINNDGERLLSRRVQNDETVLLELIADVLAVNPDVLWAIDLNCGGAALLIGLLVNHAQPLVYITGLKVHRAAGTYRGEGKTDAKDAFVIADQARVRRDLGPLRPGDEIAVDLRTLTTRRTDLVCDRTRAINRIRNQLLEYFPALERSIDLTRKGHLVLLTGYQTPDAIRRLGEQRLVTWLRQRKGRNADAIARLAIEAATAQQSTLPGQKLAAAMVERLAKGVIALNTEIAEIDAMIEDRFRQHRHAAVMLTLPGFGPILAAEFLAATGGQMAAFGTADRLAGYAGLAPVPRDSGRIHGNLRRPRRYHRGLLRSNYLAAMASLPVCPESKRYYQRKRAEGKRHEQALLCLARRRLNVLWAMLRDNTDYHCSPPLPVAA

SEQ ID NO: 421600 - protein, 394 aa, unidentified
MKLVGIDVGKNSHHFCVMDKETGEFNVAPSSFSNNKEGFDFLINSLKPYSKKSILIGMEDTGHYHVALLKFLLSNGYTVALINPKTTDLTRKMEGGITKNDKLDTITICDVLDTPERKKQYRITKVDRFDLYEQRQLTRHHHNLKEELNVYCNRLQKSIDLVFPEFNTLFSSKYGIVYMNLLKTFGSAEAIASTDIRTIRKCFEVKGRGGRISLTPEKLKECAKNSIGISSEVETIQIKHLVSQITLIKEQIAEIDKKIEEFSIKNNSPILSIPGISHFSGTSILAELGDIGNYSKPSQIIKFAGVAPYHYESSQFTAQHTAITKKGSKYLRKTLYQIILSVINFNPVFKEYYQLKISQGKGHRCAQGHCIRKLLRIIYHLLETGQSFDPALLR

SEQ ID NO: 421601 - protein, 345 aa, unidentified
MDHFAGLDVSVKETSVCIVDDTGRLVREVKVASEPEALLAVLTNPIHRFKRIGLEAGPLSQWLFSALAETGLPVICVETRHMRAVLQAQINKTDRNDARGIAQMMRAGLYRPVHVKTLRSQKLRMLLTHRKLLQSKAIAIDNDLRGTLRNFGLKVGVVGALKFEVRIRELVETLPDLAELVEPLLIVRRALRQQIGILHGRLLAVVRHDDVCRRLMTVPGVGPVVALTYRATVDVPARFRTSKAVGAVFGLTPSRYQSGEINRSGAISRCGDEMMRAMLYEAAHIMLVRLAKWSWLKAWAMKIARQRGMKKAIVALARRLAVIMHRIWVDGTEFRWTREQAAAAA

SEQ ID NO: 421602 - protein, 404 aa, unidentified
MLTPIVKRCAGLDVHKMVVVATVLLEQEDGSLREETKQFGTFRKHRRQMVRWLDGLGVDLAIMESTGIFWKSIYACLEEAGIATYVVNARHVKKVPGRKTDVSDSQWLATLGRLGLLKPSFIPPKDLRELRLITRQRIKLRRMLAAETNRLHKVLDDAGIRLGGVVSDINGLSARALIEGLIEGKAPEDIVPHVHGRLKEKIPQLLEALDEPLSERHRFLLNSLEEHIGYLEKEIATVDHYLFAAMSPYKTQWEILQTIPGIDAISAAMLLVEIGIEMQCFGSAHRLASWAGMCPGNNESAGKQKGGRTRKGNRVVRQLLCEIANAASKSKSQFKGQYQGLVIRRGHKRAIIAVGHKVLRVVYAMLKSLQPYRDPEIDYTRLVVQRNAPRWLKALKQYGYLPAR

SEQ ID NO: 421603 - protein, 414 aa, unidentified
MDVVHPRCAGVDISKRDAKVCVRIAGAGRAKAKSTVTTWGAVTNQVLALRDHLVAEQVTLVVMEATSDYWKPFYYLLEDGPFDVMLVNARHVKNLPGRKTDVSDAAWLAQLGAHGLVRGSFVPPEPIRQLRDLTRTRTTLVRARAKEIQRLEKLLEDAGIKLSSVASDITGVSGRAMLAALIDGQRDAEVLAGLAKRRLRSKIPELTEALTGRFSEHHGFLAQLHLDLIDNHTQAIDDLTERIEVVVEPFRHVRDLLVTIPGISTLVADVIIAETGGDMSRFPTAGHLASWAGTCPGSNESAGRIKSTQTRPGNPYLKGALGIAAMSASRSKDTYLAAKFRRIASRRGPIKAIVALEHAMLVAIWHMITTDVPYSDPGGDYFTRLDPDKAKHRALNQLHKMGYSVTLEPLAVAG

SEQ ID NO: 421604 - protein, 480 aa, unidentified
MAKARKSTFERLQKGQLNRQQRKELQRKFDADSPELDVKHPHAAGIDVGGASHFVSVPPNRDEMPVREFGSWTEDLRCMARWLKACGMETVALQSTGVYWIPVYDVLEGEGLEVYLVNARGTKNLPGRKSDVQECQWLRKLHTYGLLHKSFRPPEQIRMVRTLWRLRDRVVKDAGRAVQQIQKALRQMNVQLSNAISDVSGVTGMNIVRAILRGERNPYQLAKLRDPRIQASEEEIARCREGNWQPDLLFELQQVMDAYDFYRRQLGIIDKQLEEYLATLPAREPVGKVVPAQLTAKQRKKLKASRKSKDNRPAFDLGAELTRLMGVDLRIIDGIDLMTAQTIYSEVGADLSAWPTEAAWASWLELVPRNDITGGKVIKQKKRPSNNRVATALRNAAESLYRSDSYLGARYRHFTGRLEGLKGVKAMAHYLACLVYRLLTKGQAWVDRGAAYYENKRQQREMVHLQKRAAAAGMKLVPIT

SEQ ID NO: 421605 - protein, 397 aa, unidentified
MIAVGIDVSKSKSTVAILNGDGSIRAKPFDVHHVADELQALVDYIKRTSEPPTILMEPTSHYHYPLLKAFTEAELPVCLINPYQMKKYGDTELRKAKTDKRDSLRIAQYALEKSYSLIPYTPQDQKYEDLRFLSRQYSQRISTLTVAKVQLLSLLDETMPGITTILPLKSRDPDNCVLLRFIKRFKSFDVIRKMGKTRFLDSYQALVKKTKDRFAGSKGLAIYELVLNSVTTRGENPLSAMTQDQCVDLVSTSQKATDEINLQMRIIAETMPEYKVLRSMAGVGDRLGPIILGEIGDIRRFHSGKALNAYAGNDAPPYQSGQFESRNRHISKRGNPALRKACFEVMQALKLTKPQDDPVYLFLLKKEQEGKPYNVAKMAAVNKFLRIYYARAMELYK

SEQ ID NO: 421606 - protein, 419 aa, unidentified
MKAWNEIKHYAGFDWAKDHHDVIVLDATGKIVADFRFNHTAGGWEEFSKKLAAFPDVAIAVETNHGSVLEKLLEQNCCVLPVHTRSAKGYRQRKVPSGNKTDRVDAWSLADALRLDGAQWKQLSPQDPLTKELRLLCHDEVALIRDRSALITQLRQVLYDYYPAALEAFDDWTMPAAWALVVAFPTPEALVKAGKRKWEKFLHVHKLGRPATYQRRLEIFARASQFAGSLPTIRAKSKLAVARAKQLQLLETQIAEYREEIRRLFAQHPDAKLFGSLPGAGDKMAPRLLAEIGDDRARFPDAQSLQCLAGTAPVSYQSGQIHRVYLRRQCNKSFRNAVHLWANLSREFCPWAATYYTALRAKGKSHACALRALGQRWLKIVWKMWQTRTLYDADLHARNQLKHGSWVLQLVNQPVVVKT

SEQ ID NO: 421607 - protein, 340 aa, unidentified
MDITTLGIDVSKNIFHVVGTNRAGKPLFKEKFTRQKLAEFIAQHPLCLIGMEACPGAQHLARKFEEYGHQVKLMPAQFVKPYVKSNKNDYNDAAAIAEAVRRPTMRFVTTKTSEQHDLQALHRVRERLVRTRTSIICQLRSFMLENGVAVRTGRAALAKALPDILEDAEQPLSDRMRALIQGLRDHWLFLDEQIKSVSADLERIAKSRDDCRRLLTVPGVGPLVATALVASVANGKQFKRGRELSAWLGLVPREHSTGGKQRLLGISKRGSSYLRKLVIHGARSCYLNMNRSQHRMGAWIDDMANRGTHRNVIVVAIANKLARICWAVMRDGDVYHCARA

SEQ ID NO: 421608 - protein, 367 aa, unidentified
MHHLQEVDMTGVVGHESSNRDDQVIIGVDTHQDQHVAVAIDQRGVRLDECHVPATTYGYAELEWWAHSLGQIQAFGIEGTGSYGSGVARFLIERGYTVVEVNRPDRSVRRRKGKSDATDAEMAARAVLAGVADAIPKSGDGEVEMIRMLKSAKDSAIKARTQAVNQMKALVVTAPAELREVLDGLTTSALVTRCKSFRPGRLDDPRAAAKYTLRTLACRHRQLNEEVQELDAELERLTRTAAPALVNTFGIGPDTASSLLIAAGSNPDRLRSEASFASLCGVNPIPASSGKTNRHRLNRGGDRQANSALYRIVVVRLRYDPRTQEYMQRRTEEGMSKSEVIRCLKRYVAREVYSAIQRPDQILVQAA

SEQ ID NO: 421609 - protein, 332 aa, unidentified
MQDKELIIVGIDVSKKTLDICVQKGKDQTSSVITNQPKSITLFIKDLLKQYDKDLLLIGFENTGIYNYSLYDILRGTEIKTFVFHPLDLLRSMGMLRGKNDKTDAKRIALYLQLHHSFLSPSVIPTKNLLVLKALFTKRHRLVEHRAALVKSNKEIEAVLGKRQAMLIVSSDKKVIDALNQAIKTLEERIHKLLHEQESVARQMENITSVQGVGPVLASYLAIKTNGFTMLTNPRKLACYAGVVPFENQSGTSLKKNPRVSMMADKELKRLLHLAALRVIQLPGDLRDYYIRKVKEGKNKMSVLNAIRNKLIARICSCINNNKKYQINLQVS

SEQ ID NO: 421610 - protein, 437 aa, unidentified
MNTKSLFVGVDVSSSQLDVCFMDQEERKIVPIHTYPNLPSGFKQLRQDAFAFSRIIGKNIPIVFGFESTATYHKNLQKFLENRKSKRFTIRLINPYRIKEFRKSHFKLSKTDKIDAYMIAKFLKAFPEHSSTFLSPLQDSLRSLTRFRRTLVEERTRYINRLRKNLNLIYPGYRKIIGKKFTTSFLSFISTYPTPESIKNSSIPSSWKKYLALFPLAQDKLSHILTNEIIWSAERIIQLQKQIATIENEITTIMDTYFPDHILFSIPGIGKITVATIIGEIGNSVDRFPDAKHFVGYIGLYPVVYQSGKNKVFFKMTWKGNKHLKMALLLASASARKNNPLMRNFYNRIRSRGKSKKAAGGALARKLACLVYAILSSGKKWDENIAFKSIKRANEMTIQNFPVVENDVIKTGRPTIDFSTRNMDLSPKGNSGSTRLT

SEQ ID NO: 421611 - protein, 394 aa, unidentified
MYFVGIDISKYKHDCFIVTEAGEVIKDTFTFDNTRTGFDQFFSILDGLGPKNEIKIGLEATGHYMNNLMKHLSVKGYSFVLLNPIIVSRFRHSETLRRTKTDKVDAKLIAQVIASKDFSSYPLQAYHFPDLKTLTRLRDRLIKQRSLYLVMLTNQLDLSFPEFKEFFDGRLKSKTAQFILTKYGISSRIANMNSQSFELLRKVSHGKFSYAKFAKLKELAKNTIGCSSEIDEMLFALTINLYQSIDEAITEVESKIIEIMEKLDSPTASIPGIGIMSAATIIAEYGDVSRFANDGQMLAYAGLDCGRYQSGTSDFPGKMVKHGSGYLRQVLMNVAETCMIHVPSFYDYYLKKRNEGKSHRVVLSHIARKLVRMIYKLETSRTHFDLSVFNSQHQ

SEQ ID NO: 421612 - protein, 371 aa, unidentified
MNTIVYVGMDVHKESYTLCCYCYDTDKVEYKQTIPSDYKLVLKYMESMRSRYEGEVSFVCGYEAGCLGYSLYHQLREHEVDCKILAPTTMAITNTSHVKTDKRDAANIARCLAFHTYSEVYVPDDGDNSVKEYIRMRDDQKLMLKKIKQQILAFVLRQGKKFEGGKTYWTVAHMKWLKSLELKGLDKETLSEYLLTYEYLTEKIERLDNRIEELASGEKYKEKVKNMSCFLGIKTHTALSMVVEIGDFNRFEKAPKFAGFLGLVPSENSSGDSTNRYSITKAGNSHLRRLMVEAAQSYSRGNVGHKSLALKARQKGCSGEVIAYADKANERLRRRFYKMTLNKGINRNVATTAIARELACFMWGMATGNIS

SEQ ID NO: 421613 - protein, 465 aa, unidentified
MAKRKLKQPQKRRLAETPSDWRDTPATLTVQNPHAAGIDVHSDKHTVCVGPGLVREFGAYTADLHALVAYLRAAGVTTVALESTSIYWIPLYELLEAEGFDVALIEPGQLKHCGARPKTDVLDAQWIQRLHTYGLLRGSFRPPDDLLPLRAYWRQRQTLIRLAATHVQHMQKALEQMNVKLSEVLSDITGVTGMLIIAAILAGQRDPQELARLRQPQCAKSATEIATALEGTWREEHLFELKQAYDLFQCYQQRVSECDQQIAVALHALPDRAGRKTHTSQPRPRGRKKNDVRFEATGPLFHALGVDLTRIPGIDVATALVVLAEIGVDVAKFPTEKHFASWLGLCPRDGKSNQTTKKQAPRKGKNRLGQALRMAAQAVGRTQTVLGVFYRRIKSRIGGKGAVTATAHKLAVLIYRMLKHGTEYVAQGLEEYEARLKAQLTQSLRKKAQALGFELQPQAEAPPAS

SEQ ID NO: 421614 - protein, 323 aa, unidentified
MHGISENGRVIFNKAIKRAKLLAFFQTLPPCTIGMEACGSSHHWGRQLRKLGHDVKLMPAGYVKPYVKRGKSDAVDAEAICEAVRRPTMRFVDIKTEDQQAILSIHRTRDLAVRQRTQLANMIRSLLREFGHILPIGIEAVTAFSKRHLGGDHLDMPEIANGMLGIQCYQFIGLNERIEGYSKMIEQHALLNTDARRLMRMPGIGPITASAIVATIGDAKQFRTGRDLAAWLGLTPLNKSSGGKERLGKITKQGDRYIRKLLVVGMTSRAVMAKRSPEKVDLWTAKIIADKPFRLATVAMANKAARAIWAMLTKKQEYRQPAF

SEQ ID NO: 421615 - protein, 347 aa, unidentified
MRFYTKQHPFYCGIDLHARTMYVCILDQAGETLVHRNMTATPEALLKVIAPSREQIVLAAECMFTWYWLADLCAEHGIPFVLGHALSMKAIHGGKAKNDKIDAHKIAVLLRGGMLPQAYVYPAEMRATRDLLRRRMPLARTRGELLAHVQNTNSQYNLPAIGKKIAYKANRDGVAERFADPAVHKSIAVDLALITSYDALLRDVELTIVKTAKHHDANTLSLLQTVPGIGTMLRLVLLYDIHDIARFPRVQDCASYCRLVTCAKASAGKRSGTSGTKIGNAHLTWAFSEAAVLFLRDHPAGQQLLTRLERKHSKGKALTILAHTLARAVYYMLKRQTAFDLETFLQA

SEQ ID NO: 421616 - protein, 394 aa, unidentified
MKPTTIWVGLDVHKETISIAVLEGDSGTPRPSLTVRNDGTELRRLMRKLAKQGRVRACYEAGGCGYQVYRELSELGIECDVIAPSLIPVRAGDRVKTDRRDAEKLARLFRAGELTSIRVPTADEEALRDLVRCREDVREEVQRHRHRLLKFLLRHGQIHEGAHWTVKHWSWLRTLRFDNALVDRVFRDYLAALEAGITRLNGLEREIHACAESEPYKPVVGRLRCLKGIDTLSAMVLIAEICDFDRFDRPQELMAFVGLVPREHSSGSKQRRGSITKTGNDNARRILVEAAWHYRRPPNRSAALQARWKGQPPEVINHAFAAQSRLHNRYRRLTSRGKASQVATTAVARELCGFIWAIARARHASVPECSLVASVRSQTRRSAHLPRAARSSQS

SEQ ID NO: 421617 - protein, 447 aa, unidentified
MTHPIGPSRGDRRRNARKARLRSLVPREYAIVGVDLADHKQVFAVCDHDGQVLGRRSVKARAWELVDTLRWAQGTAAAAGFAGLVVACEPTGHRWRGVLDQCDALALTMVCVQPLLVHREREREDLTHDRSDPKDAVLIAGLAAQLRCYEPERPTVQWARLRHLGDRRCELITAGGAIRQQIRSLLECAWPAALTAAAQPLESITWRAAMAVIVSRCVDGDLGSVRGMGWGRFQAAVRREVPRWGGTRVTWRIARNLWEATGDTTGVMVHRHGALERVGDALVDWQRLRVQRTDIEARMIGILDDLDLTDLVTSIPGVSAVGAAAILAETGDPTRFDSARALVKHAGLAPRDNESGTFKGTSRISGRGRPGLRLAAWRAVWGALPHNPVLAARHHHLRTRETNRLTDHQARVAVAGSLLRQLHAVIVHRVPWDATIAAGVKEVTAAA

SEQ ID NO: 421618 - protein, 305 aa, unidentified
MRYVGVDVSKSSLDVFLDGRRFAFSNSALGFAALLRRLLSGDVAVLESTGGYERACAAALREAGFAVAIANPLEVSHFRRGLGKRAKTDLIDAEVLTRFGQTRQLQDSGAEQCPEFRDAVSRRAQLVSMLAQEKQHLEHARGIARESVQRHMVQLDSEITAMNKLIEQIVASDTELRAKSEVLRGIKCIGPTVAAVLLAEMPELGTLSRKQAAALAGVAPFARESGQWQGKRSIFGGRELVRRMLYMAAMTGRTWNSTLAEFYAKLRAAGKPVKVALIACARKLLVIANAKLRDARGQPRAISAQ

SEQ ID NO: 421619 - protein, 421 aa, unidentified
MKTWKEITHYGGFDWARDHHAVVVVDSQGQIVADFEFEHTQGGWKSFGEKVAAWPHLAIAVETNQGAAVDQLLQGGYTVYPVHPVASESYRKRKAPSGTKTDHFDGWGLADALRVDGHGWKPLQSMDPLIHELRLLCRDEVALIQERTLLVNQLQQALLEYYPVALQIFDDWTCPFTWDFIIEFPTPEQLVKAGKRRWEKFLHTHKLWRPETSQKRLNLCAQADQFKGSAPIIQAKCRLALSLCKLLRTLQQQLDQYRQAIESLFKSHPDHDLFGSLPGAKKVLAPRLLAAIGIDPQRYGSHNVLQCLAGTAPLSYQSGQIDKVRIRWACDKFLRHTFHLWADCFRKATAWGQTYYEKKRHQGMSHACALRCLGQRLLKIVFKMITDKKPYDAELHARNQQKHGSWVLQLLDQKPAPTTGE

SEQ ID NO: 421620 - protein, 470 aa, unidentified
MRPTPNQTMSQRKRKNRQRKAQAAALTQSVLGTVIHPDAAGIDIGAEELVAAVPPGRGEGPQVRTFSAFTEGLHALRDWLLLCHIKTVAMESTGNYWLCACLILEDAGIEVCLVNARHVKGVPGKKTDVCDAVWLQQLHAAGLLRGSFRPKPDVLPLRYLMRHRGDLVAQAGQQVQLMQKVLTEMNLHIHHVFSDVDGVSAQAIISAILAGERDADKLAALRDRRCRSPLARIKAALVGDYREEYLFVLRQCQARWEQLSQAIAEADTEIARRTAALAGVSDEPLPAAGFAQRRVQKNMIATMPVYEEAHRLLGVDLSAVPGISGGGLCTLISELGNAERIREKFRSAEAFASWLGLCPDNRISGGRILKCRTRKVANRIANILRLAAHALSRAKGRMADYVRRFKGRLGKAEGTVVGAHKLARILWAMIVHRQPYDEAKAFKTSAASTAKRIKHLHHQAQTLGFKLVPA

SEQ ID NO: 421621 - protein, 438 aa, unidentified
MQIIYQYCAGIDIHKKMVVVCVIMLNAAGQRVKEIRSFRTTTAGLLELRDWLQTTGCTHVAMESTGVYWRPVWNLLEGAFELLLVNAQHIKAVPGRKTDVRDAEWIADLLQHGLLTGSFIPPTEQRELRDFTRYRASLVEDRARVVNRLQKVLEDTNIKLGDVATDITGQSARAMLKALLAGQTDPVKLANLAKGKMRAKRAALEEALVGVIKPHQQFLLTELLGQLDSLDAAITRVGNEIATWMDRETPVEPEQSQLASDLPEQNESKKVLTWTQAVVLLCTIPGISQRSAEGILAEIGIDMSRFPTAGHLASWSGMCPGNHESAGKRLSGKTRKGSPYLRQLLVEAANAAARTKNTYLSAHYHRIAARRGRKRALIAVGHTILVIIYHLLSQQKSYEELGSNYFDERDRQNMEKRLVRRLEKLGYQVELQPAAQVA

SEQ ID NO: 421622 - protein, 339 aa, unidentified
MELYSAIDLHSNNSHVAIIDDQHNRVFYRKLANDPKVIESAFAPYRERLNGIVIESTLNWYWLADLLMENGYSVHLANPCGIQKYSGLKHADDKHDAFWLAQMLALKILPEGYIYPRQDRPLRDLLRKRAHLVQVRTSLILSLQNIVMRNHGIKIRSSDLKKLTQDPVADLLKDQEELALAGRVSKDTIDFLTRQIQRIEKVILNKAILREPFSKLLTLPGVGEILGMTILLETGPIERFKAVGHYVSYCRKVSSRWISNEKTKGKGNTKNGNRYLSWAFSEAADHARQTHAPSRTFYNRKLSQANASVAHNALAHKLARAAYFIMRDHVEFKEDKMFR

SEQ ID NO: 421623 - protein, 449 aa, unidentified
MMDNTLPPLGIDVSKLTLDARLLSQHRPAPARRFANSPDGQSLLAPWLESQGINRVHACLEATGTYSDAIATFLFEHGHQVSVVNPARVTAFRLSEGIRTKTDRHDALVLARFCEQKRPALWRPTPAEIQRLQGLLGRLDDLQLTVQQERNRFENLRLDAQIRQEIAAHVSWLQQQRERTLQCAITHVQQSPHLQHACDRLDSIPGIACLTAMRLYSVYFDQQRFRGAPQLVAYAGLCPAQRLSGTSVHGKASISMAGNAQVRQWLYMSALSVLRYDPDFAQWAGELKARGKCGRVIVVAIMRKLLHVVHGVLTSDENYDPRKAFPTHEHSTAVEAPMPTEQEHVASARKELVHHHTTQKTRLTTCLPIPAARPLHECRAASDGRISFLCPSANRLRRIDTIFNKISNIAQKPLTKKTVSTRTTTVTCPGMTKQGCKFGHSVCECLRIL

SEQ ID NO: 421624 - protein, 345 aa, unidentified
MQKISTTRTNGRKIFKGQLTIGLDLGDRYSSYCVLDEAGKILLEQKLPTTQETMKQIFGRMARCRIAMETGTHSPWVSRLLTALGHEVIVAHAQNVRLIVKSRRKDDRIDARTLARLARIDPELLSPVRHRSAQAQLHLTEIRARAGLVSARTALINAARGLVKSYGERLRKCGSFQVSREIGSGLSTELREALQPLLREVESLNERIQEYDRRIEKMAKERYPEVALLKQVKGVGDVIATTYVLTIEAPHRFRKSRDAGCFVGLQPGRRNSGDSEPQLHISKQGDEYLERCWSRERTTFWDLLGKIVIYGAGDRNSPSEEVRTPRNERWWRWHASWQYCCIGCG

SEQ ID NO: 421625 - protein, 431 aa, unidentified
MRRCIGLDVHREFAQVAIWEAGVVRQAGRIQTTPEALREFAESLCASDEVVLEATGNTYAIARLLERQVGRVVVSNPQKTRAIAEAKVKTDKVDAAVLAQLLAAGFLPAVWLPDEATFALRRQVARRAHIVRQRTRLKNQVQSILHRNLVPRCPAADLFGRKGRAWLATQDLPRDEQQAVGALLRQLDFHGQELRIVDAELGRVGLEREEVRRLMTIPGVDATVALAIVAAVGDFGRFSSPQRLVGYLGLNPRVRQSGGHPAQHGRITKQGRAHARGMLVEAAWAAAKTPGPLRAFYERVRGRRGMQVAVVATARKLATLCWHLVTTGEDYAFARRAGLPARRGQKGNAAAYSLKEVRRRERALAEQAELAYRQLVAGWQPKPAKQPPSRGVAATTGARRLGPQGGTAARQGFQPQDPALRSGVDHAPHRA

SEQ ID NO: 421626 - protein, 341 aa, unidentified
MGETSERELVVGIDIAAQTVTAAWGSDVRQIGAAQTFSQTQSGHRQLVRALKATGCAPEKALVVLEATGTYWMRVAVALHRAGYPVSVINPRQAHHFAEALLKQAKTDAIDARTLAHLALALPVKRWQPPGEAWEALYQRLAEHDSLTDTRQRVSSQLHALQQRVHVDPAVEARQQQLIEMLDDQLKAVKREIEGWLKQSEWAELAQRLQAIPGIGVLSAAWLLVVTNGFTTCDRAEQLASYLGLVPHPQPSGTSRRGYRPVGSSGHARARRILYQAGFSAVRFNPAVRAFYQRLIRQGKQVKVARCAAARKLVHIAFAVATKDQPYDPTYHLANHQPILA

SEQ ID NO: 421627 - protein, 356 aa, unidentified
MHKLNVNESTEPIDGCGIEVSAEELVVGLRRQGEAGPTCRTFPNSAPGHQQIGRYLARPGRRVRACMESTGVYGLDLALRLAKVPGLEVMVANPRAVRHFAVADMRRSKNDRLDAAVLVEFAARMRFRPWQPPSPAAMQLHALARRLAALTAMRTAEKNRWHAAQVSETTPLALRRDLERSLRSLRRASDRLTREAVKVIEQDDGLRLRFQLLLSAHGIAPTSAVQILAELAVISPDLTVRQWVAHAGLDPREYSSGTSVHKKTRISKVGNRQLRRALYMPALVAVRRQPHFRAFYQHLVARGKTKMQALVASMRKLLHAIYGMFKHQQPFDGSKVYRLATDLPPAEFAFSTREAA

SEQ ID NO: 421628 - protein, 392 aa, unidentified
MNRIVYIGMDVHTSNYTLCSLDPGYGVEKDNYFAEVQFTNDFIKNVVNYVTNLKKKLKDCEFVCGYEAGCLGYSTYKDLTKVGIKCVLMAPSTMAVQKGGKKVKNDRRDARVIAQCLAYQTYKEVYVLSEHDEAVRGYLRMRDSHNKALKRIKQQIISFCTGHGLFSPTKSNWTVAHLKWLKDLKFNDPVEQEILNEYLSSLTFLSDKIKAMDVRIEELASEKQYCENVKKLRCIKGIETNVALTLLAEIGDFNRFSKPTDFASYLGLIPGEQSSGDKVRGTGITKAGNSTLRRKLTESAKGYWRGRIGIKSATFKKLEKELPKEVTEYALKANTRLQRKFFNMTHVKGKNMNVAASACAREMACFVWGLITNHYDKAPAVPKTDEELLDLN

SEQ ID NO: 421629 - protein, 403 aa, unidentified
MDVAVGLDVAKQFHWAVAIRLDPQTGKAVPVLSRRVDNSPGDIAAFIDELSDLTTGDDSLQVGIDIVGGIAKLLEVMLTGAGLNVVHVPGSMVKNARRAARGGEHKSDPRDARVIADQVRSRDDLRPLHGIGELDAQLGLLVSRRQDLVHEQTRRIARLRDLLCSIHPGLERVVDPTNKADLALLNRYVTPAEIRRAGKARITAHLRRTGHYKTTTLDTLLDAAVAAAEDQRVSVPAEATAASIVKDLAGECLAARTKITALDAEIVEALEHHPDAALIATLPGMGATLTAELLAVAGGLDRFTSGDHLAAAAGLAPALVQSGKVRYLQRPLTGDRALKRVFYQSAFCAIPHDPTSKAFYDRKRAEGKRHHQALIALARRRINVLYAILRDRQPYQPRPPKAA

SEQ ID NO: 421630 - protein, 330 aa, unidentified
MTEMVIGLDPHKASNTIAVLDRDEMLELEQRFDNTARGMVAMLDAVAEFTDRVWAVEGANGVGRSIAQRLVAVGETVVDVPAKLATRVRIYSTGHGNKTDRADAVAIGRAALHSKHLRMVRPDDENVALKLLSDRRHELVASRTQSVCRLHRLIRELIPGGTPRALTAERAEALVNGLDVSDTAGLMRIELALDHIDDIKRSDRRLDQIMLKIHAAVKDSATTLTRIYGVGILNAGLILGEVGDVSRFPTRNHFASYSGTAPIAVSSGDNNRHRLSRSGNRQLNHAIHIAAIAQIRYDTPGRAYYRRKRAEGMKPMEAMRCLKRRISDAI

SEQ ID NO: 421631 - protein, 342 aa, unidentified
MTVIGIDAHKRSHTCVAVNDAGAKVAEKTVASTSAGHAQALRWALTRFGTDLSWGVEDLRSMTGLLERELLAAGQKVVRVPPHLMARNRGSARAWGKSDSVDALAVARAVLREPNLAAAFHDPISWELRLLVDRREDLVGQRVAVTNRLIGRLHQLSPDRPTPAHLERTTSQLALSEYLREQHGLLAELARQELADIGHFGRGISALTEDIAGRVRELDSTLLQLQGCAELTAAKLISETANMDRFRNEAAFARYVGVAPVPQSSGTAVGRVRASRSGNRQCNTAIHRIAIVQLRLKGPGREYYLRRRNEGDTAYTAIRCLKRRLCRIVYNRLRADYQHRNL

SEQ ID NO: 421632 - protein, 387 aa, unidentified
MGTVVIGMDPHKRSATIEVMAGDEAVLAGGRYGTDAAGYRVMLAAVQSWPERTWAIEGCQGIGRHIARRLIADGEQVVDVPPKLSARARVFATGQGRKTDATDAHSVALVATRMSGLRPVAGNEQLTVLRILADRRRSLGEDHTRMICQLHQLLLELIPGGAKKALSAAQARALLARVRPRDAAGKVRRRVAAELVSDLERIYQRKKAADKELRELLKATATTLTDLHGIGPSAAARLLVEVGDVTRFPDKAHFASWNGTAPIDASSGDQVRHRLSRAGNRQINRALHIMAVVQLRNPTEGRAYYDRKVAAGKTPMEAMRSLKRRLSDIVYHQMVLDARAKTAGPGGHVGAANGSSAAGSHPVAGTSEKSLPGPAIDQPMTTIRPPS

SEQ ID NO: 421633 - protein, 343 aa, unidentified
MKNTIIGVDLAKDVIQVCVYTNKNVHSNIEMTPSDLIDFLANSKSLTIVFEACGTSNFWKQKAISLGHDARLISAKLVAAVRQNQKTDRNDALAIIQATLLPDVTFISGKSIEQQQLQSIMRLRELCVKQKTASGNQLTALLLEFNIKVSNRNGGLKGAIESTLEDAENGLSFEFREALDMAWKQYLLVTQSIKTYDDCLEKAMETHPDCKKLLKLEGVGTLNAINLYIALGCAELGVFEKGKDASACIGLTPVQYSSGGKTRLGSIGKYVKNSILRSQLITGAMSAVNHATNREARTTKDQWIKAMVERRGKKCTAVALANKTVRTAYAMLTQNTEYKAELI

SEQ ID NO: 421634 - protein, 367 aa, unidentified
MQEISTMQASGSDNFKRPQVTIGVDLGDRSSNYCVLNATGDILLEDKLPTTSLAMKQLFGRMQRSRIAMETSTHSPWVSRLLTELGHEVIVAHAQKVHLIVKSRRKDDRLDARTLARLARIDPELLSPVWHRSAEAQIHLTEIRARAVLVSARTALVNAARGLVKSYGERLRKCGTQQVSREIAAGLSVELKTALEPLLEEIESLNERIKEYDRRIEKMARQKYPEAELLKQVKGVGDLIALGYVLTIEDPHRFKKSRDVGCFVGLQPGRRNSGQSEPQMHISKEGDRYLRTLLVQGAHYILGPFGEDSDLRRWGRKLAERGGKNAKRRAVVAVARKLAVLLHRLWVSGEVYEPLRNSQKKVVHAPA

SEQ ID NO: 421635 - protein, 410 aa, unidentified
MLFIGDDWAEAHHDIEIEDEAGRVLARRRLPEGLAGITMLHELVAEHLDPTAEPDQVLIGIETERGPWVQALLAAGYVVFAINPMQVARYRERHSTSGAKSDPADAHLLAEIVRQDRAHHRPVAGDSELAEHIKVAARAHQTMIWSRVRQANSLRSMLREYYPAALSAFGAELAGREALAVLAAAPTPDQGRRLSQARVESLLRKAGRQRNVTATAAKIRAILASKQLTARPGVVPAYAASASALIVVLSAMAEQTEVLAGQVEQGFGQHPDAEIYLSQPGLGVILGARVLAEFGDDPDRYADAKGRKNYSGMSPITKASGTKRVVLARYARNRRLGDALFLQAYSALRASPGARAFYDRQRDHGATHYQALRALANRLVGILHGCLRNHTLYDEHLAWHKEPDKLSPAA

SEQ ID NO: 421636 - protein, 358 aa, unidentified
MRTSGKNIFEGQLTIGLDLGDRSSAYCVLNAAGEIVLEHKLATTPEAMKQVFGSLPRCRIAMETGTHSPWDSRLLMALGHEVIVGHAQKVRLITKSRKDDRLDARTLARLARIDPELLSPVKHRSAQAQLHLTEIRARAALVSTRTALVNAARGLVKSYGERLRKCHTQQVGREMTRELSMGLREALKPLLQEVESLNERIKEYDRRIEKMAKEMYPETALLKQVKGVGDLIATAYVLTIEDPHRFRKSRDAGCFLGLQPGRRNSGESEPQMRISKEGDEYLRTLLVQGAHYILGPFGEDSDLRRWGQKLSARGGKNAKKRAVVAVARKLAVLLHRLWVSGEVYEPLRNSQKPMSTAA

SEQ ID NO: 421637 - protein, 331 aa, unidentified
MFPVGIDVSKNTLDLCMLYDGIKGRIKTRNIQNNRHSVENILRWLRLQHCSPEDVHVVMEATGVYHERLATELHDAGFRVSLANPHRSREFARGMGIMTKTDKVDAYMLACYAFLKKPHRWEPPAPEIRYLGALLRRRDVLLGDALREEDRLEKYLSTDTPADIISSCRCMAQLLREEVGNIERQIKAHIKASPALRRDYTLLTSIKSVGPQLGMHMLVVLRSHNFASAEQAAAFLGVVPIEKRSGTSVRSRPRMSKIGPPQLRAKLYMSALCGKIYNKRMRNIYDEMCLRGKPKMVAIGALMRKLVHWCYGVLKTGTVFNDEDLKPVLST

SEQ ID NO: 421638 - protein, 492 aa, unidentified
MVPVLVIATLVTLARSMGHDPVEEITRHTVWPDSQPTGGDMELKMGKSAGLSLECIELNAAGIDVGATEIYVAVPPDRDPQPVRRFATFTADLRAMAAWLVQCRVTTVAMESTGVYWIPPYEILEQAGIRVCLVNSKHVKHVPGRKSDVQDCQWLQYLHAVGLLHASFRPDERICAIRSLSRHRASLIENAAGHVQHMQKALTQMNLQIHHVLSDITGLSGMAILEAIVAGERDAAKLAALCHTRVRSDQQTVIKSLVGNYRSEHLFTLKQSLTAYKHYRELMAECDREIERLTRQLNSRIDPPQKEPMPPADLRFRKRSKNQFHCDMSSELTRVLGVDLTTIPGISALTAHTLLSEIGSDLSPFPNAAAFASWLALCPANKKSGGKVLSSRTRQTNSRASRALRLAAQTLARNRSHLGNFYRSMRARLGAPPAITATAHKLARIIYHLLTTGQPYDESVFLQEGKKQAQRNEKRLRKQAKALGFQLVPIAA

SEQ ID NO: 421639 - protein, 353 aa, unidentified
MDRYIGLDVHSQTCTLAVLGPTGRKLRLQVLETTGPALIQAVRAIPGPKHICLEEGTQSAWIYELLEKEADELVVTMAERRGGSKDDARDALQLAEALRTRAIKRRVYKACGPYSELRAAVRSYGLLRDDLARTKNRLKALFRSRGMLTGDDVFHPEKHLRWEKKLPTPQQQSAALLYAQVELLTKLWAAAEERLLAASKPHSIIKALSTAPAIGPIRAAQIVAIVVTPHRFRTSRQFWSYCGLAIVMRSSSDWVRGPHGDWLRSNVRQTRGLNRNRQPTLKSIFKGAALQLATQMTNHPLHADYQRLLDAGTKPNLARLTIARRTAALVLSMWKHKEVYDPAKQRSHIIAQA

SEQ ID NO: 421640 - protein, 345 aa, unidentified
MNYCGIDVASKSSYVYVMDESGKKLGNGEVATTKEDIVRRLRPYLAGGLTVAIEAGNQTAWIHDWLMEIGARVTVVNPTKVKLIAESRKKTDKIDAKILCELLRLNALPHPVHMPGKDIRALRGLLVARRQLVSARAKLCHVVRGLLRQDGVRLPPRELASFVGWKRVLAAGFAQPQMALIVAAYYESFVTLTRSIRALERDLAEFERREPRVARLRTMPKVGPIAALTFVAAVDDVRRFPNSRKLVGYTGLAPSVRSSGERTEYGRITREGRAELRAVWVEIAHLVAADTGRATAPLRKWFAQLAYRQGKKTAIVALARRLLVIAYHLLRDETVYDAARLKRVA

SEQ ID NO: 421641 - protein, 355 aa, unidentified
MNFTAIDYHKRYSFASALNEQGQRIGEARIVGNSPAGFVQFFRSLGGPSQVVLEACWNWGWLYDQLQQIEEVTEVILAHPYKTRLIAEAQVKTDKLDARALAQLLRGDLIARAHVPSAAMRQRKNVLRQRLFWVKLRTALRNRVHTLLARQRGLSVPERTDLFGKKGQQWLERVELSAPDGWLLRQDRELLAVLDAHVREIERYTEAEIADDANLQRLRSIPGIGTVLAAVIGTEIDTLDRFVRPTKFTAYAGLMPTTHASGGHCYHGPLVRGCNRWLRWALVEAAWIAVGCDAYFGALYRHHRDRGKSATIAITIVARRLAEIVWHVLHEARDYQDRNWQIKSDRSGVTMVGGS

SEQ ID NO: 421642 - protein, 347 aa, unidentified
MNGDYAGRQVVGMDLHRRRSVLVRMTEDGRKLGTARIANSPAALRAELARAGENPRVVLEATYGWYWAADTLAAAGAEGHLAHPLGVKAFSYRRVKSDARDAADLADLLRMGRLPEAWITPPEVRDLRELTRYRHKLVGLRTSCKDQVHAVLAKLGIPVTCSDLFGAWGSAWLDDLRLPQPYAGKVTSLRQLTGELSTEITMLNEVISDLLAGHPGYLVIRQLPGIGPVLAAVIIAEIGDVTRFRRPGQLASWAGLTPRHHESDTTIIRGHVTKQGSRLLRWALIEAIQRTPAGFGPRDAKDAIIARRGAGARNIAKVAAARRLLTLVYYGLRDGQIRCLPEPAAAA

SEQ ID NO: 421643 - protein, 286 aa, unidentified
MEHYAGIDVSLEESSVCVVDATGKLVREVKVATEPEALVRYFDEMELPVSRIRLEAGPLSQWLHAGLVVAGRDAVLLETRHVKAALSAMTVKTDRKDARGIAQLLRLGWYRPVHTKSVPCKDSRDLLVGRKLLQGKLLDVELSIRGILRRYGLKVGEVSCGRFEMHIRELIAGHVTLETVIGAMLAVRMALWNEFTKLHREMQKIARADKICRRLMSTPGVGALVALTYRSAVDDPSRFGKSITVGAYFGLTPKKYQSGETDRDGGVSKVGDAMVRTALFEAAHMC

SEQ ID NO: 421644 - protein, 428 aa, unidentified
MNQQESIRREQYCQLVKEITGSDQYLIVGIDVGKDQHHGFMGTAKGIGLFRKLIFQNDLEGFSRLLKTADQIRVENGLSKVVYGLEPTGNYHKALVRHLIRGGCNVVLVTGQAVKNNRQLLDGRWDKNDTKDAANIADLVSRAKCLYCDCPDFNIIEIRGLLSLRRSLRREAHGLRMRIRNNLLAQYFPEMDRFYSACESESLAIVRWFLDPYVISAMEFSEFFHMVTKTRRGASQALRLRKIHQLAKESVGCSFGPGVEFEADLVVEKLCQVQQQLQKTDDIIQDFCLQFSEYSYLLTIPGFGPYISARVLAAIGDPFRFENRKQLLKMAGYDLCAQRSGKSSDKAVPVISKKGNGELRYALYQAANVAVSRVDLFREYFARLLRGRERERGIKTKMRVKVAAKMLVIAWTLMKKKQPFNPAHLDID

SEQ ID NO: 421645 - protein, 365 aa, unidentified
MTKVRTWAGLDVHAAATVACVVDAQSGEMSVQRLAGRTSEVAAFCARLPAPVRAAYEAGPTGFELARALDAAGVACVVAAPGKIERPAQDRVKTDRRDAERLVRLLMIGGLHPVRVPSSEEEALRDLVRAREDIRGDLMRSRHRLSKLLLRHDVRYDGTASAWTAAHRAWLARLDLDERAAQATLLDYLGAVDGLLIRRDAIERMIDELVPHSPWAKAVARLRCLRGIDTLSAVGLCAEVGDFARFDHPGQLMSYLGLVPSENSSGQTRRQGAITKSGSRHARRLLVEAAWHYRRPPRTGTTLQRRQQDQPAQTIAISWKAQQRLHQLWRRLDSERGKRKTIVAVAVARHLAGFCWAITRTDPNP

SEQ ID NO: 421646 - protein, 343 aa, unidentified
MEHYAGIDVALEQSSVCVVDGTGRIVREAKVASEPEALTRFLGRLGLVVMRIGIEAGPLSQWLHAGLTKAGLEVVLLETRQVKAALSAMVVKTDRKDARGIAQLLRMGWFRPVHCKSPRAQEVRALLVGRKLLQGKLLDVELSIRGILRGFGLKVGVVSKGRFATRIRELVTGQAMLERVIEPMLRAREALRAEYHALHRAMLGIVREDTTCRRLMTVPGVGALVAITFTSAIDDPGRFARARAVGAHFGLTPKKYQSGEIDVTGGISKVGDAMVRSALYEAANVMLTRAGRFSGLKRWAMAVAGRRGMKRAKVALARKLASVLHRMWLDGTSFRFGKEIAAA

SEQ ID NO: 421647 - protein, 372 aa, unidentified
MKQNIIHIGLDVDDTQYHGAAFNKETGEVIDFKCRPTLKGLLQQLDRMARHFSGCSIKLCYEASYIGYCLQRDLMANGIHCDIIAPGSIPSPRGKAIKTDRIDAGYLAQFYANDLLTIVQPPDEEQERDRDLLRSRQKLLQQRTQLRKHMQAVLRRNGLHYKAETGHKSHWTKIHYFWLVRTIDGLSGSLKINLELLLRQLKALNEVLTEYGQQIEVLAISPRYQPAVQSLACYKGIKNIFALTMITEIGDIKRFSHPRKLVSWIGMDIREYSSGGKHNRMGITKQGNRYLRTAFIEANQRGYRTAKIGQDLKSRRKHIAPELVNIADRCLRRLNKKGNRLLLAGKHPNKVKVACAREMVGFVWESLNKVAA

SEQ ID NO: 421648 - protein, 349 aa, unidentified
MSHKLNAGIAVIGIDIGKNSFHVVGLDRRGAIVLRQKWSRGQVETRLANLPPCLIGMEACVGAHNLSRRLTSLGHDARLMPAKYVRPYSRGQKNDFRDAEAIAEAVQRPTMKFVATKTAEQLDLQALHRVRERLVSQRTGIINQIRAFLLERGVAVRQGLRFLRAELPRILATPCDALSPGMMRVIEDLAGDWRRLDERIEGLSSEIEVVARRDAGCERLMSVPGIGPIISSAMVAAIGSGDAFTKGRDFAAWLGLVPKQISTGDRTILGKISKRGNRYLRVLFVQAAWVVLINPKSWQRHGLKPWLEAAKKRLHHNVLAIALANKLARIAWSVLAHGRTFEASRIQVA

SEQ ID NO: 421649 - protein, 428 aa, unidentified
MNSLNERIARITPTTLIVGIDTAKELHCARITDHRGIDLTKPVKVHNSIGGFEGLLEKIGKLREKHSCDQVIVGMEPSGHYWRALGWYLKLHESNPVLVGVNPYHTKQAKELDDNSQTKSDPKDALVIAHLMRNGNYFDTYLPEAEYAELRQLNAERQRLMKQVSRANNVLIALLDEFFPEYATVWGNVTCPTSLELLKSYAFPSDVMSAPRGKLLEDIRSASGGTEGTKLMETMLRAASRSVGVKEGKQAVRQRILSLIDELEYFQRKKELIEIELEAAMEALQLGDILQSMLGVGPIISAAFMGEVGDIHRFDNWKQVRSLAGLNLVEDSSGQHKGKTKVSKRGRPYLRHMLFLAGECGCRCNPEMHKLYRYFRDRKKNPLKAYQAYVAVGLKIMRILFHLAKTGERYDPSKALGAVRMQQIASLT

SEQ ID NO: 421650 - protein, 429 aa, unidentified
MTKKYILKTQSAPAERSAVETYLAPPPPSKGKIIGLDCHPDTFTAALFVGQTPHDARKIGSQENLSLEALLKWAAADLTPQDIILMEAGSNSFELCKRLGSLGLRACVLESCHVGKHAKTYADNDKMAAARIALVYLAGNAPCVWVPDEQSRERRELLHAYRKAVGDHTAATNSIKSYLNGRGLRLGKHSLDEKTTPQWILEQADWSLLQKNILTEHLANITESKERRKRLYRLIAAEMAVDPKMMRCMKVLGVGIVSAFALLAVIGDIGRFHSPEKLVAYIGLNPGQRQSGKGKDIRLGVGRRGRGDIRHLLIQGAHAILRSGRNTPLGQWGWKLFARKGNRNVAVAAIARKLLVQVWHLLHGNPPLALESDTSFRIKLQKLAVALGTTLRTGIGLGKTLEDSIKTLLSRCQSHPEPSASPCETPQPA

SEQ ID NO: 421651 - protein, 336 aa, unidentified
MSLYCGIDLHSNNHVLCVIDDKDRRLLETKLDNDVIQTIKALSPYQKRLKAVAIESTFNWYWLADGLMEAGFQVELVNTAKVVQYSGLKRTNDRYDAFHLAHLMRLDILPTGYIYPKAERGLRDLLRKRIQLVQDRTRHLLRFQSQVQMHTGDSVPASRVKTQKYRLPVIGDTNVQLALQSQLLLIRALSAQIKQLEQSILSQVEPVASFAWLKTVPGIGDILAEAILLETGDITRFKGPGNFASYCRCVDSRRESNGKKKGENNRKNGNRYLAWAFIEAANFAVRYSDKAKRFYLKKEKATNSIIARKALAHKLARGCYWVMRNQEAFNQDRGFH

SEQ ID NO: 421652 - protein, 425 aa, unidentified
MNYKQNEKINQVKESTLVVGIDIGSTTQYARAFDWRGIELGKVFTFSNSREGFEAFKAWMQHLQDKYRKSDVIVGIEPTGHYWFDLGAYLEDEGILLVMVNPYAVKQTKELDDNSQSKNDRKDPKVIAKLVTEGRYSAPYTPDGVYADLRIMVANRKRLIREMTQIKNRFARWFAIYFPEYTDVFGDYEAQSSMLLLKKVCTPEAIVELGAEKINQIWRDAKLRAVGMKRATTLCETAKRSIGLKKGSSAARYEMKLLLEDYEYKKAQLDAVMEEIEKLCRKIPESEQMLAIKGIGVITVAGFLAEVGDVRRFESPRQIQKLAGLSLRENSSGKHKGQTTISKRGRSNLRAVLFNAAIPLIATNPEFKSLHEYYTTRANNPLKKKQSVIAISCKLIRVFYAILANGVTYDAQKMLSDIHRQPQAA

SEQ ID NO: 421653 - protein, 339 aa, unidentified
MTVKTIGLDLAKDVFQVHGISENGRVIFNKAIKRAKLLAFFEALPPCIVGMEACGSSHHWGRQLCKLGHDVKLMPAGYVKPYVKRGKNDAVDAEAICEAVRRPTMRFVEIKTEDQQAVLSIHRTRDLAVRQRTQMANMIRSLLREFGHILPIGIEAVTAFAKRHLDGDHPDMPDIANCMLGMQCYQFIGLNERITGYTKMIEQHAMLSTDARRLMRMPGIGPITASAIVATIGDAKQFRTGRDLAAWLGLTPLNKSSGGKERLGKITKKGDRYLRKLLVVGMTSRAVMAKRSPEKVDLWTAKIIADKPFRLATTAMANKAARIIWAMLTKKQEYRQPAF

SEQ ID NO: 421654 - protein, 352 aa, unidentified
MTMLADQVDLVIGVDTHKLTNTAAVVRAATGGVLADVTAPTTQDGHEAIFEMAVSHGGFRAWAIEGANSYGAGLTRFLHERGEWVIELDRPNRTARRGGKKSDPLDAVRSAREALARPELGEPRSMGDRAALGVLLAARRSAVDARTTAQRQIHALLISAPEALRTKFRGKTGRQIVLGVVLLRVSAHHDTETKTMIGVLRSLGRRILDLETETKEYERQLTEIVRSWRPELLEECGVGPVVAATVLCAWSHQGRFRSDGAFASLAGVSPIPASSGMTVRHRLNRRGDRQLNRVLHVVVINRIRHDKATQTYVERRRAEGKTDREIKRCLKRYVARQLFRQLEGGPSRLDEL

SEQ ID NO: 421655 - protein, 289 aa, unidentified
MQNITLIGIDLGKHSFHIHCQDKFGKALLRKKFTRTKLMQFLATCPPSVVVMEACAGAHFMARRISDFGHETKLISPQFVRPFVKSNKKDFVDAEAICEAASRPSMRFVQPRTEPLQAMRALHRVRESLIRDKVKTTNQIHGFLLEFGISLPTGDAVIKRLSLVLAEHEIPEYLSRLLVRLHTHYLYLVEQIAELESELSQSINADDTAQRIMTIPGVGPITASLLSSQPGDGKQFSCSRDFAASTGLVPRQYSTGGKSTLLGISKRGDKNLRRLLVQCARSFMMRLER

SEQ ID NO: 421656 - protein, 418 aa, unidentified
MTKRKDSTLIQIVHPICCGLDVHKDKISACLITVDDTGSEQHELREFTTFTHDLQKMKKWLIENKCPIIAMESTGVYWHPIYNTVGDAMEVTLVNARHIKNVPGRKTDIADSKWLAGLLRHGLLKGSFIPPEKVREWRELSRLRKKYTESLADYKRRVHKLFITANIKIDSVVSDLFGMTGLNLIELLCNNSELTIEKVQECTKGRLKKKVPELYSCLHGYFKDHHRFQLVGMMETINMFQKRIEQINIRLESLMCEHKDLLERLDEIPGIDKKSAQSILGEIGITLDDFRSMSAFVSWAGLCPGNNESAGKRKSGRNAVRNHPFKTILVQVAWAAIKKKDSYYKAKYYKLKARRGAKKAIVAIAHRIAKAIYNIVKNGESYKDLGEDYLCKPTKQRVLKNLMKKANELGMKLVPCEN

SEQ ID NO: 421657 - protein, 431 aa, unidentified
MVNQTEERSIALKPIKTTKRSFVNGKHLIVTADIGKDKHFGYWRCPDGTDVKPFAVPNNSAGFGEFWERVSRAQKLHNLDGIIFGFESTGPYAEPLAHFMRARGAELVQVNPLHTKRFKEVTDNSPNKTDQKDPKVIADIIAMGRFLTVVIPEGPAAELRRLSQARERSTRRHTALANQIQCLMASIFPEFLQAMKGVKSASAQYLLKHYPTPQEIAACGIAELTRTLRKVSRGKLGADRAQALYEAAQSTVGVAEGQASMVLEIQELLTLMEASQRFTENLEREMIQHLARIPYSNTLLSLKGIGDVTAAGLIGEVGDFRKFRTLGEVMKLAGLDLFEVSSGRHKGQRHISKRGRPLMRKLLYFAALNTVKKGGAMHQWYRSACDRGMLKTKALVAVSRKLLGILFALVRDHSAYVPNYSETRCQLKEAA

SEQ ID NO: 421658 - protein, 436 aa, unidentified
MKTPDVFIGIDVGRHHHQCSFVDGERKPIAKTLRIREDRDGFQALKLEMDNIVQKGGEVRFHIGMESTGHYHQNLMAFLQAINGLDVEVTCINPVQTKRFIQMQMLREQNDKIDARAIAEYMCVQRPAPTPQKRSDMQPLRDLSRLRCQLITQRTAILNQLHAILDHVFPEFEQVFTDIKLEPLAWALLSRYPCPQNLITAKTSQLISVQAKKGGGYLGKERALRLKKFAMQTVGSSRGEVYAFQVKILVQNVKSLQQQIEETDKAIENSIQALELPPWKTIPNVGIQTMATLLGDVGDPRLFGSAKKFSSFLGLTPRGKQSGSSVNRKGHISKCGPSHARQKLYMCVVSALATKKNPLIIEIYNRLVSKGKPKNVAIVACMNHLARIIYGVFKSNQSFNPEYQEMKSGLGRPQNGNLAIMHGVLPPRPSCNIAAT

SEQ ID NO: 421659 - protein, 339 aa, unidentified
MSDAGYVGIDLHRRRSVIVQMDAAGEVLSKTRILNDKELLARELEAAAPDAKVVMEATYGWYWAADVVKASGAELHLAHPLGIKGFNYRRVKNDVRDATDLADLLRMHRLPEAWVATPEFRELRELVRHRYKLVSGRSALKNGIHAVLGKQGAELGIGDIFCIEGRRRLESIPLDSAFRIRVDAQLRLVDAYDEEVDAVDAELRRRLKGHQGYHAIQAIPGVGPVLAATMVAEIGDVSRFATPRHLCSWAGLTPKVRDSDTTSKKGRITKQGSRVLRWACIEAACRTHPNHLRAWSDQITERKGNRLIARTAVARKILTLAFYGLRDGEIRCLATSEAT

SEQ ID NO: 421660 - protein, 347 aa, unidentified
MTYVGIDVSKATFVVAYSSAKSSETKTFKNTTKGIREFIRTISPEENHCVLEATGNYSMLLVYLLSKAGFTVCMENPLKIKNFARVMLSVVKTDEIDARLIALYGERMQPAPFKLRSDSLLLLKQKRTVLRQLKKQLTANRNLEGSLKVLPFIDSKCKKVLEKTIKFLEKQIEEMEKELTSLAEIEYKKQMDLLTSIKGIGATLAAALIIATGGFTYFDNAKQLTRYLGLSPTYQQSGTSVNVKGHINRNGDAYLRSQLYIGAMASLRCNTECKACFDRLRSNGKPGKLAIVAVANKLIRYNPQNEMFAHFQTKCIIFKNETQLFKVIPHTPKISKKSTGFAGTLYI

SEQ ID NO: 421661 - protein, 341 aa, unidentified
MLGRKVPQQRLKSNIDYEHYIAIDWSMRIMAIAHMSQRSKGPKIQERPSNITEVKEYLSSLRGPKILAFEETTTAQWLYLELTDFVDRIIICDPFRNRLLLEGPKTDKIDAAKLCLLLRAGLLKEVFHSADRLYELRTLVGAYEDLVQAGVRKMNQWNALERGHFTTSSNAIFILDHIKKSVKVYRASKKEYEKKFEEILKKHSLAKYQTEIPGIGTIGAAKVVATVVDAHRFPYTGKFWNYCGLVENQKYSGGRRYGHRRPRFNRRLKSVYKTAAITCLTGRNNPMRQYYEYLIAKGTAEHNARNAVARYIAKVSYGMLKNGQHYKPQHGRIEASEQQKT

SEQ ID NO: 421662 - protein, 419 aa, unidentified
MDEFAAYLGIDWADTKHDLCLLDARTGAKTRLVIRHTPEALAEYFTSLRARYPGRQIAVALEQSRGPLLFALLQYDFLVLFPVNPSTLARYREAFSPSRAKDDPTDAAYLVELLQQHRDRLKAWRPDDEQTRTLRYLVEHRRRLVGDRTRLSNRLTALLKCYFPQVLAWFPDIRTELVCDFLLLWPTLAAVQRVKRTTLLNFFRRHHSLRPDTLEKRWLAIKHSVPLTTDSAVLNSSVVLSKALAAQMKCTLQAIKDFDREINKLCAAHPDFPLFQSLPGAGKVYASRLLAVVGSDRERWSTAAELACLSGIAPVIERSGKSTWIRWRYFCPKFMRQSFHEFAAESVRHSFWARAYYEQQIVRGKNHQAATRALAYKWIRIIWRCWQTNTPYNEVHYLESLRKKGSPLLAFAAPIPKSS

SEQ ID NO: 421663 - protein, 392 aa, unidentified
MVIFMFFLGIDIGKNTHVASLLDEKAKIIFKAYSFTNTLDAAEALLVKLEPYKDSLEIGMEATGHYWLSLYSFLAEHKFIVHVLNPIQTDGWRKGIEIRKRKTDVIDSVLIADLIRYGNFLETSLADEDILSLRNLSRFRVYLVNSVSDLKRKAIAVLDQIFPEYASVFSNVFGQTSKELLKSLSLPSDYENLSATKIEEVLSNITQKKKASKTISTLSDKASRSFGISFCKDSFAFQLKLIIEQICFIEEQIASVELEIDQLMSKLGTNIKTIPGVGSVIGAVILGEIGDIERFDNPSKLVAYAGLDASVSQSGEYEASSGKLSKRGSPYLRKALYMAAQRAEFCDPVFHAYYEKKRNEGKHHLVATNAVARKLCHTIYAILKKDVPYEVQ

SEQ ID NO: 421664 - protein, 470 aa, unidentified
MTPRYKPRETRRRRSKKKPSAAELPAQLEQVNLNAAGVDVGATEHWVAVPAGRGEQPVQKFGAFTEDLYQLAAHLEQCGIETVAMESTGVYWIPLFEILEQHGFEVLLVDPHRLKSVPGRKSDVVDCQWIQQLHTFGLLSAAFRPEDEVCVLRSYLRQRAMLVSYASYHIQHMQKALTQMNLKLQHVVSDITGATGMRIIRAILADQWDPQELAKLRDPRCHKSEETIAKALEGNWRDEHLFELRQAVELFDVYHQKLAQCDERIEVHLKSFEDRSDGKTLAPKKSRSKPGRTGLRFDARESLWRMCGVDLTAIDGLDTHTVLKVLSEIGTEMSRWPSVKHFASWLGVCPGSKISGGKKLSSRSKPCANRAAAALRFAASGLHHSKSYLGAFLRRKKAQLGAPKAITATAHKLARLIYSMLRYGTAYVDRGQDYYERTYRQRALANLRRNAKRLGFELTPSADAAAAAAS

SEQ ID NO: 421665 - protein, 392 aa, unidentified
MYIVGIDIGKNHHEASIVSPEGKQIGRSLRFATTHKGADSLMRFIFKNIGNSPCVFGMEATGHYWYPIYSFLKAKGYTIYVINPIQSDSLRKMYIRQTKNDSIDSFLIAEVIRFGQFGTTSMADENILAMRQLCRYRDSVISSRTEIKLRIGTIMEQIFPEYEKQFSSLWVSTSMGILEKYLTPENIENTPIDELFEIIKDKSHNRLTKAKAISIKEAAADTFGIKIAQDAFSFQLKQLIDRMNFLDKQIEALDIEIMKYYEQFDCYLHTIPGIGIIGAATILAEIGDISRFKNSSALVAFAGIDPTVRQSGEFNSTHNHMSKRGSPYLRHAIFLAATTCSFHNSPLNAYYKKKRDQGKHHLTATGAVARKLTSVIYAVLRDSKPYEPKSFC

SEQ ID NO: 421666 - protein, 369 aa, unidentified
MLYLAIDQHAKQITVCVRNEDGDTVLRRQVSTRSEKIEAFFQQLIEMDAQFMAILEVCGFNDWLIEVLRKWSCREIVLIHPERPSKRKTDRRDAHKLADLLWLNRERLAAGQTVHGLRRVYMVTQKEREDRQLTSLRRNLGQRRTRTLNKIHRIINKHNLIWNYPTKSFQTQAGRKWLDTLQLPEIDRVEMDMLLAEWKTWDEQIAKVDEEIVGRASQVEPGKTHSPTQVLMTAPGVSHYSGLTLASRIGPIERFPRPRSLANYFGLTPGCRNSGNTQDRLGSITKEGSKIARFVLGQLVLHFLKHDPKMKAWYRRIKLRRGSKIARVAVMRRITTIFWHMLTHDEAYSIGGPPPRLRSDSETTGSEAA

SEQ ID NO: 421667 - protein, 337 aa, unidentified
MKYSAIDLHSNNSVVSVTDEEDRVVVEKRLPNDLAKILGFLSPWREELAGVVVESTFNWYWLVDGLQAAGYRVHLANTTAIKKYEGLKHSGDETDARYLAHLLRLGILPTGTILPPEQRAVRDLARKRMQLVRSRTAHILAVENITARQHGVRISSNQVKRLTAELVDQMPLPDDVALAIKANVAVITTLCAQIDVLEKRLQERMGARAEYGLLTSVPGIGRVLATTILLETGPIERFAAAGNFASYARCVDSVRTSNGRKKGEGNTKNGNKYLAWAFVEAANFALRYCVEAKRFYERKKAKRNNVVAIKALAHKLARACFHILKEGKPFDVARCFA

SEQ ID NO: 421668 - protein, 354 aa, unidentified
MWPQQRWRGAMECYVGLDVSLKQTSICVVNEKGSVVREGVVDSVPEAIAGFVRSKAPGAVRIGLETGPTATWLWTALARLDLPVICIDARHAKAVLKMQVNKNDRNDAAGIARIMQTGWFKEVRVKDLDSHAVKALLASRALLVKIKRDLENQVRGLLKNLGLVIGHGTFNVFAVRAKELIADRPELTSAVSPLLTARTAIEQQIGELDRQVLKLARQDAQARRFMTVPGIGPITALCFKATIDDPARFRRSRSVGAYIGLTTRRHASGELDWSGRISKCGDAMLRMYLFEAAGVLLTRVPKWSALKAWGTRLTKRSGLRKAKVAVARKLAVILHRMWVDGTEFNWSNNKEVAA

SEQ ID NO: 421669 - protein, 347 aa, unidentified
MKFYTTLHKYYCGIDLHARLLYVCILDEHGNKVVHQKIKADPHQLHKLLKPYIGQVVVGVECMHCWYWVSDFCREINVEFILGHALYMKAIHGGKAKNDKIDSYKIASLMRGGNFPLAYNYPAETRATRDLLRRRTYVMRHGSELKAHVVNTDSQYNLPAQSLNLKNVSARDGLRDYYDDPVVQRMIALDMNILDCYIRELKHVESFIEGKAKEHYGALLNIVRTFPGIGQILALTILYEIGDINRFPSVQQFASYSRLVKCKAESAGKTYGTSGNKIGNGYLKWAFSEAAVLYLRGNDNAKRYLAKLQKRMSKGKALSALAHKIGRCVYFMLRDRQVFDENKFLKG

SEQ ID NO: 421670 - protein, 318 aa, unidentified
MNEVYQAYVGVDISKDSADFYLHPAGSQGSIQNQPEGHAQLIAKLPAPGSCLVVLESTGGYETDLLYALQDAGHAVALVNPRRTRAFAVAQNQWAKTDRIDAKIIALFAESTKPEITPKPSENQRKLRGLIVRRRQLVEMQTAELNRLAMAVQALARRSLQKHLDYLQKEIVFLEQMIEKLVQEDPEKRESAQRMVAVPGIGKITAMALVSQLPELGQLNAKEIAALVGVAPINNDSGKKQGKRATKGGRAELRATLYMAALTAARVNPKIKPFADRLKAKGKPAKVVLVACIRKLLVILNAMEKNKGNWCDAIASAA

SEQ ID NO: 421671 - protein, 394 aa, unidentified
MFLVGIDIGKHKHSFCIINKETGESIVKPKFFDNNKVGFEELLSSFKGLPKKDILIGMEDTGHYHFALLKFLLDKKYQVALINPVTTDLTRKLSGSHTKTDKLDTLTICDVLTSNQRTKPYRISKVDRFDLYEQKQLTREHHNLKEQSNVLKNRLQKSIDIVFPEFNSLFKSMYGVVYMNILKEFGSADALAHSDIRTIRKCFDFKGRGKRIELTAKELKNAAINSIGFPSIAEVVQIKHLVNQIELVEEQIEELDKKIEEFSIANNSPILSIPGISHFSGTSILAELGNIHNYSKPSQIIKFAGVAPLTYESSQFMAKHTAITKKGSTYLRKTLYQIIIPVINNNKVFKDYYNLKLSQGKGYRCAQGHCVRKLLRVIFQLLSTNTQFDPTLLV

SEQ ID NO: 421672 - protein, 330 aa, unidentified
MQKNKEYVGVDVSKESLDMAVYSTGEIRSFGNDDASIAKATTWLKQVNPAIIVMEATGGMEVSLYVALQEANLPLAVINPRQIRDFAKSMGILAKTDKVDAKVLARYAATIQPEARPLPDEEARQLNTLVRRRCQLVEMIIAESNRATITRDKAMKQRINAHIDWLKQELAGIDKDISQMMKENPVWHAKDKLLQSVPGVGPVLSATFIAELSELGILNRKKIAALVGVAPFNRDSGKHRGERSIWGGRCRVRQPLYMAALSAVRFNPTIRIFYERLLANGKEKKVALTACMHKLLIMLNVMLKHNSYWSCNYAIFNNTCIPDAKTVALL

SEQ ID NO: 421673 - protein, 374 aa, unidentified
MLGRQTARGFIPRQHDVFIGLDVDKASISLTCLDHEQMVKSLRMPYQAAGLLKFVERQFPQKQIAFVYEAGPTGFGLHGDLTQAGYPCLVVSPSMVPQASGNRIKTNRLDSQKLAESLRGGQLKGIHVPSEPYRQLRHLTQLRDTFVQQSRAAQCRIKALLLLEGIAFPGTQWSQATLAKLEVLACPEAVHFKLIRLIQTLRFAQAQIKDTTKEILRFCHQEPEISRCLGYLMSVPGIGTATGTQLLARIGDWRNLRHVRQLASFLGLVASERSTGDSTRRGRITRAGDSRLRNKLIQAAWVAIRQDSELKVFYWRIYNRHAGTQASYKAIVAVARKLTTRIYAVLSEQRVYVVRTQEEQTPPGQTRMPAEPAS

SEQ ID NO: 421674 - protein, 415 aa, unidentified
MALKIVYPICCGIDVHKTFVVACIASTDSKGVTTYRSHRYSTFTQGLNELSQWLCEHDCKDVCMESTGKYWIPVFNILEQSCNITLAHPKYVKAIRGKKTDKKDARWIADLFKHDLVAGSFMPPLPIRQLRDLMRYRFKLTNFTSSEKNRLQNSLTVSNIQLASVVSDTFGKSSMAIIEKLLNDPTDTSFDLEPLIHGSMKGKLPDLELAIEGLITPEQAGKIKVIKQHYEDLESRKAELESIILSLAEPYLEEINLILTVPSFKNIFSAIAVVSEIGVNMDVFPSAGHACSWAGLTPSNDHSAGKSKSVRISRAGVYIKPLLVQCATAVVKSEKHPEIRNRYLQLKRRRGHKRAIIAIARMLLTAIYHILKNKEPYNPDLYKKADVLPVDREITVEQAIKWAQAQGYRIKATVN

SEQ ID NO: 421675 - protein, 338 aa, unidentified
MQTYAGIDLHSSNNFIGVINDKDKILYGKRHANRLDDVLRALDPFKDSLQGVVVESTFNWYWLVDGLQEHGYSLHLANPSAIQQYEGLKHTDDPWDSFWLAHMYRLGILPEGYIYPKEHRAVRDLLRRRLLFVRHSTAHILSLQSMISRNLGFKMSNNEIKKLKPTDIESLFDCSNLVFMANNSLAAIEFLKKITKGIEKKVKSQVKMRKEFEMLLTIPGIGNILGLTINLEVGDIGRFPKVGDYSSYCRCVESKRISNGKKKGENNKKNGNRYLAWAYVEAAQFCRRFCVKAQSFYQSKEAKTKPVVAIKALSNKLSKASYYIMRDQVAFDEDKLFG

SEQ ID NO: 421676 - protein, 353 aa, unidentified
MKSKMESNTASLAVIGVDIGKEVFHLVGLGADGKIAFRRKIKRLALKDAFEDLPASIVGMEACLSAHFVSRTLRALGHEPRIIPALYVKPFVKGQKNDYNDAEAIAEAALRPNLRVVQEKSQDQLDLQACHRVRSRLVSRRTATINQIRAFLIEQGIAVRAGPRALRNSLFAILENRKDEISPRMASLILGLYEDWCHLDERIERVTGEIEELSQVEAKCQRLMSVPGIGPVISTGLVAAIGAGEAFERGRDFGAWLGLVPRQYSTGGRSVLGRISKRGSKYLRTLLIQAAKVLLMRPHNWSRYSFGAWLTTASERLHRNKLAVALANKLARIAWSVLRHDKAFDTHLETVAI

SEQ ID NO: 421677 - protein, 360 aa, unidentified
MTATMTYVGLDVHARSTQAAAIDVASGELRRARFGGDSAELVAWLDALPQPLRACYEAGPTGFALQRQAAAAGIDLCVVAPSKTPRAAGDRIKTDRKDAELLARLLLAGQLRPIAVPSPSLEAARHLCRAREQLRGDLMRCRHRVSQLLLLHGRVYPGATAWNGLHRKWLSRQRFEEPASELAYLDSLAAVDGLVARRQALDERLSRLALAGEWAPTVARLRCFRGIDTLSALLLGLEIGDFGRFDSPRELAAWLGLVPTLDQSGESRRQGAITKTGSGYARRLLVEAAWHYRREPRIGVSLRNRQQGQPAHVLQIAWRAQDRLYRLQRRLRARGKPANVATVAVARELACFLWAAAVAV

SEQ ID NO: 421678 - protein, 341 aa, unidentified
MAVIIGIDPRKLSHAACAIDNNEHEVAQLHVGAGQRQLELLLGWAQPFSERRWAIESAAGLGYLLAQQLVGAGECVMDVPATLSSRVRLLGTGRSNKNDPNDARAVAIAALRAPSLAVVRGEDHLTVLRLLAKAHLDAGRARNRACCRLHALARELVAGGIRKEVVVSQAESLLAGVEPVGVAQRQRLELAYELVDEIRALDAKLRRSKARITTAVVASATTVTDLYGVGPIVAATVIGYSGDVRRFPTAGHYAAYNGTAPIELSSAGRTVHRLSRRGNRVLNHAIHMAAVTQIRNLPSEGRAYYDTKVAAGKTKREAMRALKRRLSDRVYRQLLADTRPR

SEQ ID NO: 421679 - protein, 344 aa, unidentified
MTSMHFIGLDIHKKSISYCVKDVSGTVLSEGTVAATRAQLNDWVKTLPAPWTVAMEATMFTGWIYDHLLPHASAVKVAHPLMLRAIAAAKKKNDRIDASKICDCLRCDFLPECYMVSAEVRERRRTLRYRKLLVRQNVQLRNKVSQMLMESGVVYNKQKLHKVGYFKELMETNPDISRELKPLLAICRETIVRIGKIESALIRSLRRDPLLHARVERLMTIPAVGPITALTWVLEVDDVARFHSVKQAVSYCGLCGAERSSAETIKRMPISKQRNKHLQSVLIEAAKLAPRLSPELALVYDTEKQKGHANRASIAVARKLVAYLLAVDRSGREFVVAGERRAAA

SEQ ID NO: 421680 - protein, 409 aa, unidentified
MSNEFQWFLGIDWGSEKHRLCLMECGGKILEQKWVEHSGSALAELVDWLRRLTSGVPGQAAVAIEVPRGALVETLLEHGFAVFSINPKQLDRFRDRYSPAGAKDDERDALVLADSLRTDRHCFRAVRIDDPQIIRLRELSRLEDDLLAERNRLSNQLWEQLRRYFPALLKLSSSADEPWLWDLLHRAPTPERAAKLKPAQIARILDQHRIRRLNAQQVHEMLASAPLRLAAGAAEAATEHVALLLPRLRLLHQQQADVARRQEKLLQELATPAGETGEHRDAAILLSLPGAGRKVTATMLGEASQAIAERDYHALRCLAGCAPVTLQSGKKKIVLMRYSCNERLRNALYHWAFASIAHDPAAKRFYAASRARGQTHARALRGFADRQLAVAITMLRHHTLYDPNRRAAA

SEQ ID NO: 421681 - protein, 319 aa, unidentified
MTLTHPIAGIDVAKHSLDIALLDAEQNCASSTLASDEEGLKNLTGWLKTKGVRLVVLEATGGLEVGVMLALEAEGLDVARINPQRVREFAKSLGWLAKTDRIDARLLALYGERVRPRPTPLTNEKHRRLKELVARRKQLVDARAKEKTRGHQCSDDLVRASILDLIAHLNAQIRSMESAIDKLVDDEPDLAHKRRIVRSFGGVGAQSANAILAYLPELGVINHKKASALVGVAPFADDSAARSGRRTTAGGRAELRQMLYMAMQAGYRSNPHLKPLYQRLRERGRSHKCALIACLNKMIKILTAMLKTGTMFMPRSTEA

SEQ ID NO: 421682 - protein, 340 aa, unidentified
MNFIGVDLHKKIITVCVMDQKLKVLARATLYSDQPDKILEFFRSWRPFKVVVEATASYSWFVEALEPLAEEIVLANPNKLRVIAESTKKTDRLDAQILAEFLARDMIPRAYMPTPRQRQHRALVRHRQYLRGRITSVRCKIRHILADYNADRKDLFSSQCGVAYIKEVGLSEAQKTVILQLWEELKEHEARINELTKKIKAFIKKAPQREAEARTIVKTAPGVGFVTAEVVLSELGDVSRFRNSKAISAYAGLAPAVRQSGGKKSKDLAITKQGSGLLRWALVEAAWRLVGTSRLWENRFERLKKRGGAKRAIVAIARRLLCVLYAMLRTSTPYNVLAAA

SEQ ID NO: 421683 - protein, 345 aa, unidentified
MEITTIGLDLAKNVYQVHAINGAGEVVVRKTIRRAQVLRFFERLDPCLVGIEACGTSHYWAREISTFGHEVRLMPPAYVKPYVKRGKTDASDAEAICEAVSRPTMRYVAIKSCEQQAALTIHRTRDLFVKQRTQLVNMIRGLLAEFGIEIRRGITHALSLAERIAAGDMPGIPALAAKMIASLAGQILDLEARLREIERELLAWHRSSDIARRLATIPGVGTVCATAFAASVTDPHQFRSGRQFAAWLGLTPLQHSSGGKERLGRISKMGDKYLRRLLVVGMTSLVRRAKYKPDAVDRWLSDLLSRKPARVVTVALANKAARVIWAIMARGGTYRAPQPAGAAVA

SEQ ID NO: 421684 - protein, 344 aa, unidentified
MTYYAGLDVSLRTVNICVIDEQGELVAESKLASDVQDIVAYLDELSLDIESISLEAGTLAQYLTYGLQAAGFNVICMEARQVKGALSAMRNKTDKHDARGIAQILRSGWYSRVHIKSMQSHHIRMLLSSRKAVLSKCVDLENEVRGLFKIFGIKLPPKLGHGAFDATVRDIIEADETLSHALLPLLDARLVLYRTFRVLDNRTRKMAHADPVCVRLMSVPGVGFITALTFKAGVDDPKRFKRSRTVGAHFGLTPRRFQSGEMDIDGHISKCGDADVRSTLYTAANALLTRSARWSPLKAWGMKLAKTRGHRRAVIAVARKLAVILHRVWIDDTQFRWGTEGARS

SEQ ID NO: 421685 - protein, 372 aa, unidentified
MNRNILHVGLDVDDTQYHGSAFNRATGEIIDFRCRPTLKGLLTQLDKLQRHFRGLSIRLCYEASYVGFCLQRDLRAHDVHCEVVAPSSIPSPRGKAVKTDRIDAGQLAQFYANDLLTIVQPPDAEQEPDRDLLRTRQKLLLQREQLRRHMHALLRRNGLHYKAQTGYKSHWTKPHYAWLQRTIKGSSGSLQVNLNLLLCQIRGLDGALVAYGQRIEELAGTPRYREAVRSLTCYKGIKNVFALTMITEIGDIQRFAHPRQLMSWIGMDIREYSSGGRHNRLGITKQGNRYLRTAFVEANQRGYRSSRIGKELKARRQDSTPELIAIADRCMRRLNKKGNRLLLAGKHPNKVKVACAREMVGFVWESLNAVAA

SEQ ID NO: 421686 - protein, 419 aa, unidentified
MNYVGFDWASRAHDVTVLDEAGGVLDRWAFPHSETGWVTTLDRLARHGSAAEVPVIIERTCGLIVDRLLAAGHPVVPVHPTAFYAARPRWGASGAKSDPGDSYKLADYLRTDGHRLRRLTPTDPGLHELQALVRLRDDQVRARTAATNQLTAILDNYWPGPKQLFMSLASQIALAFLTDYPTPTSAAHLGEARMAAFCRRHAYRGGKSPAELLSRLRAAPVAPVGLPPATLAAMVTAQVTVLKTLQTVISDVERLIAVRVVAHPRSNLFENLPGVGMINLAQLLAEVGPILDRVDSAEQAATECGAAPVTRSSGQTRGVYFRWAANTRARKAITSFAHNARMQDDWAAALYADARARGKRNPHATRIVARAWLRVIWACWTSGQPYNLDRHHSSRFLHRCHPAGAQARSRWSPPPEERS

SEQ ID NO: 421687 - protein, 321 aa, unidentified
MSKDKNYCGIDVSKDKLDAFNERTGHIVVENNLKGFRELLKWVPLKTHFVMEATGVYHKKLAHFIYNQACNVSVVNPLIIKRFSQMLLRSTKTDKADAKIIHKYAVKNTPALWKPAAAYIEACMDLSSLLNLMFKQRTALKNKTHALETKGCCDKMVFRCIKQSINNLNKQIEALEKQLEMYIEENTPELFKQLKSIPGIGTKTAAFLIIVTDGFKDFESSKQVSSYLGMAPSIKRSGSSIKGQSRITKTGNSHIRNLLFMSSFTACKYNPGCRQLFDRITGAGKSKKLALIAVGNKLIKQAFALAKSGSYFNPEYVSVRN

SEQ ID NO: 421688 - protein, 421 aa, unidentified
MELAWFVGIDWGSQRHQACVLDAGGRVLGEREFEHGGAGLTQMADWLLAFASDAAAVGVAVETPRGPVVESLMERGFAVHSINPKQLDRFRDRFSPAGAKDDRRDARVLASALRTDPHCLRRLKPTDPAIVELREWSRLSEELTRERIRLANQMREQLWRYYPQFLGAVDDDVAAPWALDLWRSLPTPRAGQRVREVTLTKVLKQHRIRRIDSASLRARLRVPAVRLTPGAAEAAMTHVRLVVERLALVNRQLDDVRRHLDGLVHRLTEADSTGDSDASMEDGPSPKTPPDAAILLSLPGVGTKVLATLLAEGNDAVGRRDYDALRCLCGVAPVTRRSGKSLIVRQRHAAHDRLRDAVYHWARIAAQRDPVSHDKYRSLRARGHGHARALRSVADRLLNVACAMLRDGTRFDAHRVKIVAT

SEQ ID NO: 421689 - protein, 355 aa, unidentified
MTSTKYIGMDVHTESISMAVRNSVGKVVMESVIETKASMILQFIEGLRGDLHVTFEEGTAAAWLYDLLKPHVARLVVCNPRRNALLKVGNKSDRIDARKLSELLRGNQLHPVYHGEHGLRALKELVRSYLTISKDLARVMTRVKALYRSWGIPCSGTQIYSRLHRVTWLSKISEPGVRLRAAFYFQQLDALRTLRQEVRQELLAESHKHRAWKRLCGIPSIGPIRAAVALGVLQTPHRFRTKRQLWSISGFAIETRSSADHRHVNGQLQKVKKRVSIRGLNQNHNHDLKNLFKGATVIASTKPGPFQEFYNALLAKGMRPEMARLTLARKIATMVWIVWKRGVSFDAQYLKPQTV

SEQ ID NO: 421690 - protein, 451 aa, unidentified
MATKRKKRVQDLPVLHPDAAGIDVGASEIFVAVPADRDAEPVRSFATFTRDLNSLADWLQACGIRSAAMESTSVYWIPLHQILEARGIEVCLVNAQHVKNVPGRKTDVSDCQWIQYLHSVGLLRASFRPPAVICAIRSLWRHRDSLIQMAAEHVMHMQKALDQMNLQVHRVLSDITGFSGLRILDAILAGERDPIKLAQLCHSRVKSSQDTVAKSLEGDYRIEHVFALRQSLAGYRYYQGLIADVDQEIQRQLADLKTAAGDSKPPKRTKKTPYQRYRYEPAGFDLRGELYRILGVDLTDVPGISSVTAHTILCELGTDVSRFRNASAFASWLGLCPERQISGGKVLYTKSRRVRNRVALALRLGANSLHHANNYLGEFFRRITRKLGKAQAITATAHKLARIVFHLLNTKEAYNESVFRQCEEEALKHAELRLRKHAARMGFQLVSAANG

SEQ ID NO: 421691 - protein, 504 aa, unidentified
MVVVGTDAHKYSHTFVATDEVGRQLGEKTVKATTAGHATAIMWAREQFGLELIWGIEDCRNMSARLERDLLAAGQQVVRVPTKLMAQTRKSARSRGKSDPIDALAVARAVLRETDLPLATHDETSRELKLLTDRRDVLVAQRTSAINRLRWLVHELDPERAPAARSLDAAKHQQALRTWLDTQPGLVAELARAELTDIIRLTGEINTLAQRISARVHQVAPALLEIPGCAELTAAKIVGEAAGVTRFKSEAAFACHAAVAPIPVWSGNTAGQMRLSRSGNRQLNAALHRIALTQIRMTDSRGQAYYQRLQDAGKTKRAALRCLKRRLARTVFQALRTVHQPSSEHTQPAAACHRSYCSSHLGEPPRLTDMTQKTRIQPLPPKRAGLLIRALYRIAKRRFGEVMSLWPNARRRSTGCAGSSMNSIPSGHRQHARSMPPSTSRPCGPGWTPSQDWSPNGGPLRLSVGVVCAARWVCRCDRRRVAVVCSGSPGVWLTLRLPSSWGWR

SEQ ID NO: 421692 - protein, 396 aa, unidentified
MTPLSNQQFTAYVGIDWADTKHDICLQAAGDIRREFDCIPHQVARIDEWAKSLQRRFGGPIAVALELAKGPIVAALQKYDFFTLFPINPSTLAKYREAFKPSRAKDDPTDAELALDLLLRHPERFAPLRPQSAAMRSLVSLVERRRDLVGDQNRLTNRLCDTLKQYYPQALEWFDDRGTVLFCDFLTRWPTFLAARRARSTTLEVFFHAHNCRHANLIEARLESIRAATPLTEDPGIVAPCRLYVLALVEQLRTVLTAIDRFDREIATVAGTLPDYTLFQGLPGAGPQLAPRLLAAFGEQRDRFHGTDELQKYSGIAPVTERSGKKSWVHWRWQCPKFLRRAKGSTHQAAVRALAFKWIRILYRCWQTSTPYDETTYLNALSKRGSPLIRNLGLAG

SEQ ID NO: 421693 - protein, 361 aa, unidentified
MKYYTSTTEYNCGIDLHARQMYVCVMDRQGKKLVHTNIKGNDFEFFLGRINAYRHSLTVCCECMFGWYWLADACQQAGLSFVLAHALYLKAIHGGKNKNDRIDSEKLAHLLRSNLIPPAYVYPAEKRPLRALLRQRICYVWRRTELLNRIQSHQLAHNRPSVRCTTRYNRDPWEKLILETETHPLRQLALQTDMAMVRHYDAQIRTLETKLVSLAKEQAPREFTLLLSVPGIGENLGLTLLHEIGDIQRFPTVKDFLSYCRLVKGTVASAGKIKGLRGARLGNPYLRWAFGEAAIIAKRDHAVIGPLAQRLEKQMGGNKFKANTVVAIKLARAVYFMLKNKTVFDPERLVASLSRDSQPNP

SEQ ID NO: 421694 - protein, 347 aa, unidentified
MQFYTKNHQHYCGIDLHTKMMYVCILNSLGEIVLHKNIPTNPTKFLKLIAPFREDLVIGVECMFSWYWLADECERQKLTFILGHALYMKAIHGGKAKSDKIDSEKIARLIRGGNFPLAYVFPAELRPYRDLLRRRNFLVRRRSEVLAHIKLTNHQYNLPTFEKSITKKGNRADVAERFSDPAVRKNVEVDLAVADHTHEMIKQLEGYIIRHVKQFDPRTYYRLQSVPGIGPVLALVIMYEVGDILRFPTVQSFCSYARLVKCSKESAGKLYGYSGGKMGNAHLKWAFSEAMCLLLRESDRAKAFVAKYEKKHGKGKAMSILTHKLGRAIYFMWKRKDAFDEKYFFKT

SEQ ID NO: 421695 - protein, 361 aa, unidentified
MTTIADARPLVTGGVDTHAEVHVAGVVDQAGRVLGTQEFPATAKGYQAALAWMRGRGELVRVGVEGTGSYGAGLARYLAAEGVEVTEVIRPNRQARRRRGKSDAADAVAAALAALNGEASGVPKSGDGAVESIRALQVARRGAVKARTQAGNQLRDLIVTAPEQLRGKLAGLATAQRVALAARFRPGDLACPAEATRAAMAAVARRHQALTAEITRLDTSLEALAEHAAPPGFLAKKGVGTQVASILLATAGDNPGRLRTDASFAALCGASPVDASSGKQIRHRLNRGGDRQANSALWRIVFTRMTCDPRTRAYVARRTAEGKTTTEIMRCLKRYVAREIYKALAVPAREHAAGIPLTRAA

SEQ ID NO: 421696 - protein, 575 aa, unidentified
MSTATPLDRIGVGIDTARYGHRVTFLKPDRLPAAKPLTVLENRASYRALQQRLQRLHEQHPQAHFHIRIDAAGQYAANLERFLRQLSLPMTVSIGEPKRNKDYRKAHFPKRTTDDTESQAMARFAVVEQPAATAGSAPAMVLLREVAGRLQAKVKQSTQAINRLHNILARVFPELATLTNNLAAAWVLNLLDKYPTVERIAQARSSSLEKIRYLSEDLATQVRRAAQQSVASVHGDVAAALVRDLVAQVRHTQQAEEGMRQLLKQAFADLPPSGHLQIETIPGIGPRTAAVLVAKIVDIDRFATPDKLVGYFGVFPELNTSGVDKQGQPLSAGTLHMSHKGNDLVRAYLWNAVRSAILHNPAVRALYHRLRAKGRRGDVAMGHCMRKLLHLVFAVWKTNRPFDPEHVPWEQHTDMVVSPKTTANTDDTNNKAVGHKRVKPALEVVTTADVTVVPATPSVKLPLRTAKPFKLDFAFLRQQVTMEQVLERLGILSNLRARGEQRRGPCPIHSQPTDRQRTFSAHLGKNLFQCFHADCAAQGNVLDLWAALHHLSLYEAALDLADTFHLRRNREEEPV

SEQ ID NO: 421697 - protein, 342 aa, unidentified
MQITTIGLDIAKNVFQVHGIDADEKVVVRKQLRRSQVMAFFAGLPPCLIGMEACATAHHWARELTKLGHEVRLMPAKDVKAYVKRSKNDAADAEAICEAVRRPTMRFVRIKSAEQQGQLMQHRTRDVLIRQRTQIINALRAHLAELGIVAAQGDKGVKDLLAIVADEEDTRLPIDARASVIVLAAQLEALESAIGAIEKRIKMQHRSSEASQRVETIPGIGVIGATAIVATVADPTIFRSGRDFAAWIGLVPRQDSTGGKQKLGPISKQGDRYLRRILVVGAIAVLRRALENPGKYPWLTQLLARRPFKVVAVALANKMARMAWALLAHGGTYRAPELAETA

SEQ ID NO: 421698 - protein, 371 aa, unidentified
MKSILYVGMDVHKENYTLCSYSFDEDKLQYKQTIAPDYKMVLKYLDQIRVRYASEIEFVCGYEAGCLGYTLYHQLTNHGVKCVILAPTTMAITNNNRVKTDKRDAGNIARCLAFRTYSEVHVPTAEDNSIKEFIRMRDDQKKALKVIKQQILALVLRHGYRFEDGKNYWTIKHVTWLKSLDLGGILQESLVEYLVTFEYLTDKIERLDTRIQELADGERYQEKVKKLSCLIGIKTHTALSTIVEIGDFTRFAEAEKLAGFLGLVPGEDSSGEKHRRGSITKAGNSHIRRLLVESAQSYTRGAIGHKSKDLKRRQHGNTPEVIAYADRANERLRRKFYRMTLKNNTHRNVAATAIARELSCFMWGLMTDNIA

SEQ ID NO: 421699 - protein, 387 aa, unidentified
MTVLTVNNLPAATHSETVRCLFAIELSGMSWVVAFNTPLSEKISRRTLIGCKWKKLLELIEEVRARVGRETGRAVEVISCYEAGYDGFWLHRQLSAHGIRNYVIDPASLQVDRRARRVKTDRIDTERLLRSLMAYLRGEPKVWSVVRVPSVAEEDARRLHRERDRLVSERVQHVNRIKGLCALQGIYHYNPLRPQAMARLEQLRTTQGDALPPRLKSEIKRELQRLELVVEMIAALEAERNAIVADESSTHPNAKKIQTLHKLKAIGPEFATVLVGEIFHRDFNNRRQLASYVGFAPSPFQSGNVAHDQGISKAGNRKGRTTGIELAWLWLRYQPDSDLSVWFRTRVGSTKGRIRRITIVALARKLLVALWRYLETGVVPQGAVLKG

SEQ ID NO: 421700 - protein, 400 aa, unidentified
MSGLKDGIDCFVGIDVSKDKFDACGITCEGAKLFQISTSMDRKGFEKLKRHLGTVSVSSVLIGMESTASYHVNLFSYLVAEGYKVILINPLLISNYVKMQLRKTKTDKKDAVVIAQFLLANGDTLIQRATPSLISDLRDLSRQRESLVDEMTSLKIEIKQLLNITFPELEHIVGIFTKSILKLLQQYPSAFALRDADIGQLSQALIADSYGHKREEFAKTLIKAARSSIGINSPAKEMIIKQKIGLLLHLEEALQEITDMLIEMARKLMEEDINIMTSIKGIGDKTAANFLVEMGGDINQFECSGKIIAMAGLDPAVYQSGQHEGRGRITKRGNRHLRRIIWMMTTSVIQYTDIFNAYYLKRRKEGLPYKMAVLATAHKLIRVIYAMLTQRTTFCPQLNS

SEQ ID NO: 421701 - protein, 335 aa, unidentified
MWYVGLDVHWKTSSLCILDENGRRVKRLTIRSHWLKVLAECGRIPRPFAICFEASCGYGYLHEELSKMAQRVVVAHPGQLRLIFRSKRKNDRIDAERLAKLLYLDEVPAAYVPSVKIRRWRETIEYRQRLVAKRVRCKNGLRALLRSRALVAPRGLWSAKGLAWLRAAEVGDPLATLRRDMLLEELAVLSRQLQRVTGILNGVAQNHPGVIVLRTIPGVGPRTAEALAAYIADPDRFGRARQAGAYFGLVPCQDASAGSSRLGHITREGPATARKLLVEAAWQVIRRCPRTKKRFERIAGGKRDRRKIALVAVAHHLLRCMVSMLKTGEVWREAA

SEQ ID NO: 421702 - protein, 294 aa, unidentified
MGNVITIGVDLAKSVFPVHGVDAAGAIVVRRQLRRPQVLPLFAKLAPCLVGMEACATALHWARAIEELGHRARLMPPRYVKAYVKSQKNDAADAEAICEAVSRPTMRFVEIKTSEQQSVLILHRTRQMFVRQRTTLINAIRAHLAAFGIVAQIGRNGVESLLRIISEPEDNRIPEVARSCLKALASQLHLVKRQILEADRRILAWHRSNETSRRLDSIPGIGPLVATALVASVPNPQAFKSGRDLAAWIGLVPKQNSSGGKERRGAHKEMLSSMPLPKSLLAKSLPTSMPGSFT

SEQ ID NO: 421703 - protein, 462 aa, unidentified
MALTLGIDVAVRAAHQATLVRDGTTVWRGCKFSTRPTDLERLWSALDLADPGDLTVVVEPTRNAWIVLAEWFRRRGTQVVMVPTTQSADLRKYYSKHTKNDRIDSELLAGLPLLHPEGLREYSGQGPADPLRRLVKQRSTMVKRRVAVYARLDALVELLGPAWYAVLGSNYGIAALEFLARYADPNVVIRLGQGRLSRFLSARSRGAWREDHAAGLIVAAKETLALWGSEGMNFAELAEDIAHEAEQALYLTRQIKQIDERVANLYADADPDGIVASAPGVGPVISAVIAGRIGDPHRFTSLAAIRAYTGLIPKISQSGLSKIESSITKAGDPLLREMLCTAADQARKVDPQIAAKYQRLMTGDRHHDSAICHLATMLVTRIATCMRAGQPYQLRDVDGTAITESEARAIVKQRYQLDPRQRDHVRHKLMRERRKRPARSHRSRQALQHPIPLNASLRRAPN

SEQ ID NO: 421704 - protein, 325 aa, unidentified
MDYLAFDVSKDKLDIVLTDLRSKEKYFQIKNEKEAINAWLGETKLSKRLVTGSESTAGYHLLLQKILVEKGYDFRLLNPILTKQFIRSTIRKKKTDKSDSLIIARLLGQGEGRKIGASDLDMSVKIEQRISGKLVSEKHRLRMMRKSLKLHFGLDDFIDKTLEELEDAVDEKIKAYDKALEEKHGDNTTIRHLMSITGIGFKLALIIYSEIGDIDRFQSPKQLVAFAGLDSKVRKSGSSVNSTGKLTKRGSPRLRYALFIAARSAARFDPDMKEYYGKKIMEGKKHTVAVVATSRKMLNRVFIVWKRQTPYIRREMESVKKRKLD

SEQ ID NO: 421705 - protein, 388 aa, unidentified
MEVRLVDTASTARDDARAYCLIAIELSKMSWVVGVQTPLSGKTSQYRLTGGDWEGLLKLIERVRRQVGRELSRPVEMISCYEAGYDGFWLHRLLTAAGVHNHVLDPASLLVNRRARRAKTDRIDVERMLRALNRHLRGEPDACSVVRVPSVEQEDARRLHRERHRLIQERVQHINRIKGLCATQGIYDYEPLRSDREAQLENLRTGDGRALPARLEAEITRELQRLELVLEMIVGIEAERDAIVKEAAPQHLHADRIKALVRLKSIGMEFATTLVGEVLYRSFDNRRQLGSYVGLTPSPYSSGSTDRDQGISKAGNPKARSTMIELSWMWLRHQPDSTLSIWFRERVGDLKGRPRRIAIVAFARKLLVALWRYLETGLVPAGAVFKTR

SEQ ID NO: 421706 - protein, 455 aa, unidentified
MQVTYTHCAGLDIHKKTVVACAIVPDPQGQPQTIIRTFSTMTADLLALGDWLHSLAVTAVAMESTGEFWKPVYNLLEGQFELLVVNAQHIKNVPGRKTDVKDAEWLADLLRHGLLHSSFIPPRSQRDLRDLTRQRTNLVQDRATVVNRLQKALEWANLKLSAVVSDVTGVSARAMLAAIVAGETAPAELAELARGRLRAKRDLLEQALTGRVREHHRFIIAEHLIQFDNLDEQIGRFDAQISAYLDQLSAPPPASGGASDAAPASSPPAADPASPAPAAEPPSPAPAALTWNAALVFADAVPGIGLRLAQDILAETGIDMRRFPSAGHFASWTKICPGHNESAGKRFSGATGHGNRWLRTKLVQAAWAAVKVRDSYFAACFHRLAGRRGVKRAIIAVAHRILIALYHVLAKQEAFRDLGATYYDARSQAQLIKRTERRFAQLGLKVTVEPLPPAA

SEQ ID NO: 421707 - protein, 338 aa, unidentified
MPLYGGIDLHANNSVVVLLNEQDQVIYQRRLANYLPTILEQLAPYHSDIRGVVVESTYNWYWLVDGLMEADYRVHLANPGAMQQYSGLKYTDDHSDARWLAHLLRLGVLPEGYIYPKAARAVRDVLRKRAHLVRQQTATVLSLQNIIVRNTGVRLSAKRIHALSLEEIERLLPEPEHSLAVTSSLAVLHCLEQQIKTVEKLVHTRLKHSPAYEQLQTVEGIGTILAQTIGLDTGDMRRFATVGPYASYGRCVQRTKISNGKRTGQGNVKNGNPYLAWAYMEAAQFAIRFSPTVQRFYQRKQAKSHLLVARKAVAHTLARACYDIRRDRRPFEVHKAFG

SEQ ID NO: 421708 - protein, 320 aa, unidentified
MSAYEFVGVDIAKDKFDSSLCINNRYKHAVFSNTNQGHNEFLKYLNQSTVSPWVCMEATGHYSEELADFLVRKGIRVSVINPFQIKSFARASLARNKNDRIDAKLIAQFSQRMEPRLYQPTPTEQKEMKELTKVLDMLKAQVTQLTNQLHSIRGATAQKSLKKMIQKLGQEIECIQKKIDELINNNQRLKEKLDLLMSIKGIGKLTAYYILARMPDIHSFQTAKQFAAYIGITPKQHQSGSFTGKTTISRLGDSRLRKALYMAALVAKRYNKALHCFVNRLQIKGKTPKTIICAVMRKLAHIIFGVLKNNKPFNENWACF

SEQ ID NO: 421709 - protein, 369 aa, unidentified
MKKHSKKANEKGRMSANQGQPEVTIGIDVGDRYSHFCWLDANGEIVKRGRVSSTQQALEKEFGKIPAGRIALETGTHCHWMSEVLSQLGHEVIVADARELKSISGSRRKNDPRDAEQLARLARVDVWLLHPVRMRKRKTQQDRSVLRARDLLVASRTQLICAIRGMVKADGSRLADCSAESFPEQVGQSIPEGMRRALAPLLETLDVLNEKIRYYDELVTHIAEEEYPETCLLKQVPGVGPVTALYFRLVIEEAQRFQHSRDVGSYLGLVPKQQDSGESTPELRISKAGDEGARRLLVNCAHYVLGPFGPDTDVRRWGLRLAARGGKNAKKRAIVAVARKLAVLLHRLLVTGEVYEPLRNSRAAERAAA

SEQ ID NO: 421710 - protein, 357 aa, unidentified
MTTSNIKYVGMDVHKESISLAVMNGAGKIVMESVIETKASMILQFFDGLRGDLQVTFEEGTSAAWLYDLLKPHVTKLVVCDPRRNASMREGNQNDKIDARRLAELLRLNHLNPVYHGEHGLRSLKELVRSYLTITKDVGRVMSRVKAIYRSWAIPCTGKQVYALRHRAEWLEKITEPGVRRRAEFYYQQLDALRTVRQEVRRDLLAEGKKHQAWKLLCQIPSIGPIRSAVLLGILQTPNRFRTKRQLWTYSGFGIETQSSADHRSVNGQLQRAKKQTSIRGLNRNCNHDLKSLFKGAAIVASSKPGPFQEFYTALLAKGIRPEMARLTLARKIATIVLIVWKRGACFDAQHLKPQAA

SEQ ID NO: 421711 - protein, 304 aa, unidentified
MVARHGTKGSTRIPNSASAIGKWLSTLPVGSRIGVEATNRYHELVVQAAQKAGHVVFVLNPRDIKHYAKGVACRGKTDSGDAQVIARYIAKEADNLHEHVARSPAQEQLHVLLQQRDSLVRSKAKLNLSLGAGASESAIFGRIFDGLKEAIALLDQQIQQLCRSGEQRDLYRRIMTIPGVGPTVAAFVTHHITRWPLTSSDAWIACTGLDPRPNESGARIGRRRLSKRGNASLRQILYMAAMGLTRSKNGKALYNAIRERGHSSTASFNILARKLARIAWGVFKSGRDFDPAMLKVGQACFQQA

SEQ ID NO: 421712 - protein, 344 aa, unidentified
MEHYAGLDVSLEQTSVCVVDAQGQVVREAKVASEPEALVHFLAREDLEIARVGLEAGPLSQWLHAGLIAAGYEAVLLETRHVKAALSAMTVKTDRRDARGIAQLLRLGWYRPVHAKSASAQEMRALLTARKLIQGKLLDIESGIRGVLRGFGLKVGAISRGRFETRIRDLVEGQTMLATVVGSMLAARAALQAEFARLHRALLVLVRADPVCRQLMSVPGVGAVVAITFKSGVDDPTCFRRSRDVGPHFGLTPRKYQSGELDVTGSISKVGDRMVRTALYEAASVMLTRTVRMSPLKSWAMGVARRRGAKKARVALARKLAVILHRMWVDGTDFRWTRETPAMA

SEQ ID NO: 421713 - protein, 428 aa, unidentified
MEQKNCNRLAEFRQLRKDIRGSDEHLIVGIDVAKERHNAFFGTATGETLYRRLIFDNDKDGFERLLLQAEAMKVQHSLKKVVFGLEPTANYHKPLGEYLIKNGHAVVLVATDAVKKNRSLLDGRWDKNDKKDPANVADLISQGKCLFYEHPSQEVRDLRNLLSFQRKLKKVEHSTRMRIRNHLIAQYFPELDTCCNWGANEGLAIVKSCLDPAVVSSLQHDEFLRKIQTRGVTLAQQRRLSTVWQRAFKSMGCECGLSVKYEARMMVKILEQVRMSIADTQQQIKTVCEKFPEYEYLLSIPGFGPDISAKALGAIGDPFRFDNASQVLKLVGLDLSASRSGKNSNNITPSISKKGKSELRYALYQAALIASSRDKHFIAYFTNKLRGREKEKGIKTKMRVKLSAKMMIIAWTLMKKKEFFDPKYLNIE

SEQ ID NO: 421714 - protein, 387 aa, unidentified
MGKTISLASPADAVDYDATLIMAVETSNKSWVVAAHVPGLGHIKAKQTIGPTAEALATSVEGYRRRAAASGRVIDRVIVVYEAGYGGFWLARWLTARGVDVHVIQPSSVPVERRKRRAKSDKIDADLLLRTLLAWLRGEPRVCTMVAIPEEAEEDARRPSREREELIRERIMLTNRIGAILATLGIDDYNSLRRDRRVRLEALRTALDHPLPEHARAKIVRIIERLELVLSQIAALESQRDAVLEDEAPEEAKRMIKALVLLRSIGAQSATVLVYEAFIRRFANGKALGCYAGLTGTPFNSGGSEREQGISKAGNRRLRAAMGELAWLWLRYQPESALAKWFRERLAGANGRLKKVLLVALARKLLIALWRYATDGVIPEGAVLKPA

SEQ ID NO: 421715 - protein, 303 aa, unidentified
MAIVAGFDVHRTQITFDALDRETGELTRGRIDSTPEAVRAFVGRFPQAEIEVALEACTGWLFVCEALVAAGAVPRLADPAETSARRGGKRRAKTDRADARHLRELLAEGRLPEAWIPPRHVHEWRTRTRLRKTLVEERGQWLQRIQATLFHHGVPASAVPARLLTSRGRAWLEQVALPGAARERVRVALALVDAIDAQLAPLEQDLRRIARRQTGCRALQRHFGIGHTTALTLLCELGDVARLSASRKAVRAVGLDVGVHRSDRRSRVGKLTKQGSPHARGRCTKRPSPPAGARAPTTRHTWP

SEQ ID NO: 421716 - protein, 424 aa, unidentified
MKHHGWPSREGILTESYRFFVGIDWAWERHTICVLGSDAEVIDRRTIEHSGAGLTQLADVLEKLSSGDPFCVAIAIEMPRGAIVESLVERGFAVYSLNPKQMDRFRDRHTVPGAKDDSRDAFVMADALRTDLHLFHRVRLDHPDILRIRELSRSEEDVQQDQVRAENQLRSLLNRYYPQMLQLCPAVDQAWFWDLLEMASLPAQGAKLSKSRIEKLLRSYRIRRLDANEIHQTLSVPALQLAPGAAEAASEHVLLILPVLRLLDRQREEIARRMQLLLEKMSEDEQVVEHRDVKILLSLPGVGRVISATMLAEASQPLAERDYHAIRSYAGAAPITRRSGKRKMVVMRRGCNPRLRNALYHWSRVSSQNDPRSKEHYAALRAKGHSHGRALRGVADRLLAVLIAMLRSGTLYDPNHQTAAMPLK

SEQ ID NO: 421717 - protein, 346 aa, unidentified
MDHYAGIDVSLECSSVCVVDAKGEIVREAKVASEPEALIAWFHSLGSDLARIGLEAGPLSQWLYAAMKKAGLAVELLETRHVSDAFKAMPVKSDRNDARNIAQLMRLGWFRPVHCKSMSAQEIRAILTARKLIQTKLQDIENSVRGILRGFGLKVGKTTKRSFAARINELVAGHPALKTIAAATLAVHTVLLREFNGFEKQVRAMSLLDAKAKLLMSTPAVGPIISLTYASAIDDPARFTSSKRAGPLFGLTPKKYQSGETDYSGRISKNGDASVREALYEAAHIILTKPIKGCAQLKSWAMRIAKRAGMNKAKVALARKLAVIMLRMLKDNVPFNSTAKATAAAV

SEQ ID NO: 421718 - protein, 403 aa, unidentified
MDFYVGIDVSKFKHTVAIIDEEGEIRKKSFDISNSREGFSSLLNELGLLGEKEQIKIGMEATGHYMNCLVRCLISNGYQFQIYNPSLISKFRDAESVNLAKTDNLDAMLIAKYVATHPFTSSPQLSYLIGEIRKISRAKYFLFGDKTACYNHLLRYLDEVFPEFVSFFKKNEDGTRKNMGRNLFESPTIRWLLSEYTSPQKMARMRIETGETLRRMSKGSISFNRFNQLRELAKNSIGYSTEVDEQIIRNLVTQVRIIDEEIEMLNELLEPFMEEINSPLLTIPGIGINLAAMIIGEIGDISRFENPEKLIKFAGLDVKVYQSGTINHKGHIRKRGSPILRYALALSVQKLRIHSPVFSEYYYSKLRQGKATNVAIIATTRKLIRVIWKMMTTNQVFENIKRD

SEQ ID NO: 421719 - protein, 409 aa, unidentified
MDIMYERCCGLDVHKQTVVACVLLPGSGRQPAKEIRTFGTMTADLLELGDWLTANGVTHVALESTGVYWHPVWNLLEGQVELLLVNAQHIKQVPGRKTDVRDCEWIANLLRHGLLRASFVPERPQRELRALTRYRTSLIRERAAEINRIQKTLEGANIKLGDVASDILGVSARRMLEALIDGATDPAVLADLAVDKLRKKLPQLERALKGEFGAHHRFLLAQQLAHLDGLDELIDHLGSEIAERVRPVEQVVERVDAIPGFGRRTAEIVVAEIGTDLSRFPSFKHLASWVGLCPGNNESAGKRMSGKTRKGDVWLRSALIEAAHAASRSKDTYLAAYYHRVAARRGKKKAIVALAHTLLTIVYYLLTRDCDYQDLGPEHLDERDREQTERRLIRRLQGFGYTVTRETAA

SEQ ID NO: 421720 - protein, 351 aa, unidentified
MRTSQKITGIVTTIGIDIGKNTFHLVGFDQRGAIILQQKLSRGQLERRVANIPRCLIGMEACSGSHHIGRQLAAIGHDVRLIPAQYVKPFLKGHKNDYRDAEAIAEAVQRPTMHFVTIKTPEQMDLLALHRVRSRLVGRRTGVINQIRGFLIERGITVRQGPMPLRKALSEILSSDTGALSPRMVGLIADLAQDWRRLDERIAAVSAEIEALAEQDDSCQRLMTVPGVGPIISSAVVAAIGNGTGFKQGRDFGAWLGLVPKQESTGDRTILGKISKRGNKYLRTLFVQAAHVVLERRPSAAMRGLWPWVERASKRLHRNTLAIALANKLARIAWAVLARGGTYQPRITHAA

SEQ ID NO: 421721 - protein, 407 aa, unidentified
MDLPAIYQTVVGLDVHQAKISACAMIELPDGTLAIEHREFGAFKRDRRSLAEWVHSLNPAVVVMESTGIYWKSPYAALEAVGINAWVVNARHVKNVPGRKTDVADAQWLATLARAGLLRASFIPPAEIRHLRLIARHRQKLGGMLASEKNRLHKVLADAGIRLNVLVSDIHGQTGRAMVKALIEGQRMPEILGLAGRLRASREELFEALQPEDLSEQHRFVLSEIMAHIEELEARMIRFEQQLLTGLAACEPQLVLLQTIPGIDRVGAAMLLVEIGVDMSAFGSAEKLASWVGICPGNNESAGKRKSGKTRKGNAWIRRLLCEFAQAASRSRCGLKDKFKTMSLRKGHKKAIVALAHKMLRIIFAMLKNNTPYRDQAVDYEALQVQRNAPRWIKMLVKHGFIPKVST

SEQ ID NO: 421722 - protein, 342 aa, unidentified
MSEVTIIGVDLAKRVFQLHGARSDGSIGFRKKLSRDRLLAFLDSLPPCVVAMEACATAHYWGRKIEALGHEVRLIPPVYVKPFVKRQKNDAADAEAIAEAASRSTMRFVAVKTEAQQARAMLFRTRDLLVRQRTQLINALRGHLAEHGVVTAQGKAHLKRLADPVADENSPLPASVRGLGRVFLEQIAELDRRIAELDMKLRAAAREAETTRRLQTMPGIGPITAVAIEAFAPPVTSFYRGRDFAAWLGLVPRQHSTGGRQRLGRTSKMGQRDIRRLLIIGAMAVVRHAARTPPPTGSWLSRMLAKKPRMLVAIALANKMARGVWAMLTKQEDYRDPAAATS

SEQ ID NO: 421723 - protein, 400 aa, unidentified
MNIIGIDVSQGESHATLITEEAEKVAFKFKHNKSGFQILNSYISSNTIIIFETTGVYSAQLTAYLKSKKVKFYELNPLEAKLRMASLRRNKTDKNDSFKLALLGKTQLAEIKNHCNKQSNSLYESLRILSLRYKQLIKCRTRILNFLRSSLELTFPELNQIFKNAYAVLALQVFRMYCHPDFLVGLTLKEMTTRVYQSVSRRIHKDVIQSYCAQVWLAAKDSYPAVPANSLEIEIISEYCDEIESYNKEITYIQNKLIKTAVGLDDFKVISSIPGAGQLNSALLLGFTGDIARFDNYKQLNAFLGLDLNRYQSGKYIKGDTINRRGSSQGRAVETDMIRSMLRNQGKIQNHLVDYYYKLKKPPFNKHDKVALIACANHLNRTIINLVHTHQLYNYSKAIH

SEQ ID NO: 421724 - protein, 323 aa, unidentified
MTRIICGVDISSTSLEARIGRDGAAGSFPNRAEGIASLAAFCQAHQVELVAMEATGGYEQRALALLWEQGLPVAILNPRAVRRFADSMGQMEKTDALDAGMIAWFAETKRSQPVRLSTARQLQLRALVTRLRQLTEVRTAQLNQARLVTDPAVLVLIQQLLALVAGQIRQLETAIAQLVAADPLWHQLDQAFRSIKGVADRTVARLMAEMPEIGTLSNKTISKLAGVAPLAKDSGKHQGKRAVRGGRAPVREILFIVASVVGRHEPDFIAFQQRLAAAGKPRKVIRIALAHKLLVRLNAKARQVRQRLATPQPHATALLAESV

SEQ ID NO: 421725 - protein, 338 aa, unidentified
MEHKEVKNYIGIDIAKKTFDLTVIKDSNKDKLIYNQFSNDAMGIRLMKQMLKSNGVNLSESVFCMEHTGIYCRVLVDFLTKNDCITWLEMPMVIKRSMGLQRGKNDKIDSKNIALYAYKNRDDIKQWKAPREEVLKLKDLMTLRDRLIRNKKSLKTPIQELRSMGDTSGAKLLYDSCKAALEGIEKSLKRIEHQIDEIVKGDTKLLKLYKLIVSVPGVGKVTAINLICYTNEFSLYKNAKQLACYCGVAPFEHTSGTSIRGKTRVSHMANKTLKTNLNLGAWSIIRGNNEIAEYYKRKIAEGKKEISVINAIRNKIIHRVTAVIKRETPYVKIDTQVA

SEQ ID NO: 421726 - protein, 359 aa, unidentified
MKQTRKSTGKISKTTLTTGIDLGDKFSHYCILNQDGEVIEEGRVRTTPEGFAQHFDGVSRMRIAIETGTHSAWVDHMLRGFGHELLVADARHIASISASDNKADPHDAEQLARLARLDPKLLHPIKHRSLTAQADLTVIRARAKLVEVRTTLINTVRSTVKGFGERLPRCIADSFHRRCHDAIPTHLHETLAPIFGLIEDITKQISVYDHSIEQLSKGKYPETDSLRTIPGVGPIASLTFVLTLGDKHRFERSRDVGSYLGLRPRRSQSGDRDPQLRITKAGDTYLRKTLVQCAQYILGPFAPDSALRKWGLSLAGRGGKSAKRRAIIAVARKLSILLHRIWVTQQPYRPFPDIVGRAA

SEQ ID NO: 421727 - protein, 351 aa, unidentified
MIIGVDPHKSSHTATAVSPTTNTSASSIRIDATLAGYRQLLRWAKAFPERQWAIENAHGLGRHLAQWLIAHDETVADVRTTATARVRELSRGGRRKNDVLDSSAAASVAAAHGDVSLVAAEDETTVFALLEERRANLAANRVRLVNQLHALLRDLIPEGAGPALTAKAAAALLRGIRPVSPAERTRKQLARELIQDIRLADTRLDRMVARMAEALHARGTRLLEVQGVGPVLAVRLLGRTGRASRFPSAAAYASYTGVAPIEVASGDRARHRLSRSGDRQLNSALHLVAVTQVRMPTSVGRSYYDRKVAEGKSHNEAMRCLKRRIADHVWRLMLQDERLHEGMTGSPAIAT

SEQ ID NO: 421728 - protein, 362 aa, unidentified
MFRPHTLYIRIRIVRKVSEPAFAMKDQDVTDVIRRKQQTAMRYIGIDVSKATFVVAYSSDKGGEIRTFNNTTTGIKQFIGALPKDSSIHCVMEATGNYSAMLLYLLNVAGIAVSMENPLKIKNFARAMLSTVKTDKIDARLIALYGEKMNPQPFKIQGEAILRLRQKRTVIRQLTKQITAMSNLRGSLACMPVPDKGATHTVDETIEFLEKRRDRLQSELTDLVEVEFSRQLALLTTIKGIGITLATALIITTGGFTYFQNAKQVSRYLGICPTYEQSGTSVNIRGHINRNGDAYTRGLLYVAAWTASRFNTKCGETYTRLRQNGKPGKLAMIAVANKLVRQAFAVVTHDKEYVDGFVSNRP

SEQ ID NO: 421729 - protein, 349 aa, unidentified
MRLSPSPNSYLNELRIVQGRDMTNAATRESAPLDFVGVDIAQEALEWALHGVRDTHSASNNETGFQALLEALKDRRIGLIVIEATGGLERALAGFLLRHGLPVAVVNPRAAREFARSMGHLAKTDAIDAVALAHLAQTLAAKADQAGVAFVAPSVEVEALQAMVARRVQLLNMRTAEKNRLGGAMRVLHKSIEAVIKTLDKEIAKLERDIDAHLERHFKAQAQCFEAIKSLGPITCATLLAFMPELGTISNARAAKLAGVAPLNRDSGKERGKRHIWGGRRVVRCALHMAVLSAVRFNPVIKAFYERLIAAGKPKKVALTACSHKLLRILNAMARTGQPWNEKFHAVTP

SEQ ID NO: 421730 - protein, 428 aa, unidentified
MRFIGLDVHRDFCEVAIAEGGVVRVAGRVQTEPAALELFAQSLAVDDQVALEATGNALEIARIIQPHVARVVVANPKAVKGITRAGAKTDKIDARTLAKLLAGGFLPAVWLPDEQTRVLRRRISARAQLVRQRTRAKNQVHATLIRNLKGRPPVSDLFGVRGRRWLAEQTLPADERETVAACLRQIAFLDGEIALIERALAEQVLASTEMRRLLTLPGVNFVTAAALMAAIGEVGRFPTARQLVSYLGLDPRVNQSGSEPARHGRISKQGPGETRHVLVEAAWHAARAPGPLRGFHERVAARRGRNIATVAVARKLAVIAWHMLTRSEDYAFARPSLTREKIRRLELMTGTRNSPRRPNSPTADSSRTGSRRSRTRVPHRGAHPIGRQAAKQRGRRQPHPLRFSSRSPAPRPTLTKEPPTVQRLDFHP

SEQ ID NO: 421731 - protein, 352 aa, unidentified
MNQDTVTADLQTIGLDLGDTRSTLCVVDPQGRIVEEKSVSTTREALTLRFRRPRARVVMEACGQSNWISALIEELGHEVYVVNPRQLHLITRSVKKTDRNDARLLARLGRADIGLLQPTHRRGLDCQAARTVLNARRALVQTRTRLVNTIRSAAKSYGFKLRGCSSKTFAKLANTNLPQQVRTLVQPLLDAILNLDQYIERYNAEVERLGREHFPQTNVLRQIHGVGPQVALAFVTTIEEPKRFARSRDVGPYLGLTPRRDQSGDSDPHLKISKHGDGSTRSLLVGAATAIMRDTAPDTDLKRFGERIAGGTSRRDRGRARIAVARKLSVVMHRLLLTSEVYQPLRHAQTEG

SEQ ID NO: 421732 - protein, 428 aa, unidentified
MFHVTARRKREGKVMMSRQVRRNPRSVRRGPGPSSTLLTPDRAGNVVGVDPHKRKLSATVADPRGGIVASEHFRVSGEGHRALEAWARQFGPIVRWGIEGASAWGRHTAIFLALRGYDVRDVCPNRTGRQDRARQRGKSDVLDAERIARETLAHPLLPRAFKRAGDDAGPDEQAELLAVWWQARCSLVKRRQQLLSESEALLRDLPLEVIEQLPEAKAVRPRLGALEGATRQRALDPPTALRVRLLDEYRDHIAKLDSQEKTITRELRALVQASGSTLDQLCGLSTISVAELLVEVGDPRRFTEGGFARFNASAPLVASTGEGPGEPMRHRYNPGGNRRVNAILHRMAVTQLRCDPRAKRIYATARADGQHTKKEARRILKRHLSDVVHRRMMRDLASHPRPGLLAAQPRADGARSRVARQGRARRAA

SEQ ID NO: 421733 - protein, 457 aa, unidentified
MPLSINNSNNYYHGKESKKVKTAKGAELRIVNPDAAGIDIADGIMQVCVPADRSKDNNRAFGAYTSDLHAISAWLRECGIKTVAMESTGVYWIPLFCRLQEDGMDVVLTNARDVKNITERKTDESDAEWLMLLHQYGLLKASFQPHNDAKRMRTLTRHRDTLSREASSIVLRMQKAMQQMNIKLTLVLSDITGKSGIRIIEAILAGERDPKKLADLADIQCKTPKEEIAKALEGNWEEDLLFVLRQNYDTFKHFCAQLDRCDTELEKLMENYRTEVAGTGRPSYSPTKKRRDYHKRKRNVGFDVERKAYDMWGVNVFEIPGISHLTALGLMSELGHDFTRKFPSSKQFCCWCNIAPNTKISGGKRISSHVPHRRNNVGLIFRSIASSLANAKNQLGNFYRRIRSRAGGKAAVIATAHKVAEIFFAMVANQTTYNPEKVGIDEKVLLEKRIARYKREL

SEQ ID NO: 421734 - protein, 393 aa, unidentified
MVVSVGIDVSKNKHDCFIISSEGEVLADVFTIPNNMDGFHALLEKIRACTTPQDKIKVGLEATGHYSYNILGFLLDNGLATYVLNPLRTNLYRKSLSLRKTKTDRVDARTIAAMLLSDVGLKPYTNTAYHNEELKSLTRYRFDKVKERAKLKSSISRLVCILFPELEKLVSSLHLATVYALLEEFPGSKQIAKAHLTRLKTLLGNASKGRYGRDMAVTIRSAAQNSVGSCMPAKSLELQHTIRLIRELDAEIAEIEAEIETMMDKIQSPITTIPGMGFRMAAMILAEIGDFSRFESPDKLLAYAGMSPSTYQSGQLKNCYPHMEKRGSRYLRYALYNAAKYVCHWDPTFAAYLAKKRDEGKHYNVALSHATKKLVRLLFALERSRQPYCSLAA

SEQ ID NO: 421735 - protein, 437 aa, unidentified
MPNVAYLGLDISQADVSVCFLLTDGREPVPRWTVANTQPGADRLSATVAQLCQTHQVDELRIGVEATGLLWWHLVCVLNAAPPLLPFRPHVYVLNPHLVETFRRNYGALPKTDRADAFLIAERIRFGRQLPPPFQVDVRYAPLQRLTRFRFHLAHNLAREKSYFLSFLFLTFSSFGQVEPFGDPFGATSSAVLSELTTEELAQQSLEDLAAYLQTHGHGRFADPAALAETLQQAARDAYRLDKVLAEPLRIVLSTTLANIRSLTAQLKTLNQTIAAELQPIPQTLDSVPGLGPVWTAGLIAELGDVSRFADDDAIAQFAGLTWPAHESGQFQAEDTHLSQRGNSYLRYYLVEGANSVRRHCPEYAEYYTAKYAETLKHPHQRALVLTARKLVRLIDALLRSQALYQPPDQRPTPPSAGPHARRPGRQRRQPQANPVT

SEQ ID NO: 421736 - protein, 384 aa, unidentified
MRSVCGLDVHKDSVYLCILSEDGELIEKVFGVLTFQLHQMRDLLLAHHVEKVSMESTSVYWIPIWRILAPNFHLQLVNPYFIKQLPGHKSDVADAQWIAECTMKNLISSSFVPPEDIQQLRQYDRRIFDLDEEIVRKLSKLDAVMQRCNIRLSNYVSNVDCKSYKDVVRKISEGVTDPEILIEEIHGRIIKHHGRETILASLTGVVSQAEVDVLRQLREELDLAEEHKQECLERMLEICQEKYPDELRRLQTIPGVKERTATSLIAEIGTDMSKLETANHLTAWSGLRPRNDESNRKFKSRRITHGNVYLRKNIIQCAWGASRTKNCFFSRFSYHQTQVRKKNKMKVIVAVARKLLVAAWHVIHDKTDYVDFQKQDRQSPASNG

SEQ ID NO: 421737 - protein, 377 aa, unidentified
MSKIRFVGLDVHAETIAVAVAESGGEVRAHGVIPNRLESIRKLIGKLGPVGQIKACYEAGPTGYVLYWQLTQLGVVCEVIAPSLVPTKAGDRVKTDRRDAEKLARCYRAGELTPVWVPDAAHEALRDLVRAREAAKKDQLKARHRLGKFLLRHGRRPEGLKAWTKKYLEWIKTHVHFDQPALEVTLADYLEEVDHVAARIVKLEKAIDEAVRLAPPEIRAVIEALQALRGVAQTTAATIVSELGSVSRFQSPRQLMGYSGLVAREHSSGNRVRRGGITKTGNSHLRRVLVEAAWAYQHRPNVTGFLLRRQKNLALSDEVKKIAWKAQQRLHKRYQAFAARDKNKNQIVTALGRELLGFIWAIAVHTEKQQKQLNKIA

SEQ ID NO: 421738 - protein, 379 aa, unidentified
MRNVRFVGLDVHAQTIAVAVAEAGGEVRSLGVVPNSAESVGRLLKKLGKPEQLRVCYEAGPTGYVLYWQLTKLGVRCEVVAPTLIPVKPGDRVKTDRRDAEKLARCYRAGDLTAVWVPDAAHEALRDLVRAREAAKSDQLRARNRLGKFLLRQGRRAPEGTRVWTGKYLKWIKEQVRFQQPAQEATLLDYLHEVEHAGERIQRLENSIDVAIETVPPKMRAVIAGLQSLRGIAKISAVSIVAELGEISRFTQPRQLMGYSGAVSREHSSGERVQRGSISKAGNAHLRRIVVEAAWSYRHRPSIGAALATRQKDSSEEVKEIAWKAQHRLHTRYSKLCAKGKTKQKVVTAVGRELLGFIWAIGVHVEQSVSASHKRRRAA

SEQ ID NO: 421739 - protein, 329 aa, unidentified
MQKEVLYCAIDVCKDKLDVEGAALALPEQLGNDQCGYRQLIKAAKKYPGPVQFVFESSGPYHLGLALALWEAQMPLSILNPARVRFYAKAQGKAKTDPLDKQVIGAFAQAMRPGPTPAPDELSRQLTELLQRRDELIASRGAEQSRLGQSRHRLIKQQMGRLIGQLTEQIKQIDGLMHQLVGSCAELKSKVEQLCQIKGVGQLTALILLITVPELGTLGRNRMSRLVGLAPLNDDSGTQKNKRFIQGGRRRPRNALYMAALSASQHNAVLRPFYQRLLKAGKAKKVALTAVMRKLLICLNALLCRWAQQKAALAAFCPAKATVTQPLNA

SEQ ID NO: 421740 - protein, 356 aa, unidentified
MTSIAPDTPLRKVIVGVDTHKHVHVAVAIDSLGARLGDLAISADTGGYGQLDVWARALGRVQSFGVEGTGSYGAGLASFLRRFGHRVIEVNRGDRRTRRQNGKSDTVDAEMAARAVLATSIPKTGDGLSEMIRQTKVTRDTARKGRTSAIITLKQIIVNAPAELRESLDGLTDKALIDRCAGYRPGDIDTTIASAKHTLRALARRWQHLDTEIRGQDAVLDPLTAQASPTLRDGFGIGPDTAAEILIVLGDNPDRIRSEAAFAKLCGVCPMPASSGLTNRHRLYRGGHRQANAALYRTVIVRMRFHQPTIDYVARRTTDGLTKKDIIRCLKRFLAREAYHRVMTDHRARTGAAAAS

SEQ ID NO: 421741 - protein, 360 aa, unidentified
METKVNQKLFEGQSIYVGIDCHKKNWTVTFLGEEYEHKTISQDPDPAILASYLKKNFPGANYLAVYEAGFNGFESCRKLRQSGVNCYVIHAADVPTSHKEKIQKIDPVDSRKLARSLRSKEFKPIHVPEQWIEADRLLIRQRFRIVKDLTRTKNRITAILFQFNIKLPHNFTSNNTRHWSKAYLKWLKELPLNHESLKLAIDNYVHIGETQRNELLHINKQIRALSQKTAYVNNYNLLISMPGVGIITAMMFLVQIGDIRRFACLDDLCNYIGLVPSMHGSGDKNKTGKMVNRGRKELKILLIEAAWEAVRLDPAMMATFNRLSLRMHKNKAIIRIARKMVSRMRTILLNQTAYQVGIND

SEQ ID NO: 421742 - protein, 337 aa, unidentified
MKFCGIDLHGNNHWVVILDERDRVLYSKRHANDLSRLLPVLEVHQSELCGIVVESTFNWYWLVDGLQEAGYRVLLANTAAIKQYEGLKHRGDESDARQLAHLLRLGLLREGYIMPKAMRAVRDLARKRMQLVQQRTTQILTIESMLSRHSGWKLSSNRIKSLRPADLEELQLDEVPMMGLKANVAVMKTLQTQIDALEKVLADYCRAEPGYRLLRTVTGIGEVLATVILLETGSIERFADAGNYASYCRCVGSVHLSNGKKKGQGNTKNGNKYLAWAFVEAANFAVRSCEAARRFYQRKKAARNSIVAIKAVAHKLARACYHMLKSGEPFSIERCFA

SEQ ID NO: 421743 - protein, 341 aa, unidentified
MDTHGQTHHVAVIDQVGRHVADAEFPTTPAGYRALLAWLGAQGQLDRVGVEGTGAYGAALSRYLSGQGVVIVEVDRPDRKTRRAQGKSDPIDAYAAARAALSGAATGIPKTRDGRVEAIRALRLVRGSAVKGRTQAINQLKSLLVTGPADLREQLRPLGSAALVETCAQLCPDGDLTDPAIAVKTALRRLATRIHALNAEIAEADRELAPLVTAAASRLVALLGVGPEVAGQLLVTAGDNPDRLHSEAAFAHLCGVAPLPASSGRIDRHRLNRGGDRAANCRIVLCRLRYDLATQTYTERRTKQGLSKPEIIRCLKRYVLREVYRTLVSAATPKEDLAPAA

SEQ ID NO: 421744 - protein, 489 aa, unidentified
MAKTALEAINIPSCGLDVHKDMIEACVIDETGEKHHKTFDAMRKSLYALRDWILSLNCLHVLMESTSVYWIPIYEILEDVTGMDVGVGNAQRMKQVPGRPKTDKGDSDWISRLCMMGLVLKSFVTNRKTRELREYTRYHKKLVQERSRQVNRIEKLLQMNGFKLSSVLSDITGSSGMKLLRILRDKGNVTFSEVRAELHKRVKSTASEIENAINGQMKTTSRLLLGKMLSRLETCDNEIADIYRAMAEIAQDNRSYIEQLKSIPGIGEQSAIYILAELSADMSSFNTAGHIAAWAGLAPKDNQSAGRLRYSKTQKANIYIKSVMIECAWAAVRTRNTRLSNWYWSNKGRIGTKKAITAVARKLLVYVYSMLKSGEMYNDSLDMADTEKRKAYKLESACKIVERRLNTVNPQNHQTNVEHEIQISSLLRADTEVKTPVNEGEQPVSTPLKKRGRPSKTTGIDVTAQDPIKKRGRPRKTASIDDLEVSQTA

SEQ ID NO: 421745 - protein, 411 aa, unidentified
MSYETKELRVETSSIDVFIGIDVGKSDHWATALTGEGKKLFDKALPNDEAKLRDLYDRLSQQGRVLVVVDQPATIGALAVAVAQDMGLTVGYLPGLSMRRIADLTPGNAKTDARDAAVIAEAARSMPHTLRALNASDEDAAALSMLTGFDLDLARQVNQVSNRIRGLYTQVHPALEKVLGPWLEHDSVVEVIATWPTPAALKHAGRARVDAKLKAHGTRRHTAWAEAIINALGAQSVVVAGTDAAGVVLPHLARQLIALHAQRRDVAAQVEALVETHPLHQVLTSMPGIGVRTAAVFIAETLGHTFASGAHLASYAGLTPLTRRSGSSIRGEYTSHAGNKRLKRAMFLSAFASLRSDPTSRAYYDRKITQGKRHNQAVIALAHRRILTPHAMIRDGTLYNPQPTHQLPAAA

SEQ ID NO: 421746 - protein, 345 aa, unidentified
MLNCNVIAIDLAKNLFQVCKTDKNGKVIFNKLFTRAKLKELLTKEKKSLVAMESCGGTHYWARMAKNAGHQVKSIHARKVKAFRQGQKTDANDALAISVAARQPHIKESRLLSTQEQCLQSIESMRDLLVKQKVSLGNQLRGLLLELGHAIAQSDAKLRQAIPEILEDAENELTHSFRFSIDIIYQRFIDTIDEVKLIEDKLAEVIKQDKTCQRFQALEGVGPVCAILMKVALGNATHFKNGREAAACFGLTPVQHSSGGKEKIGSISKVVGNKKLRSALYKGALAVVSQLEKREVRSQKEVWLKGLTARRGKKVAAIALANKTVRTAFALLKHDQVYQPQLLVA

SEQ ID NO: 421747 - protein, 408 aa, unidentified
MNAVGIDVSKGKSMVAALRPMGEVALLPQEFLHTEVGLEQMAYAILALGEDTRVVMEATGRYHEPVAAALHEYGIYVCVLNPLFIKQSGGGSIRKVKTDKADAMKIAKYGLDNWVDLREYTPMDTVRQQLKLCSRQYNLYMKTVVSLQNNLISLTDKTFPGVNELFSSPERADGHQKWVDFVMTFWHCDCICRVSEKAFTERYQKWCKRKGYHYSAEKALDIYAGSCGHFTTLPKNDNTKLLITTAAQQLLAGKMTLAALRAEMARLARQLPEYDTVHAMYGVGEITAAQLMAEIGDVRRFPRRSSIVGFAGVDPAVNQSGKHAAQSTPTTKRGSPHLRKTLYQIVCTYLRKAPEDEPVYQFLDKKRAEGKPYFVYMTAAQNKFLRIYYARVKECLEDFDAQQNSAQS

SEQ ID NO: 421748 - protein, 338 aa, unidentified
MKLYGAIDLHSNNNMTVVTDEQDRVVYEKRLANDLELIVQQLAGYRDGLQGIVVESTYNWYWLVDGLMEEGHKVHLANTSAIQQYEGLKYTDDEYDARWLAHLLRLGVLPQGHIYPRQHRPVRDLLRKRGQMVRQRTMNLLSIQNLFSRNTGSSMSANGVKRLNSQQVESLFPETDLALAIQANLAMLGCADEQIERLEKTVIERVKLKPEFKLLKTVPGIGDILALTIMLETGDITRFPSVGDYASYCRCVGSKKISNGKKKGSGNTKNGNKYLGWAYVEAANFAIRFNAKIKSFHQRKKSKTKNVVALKAVAHKLCRACYYIIRDQVAFDISKAFA

SEQ ID NO: 421749 - protein, 465 aa, unidentified
MRRRIPQRMMEQPLAQRNRSLSPKTGKSRQTLTITHPNAAGIDIGSASHFVAVPPDRDDDPVREFASFTADLHALADWLSTCGVDIVAMESTGVYWIPLFELLESRGFTVLLVNARHVKNVSGRKSDVLDCQWLQQLMTYGLLSGAFRPAEQVCVLRALYRQRGTLLRSQARHVQHMQKALTQMNIQLTNVLADVVGETGQRILRAVVAGERDGQVLAAMRNVRVRASADEIAKSLQGNWRAEHLFALKQALDAFDFVGTQLGECDREIELQLHRLQIQDGDPAKGKKRGRARNAPKFDLRTQLFRMCGVDLTRIDGIDVTTALAVVSEIGTDMSRFATVKHFTSWLGLCPGTKITGGKLMSGKTKRIVNRAAQALRLAAAALRSSKSALGAYFRRLCSRMDKSKAVTAAAHKLARLIYTVLTKGQEYTDQGQDYYEQRYRERVLRALSQRAAKLGMKMVPAEPT

SEQ ID NO: 421750 - protein, 345 aa, unidentified
MENMYYIGLDVHKRTISYCVKDGSGTIHAEGTFPATRFDLDRWMRTLPQPWTAAMEATVFTGWIYDHLQPHAAALKVAHPLMLRAIAAAKKKNDRIDASKICDCLRCDFLPECYMASSAIRERRRTLRYRNLLVRQMVQMKNKIGMLLMEAGVNYNKQRLHKAGYFRELLATNPDINEGLCSLLRLCRETVVRLQKTESALVRSLERDSLLMDRVERLMTIPAVGPITALTWALEVGDAKRFSSIKKAISYCGLCGAEKSSGNTVQRTPLSKQRNKHLQTTLIEAAKMAPRNSPELAMLYDKEKQKGNANRATLAVARKLVAYLMAVDRGQRNFQVVETSNCIAA

SEQ ID NO: 421751 - protein, 328 aa, unidentified
MAKGITICAGIDTGKYKLDIALEGASKRLQVDNTPADHNVLADWLRRHRVKRVGIEASGGYEQAVVAALRRKRFVVVVFQPAQVRAYAKFRLQRAKNDKIDAALIAACTAAVKTIHAPPDPRLAPFAEQLTMIDQIGEDIARLKNRLETCRDPRICQAWSEEIARLTKRRNNELKALVAAIRQHRDLAERLALIESVDGIGLPTAVAIVVRLPEIGRITREQAAALAGLAPYDDDSGGYVGIRHIAGGRERLRRALYCAALPASMRWNPQLIALYRRLIAAGKEHKRALIACARKLLIFANTVVARGTPWGRTAPTLPTTSHAQLAVA

SEQ ID NO: 421752 - protein, 404 aa, unidentified
MYYVGIDVAKEKHYVCILDDTKEIAVKPFWIYSDILGLRDLVKRLADLSLNNDEFIIGVESTGAFSENLYEYITDADYKVILLNSYQTAKYRDFSTMKKIKNDSIDALVIAELLASDKYKESYISNDDYQSLKVLGRLKKSLSDKIKTIKREISTVMATVNPEITKVFPNIFSKTALVTIKAYPTAMDIQKATPKKLTKLFRHIKGNNFNEDKAKFLIELSKSSIYAGRAQESRALMIRTNIRILELLCQERDEIEAQINTLLYNKIEIIDSSIENIRTIPGVSDKTISAVLGECGDIKRFESAKAFIGYLGLYPTQYQSGNSLSVGRLAKRGIPIAKHALYMAAVASVRHNIELNKVFHDKVSAGKSKKEALIIISKKLATIIYSIFKYNKPYQAKRVFLPIR

SEQ ID NO: 421753 - protein, 356 aa, unidentified
MVIVGLDLHVRNSFLSAMDLETGEVLDQRRIPNTREAIRGYFGQFDGQEVKVTLEATTNTYPMVSLLRQMPKVQVVVVHPRKMKIIAEGLCKTDKVDSEVLVELGRGPYRLPTSYIPNAEVHDLRCELRTRARLVAMRTELKNRVHGLLTGEGFFEHPAALFGKRGREWLSQVELSEGARRRLDRFLRLLDRFEAELVEISQVLREHYARAPLWEEDVKLLTSMPGIGLLTALTILSELGDWRRFKRPESVVNYAGLVPWVDRSNEKSHYGRLTKQGPRFLRWILAEAAQVARRKVPRYGRLYDRVARKSGAGKATMAVARTMLEHAWLMLLRREKFHYEVTEKMVPGGEPVVGMA

SEQ ID NO: 421754 - protein, 364 aa, unidentified
MKEITLLGIDLAKNVFQLKGLDKHHKEIFKKRLSRSKLESFVRGLPSCTIMMESCGGSNHWGRVFGTMGHEVKLISPQHVTPYVGNHKNDDKDTDGILECGTRPRTKFVTVKTLEQQDMQSILRIRERLVGNRVSLSNQIRGLLLEYGIVIPQGFSHLKKHISQLLDANSNELSEELKEGISDCYEEFKELSKRIAYYDRKIETISNKHEYCRLLRTIPGVGPISALALYAAVGNGSQFKNGRMMAAHIGLVPKQSSSGEKHRLLGIIKKGHADLKKLLIHGARAVVYHAGKKTDWRSEWITALSSKKHTNVVTTAVANRTARIAWAVLQSCKPYQAKNDELVEGSACYPQPYHALRKNEGLLA

SEQ ID NO: 421755 - protein, 363 aa, unidentified
MLRVAKTLVTNKEETSMRFYTKQHPYYCGIDLHTRTMYVCILNQAGETLLHRNMQATPEALLKAIAPYREQIVLAAECMFTWYWLADLCADQGIPFVLGHALYMKAIHGGKAKNDKIDAHKIAVLLRGGMLPQAYVDPSEMRATRDLLRRHTHLARKRGELLAHVQNTNSQYNLPAIGKKIAYKANRDGVTERFTDPAVQKSIEVDLALIGYYDELLRDLELTIVRAAKHHDANTLYLLRTVPGIGKILSLVLLYEIHDIERFPRVQDFASYCRLVKCAKESAGKRSGTSGTKIGNAHLKWAFSEAAVLFLRDNPAGQKFLARVEKKHTKGQALTILAHKLARAVYYMLKRKTAFDMPTFLQA

SEQ ID NO: 421756 - protein, 371 aa, unidentified
MKSIIYIGMDVHKKTYSLCALLKETGEIIGETKIPADVSLIIKFIENAKKSVDSDDVQIKTGYEAGCLGYSLYWQLAAKGIECDILAPSTMHRSAKNKVVKNDRRDAKNIAANLANGTYKSVYVPTDEDVEIKEYIRMMHDFKIELKKVKQHINAFLLRFGHQYPGKSKWIPAHIKWLKELELSDMYREILDEYLSQLEILSEKIERFKYRLEELSQKETYNEKIGQLRCIKGIDTTAAMTMHAETSDFDRFPTANAFASYCGLTPGEDSSGDSYHRVGITKQGNSIIRTTLVEAAQVLVRGTIGKKGKKVKSKQKDQDVKVIDYADKAVIRLQKKYHRMIFRGVKINIAITAVARELACFVWGIETGHIS

SEQ ID NO: 421757 - protein, 348 aa, unidentified
MKYYIGLDAHSTTSTFAVVDENGQCVLRETVKTSEQSLVHVINKINGERHLTLEESSISQWLFLHLKDKVDKLIICNPTYIAKKQGAKTDFRDALHLANELRTNHLQPVFHDTSHWMELRTSVSGYLDIVEEIVRFKNRLKSLFRAEAINTDENSFYKNNLRVKELKNPSAKFVAEKLFNQIEFLENEKEKYKELFDKNRKKYRPIRNLMTIPGISIIRANIIAALVCQPARFDNKHKFWGYCMLVRHIQESGGRIYGNKRFFGRRELRNVFIGAAENAMRLDGELRDKYESQRAKGIEHKDAKLNLAKQIAAIALCLLKNNDKYNENYGAHLKERKKLRLEFYNQTL

SEQ ID NO: 421758 - protein, 403 aa, unidentified
MRFVYVGIDAAKDRHVAEARDRGGNVLLPAFSFSADLEGIEELLSRVTRIAEKLEATPLFGMEATGIYHLGLYAELKKRGFHVRVYNPLQLRAFRKKSIRKTITDKTSCSALAEMLRYDTIPAERKIPPEVLKLREYCRARHRLVKKLRVAKTQLRRDVSIVFKGYEHVFRRLTCRSSKRLLRQCPTPRQVLELGAARIEEILREEGDVQARKKARRLVSEASRAAREEALVEPCVYETRMLLQEIEHLEAQLRRLESEIERLFSAFEESRLYTSVKGVSMVTGAVIFSNFGSLRDFPHPDKAVAFAGLDPSVVESGRFKGGWRHLSKRGSPYLRQALYQAANAAVHFNPVLAAVYRRKRRQGLSHRAAVCVAARKLVHVLHSVVVNGMAFHVPSQMKEKASS

SEQ ID NO: 421759 - protein, 394 aa, unidentified
MATIGIDIGKRQHIAAVHHEGEREARKAILRFNSDRGGFAELARWLARQGEVSRAVLESSGHYHLNLAAALQRSGVPVAIVNPLESKYFAKRRLQRSKSDPADARTLATLAMVDQPAVRDVLAGAELREAARFAMSLVDELGRIDQRICRLVELGFPELERAYDDPTCVSALAVLRSAPTAAAAARKRTATLAQAARPGGGRRIGAKKAEQIHTLAQDTIAAPELADQIGFQIRLLIAQHDLLEAQIAEAEAHLGTLMDGELVRRLRTIPGAGPAIVATLIAEIGDIARFSDFDKLVAYVGVHPAEKSSGEKGKDPETSWRMSKAGNAYLRTALYRMAIVGIQHNPLIKAHYARKRAQGKSKMNAVGHCMRKALAIVWGVWRSGTDFAAPPSLP

SEQ ID NO: 421760 - protein, 341 aa, unidentified
MQHELRTVAIDLAKKVFHLVGTDTTGKILWRKWLTRHALMPFIAQLPPVLIGIEACGGAHYWARRFREHGHDVKLMAPQFVKPFVKSNKNDMRDTEAIAEAVTRPTMHFVPPKEVDQQDMQALHRVRERLIGARTALINEVHGLMHEYGIVLPKGVAKFRQAVVDKLESEQEKLTTLSQEMFWKLVEEFVTLEQQLAYYQEKLEALATTHPECQRLMTIPGIGPITATALVAAVGDVGVFKNGRQFAAWLGLVPRQHSTGGQTRLLGISKRGDSYVRKLLIHGARATLRWVKLKTDDRSRWMRGLLARRGWNRTAVAVANKNARIVWALLSRGGVYGDNGS

SEQ ID NO: 421761 - protein, 394 aa, unidentified
MQIEAIMQIAAVRPQAPTAIRTDLGAIFVSLELSRSTWLITSLAPGGGEKMSKHSVRGGDVAGLLERFVQLHEKARARTRQCFRIIVIHEAGLDGFWIHRVLQAEGIESHVVDPASIATSRRRRRAKTDKIDGEALVRALLAYKRGEPRVCAMVKVLTPEEEDRRRLCRERKVLTAERVRHVNRVKGLLFAQGITGYEPRRRDRRERLEELQTGDGRRLPEHLKAQVRRELDRLELLLEQIKAVEVERDVLLAAEYAVTPAPAAMLLDIKGIGPEFAAILWSEGLFRHFDNRRQVAAYAGLAPTPWQSGSVNREQGVSKAGNPRLRTTLIQVAWLWLRHQPDSALTHWFHERVRLNGGRLRKTTIVALARKLLVALWKYVTAGVVIEGAVMKTA

SEQ ID NO: 421762 - protein, 339 aa, unidentified
MPLYSGIDLHSNKLAIGIMDETKRRILKKKLVNDSELVLATLEPYCKEIVGVVVESTYNWCWLVDALMEHEYRVHLANPSANEQYSGLKYRDDDHDAFWLANLLRLGTLKEGYIYPKQERPLRDLSRKRSHLVGIRTSLILSLKGFMARNFGMSMNSSRIKNHSLDSLVGGLPQEENLTLVVRTSKESIDFMGSQIKQLESNILKQVQGKPFYENLLGLPGVGKILAWVIQLETGPISRFLEVGNYASYCRKVATQWSSNEKTKGRGNAKNGNKYLAWAFSEAAEHARRHDGPSRTFYNRKLSQTNEAVAHNALAHKLTRAAYYIMRDNVPYDEKKLFG

SEQ ID NO: 421763 - protein, 407 aa, unidentified
MQVLIERACGLDVHKKTITACIVTPEGKEIKTFHTHTVYLLQLIDWMKEHRCTHVAMESTGVFWKPIVNLLEAEDIQYLVVNAAHMKAVPGRKTDVKDAEWIADLLRHGLLTASYIPDRNQRELRELVRYRRSLIQERAREHNRVQKVLEGANIKLASVATDIMGLSSRDMMNAMINGEEDPEKLASFARGVMKKKKEELELSLRGKMSAHQRLMLKTMLTHVDFLNEQITELDAEVAKRLDPFQEDIDRLDTIPGIARRTAEQILAEIGTNVGSRFPSAAHLCSWIGLVPGHNESAGKRKPSKTRKGNKYLRSALLEASQSVCRSDNYLGALYRRIAARKGGRKAAVAVAHAIMKIAYHLLTRNEDYRDLGADYFEKRQQDFIVKQSVRRLENLGFTVTIAAPNAS

SEQ ID NO: 421764 - protein, 362 aa, unidentified
MAQVRSWVGLDVHRASVVAAVMDRDTGELRVRRLPGETREVVAFCVALPGPTRVAYEAGPTGFGLARALVAAGVQCVIAAPGKIERPSSDRVKTDQRDAERLLRLLMIDGLHAVRVPSSEEEALRDLVRAREDIRGDLMRARHRMSKLLLRHDVRFDGTAAAWTTHHRRWLGAVDLGDRGAQITLLDYLGAIDALLIRRDTLEHTIDELVPDSPWADTIARLRCLRGIDTLSAVGLCAEIGDWQRFPKAGHVMSYLGLVPSEDSTGQTRRQGSITKTGSGHGRRLLVEAAWHYRRAPAKGQALKRRQAGQPAHVIAISWQAQQRLHRTWRRLDTERGKRRTIVAVAVARELAGFCWAAANAD

SEQ ID NO: 421765 - protein, 357 aa, unidentified
MAKCIKAVKTSMRAIGLDLADVWSDWIGLDEAGKVVQGARVKTTESELRKIFGAIPPATIALEVGTHSAWVSRVLGSLGHRVVVANARKVALIHRNKRKNNRIDAELLARLVRVGEQLLFPIRHRDEQSQTDLAILRSRDILVGCRTKLINHVRGATKSFGTALPKCSAPAFVARCAGLVPPMLSNAFKPVLDQITQLSAQIKSLDRQITVMAGRHGPAQRLMQIRGVGGLTALAYVLTIEDPHRIVRSRSAGAYFGLVPGSDDSGEKHEPRRITKEGDRFCRRLLVSAAQYMLGPFGSDSDLRRHGLAIASRGGKNAKKRAVVAVARKLAVVMHRLWISGEAYIPLFNASPQTAAA

SEQ ID NO: 421766 - protein, 472 aa, unidentified
MAQTSSPKTYLLQIRLDFAGRPCGLQNVPVAHFSQHALACLPVSQIWIQGVWPLFKIYRFNCCGLDVHKTWIYACVGITSKVGLTEYKRQRFSSFSKGLRELAAWIQSFGCKEVCMESAGKYWIPVFNILEKADLWVTLAHPKYTKPLRGNKTDRKDAKWICDHFICDLIKPSFIPPRDIRELRDLVRYYKKLTNILTGEKNRAQNCLTVSNLKLDDVFSDVFGKSARSITQHILDHPGEKFDVTPFVDKRCKTPIAEIQAAVDGAISAEQAVKLREVLAHIDELTAHKERINAELLRLAEKYEVALNLIRTVPGFSADPLTAITVLSEIGADMSVFPTAKNLVSWAGVCPRNDQSGGKVKSTRISKAGSWLKPTLVQVANAVVKSDKHPEFKGRYRRIKAHRGHKKTIIAICRMFLTAIWNILSKLEPYTAQGYLDPNPPLTREISAVDALKMLKSRGYIIKGDLSAPTAA

SEQ ID NO: 421767 - protein, 386 aa, unidentified
MEHVVATATERSEVAVATAAGDRSIAPGPSKAVAEPDRRRSSDQSPNSRQSRRRNFSTTSSHPQDRDSFMNSSFTSFVGIDVAKLTLDLCVLPDQKTGTFDNDPKGRKQLLRQLPQPGTCLVVLEATGGYQRMIVADLLEANHRVAVVNPRQVRDFARALGILAKTDRIDAEVIARFGQQANPRTLPKTPEKQDELKQLVTRRRQLIDLRTAESNRLEATTLKSIRKSLKQHVALLDKQIKSIEKEIADLIDADDTWNDKNQILRSVPGVGPITVASLIADLPELGLLNRNEIAALAGLAPYNRDSGAWRGRRSIWGGRAPVRKVLYMAAVSARMHNPVIKKFSDRLAEDGKPFKVQITACMRKLLVILNTMVKNETSWNPNPQGN

SEQ ID NO: 421768 - protein, 327 aa, unidentified
MAKRTTICAGIDTGKRKLDVALDGSSEQLQIDNTPEGYKVLLDWLRRHRVKRIGIEASGGYEQAVVAELRRKGIVVVVFQPAQVRAFAKFHLQRAKNDKIDAALIAACTAAVKKIHPPPDARLLPFAEHLTMIDQIGEDIALLKNRLETCRNERIQQVWKEDISRLAKRERTEFKALVAAIREHRDLAERLDLIYSVSDSGMPTAVAILVRMTEIGQLTREQAAALAGLAPYDDDSGNHVGVRHIDGGRQRLRRALYTAALPASFRWNPHLITLYKRLIAAGKGHKRALIACARKLLIFVNAVVARGIPWGHERPPTVAASALPQTG

SEQ ID NO: 421769 - protein, 312 aa, unidentified
MDMANQYVGIDVAKATLDVAIGSDGELVQVENSEAGVARLLERLGAVAPKLVVLEATGGYESVVAGAIVGRGIDVAVVNPRQVRDFAKATGVLAKTDRIDARVLARFAEAVRPEPRPLPTAEAKELDEYLSRRRQLVDMLTMEKNRQSIATTDRMKKSLKKHVDWLEEALRRANDDIDKAIRNSPAWREQEDLLRSVPGIGPVSARTMLAELPELGRLNRKKIAALVGVAPLNRDSGTLQGIRTCWGGRASVRQVLYMAALSAVRCNPVIRRTYAALRARGKKHKVALVACMRMLLTILTAMVRDKRHWSPS

SEQ ID NO: 421770 - protein, 343 aa, unidentified
MEHFAGLDVSVKETSVCIVDETGKIVREVKVASEPAALLAVLRNAAYRFKRIGLEAGPLSQWLYSAFAEAGLPVICVETRHMRAALKAQINKTDRNDARGISQMMRAGLYRPVHVKTIRSQKLRMLLTHRKLLQSKAIAIENDLRATLRNFGLKVGVVGTLKFEARIKELITTVPDLTVLVEPLLVVRRALREQIGILHRCLLAVVRDDEVCRRLMTVPGVGPVVALTYRATVDVPARFRKSKAVGAVFGLTCSKYQSGEIDRSGRISRCGDEMMRVMLYEAAQSMLFHSAKWSWLKAWAMKIARHRGMKKAIVALARRLAVIMHRIWVDGTEFRWTKEVATA

SEQ ID NO: 421771 - protein, 355 aa, unidentified
MSQEKYIGMDVHQATISVAVLDSRGKLIMESILETKAATILEFLQGLHGSLSVTFEEGTSAAWLHDLLKPHVTRLVVCDPRKNALLKDGSKSDRIDARKLAELLRGNQLTSVYHGEHGMRTLKELGRSYVTITKDLVRVMSRIKALYRSWAIPCSGTSVYAPRHRAEWLDKIPEPGVRLRAERLYQQLDLLQPVRQQARRDLLTESRKHHAVKLLRQIPSIGPIRAALLVAQLQTPHRFRTKRQLWAYSGFALETHDSGEYRYVRGKLQRNRERMTVRGLSNNHNPDVKNLFKGAAISASTHPGPLYDFYVALLENGMRPTMARLTLARKIASITLTIWKKGVDFDATQLHRQEA

SEQ ID NO: 421772 - protein, 349 aa, unidentified
MRFYNQQHRFYCGVDLHARTLSLCVLDAKGSIVRQQTITAGPHAFLQAVAPFRDGLAVACECMFAWYWLADLCEQEKIPFVLGHALYMKAIHGGKAKTDKIDAHKIAVLLRGGMLPQAYVYPKGMRETRDLLRRRTFLVRRRAEALVHLSNTNSQYNQPPFAKKLAYAANRAQLDIVERFSDPSVQKNVAVDLALIDAYDTQIADLELYLARTAKVDDPQAFHRLRSVPGIGKVLALVLLYEIHDIRRFPEVGQFLSYARLVRCSHESAGKKQGTGGNKIGNAHLKWAFSEAACLFLRESEQAKKWLARREKKHGKARALGALAARLGRTVYHLLRKQEVFDRQRFFAS

SEQ ID NO: 421773 - protein, 347 aa, unidentified
MKRIAVDLAKSVYQVAESVRSGQVVQRKRLNREAFRRYIQEQAEPVEWVMEACGTAHYWGRLAQSLGHQVKLIHARYVRPYRRGNKTDRNDCDAMLEAARCKDIYPVPVKNHEQQQLQQLHGLRETWKKSRTQRINLLRGILREAGIEAPVSTATFIRAANELVEQPELAPLSRLLHIVLAEINLYEQCMAECEQQLKRWHAEDEIVRKLDEVSGIGLLTASALTVVVGKPERFSSGRQLSAWLGMTPNEYSSGERRRLGRISCKGNIYVRTLFIHGSRAALLAAQRCQARTPEKLTELQRWAVETAARIGHNKAAVALANKLVRICWAVWCHERRFNGNWQSTKPA

SEQ ID NO: 421774 - protein, 316 aa, unidentified
MTTSSVVVGVDVAKERLDVAVRPSGEVWSEANDDAGVRALVARLRPLGPALIVCEATGGFERAAIAALAAAGFPVVVANPRQVRDFARATGQLAKTDQLDAGILALFAERVRPTPRPLPDAAAQLLDAVLTRRRQLLEMLVAEKNRLGFAPKPLHRGIHAHIRWLERQLDDVTTDLAGLIEASPVWRAKDDLLQSVPGVGPIVSSTLLGELPELGTLSHKQIAALVGVAPLARDSGTLRGKRMVWGGRASVRTALYMAALCGRRWNPALKAFYERLKAAGKPTKVALIACARKLLTILNAMLRDQSPWTYHAQYSC

SEQ ID NO: 421775 - protein, 344 aa, unidentified
MQITTIGLDLAKSVFQVHGIDAAGQVVVRKSLRRMQMLPFFSKLRPCLIGIEACGTSHYWARKLIELGHEVRLMPPAYVKPYVKRGKTDAADAEAVCEAVTRPTMRFVPVKSPEQQAALSIHRTRDLLVKQRTQLINMLRGLLAEFGVGIPKGLERALLMARQVIDGKAPEVPIEAARIATTLSQQALDIHARLREIDRDLAIWLRGNDIARRLMTIPGIGPVGATALAASVTDPHQFRSGRQFAAWLGLTPLQKSSGGKERLGRISKMGDKYLRKLLIVGMTSLVRRAKYAPGKIDPRLADLLARKPTRVATVAMANKTARVIWAIMARGETYRTGHQPALAA

SEQ ID NO: 421776 - protein, 325 aa, unidentified
MGWMAPLRHLGAKMPDGQKPPANREPSMNEITTVGLDLAKNVFQVHGVDAEGTTVLRKQLRRAQVLAFFSRLPRCLVGMEACATAHYWARELRTLGHEVRLMPAQYVKAYVKRNKNDAADAEAICEAVARPTMRFVPAKTAEQQAAVLLHRGRERLVRQRTMLVNALRGHLAEFGVIAPQGLRNVGRLIAIIRDEKDARLPGLARQVLQVLAVQIEQLEAAIAALEKRLMGWHKSNPVSQRLATVPGIGPIIATAIAAMVAEPSGFRSGREFAAWLGLVPRQNSTGGKNRLGGISKRGNQYLRRLLINVTAPICDAGRRPMPIHG

SEQ ID NO: 421777 - protein, 311 aa, unidentified
MKKSTRILGADISAATIELCARELRLPAQIPNTPKAIASLLKKLSGHSIHIVCEATGGCERALLEACWKAGVPVSRLNPARVRDFARSQGLLAKTDKIDAKALCDYGSLLRPDPTPQPSPAQARLAELVARRQDLLDLRIAETNRLSTVRDPEVRRLARRLVKTLEGQIQAIEKLIQETIDSEPPLRARCQQLRETRGVGLIVSATLLATLPELGSVARNAIAALAGVAPYNRDSGTLRGKRCIRGGRLQARRALYMAALVASRQNPVLRAFYLHLRSRGKPAKVALTALMRKLLIHLNSCLKPLTLAPAL

SEQ ID NO: 421778 - protein, 351 aa, unidentified
MLLIGVDYHPSFQQVAFSDQETGECDELRLNHSDGEAERFYRDLKSRGISVRVGMEATGYSRWFERLLAELGFELWIGDPAEIKAKRVKKQKYDREDARLLLRLMRENNFPQIWVPSAENRDLRQLLWHRHRLVQMRTRIMGQLQALAMNENKCWKKKLWSERGRAEFEKLPLGFWAGRRRQELLELLDRMNPKIEELTAAVEQEAKKRPDALRLMTHPGVGPLTALAYVLIIGTPARFSRGKQIGAYVGIIPREDSSGGKQRLGHISKQGSSLLRFLLVEAAQAAARSHPEWRRRYIRLAMRRHKSIAKVAMGRRLAVQLYWMWRNGCEYSQSVKCGSYVGQLGSGHGVK

SEQ ID NO: 421779 - protein, 343 aa, unidentified
MYYIGLDVHKRTISYCVKDAAGHVRGEGKIGSTRRELDAWVKTLPQPRMIALEATIFTGWIYDYLLPHADKVKVAHPRMLRAIALAKKKNDRIDASKIADCLRCDFLPECHMASTAIRDRRRVMRYRNLVIKQSVQMKNRVSGLLMETGVSYNKQRLHKVGYFRDLLSHNEEVSDSIRPLLKICREQIERSRKLDYVLVSRLERDPLLKDRLDRLRTVPGVGSITALTWVLEMGDFTRFASIKEAISYCGLCGEEKSSADKVMRTPISKQRNKHLQSVLIEAAKLAPRESPELAMVRARELERGNPNRATLAVARKMVAYMLAVERRQQNFVPAEEFRPTAAA

SEQ ID NO: 421780 - protein, 430 aa, unidentified
MVSERGWKVARMRVEQEEPEIVERVAALDVGKAEVVCCVRVPGAGDGRRMQEVRTFTTMTASLLGLGDWLAGLGVTRVVMEATSDYWRAPFYLLEDRFQTWLVNAKDVKHLPGRPKTDRLDSVWLCKVAERQMLRASFVPPPPIRQLRDLTRYRVDLVAARTAEKQRVEKLLEDALIKLSAVASDIFGVSGRAMMAALIGGRRDPRALADLARGSMRSKTVRLREALTGRFSDHHAFLLTQMLSRVDAITADIATVQARIDTQIAPFDQAVTRLDEIPGIGVTAAQAIIAEIGLDMTRFPTPAHLASWARFAPGVSESAGRKKGNASTGHGNRYLARSLGEAAVAVGRTDTFLGERYRRIARRRGKKRAIVAVGRSILIIIWHLLSDDNAHFIDLGPGYHDSRVNLNRRMRNHVRELQALGYRVTLEPAA

SEQ ID NO: 421781 - protein, 338 aa, unidentified
MEREKHVWIGVDISKETFCAAVDILDGDGSKKEVNYLQTKEFELTETGSDSFLNWLSESFPEYHFSMVMESTGCYSKKLSKFLHARQNDLPISILNGRQSSNFVKSLGLPHKTDKSDAQALARFGTERSPKPALPDDPVRESLKELSRERSALLKAKAALENRSDSLFAAFTKDINNRAIVALNLQISAIEKEMERCIKANAELRHEAELMKTVPGVGPTSAYGFLAELGSLKQYSSRKLSSMSGLLPHVFISGTSVNKTCLSKRGSARVRQLLYLDCMTAVNKIPQLNSQYLNLVSRGKTKMTARCACMRKLLLIIRAVVVEDRPYEKISKKGTKTA

SEQ ID NO: 421782 - protein, 380 aa, unidentified
MSEITRVLAAVALIVRVGVDLAKRVIQVHAVNAAGHKVVAKAMKREQFIEWCVQLPAGCLVAMEACSGAHYWGRKLSGMGLDARLIAASFVTPYRMEGKRGKNDATDAAAICEAASRPSMRFVPIKSCEQQGVMSLHCTREGYKKARTACINQIRGVLAEFGLVFNKSPKALRAELADVIEDASNEIDGRTRLVLQEAFEHWRELDEHLRWSDKEVGRHVRSCPKAKRAAKINGIGELSASAMTAAVGDFKQFKAGHQLGAWLGIVPSQNSSGGKASLGRITKRGDDYLRTLMIQGAKSVVMSAGKRDDPTSQWLVQLTARVGWQKACVAMANKNCRILWAVMTREEGYDPRHVSEKPSAKKTIKERMDGVVPPRAASSA

SEQ ID NO: 421783 - protein, 340 aa, unidentified
MSKLLKHFVGIDISKLFFDAALIKAACPEHAVHQQFDQSVQGFAKMIKWLEKQDVLINEETLICMEYTGMYNTALVNYLCSKKALIWIEMALRIKKSHGFERNSDDKTDAIKIARYAHRHQDNKQLWSPTDESLGRIKHFIAQRDRLVDTITRLTVPLNELKEMGCEKEAMQMEKMQKAVIGSLQKAKHKIEEMIRALVNENKELSHKVNTIKSIKGIGEITAITFLVYTKGFSCFENAKELACYCGVVPFIKKKSGISIQSKPAVSPFANKKLKWLLHLCALSAIRFDDQLKCYYERKVAEGKNKMSVINAVRNKLVLRMFAVLRDDRPYVDNYERKCA

SEQ ID NO: 421784 - protein, 343 aa, unidentified
MGEISMIGLDLAKNVFQIHGVDASGKVVLRRQLRRGAVEKFFAQLPPCTVGVEACGSAHHWGRVIGRYGHRVRLMPPAYVKPYVKRNKNDGRDAEAICEAVGRPSMRFVPVKSVGQQATLAVHGTRALLVRQRTMAANALRAALSEVGIVAAQGIKGLGELIARLEAPSAEIPEMMRGALLVLARHWQALDADERALERQIAKAARADREARRLMEAPGVGPIIASTVLAKVPDAKVFRSGRDFAAWIGLTGRDHGTGGKHRPGRISKQGDRMLRALLISGASAHLRQQKRRGVSDPWLRELLARRPYKVVMVAFAAKTARILWAMLVKGEHYRDRASASAAA

SEQ ID NO: 421785 - protein, 313 aa, unidentified
MSQNNPPILHVGLDVAKASLQLDLAGQPHSITNDAKGQAQLLKLLRPHPGAHVVCEATGGYEQPVVRVLHAAQVPVSIVEAGRVRYFAKAKGLRAKSDPIDATVLSEYGRTFKPAATPAPTATQVRLSELSTRRLQLLTTLTAETNRAAHYIDKLLLRQTRQFQQLLDKQIAACDTAIAALIAADEKLQAQAARLDAIPGVGVITAATVLAELPELGRISDQAAAALVGVAPYNRDSGDRTGARHIAGGRKEVRCALYMATLSAVQYDAILKAFYQRLRLAGKKPKIALVAAMRKLVVLMNRLLKNPEFQLAK

SEQ ID NO: 421786 - protein, 430 aa, unidentified
MGFIVPTDMHPEQDDQPIPYQWFVGIDWGSQRHQVCVLDGERRRVGERAIDHDGASLAQLADWLWSVSTGQPQRVAVAIEVPRGAIVEGLLERGFHVFAMNPKQLDRFRDRHSVAGAKDYRRDAFVLADAVRTDQPSLRRLHLDAPQLLRLRELSRAEETLLEDFRRSANRFRDQLHRFYPQMLALCSAADEPWLWDLIDLAPTPAHVALLSEEQVQRVLKAHRIRRVTAKEVLTCLQALALPVAPGAAEAAQAHCQFLLPCLRVLAEQLQACSQQVSALLHTLAAEPGDGEGPSDVALVLSLPGVGRKITAWLFAEAAQPIAERDYQMLRTHSGIAPVTKQSGKRRLVVIRRGCNPRLRHALYHMARVAMQCDAHFNSVYAALRAKGQRHGQALRNIGGRLLRILMAMLRHRTCYDASRIRREPVVQMG

SEQ ID NO: 421787 - protein, 357 aa, unidentified
MANYSLSALKSFVAAHQSEPFWIGVDVHKRSYHLAFLRADGKTFTFVSPACPEQMVERFRHLGILVEGVVYEAGPTGFSLARTLQAEGISVIVAAPSKIPRSVRAGSKTDRLDCLKLALYAAKGLIRPIAIPTAQEEAHRALLRRRNQLVDSVRRCKQRIKGFLLYHGFKETDSVKNWRSNFAEQITSLPMEPEARLTIESHLRELNFLASELSKVTKDLEQLNLQPKHRSAIRALTSVPGVGKIVATSFYLELFRPERFSRGEEVASYLGLAPMVRHSGERTPRGYLVPVGQSRLRSLLIEAAWMWRAKDGYARDLYNKLLSRTAVPQKAIVALARKLAIILWRLSIEQRAYRSAA

SEQ ID NO: 421788 - protein, 316 aa, unidentified
MESQPTFVGIDVSSKRLDVAVLPTALHFTAPYTDEGLAALAQRLLKLAPQIVLLEATGGYEIPAAYALYEAGLPVVIINPKVVRHFAKSTGRLAKTDKLDAQVLAHYAQAIQPPVRPLRDPEQLELSQLMSRRRQLQGMIVMEENRRRTCLPKVRHNIDQSLAHLQRLLKDLDRDIQDFIRRTPLWQEKADILQSFTGIGPKASAALIADMPELGTLPSPKAAALAGLAPMNQDSGQHRGQRQIQAGRADVRQALYMPALVAVRHNPVIREFYQRLRQAGKPAKVALTACMRKILVILNAMLKNRTHWNPQLPLAA

SEQ ID NO: 421789 - protein, 410 aa, unidentified
MDTLIERCAGLDVHKETVVACVRVPTRGGGREQCLQTFGTTTAQLLALRDWLVAHGVTRVGMESTGVYWKPVYYMLEDAVECWLLNARHLRNVPGRKTDVADAAWICQLVEHGLVRPSFVPPKPIRELRNLTRYRKAQIEERTREAQRLDKVLQDAGIKLSSVASDVLGVSARAMLRALVAGTRDPELLAELARGTLRKKIPALREALHGRFGPHHALLVGTILAKLEFLDEALAQLSAEIEQVIAPFTAEAALLRTIPGVDRRTAEALIAEIGVDMTRFGAAGRLASWAGWCPGNHESAGRQGSGKTRKGSKWLRTYLTEAAKAAAGAKGTYLAAQYARLRGRRGSARATVAVGHSILVAAYYILDRHQPYRDLGPDYFRRRHSREHQMRRLVRQIEALGFRVTLEEAA

SEQ ID NO: 421790 - protein, 393 aa, unidentified
MYYCGIDVAKRKHAVAILNERGQPHKPVFQTENTHAGMDYLVEQLGRLEGSVSIGLEATGHYWLALYDTLTRQGYPVVVINPLQIHAYRKSGVRKVKNDRTDAVWIADFVRISNKPATSRDIPVLLQLRELTRFRFWLSEQIGDCKRKLVTILDRVFPEYESLFSSVFVTSSRALLQEAVSAQEFADFDLQELTGLLTKTSRGRFGAEKAMQIQAQARQSIGVGFLADAAQVEMRCLLAQIALLEEQQAEVDEAEAALMAQIPQHITSIQGIGLPTGAAILAEIGDVHRFESEDKIVGYAGIDATVHQSGQFQATETHMSKRGSPYLRLALWQAASMAIQHNEEMKAYYQKKRAEGKAHGTALGAVCRKLLIRIYVILKENRPYEARQPKTAS

SEQ ID NO: 421791 - protein, 361 aa, unidentified
MRIIGCDLHARQQTLAMLDTTTGEVVTMTLKHEGNNVREFYSKLPRPVRVGIEATGSMQWFVSLMEELEIECLVGHPAQIRAAEPRKQKHDRRDADLILKLLAENRFPRIWLPSKELQDLRALLRHRHQWVRIRTRIQNALQAIALANGLRRGPSLWSQDGQSKIGALPLAPHTAYRRSELQAMYAKFAAEIEKLNQRVEEQACERPGARLLMTHPGVGPITALATDVFLGDAARFADSKALASYVGMIPSEYSSGGRQRLGGVSKQGNPLLRFLWGEAAAHAVRRDPELQRFYRRKLVQKGLGKSRVAVARKLGIRLWIMLRDEIDYNEFCRRGQKQQKSSEACVGMPDTGHGAKQSPAD

SEQ ID NO: 421792 - protein, 405 aa, unidentified
MGDIVEVAWVGIDAGKVSHQATLVDADGTIVWSRQVRNDQAAVEQLIAQAAATATTVRWAVDLTSAGAALLLALLIAAGQRVVYVPGTVVNRMSDTFAGEANTDARDSYVIAETARLRRDLTELITPNELVAELALLAAHRADLMADWVRGVNRLRELLTRVFPALERSFDYTTRSALILVSRYSTPDAIRDADADQLAAYLRSEEAHRPSIPGMVAKAHAAAAAQTVRLPGEAATAALITRQARKLLDLDREIKDLDKQITERFRAHPQARIIESMPGMGPILGAEFIAITAGDLAAFGTAARLATYAGLAPVPDDSGKRKGVRHRPRRYHRRLRHVFYMAAFSSLKTDGPSREFYARKRSERQRHTRAMIALARRLVDVLWALLRDNRTWQPQPPTPLPATAA

SEQ ID NO: 421793 - protein, 450 aa, unidentified
MIPRINLYLQVPRIHNRKGGDIMIKINPLSTLYVGIDVSSKSNYVCALDFYKNKYINSSFANNQPGAEELAQKILECLKEHPDLNTVVAALESTSVYSIHIANYLSSCEELMPFKPFIFVLNPKCTANYKKSYIGLGKSDPIDAFVIADYARAGNIETEPWRGSQFLALKRITRHRLHLVECITREKAYLVSNLYLKFSELQMLEKDNQPFCDIYGATSSSVLTEYLSPEEIIESSEEELVSFLADKSRNRIKDISKTADLLKKAARDSYRLDKALYEPLNVSIASSFNCIETFKKEIKAIDIAIEREIKGLNPNAFIILQSIDGIGPVFAGGIVAEIGDISAFTSSDALAKYAGLCWRSNQSGDFDGEDTPMTKAGNRYLRYYLGEAANSMRKHNVEYGAYYRKKYNEVSKHQHKRALALTSRKFVRLVYGLLARNQLYSGVSLDTSNE

SEQ ID NO: 421794 - protein, 282 aa, unidentified
MNNIILGIDISKLTFDVALLNDDKVKTKKFTNTSKGFSELKQWLKNNEIDSVHACMEATGGYESKLAQYLYDNNFKVSVINPARIKGFSMSKLSRVKTDKADSELIAQFCQAMQPDLWKPTPLNIQELQQWVRRLDSLIANKNQENNRLDGASEVVAINISTHIEFLDKQIQEVEELISNNIKGHQDLNDKSKLLNSIPGIGEKTIAIILAFLTVENFDSAKQVVAFVGLNPKPKQSGSSVLGAGRISKTGDADLRKAFYMPAIVSLRFKNKTPFNKNVKTI

SEQ ID NO: 421795 - protein, 352 aa, unidentified
MAGVMIGVDPHKASHTAVAISGAEEPLGELRVRACAVQAERLLAWAAAWPERTWAVEGAGGLGHLLAQQLLSAGERVLDVQPKLGARVRLLATGNVNKNDPNDARSVAVAALRSPGVREARPDDHAAVLKVWSKRRRDLASSRTQVVCRLHAVLCELVPGGVPKKIIAAHAARLLGSITPPDAVAAARWELAAALIEDLRRIDAQLGETRKKLDTAVRASGTSLTGLFGVGPVIAATIIGEVRDVSRFTNRDRFAAYNGTAPIEVSSGQRKVNRLSRRGNRRLNHAIHMAAVTQVRQKHSEGRAYYDKKLAEGKTRKEALRALKRQVSDAVFTRLQIDDQRTQAQVRDPGGQ

SEQ ID NO: 421796 - protein, 319 aa, unidentified
MEQSELVAVGIDVSKEGLEIAVRPSGEQWSERNDVQGVRRLVKRLQALGCRRIVVEATGGYETVLVVELSVVKLPVVLVNPRWVRAFARSQGQLAKTDAIDARILALYAERAELKVRELPDAQVREFGGLCARRAELLDMQTAEENRLEHAGPSVKREITSHIADLRKRIGRLDRELRRRLRESELWRELDQLLDSVPGVGPVLRSAMVAWLPELGRLNRGEVAALVGVAPLNQDSGKWRGSRHIAGGRARLRKVLYMGTFGALQHNPYLRAYYQRLRTTGKKHKVAMVATMRKLLLILNAIVKTRTPWNEATCAGANP

SEQ ID NO: 421797 - protein, 347 aa, unidentified
MAVTIVETRAITGGVDTHADMHVAAALDPVGGLLGVEEFPVTPAGYARLLEWLGGFGTVCLVGIEGTGSYGAGLSRHVTNAGVRVAGAGRSDRQDRRRAGKSDPLDAVSAARAAQSGRARGAPKGRDGAVEAIRALMVAKRSARSERIQTINQARSLVHTGPDDLRARFTGHTTVALVAGLASLRPRPGSTIGYATRVALRELGRRAEFLDAQLERLDELIVPLVTAHAPRLLALYGVGPDTAALLLIAAGDHPERLRSEATWAHLCAAAPIPASSGKVTRRRLNPGGDRQANHALWRIVITRMSSHPPTRVYVERRSKEGLSKKEIIRCLKRYVAREVYPCLRIAG

SEQ ID NO: 421798 - protein, 471 aa, unidentified
MSCFRGAIQNRLRKEDFMKKQDSYNYYVGIDCAQNKHDFAMKNNQDKFLIKRGHFSNTLQGYEKFLNTVLSKCLNKDKILFGMEVTGIYGTNLYERLKSDGYHVVMISPDSVKNYRDYKRLNKTDKIDSGCIAELLLNGDAQIVHVAKNGYTDLKAYIRRRNALKVTCTQETNRFLAKVCLYFPDLLKVFPSGRATLKAIFSIYPTPYSIIEADFDELVSVLQKASKNKFGVDKANELIHAARNSIVVRKSISDGELYNIHSLIDSIDSLESEIRNLEKIIDSKAEEFPAYHVLLTLTGCGKITAATIVAEIGDISRFHKASQIVSLAGLYGDNSKSGSSVNKRGKISKKGSRYLRHAIYMVAEFARRNNPIFKAYFTRKKNGDRTKHTLAVNAVANKLCKVIYSLMKNQSTYIIQYRDLVKLSESTQNEFFQNAETDFSAKTRRKKYLYEDEYGELHEFVFKSIKTALIE

SEQ ID NO: 421799 - protein, 375 aa, unidentified
MTATTRPEMSVSEPTLYVAFELGKKEWKLAMTSRFGVEPWVRTVPGGDLGAVDRLLRQGRQRFALPAHARVVSCYEAGRDGFWVHRALTALGLANRVVDSASIEVSRRKRRAKTDRLDARKLVTMLVRVCCGEQRVWSEVRVPTVAVEAARQMSRERTALMQDQTRLTNQMRGWLASWGCAFPRHRPDAWWTTVRDWAGAPLPGEVQTRLARAAARMAVLEEQIAALDAQQQAVVTAAPATSAIRQLVRLKGIATTGASVLLDEGLVWRAFRNRRQIGGLLGFAPTPYDSGETQREQGISRAGNNRLQGVSIQLAWSWVRWQPGSALTLWYRAQFGTGKRARRIGIVAVARKLVIALWRYVTTGVVPAGAILKGA

SEQ ID NO: 421800 - protein, 345 aa, unidentified
MKIVGCDLHTRYQQIAMLDDETGELVERRLEHANGEAKEFYTQLTGSVRVGIEATGHTRWFERLLAELGHELWVGDAARIRAADVRKQKTDARDAALLLELLLGGRFPRLWRPSAEERDLRQLLWHRQKLVWMRNAIGNQLHALAMGEGLCKKQQLFTKKGRAELQALNLDPWASRRRQELLRMLDQVDVSLKEFDEAVNEQAAQNVEARLLMTHPGVGPVTSLAFVLMVGPVARFQRSKQLVSYLGLNPREHSSGGKQKLGSISKQGNPMLRGLLVEAGHTTARLDAELRQDYQRLRLRRGGSVAKVAIARKLAVRMYWMLRRQVNYTQLVRMQGSSRATLVQP

SEQ ID NO: 421801 - protein, 491 aa, unidentified
MIEGAFVKENQRRCCGIDAHKNSVTVCVLPPAGQPHIEAKKRKFRAFTRDLKQLRTWLKNCQVTEIAMESTGQYWRPLWNLFEGEFGKVILVNPQHIKGLNGYKTDPKDAQWIADLLESGKLRGSWVPPRPVRELRDLTRQRVHLLEDLNRVKNRTEQLCQAGNIKVSSVATDLFGVSGRKMLKAIVEGKRDAGWMADYAQGKLRGRRRELELALDGTFTGEQRWLLERELRQVEWLEKQIETLEQEIQRRVAVFEEPIRRLLTIPGIDRKTAWTIVAEVGVDMSVYGDAKHLASWAGLCPGNRESGGKRMSGRTRKANRYVKRGLCQAAWAASHTKRTYLSAFYRRMAVRKGAPKAVIALAHHMLTVVYQVLADNAEYIEMGSDYYDQRSKPKTVSRLVARLMRLGYQVDLKPMTGNPAHAPMANFNDPPQEEFQGAAAWEPRKDSTIPTTRRKRGRPCKCTERGIICKHGAPARLKPMIPQMLVGEKFS

SEQ ID NO: 421802 - protein, 316 aa, unidentified
MDEILRFVGIDVSKDHLDVHVRPDDQQRRFEYDADGLTDLVKMQTELRPNRIVIEATGGYEQRVVATLAAQQLPVVVVNARRVRDFAKATGQLAKTDRLDAAVLSDFGEKLRPQLRTLPDESREELKALLVRRRQLVDMMTAEKNRQSTAPKRIRRHIQTHIDWLQKQLAGIDEDLAGTIQQSPMWKAKDEILQSTPGIGPTTSTTMLAALPELGSLNRHTIAALVGVAPMNQDSGKFRGRRAIQAGRRSVRTILFMSTLVATKHNPVIRAFYQRLLAAGKPKMVAITACMRKLLTILNAMLKTNSHWNSEHAKTC

SEQ ID NO: 421803 - protein, 422 aa, unidentified
MKTPGTKPFTAYIGIDWADTKHDICIQAAGEERREFSRISHQVDEIEEWAQSLYRRFGGPMAIAVELSKGPIVYALQKYDFFVIFPVNPSTLANYRKTFSPSRAKDDPTDAQIALELILCHPDRFSPLKPQSVEMRTLASLVEQRRHLVNDRVRITNRLRYALKQYYPQALEWFDHIDTPLFCDFITRWPTLIQAKRARKNTLEKFFRAHNMRFAHVLEDRIQAIRAASPLTLDQAVITPHRLQALVLVDQLRVILNAIKLYDSQIAELAPRHPDFALFDALPGAGPSLAPRLLVAFGEQRDRFNSAAELQRYAGIAPVTERSGKKCWVHWRWQCSTFLRQTFVEWAAQTINKSYWAGAFYQQQRDKGCSYNAAVRALAFKWIRILYRCWQTRTPYDEATYLKALKRRGSPLVNPPAMVEIA

SEQ ID NO: 421804 - protein, 414 aa, unidentified
MGSSKGGERLTIFVGIDWAEAHHDVCLLDSDGRVLATRRVAEGLEGVALLHGLLGEHAERPDEVVVGIETDRGLLVTALVAAGYRVYAINPLAAARYRERHTTSRAKSDRGDAKMLADLVRTDRHNHREVAPDTELLDAIKVLARAHQGLIWTRGRQLNALRSALREFYPGAVAAFPELGHADALAVLGVAPDPERGRRLSTSQIGAALRRGGRQRNVERRAAEIRTALRAPQLAAPPLVADAHAASVTALVAVVRTLSTEIESLEGRLGERFSQHPDAEILRSLPGLGGILGARVLAEFGDAPNRYADAKARRNYAGTAPVTRASGTSRAVVARLVRNRRLFDACYQWALCALTASPGARAHFDAHNPGPHTAKVARRKLANKLVGILHGCLTHQTRYDELRAWAPAVDRIAA

SEQ ID NO: 421805 - protein, 318 aa, unidentified
MSKIICGVDVASRFLQVRIGPEGPGGRFANTAKGIAELAVFCRQYRVDLVAMEATGGYEKQPFALLWAQGIAAAILNPRAVRQFAEGMGLLEKTDRIDAGIIARFAEVKGVAAMALLSPEQQRLKAMVVRLRQLTAMRTAQRNQQRLVDDPMVLKSFKRVLAVLASQMRQLESAIAELIAADPVWSKLDQTFRSIKGVADRTVAHLLAEMPEIGRISNKAISKLAGLAPMARDSGQHEGKRKVRGGRPEIRDLLFVVAMIVRKFNSDFAAFHERLLAAGKPKKVIRIAVAHKLLVRLNAKAREARAELGNLSLLATVQ

SEQ ID NO: 421806 - protein, 409 aa, unidentified
MEGTESNYQWYVGIDWGAERYEVCVLDRQAQVVARRSIAHSGTGIAEFVDWLLKLCEGKPERVAISIETPRGAMVESLVERTFAVFAINPKQVDRFRDRYTVAGAKDDSQDAFVLGDSLRTDEHCFHRVGLDEAAILRMRELSRLEENLQQESNRLSNQLWEQLHRYYPQMLALSKAADEPWLWELIEWAPRPVEAGKLELARVQQLLGSHRIRRIRAEQVLEALKKEPLRLVLLPRLRLAHEQRTQVAKRIQRMLREMSAAEPTEKADKRQHSDVKILLSLPGVGRVVPATVLAEASGPLRERDYHRLRNYGGIAPVTRQSGKKKVVSMRYGCNMRLRNALYHWARTSVQKDAAAKKHYAALRQAGHSHGRATRGVADRWLAVLMAMLKAGTLYDPERRGKGQATKVS

SEQ ID NO: 421807 - protein, 401 aa, unidentified
MSKFNPGRHRIETASALETVGDTAGVERHAAYVGLDVHKETIAVAIAEPGRGEPFYHGEIANKPKTVEKLLAKLGEAYDGGLALFCYEAGPCGYALYRQILACGHDCQVVAPSKIPKAPGERIKTDRRDALKLARLLRSGDLTAVWVPDREQEMMRDLSRARDDMKAQERKARQQLNAFLLRHGHHWPRGKTRWTPAHENWLAGLKMEHPWQQVVLQEYIDAERAAGERVAQLTDHLMRALPEWSLAPVVDSLIALRGVDKLSAIVLLAELGDISRFDSPKQLMAFLGLVPSEHSSGPRRRQGGITLTGNGHARRMLVESAWSYRFPARQTKHLKGKAINASEAAKKIAWKAQTRLCGRYRTLTRAGKNTKLVCVAIARELAGFIWDIVRHEMPRPAPQEG

SEQ ID NO: 421808 - protein, 458 aa, unidentified
MTLVMIGIDPHKSSHTAVAIGLAEEPLGQLQVRASPSQAGQLLAWAREWPERAWAIEGAAGLGNLLAQQLVAAGERVVDVPPKLAARVRLLQAGNTSKNDPNDACSVAVAALRSKAWRPVVADGQAVVLKVWAKRHRDLARSRNQACCRLHAALCDLVPGGTRREITAARAARILEELTPSGPAAKARCELAAEFLADIRHLDAQLRECSRKLAAAVKASGTSLTGLFGVGPVIAGTVIGDVRQVFRFPGRDHFASWNGTAPVEVSSGDRKRIYRLSLRGNRRVNHAIHMAAISQIRYKHSDGRAFYEKKIAEGKTHKEALRSLKRRISDAIYAALVADARQATACPKGPGGQPGNHSASRAAGSHPARRRFGQATPGPGHHTTAADGIPGRAGPSSIAANLPPAKPQVQVERPQRSEDERPGGAARRRPHSATRKAPMRSSNSPLKPRLRTNPTTTA

SEQ ID NO: 421809 - protein, 337 aa, unidentified
MELYSGLDLHSRNTYIGILDTDFKRVFKKRVSNNLDLILETLEPFKDQLKGLVVESTYNWYWLVDGLMDAGYGCVCLANPSAIKQYEGLKHSDDQHDAFFLAQLLILGILPQGYIYPKEDRPVRDLARKRMFLVKHKTAHILSLQSLIARCCGQRVSSNQLRKFTSADLKQLLKEEYLLLSAQANLNIIAFLIQQIKALEKAIKKKVKLDKAFEQLMTVPGIGFILAMTIMLEVGDISRFAKVGNFASYCRCVSSQRLSDGKSKGSGNRKNGNRYLGWAFVEAAQLGRRYSQRFCRYYDRKAAQTNTIVATKALSNKLARICYYIMRDQVPFREELF

SEQ ID NO: 421810 - protein, 316 aa, unidentified
MNVIGFDISKDTIDVTLLRNSGKVDYIKIANACEGFEKLNDWIRSKRIRKISISMEATGIYYEEAADYFSAIYQVFVINPLKIKDYSKSQFSHTKTDKADSRLIAEYTKRHLDKLTPFKPSENPTLYKLISLLQQLKQQQNESQNRLHAAKDTFIRATHEAIILLLAKQIDQTAKRIDLMIQQQDSLNTHYKNLQTIPGIGKDTAAILLNHLTDKQFKTANQFVSFAGLSPRIEQSGTNVNKKGRLSRYGHRRLKRALFMPALVAYRIKAFPKLVQNLSQKPKMVVIVALMRKLAKIAFYIHKTQKPFEKMRYQIA

SEQ ID NO: 421811 - protein, 412 aa, unidentified
MQVVYVRCAGLDVHKKTVSACVSVCEAGEAKWQKTRTFGTFTQDLLLLAGWLKECGVTHVAMEATSVYWRPVWAMLEGQFEQMLVNPQHIKTVPGRKTDTKDCEWIADLLQHGLLKGSFVPPTAIQDLRDLTRYRAELRQSQNRVANRIQKLLEQANLKLSSVVSNTLGVSGRLMLEAIMAGGEDAQKLAQLARGRLKTKIPQLKQALEGRVREHHRFLLAEYLNEWDTLEDSIRRIESEIDVHIRPFESAVTLWKTLPGVERVTACSLVAEIGVDLKQFATAQHLASWAALCPGNHESAGKRRSGKTRKGNKWLRRSLSQAAWAAARTKDCYLSAQFKRLAARRGKKRALMAVAHSMLIIGYHVLKTGQDYRELGGNYLEQINKEQLQRYFVKRLQRLGLQVTLQPVAAAA

SEQ ID NO: 421812 - protein, 352 aa, unidentified
MIVLSADTHKRSHTIAAVAAGTGEFRGEQTIVVGRRGFAELLAWARSFDSERVWALEDCRHVSGSLERFLIEHGERVLRIPTHLTAGARKSARTRGKSDSIDALNVARAALQEGLESFPAAQLAGPELDLRLLVDHRERLVRHRVELNNTLIWHLHDLWPELQLPGGALFSKKWSTRIAGRLARAEQTTRVRIAREELRRLRDLTQSIEQRKREITALVSEVAPQLVAEPGFGPLIAAKLVGEIAGAERFATSAKLARAAGVAPIPASSGNTRRQRLDSGGNRQINAALHRVIVTRARCHQPTRDYIDRRRREGKTTREAIRCLKRYLARDVWRLLQPPHPVLETTPPTSIS

SEQ ID NO: 421813 - protein, 433 aa, unidentified
MLEAEDEPLFAERAAGIDIAKAGIEVTIRVPSDTRRGGRQQETRSFRTTRKDLLALADWLRCWQVTKVGMESAGDYWKPVYFLLESEGFDCVLYHAAQVKALPGRPKTDKLDSVWLAKITERGSLPGSFVPPEEIRRLRTHTRYRRHLTQARTAEKQRVEKLLEDAHLKLSSVISDIHGVSGRAMLEAIAAGERNPKTLAQLARGSMRGKVRQLEEALDCAFVTGEHAAVLAMMLAAIDYHTARIEDLTAKIEVLCEPYLHQIAQLDEVPGTGVITAQDVIAEIGTDMTVFPTAAHLVSWAKWCPQVAQSGGKRKGASASGRGNRYIGAALGEAAISAGRTQSFPGAKYRRLVKRMPKRKALVATGNSLLTIYHALLSDPQAAYTDLGAGYYERRANIRRQARNHVRGLERLGYKVTIEPIDPATGELQAAGS

SEQ ID NO: 421814 - protein, 344 aa, unidentified
MEHFAGLDVSVKETSVCIVDEAGRITREVKVASTPEALMQVLRAPAYQLKRVGLEAGPLSQWLFGALAEANVPVICVETRHMRAVLKAQINKTDRNDARGIAQMMRAGLYRPVHVKTLRSQKLRMLLTHRKLLQSKAIAIENDLRATLRNFGLKVGMVGTAKFEARIKELVGDDSDLVLMVEPMLIVRRVLREQLAILHRHLLALARDDGVCRRLMTVPGVGPVVALTFRATVDVPARFQNSRAVGAVFGLTPCKHQSGESDYTGGISKCGDEMMRMMLYEAAQIVLIRATKWSWLKSWAMQIAKRRGVKKAIVALARRLAVIMHRIWIDGTEFCWIRQQAVAA

SEQ ID NO: 421815 - protein, 320 aa, unidentified
MAKKDVVEFEQVIDKGCGIDIHKKVLVATVQGKGIKEETRSYDTFTESLESCKVWLKEIGVTHIAIESTGVYWKPVFNIFEDSFKIVLVNARHLKSIPGNKTDKKDSKRITKLLLAGLLKGSFIPPRIVRDIRDLTRYKRRIIEQISSEKNRIHKFLEDANIKLSSVVSNLSGVVATKIINAMIGGEDDVKELVKLRHGKMNATIEELSSALTGKLTKHHKFMLNVVKKSIESKEMLIKELDIEIDKLLKNNQMVHDAELLSTIPGVSKESATYILAEIGNDMEQFPNEQHLASWAGLSPGNNESAGKKKAAEPLMVING

SEQ ID NO: 421816 - protein, 399 aa, unidentified
MMYQQFCGIDVSKDSFDITLLNSNGEIKLQDKLLMNRDGFNTLLKYLSSYSKENLLVAMEATGIYHLPLLSFLLENSFKSVVINPILIKSFIGSTTLRKTKNDKKDATSIALFSLKSYQSLHLATTDAIENIKPLIRERETLSKEIARLKTEIKAILTQLFPELSKNTNIFTRSILNLLLKAPSRKAIRNLKKQRIQKILDDTSGNKVRISADEILSLAKNSIAISDKYLEKVLTSKIRRLIYIQDELSFLDTELQNSLEDTDINNDIEILQSIPGIGSVTSKNFMIEVSSVEKFKSVKQLCAFIGIDPSVKQSGTSINYRGKISKRGNANLRRTIWQMAIGVIRSCDKFNAYFSKKREEGKKFKQAVIAVANKLLRTIFVLLKNKTKFDENLVLGVSK

SEQ ID NO: 421817 - protein, 352 aa, unidentified
MRRTTTLHTVSTLGIDMGKYTLHMIGLDTRGAIVLREKVSRGRINSRLANLPRCLIGIEAGMATHYVARELTALGHDVKQVPVSYAKPFRQGHKNDFRDAHAVAEAVQRPTTRFIPIKTNDQLDLQGLHRVRSRLISSRTAVINQIRAFLLERGIIIRQGVSSLRQSLPDILSQRTDVLSPRTVRVIIDLASDWHQLDNRIETVTDEIEALAKDDETCRRAMTIPGIGPIISSALVAAIGNGVAFGNGRDFSAWLGLVPKQRSTGDRTILGRITKRGNGYLRMLFIQAARVILRRPKNWPKHGFGLWLTHAAQRLHTNVLATAFANKLARIAWTVLAQGRSYEARTTEITTA

SEQ ID NO: 421818 - protein, 405 aa, unidentified
MGKVFVGHDWAEAHHDVHIEDEQGRRLAKARLPEGVEGVARFHELVAPFVEDPAEVVIATETDRGLFVGALVAAGYTVLAVNPLSTSRYRERHSTSGAKSDLGDTLVLAELARTDAHNHRPIAGDSDLAEAVKVLARSHQSMIWTRQRQTNQLRSTLREFYPGALTCFDDLDGRHALAVLAVAPTPVLGRSLSRSKIASALRRGGRQRRVEERTAEIQAALRADQLAAPDLVSEAMGVTVAALVAVIVELSAQIARLEESLADRFDKHPAAEVIRSLPGLGMILGARVLGEFGDDPNRYADAKSRKNYAGTSPITKASGTRRVVLARFVRNRRLADACYMWAFASITASPGARAFYDQRRAAGDTHHRALRALANRLVGVLHGCLRHGVMYDEDTAWGHRMEQAA

SEQ ID NO: 421819 - protein, 368 aa, unidentified
MEEGIKFFIGLDVHKDSIAVAVAEAGRAPARLVGGIGQDIGKLRKLLSRHGQPGQMHVVYEAGPTGYGLQRELTRLGYRCEVIAPSLIPKRAGERIKTDRRDGIRLAELSRAGELRAIWIPDLADEAIRDLARAREDAVNARTQARHQLKSFLLRHEVRYPHKTSWSKTFYRWLGTLSFAGSGAQTAFTEYWQAVTAADERVARLSAALGSSIEGWRFESVVSALKALRGIDQVSAIGLVAEIGDINRFSHPRQLMSYLGLVPCERSSGERITRGSITKTGNAHARRLLTEAAWNYRFKPRIGYRAQRRAEDLPQAIREIAWKAQLRLNARFARLTARGVQANKVCIAVARELAGFVWAIASARQLNN

SEQ ID NO: 421820 - protein, 317 aa, unidentified
MPQPDLFVGIDVAKNELVVRLHPLGEEWRFPNDKAGLKALERRLKALAARYHLLIGFEATGGYERKLAALLDRLGLTAYLLDPARVRSFARAERQLAKTDPLDAAVIARCLAALHPELTPYRHDPQAARLAEHVRMRDLAVAQRIQLGNQLESLDDPAMRRLVKAQVGKLKALALRIEKAIAALIAASPDLATRDRLLRSAPGIGPIVAACLHAHMPELGMLSSRQAAALAGVAPFDRQSGATRKPGRCTGGRPAVRRCLYLAALAIARSKKGPLAQTCQRLRDNGKPAKVALVATMRKLIITLNAMLKSQQTYRPA

SEQ ID NO: 421821 - protein, 345 aa, unidentified
MKISTVGLDLAKNVFQVHGVNEHGVAVLRKQLKRDQVTPFFARLQPCLIGIEACGGAHYWTAKLTALGHRVKTMAPQFVKPYVKTNKNDLLDAEAICEAVTRPNMRFVPAKAPEQQSVLSPHTARESFVHARSAQANQIRGLLNEFGLVVPQGIRHVYERVPDLIEDASNELPGRFRLLIDRLLQHLRELDRQVHELEREIEQWHRSSEVSRRLETIPGIGPITASALVASAGDPSNFKNARQFAAWIGLVPHQNSSGGKTRLLGISKRGNVYLRTLLIHGARALVQLAQTRADRADTWLAKLVGRRHHNIAAVAMANKNARLAWALLSTGKAYEPMRATTAAAT

SEQ ID NO: 421822 - protein, 375 aa, unidentified
MKNKVRFLGLDVHAETIAVAIAEPDGEVRSLGTIANRAESVRKLVKKLGPAEHLKACYEAGPTGYVLYWQLAELGVACEVIAPTLVPMKAGDRVKTDRRDAERLARSYRSGDLTAVWVPDEGSEALRDLVRAREAAKQDQLRARHRLGKFLLRMGQRPAVGMKAWTAPYMAWVRQVHFTQLAREATMLDYLYEVDHMGERVKRLEQSITEAVKLATPAVQEVVKGLQALRGIAEISAVTIVAELGNITRFENARQLMGYSGAVPSEDSSGQRTRRGSITKTGNAHLRRIVVEAAWSYRHRPAIGPRLRKRQEGVPEPIKEIAWKAQVRLTKRYARLAAAGKDQRKIITAVGRELLGFIWAIGIKAEAAGKLRLAA

SEQ ID NO: 421823 - protein, 412 aa, unidentified
MNAVGVDVSKGKSMVAVLRPLGVVVAKPFEVSHTAADLGKLADFLKSLDGETKVIMEHTGRYYESVAHVIHDQGLFVSAVNPLLIREYGGNSLRRVKTDKADARKIARYGLDNWAELREHTPMDTTRYELKTMNRQFHLASKNRTACSNNLVALLDQSFPGVRGWFDSPVRKDGSQKWVDFAMAFWHVDCVRSVSQAAFAERYRKWCKHHGYNFNAEKAEQIHREAREMIALVPKSATAKLLVQETATQLLNLSRMVEVLRAEMNRLAAQLPEYPVVMGMYGVGESLGPQLMAEIGDVRRFAGKKSLVAFAGVDPMPNQSGAKESRSNRSSKRGPPYLRKTLFNLMSMLLRLAPSDVPVYQFLDRKRAEGKPYYVYMTAGATKFLRIYYGKVRDHLAALDAVPHDTTSANPQ

SEQ ID NO: 421824 - protein, 457 aa, unidentified
MPRTIKQRRKCTSSVVSLPVLRPNAAGIDIGAREIYVAVPPHRDPHPVQAFPTFTSDLLELADWLKQCGVDTVAMESTGVYWIPLFQILEARGFEVFLVNAHHVKNVPGRKSDVSDCQWLQYLHSLGLLRASFRPPQAVCQLRAILRHRDNLVQMAATHVQHMQKALDQMNLQLHHVISDLTGTTGLAILDAILNGERDPQVLAQLRDPRIQASSETIAQSLVGDYRPEHLFVLRQSLASYRAYQALILECDKEIQAVLAHFQTQADPASMPTPTQKPHKPQRNQFHFDLHAEHYRILGVDLTRVPGLETLSVHTLLSEVGPDLSAFPHEGEFASWLGLCPHRRITGGRLLSSRTRKVRQRLARALRMAAESLHHSQSWLGEFYRRMRAQHGAPKAITITAHKLARIIYHLLKARRPYDESVFAREQQRHCRRTQARLQRQAKALGFQLVPIDAPTT

SEQ ID NO: 421825 - protein, 399 aa, unidentified
MQSKAALKFLARCYSAVGQKQWDGLLLTLRHRNVPDWIVKFIKRKKSQSQEEKESVMKLSRVGVDLAKNVYQLHGVDRHGKMVWKRRLRRSRWLQALLDKTDPGCEIGMEACTGAHHWARELQARGYTVRLIAPQFVKPYVKSNKNDANDAEAICEAMGRPHMRFVTVKSVEQQDIQATHRVRTELKDHRNAKANQIRGLVAEYGLVAPQTLLALRRAIPEWLEDAENGLTDNFRCLLHGLWDDLFTLDDRLKELDKEIEKLARSNEVTQRLQQLRGVGPLVATALVATVGTGEQFSKGRQMAAALGLTPRQSSSGDKRRLFGISKRGDVYLRTLLIHGARAVVSQAKHRHDPLSRWATNIAKRRHPNVAAVALANKTARMAWAMLQNDTDYDPALAVG

SEQ ID NO: 421826 - protein, 400 aa, unidentified
MLSIGIDVSKGKSTVCGMKPGGEIVYTPFEIQHTREGMSELVSLLHNSCEEVRVVLESTGSYHCPVVAALLENGIFVSVVNSLRMKRFCSQSIRKVKTDRIDAMQIALYGLAYWQELQPTRLPEDTYRELQLLARQYYQMTSMLIKAKVDFNAICDQVLPGMQELMSDHAGRHKLSDFVLRYHHTTHILEMGETRFRKDYCKWAEKKGYRNCERMAALIFATAQNGIPVLPNAPSTQIVITEAIRVLHTVEASRDAILTQMQALAKTLPEYSLVREMPCIGDTLAPRLIAEIGDVRRFHSKRALIAYAGIDAPPYQSGKFCANNRHISKRGNRYLRKTGYEVMQSYVMHKPANDPIFTFIEKKRSEGKCGKLAMVAGLNKFLRVYYGKVTELYRSLPAIE

SEQ ID NO: 421827 - protein, 355 aa, unidentified
MNDAKYIGMDVHQATISVAVRDSRGNLVMEAILETKAETILQFIGGLRGSLYVAFEEGTWAAWLHDLLQPHVVRVLASDPRKNALLKAGNKSDRIDARKLSELLYLNKLSPVYHGEQGIRTLKELARSYITITRDLTRVMSRVKAIYRSWAIPCSGKQVYAPRYRAEWLAKISEAGVRRRAELYYQQFDALAALRQGTRRELLAEARKHPAMRLLRQIPSIGPIRAALLIALMQTPNRFRTKRQLWAYCGLALRTYTSGEYRFVGGQLKRSKKVLAVRGLNINHNHDLKNIFKGAATRAASTVGPFQDFYQVCVARGVKPHLARLTLARKIAATTLLVWKKGVRFDAEHLKQQAA

SEQ ID NO: 421828 - protein, 339 aa, unidentified
MKYVGADYHKEFVTICIQGSRGKVQEIFELPATCDGMDELIRKMEGDNWMIMGETSGYSVNLHNYLLANGINSKLVDPANLKLITASDKKTDRNDATVIATFLRLMDKGEISLSISYIVDGDQRDLRDLCRYREIAAKLKGQCHQRISAHMRIHEQHLEDDYDNLHTYKCQLMMRKAFSDDFVLMSLLDDYVYWMNRCDSIDRMFDESVYQTREVKLLMTIPGIGSLTAVQIMSMIVSIDRFQTADKMRAYFGMAPSVRDSGGKEKHGHITRKVDSMMRSILGRTLNQFIMHAKDSSVMRYYDSHVDSTGKKKARIATMNKILDIIFAVLKRGTPYVYR

SEQ ID NO: 421829 - protein, 428 aa, unidentified
MNIEDTIRRDQFCQIKSEIRGCADYLVIGIDVAKDKHHAFMGTATGKSLLRKLVFENNLQGFCELLERSEAVRAQNALSKVVFGLEPTGNYHKPLGAHLIGCGCHVVLVTGKAVVNNRELLDGRWDKNDTKDAANIADLVSRGKCFYYDYPSSRINELRQSLSLRRRLKKEEHSLRMRIRNNLLAQYFPELDGFYSACESETLAIVRWCLDPARIAGMKFDAFFSMVTGSRRGIAQKLRLQKIHRLAHESVGCTMGAAAAFEAVLLVDKLQAVREQLKQVANQMEDICQQFAEYSYLLSIPGFGPYVAARVLASIANPWRFDSSSQVIKMAGYDLGANRSGQGSDKAVPVISKRGNAELRYALYQSAHVASTRNGDFIGYFTRMLDGRQRERGIKTKMKVKLAAKMLKIAWTLMKKREAFDPEYLNLE

SEQ ID NO: 421830 - protein, 416 aa, unidentified
MPQFAALIGLDWGDAQHALALLDPATGQVETSTLVHSAEELTVWLQKLRQRFGGRAVALALETSKGPLIHLLVDAPWVTVYPIHPATSARYRKAFAPSGAKDDAPDALVLLDLLRHHSHRLRPLVWQDAATRQLGALCELRRKSVDQRTHLTNQMRSLLKAYFPQALLLVGEVLHSPLALDFLSRWPDLISLKASKASTVRAFYYGHSVRRPETVQTRLELIARAVALTTDPAIVSVHVRHLQRLIQQVRVLQKHIAADEKEIAQQFKSHPDAELFANLPGAGPALAPRLLVGFGSDRACYANAAEFQRYSGVAPVKEKSGGRVWIHWRWNAPGFLRQSLIEWAGQSTLYCPWAKAYYDQQRAKGKRHWASVRALAFKWVRILWKCWKTHTPYNEAVYLQALAKRKSPLLPQSHAN

SEQ ID NO: 421831 - protein, 460 aa, unidentified
MSLTGLVSQNSQEDVVVQGSGLSRGDKRRNAKLARLRELVPTDNAILGIDLADEKQAIVLTDHDSQVLARTRVKAKAWRLGPVLRWGREQARKHGFADVTVGCEPTGHRWRVLDQLAAQQNMVLVCVQPLLTGRARESEDYTRDKRDDKDAVLIARLVAQLDCYAPERTDETWARLRHLGARRDRLISESTACVQQLRDLLECAWPAVLSAAAQPFDSVNWCAALAVVLERCNGDPRRLARLGPQGFEAAVRRELPRWGGQRAWRRIITAVFTALTDAAGVFAQRRGALERARWVLADWRTCQARLAEVETRMVEVLDELGLTEYLTSIPGISAVGAAAILAETGDPTRFDSPRALVKHAGLCPRENTSGTYTGQSRISRRGRPRLRLAAWRAVWGALPNNPVMAARYQHLTTRERNQLNDGQARAAIAAALLRWIHVIVTRRVTWDAALAGANELPAAA

SEQ ID NO: 421832 - protein, 400 aa, unidentified
MDPMIRVGVDVGCKTHQVGIAGPDGTLLEEFSIPHTQEGFTEFFTRIEHHRRKLGLPVAVAMEGYNGHARPLDRMIVEKGYRLYNVNNLKLARFREIFPGPAKTDSLDVRKILELFHLKDHLPMAKDVLQEVPEVPKENEKLKRLTRRRRQLVNEKVRVMKRMQADLQAVCPELLGLTRKVDNLWFLRFLASCDDLEELAQLATEEIREIPGIGVKYAGIIREWQKGAKFSAEVEYVGPMIVADARRVLELLEEIAVLKGAIEELCEESELARRLRSMPGFGTISAAELAGEIGTLNRFSSEASLALYLGMCPLDKQSGQLHGTRSPRQVNKRAKAAMMTAVAHHIWEVPESRAYYERKRAEGKRHNQAVRSLGRHLVRVIWSMIKQGRDYELGEVECLT

SEQ ID NO: 421833 - protein, 347 aa, unidentified
MLHAGLDLSRKKVDVCLLSETGEHLDQLAAPPDADSLRRLARRIEQVHHQPVCAVIESMTGARMVHDTLEAEGWAVEIADAQKVKGLAPLACKTDKIDSQVLATLSQRDLVPAIWLPDPRVREERELARFRLHLVKHRSMLKHRVHSSLVNFGRPCPVSDLFGVEGRKLLERLEVPEPWRGNITASVLLIDDLEGQIAEANRRLRQGHADHPYVPLLMSAPGIGWVLAFTIAAEIGEIERFSSPEKLTGYTGLCPRVVQSGDSDRRGPLSKHGPRYLRWALLEGTMHALRHPAYAERYQRTKRRLGKQRGAKVAQIDIARRLAHAIWHMLSRNQPFAPRGTAFRLAA

SEQ ID NO: 421834 - protein, 353 aa, unidentified
MSKHTRIWTVGIDVGDRSSFYCLLDERGEIAAEGQFRSTKEGLRQQFGAMQPALIALEAGGHSRWMSELLGELGHEVIVANPHRLRLLTESDRKNDKQDARTLAEVAFARPALLAPIQHRSAEAQADLNIIRARDLLVEARTKLINGVRSLVKGVGGRIPRCASERFTTMANTHLPDGIRPAAAPLLEAIDELSERIQCMDETVEHLAQTRYPRTALLKQIAGVGSLSALAFVLTIGDAERFRRSRDVGCWLGLRPKQKDSGSCTPQLRITKAGDQYLRRIMVSCAHYIVGPFGPDTDLRRWGLKLSERGGRNAKKRAVVAVARKLAVLLHRLWVTGEAYEPLRNAKLTTVAA

SEQ ID NO: 421835 - protein, 346 aa, unidentified
MEHYVGLDVSLKLTAICIVDRTGKIEREGVVASDPETIAAFIKSHAPHVARVGLETGATSTWLWTELSKLGLPVICIDARHAKAALKLQINKSDRNDAVGIARIMQCGWYKEVRVKDLDSHAIKALLVSRALLVKIKRDIENQVRGLLKNLGLVIGQAKMNVFAVRAAELADARPELAAAVEPLLKAREAIGRQIADLDRKVMRLARNDAQVRRFMTAPGVGPITALCFLATIDDPTRFKRSRSVGAYAGLTTRRYASGEIDWTGRISKCGDKMLRSYLYEAANVLLTRVVKWSALKAWGIRLAKRSGIRKAKVAVARKLAVILHRMWIEGTEFNWSSKEATNQPA

SEQ ID NO: 421836 - protein, 320 aa, unidentified
MSGYIGIDVAKSELVMAISGIDGVRSFPNSEHGHAEVTKWLKKLDAPPVLIVLEATGGYERGITAALGNAKLPVVVVNPRQVRDFARGMGKLAKTDKLDAAVLAEFAARVRPEVRELPTEEQEDLRELLIRRDQLKQMLLAENTRLLQAAGKRYHRRRKEIKSHVSDLEKRMRMLESDLDDTLRRSSLWREHDDLLQSAPGIGKQTARSMIGFLPELGTVNAAQIASLVGLAPRNRDSGMMRGQRHIGGGRSRLRATLYMATLAAIRTDPVVKGWYEHLLAAGKPKKVAIIACMRKLLVILNAMTKTNTRWQPQTQPLPA

SEQ ID NO: 421837 - protein, 359 aa, unidentified
MQRNKISFKGQKIYIGIDVHAKTWEICVLTESGYKERHPQQASAKTLFDFLKKHFPDGEYHAVYESGFSGFSTYYALKEYGIDCVVTHAADVPTTQYEEVMKTDKVDAAKLARSLRVGDIRPIYIREKENIDDRSVIRIRKTIQKQLSGYKARVKHLLHCNGVEIPERFVRPGTHWSRAFIKWLKEDVVLLSSSRLSLDLLVKQVETIRQTLLDATKSIRRLAQTDRYRNNYELLMSIPGIGVSVAMCILTEIYDVKRFRNENQFASYLGLIPTCHSSGEKTASGEKTFRGNKHLGPMIIEAAWIAIYRDYGLGMAYARYKQSMKPQEAIVKIARKMSNIIFSVLKNSRKYEPYRWDKE

SEQ ID NO: 421838 - protein, 353 aa, unidentified
MTILGGLDIHRGQVTFDYVDTRSGEVFGGQIADPHRHRFREWLDGLPDRDCEFVMEGCTGWRYLVEELEAAGMRARVADPAEAAALKGKKKRAKTDRADAKHLRMLLVDDRVPDSWIAPAHVDEVRALGRLYLDLRNCRASWNQRVHATLFHHGAPRVSAELFTEAGQSQARTYGAELPEVNRHAIETSLTMISSVSTEMVTTRKRLQWIGRHQIGARAIGAVYGIGELTGAVTWAELGDVSRFRSSSQAVRHSGLDITVYESDANRAPGRITRQGPPALRWALFEAAMSATKPASPDHPYYQQVSKRVHHKAAVLSVARKHARRCYHILKDLGPDALAEPNPPRATPPPLHT

SEQ ID NO: 421839 - protein, 353 aa, unidentified
MRKMQDYILKGKHIFVGLEDSKKSWKLCVRSEGMAVHETSMPTDYENLRTYLQGRYPGCKVKLMYEAGFGGFWLHDLLMADGIECMVTPAHLVTQEKVNKVKTDRVDARRLALNLENGDYRTCHVPDRERREDRQLVRTLSQIQRVITATKNRIRKFLDFHGLNEGLPSGKWNDGYYKRLQEMSLSVPLQLCLDVYLRMLESLEGYRKELKASLRQLCRKERYRESVKSKQSLPGVGWLSAIRFTLEWGDLSRFPGGKEFSSFTGLTSSEYSSGESVHRGRITGQGSRQVRAWLIQSSWRAIKLDPVLLSKYRAVRRNSGSKKKAIVAVARKLAVRMRAVELSGQLYCSGVIE

SEQ ID NO: 421840 - protein, 337 aa, unidentified
MQISTIGLDLAKHVFQVHGVDAAGNVLVKKRLRRSQMTAFFARLPPCLVGMEACATAHFWARELRALGHEVRLMPPQYVKAYVKRGKNDAADAAAICEAVTRPSMRFVAVKTEQQQAALTVHRARELLVRQRTQLSNAVRGHLAEFGLIEAKGPWHVTRLLARLAEEGAGVPELARRVIELLAGQLAEVGRRIDALEAEIAARHKADPVSRRLATIPGIGPLIATALAATVPDPAAFRSGREFAGWLGLVPRQNSTGGRQRLGRISRQGDSYIRRLLIIGAQSVLRGSKTARSDPWLQGLLARRPRLVVAVALANKTARIAWAVMARQEVYRQAVPA

SEQ ID NO: 421841 - protein, 410 aa, unidentified
MTDASIAQTEPVLVAIDIAKSRHEVLLSIPGRKRRRRLTVLNQLDDFNRLIALLRDYGRPVRVAFEATGNYHRALAYRLGSAGFEVKLVSSVSLARTREALNNSWDKNDPKDAQVILHMMQIGNEQFYHDPVLCGTNDLQELSKTHDIVSRSKTELWHRVLTHYLPLYFPEAERFHRSSRSDWFFAFLERYPSPHFISAMSQEAFIADAWEVVGRKVSKERLLADIYETAKTSVGLPIAPDSDAAKMFRMVLAEGRSLIAQRNQIEGLAEALLKENADYTLLTSIPGIGAINALTILAEAGDLRRFQHHRQFLKFCGMDLATIQSGTFRGQTKLSKYGNARLRRTLWMAGQVAINQRTNSFRDKFERYIAKDRQNTHLRRKAYTAIAAKMARTIHGIIKRGEPYRPFFEG

SEQ ID NO: 421842 - protein, 349 aa, unidentified
MDATTVAVDLAKNVFELAVADSGGRIRAHHRLSRARLLPFFSNLPHCRVVMEACGSAHHFARRFSELGHDVMLLPAQYVRAYVRRNKTDRAYAAALIEAARCADIHPVPIKSVDQQAIQQLHRLRTQWMRTRTARINLLRGMLREFGIAIALGAVRAIEQVRRQLAAPDGTVPAALQPSLTELLAEIAALEQRCTHIERQLRSLTQHDAVVQQLLGIPGVGPLTATAMRAALVDVHRFPSGRHLASWLGLTVREHSSGERRRLGRINKQGDPYLRTLLIHGARAVLNAAQTARRRGQSLDRLRSWALSTHERCGHNKAAVALANKLARIIWATWKHERTFNANWVPTTA

SEQ ID NO: 421843 - protein, 344 aa, unidentified
MTSMHFIGLDIHKKTISYCVKDVNGKVLSEGIVPATRIQLNEWMRTLPAPWTVAMEATMFTGWIYDHLLPHAAAVKVAHPLMLRAIAAAKKKNDRIDASKICDCLRCDFLPECHMVSTEVRERRRTLRYRKLLVRQNVQLRNKVSQMLMESGVVYNKQKLHKVGYFKELMETNQDIGRALRPLLTICRETIVRIGKTESALIRSLRRDPLLQARVERLMTIPAVGPITALTWVLEVDDVARFHSVKQAVSYCGLCGAERSSAETIKRMPISKQRNKHLQSVLIEAAKLGPRLSPDLALIYDTEKQKGHANRASIAVARKLVAYLLAVDRSGREFVVARERKAAA

SEQ ID NO: 421844 - protein, 335 aa, unidentified
MNQARMHVGVDVGKDSLDICYPNGDKEHIRNTKRCRATLIKKARTLGAVISFEATGPYDEALESECVASGVPAVRLDAWKTRKYAESQGMLEKTDSIDCEMIRDYAASLRPDQLHFVRERSAGYRKLKRAVSVRRNLLKAKALIASQLEGDLDAEIKSAIARAVASIDRQVERMDAVCVAAIRSDERMGAIAARLGQVVGIGPVLISTALASCPDIGSFTSKGIAKFAGVAPLENRSCTITKKPRPRRGCRDLRCALYMAAVSACRSNHRLRRTYEGLVARGIPKRAALIALARHIIVLMNYIAKYPDFNPEVDPKKAAQMALPKRRPGRPRKNP

SEQ ID NO: 421845 - protein, 342 aa, unidentified
MKKMVKQVVGIDVAQKELVVCLGRMYDDWSPELYGSKSFVNNAKGFEALVSWVKKMTDPQVSIRYVMEATGVYHESLCYCLADKGYALSVVLPNKISNYFRTLAVKTITDKTASEAIALFGLERKLDDWKRPEPVYKKLKQLTREREQLVQIRTMAKNQLHAEQSEAEPNKSSIARVQKQIAFLNKQEQEIKAELQELVKQNDQLKSTVKTIGSLPGVGLLTAVTVLAETNGFELIRNKRQLASYAGLDVKEKQSGTSVKGKPRISKKGNRFLRKAMHLPALAAIRHDERFKAIFARLVAKHGIKMKAAVAVQRKLLEMIYTLYKTNKIYDPNYLNIKVESN

SEQ ID NO: 421846 - protein, 344 aa, unidentified
MNEVITIGVDLAKNIFQVHGVDAEGGMVVRRQLRRGQMLAFFKKLPPCLVGMEACATAHHWARQLIGLGHEVRLMPPHYVKPYVKRSKNDATDAAAICEAVTRPTMRFVSVKSMDQQSVLMLHRTRELLVRQRTMLINAIRAHMAEFGIVAPTGVPRIKELLTVIADEEDLRLPPLTRTCLESLVRQYLSLNDEIIAAEQRITRWHRSNEVSQRLETIPGIGQIIASALAATVTDPEVFKSGRELAAWIGLVPRQNSTGGKQRLGKISKQGDQYLRWLLVAGAMSVVRHAKRRGRTDLPWLADIIDRKPTKVAAVALANKNARIVWALLRHGGTYKIPSSVSAE

SEQ ID NO: 421847 - protein, 443 aa, unidentified
MMRVVVRRGAGLDVHKKTVVATRLRVGEDERMAWETKTFGTMTTELLELYDWLQEWECTHVAMESTADYWKPVFNLLEGAFEVVLVNAQHVKHVPGRKTDTKDSEWLAELLAHGLLKASFIPPKPQRELREMTRYRGTLVEERARVVNRVQKLLEGMNIKLASVATDVLGRSGRAMLEALVADQLRPAEMAQLARGRMRTKMPELEKALTGVVGPGQRKLLGLQLAHIDFLDEQVETLSAEIARHVQDMDEPPSQGTSDDDSSAAEERPNGDPLPPLGYAQAVALLDTAPGVDKRVAETVLAELGADMRRFPTPEQAAAWSGIAPGNNESGGKRYSGHVRKGNQSLRSALVQAAWSAVRTKDTYLRARYARLVVRRGKKRAIIAIAHSLLKSIWHMLAYHQPYQDLGGDYFDNRRKESKIDYHLRQLHKLGYFTQVEPQPVAG

SEQ ID NO: 421848 - protein, 336 aa, unidentified
MEYGAIDLHKRYTWIRLVNAEKEVTFERRVPTTRDAFTSAFAGRPRARVLIESATESEWVARTIEACGHEVVVAAPSYGLMYGHRDPRIKTDRRDVLALSEACRLGIYRHAHRVSADQRQRRRALKVREVLVRQRTMLINLLRAELRQEGVRLPTCAAENAGDRYRALTLPTELTTVLSPVVAQLDELNDAIAASTDALTATAAADPIVRRLQTAPGVGPITALTFRAVLDDIGRFEDARSVAAYIGLVPREDSSGERQRKGAITKAGPTNLRSLLVQASWVAWRQKTSGGALHAWVERLASRRGKRIAVVALARRLARILYAMWRDGKDYRVQPA

SEQ ID NO: 421849 - protein, 342 aa, unidentified
MGKFVGLDVSQKTTAICIVDDEGQCVWRGQCASSPGELAKVIKRRAGMEARVGIETGAMTPWLVHELRAHNLNITCIDARHAKAALQMQLNKTDQNDAEGLAQIMRTGWYRVVHVKSFDTHRIRALLGSRLQLVGMATKLSNHIRGVLKTFGLLPGAVRGKPFARKVETLIADQPDIAPMVRPMLAVWLNLREQISAFDKAIRMIVKDSPTCRLLMGVPGIGPITVLAYVSAIEDPTRFSKSRSVAAHLGLTPRQYQSGDIDRRGRISKCGDTRARVCLYEAATVIMTRLKRPVPLKSWAEQLAKRAGPRKARVALARKLAVILHRIWITGELFRWDEQDAL

SEQ ID NO: 421850 - protein, 413 aa, unidentified
MEILYRICCGLDVHKKTVAACLRFLSPTGTRAEEIRTFGTTTRELLRLADWLATAGCTHVAMESTGVYWRPVYQILEGSFELLLVNAQHIKTVPGRKTDVKDCQWIARLLEHGLLRASFVPPTPFRELRELTRYRRQLIEERAREANRIQKVLETANIKLGDVATDVLGASGRAMLKALIAGERDTEKLAALARGLLRKKEAQLREALVGRVTDHHAFMLQGLLSHIEFLDRQIALFDARIEAQTRPFIAALERLDTITGVARRSAEQILAELGDDMSRFPTAAHAASWTGICPGNNESAGKRKSGKTRKGNRWLRATLVECARGAVRARDSYLAAQYHRIARRRGDKKGIVAVGHSILVVAWHLLRNGGSYRDLGHDYFDRLDRDRLVRYHTRRLADLSVVLPSPSPAQATA

SEQ ID NO: 421851 - protein, 390 aa, unidentified
MLKFDGLSHSLTAFEQDSTLVVVIELAASSWTVGGLLPGVPRQPTKKMAADKYALAWQLEDWREEAEAAGHPIKRVCVSMEAGRDGFWLARWLRARGIEAYVIHPTSIPVPREHRRAKTDRLDVGMLLRAFLGWLRGERKHCSMVKIPTREEEDGKRPLREREGLVGERSSLINQLKSLLALHGIRGFKVTMKKAATRLQGLQTEEGLPLPGHILAALERGMARLSLIKTQIADIDRERVRRLKEAPEEGLHPMVWIIAKVKGVGLMTAELLVREILSRPMRDRRAIARYAGLTGSPEESGKRRREQGLAKAGNSRVRHVLIELAWRFLRHQKDSALVQWFFARTQDGRGPTRKVMIVALARKLLIALWELATTGKLPEGVCLHDRPLVA

SEQ ID NO: 421852 - protein, 390 aa, unidentified
MIYVGIDVAKDKHDCCILGPDTEELFQVFTIRNNSDGYGELFHKIESVSKDKSQIKIGLEATGHYSYNILGSLLDHGYHTFVINPLHTNLYRKGQSLRKTKTDKVDARSIAEMLVTDKTLKPYTGTSYHSEELKSLTRYRFELVKERAKLKTSVSRLVNILFPELESLVPTLHMNSVYRLLQELPGAYFIASSNLTHLKALLADASKGHYGREKAIEIRETAKSSIGSLMPAKSMELRQTIRRIDTLTSDIKEVEQSIQKIMDECGSPITTIPGIKYRMGAMILAEIGDFTRFSNADQVLAYAGLSPSTYQSGQLISSYARMEKRGSKYLRYALFNAAIYASVWDERFRLYLSKKRAEGKHYYVAISHVVKKLVRTIFRMEITHTSYQPL

SEQ ID NO: 421853 - protein, 366 aa, unidentified
MHVQGREPVNSLLSLSPLLQTNMTNIQVKNIDHESKPALFAGIDVGAEELILVIRKNGKPFDPQKFANTPSDHTRLVKKLVKLPGIIVCLEATGVYHFDLSLALHDAGVLLMVVNPKAAHNFAKVLMKNSKTDTVDANTLAEYAVRMDFVAWTRPSDEQIALRSFARRINALTSQKAAAKNHLHALNATSETPKAVLKDAKLAITQLEKRIDRLTAEALVLIGKHPELTRILALLVGIKGIGNTSAIALMGELLLLPPDLSHREWVKFAGLDPRAFDSGKSVHKKTRISKAGNRHIRSALYMPALSAKQHDPHVKAYFQHLVDNGKKPLQAVCAIMRKLLHAIHGMLKNNEPFDNTRFYTIPLSAE

SEQ ID NO: 421854 - protein, 348 aa, unidentified
MAGLLRRRLRGKPRRATCRERVIGNSNGGRPWKKVSSFSSDWMCIRTRSAWQSRKRVGRRRLIGNIADDVAKLLKVLARYGEARGVEVVYEAGPTGYGLQRALARRGYQAQVIAPSLIPKRAGDRVKTDRRDSLRLAELARAGELRAVRIPDPADEAIRDLARAREDAINTRTQMRQQFKGFLLRHDVRYSGRSSWSKTYYRWLATLSFGASGAQTAFTEYWQAVSAADERVARLTTALVQSIAGWRFEPVVLALQALRGIDQVSAIGLVAEIGDIARFAHPRQLMSYLGLVPSEASTGERVVRGSITKTGNAHARRGGDQSTDMSLIHRRCIARVASPDRSETWASG

SEQ ID NO: 421855 - protein, 334 aa, unidentified
MNYIGMDIHKQFTVAVAKDRDGNLLAEEKFDNHKCNFENFLKDFCPSETKIVIESSSIWKYIYEILEEMKFEVKLANPTKTRAIAEARIKTDSIDADTLCDLLRANLICESYIPPKEIRNLRNIMRQRKAIVKGRTQIKNKIHGILLMNGIKLPYSTLGKTAMKWIIDEINTTSIKTILVSYINLIEQYDFELKKIEERIIQIASENNNAKLLTSIYGIASIRALELVSEIGDIKRFNSSQKLCSYCGLVPSIKQSGSTLRFGRLVKQSNKSLKSTLIESSWNLIRLKGENPYREFYKKLSKKKGKQKAICAVARKLCCTVYAMLSKNQEFMFL

SEQ ID NO: 421856 - protein, 342 aa, unidentified
MREKRSVGIDLHRRRFTCCVRLEKGRNYLSEWSLEQLPQFIRKLRATDEIAVEVTGNTRLFYEAVAPYVARVVVVDPHQFRVISHSVKKTDPHDARNLALYLAKGLLPEVRMKAKRQAEVASLTQTRDRLVKLRTALKNKVNNLLSARGIELDKESLSSEKGLAWVLEQKLEELAHLELEVIVEQIRSLNRSIARLERVIEEASQKLPGYRNLTSIKGIGSLGAGILLSVIGEVSDFAHEGKLAAYFGIVPRVQDSNETEHRGRITKRGSKLGRTTLVQCALIAKRYSPYLDRYYERIRARRGTGKAIIALARKFLSIVYYTLKNNWIFEDFPNFVLAEAKT

SEQ ID NO: 421857 - protein, 341 aa, unidentified
MKNKSFIGIDISKNVIDASIFCEGTPIKDFPHAVFNNSRKGFGEMCTWLKKNHVVLSNCLFGMEFTGSYSMELEKFLNARNYQFCMLSTHVVKHHPMGPKDKSDKIDSAKIADFLYRYDGTECVKPYKMPDKTMQRLKALTNERKFLVEQRTCFMNRRQLCTTKEDAQLYDGYIKKFSRDIENIELEEQKLLATDDSLLATYKNLLTIPGIGFVNAINVIVITRNFTAFETARQYASYVGVAPHSHTSGTSVKWRPRPSARCDGQAKADLSMAATVAVQYDAELQSFYNRKLGGKQDSDTKRKALNAVKFKLVLRMFAIGKQNRKWEPLDSKSSNEKLAIS

SEQ ID NO: 421858 - protein, 449 aa, unidentified
MKNSDLKTRGLPVINTRAAGIDIGSRFHVVAVPADLAQDPIQTFNVFTADLERMANWLVSLGISTVAMESTGVYWIPVYEILETHGLHVVLANARDARAVPGRKTDVNDAQWIQRLHSCGLLRASFRPDREISALRSYLRLRERHLDYAAAHIQHMQKALTHMNLQLHHVVADVTGVTGMRIIRAIVAGERSPSVLAAMSDTRCKAGIDVIKAALVGNYQPEHTFALSQALTMYDAYQAQLLICDQQIAQVLIKLSQEKVRPSEPLPKPRHKTRQPNALNFDVRTLLYQLVGVDLTQIHGIGPFLALRLVAECGTDLSRWRTCHHFTSWLTLAPGCRISGGKVLSAHTRKTKNRVTAHLRLAAVTVGRTSTALGAFYRRLAARIGKAKAVTATARKIAILFYNAMRFGMNYQDPGADQYEQRYRERVVKGLHRRAAEFGFTLQPTEGVS

SEQ ID NO: 421859 - protein, 337 aa, unidentified
MRLYSGIDLHSNNCVVTVINEEGLTVYEKRIANDIEMIKRVLLPHKESLAGTVVESTYNWYWLVDGLQEANFKVHLANTTAIQQYSGIKNTNDRTDARWLAEMLRLNILPTGYICPVEQRAIRDLARKRLQLVSQRTRNLLSLQTLITRLTSVTMKCNAIKKLTEENLKNIISNPNHYVAARANLRLLQQIDSEEENITNEILRQIKLTPIFQKLTEVPGIGKTLAITIMLETGDINRFPKVGNYASYCRCVGSKKESNGKSKGKNNTKNGNKYLSWAFIEAANFAIRYYPEIKKFYQRKLSKSGGTVAIKAVAHKLARASYHILKNGDIFDMSKAF

SEQ ID NO: 421860 - protein, 393 aa, unidentified
MKNVLFAGIDVSKDTFDITIINKNNKIVMQNKFEMDSSGFNKMSENIDGIQYDDILFVMESTGVYHLNLYFFLIDNNFKTAVVNPLLIYNFAKSISLRKTKTDKKDAETIAAFTLSNFQNIDFSNKANNSIRSISRERDHLAKNVARLKTQIKNVLHVLFPELAKNTNVFSKTMLKLLLKAPGRFPIMKLKTQQITRLFNKSRGNKIQITSRELRNMAINSIGVRDDLLEAVLVLKIKRLLFVFEQIDDLDDILNKFVKDNIQQNFDIVTSIKGIGKTTAEKFLIEIGDINNFKSHNQLRAYIGTDPSIKQSGSSINVTGRISKRGNAYLRKTIWQMAVGTIRCNQKFNDYFNKKMREGKKYKQAVIAVANKLIKTLYALLKNKTLFDPNYSR

SEQ ID NO: 421861 - protein, 421 aa, unidentified
MIPAVIENCAGIDVGRKFVVVCVMCGDAHATPTLEVRKFSMLTEGLEQLRVWLHQSECTHVVMESTGSYWKPIFNILDDGQLEVVLANSQQVKNLRGHKTDPNDARWLAHLLRHGMIRPSFIPDRDTRELRDLTRRRKKLVECAAEERNRVQRVLQEANIQLGMVLSDVFGESGLNMLDALMNPDASPQQIADLAVRTARKKIPEIRKALEGHRMTEHHRRLIRHSMEHLAFLEEQIAELDREIDDHTNSRPALKSATELVKSVPGIQQTSAAALVAETGADMGHFPSGGKLASWIGICPGNNESAGKRKSGQTRKGNPWAKRVLVECAWSASRKKDSETKRYYERVKPRLKHKRALVATAHLMTLKVYAALSTGQPYQVDQQPELTAAKLRRLVRHHTHRLRSLNKWLQGHKKRCGQAQH

SEQ ID NO: 421862 - protein, 319 aa, unidentified
MERYLGIDPHRDSCTLALVSTRGKKVRELVVPTEGSELVKTVRELQGPLHVCVEEGEWGEWISEILTPWVARLVVCRPQARRGPKSDAVDARELAERLRTNRTGPPVYKPSSEWARLQEAVRLESKLTQDLTRTKLRLSSLYRRRGLTCLNAEIYLPRHRGKWVAQLPPSGRPCAQLWGEQIDLLAELHEKAQQQMYAAAAKFPIWRTLQTAPGIGEKRAAILLATVVTPHRFRTKRQFWSYCGLGLVTRSTSDWVSQPGGWVRAPVIQTRGLNRASNRPLKAVFKGAALSARMMLAPNPFAITTTGCSKPGRSRTWRS

SEQ ID NO: 421863 - protein, 358 aa, unidentified
MAVNQGTRRIVGGVDTHKDLHVAAVVDEQDRVIGTRSFATTHQGYRQMLAWMRAFGDLQRIGVESTGSYGAGLLRFMQQAGIAVLEVTTPDKQDRRRRGKNDDLDARNAAHAAFAGQRTVTPRSRDGMIESLRVLMACRKTAVSARRVALQMIQNTIVCAPDSIRDQLRSLTRMQLVRTLAAWRPDLTAYRDLDSAYRIGLKSLARRYLELHDEIADLDVMIAAIVDELAPNLVARNSIGHVGAAQLLLTAGDNPERLRSEASFASLCGVSPVPASSGKTVRHRLNRGGDRAANSALHIIAIGRLRTDQRTKDYVTRRIAEGHSKLDAIRALKRYLAREVFTLITQRRREINATRIAA

SEQ ID NO: 421864 - protein, 401 aa, unidentified
MIGTRARVWAGIDIGKTHHWICVVDRDGRRVLSMKVANLEADLTAAMTRVGDVADEVVWAVDIIGSPSALILALLTRAGHPVCYASGRVVNTMSTAYSGEGKTDAKDAYVIAETVRQRRDLPTVDPIGDSARDLALLTGHRGDLIADRVRMINRLRDVLTSVFPPLETAFDYSSCKGALILVTEYSNPQRLRRLGAARLAQWLRTRHVRDAAKVADRAVAAAHAQTVQLPGQDVATAIIADLAGHLLTLEHRVKELDTQIAAVFRTHDHAAAIESMPGFGPILGAQLLVAAGDLTTFPSAGHLAAAAGLVPVPNDSGRRSGNLHKPRRYSRPLRHAFYLSAQTAMMREGPNRDYYLKKRAGGRTHTQALIALARRRIDVLWALLRDHRTYTAIPPMAAHAA

SEQ ID NO: 421865 - protein, 343 aa, unidentified
MEEYIGLDVSMKETVVSIRREGKRIWRGRCASDPKVIADLVRKRAPVAKRVVFETGPLSVWFYHVLCAEGLPAICIDARHAKAALDMAANKTDANDADGLAELAEVGFFREVRVKGFDSMLTRTLVMARTRLVRVTTELSNQIRGIMKTFGLVVPAGKGSTFEKNVRALLVDQNGLAPIVLPLLEAWRNLRIRAAELGRQLIAGARQSQACRVLMSIPGVGTITAISFATAVEDPANFKKSRSVGAWLGLTTRRYQSGQVDYDGHISRRGDHHLRGLLYEAATVILTRSSADSTLRAWGVKLRERVGFKRAAVAVARKLAVMMHAMLKTGELFDKSAGAAAAN

SEQ ID NO: 421866 - protein, 395 aa, unidentified
MFIVGIDVAKRSHEVCMITSDGQTVQRPFSIRNNCTGYNLMLEKIRKHTNIKSQIVFAMESTAHYWLALFTRLRKDGYHVILLNPIQTSAMRDMFIRKIKTDAKDSFIIAELIRFGRYAESNVAQDRLLALKELCRNRFYLVDMAGDLKRKLVALIDRVFPEYEAQFDTIFCKSSVALLKKYPTPQKLSNAHLDKLTELLWNSSNGHFGEWKARELKELARNSFGVEDCDGAYSTLILLMLDQIQSLSGKADALEKEISRLFQSFDTTVTTIPGVGPIIGAVILSEVGDISRFSSADKLAAYIGVDPSVNQSGEFQAVHAHMSKRGSPYLRRCIWMASQVAVQRDPMFRAYYEKKAAEWLKYMTIIGHVTRKMTAVVFAILRDHKVYEPVLPTAA

SEQ ID NO: 421867 - protein, 403 aa, unidentified
MNAVGIDVSKGKSVVAILRPFGEVMYSPFEIRHTSSDIHSLIRLINSMEGESRIVMEHTGRYYEALAHQLSDANLFVSAVNPKLIKDFDNNSLRKVKTDKADSIKIARYALDKWQFLEQYSVMDEIRNQLKTMNRQFGFYMKHKTAMKNNLIAILDQTYPGVNTYFDSPARSDGSQKWVDFAATYWHVDCVRKMSLNAFADHYQNWCKRKKYSFSRSKAEEIYRKSKEIVPVLPKDEITKLIIKQAVEQVRNASATVEELRAFMNETASKLPEYPIVMGMNGVGTSLGPQLMAEIGDVRRFTHKGAITAFAGVDPGVNESGSYEQKSVPISKRGSGELRKTLFQVMDVLLKSMPQEDPVYQFVDKKRAQGKPYYVYMTAGANKFLRIYYGRVKEYLATLPDLN

SEQ ID NO: 421868 - protein, 355 aa, unidentified
MSQEKYIGMDVHQATISVAVMDAGGKLIMECLLETKAATIVEFMEGLHGTLWLTFEEGTSAAWLHDLLKPHISRLVVCDPRKNALLKDGNKSDRIDARKLAELLRTNQVKPVYHGEHGVRTLKELGRSYLTITKDVTRVMNRIKALYRSWAIPCAGATVYAPRHRAEWLAKIVEPGVRVRAERLYQQLDGLQPVRLEARRELLLESHKHSAVKLLRQIPSIGPIRAALLVALLQTPHRFRTKRQLWAYSGFAVETHDSGEYRYVRGKLQRNRERFTVRGLNDNHNNDVKNLFKSAAISASTRPGPLHDFYVARVEKGIRPTMARLTLARKIAAISLTIWKKGVDFDAQQLHRQTA

SEQ ID NO: 421869 - protein, 323 aa, unidentified
MLTRASGVQMTNAAGIFVGIDVSKARLDVAVHEPATSWQADNTDRGIAELVDRLQELQPRLILLEATGGFELPLVAALMHARLPVVVSNPRRVRDFARSTGQLAKTDRLDAQMLAYMAAVLRPEPRPLPSDAEEQLTALLTRRQQILDMLTVEKNRLHTVRATMRQDIQEHLTWLKQKLAKLDEEIDHFVQSSSIWKEKDAILRSTPGVGRVTSSTLLGRLPELGTLNRQEIAALVGVAPLNRDSGKKRGKRRIFGGRAAVRRVLYMAALVATQCNPRIKRFYEHLLKQGKEKKVALTACMRKLLVILNAMMRTKQYWRSELA

SEQ ID NO: 421870 - protein, 347 aa, unidentified
MDQIIRIGMDTSKHIFQLHGVNAAEAPVLRKKLPRKSMVAFFEKLEPTVIAIEACGASHHWARLLQSFGHEVKLIPAQMAKPYVKRGKNDAADAEALCEAMSRPTMRFVPVKTTEQQAALMLIGVRDRLIRRRTQLANAIRGYAAEFGLTAARGIAHLAPLLARLEADESLPILARELFAIQAQEYAQLQERINAVEIKLMAWHRADERSRRLAQIPGVGPIGAVLLAMKTPAPELFRSGRQFAAWIGLTPKDHSTGGKLRLGVITRAGDEALRTTLIVGATALLQQVRNGRGSNASPWLLDLLKRKPPKLAAVALANKMARIAWKLMVTGQRYTTNPASAAMSGAA

SEQ ID NO: 421871 - protein, 355 aa, unidentified
MMNDKQVKVYGGIDTHADTHHLAVIDQAGRRLADAQIPTTATGYQAALRFLGSWPGLVSVGIECTGSYGAAVTRAVREAGITVFEVNRPNRFDRRLHGKSDPFDAYSAAEAVLGGRASAAPKGGDGLVESLRVLRTSRSSALQARTATINQIKGMLITAPEDLRTRYKGLSTPKLIAALAASRPTPTPVTAAEATAYSLRLLARRWQALTGQIEDLAGHLQRLLDDHAPDLMRVFGCGQDTIAQLLITAGDNPDRLRSEAAFAALAGVCPIPASSGKTKRHRLNRAGDRQANSALYHIVMVRLRYNQETQDYVARRTAEGKTKMEIIRCLKRYLVRQLYPLIVETLHPRKEVAVA

SEQ ID NO: 421872 - protein, 415 aa, unidentified
MALKIVYQICCGIDVHKTFVVTCIASTNKQGVTTYKRHRFSTFTQGLKELLQWLLDNHCKDVCMESTGKYWIPIYNVLEKDCNIVLAHPKYVKAIRGKKTDKKDAKWIADLFKHDLVAGSFMPPADIRQLRDLMRYRFKLTCFMSSEKNRLQNCLTVSNIQLASVVSDTFGKSSQRILDKILENPDDTSFDIESLIHGSMKKKLPELELAIDGFITPEQAGKLKVIKKHFEDLESRKAELEKLILALASPYQQELDLILTAPSFKNKFTAIGIISEIGVNMEAFPSAKHLCSWAGLTPTNNESAGKKKSVRVSKAGCYIKPLLVQCANAVVKSTKHPEMRNRYLRLKKRRGHKKAIIAIARMLLTALYNMLKNKEPYNAELYRKSDVLPVNREITIEQAILMAQFQGYKIKSAAE

SEQ ID NO: 421873 - protein, 343 aa, unidentified
MQVIIGIDPHKATHTAVAVNGSEDEISRLKIRATRDQVAKLMTWAAPFPSRLWAVEGAEGLGFLLAQQLVTAGETVVDVPATLAARTRVLGSGRSNKNDPNDAMSVAVTALRSRDLRRVQSVGNSEVLRLLSKRNADIGRQRSRVVSRLHALLVELAPGGIAREINVSAAAAFLANIAPSSAVEQIRYDLARDLIDDICRLDAQLKESHKRITSAVRASSTTLTDLFGVGPMIAAAVIGNVGDVRRFRNRDHFAAYTGTAPVEYSSGGRTVHRLSRRGNRTLNSAIHMAAVTQLRHKHSVGRVYFDRKVADGKTKREALRSLKRHVSNAVYRQLVADADRIGR

SEQ ID NO: 421874 - protein, 349 aa, unidentified
MSEYIALDSHRRYSWVDREDHSGKNRSHRLDHAPGAVRTYLSRCAPGTPVAVEATGNWYWIVEEIEQAHCEPRLVHARKAKLMMGLINKTDRLDARGLNRLQRNGTLPTVWIPPGPLRDLRELTRSRLMLTAERTRLKNRISATLAKYGIPPSERSDRFSRRGREELIQDLQRLPEQTRWVSDQLLAQLDFVSGQISQLEQRLEQLVEISESMQRLMTLPGVAEILGATIALEIGEVSRFPSAAHLASYAGTTPRVHASGGKVRYGPVRNDVNRYLKWAFAEAANSVAVNHRRHPERHVSQLYQRVRRKGHAKAVGAVARHLAESAFHVLSKQQAYRDPLLDRGCTNPG

SEQ ID NO: 421875 - protein, 424 aa, unidentified
MKNNAANKRKQVPTGYLVIGVDPHKKKHAAVFMTQDFTTHNKLKFDNSRAGFEMVLERARTEMLKTDCRGVIFAIETGAHHWRNLAYFLDEKGIPLRLINQYTLKRRREGKDLNHRKNDYRDSEVAAELLCTGEFNAARLSQGVYAELRGAYGSYRRLVKEKTRTVNLVKSLLDGLFPEFTQVFKDPCGQTAASVLCTCAVPRAIADMTEPEFIDTIKAACQGRIMKGKLQSLRHAAMTSIGIEAGARSVSFEIAFLIEKLRLLEQQRRHINETMAILVNETREGKYLLSIVGLNYVSVAGILAELGSFSSYQNAKQMIKMAGSNPTESESGGKRHSHTPISKQGRPVLRHCAWTAVIPMLRFNSDFRDWAKKLRERPAGANPLSGREVMVAGVNKLLRLSFALVKKQAFYRMPAPQPVEIAAI

SEQ ID NO: 421876 - protein, 317 aa, unidentified
MSESFVGIDVSKEKFDVHVRPSDHSRTFRYDEEGLEQLVAVLQIVQPRIETIVLEATGGYERRLVAVLLAAQLPVVVINPQRVRHFAKATGQLAKTDSIDASILSLFGQTLRPQPREVPDKSLEDVRDLLARRRQIVSMITAEKNRLSTAVRKSIRREIQDHIHWLIKRLKSTDDELHRHIQSSATWKAKDDLLQGVPGVGPVSSSSLLIQLPELGTLNRRQIAALVGVAPINQDSGRFKGHRITQGGRTSTRSALYMCTLVATQHNAVIRHFYRRLVQSGKPKMLALIASMRKLLTILNSMLKHNRTWDDSYAKIS

SEQ ID NO: 421877 - protein, 402 aa, unidentified
MAYDFVIGVDVGKYFHHACVLDPQGRQVLSKRINQHEGSLRKLFGQFLADDASVLVIVDQPNNIGRLTVAVAQDMGVDVRYLPGLAMRQLSRIHVGNSKTDVRDAYVIAHAGLNLPDSLRSVDRVEDVFIQLKVLNGIDEDLARAYTRLINQMRSALVGTYPAFEHVLRGQMIHRKWILHLLAKYGGPTKIRRIGRTRLTAFARKHRARNPEPVIDAMLAAIHEQTVSIAGAEYAELGVTMSATDALAKLEHRKEIEAQVLKLIQDIPQTEILLSMPGIGPRSAAQILMTVGDMSDFPDAAHLASYAGLSPRTNQSGTSIMSNSPNRAGNKKLKNALWQSSFASIRFHERSRQFYERKRKEGKRHNAAVVALARRRLNVLFAMMRNGELYRDISTVQEAAAA

SEQ ID NO: 421878 - protein, 358 aa, unidentified
MQRNKISFKGQNIFIGIDVHARTWEVAVLTESGFAKRYSQASSAKVLFDFLRRNFPDGEYHAVYESGFSGFSTYYALKEYNIDCVVTHAADVPTTQYEELMKTDKVDALKLARSLRADEIRPIYIRERENIDDRSVLRIRKTIQTQLGGYKSRVKHMLHSNGVEMPERFAKHGTHWTRVFIKWLKEDVTLLSPTRKSLDLLIMQVETLRSTLLTATREVRKLALLDRYKDNYELLKGIPGIGTIVAMSILTEIYDVTRFKNERQFASYLGLIPTSHSSGDKESHGEKTFRGNKQLGPMIIETCWIAISRDYGLGQAYVAYKRKMNPQEAIIKIARKMSNIIFSVLKNKRKYEPYHWEI

SEQ ID NO: 421879 - protein, 338 aa, unidentified
METYAGIDLHSSNNFTAVIGDQDQRLYGKRLPNRLDTVLAALEPFKDSLGGVVVESTFNWYWLVDGLKEHGYKLHLANPSAIKQYEGLKHTDDKWDSFWLAHMLRLNILPEGYIYPKDKRPVRDLLRRRLLFVRHRTAHILSLQSMISRNLGVSMSCRAIKRLDGEAAQSLFDSPHLLLAAKSNIAVIHFLNEKIKIIEQSVKAHIILQDEFQHLLTVPGIGDILALTIMVEVGDIHRFPKVGDYSSYCRCVKSERLSNGKKKNENNRKNGNRYLSWAYGEAAHFAIRFSPYAQAFYQKKMAKSNRVVAIKALSNKLARASYYIIRDQVPYDAKKLFT

SEQ ID NO: 421880 - protein, 343 aa, unidentified
MQVTTLGIDLAKNVFQVHGIDDHGKVILKKQLKRAQMAPYFINLPPCLIGIEACGSAHHWARKLQAMGHTVRLMAPQFVKPYVKTNKNDLADAEAICEAVGRPNMRFVPIKNVEQQAVLALHRVRQGFVKARTAQGNQIRGLLAEFGIIIPQGINNIGSRVPELIEDASNELPGSFRVLVQRLLDHLKELDRQVDELEAQIQAWHLSDLSTKIAQVPGIGPISASALIASIGDAKNFDNRRQLAAWLGLVPKQHSTGGKSNLLSISKRGDTYLRTLLIHGARSVIYHAAKKPESCNWVSAVVNRRNKNVAAVALANKNARIVWALLAHDRRYETGYTRAIEQT

SEQ ID NO: 421881 - protein, 401 aa, unidentified
MQDTQQHDAVDVFVGVDVGKGQHHAVALDRNGKRLYNKGLPNDEAKLRALIAELKTHGQLLFVVDQPSTIGALPVAVARDEGVLVAYLPGLAMRRIADLHAGEAKTDARDAAIIAEAARSMPHTLRSLRLADEQLAELTMLCGFDDDLAAQVTQTSNRIRGLLTQIHPALERVLGPRLDHPAVLDLLERYPSPASLAAASEKTLANRLTKLAPRMGKSLAAEIVQALSEQAVTVPGTQAATIVMPRLAQQLAALRKQRDEVAAEVERLVLAHPLWPVLTSMPGVGVRTAARLLTEVAHKAFASAAHLAAYAGLAPVTRRSGSSIRGEHPSRRGNKVLKRALFLSAFAALRDPISRDYYARKIQQGKRHNQALIALARRRCDVLFAMLRDGTFYQPKAAPNA

SEQ ID NO: 421882 - protein, 358 aa, unidentified
MKYVGIDVHKKMCQVAVLDEDGELLDEIRFRNDAEGIEDFAMKLTTFRDEVKAVVESTGNLWIQIHDRLEAHGFNVALSNPYKTRLIAEAKVKTDKVDARTLARLLRADMLSTCYVPDEEQRSRRELLRHRLKLVKTRTEVKNRIHSLLDKHGLRMPHPTPFSKKNIAWLKEQSLGFMDDAILRSDLAILEAIDEQVGFMEEKIAALAVDEPRVRLLMTMTGVGYFTAMLIIAEICTMDRFSGDKRFSSWMGLAPSVHQSGERIRIGGVGGPGNRRLRWVMVQCAHTARQHDPRLRGLYERYSRRKGEKSAVVAVAHEMARIIYYMLKRNEPYRGQNKGLTERKLKAMERRALRGLRN

SEQ ID NO: 421883 - protein, 339 aa, unidentified
MGLYAGIDLHGKNHVLIIINQMDEWVHKTRLSNNINLTLDVLQRFKNKLKAIAVESTYNWYWLVDGLRKNGYNVKLAHPAAFERYDGIKYTNDYSDAFYLAQLLRKGDLPEGNIMNIKRRQIRDLLRKRVMLVQERTKHKLSLQSLIARNSGRMIPMKKVEKMTRSDIDDLFKNEFLRMNATTNINMINNINKELGPIEKKLFSILKITKDFELIQTVNGIGKILAATIILETGDINRFNQVGNYSSYCRLVKSERRSNGRKKGTNNHKNGNKYLCWAYVEAATFMIRNNEKARKFYQRKKAKTNKIVGKKALANKIARACFYILRDKVEFDDKKLFGA

SEQ ID NO: 421884 - protein, 409 aa, unidentified
MPDVTPCLHPGQVRRWISFDHHKFSIVAAVLPPDGGRPEVLRIETTEKAIRRFIDKQGGPEGLSVCYEAGPGGFALWRLLTRIGVACDVVVPSLIPTRAGDRVKTDRRDAKKLVSLYRAGMLRFVHPATPELEGLRDLLRARDDLRSARLAARHRVLKQLLRHGRIYREGRTAWTKAHRAWVSRQKLEDALAQEALEQLLICLDGVERQLDLLDARLAEIAGRERWAGQVEILTRFRGIATLTALGLIAEIGDFSRFAHPRELASWLGITPSEYSSGDQQHRGHITLAGNQHARRLLIEAAWHYRHAPRRPKTGPPPDQRAWQAQVRLYHRHRHLTEHGKRTTVANVAVARETHRVPVGRDDRPATPHHRHRRIVLVHHQLAPGGRRLANPPACGGAGRRGATRPEDPR

SEQ ID NO: 421885 - protein, 310 aa, unidentified
MDATYVGIDVSKDKLDVHMRPSGEAFAVARDGKGLRELVERLRGVSPTLVVLEATGGFETIVVAALTTAELPAAVVNPAQVRYFAKALGQRAKSDPIDASVIASFGAAVKPEPRHLPDDAARLLAELVGRRGQLVEMLTAERQRESRATNARVRKSLKRHIAVLEKEVATLEGDIDGLVRASPIWREKEDLLQTFPGVGTTIARVLLADLPELGRLSRREIASLVGVAPFIRQSGKWKGHSKIAGGRSSVRAAIFMAAMTAASRNSVLREFYQRLLAQGKLKMVALIAVARKLLTILNAMLRDKKPWQPA

SEQ ID NO: 421886 - protein, 315 aa, unidentified
MAKKVYVGIDVSKASLDVSGLPGVVAFRVTNDAGGIEELVRLLGEVPGRIAVIEATGGYELGLVVALTAAGQTPVVVNPRQTREFARSTGRLAKTDRIDADNLADYGRKMRPKPRTLPDAQVRELQALVRRRRQLVEMLTAEKNRRYLARGYAQESVGRSIEWLKAELADLDKALKDLILASPSWREQAQLYQSVPGVGDILACTCLADLSELGLLNRRQISALVGVAPLNRDSGIFRGRRQVWGGRADLRSALYMAALVATRHNPAIRAFYLRLLAAGKAKKLALTACMRKLLTILNAIARTQTPWQEHATSLT

SEQ ID NO: 421887 - protein, 350 aa, unidentified
MNANHYIGFDVHKKTVSYCVKTADGCIVEEGKLRATHQVLRQWSRERKEPWRGAMEATLFSGWIYDALKPFAEELQMGHPAMMKAIGASKKKNDKLDARKVADLVRCNLLPVCYVAPTEIRELRRLLRYRNLVVGQAVRMKNKMSGLLMEVGAEYNKEQLHGKKYFTELLDRLEEVPESVKDMLRLSRGAMEMFEGTQQQLLVRLQKHPRLAKRVALLKSIRGVGEVTALTWVLEVGDPHRLSSIAHAVSYCGLTSALVSSADKQQRGPISKQRNAHLQTVLIEAAKLAPRWNPQLAAAHTRELERGDRNRATLAVARKLVAYLLAVDKSGQPFQLRSRPAATQETVRAA

SEQ ID NO: 421888 - protein, 344 aa, unidentified
MGEVSTIGLDIAKSVFQVHGVDVAGAVVIRKRVSRAKVLEYFGEQPPCLVGIEACPSAHHWGRELQALGHEVRLIPPSYVKAYLKRSKNDANDAAAICEAVTRPSMRFVPIKTKEQQTALMLHRTRQLLVRQRTMLSNALRGHLAELGIVSAKGRNGTGELLRIIADGEDSRVSPAVCGILDVLARQYDAIGAEIASIDKGIMALHRGCEASRRLAEIPGIGPIGATALVAEIGDWKTFSSGRSLAAWIGLVPKQHSTGGKDRLGSITKQGNRYLRWLLVVGAMAVIRYARKHGTQKRPWLGRLMERRPTKVAAVALANKIARMAWAIMVRDERYKEPKLSLAA

SEQ ID NO: 421889 - protein, 376 aa, unidentified
MREKLRFLGLDVHAETIAVAVAEPDGEVRNLGTIANREDSIRKFIKKLGSPEQLRACYEAGPTGFVLYWQLTQLGVDCVVVAPTLVPKKPGDRVKTDRRDALKLARSHRSGDLTAVWVPDEDSEALRDLVRQREAAKQDQLRARHRLTKFLLRTGQRPPLGLKAWTERYMRWLGQVRYAQPAQEVTRRDCMNEVEHMSARVKRLEEAILEVVKLAPQSMQEVIRGLQALRGVAHISAVTIAAELGNISSRFQSARKLMGYSGVFPSEDSSGNRIRRGGITKTGNAHLRRIVVESAWCYRHWPRVGARLRKRQQGIPAEITEIAWKAQNRLHKRYMRLSMAGKDPRKVMTAVARELLGFIWAIAIKAEQAFQQLIAA

SEQ ID NO: 421890 - protein, 343 aa, unidentified
MQTITTIGFDIAKSVFQVHGVDSAGEVVIRRQLKRRYVLAFFQKLSPCLVGIEACASSHYWSRELQALGHSVRLMPPAYVKPYVKRQKNDMADAEAICEAVTRANMRFVPTKTPEQQSCLMLHRTRHLFIRQQTAVINSIRAHLAEFGIVAPVGRKGVTELLHVVADPSDRRVPEVARACLAALGTQLLRLKQQILEFDRLIMAWHRSNQTSKRLHYIPGVGPMLATALVASVADPRTFRSGRNFSAWVGLVPKQHSSGGKDRLGSISKQGDRYLRSLFVAGALAVIRYAKIHGTKHRPWLTALLARRPTKVAAIALANKIARMAWAMMAKGERYKQPVALAA

SEQ ID NO: 421891 - protein, 310 aa, unidentified
MEIIVEKGCGLDVHKKTVVACIAGSGIKKEIRTYNTMTNDLLQLKKWLKENKITHVAMESTGIYWKPVFNILEDSFEVMLVNARHIKHVPGRKTDVQDSEWICRLLRNGLMKGSFIPPKDIRELRDLTRYRRKLTQAISAEKNRVQKVLEDANIKLSSVVSDTFGVSGSEIIESLTRGELSTEKMCGLLRGKLKKKKTEVKEALVGNFQEHHKFMIKASLKHIKSLEKIISGIDLRIVKKLKNYREEYKLLQTIPGVKEHGAASLIAEIGVDMDRFPTPAHLSSWAGVSPGNNESAGKKKLVEQRRETSA

SEQ ID NO: 421892 - protein, 315 aa, unidentified
MVDVPCFVGIDVAKAQLDIALRPSGERWAVPNDADGVATLVERLQTLHPTLIVLEATGGLERPATAALATAGLPVVVVNPRQARDFARATGQLAKTDALDARALAHFADVIRPTPRPLPDAQTQELRALLGRRQQLIVMRTAEQNRLAGVHERLRQDIEAHITWLNARLATLDDDLETVLRASPLWRENDDLLQSAKGIGPVCARTLLLELPELGTLTRQQIAALVGVAPLNCDSGTLRGRRTIWGGRAHVRTVLYMSTLVATRYNPRIKAFYERLLAAGKVKKVALTACMHQFLTMLNAMLKHRTPWQSQEVQG

SEQ ID NO: 421893 - protein, 456 aa, unidentified
MSKRRGKAKRVQKASNQEPENLPVLNRDAAAIDIGSEEHLVAVPPGRDTESVRSFAAFTIDLHAMAGWLKQCGIKSVVMESTGVYWIAPFQVLEQYGLEVLLIDARLAKNLPGRKSDVLDCQWHQQLHTFGLLRGCFLPVAEIVPLRSYLRLRDELVKASTQSIQHMQKALFEMNLQLANVISDITGETGLAIIEAILAGERDGKKLAELKHRRIVASKETIAKSLEGNWRPELLFALQTALDRYKFYQQQLAQCDGQISQALAQLPTRELQVQTEPEKKTEPSARGQKLTPLEAELQRIAGVDLTSIDGIGQQIAQIILSELGPDLQKSFQSEKHFSSYLGLCPGTKISGGKVLKRKSRKVKHRVATALRLAARSLHSSDSALGANFRRLKARLGAPKAITAMANKLAKLVYRLLVYGKDYFDRGAQIYEQKFRLQQIRRLQKQAKMLNLKLVPA

SEQ ID NO: 421894 - protein, 337 aa, unidentified
MKITTIGLDLAKSVFHVVCFDEKHKEVSKRMLRRNQVREYFAQLEPCRVAMEACAGAHYWARELEKLGHTVKLIPPQFVKPYVQGNKNDYNDARAIAEAATRPGMRFVGIKTVEQQDIQALHRLRQQRVEERTALCNQLRALVAENGIVMSKGVATVRRGIPLLLEDAENRLSDMFRTLLARGYEQLVELEEHIDHYTRQVKAHGRQNVQVRRLQTLPGYGPIVASVFASRIGDGSAYKRGRDVSASLGLVPRQHSSGGKVVLLGISKRGDKYLRSLLIHGARSVVLHAKNKEDALSRWVNRIRERRGTNKAAVALANKLARMGWALLRNETVYCPA

SEQ ID NO: 421895 - protein, 409 aa, unidentified
MQVMHARCAGLDVHKKTVVACVMISQPDGGVEKYTATFGTMTPDILALSDWLKGHGVTHAAMESTGVYWRPIYQLLEGQFTLLVANAQHVHRMPGRKTDVTDAEWLADLLRHGLIAPSFVPAQPQRELRELTRHRSNVAGRRAQCINEVHRTLEGTNLKLSSVATDITGVSATDMLEHLLAGQTDPDFLAELARGVLRKKIPQLRKALQGVVRPHQQLILSQLLADIEACDEQVRALNTEIAHRLEKEQALIERLDEIPGVNRKVAEVIVAELGTDMKRFGSASRAAAWSGMCPANRQSGGRRYQARSRFGNTHLKSALTEAGRAAGRSKDTYLGAQYRRLTVRRGNKRATLAVGHSILTIAYHMMDRGTRFAELGADYFDRRNPERVKARLVARLEKLGYKVNLEQVA

SEQ ID NO: 421896 - protein, 345 aa, unidentified
MPIVGGLDIHRKQITFDYLDTATGEVRRGQIAPADRKHVRAWLARFAGRGGVAFAFEGCTGWRYLAEELAAAGLRAHLGEPADTAALRGRKRHAKTDKTDARHLRALLAEGRLPECWIPPPHILEYRALLETYHDLRAAHTAWVQLIHAVFFRQGAPPLSDDALRTEQGLARLQAAAATHLSPAGQLQVATALDMLAATEARLGPLRQQLRETARHLTGARVLAERLYGVGPIAALALTCWLGGAGRFSSSAKAVRFTGLDITVWSSDRKGPPGRLSRQGPPVLRWAVYEAGKTHGRAAAPGHGYYATVKDRKNGKRAALSEARKIVRQACHILAELGDDALTAA

SEQ ID NO: 421897 - protein, 358 aa, unidentified
MDRMFVGVDISKDTFSAAGLDAEGNECFSGFYSMDSDGFCKFLEIVTAHCQDRQKVLVGMESTGCYHINLFSFLTSQGIPAVVINPLLIANFAKRSLRKTKTDKKDARTIAKFLRENGEEISQLSISQDLQDLRDLARERESLSHLISATKVEIKRVLRAIFPELESIADIYTRVMLRFLQVYPSARLVKAAKPKVLAQALRQPYVGHKLTFSAEDILRAAQSSVATASPGKEIILKGKIATLLHLQERMDEMTKLLTDLCKATRVEDLKTLRSIKGVGAKTGVPFLAEMGSVENFSSPKKLIAFAGMDPSVCQSGKYIGKSKPKRCIKRAISTTSFPRKRESRQKSWIPGQARNDGC

SEQ ID NO: 421898 - protein, 344 aa, unidentified
MQITTIGLDLAKSIFQVHGVDAAGQTVVRKSLRRSQMLPFFAKLPSCLVGIEACGTSHYWARELIKLGHEVRLMPAAYVKPYVKRGKTDAADAEAVCEAVTRPTMRFVPVKSPEQQAALSMHRTRDLLVKQRTQLINMIRGLLAEFGVDIPKGLERALLMARQIVDGKAPEVPIEAARIVATLSQQALDIHVRLRGIDRDLAVWLRGNDVARRLMTIPGIGPASATALAASVTDPHQFRSGRQFAAWLGLTPLQKSSGGKERLGRISKMGDKYLRKLLIVGMTSLVRRAKYNPGKIDPRLADLLARKPTRVATVAMANKTARVIWAIMARGETYHTGHQPALAA

SEQ ID NO: 421899 - protein, 340 aa, unidentified
MLKNFVGIDVSKSKFDLALIKDSDKDHVIQSVFENNQKGIKSMRKFIEKDHCILFSETIFCMEFTGIYCRPLTSFFVNQECNVWLEMPVNIIRSLGLQRGKNDRIDAHRIALYAYKNRDNVKLWKPQRNVILQLRDLLSLRERLLISQKSLTMPIDELIAMGDKSGAARVRKGCQKTLYSIKKEIEQIDKGLDDIIKDDPHLKELYKLVTSVPGVGKFTALYMICFTNEFSMYTNPKQLACYCGVAPFEHSSGSSVRGRTRVSHMANKVLKRMLHMGAMSVIVRDPELRDYYQRKIAQGKNKMLVINAVRNKIIHRICAVIKRGYEYQSGTIFKECLILS

SEQ ID NO: 421900 - protein, 340 aa, unidentified
MGDITTIGLDLAKNVFQVHAVDVAGSVVLRKRLRRGQVLAFFAGLPPCLIGLEACATAHHWARELIALGHETRLMPPSYVKAYVKRNKHDVADAEAICEAVRRPSMRFVPLKTAEQQSALMMHRARDLLIRQRTMLVNALRGHLAEFGLVEAQGLHKVARLIAIVMDEMDGRVPDIARQVLKVIVSQIEDIQTRIAGLETQVLAWHKSNPVSQRLATIPGIGPIIATAIAATVVDPNIFRSGREFAAWLGLVPRQNSTGGKARLGGISKRGDSYLRRLLVNSAHTVLLCSRAAKADPWLTSLLSRKPRLVVAVALANKTAHMAWAIMSRPDLYRHAAVTA

SEQ ID NO: 421901 - protein, 375 aa, unidentified
MSSAATTIYLGLDVHKESVTIAVLPGGAIAPTRVERLPNDLAKLKRFCERLRAQGEVHACYEASGAGYVIHRAMATWGIACDVIAPSLIPTKPGHQRKHDKHDAIQLARLYRAGELTVVRIPSEAEERVRDVVRCRETFQREVLRSRHYILKFLARRGFVYREGTPWRQAHYEWLRQLASVRSPLAPEDRRVFGEYLGLLEYKLSRRDELDRQLAALALTPPVADAVQRLQCFRGVQLHAAMVLATELVDWRRFQSPRQLMAYLGLVPREHSSGDRERRGSLTKAGNSHCRHVLVQAGWAYRYQPKIGIALKARQRGQSPVVIAHAWKAQHRLHTLYRRLAARTKPQIAVVAVARELVGFLWAVMQDLDPQAVAA

SEQ ID NO: 421902 - protein, 322 aa, unidentified
MTTSPAPAAVYVGIDVSAATLDVACGAEATIIETFTNTEPGRQSLVEKLREWQPTLIVVEATGGLERWVMAECQAAGFHVARVQPARVRNFAKALGARAKTDALDARLLARFGQTLRPPATPLPSAEAQQLAAWVTRRRQLLDMRVAEDNRLKTAPDSVRPLIQEHLTWLTTQITQLEERIRDFIDRTPDWAAKDEILQSTPGIGPVTAATLLTDLPELGTLNRKQIAALVGVAPYNHDSGGQHGQRHCHAGRTALRSVFYMATLAATRFNPTIKTFYDRLVKAGKEKKVAIVACMRKLLTILNAMLHTKQAWKLIPAKSNP

SEQ ID NO: 421903 - protein, 408 aa, unidentified
MNSLYVGIDVSSKNNVAYLMKPDGGKHSSFSVQNNLGGAKLLSERIVSALSSMRLSDVVIGLEATSIYGNNLVYALREDGSLSRFQRKIHVLNPKQVKKFKEAYPDLPKNDFVDAFVIADHLRFGRIAKEVYMDDYRYQALRTLTRARFDVIQNLTREKQRFANYLFLKCSGIAQEKDIQNTSATTIALMEHFETVDDLANTDLDELTDFIAQAGRGRFVDPDATARAVRAAAKGSYRLPKTVNDTVNQAMSVSIASMRALKEQVKVLDKAIEQQFEIIPNTLTSIPGIGKVYSAGIIAEIGDIHRFDSQASVAKFAGLVWTQHQSGEFEAEHSRMIKSGNRYLRYYLLEAANSVRRCDSEFRRYYDLKFKEVNKYQHKRALALTARKLVRLVFRLLKDNRLYIPSEG

SEQ ID NO: 421904 - protein, 380 aa, unidentified
MRLCARIGDCRVQANRKQKEVKKEMAVYVGIDVHKNYCQAALMNDHGHLLHELRFDNNSEGASSLFNLAKSVDPQIKAVLEPSANFWIRIYDKLEEEGVEVKLSNPLRTKAIAEARIKTDRIDAKTLAYLLRGDLVAESYVPTRKNRERRALIRHRASLMQIRVEIKNRIHALLDKHELSYTYTDLFGKQGMEWLRNLQLPTPDHQILQSNLQVMETLTAEVRNADIQIAKDATTEEKAKLLMTMPGVDYYAAMVLLSEIGDVHRFSSDEKLVSWVGLAPQVHQSGKSQWTGHITRKGSKRARWILGQCAQTARQHDPRMREFYERIERKHGHQKAIVAVARKMLAIMYVMLIRNEPYRGENPELTQQKHKRLDTLANSA

SEQ ID NO: 421905 - protein, 311 aa, unidentified
MPKNKPAVYVGLDIAKVTLQLHLPDGQHPLPNTAAGHARLVQLLSSVCDAHVICEATGGYERGLVAVLHASNVPVSVVNPAQVRHFALAQGQRAKNDPIDAALLTAYGQALCPAATPAPESALSELRDLVQWRDHLKEQLTRARQVAEHAMRPFIRRQQVKEVAHLEKQMSAVEKEIAAALARAPQQKAQVEQLAKLDGVGTLTAVTVLSQMPELGQINRGQTAALAGLAPWTRQSGPWEGQRHIGGGRARVRRALYMSAVALARQTQTVLGKFYARLRAAGKPAKVALTAVMRKLLIQMNLTLKNHALQS

SEQ ID NO: 421906 - protein, 371 aa, unidentified
MFHVGLDIHTKRISICALDEKGQVVLRSQVRGIQDLVRVLTGLPDRFEVCYEASCGYGHFHDLLRPLATRVVVAHPGQLRLIFRSRNKNDRNDAERLAKLLYLGEAPAMHVPSAEVRTWRELINCRSQVIAKRTRAKNAVRALLRSAGVTPPRRPGLWTKEGLAWLRRLELPTASQQLRRDLLLEEIETLLRQVQRIERQLMQQAQRTPAVVRLRSIPGVGLRTAEAVAAFIDDPHRFPNAKAVGSYFGLVPCQDQSGDRNRLGHITRQGAPVVRQLVAEAAWQARRRSPTVRAYFERAKRDDPQRQKIALVATAHYLVRVMWALLKRGAEWQENPALAKAPDAASGGVPAAERGPRRPGDSGGERMSEST

SEQ ID NO: 421907 - protein, 360 aa, unidentified
MVTTIGLDIAKSVFQVHGVDAQGRVVVRRQLKRRYVLPFFKKLSPCLVGIEACATSHHWSRELQALRHTVRLMPPAYVKSYLKRQKNDAADAEAICEAVARPNMRFVETKTAEQQSCLMLHRTRHLFVRQQNAVINSIRAHLAELGIVAPVGRNGVEELLDVVADPEDDRVPEVARECLAALGAQLRMLKAQILEFDQRIVAWHRSNETSKRLDEIPGVGPALATVLVASVADPRAFRSGRDFSAWIGLVPKQNSSGGKEKLGNITKRGDRYLRSLFTAGAGGDPLCEAPWHQAPAMAHRTVGAAANQGGGHCARQQDRPHGMGHDGQRRALQGTCRPGGMNEIAPVSWRDAEVGRTNST

SEQ ID NO: 421908 - protein, 463 aa, unidentified
MSTKREQSKRARADHPKVDWKALEVVHPDAAGIDIGGSEHWVAINPEKDEEPVRRFDCFTADVKNMADWLLARGVTSVAVQSTGVYWMPVFEILQQHGLEVYLVNARHTKTLPGRKSDIAECQWLLKLHTFGLLNNSFQPSDEIRSARTLWRHRAGLVTQAGSAIQRMHKALIEMNVQLSNVLSDLSGVSGMAIVQAILEGEREPRKLAALADPQVKASKALIAKSLEGNWRPELVFVLRQEVEMYRTYQDKIAACDRQLQSHLEGMAPRVDLQAQPLGPRPKRKRARGNAPKFDLRAELYRITGVDWAQVDGIDVQVAQSVIAEVGLDLKAFPSERHFSNWLGLCPTNETSGGRVLKRRTPKVVHRAKAAFRQAASTLIRSQSYLGAQYRRLRTRLGAPKAITAMARKLACLFYQLLKHGQQYVDKGMEFYDAKYREQQIRTVLKRARQLGLQVAQPASIPA

SEQ ID NO: 421909 - protein, 437 aa, unidentified
MGRSIGLGPRSVDESKSATANSCVVTKPKSTTYRSAGISELELVKTFCSICILGENYEKSRFKLCRNRLWKKSLEVIRINSEGSYERQQFSTTEIGISKLINWLNPNDVVGLVFLACKEPLAKLRCSLAISLFMNRSIGSQSFRIAKSILNKGIQVIVLNPGDLATIYQSLKKTDKEDSLKIARLIQRYPMEELPVVPVPTDEEEDNRRLCTEQENWTRQLTQGKNRLHSLFTQAGLTHITKKHLRTKSSRETSVALLPSRYQKEAERILQVLDLVEQNLKLIEEETKDALKKNPAYVQTIMSMPGIGMVTSLAIMSYMGDCKRFSSGKQAAYYAGLVPRVDISGDTVRYGKIVSRGCHSIRRVIVQAAWSLVRCQHGGKLKEFYERLYSKKGAKKSIIAVSRKMIEVLYSMIRTGALFDSMPESVLNRKLAQYGLM

SEQ ID NO: 421910 - protein, 325 aa, unidentified
MEYQNISHSIGIDVGKHELVACVRCSNGIAEPPVAFPNSSIGLNKFVVYLKKYEIAPDEPILLESTGPYHWKAARTLTDKGYFVKVANPIHTKQIARLSIRKRKTDKVDAANLAFLASQGYGYQFVETEDLVKKKAMVRHYWKLRTTATNLLVHEKYLQEYRNINPVSISKMIVERCNVLKKKIVKDWDKGNDIKYLDSIPGITPFLAVTILVELTPLSRFQRIDQFIAYAGLDPSVKQTGGKAGKHGAISKRGSATLREALFLAAFGSFQREPMRSLYLRYKERGLHHNTILCILGRKILRISVALLKKRRVFDQKFLSVDKSD

SEQ ID NO: 421911 - protein, 347 aa, unidentified
MKILALDLGKYKTIGCDYERESGEHRFRGSLTTPAALQQLVKEVKPDRVVIEVCNIAGWVCDLLREMGVAVQVANTSDDAWRWRKVKKKNDRCDALKAAQLSAVNQLREVHIPTIEVRQWRALIAYRQQLVSRRGKVKNHIRDLLLTEGQLLPRGAKCWTELGVARLEALAKPLAEVGLHELWRGQLHLELRQLREVQAEIKLVEEKLDAVAAGDPRIALLRTIPGVGPRLSEAIVALLDQPARFRNANQVSAYIGMVPKELDSGETVRRGPITKHGSRLVRSLLVEVAWAGLRHNAWVRQTYQRISGGKKSRKKIAIVAVGRRLLVRCWAMLRDGTSWQPPVASLG

SEQ ID NO: 421912 - protein, 410 aa, unidentified
MAERFVGIDVGLREHRIAVLDRDGEAVGQSFTIAASTDGVATLLRTLAARDATAAQTLIGLEASGHLWENLEAALGGAGYRVLVLNPLQTRRYRDVVRRKAKTDDIDAHVIAGLLRSGAAQASYVPDEPIQSLRELARLRARLMADRQDYQRQLVAQLDVVLPEHRAVLGDLLTARARGILAQFPTAQHLANANPRAIRRAAEDAGARGFSLDDATGVRDRARRSLYSGKAAAARAHVVRTLVSQLERLTSAIDEVDHAATTLLPPSEPGTGPSDAELLQTIPGIGPQTAATLLGELGAFTRFTDARALVAYVGFYPVIQESGDRAATPRLSRVGSRIARRSLYLAAVNAVRGSGEWRTIYLRKKAQGKTAKQALVVVAVKLLHALYAMLKHRQPYNPSRLLVAPATIGS

SEQ ID NO: 421913 - protein, 317 aa, unidentified
MEQQVSFSQVVSRGCGIDVHKKIVVATIDGEGIKKETKEFGTFTSSLTKMKDWLLEKGITHVAMESTGVYWKPVYNVLEPSGIKVWIVNARHIKYVPGHKTDKKDSAWICKLLLAGLLKPSYIPPKEQRELRDLTRFRKKLIQKVTAEKNRTIRVLEDGNIKLSSVLSKSQGVVGSKLIDKLCKGNGITMDDIEEVYHGKIEASKEEMYEACQGTIEEHHIYMLKMIQKDIDYTNLIIENLNERIKNKLIEYKDVLERLKAIPGINIKTVEDLVAEIGLDMSVFPSEKHLASWAGMCPGNNESAGKKKADARITGIK

SEQ ID NO: 421914 - protein, 370 aa, unidentified
MTSITYVGMDVHTTNYTICCYEMQNDSTFGMMQLEPNYQEIVRYLKQIKAQKGGHVEFVCGYEAGCLGYSLYHELKSQGINCIILAPSTMPVAPGDRVKTDRRDAMRIAKCLAYNTYSPVHVPTEQDDAIKEYIRMRDDVAEELKKIKQKTLALCTRHGKRFTGTKANWTKAHLDWLEKLDLDNAILTETLREYLTMYYILTEKVEMYDMRIEELASMDANKEKVKRLVCLKGIATHTALSLCVEVSDFQRFPDANHFAAYLGLAPGENSSGDKVQRTGITKAGNKHLRRLLIEAAQCYSRGYVPKKSKALKARQQGNPPELVAYADKANERLKRKYMRIALRSKSAIAKTAVARELACFVWGIMTDHIQ

SEQ ID NO: 421915 - protein, 481 aa, unidentified
MVRYVGLDVHRSIVQVCIQNERGETIATHRFDGLCREVLLRFAKQHLTCDDRVALEATTNTWEITRLLTPFVHDITVSNPLTTHAIAKAKMKSDKVDASVLAHLLRCNYLPEVWQPDPQTILLRQLLARRCGLVSQQTAVKNRIHSVLAQKLIPLPGTDLFGQAGQKWLASLELDAQDRWLIDSDLRILETLQVEIAKLDQNLSEKGYSDERVRLLMTLPGVNSVVALGLIATLGDINRFSSPDKAAAYIGLVPSMKQSSNKCYMGSITRHGNSQTRWLMVQAAQHAGRHPGPLGAFFSRIKRKKNHSVAVVAVARKLVTIAWHMLKHNEPYRYAIPRSTEEKLRKLRVKATGERRKSGPKKGSKTDSKVDQKVDQKVDQKHSDNSQRSQGSQGSQPESNRARNVKPLSQIYEEEGIPALQPFSAGEERMLEENGMTEFVDTIRKPQTRTYNRKTDNHKTDKRKTDKQSTIKTGGTVKNKA

SEQ ID NO: 421916 - protein, 405 aa, unidentified
MAVIIGIDPHKGSHTAVAIDEAETALGELRIRSGATQLERLLEWAGRFPERTFAVEGAGGLGYLLAQQLVSVGERVLDVQPKLAARVRLLATGDTNKNDPNDARSVAIAALRSPAVRVVHPEDHAQVMKLWAKRQRNLGSARTQVVCRLHAVLCELTPGGVSGQLHAPRTARLLEELEPEGAVASARHELALDLLEDLRRIDEQMSETKKRIAAAVTASKTTLTEIFGVGPIVAATVIGDVVEVSRFANRDHFASYNGTAPIEVSSGPRKVYRLSRRGNRRINHAIHMAAVTQVRHPTSEGRAYYDRKLAEGKTGKEALRSLKRRISDAIFARLQVDAHQLERFVDVGSGGQEGNDSVASATGSHPEHRLFGTATPEPDVTLKRPAAPRRRNTTSTSPKKERRAS

SEQ ID NO: 421917 - protein, 342 aa, unidentified
MEKVTTIGLDIAKSVFQVHGVGADGEVVIRRQLTRARMLPFFAKLPRCLVGIEACNNSHYWARELSKLGHDVKLMPAQYVKPYVKRGKNDAADAEAICEAVTRPTMRFVAVKSPEQQSLMMLHRVRLMLNRQRTQISNAIRAHISEFGVVAPVGRLGVDRLLEVVADASDDRVPEDARLCLQMLAAQLEVVKQQILENDRRVLASARRTELGRRLMDIPGVGPLLASAFVASVADPTMFKTGRDLAAWIGLVPKQNSSGGKDRLGSITRAGNRYLRQMLVVGAMAVIRYAQRHGTKRPWLVRLLARRPTKVAAVALANKNARMVWALMTSGERYREPMPMAA

SEQ ID NO: 421918 - protein, 314 aa, unidentified
MKMIEHCYGGIDVSKDRLDVLVLPDRRCFSVDNNAAGWSELVERLHGLSIAAVGIEPSGGYERCVIRILLAAGLSVRRINPNKLRQFARARGVLAKNDRLDAQLIAEYVSIMPTRVVQRDAGTERLAEVVTMRRQLCDEHATVENQAAQVEDVMLRRLNKRRLARLQADIHLLDRRMAEMVAADAVLAQRYELLTTMRGVGPILAFTLIALLPELGQMSRKQIAALVGLAPYDFDRGKLRGHRCIYGGRMPVRNVLYMAALSACRYNPAIKVFHNRLATANKKPKVVIVAVMRKMITILNAMIRDNAAWQPKTA

SEQ ID NO: 421919 - protein, 424 aa, unidentified
MNCNQNFKISQVTEGTLVLGIDVGSNTHYARAFDWSGLELSKVFKFKNSFEGFQSFVLWVNDLCCKYNKSKVIAGLEPTGHYWFSLGELLKENNITIAIVNPYHVKQSKELDDNLQTKNDSKDLKVIAKLVIDGRYSFPYIPEGIYGELRVADKLKNDITQQIISIKNKIHRWLSIYFPEYENIYSSIDSKSGFLLLKETPLPKDIVELGSEGIVERWKQTKLRAVGLDKAKKLEEAAKKSIGCKNITSSARFEIKLLIEDYEYKQNQLNSITEELNKLCEKIPMIKEIAEIKGIGIATAISFVAEVGDIRRFKSAKQVQKYAGLALKENSSGKHKGLTRISKRGRKKLRTILFRATIPLIGFNKEFSSIYNYYIERKDNPLKKKQVLTAICCKMIRIFFTILSKGIKYDETKMLHDIKRPVAA

SEQ ID NO: 421920 - protein, 363 aa, unidentified
MVEIIRIGVDTSKHVFTLHGVDAGGHAVLRRNLSRGQFEGFFAKLAPTDVALEACGASHHWGRQLQGMGHRVRLIPPAYVKPYVKRNKNDAADAAAICEAASRPGMRVVAVKSAAQQASQMVQRVRELLVKQRTQLANAVRGHAAEFGLVSPKGLARVETLLAMIAAVPPEPEPSAPADGQPAQEGGGGPAAARLPQQAREMFALLGEAIAEVDRRIAEVEAKLLALHKASPVSRALAEVPGIGPITAISLMLGAPASQFSSGRDMAAWIGLTPRDHSSGGKQRLGGISRAGNSRLRQLLVLGATAVIAQASKPGRSASPWLKQLLARKPRKLAAVALANKMARIAWAMMTRGEAFRRQPKAA

SEQ ID NO: 421921 - protein, 407 aa, unidentified
MDVVHLKCAGLDVHQQTVVACARAGSGKTVAYDVRTFGTSTPELLALSDWLTARGCTHVAMESSGVYWKPVWHLLDGDFELVLANAMHIRNIPGRKSDVNDATWIADLLAHGLIRSSFVPPASVQELRDLTRTRKQLVRELAQHTLRIQKTLETANVKLTSVLADIMGVSGRAILAALVAGETRPERLALLANDKVKASRAEITAALQGRVTAHHRFMLKLHLTQIEALEAAVREVEARLGEALAPFRAAVDHLITMPGVSETVARVIVAEIGFDMTRFPSAAHLVSWAGLCPRLHESAGKRLANRTRASNPWLKTTLVQAAWAAARKKDSYFRAQFLRIKSRRGPKKAVLAVAASMLTAAYHMLRDDADYRDLGAAHFDRRDKAKLAKRLIARLHDLGLVVDVRAA

SEQ ID NO: 421922 - protein, 407 aa, unidentified
MAACAGVDWASDTHDVWVADGDGERLWAETIAHTECGLRKLCRTLVTLGVERVAVERPDGLLVERLLDAGLTVLALHPNQVHAARPRFRPAGGKADRFDAFVLSELARTDHHRFRVLVPDRDETKALRALTRGRELLVEQRVALSNQLRAELQRFWPGAIEIFSELDSPISLAFLERYPSPLDARSLGERRLAQFLARHHYCGRRGVSELLDRLRSAPSGRAAQLEADARRGIVLALVAALKPIVEQIRLLTSEIAHAVRTHPDGEIFLSLFKDPKSVICAATLLAEIGDCRARYPTPEHLAADAGMTPVAVESGKRKVACFRRGCDHRLRSAFTTLADSTRHWHPWAHRHYADATARGHDHPKAIRTVGRAWSRVLWQCWQHHTPYDPSRHNALQRQLTITIPHTG

SEQ ID NO: 421923 - protein, 329 aa, unidentified
MRASKAEPSAPDAFSLPQTVGIDVSKAWLDVYLDPANVFKRVDNTPSGIHQLLRWLSKVDVKLCITEATGGLERPLLTAFQCAGYSIARINPRWIRDFAKSKGRWAKTDRIDAKLLASYGVTIAPEPSPVEDQKTQTFKALCARRRQLLHMRTQELIRKKQVCDKMIARMIAANIQSFNRQLKTLEKAIDAIIDQNPVWQRKRQIIQSVPGLAGTTARTLIADLPELGNLNDKKIAAMVGVAPFNHDSGKLKGYRAIIGGRNTVRTLIYMVAMGCATRNNQKFQAVYRAFRQRGKPAKVAIVAIMRKIIVILNVMIRNDQTWQEKPKTA

SEQ ID NO: 421924 - protein, 344 aa, unidentified
MKKATTIAVDVAQAVLEVAVSHRPGQVASRHRLQRGEVLPFFAQRPAATVLLEACGSASFWAREIEKLGHRTVLLPPQHVRRYRTRNKTDRADAKALLEAFRNEEIRPVPVKTPAQQTLAALHRLRSAWLGTRTARLNTIRGLLREQGLPIPAGARRVVPQTLTWVEDAESGLSAPLRFVLFEACVEVRELDGRLRKVEAQLAALAKASPLAARLRSVPGVGLLTATAIAGFVADLTRFPSGRHFASYVGLTPREHSSGNIRRLGAISKRGDAYLRTLLTHGARSVLVAASRHNDPDRLRRWALDLAARVGHNKATIALANKLARYAWAVATREMAFEPQPVTA

SEQ ID NO: 421925 - protein, 414 aa, unidentified
MEKDTLYVGLDTDKKHIDVAVAEPLPAGEVRYWGKIANDAASVERLLKRLCRDGRDVVLCYEAGPCGYGLYRQLAGRPGVRCDVVAPSLIPRRPGERVKTNRRDALALARLLRAQELTAIWVPDAAHEAMRDLVRARASAVTAVVRCQQQIGAFLLRQGILYTAGRPWTKKHRQWLGTLRFEQAAHRLMFGEALLALDQAAARRQRLTEHIEELVPSWPLAWLVEALQALRGLRLINAAVLVSEIGDPRRFATPRKLMGFLGLGVCEHSTGDSVRRGRLTKTGSKRDRKALIEAAWTYRAPARKPKVQASRQNAAVQAIAEKANHRLSRRYRYLVRRGKLSKVAVAAVAREMLGFVWAIAHAAAPAQQQPHATTVAHTTRGLRGMRKSSVIRTPAMPPNSDAGKQCPPASAASP

SEQ ID NO: 421926 - protein, 339 aa, unidentified
MALYGGIDLHSRISWLVILDGALKLVRQVKLSNDLEEFLRLLEPYRAELGGLAVESTPNWYWLVDGLQCAGYRMHLTNTCAVQQYSGLKYTDDRHDARLLAHLLALGILPEGYIYPAHERPLRDLLRRRGFLVEKRTSMLLSLRSAFECHTGHRVNSDTVKKWTAVELEELLDNTTVARGLTCLLEPIKAMSTQIKMLEKEVLAQAKLRDEFALLRTVWGIGPILALTVMLEVGDIKRFEKVGNFASYCRLVKTDRLSVGKRKGSGNAKNGNPYLSWAFSEAAHFATRYHDAAKRFHQRKLAKSNGILAIRALAHKLARASYYVMRDKVEFDPDRLFTN

SEQ ID NO: 421927 - protein, 343 aa, unidentified
MDYFAGLDVSVKETSVCIVDDTGRIVQEARVASEPEALLQVLTNTIYRFKRVGLEAGPLSQWLLSALAEAGLPVICVETRHMRAVLRAQINKTDRNDARGMAQMMRVGLYRPVHVKTLRSQKLRMLLTHRKLLQSKAIAIENDLRASLRNFGLKVGVVGTVKFEARIRELVENLPDVAVLVEPLLTVRRVLREQITALHRRLLAIVRDDDVCRRLMTVPGVGPVVALTFRVTVDVPARFRNSKAVGAVFGLTPSKYQSGESDRSGGISRCGDEMMRAMLYEAAQILLMRSAKWSWLKAWAVKIARHRGLKKAIVALARRLAVIMHRIWVAGAEFRWTREVAAA

SEQ ID NO: 421928 - protein, 325 aa, unidentified
MFYLGIDVSKSKFEVALIPSSDEPQTLKRKVLANSPEGFDKLHAWLSRRVEGEVHACMEATGTYYEDLATFLVNSGIKVSVVNPALIANFAKSSNTRNKTDSVDALVIADYCRSKRSKPWTPPSPEAKELRELVRRLAALERAKQDEENRLSSGVSSAPVASSIKQSIEFLSQQMKELESLIKDHIDSHPTLREDRDLLVTIPGIGKKTAAAILGELPNTANFDNAKQAAAYAGLSPREYRSGSSVRGRTRLCKVGNSRLRRALYFPAVVACIRNPVVKDLYQRLLRAGKSKMCALGAAMRKLLHIVFGVLRRRQPFLAVGDTPA

SEQ ID NO: 421929 - protein, 317 aa, unidentified
MPHHDALYLGIDLSKEWLDAHLLPTGKTWHVSTEPVELEAWVAQLPAELTLVVMEATGGLEATVAGLLARRGLAVAIVNPRQVRDFAKSMGILAKTDKLDARAIALFAERVRPEPRPLKDEQQQELDELLTRRRQLVEALTAEQNRLSPARGKAVRASVPAHIDWLERQIKKVEERLDTLIKASPLWRAREDLLRSTPCIGPGAARARLADRPELGTLKRRQISSLVGVAPFLHQSGKWKGQSFCSGGRAAVRTALYMAVVSGLRFNPVIKEFYQRLTARGKRPKVALVACMRKLLTILNAMVRENKKWNEYLLVHA

SEQ ID NO: 421930 - protein, 350 aa, unidentified
MTIIGCDYHPGFQQIAFVDLETGDCGEQQLKHCEGAEKFYRDLASEGKKVRVGMEASGHARWFERMLAELNMELWVGDAAEIRAKRVRKRKTDREDARHILRLLMEDRFPRIWVPSAENRDLRQLLWHRHRMVQARTRIMNQLQAVALNEGLRCKKRLWREQGREQLQSFRLAPWASRRREDLLNLLDQLNPTIAQLTHAIEQEAEKCPEARRLMTHPGVGALTALAFVLIIGKAERFQCGKQIGCYLGLVPLEESSGERRRLGHITKQGNSVLRFLLVEAAQVTTRTIPEWRSKYIHLMMRRGRKIAKVAMARKLAVRLFWMMRNGQYYEQVRDFGSHVEQPGHRHGVQ

SEQ ID NO: 421931 - protein, 420 aa, unidentified
MKVVYSTCCGVDVHKTFLVATIIKTTKGFQPSYQKKRFSTFNSDIRHFKQWLLDNSCFDVCMESTGKYWVPVFNLLEDKINVTIANPKWVKAVKGNKDDTKDSKWIGDLFRLGLVPGSFIPCKDIRILREYTRYRFKLTCCKRSEKNRFQNAFTVCNVALDAVVTDMFGKSASSITDYLITSDEFDPETCKSFLQKSLKKKADSIIESIEGYQMTSSQKERMLMVRSHLDFVQQSIDSLDSKLDELIAPYENAVSLLCTIPGVDRTSAITIISEIGTDMSQFNSSKRLCCWAGLTPGNNESAGKKKSTKITRAGVYLKPALVQCAHAAVKFSTSPYYKNKYERISKRRGKKRDIIAIAGMILTAIYQMLSNGETWNPCDLYKIDMPQEMQDKQKTKAIKQALKLLVSEGVISPESASVAI

SEQ ID NO: 421932 - protein, 353 aa, unidentified
MAIFIASDFHCKYQKVVWMDSTDGELHIADVHHQDVNEVAGFYRQFPAGSILGMETSGYSHWFEELVVSLGLELRIGNSQVIAGKRPRRQKNDQLDAEHMLCMLLENRFPSIWRPTPENREKRVLIRQRCRLVKMRTQLINALRALVYNHNLHLKRGQLSKKRRQQIADLPMSPMLDQQRREMLGLIEQLDVSVKAKEAQIDQWARQDEAAARLLTIPGVGACTALTAVLILGPVGRFPTAKQVVSYVGLACCEHSTNNGYQKRRYGQISKQGNKLLRWLLTEASGTAIRTDVQRKRYYARLKYRKDWRVAKTAVARKILVCIYVLLRDGIDYPEFLRRGPGFGMPVETAGRK

SEQ ID NO: 421933 - protein, 360 aa, unidentified
MSRTSLSQIHQFIEGYSSGKFWIGIDVHKRSYSLALLREDGMSYTWVTTADPIRLVEQLQGLPITISSIVYESGPTGFGLARTLKKANIPVDIAAPSRIPRPVRPGAKSDRLDCLKLAAYGSKGMVKSIAVPREEEEALRALLRRRQQLTESLVRVKQRIKSLLLYIGQTEPHGLRSWTDKSIRQLENMSLNDAYQILLKSLIRQLRFVQDERQIVLNQLQSLISKTDQQNRLGCLSSVPGVGSITALTFLLEVFNPQRFNRAEEIASYLGLAPMVHHSGEQTPPGKLQPVGQACLRSLLIEAVWMWKTKDEGARTMYNNFLSKMGIPQKAICAMARRLAIILWRIAVEQRTYYPIEVKV

SEQ ID NO: 421934 - protein, 344 aa, unidentified
MSNLDTCGIEVSAEELLIRLGRRGELQPLRSFSNTREGREMVRRYLSEAGRVVRVCLESTGLYGLDLALLLSAAKGMEVMVANPRAVRHFAHALMRRSKSDPIDATVLEQFAARMPFQAWKPPSAAALALHALARRLRELVQIQTAEKNRQHAAGLSQTIPTAVRRDLARSLRAQQRAVVRLTREARKLIAQDPQLRERFELLDSIPGIGETSAVQLLGELSVLAPDLDARQWVAYAGMDPRQHTSGSSVHKKPRISKAGNKHLRHSLFMPALVAVQHDPYLGAFYQHLLARGKFKMQALVAVMRKLLHAIHAMFKNHQAYDGGKLFRLPPVPAQEVPRAAVVA

SEQ ID NO: 421935 - protein, 359 aa, unidentified
MIKDSIVFVGLDLGDRWSQLQVLDQEGEVVEESRLPTSESALRRKFGAMGRWRVAMEVGTHSPWVSRLLTELGHEVIMADARKLRLIYRNPRKNDRIDAEYLARLARLDPQLLSPVRHRSPEAQADLALIRSRDALVRARTMLINHMRGMPKSFGERLPACSAESFHHKVREAMPQALQPAFEPFLDTIGEMTDRIRAYDRQIEDLCRSRDPQTKELRQVGGVGALTSLAYILSLEDPARFRKRREVGPFLGMVHRQNQSGGADPQPRITKTGDAYLRRLLVGSAHLSFDPSVHRALRAHPECERKCGVQELSRQISEERSPRRPLTTKAFSWKWLGGRTEQEGGRLIRRHRWWIVSQR

SEQ ID NO: 421936 - protein, 392 aa, unidentified
MYIIGIDIGKNHHEASIVSPEGKQIGHSLRFATTHKGADSLMSFIFNNIGNSSCIFGMEATGHYWYPIYSFLKARGYTIYVINPIQSDSLRKMYIRQTKNDSIDSFLIAEVIRFGQFTTTSMADENILAMRQLCRYRDSVISSRTEIKLRISTIMEQIFPEYEKQFSSLWLSTSMGILEKYLTPENIENAPIDELFEIIKDKSHNKLTMKKAISIREAASDTFGIKIAQDAFSFQLKQLIDRMNFLDKQIEALDCQILEYYEKFDCYLHTIPGIGMIAAATIIAEIGDINRFKSSSALVAFAGIDPTVRQSGEFSSTHNHMSKRGSPYLRHAIFLAATTCSFHNSPLNAYYKKKRDQGKHHLTATGAVARKLTTIIYAVLRDSKPYEPKSFC

SEQ ID NO: 421937 - protein, 336 aa, unidentified
MEITTIGLDLAKQVFQIHGVNEAGDVVVKRRLRRAQVITYFASLPACLIGMEACATAHFWARELRSLGHEVRLMPPQYVKAYVKRGKNDAADAAAICEAVTRPSMRFVPVKTEEQQSALTMHRVRELLVRQRTQLINAVRGHLAEFGLVGPQGPWNVPRLLASMQEDRRVPELARQVLELLAAQLDEVGQRIAEVDARIMAWHKANPVSRRLATIPGIGPLIATAIAATVPDPDIFRGGREFAAWLGLVPRQRSTGGKQRLGRISRLGDKYIRQLLIVGAQTVLLRSKAARSNAWIQGLLARRPRLVVAVALANKLARIVWAVMAQGQSYRQAVPA

SEQ ID NO: 421938 - protein, 315 aa, unidentified
MEQRSELFVGIDVSKHHLDVYWHPTGRSVRTVSTSQGLAELVEQLLVDPPGLIVLEATGGYERAVAGALATAGLCFAVVNPRQTRDYARATGRLAKTDAIDAEVLARFACAVRPEPRGERPADQQALDELVRRRRQLVELRVGERNRLEQARSASVRRGIERLIGVLDEQIGELEVQLEQQMAADARWRRTKQLLTSVPGVGSGTSWTLISCLPELGRLNRREIASLVGLAPINRDSGQWRGRRCIWGGRALVRAALYMPTLTAMRFNPTIRVFYQRLREAGKTFKVALTACMRKLLTILNAMVKTNTAWSPKTA

SEQ ID NO: 421939 - protein, 338 aa, unidentified
MTIVMGLDQHRAQITAEWLETSTGEIGRARVAPAHRAGVRRFVERFRGQELEVALEATTGWRFVVEELRRVGATVHLAEPAETAARRGNNKRAKNDRADARHLRELVMAGRLPESWIPPDHILDLRARVRLRHSLVDQRGEWQQRIQAVLYHHGCPQRRNLMTGEGRQWLAAMRLPVTAREQITVALAVIDALDGQLGPLDKELRAYARRQPGCRALMGQFGIGELTAVTILAELGDARRFSSSREAVRYAGMDITVHQSDQRRSAGHLSRQGPPALRWALFEAAQSAARAGSPDRDYYRQAAERLGANRACLSVARKLLKRSYHTLRELGEEALQPA

SEQ ID NO: 421940 - protein, 397 aa, unidentified
MYIVGIDIAKRKHEAAVIDGDGAVIIKPFSFTNNCSGYNRLLAMLTKAKLPLDEVSFAMEATGHYWLALFTRLQKEGFRVQVINPVQTNSIRSFYIRQAKTDPRDALLIAEVIRFGHFSESTLHPENIYELRELCRGRHAIVSMQADVKRKVVALLDQVFPEYETAFTNMFSDTSMAILQTCPTPKELSEMPLEELCHLIEVSSHKRFRMAKAQELQELARNSFGFAMAGDVFSTMIRLYAKHLDFLKQQVREMDRKIAEIMETLDTPITTITGIGPTLGAYILSEIGDINRFSSAAKLAAYAGIDPTMRQSGEYNGVRNRMSKRGSPYLRHAIWLAASSAVLHDPALKLYFQKKRDEGKPYMASVGHACRKMVSIIYAVMRDNKAYTPYIPNEISA

SEQ ID NO: 421941 - protein, 369 aa, unidentified
MSKYIWVGLDVHLESITAAILKDDSNEAEVLKMSGDLMKVRRLFRRLSAKGTVRACYEASSAGYVLHRVLTRDGFHCEVIAPSLIPRKLGDHRKTDRLDAVMLAKLYRSGHLTAIHVPNEEQEALRRLIRLRYSYQEQCKSTKRRICSILLTHGLAYREGKSYWTKKHKTWLNTLRRDLTGPLQTALATELEHLEYLEMKRNALDADIERYAEQSPYRGYIEVLCCLRGIKILTAMTLLCEIDDINRFPSPRSLMAYFGLVPSEHSSGDREHRGPITKAGNKHARRVLVEAAWNNHHRAAADLILNRRRQGQPPEIVAIAVKAQHRLSRRFHHLSRTKHLHIAITAVARELCGFVWAILKAAPRCQGAA

SEQ ID NO: 421942 - protein, 311 aa, unidentified
MNLGIDVAKAHLDICVRPSGEEWRTEHTAAGITALTARVVALQPARVVVEATGGLERPLARALQTAGVAVAVVNPRQVRHFARAVGQLAKTDRLDAQLLARFAEQVQPEPRALPSVETAAAAELTARRQQVREMLTAEQQRLKQAASAAARAWVAKHIAWLEAELAEVEAALEKALTATPAGAQKAAVLRSVPGIGPVVTATLLADLPELGTLGRKPLAALVGVAPLACESGRLRGRRLIWGGRGRVRAHLYMAVLAGLRANPVLKTFYQRLHAAGKPAKVCLTACMHKLLTILNAMVRDGRHWAPKTLEA

SEQ ID NO: 421943 - protein, 370 aa, unidentified
MSVRRILAKTINTDLEYEAIGIDLAKNCVSVALLTTDGEVVCIDRLDYSELEKSAQVLCPTTFAMEPCTEMNYLVQKLEAWGHRCLVIGGKNVQNYVENHYSGQKTDLNDAQALAFLAQDTQLRTIKAKDMEQQKYASLTTLREQYIKQYRQTIVSLKGICQAWGLNISKGISGKARLKDLIENHAAFPEELKESLVDMVTHAQTAQKALNKITKTLEELAKSDKVCQLIQTIPGLGSICSCRLRATVGDIKRFKSPKDFPAYYGLVPRSIATGHNERKGKITHRGDRTMRSLMVQAAGSLVNMATKGKLKSKQLTKWILKKQKEKMPWGKLVCAVAAKLLRIVRAVLISNKPYNSKIAGVAKCSLPKAT

SEQ ID NO: 421944 - protein, 377 aa, unidentified
MWSESSDAQDGEVRVTVGVDTHIDQHVAVALDQFGRRLGIRSVPTTPAGFTALLAWARDFGVVEQIGIEGTGSYGAGLTRWLRARGLAVIEVERPHRHDRQARRRRGKSDPIDAEVAARAVQAGTVVGQPKAGDGHVEMIRTLRLTRRSAMKARTQAANQLHALVVTAPDDLRARLRAVSLAELVGLAAAFRPVRAGAALSTPLAAAKLALKGLAIRYRHLSAEIDALDVHLGQLVAAAAPDLIAVKGVGTDIAGALLVAAGDNPDRLHSEAAFASLCGVAPIPASSGKTNRHRLSRGGDRDANRALYLLALGRMGWDPATRTYVTRRTAAGLSKAEIIRCLKRYLAREIYRILVEPTATPSRPADADPTPPLAKAS

SEQ ID NO: 421945 - protein, 316 aa, unidentified
MSISETFIGIDVSKEQLDCASRPNGTTSSFKNSVTGIDALIKQLQEQRPRLVVLEATGGLERALVAALVVAQMPVVIVNPRQVRDFARAVGQLAKTDRIDAAVIAHFGEAVKPEVRTLPDQLTQEMDALMKRRGQLVAMLGVERNHLVSATSPVSNHVKEHISHLEELIKRLDQEIDQMIGKSPIWKAKDELFQSVKGVGPVLSRTLLAELPEIGQLSRQKLSKLVGVAPLNNDSGKRKGKRSCWGGRSRVRAILYMSALSATRFNPVIKEFYQRLLAKGKTKKVALVACMRKLLTILNSMVKNNTPWDPSFAQRG

SEQ ID NO: 421946 - protein, 368 aa, unidentified
MSQKSSKVYIGLDVHKESIDIAVGEEGGEVRHHGQIGGDMNALWRAVRKLESLGRELVFVYEAGPCGFGVYRGLIARGHACWVVAPSNTPRRVRDRIKTDRRDSVKLAGLARAGELTPIYVPDVRDEAMRDLVRAREDAVVMQRQARQRLTALLLRNDVRYAGKTAWTAAHRRWIADVRLAQPAQRLAFEEYVQAVEEATVRVERLTGYIAQEVAQWRWLPVLNALQACRGIQLLHAVRIVAELGDLSRFNHPRQLMSYLGLIPSEDSSGERRRQGCITKAGNGSARRALVEAAWAYQYMAKVSGLIARRQVKAPKAALDIAWKAQVRLCARFRRLAARGVSRNKIVVAIARELAGFVWAIGQQVKPV

SEQ ID NO: 421947 - protein, 343 aa, unidentified
MQVTTLGIDLAKNVFQVHGIDDHGKVILKKQLKRAQMAPYFINLPPCLIGIEACGSAHHWARKLQAMGHTVRLMAPQFVKPYVKTNKNDLADAEAICEAVGRPNMRFVPIKNVEQQAVLALHRVRQGFVKARTAQGNQIRGLLAEFGIIIPQGINNIGSRVPELIEDASNELPGSFRVLVQRLLDHLKELDRQVDELEAQIQAWHLSDLSTKIAQVPGIGPISASALIASIGDAKNFDNGRQLAAWLGLVPKQHSTGGKSNLLSISKRGDTYLRTLMIRGARSVIYHAAKKPESCSWVSAVVNRRNKNVAAVALANKNARIVWALLAHDRRYETGYTRAVEQT

SEQ ID NO: 421948 - protein, 367 aa, unidentified
MNYKLKAAPTAVSKEENSQKEPKANRIAIGVDTHLKSYQAARKIDKGAVGVAQTFRSKEALLLYLEKQREQSKEVVVLYEAGPLGYTLYRELKAKDIECLVCAPRSGEQKRKRRKNNAIDARSLTSELSNYLNGNEQALQLVRVPSEAQEQARVESRQHDALVQERKRIGAVGNALLLSQGYGSWSNWWRPKAFERLSRVVAGWVLKQLQRWVKVLGELDQQIQQAKVELSQQWKGPRPKGMGAPSLAQLKAEVLDYNLYSSGRKIGCLAGMVPSEWSTGNSQRLGSITKVGVPAIRRILTEMVWRMILFQPEYKAVQKWREVLEGSNRGLKKKAVVAIGRQLMVDIWRLQTGRISAQALGLIMIEA

SEQ ID NO: 421949 - protein, 330 aa, unidentified
MESWNVILGVDVSKLTLDICCAEKRLYIKIGNDSKGFSVFKKWCKTNAIDLEESLVVMEYTGGYEYRFMQFCESLSVSYCRIPGLEIKQSMGMTRGKSDQADAFRIGQYGEEKRKRLEPSKPLDNHILRLKQLLSFRKRLVRERAGLESTIKERKHMYALQKADTITHIAQAKIKADKKYITQLEQEIMEVIKSDEMMLLNYRIISSIKGIGPINAWMTIAYTENFTSFTDARKYAVFVGVIPFEHTSGTSIKGRKRVSHLAHKGLKSELNQAAKTAITHDPEIRAYAERKFKSKVYPLVLNNVKFKLILRMFSLVKRGEKYVENYKRAA

SEQ ID NO: 421950 - protein, 315 aa, unidentified
MMNEQTYCGIDVAKRHFVIGLSTQKRTKTETNNPKGIAHTIEYLRRFSVDLIVLESTGGLELPLAKALHRTGFRVVIANPRQTNQFAMSQSLAKTNNKDAKMLAFYAQMLAMRDNVAQQLYIPPTPEQEQLEALVSRRNQLIEMRFAEKNRLEQVHSTQVFSVEQHIDYLSLRIDELDREIEQHLKHFDDTIKKFKDIKGLGTQTIAVLMSMLPELGQYTHKQIASLVGVAPHPKESGNTKWKSRCSGGRKAVRNALYMATFVCVRFEPKLKQFYERLRANGKAFKVAINACMRKLLTILNAIVRDDSQWDAHAL

SEQ ID NO: 421951 - protein, 359 aa, unidentified
MIKNSMLFVRLDLGDRFSYITIVDQDGELIEETRLPTTKASFERKFASFQPCRVAMEVGTHSRWASHLLRELGHDVLVANARKLRAIYHNPRKGDRADAETLARLARLDPELLSPIHHRSPEAQADLAVLRSRDAIVRSRTLLINHVRGIVKSSGARLPSCSADSFAHKAAPAIPERLRTALLPILETIGSLTHQIHKFDEQIERLCQDQYPETKLLRAVSGVGALTALGYILTLETPDRFRRSREVGPALGLVPRRDQSGDQDPQLRITKTGDAYLRRLLVGSAQYILGPFGPDCDLRRWGLKLAERGGKNAKKRAVVAVARKLAVLLHHLWKTGEIYDPFYLARKHNRATEAVPAAA

SEQ ID NO: 421952 - protein, 458 aa, unidentified
MSRSKSTDRVRRTIAVVHPNAAAIDVGATMHMAAVNADRTPEPVRSFGTFTTDLHRLVDWFAECGVDTVVMESTSVYWIPIFEILDAHGFAVFLVNARDAKHVPGRKTDVSDAQWLQRLHSFGLLRASFRPKGQIAELRAYLRQRERLLEYGASHIQHMQKALTEMNVQLHHVVTDITGATGLRIIRAILVGERNPAVLARMRDRRCHATVETIEKALAGNYRAEHLFALEQALALYDTYQQKASACDARIEAVLKELSAHRGRKAGPLPSPRQNRSRQQNSLLFDVRTALFALLGKDLTQINGLGPYLALKLIAECGDDLSAWPSAKHFTSWLCLAPSNKISGGRVLSSRTRRSGSRAAALLRLAAVTVGRTDTALGAFYRRLSARIGKAKAVTATARKIAVLFYNAVRHGMDYVDPGASSYEIRYRARVIDNLHRRAKAFGFMLQPMAPTPGMAVS

SEQ ID NO: 421953 - protein, 298 aa, unidentified
MNKLNAIGVDLAKNVIQVSVLSPSNRELRNSALSRRKFAEFLAKQRPGLVAFEACATAHYWARTAQRHGHDVKIIPAKAVAPFRQGHKTDENDALAVAEAARRPNVKLAPLKTVEQQGMQAIQRSRELLVHERVALSNHLRGLLLEFGIVIPQGFASLYRQLPEILEDGENELPDLYRPTLNLLYATLGTGEAFVNGRQFAAYLGLTPKQFSSGGKVNLVGISKRVANRRLRAVLIQGARAYVYHMKEPNTTKDRWLWAIVERSGKCKAAVALANKNVRTAWAMLTQNTEYQRYPLAA

SEQ ID NO: 421954 - protein, 440 aa, unidentified
MTMRKRDEVVYENAAGIDVGGSSHWVAVASHLAQEPVREFGTMTDDLNALAQWLLDCGVDTVALESTGVYWIPVYEVLEQRGLKVWLVDARQLKYVPGRKSDIQDCQWLQKLMSLGLLRAAWRPAGEVCVVRAVVRQREILLTEQASWVQRMQKALLQMNIQLGEVLTDVMGMTGEAIIRAIVAGERDPLVLAEHRNYRVKASAADIQRALTGNWREEHLFVLSQALAMYDALAQRILECDAKLQALLGQLGHREVELDGPAKPAGKNTPRFDLRTALARWAGVDLTRINGLAVSSVLTLLSEIGTDLSRFASVKHFCSWLSLCPGTKISGGKVLSSRTRRSSNRARQALKLAAMSLSRNGSALGAFYRRLCARMDKPRANTAVAHKLARMVYFMLTRGEKFVDRGQQHYEEQQRQRSIAALKRRATALGFQLNPMTAAT

SEQ ID NO: 421955 - protein, 345 aa, unidentified
MTPPTNRPAYQLFVGIDIAATTFTAVWTTDGPPQERARSFGQTPAGFEALQAQLQATGVAPGQILVVLEATGSYWVALAVALHEAGYVVSVVNPAQAHNYAKSLPRRAKTDLLDAAVLAQFAAERRPCPWTPPPAVYHELRQRLLARDALLTMRQQARNQRHALLQWPIVVESVRQQLDSLIADLEKRLTELDSEIAQVLSEGAWAESATLLLSITGIGRITTAWLLVGTLNFQACRSAESAAAYAGLVPLAHDSGSSVRGRAQIGHGGHARLRTALYLATLTAARFNPIIKAQYERLRAAGKPMKVARCAAARKLVHLAWAVVTKRQPFDPSYGMRMVEERRAA

SEQ ID NO: 421956 - protein, 338 aa, unidentified
MVLIGIDPHKASHTAVAVDEKEVALGELTVRADRHQVERLLKWAIDYPERLWAIESANGLGHLLSQQLLAAGEEVVDVPPTLAARVRVLASSKSQKNDPNDALSTAIAALRAPRLRTVAREDHGAILRMLGDHHHDLGSLRTQAICRLHALIRSLVPGGTGIRLSADRAAAVLRKVKPTNFADAERKRLALGFISDIRRLDSEIADSKARIVKGVRACATSVVEINGVGPIVAAFLIGHSGDMSRFKNRDHYASYNGTAPIEASSGPKKRHRLNPRGNRQLNHAIHVIAVAQIRHPTDGRRFFDRKVAEGKSNKEAMRALKRHISNAVYSHLVIDSSR

SEQ ID NO: 421957 - protein, 480 aa, unidentified
MAKRAVQHADLKAVPMLLNESLYVGIDIGKAKHVAGFLSKTLLERHERFEACPALVFENSREGFRLLIERIRSLAPLEHIFVLMERTGHYHRTLEQYLQELDITVYVMHVQSRSTGMLKTDKRDALTLANQLYNQLELGVQVPNKLQLIRRVVPPTQAAAELRGLIRHRYELIHESTRRKNKLTAICDELFPELVRVVKDPNGQVALALRERFPTPAALATVSLTPLQQIRGGARSISSAKLLELQRQAAQSIGIKEVARLRGLVLEQTQLIKELQMLQEHIQQLDKEIGGIVEHAREGQILLSFPGIGPIMAATSIAAIGSIHNFPSAAALKSYFGWAPVVAQSGSTLDHTRLTHGGARTMKHMLFLAVFQAIRLKDNEWARLYERLVKTKCPFDERTQSYLGKTRVIGRVAGQMTEAIYALLKRDAELLSKVPPSQDPPPPLLYDPEVHRQHHLGHYRPLKSTPPPNTITLLHPFPAE

SEQ ID NO: 421958 - protein, 412 aa, unidentified
MELRPIHRRVIGLDVHRAQVTACALIEDPDGQVRIERRQFGAFKRDRAALADWCAHLRPDVVVMESTGIYWKSPYAALERAGLAVLVVNAHHVKNVPGRKTDVADAEWLASLARAGLLKRSFVPQRKYRELRLIARQRQKITGMLAAEKNRLAKVLADAGIGLGVVVSDLNGKSARAMVRALIAGATPEAALSQASRQLKAPREAIGASLDGEISEAHRFVLSELIAHIEDLEAKISRFDAYLLAHLEQPAERQALALLQTVPGVDLIGAAMLLVEIGIDMTAFRRPDDIASWSGLCPANNKSADKRKRGKPLKGNTYVRRLLCEFANAAARTACVIQAKYRSLTLRRGHKRAIMACAHKMIRAMHAMLRRGEPWRDGTVDLDALIVKRNAPRWIKALARHGYLSATAATTR

SEQ ID NO: 421959 - protein, 345 aa, unidentified
MNILAMDLGKNNTVICLYDALSGKHKFSKIKTTPQQIHNVLAENSPDKVVFEICSSAGWIYDICHTLKLNTDVANPNTQAWRWKNVKNKNDKKDALKLAQLSAMNQLPIVHMPKPDVRQKRALIQYRHTLVERVVAIKNNIRSILDKQGLSMPAGKSGWTNKTVESLNNETLPFEKCDVYNLWRGQLYIEIQMLQSTQKALADITAELDKQAQSNEDIKLLQSAAGVGPRLAETISAFIDEPQRFTSGKQVGSYAGLTPRQYQSGSMDRQGKISGQGNKLLRALLVEVSWLGLRHNSWMRQTYDRLLRGSPSRKKIAITAVARKLLVRCWAMLRDGIPWQVKAAA

SEQ ID NO: 421960 - protein, 349 aa, unidentified
MEKNTTVIAVDLAKTVFQIAISETPGEVARCRRLNRAGFQAFIEKLAPAIVVMEACGSAHYWGRRLQALGHSVHLLPAHLVRPYVPRNKTDRADALGILEAWRNKDIHPVPVKTVDQQALGGIHRFRSGWIGSRTAQVNTIRGLLREFGILIPIGVEKVVPQVRLLIEDADSQVPDGIRASLAAACEEVELLDQRIKQAEKELESLCGQDPVASRLRSTPGIGLIVGTALVARVGNVDRFRSSRHFASYLGITPREHSSGLKQRFGRISKRGDGYLRMLLIHGARSVICHAKRLKSQEHDGLRLWALKLQSRTRHNKATVALANKIARIVFAVWKHGRPYTPAQARAMA

SEQ ID NO: 421961 - protein, 307 aa, unidentified
MYVGIDVAKDRLDVHVRPAGEVFAVTRDGEGLAELVARLETLAPQLIVLEATGGFEVTVAAALAAAKLPLAVVNPRQIRDFARSTGKLAKTDALDAAAIAHFAEAIRPEPRPLPEEQAQALGELVARRRQIVEMVVAETNRRRQLTRRALIKRLDRHLGVLQEELSAIERDLDDTIRGTPAWRESEDLLKSVPGVGDATARTLLADLPELGRLDRKQIAALVGVAPLNRDSGRMRGKRSIYGGRAPVRAALYMAALAAARWNPVIAAFHKRLRAAGKPPKVALTACMRKLLTILNAILRDRQPWRHA

SEQ ID NO: 421962 - protein, 318 aa, unidentified
MKALRTNVAGVDVHKDMLAITTMIGAGDADPVVEHFECSTMTDDLRAMGIVLKERGVRDVAMESTGVYWKPVYNVWEPLGLNLTIGNATHMKNVPGRKTDQKDAEWIAQLHRFGLIKASFVPDGAYQRLRLLSRHRTNLVEDLSRVKNRVEKVLQDGNIKWSSIVSETFGVAGVKIIDLIADGVTNAQTLAASVTTKIKRKDEAQKALTNCLTKEHIFVIKELMQQYRDLRARILEVENQMMENAKPYAHLIEKLDAIPGIDKILALGIIAEATADMSSFKSDRSFAAWCGVASGNNESAGKKKDQNAGTATRTSENF

SEQ ID NO: 421963 - protein, 404 aa, unidentified
MKGPIVSIDVSKGKSDYQAFKNLNVKYTGSHSIKHTKEGFDEIVNLVREMEKKLEAEVCVVYEATGVYHRVLKKVLEDNNIKQFIINPLLSAKTRKNDSLRCPKTDKLDPKSIAKTYYSHSLHNSHKQETIYHELRELSRYYEDILVHIRKDKVAFRAQLDIVFPGYDALYDDLYGPVALAVIEKYPHPEMLQKKKINTVSKVIQSKTCHRQAVSDTMADKAIEYSKTIYSGCDKDDIEVLILQRFIKKLNEDMAEAERTIGEMIKLAQELPDFSIIKSIPGIGDNLAARIIAELGDMTRFKKKNELVAFAGLDPRISESGKNDGDHMHITKKGNKRLRCLLYLAVTCSIRLKRDDNSIKDFYIKKKQQSNPMCSKAAKTACASKLVRIIYSMCKTGELYQYNK

SEQ ID NO: 421964 - protein, 401 aa, unidentified
MWFVGIDWADKKHDVVVIDEAGRKVAQLRITHTPEGLAKLVSFLKELAPLDQLACILETKHGLLRPALLEAGVPLYPVNPKTIDRKRVASGAKTDLIDAYLLAKHGRAELADLRRLEPDSPTIAELKVLTRDQESLIQMQTRLVNQLTACLKAYYPVALTLFSKLQQKVTLVFLQTYPTPQAAQAATPEHLMATLKQAGHPTPEKTASSIFEALRQPQLRADEVTIKTKSRLMLALVAQLLPLMEQIAAYDKEITERFLTHADSQIFASLPGAGKRLAPRLLAEWGDDRKRYADATSLQALAGTSPVPFESGTYATVHQRFACIKPLRNTLYQFAWQSTLQETWASVYYERKRKEGKSHSMAVRALANVWVRILFAMWCKGEEYQPRIFEAARKQHAPRAA

SEQ ID NO: 421965 - protein, 345 aa, unidentified
MEITTVAIDLAKSVFQIHGADKRGKPLVRKQLKRDQMASYFANLPPCVIGMEACGSAHHWARKLQGMGHTVRIIAPQFVKPFVKGNKNDRADAEAICEAVSRPTMRFVPIKTVDQQALLSLHRARQSFVQARTAQANQIRGLLAEFGVIVPVGIIHVTKQVPALMELAGDDVPLMLRGLIDRLLDHLKVLDTHVQQLELQIKTWHRDHVISRRLEEVPGIGPITASALTASIGDAKAFKNGRQLAAWLGLVPKQHSSGGKENLLSISKRGDVYLRTLLIHGARAVIYAHIRKTNPTDNWLTKLIARRNPNIAAVALANKMARVAWALMAHDRRFQPDYISASLAS

SEQ ID NO: 421966 - protein, 319 aa, unidentified
MAQNEVVVVGIDVAKDKVDACIRAFKLRQTWLSTAQGHRKLVAWLRKYQVNKAVMEASGGYERAWARVLREAGIEVRIVDPKRVRSFALSAGRLAKNDAIDAEMIAWFAETFSEAPSQPHDAAREELQALVKARLDLIDFRMRLVSQSEHAAPGLVQKAHAHILKSLASEIAKLEAAISAKIKSTPDFAERAEIIESVPGFAQTSSANLVAGMPELGQVSDEIAAALIGVAPYDDDSGKRRGERHIKGGRRWVRNAIYMPCVGAATQNNPVLKAYYQRLLAKGKEPKVAIIACMRKLIVILNTMIARRQKWDPSRYVLS

SEQ ID NO: 421967 - protein, 342 aa, unidentified
MSVYVGIDVHRKRSQVAVIDARGEVLANRNVPNGAEPILKVIGGLPPGTPAAFEACYGTSWLVALLEDYGFTPHLVHPSRCKAIASARLKNDKVDAAILAQLLRADLLPEAWIAPPAIRQLRALLRHRVALVRLRTRLRNRIHAIVADYGYDRPAGGYWTGPGRAWLAALELAAVSRELVEDYLGLIDALQDRIDRLDWEIRQRARSDPQVKVLTQLPGIGPFTALVIVAEVGDISRFASARKLASWAGLTPTVRGSDRVAHYGHISKEGSAWLRWVLCEAAQTAKRHPQFAASFQRIATRRGRKIATTAVARKLLTRAWHLLASAGHAAAPQPAAPQPAAR

SEQ ID NO: 421968 - protein, 345 aa, unidentified
MDQISRIGMDTSKHIFQLHGVNAAEAPVLRKKLRRKEMVTFFEKLAPTEIAIEACGASHHWARLLQSFGHSVKLIPPQLVKPYVKRGKNDAADAEALCEAMSRPTMRCVPVKTAEQQAALMLVGVRDRLIRNRTQLANTTRGHAAEFGLTAAKGMAHLVPLLERIQAAESLPALARELFAIQAKEYAQLQAQIDEVDAKLMAWHRADECSRRLAKIPGVGPLGGVLLRMKTPEPELFRSGRQFAAWIGLTPKDHSTAGKVRLGVITRAGDEGLRSVLVVGATAVIQHARRGGRASPWLAELLKRKSPKLAAVALANKIARIAWKLMLTGEAYTTKSAPAAFAGAV

SEQ ID NO: 421969 - protein, 304 aa, unidentified
MSKAKLDVCIEPGHRLASFNNDTSGIAELAAFCREHKVELVVMEASGGYERRTFIELWEQDISCALTNPRSVRRYAEAMGILEKTDRIDASVIARFADAKGLAPTPLPSQAQQRLKALVARLRQVTDDLVVQKQRRSSMFDNTEMQASVDEVIALLKRQSRSLEGEIASMIDDDPLWAKLADTWRELKGVAGRTVARLHAELPEIGTLSNKAIAKLAGLAPLANDSGKRKGKRPTRGGRAGVRSILFLVAAIVARYDKNIGTFKERLVKAGKEKMVIRIALARKLLVILNAKARDARAQYANAT

SEQ ID NO: 421970 - protein, 383 aa, unidentified
MENSSSYYCPKTSVIVSVELSKRNWLVASLSPGAAKPSLRTIPAGNSAELISHLRNLECKAADRIGEPAAIRLCFEIGYDGFWLARLLRSNDIDTYVLDPASFLVSRRGRRAKTDRIDAEAMIGILKAYLAGDKSVCRVVDVPSPEEEDARRVMRERGDLVHERTRIISRVRGLLAVQGIRTVKAIKGGDWSKQLDDMRTGDGRPLPPNLRRQIERCFERLALLNDQIKDIERDRAEVVLHEESTFPCREKAVRLEQLKGIGPNSAAMLVAEVFCRKFESRRHVAAFLGLAPAPFASGDVSRDQGISKAGNRSTRVQMVELAWCWLKYQPSSELTVWYRNRFKGNGARAAKVGIVALARKLLIALWRFVETGLVPQGAELRAA

SEQ ID NO: 421971 - protein, 461 aa, unidentified
MSRRKSKRTKGIEEAHPFAGMSQVNANAAGVDIGAEEIVACVEGAENMQIVKGFGNYTVDLQAIGQWLGEHHVKTVAMESTGVYWIPLFEVLEGMGFQCLLISSRSLRRVPGRKSDILDAQWIQTLHSYGLLESSFRPQADLVALRTLLRHRAQLLEHRAPHILHMQKAMLQMNVQLSQALSDITGETGMAIIRAIVAGERDAEKLAAYRDRNCKKSAEEIGRALTGTWRAEHLFVLKQSLEMYDSYTRQVEVCDAEIDRLYALTRPDWDGGELKPLPMKKRNSHSKNAPKNQEAIRAHLKRISGVDVCAVEGIGVGVAQTVIIECGTDLVQFPKEGNFSSWLGLAPKHEISGGKVLKNRTLKTKNRAGQAFRMAAQSVKRSDCVFGMMFRRFRARMDNRQATVATAHAIARVVYRMLKYKVEYDQIDVTEYEKQYEEQQIKYLKKKAGKFGFQLVPTASA

SEQ ID NO: 421972 - protein, 340 aa, unidentified
MSNLPLFVGLDYHQDSIQVCVLNQQGDVLLNRSVGNDCDQVARAIDPLGGRVQRVGIEACCGAADLGEELVERLGWNVSLGHPAYVARIKSSPDKSDYSDGRLLADLTRVGYLPRVWLAPAHVRELRQLVNHRQRLVDHARALKLQVGAVLREQRVTIAADRGSRWSKGWTASVRDHDGLSRHARWIVNDLLDDLRYAKGTIAAAEARLRGAAEGDPVIARLMRQPGVGEVTAWVLRACVGDFGRFKTAKQLSRYCGLSPCNASSGNRVADAGLVDACNKLLRATIVQAAHRLIRTTDRWGTLAASLRRRGKPSCVIVGAVGNRWVRTLHHAMGPNPTMP

SEQ ID NO: 421973 - protein, 312 aa, unidentified
MDSQIAVGIDISKRTMEVAIGYEQSTVIFGNDDAGHQALIKALKNYQVSLIVMEATGQYQLACACALQAAGFAVVVINPRQARDFAKAMGRLVKTDSVDARMLAELAQVLNRRPDRDRFIKPMPDQAQQQLHALVLRRRQLVRLLVSERQRKHMAHAEVVQDITELMDVLAKQLETLDRRIAEHLAQYRSDLATLLKSVKGIGPATAATLISELPELGQLKAKQICALVGVAPMNRDSGQARGKRIICGGRATVRSALYMAAIVAMRYNPVIRRCYERLLAAGKPKKVAIVACMRKLLIIMGSPQKTENKAR

SEQ ID NO: 421974 - protein, 342 aa, unidentified
MQVTTIGLDIAKNVFQVHGIDAAEKVAVRKQLRRGQMLAFFKALPPCLVGMEACATSHYWARELTKLGHQVRLMPARDVKAYVKRNKNDAADAEAICEAVRRPTMRFVQVKSTDQQGRLMLHRARDLLMRQRTQLINALRAHMAELGIVAAQGREGVKELLKIIASEEDARMPVDAHGSLVVLAAGLRALQTMIGSIEKRIIAQHRSDEASKRLRSIPGIGILGATAIAATVPDPKVFRSGRDFAAWIGIVPRQDSTGGKQKLGPISKRGDQYLRRILVVGAHAVLKRARHQPEKYPWITRLLERKPFRVVAVAVANKMARVAWALLARGGSYRAPALAAAA

SEQ ID NO: 421975 - protein, 403 aa, unidentified
MYVLALDVSMGKSYVVIYHENTCLFEQEILHDKTHFNALLQEIYALPERPQIVFEATGVYSRVIETFCQKNHFAYCLLNPLEAKKQLNIDLRSVKTDKRDAHRLAQTHGQFLRKQKQSQTEVYKQTRDFARFYQQIERDIKRTRMNLHTALQLTFPELETLFTNRLSKLALNLVELFPHPDYLAHLSQTKVKNVLKKNTDKKISDQKALAKAQTLLSLAQNSYPAESGQSISVQKVVYYAQQLKQLLVTKEQLAKQLVEIAKQTIEFDFYQSIPGIGELSAGLIIGELGDIRRFSSHKQLNAFVGVDTRRYQSGKYTAKEHMNKHGNPKARKNLYFIMMNMIRQQAAGPNHLVDYYYKLKTQPSPKKHKVALVACINKLLKCLHSMVRHSSPYDYSYTASNDQ

SEQ ID NO: 421976 - protein, 400 aa, unidentified
MDPVIGLDVAKGESQVQAFLQRKETYKESFKFTHDLPGLHMFHRFYQELEKVSGQPPAVIFESTGHYHEPVLQFLEDQDIAYYLVNPVISFEARKTSLRQVKTDKADAYHLGELYYKEDLEIYQRKTEKALNLRLLTRQHSALTDSYVQIKLQFQVALDQIFPEYHHVFSDLYGKLSLNTLLNYPTALDIQEVADEKLAEEMRQFGARRSHIWFLDKAQQLKEAARRNPYQSQISHGQLISLRMYIHMLFQYQEHLTELLKEISILAKSFEEYKLIQSVPGIGEKIAATILSEIGDINQFDNPKKLVAYAGLDPSVFESGKFKASINRITKRGSSRLRQTLYTAVQCGLAKGRNKKIIDFYERKRNEGKPHKVAVIACANKLVHWIHAMLKRQEVFVDQV

SEQ ID NO: 421977 - protein, 316 aa, unidentified
MKVGIDVSKLTFDASWIDGENHQQHCFDDTDLGIEAFIELMASDAHIVMEATGVYHSRLALKCYEAGLSVSVVNPVAIKRFGQMLLKRDKSDKADALLIRLYAESQDPEQWKPSSESINSLRQALGWIDDLTRERTMVSNREEAIRHNAAPCEFVVYEIRDLRKYLKERIQRAEQYLKATVKKHFPELYERLQTIPSVGEKTATEMIVITEGFTKFASDKALAAYVGVSPTTYSSGTSVRGRGGISRASKGRTRQLLYLCSWTARRSNPACTALYNRMIAAGKPPKVISIALAHKLLRQIFAVGMSSQNYRAEYAY

SEQ ID NO: 421978 - protein, 385 aa, unidentified
MTQAAQISGFIPRDHDIFGGLDVDKKSMAVTFRDHGTMRKSLKLPNSASQLLNYTRKHFPGQRVAFVYEAGPTGFGLYDELTAANYPCLVVSPSMVPTAPGQRVKTNRLDGNKLSEGLRGGQLRSIHVPAASYRELRHLVQLRDTQVGQLTATKCRIKSLLLYEGIPFPAANDRWSGQVLRQLEALPCSAAVRFKLDRLLDALQFHFQSAAVVQKEIRRFCQSDPELRQSLSVLTSLPGIGTITATHALARLGDWREIRNVRQIAGFLGLVSSEHSTGDKENRGPITRSGDSRLRNKLIQCAWVAINQDPELRAFYRRIYQRHPRKVAARKAIVAVARKLTTRMYAVLKEQRPFVIRADSSVAPLTAEETVGPRERLDTAQNEQH

SEQ ID NO: 421979 - protein, 370 aa, unidentified
MDENIKFFVGLDVHKDTIAVAVAEAGREPARLVGSIAHDVVKLRKLLARYGEPARVLVVYEAGPTGYGLQRALARRGYPCQVIAPSLIPKRAGDRIKTDARDGLRLAELSRAGELRAVWIPDPADEAIRDLARAREDVVNARTQARQQLKGFLLRHDVRYAGKTSWSKTYYRWLATLNFGWSGAQTAFTEYWQAVTAADERVARLTGALAHSIQGWRFEAVVNALQALRGVDVVSAIGLVAEIGDIRRFAHPRQLMAYLGLVPSEHSSGERVVRGSITKTGNTHARRLLVEAAWNYRFQPRIGRRAQQRAEDLPQAIRDVAWKAQLRLAGRFARLRARGLQINKVCVAVARELAGFVWAIASAQAKLTPN

SEQ ID NO: 421980 - protein, 385 aa, unidentified
MLSRANNTETSIRTDLRAIFVSLELSRTTWLVTSLSPGTREKMSKHSVPAGDIGGLLTRLRSLQERVRARRKQLSPLVVIQEAGLEGFWIHRVLTENGIESHVVDPASVATSRRRRRAKTDKLDGDTLVRTLLAYKRGEPRVCAMVRPPTPEEEDRRRLSRERRVLLKERVQHSNRIKGLLFAQGVTGYEPLGRDRRHRLVGLQTGDGRPLPPHLKAQIDRELDRLEMAVEQIKAIEDELRHAIVAADTVTPVPRMLIELKGIGNEFATVLWTECLYRSFDNRRQVAAYAGLAPTPWQSGSIDREQGVSKAGNPRLRAMLLQLAWLWLRHQPGSVLSQWFLDRVKANGGRLKKPTIVALARKLLVALWKYVTYGVVIEGAVVRAA

SEQ ID NO: 421981 - protein, 342 aa, unidentified
MKQYVGLDVSQKETSVCVVDEVGQVLFEGKAKSDPGALAALLRKRAPQAERIGFETGAMASWLWHELRRVDLPVVCIDARHAHAALSVRMNKSDQNDARGLAELVRVGWYREVKVKSEESQKIRAILVARSRLVSMRRDIENQVRSLIKEYGLLFPRAIGQQFRNLVSELLSDNHPLLSVITPLLLIHEHICQQQNKFDDEVRQLAKADETTRRLMTVPGVGVVTALTFRHTIDDPSRFRSALTVGAYLGLTPRRNQSGETDINGKISRWGDRLLRTYLFEAATVLLYRTKKWSSLKAWGMKLAKRIGMRKAKVAIARKIAVILHCIWVDGTSFDWGQPQPV

SEQ ID NO: 421982 - protein, 362 aa, unidentified
MSSIALERTDVIVGVDTHKDEHVAVVIDGLGGRLGEYYLSVTNSGYAELLAWAKSLGRVHAFGVEGPGSYGMGLARFLRRHAQTVIEVSRPPRAGQRRLDGKSDPIDAEQAARHVLGGQATATPKVSDGAVEAIRLTRIARNTAVKAHTQAIVTLKATLVTASDELRAKLQPLTDYKLMTACVGLDNDGDPSDPDVAMRHVLCSLARRWLDLHEEINTHTKRLKKLTTATAPRLLDAFGIGPDIAGELLVAAGDNTDRIRSEAAFAKLCGVCPIPAGSGKTGGRHRLNRGGNRQANAALFRVVIVRVRWHAPTIAYVERRTTEGLSKKEIIRCLKRYVAREVYNLLPPPRDREVSLSPACDL

SEQ ID NO: 421983 - protein, 387 aa, unidentified
MPASGPRPGQVAVQVSLAAIFVSLELSRSTWLITSLVPGGADKMSKHSVRSGDVAELMAHLAKLRDKAHVRAGACFPIITIQEAGLDGFWVHRVLERAGIESHVVDAASILTSRRRRRAKTDRIDGEALLRTLLAYKRGEPRVCTMVRAPSPEEEDRRRLCRERKTLVAERVAHVNRIKGLLFAQGIADYEPLHGDRRQQLEALRTGDGRPLPPYLKAQIGRELDRLELLLEQLKAVEAERNAVLEPANDVAPVAVQALAGLRGIGPEFTAMLWSECLFRSFRNRRQIAAYAGLAPTPWQSGSVQHEQGVSKSGNPRLRSTMIQLAWLWLRHQPTSELSLWFRERVKRNGGRGKKTAIVALARKLLVALWKFSSSGVVIEGAMMKAA

SEQ ID NO: 421984 - protein, 344 aa, unidentified
MNKLSRVGIDLAKNIFQLHGVDRHGKAVWRRRLTRDKWLKVLLGKVEPGCEIGMEACAGAHHWARQLQAKGFTVRLIAPQFVKPYVKSNKNDANDAEAVCEAMSRPSMRFVAIKTVGQQDIQAIHRVRSELIGQRTSKANQLRGLVAEYGLVAPQQLARLRAAVPVWLEDAENGLTSRFRELLNGLWDDLKTLDRRVAELDREIDVIAQSDPVAKRLQQLRGVGPMVATALVATVGNAEQFANGRQMAASLGLTPKQHSSGGKDRLLGISKRGDAHLRSILIHGARSVIRTAKLKDDRLSQWVTSLAERRHPNVAAVALANKTARIAWAMLRHGTNYEPGYIAA

SEQ ID NO: 421985 - protein, 353 aa, unidentified
MKYVGLDWAYRTAQWCALAPGGEIASEGRIAADRDGLARLVLELGDEVTACLEMMSGALWVRDQLVDCGWQVEVADARKVKTVAPLAAKTDKVDARLLAELSRRELVPALWLPSLDERALRERLRRRMHLVRLRTSAKGRIFGLQTQWGVRVSLARLRRADGLTLLERAGVPEVWRRSVGECLALIDFLDARLEPLDAELRPFAKADPRAVLLDTIPGIAELLALTIAVEVGEISRFASPEKLVSYGRLAPRVRQSGQARPRSGPLSKSGSRLLGWAAVEAAQQAWRESNPWHGLYVDVSARSGNRNSAKAAVARKILIAVWHMLSRNEPFNPAPRSTRGDSVPASSRLALAA

SEQ ID NO: 421986 - protein, 330 aa, unidentified
MRFRYFLGIDVAKAKLDCMLLDSVEERRRSKVVANTPEGFQVLVKWLAKQGVGCAQVHAILEPTGVYHERALFALAQAGVAVSLVNPAQLRRFAEGLGIHTKTDACDSAVLARFGEMVKPAHWQPAPLKARELRALLARRDAVAQDLQRERNRCEQLVIEDTPERVRQSLTDAISFLEEELQALQQAIDKHIDDDPDLKRIWDLLQSIPGVGQRVADHFTALLSGRDFKSAEQLAAYLGLVPTERQSGSSIKGRPRLSKAGSASLRQLLYMPAVVAIRRNPHIKALYERLLAKGKAKMSALGAAMHKLAQLCFGVVRTGQPYRADWPVKT

SEQ ID NO: 421987 - protein, 347 aa, unidentified
MDYYAGIDVSLEASSVCVVDGAGKIIREAKVVSEPEVLIGGFAALGFDLTRIGLEAGPLSQWLYAAMKQAGLAVELLETRHVRVALQTMPMKTDRNDARGIAQLMRLGWFRPVHCKSLAAQETRALLAARKLVQSKLYDIEMSLRGILRGFGLKVGPTTSKRFARRIEELVAGHATLEVIAKALLSAHAALLREFDMFEKRVRAIARQDKRVRLIMSAPGVGVIVALTYVSAIDDPSRFSSSKRVGPHFGLTPRKYQSGETDVTGRITKIGDAGVRTALYEAANVILTRPVKGAGLKSWAMKLARRAGMKKAKVALARRLAVILHPMWVDGTPFDANKAAFTVVAAA

SEQ ID NO: 421988 - protein, 341 aa, unidentified
MDHVAIDLGGTESQICVRGPDGKVLEEIRWGTRRLAAYLKKRPPSRVILETSTEAFRIADAARELGHDVRVVPATLVPSLGVGARGVKTDRRDAQVLSEVSSRIELPSVHIPTEISRTWKSTCTARESLVSARTQLVNTVRGWTRSQLLSIRSGSLCTFPDRVRKAAIASSIGLPEFIESVLQVIATLNDRIAFADKQLKDLAIEHPVCERLMTIPGIGPVTAVRFVAAIDRVDRFRNAHALECYLGLVPGEDSSSKRQRRTAITKAGPPQVRWTLGQAAWVLRQKYKSDPLALWAAEVEKRRGKMIATTALSRRLAGVMFAIWRDGTRYEPTRHRPPTPL

SEQ ID NO: 421989 - protein, 337 aa, unidentified
MTAVHILAIDLAKRSFQVCATDRGGAVLFNRALSRARLQQLLSEQPPCIVAMEACATSHFWGRFAQSCGHKVRLIPPIYVKPFVKRQKNDAADAAAIAEAALRPNMHYVEVKSAEHQARAVAFRTHQCFVRQRTQLINALRGHLGEFGIVVAQGPANLTAVAGVLADETNDLPDGVREIGQLYLDQIRLLTEKIDGLMLKLREATKANEDMRRLCTVPGVGPVTAGAILAFAPDLRAFKSGRNFAAWLGLVPRQHSTGGKTRLGGVSKMGQTDIRKLLIVGAMSLIRWIVRKGVLPDNWLGGILGRKPRMVAAVALANKMARIIWAMMTREQNYRMA

SEQ ID NO: 421990 - protein, 319 aa, unidentified
MMKTEPIYAGIDISKDNLDLAVHPRQQIRRFHNTATGINKMVEYIRDIGPVLVVMEATGGYEIAVVAALGEAGIPTAVVNPRQVRDYARSTGKLAKTDAIDAQILADFAAVVQPQPRPLADTQTQELKDILARRRQLSEMITAEKNRLHRARGALVDHIRAHIIWMEKELLEMDSELKRFVEESPMWREKDNLLRSVPGIGPVLSSTLVAELPELGTLNRKQIAALVGVAPINRDSGKMRGKRSVWGGRGSVRSALYMGTLVATRFNPVIRRFYERLIASGKAKKAAITACMRKLITILNAMIKHHVTWRYTPDLAVIS

SEQ ID NO: 421991 - protein, 381 aa, unidentified
MLYSPCMSCSVYFMDDGFVGVTDRPARGRKARGRAWVVAPLVIDPEQLPGPPSPYRARSGQREKDIMSVEMNVGIDVAKATLDVAERPDEVGWGTTNDDAGIGTLVARWTVSRPARIIVEATGGYEMRLVTALVEAALPVVVVNPRQSRAFAKATGQLAKTDKIDARTLAHFGEAMRPAVRPLPDAQTRALSALLARRRQLIDMRTAERNRLETVDRPIEREIQTHLRWLNKRIDAMDRQLDKAIKASPVWCQKDALLQSVPGVGPTVSRTLLADVPELGTLDHKKIAALVGVAPFNRDSGTFRGRRCIWGGRASVRTVLYMAIISAAQHNPVIRAYHQRLMAAGKPFKVAQVACMRKLLVILNAMVRDGAHWQQNHALAA

SEQ ID NO: 421992 - protein, 328 aa, unidentified
MTMNPALSAFNHVVAFEVAKDSLVIHVLPTEKQSIAANKPAAIRKALMAEMRGNAEASLGPLLVVCEATGGYERHVLEVCKELGIAAHKAHGSRVRHFARYLGLLAKTDPIDARVLALYGLKTTDLRLYVPPAPEVLALRDLKSRRDQLQQMLFAENSRLDHARHASVSRSLKAHIAGLRKALAALETEIAAHVKACETLARKARLMRTLKGVGPATVAAILAYMPELGDLKKGEAACIAGLAPINNDSGAFQGLRHIQAGRAVVRKTLYMTALVAIQHNPVMRLFADKLRRRGKPSKVVITAVMRKLIVTLNAILRSGEPWSHAKIA

SEQ ID NO: 421993 - protein, 358 aa, unidentified
MDTRNSIGQTEYFIGIDQHKHYSMVGVINQAGHKLMAEKLYHNDKDAIKEFFRQFPPASTKTALEAMGYWYWLYDLLESLGLDTKLVHPLKVRLIAEGKIKTDKIDAFALAELLRLDALPASYIPSKEIRNCRELLRHRIVLVHQRTSLKNRIESVLSKLGIDKQVVNLYSKEGKSWLRGLNLSEPYQLELNNYLELIETLTEMVVGLDKQINRYLTKDERAKYLESIPGIWHYTTYLILAEIGDINRFSSAKKLASYAGLVPSVHQSGQVKYYGPITKEGDIYLRCGMIESAHIAVRYDEGLKARYQHLRRYKGSAKAITAIARELIEIVYYVLKERRNYYRKYQKTKRLELITTTE

SEQ ID NO: 421994 - protein, 333 aa, unidentified
MSRFWVGIDVSKRKLDVALLNDAGKVKSKSLANDPAGFAALTIWLNERGADLASTHICMESTGSYSEGCATALADAGWLVSVVNPAQPKSFGQSELNRNKTDEMDAALLARYCSKMEPAAWQPPPLEYRKLRSLVERVQALKDMRQQESNRLEATAEAAARQSITEHLTWLDARIAELDRDINDHIDGNKETLGKDAQLLTSIPGIGKTTAAKVLGLLGDLRRFSSGKALAAFIGVTPRRHESGTSVRGRSSIGRAGHPRIRHALFMPTLVAAKHNPLIKAFRNRLVAAGKPKKSAALASMHKLVHLMHAIVCNGVAFDSRFSRLALDVQDGI

SEQ ID NO: 421995 - protein, 391 aa, unidentified
MIYIGIDVAKDKHDCFITNSDSEVLFKAFTIFNNLDGFNDLYQKIESVMDDVTKVKVGLEATGHYSYNLLGYLIDKGLPTYVINPLHTNLYRKSLSLRQTKTDKVDARTIASMLMSDVNLKSYSDTSYHNEELKSLTRYRFDKVKERAKLKSSVSRLVCILFPELEKLVPTLHMASVYSMLSEFPGAKHVASAHLTRLTNLLSEASKGRYSKDTAITFREAARASIGSNMPAKSLELKHTIKLIQELDSEIDEIENEIKVIMDEINSPILSIPGINYRMGAMIIAEIGDFSRFDSPDKILAYAGFSPSTYQSGQLDGAYAHMEKRGSRYLRYALYNAAKYVCHWDPTFAGYLAKKRAEGKHYNVAISHAVKKLVRVIYHLEKTKQQYIKVA

SEQ ID NO: 421996 - protein, 362 aa, unidentified
MQVRHIFVGIDLGDKNCVARIAADRDKSERFGFVNNRQGRARLFAELKRRAEQAGGAKVVMAYEASACGFVLCEEAEAQKIPCSVLAPTKMEKSVEQKKHKNDDRDADDIVERLRGHVLAGNRLPTVWIPDRQTRDDRELIRARLDLTEKQTHVKTQIQMTLKRHGLEKPSGCGAGWTVKYRQWLEGLKESPALGWGLRQGLDSLLRQLAFVESEVKRLAEPIRQLAAAPRHQRMIEELTKEAGVGQFTALVYRSEIGYAGRFHRGRQVGKFTGLTPTSHESGEQNDRKGHISRQGPPRLRKMLCQAAWVQACRDADVRQRYQKLVSRHPKKKKIAIVAIMRRLAVRLWHRMRKVEMELAAA

SEQ ID NO: 421997 - protein, 391 aa, unidentified
MLPTRLREQNESDKVLIKGDSMSVRRILAKTIDTDLEYEAIGIDLAKNCVSAALLTTDGEVVCIDRLDYSELEKSAQALSSTTFAMEPCTEMNYLVQKLEAWGHRCLVIGGKNVQNYVENHFSGQKTDLNDAQALAFLAQDTQLRTIKAKDVEQQKYASLTTLREQYIKQYRQTIVSLKGICQAWGLNISKGISGKARLKDLIENHAAFPEELKESLVDMVTHAQTAQKALNKITKTLEELAKSDKVCQLIQTIPGLGSICSCRLRATVGDIKRFKSPKDFPAYYGLVPRSIATGHNERKGKITHRGDRTMRSLMVQAAGSLVNMATKGKLKSKQLTKWILKKQKEKMPWGKLVCAVAAKLLRIVRAVLISNKPYNSKIAGVAKCSLPKGS

SEQ ID NO: 421998 - protein, 336 aa, unidentified
MIHVGVDLHQRLCYCTAVKASGEVMRQCAVANEAASLRRFLRSLPGPAQVVVEACGFWPAFARAVESEAARLVMVHPQRVKAIAAARLKNDRVDSATLAHLSRCDLLPEAWMADEATRQLRLQVRLRVTLGRQRARLKNLLQAVLHQEGFRKPVSDLFGRRGRRWLAGLELSPAGRTVVDTYLSLIDQMQREITAQERQLEQRAAADVRAGWLQTVPGIGAYSAMVILAEIGEIGRFATKRSLASYAGLVPRVRESAGKRHYGGITRAGSETLRWILLQVAQVAVRHSPAAAGFYQRLRRKKRPQVAKVALARKLLCAVWALLHHGIAYDDQVFAG

SEQ ID NO: 421999 - protein, 322 aa, unidentified
MAMLSFCGIDVSKDRLDVMVLPEQQCSSVGNNVAGWSELIERLRGFSIAVIGLEASGGYERGVMRALLAAGMSVRQINPFKLRQFAKASGVLAKNDRLDARMIASFVAIMPTHPAQRRAPAVERLAEMVTVRRQLSNEKIAAENASRMLENAMLQRLSRRRIARLATDIAVIDQHLVEIVASDAALAHRYRLLTSMPGVGAVLACSLIAFLPELGQLSRTKIAALVGVAPYDFDSGKLRGMRCIWGGRTPVRNVLYMAAMSASNWNPRLKAFHDRLAATGKKPKVVIVAVMRKMITMLNAMVRDDILWADRYCDRHSVPTAR

SEQ ID NO: 422000 - protein, 412 aa, unidentified
MIFCGIDWAERTHDVALVDDSGQLLAKRHITDDAAGYRILLDLLAEYGDTEESPIPVAIETSRGLLVAVLRTGRRQVFAINPMAAARYRDRHSVSRKKSDPGDALVLANVLRTDMHAHRPLPNDSDLAQAVAVLTRAQQDATWNRQQIANQLRSLLREYYPAALAAVEVWKNGLCRPEAHEILRLAPTPAKAARLTRTQLQAALKRAGRQRGIAADAERLRTAFRADWARQPELVEAALGKQMLALLIQLEAACTAADNLAEAVEEAFPQHPDAEIILSFPGLGTQLGARVLAEIGDDRKRFADARGLKAYAGASPITRASGKKSSITRRWVKNNRLNHAGYLWAFSAITASPGAKAHYRRRRDNHADWHAAAQRNLFNRMIGQLYHCLKNRELFDEESAFPAPPDVDVSAA

SEQ ID NO: 422001 - protein, 407 aa, unidentified
MPEQVVTTHVVGIDIGMESCTMACLTIDKRQIIKSTPLANAVQGFDWLFERLEGLGVAPKQILVGLEATSRYGENLVQALLKRGYQVCLLHPAQMHAFAQQRGLRAKTDQLDAVTIARALLSGEARFGYVPNEQVATYRELMRLQHQLSDDVVRYKNEIHALLVVLFPEFTQVFVDPTRPTALAVLKRYPSAQAIAQTEVETLSTCLHELAPRHYGRPPAQELVRLAKASISSGVAVAARSSSLRILCDQLEHTQTNLEHLQCEIDQLLDQDPKAKGMLSVPEFGPTTVAVLRAELGDLTRFTRIDQVVAYVGLDLQVKQSGKWKGQTKLSKHGSGRVRRILYLAALRSIHLETSPFGAYYQRLVARGMKKGMAVVAVMRKMLIVTVHLIQTEESYDPGKVAVQAGS

SEQ ID NO: 422002 - protein, 337 aa, unidentified
MKSYLFIGIDISKATLDVCVLSPSDITEVHHHSFCNGTKGFSQLMRWLKQKSEGVAIEDWRACMENTGIYSLELNCFMNEKGIWQSMENALQIKRSMGVVRGKTDKADSKIIALYAYRFIDKLKPYVLPTGTLLRLRALFSQRERLVSMHSQLLVASQSIKGYPNDLVKDIQEQNEMLLKNLAVQIKGIDKSIKECLQQDQDLERKSKLIQSVPGIGQQTAAYLLIVSQGMKSFATPRQFACYSGCAPFAHQSGVSIRGKTRVHFIANRKMKMLLHMAAMNAITFNNELKAYYQRKIAEGKNPMSVLNAVRFKLICRIYSVVKRDEEYQKEYGKIAA

SEQ ID NO: 422003 - protein, 358 aa, unidentified
MQSVTRVGIDLAKMFIQVHAVDAVGKLVCNKQLSRDKFIAWCNQLPAGCLVAMEACSGSHAWARKLIALGLDAKIIAANHVTPYRLEGKGGKNDANDAAAICEAASRPSMRFVPVKTLSQQGMLCVHRYREGVKEERTANINRIRGLLAEFGIIAPQSPNKLRERLAEIIEDADNDLCGIARLVIQEAFSHWDEIDKQLGWCTQRISAHVKENQQAQTAVQLMGVGPVTASAAVVTVGDFKQFKNGAQFGAWLGLTPRQNSSGGKTKLGRITKRGDVYLRMLLIQAAKAAVMTAHKRDDPISRWLLQLREKSGWQKAAVAMANKNARILWAVMTKGCDFDPRYVSVKPSGGGSIAAAI

SEQ ID NO: 422004 - protein, 396 aa, unidentified
MPQIWAGMDIGKEHHHCVVINERGERLLSRRVLNDETALLELIRDVLDIDRDVLWAIDINHGVAALVIGLLLNHDQPMAYLTGRAVHHASGTYRGEGKTDAKDALVIADQARMRRDLGRLRPGDEIAVDLRLLTARRTDLVADRTRQINRLRAQLLEIFPALERALDMTNKGPVVLLTGYQAPAAIRRSGAKRIETWLRNRKVRSAAALAKTVAEAAEAQHTALPGEKLAAAIVARLAKGVMALDDEISELEALIEGRFREHSQAEVIRSLPGMGNLLGAEFLAATGGDMDAFGSADRLAGYGGVAPAPRDSGRVSGNLHRPRRYHRGLLRVFYLSAMASLKSCPASKTFYERKRAEGKGHKQALIALARRRVNVLWAMMRNGQCYHGSLPVTAAA

SEQ ID NO: 422005 - protein, 422 aa, unidentified
MNAKSNTAQPMLFIGIDWADKEHALHLISSASHEQSTETLPQDPEAISQWATQLGKRFPQHRLMVILEQSRGALFAALAEHSQLELYPLNPKQLSRYRDSLYPSGGKNDPMDARLLAMFLKEHCQQLRQWQPDNLITRQISQYSEIRRKLVDERKRLVSKMQSILKTYFPQALTLFQVPLYDARPLNLLKRWPSLQRLKRVRPETLRSFLKEHRMKNEDKQTEFVKTIRSATPLTKDKALIEANALYVQTLVQQIRDLNQAIEQFEQQLKELVKTHPDAELFQSLPGAGEALVPRLIAVMGSQRERYQNAAEIQCRVGIAPITIQSGKSLQVRKRIAYPKFLRQTFHEFAEQARLWSPWSKAFYQMKKEKGMKHQAIIRALAYKWIRIIYQLWKTKTRYDANQYHQRLKTTGSPIINFLEKS

SEQ ID NO: 422006 - protein, 392 aa, unidentified
MYIVGIDIGKNHHEASIVSPEGKQIGRSLRFATTHKGADSLMSFIFKNIGNSPCVFGMEATGHYWYPIYSFLKAKGYTIYVINPIQSDSLRKMYIRQTKNDSIDSFLIAEVIRFGQFGTTSMADENILAMRQLCRYRDSVISSRTEIKLRIGTIMEQIFPEYEKQFSSLWVSTSMGILEKYLTPENIENAPIDELFEIIKDKSHNRLTKAKAISIKEAAADTFGIKIAQDAFSFQLKQLIDRMNFLDKQIEALDCQILEYYEKFDCYLHTIPGIGMIATATILAEIGDIHRFKSSSALVAFAGIDPTVRQSGEFNSTHNHMSKRGSPYLRHAIFLAATTCSFHNSPLNAYYKKKRDQGKHHLTATGAVARKLTTVIYAVLRDSKPYEPKKFC

SEQ ID NO: 422007 - protein, 367 aa, unidentified
MRAYVGLDIHSKSSTYVVQDARGKELGRGEVPTSPEGLAEMRERLHLEAGTEVSLESGTMAFYVARQVRALKLKPVVVDAHEVRLKAHRPTQKSDQRDARELCVGLRTGMYRSIVHIPSEAVLLLRETLSRRRHFVRIQTGEINAAKRVLRSSGYRTLGRKSLTTAGAWKRVLKEAAEADGTRTFVDLHFQAWQAAGERVGDLEQKLETQVTGMEPAYGRLRSVPGVGTIVAATALAFLSEPERFGDAKHAASYAGLVPQMDESGDVHRGGHITKGGPAELRAMLCEASHQAARRSNPLNPLFLKLSARLGYKKAITALAHRLCRVLYAILRDGTEFDLARLGLEKGPFQVTRTRMYRLRKVPPTKR

SEQ ID NO: 422008 - protein, 454 aa, unidentified
MMHGAHIGGQRAGAFLELVDGVDPRRVLLVGVDVAKATWFVVASNLVGEVVVDGVRLVADRAGLAVLERLIAATSGQLDAAVVVVGVEAAGHHHQTLVGHLGDREGLVVRLLNPAQVAAVRKQQGNRRRKTDWLDAAAICELLARGEGSPPHLDASPAATLRPLWSGRKDLVDARGRLRQQAGALVDCLWPGFSATDKHAGVAPVLSSPFDTKAGRVVVGLLAEGWTPAGIAAADPAELRQIFAARGCRLSGPLAGRLIARAASALAPHPAATAGKAATLAGLLGALAALDLQIAGLEAEMAPLLAATQGAKLTQIRGVATVAAAGFVALVGHTGRWADWSKVWRAAGLDPARSQSGATDASYGISREGSAWGRRAILDLAAGVCRQPGRFHDSYQARLRHRKHPKVALAAVGNQVGRTCFALMDSGADYDPDHQTNYAERRTATQPKAGGRAA

SEQ ID NO: 422009 - protein, 419 aa, unidentified
MSSWEEVNYYAGFDWASDHHDVIIIDRAARIVADFQIEHTQQGWQRWREQVAALGPGVAACVETSQGIVVEKLLESGVLVYPISPASAKGYRQRKVPSGNKTDRVDAWSVADALRVDGHGWKALSKEDPLVAELRLLCRDEVGLIEERTALINQLQSALHEYYPAALEAFEDWTLPAVWAFIEAFPTPQALQAAGKRKWEKFLHSHKLARPQTYQKRMEVFARATEFVSGQALTRAKSRLAMARARMLRTLQSQIDAYRAEIQKLFAQHPDHELFGSLPGAGPKIAPRLLGEIGSDRSRFEDFNALQCVAGTAPVSYQSGQIHKVFLRRHCSKPLRYAVHLWADISRRSCPWAAVYYQALRQRGKSHACTLRCLGQRWLKILWKMWQTHTPYNPELHARNQIKHGSWVLRLQPSSDSCE

SEQ ID NO: 422010 - protein, 418 aa, unidentified
MNVKTRRTKKQVNVENQAINLLSKEELNKKIEVVEKELRSYTWRELETNGKFAKNDKLSFITDDMLIVGCDIGSENHYIRAIDVRGRELSRGAFEFSNTSEGFENAKAWVLALAAKHDKKQMVLGLEPTDHYWFALAAWMISNGISVVQVNPYAVKQSKEIEDNSQLKDDRKDPKLIANLVKDGNYGMPYLPEKVYADMRRLSMFRDQLTEDRIRNINRLHKELKIYFPEYMDAFGKIDGAFTLEVLKVSAIPSDITALGAEGIKNIWHNEKLRGRGYSRANEIVSYAEKSVGLTDGIDAGREAVKWYAEQILKLVACSSGKYKGQTKISHRGRKRLRYWLFQAAKSAVSHADEFKQLHEYYTTRTNNPLKKMQSLVVIACKILRVIYTILKTGTTYDPQKLLEDIKRPTASQTPMAA

SEQ ID NO: 422011 - protein, 348 aa, unidentified
MTLVGCDLHSRKQQVAVLDTRTGELVEQELVHEGDAVERFYRALPPPVTIGIETTGYTQWFHALMHQLGHTVVVGEAAKIRAMVVRKTKTDRRDARHLLDLLQHDRFPAVWIPDPDTQDRRALIAHRVRLVRMRTVVKNGLQAIAPNQRLALHSALWTQRGITQLKALALPPHTTRRRDDSLALLAWLTTRIDQLDAHIATVASADPRVQLLLTHPGVGPLTALTTVLVLGPLARFPDSKHVVSYVGLAPAVNASADKQRLGKITKQGNALLRWVLGQAAPLAARADDDLRRRYFSVMHRRGRPKAKVALARKLLVRLYIMLRDQIDYAAFRRRGQTPRPQHLPVAVM

SEQ ID NO: 422012 - protein, 410 aa, unidentified
MELLHRRCCGLDVHKETVVACLRLVSNGKVTTEVRTFQTTTADLLHLSEWLAANDCTHVAMEATGVYWKPVWHILDDGEFELVLANAAHVKNVPGRKTDVNDAMWLAELLAHGLIRASFVPDTQTQEMRNLMRTRKQLVREQSSHVLRVQKTLEDANIKLDSVLTDLMGKSGRAMIEALIAGETNPAKLASLADRRAKASHEEFREALRGRVTKPHRFLLRLHLNQIDALDAAIATLDAQVEANLGPFRTAVDLIISIPGIKNLGAHVIVSEIGIDMSRFPSHAHLISWAGICPRNDESAGKRRSNRLRKGAPWLKTTLVQCAWAAVKKKNSYLQAQFYRIKARRGPKKAIMAIAASILTAIYHMLKDGTMYKDLGCNHFDRRSTDQQKQRLVKRLADLGYAVEIKPLAA

SEQ ID NO: 422013 - protein, 411 aa, unidentified
MKNNIKATTMQLAKNHSVKAQITGTQTKKASRESEQLSERLKYPIRDGGSRARAAKEVNCYVGIDLGDKKSNYCFLDAKGNIFAEGTLATTQAGLSELFSQIPRCRIAIEVGTHSPWVCALLKGHGHEVIVANPRKMESIHKNRRKNDKVDARTLARLVRADPELLYPIQHRGDQARQDLVLLRAREGLVAVRTKLINCVRGQVKSVGGRLPSCSAESFHYTVAEKLPDSVREALLPLVLQIGEMSKRIRAFDAEVIRISRQKYPETECLQQVRGVGPITSLTYILTLEKPERFTKSRDVGSYLGLVPRQDESGAISKQLRITKTGDKMLRQLLVSSGQYILGPFGEDCDLQRFGLKLAERGGKNAKKRAVVAVARKLAVLLHRLWLTGEKYEPLHNVHLHEKTLGIAANG

SEQ ID NO: 422014 - protein, 322 aa, unidentified
METVNFQQVVNRGCGIDVHKKTVVATIDGQGLKRTTREFLTFTSSLTDLKDWLLENGITHVVMESTGVYWKPVYQILEPTELTVWIVNARHVKYVPGHKTDKKDSAWLCKLLLAGLLKPSYIPPKQQRELRDLTRYRKKLIQDIASNKNRIIRILEDCNVKLSSVLSDTSGITATKLIDKLCDGKAITMDDINEVYHKKIQATREELWEACNGFMNEHHIYLLQTIRQNTRDTEKIILELNDRIRALLSPYENILEHLREIPGLGHKTAEDLVAEIGLDMEVFPSENHLSSWVGVSPGNNESAGKKKADAQRTGISKRNLHW

SEQ ID NO: 422015 - protein, 333 aa, unidentified
MKDLSTLQHFVGCDVSKSTLDFAIYERGKDYRMFDHISVANTTEGFQAMRKWLRSFKINVKDAVIAMEHTGSYSNALAEWCFKKGITFVLLHPLDVKNAGARGRNKTDKTDAQFIADYAYTMREKLTPSLPEPQSIKKLRQLRNERQLAVRARTAYMNQLKTVTDKSTLQRMEKVTATFNAQIKAIEASIRTAVEADSRIKNTYDLLVSIPGIGMLNALTTIIATGNFTRFQTARQYAKFCCVSPLSRQSGTSVRSGDHVSRAGHNEIKSILTEGARSAIHHDANLKSYYERKRAQGKTHGCVMNAVKFKLICRMFAVVQRQTPYVNVERYRG

SEQ ID NO: 422016 - protein, 346 aa, unidentified
MVIIGCDFHPGYQQIAMLETDTGEVRYLQLAHKQEAEQFYGSLRGRQVLVGIEASGYSQWFEQLLEGLGHGFQIGDAAAIRASYVRKQKTDRRDAGHILRLLVEGRFPALWVPTAADRDARQLIVHRHKRVEMRTRVKNQLHALALNQGLRLRWRLWTRAGLEQLQALPLQPYATARRADLLRQLQEMDAEIARLDGMVRQEAEARPAAMRLISHPGVGPVTALAFVLTIGDAGRFSRSRQVASYLGLIPSERSSGGKQRLGHISKQGNPLLRFLLVEAGHIAVRGDAELRRVYTRVRHRHSTGVAKVAVARKLAVRLYWMLRRQMDYAQLRGPYAGKPVSFCGRK

SEQ ID NO: 422017 - protein, 320 aa, unidentified
MRNAVGLDISKLTFDAFAMVGNAEYSAKFDNNSKGLNQFSDWLKSLGCQNLHICMEATGNYYEEVADYFAQYYSVYVVNPLKISKYAESRFKRTKTDKQDAKLIAEYCRSAQESELVKRQKPTDEQYRLSRMTAAYTQIKSECAAMKNRHHVAKDEEAAKAYAEIIKAMNEQLEVLKAKIKEQTEKPKCKEGVKCLETIPGIGRMTAAVLFQYLTSSAFETSNKFAAFAGLSPQQKESGTSVRGKGKLTKFGNRKLRAVLFMPAMVAYRIRAFPDFIKRLEAKKKPKKVIIAALMRKLAVIAYHVHKKGEDYDPSRYKLA

SEQ ID NO: 422018 - protein, 378 aa, unidentified
MKRILKIGMDVHTTNYTLCAMEPIIGEDDRVFATIKVTPDYKNILMFIENLKLKLGLNDEYDIQCGYEAGCLGYSLYNQLTAAGVKCVILAPTTMLTPQGVRIKTDMRDAYMIAQCLSYGGYHAVYIPTEDDDSVKEYLRMRNDHKLALKKIKQQINAFCIRYGFCYDGTKWTQAHLKWLKKLEITNGLYRETLNEYMASYEEQEAKIERYDKRIEKIAEQTKYHDKVKKLECFLGIKTHTALSLIVETGDFERFAKGNQYAAYLGLAPGENSSSDSIRRLGITKAGNSHLRQLLIEASGGICKGAVGHKSKELRARQNGNTADVIAYADKANTRLRSRYYKFIRHGKKRNVAVAAIARELACFVWGMMTDNIEMKVA

SEQ ID NO: 422019 - protein, 328 aa, unidentified
MSYVGVDISKDSFVVAFSSASKSKTITYQNDDKGIEKFINTLDKEQHHCVMEATGNYGVNLLYHLCEQKIKVSLINPKQSNFLSKMKLSTAKTDNKDARLLVEYGEKMNPEVYKMPSDKIILLKQKQTVLTHLIKQRTASKNQLKSLELLNKKDNLAIDMLKNNIDNLDKLINNLEKDIVSITEEEFEKQVQLLTSIKGIGKKVATTLVIITNGFSFFENPKQLSRYIGICPTYQQSGKSLNYNGHINRNGHSTLRGQLFIASWSAAKYNSSCKALFERLREEGKPWKLAQIAVCNKLIRQAFAVIKSGVAYIDGHVPTLSAPMQTAI

SEQ ID NO: 422020 - protein, 411 aa, unidentified
MEAAVITAVGIDVSKSKSTVAVRRPGGEIVLRPFDVRHTNSDLKKLASTLKKLGGDIRIVMEHTSTYWRPIALTLKEAGFFVSVVNAMLIHDFSDNTIRKLKTDRSDAHKIANYALTFWDTLPPFNNEEETRLLLKMQSRANERITATATALRNGLIALADQTFPGVNIAFAPNTKNANGHEKWVDFFLRYRHKDCVCQYSMEAFTESYRGWCKRKNYKFRTDTAHQIYLLAQEGVATLPKCESTKMLITQACKSLNAVCEAKQSTQLEMQRLAAMLPEYEVVMQMEGAGPITGPALMAEIGDVRRFKNKKALVAFAGIDAPPFQSGAFESKSRHVSKRGSPHLRRTIFIVSNIILTRSNPENAVYCFMDKKRSEGKHYYVYTVAGSAKFLRVYYARVTEFLRSQPSPGAC

SEQ ID NO: 422021 - protein, 343 aa, unidentified
MDHFAGLDVSVKETSLCIVDDSGRIIREVRVASEPEALLAVLTNPACHFKRIGLEAGPLSQWLFNALAEAGLPVICVETRHMRAVLKAQINKTDRNDARGIAQMMRVGLYRPVHVKTLRSQKQRMLLTHRKLLQSKAIAIENDLRATLRNFGLKVGVVGTVKFEARIKELIENLPDLVVLVEPLLIVRRVLREQIGILHRRLLAIVRDDGVCRRLMTVPGVGPVVALTYRATVDVPSRFRNSKAVGAVFGLTPSKHQSGESDRTGGISRCGDEMMRAMLYEAAQILLVRSTKWSWLKAWAMKVARRRGLKKAIVALARRLAVIMHRIWVDGPEFRWTREVTAA

SEQ ID NO: 422022 - protein, 371 aa, unidentified
MTDNSTFIGMDVHKNSIDIAIAQTGRKGQVRHYGKIDGTLSALDKVVRKLVSKGNRLRFVYEAGPCGYQIYRHLTAQGFDCSVVAPSRIPKPSGKQIKNDRRDALMLARLHRAGELTAVYVPLAEDEAIRDLTRAREDAKGDEKKSKQRLLAFLLRSGIRYTGRASWSRAHMRWLSDIKMPHRSQQIVLQEYIGTLNQCKDRVQRLTDQIQQLLPEWQLFPVVQALQSMRGVSMIVAATTVAEVGDLKRFQNPAELMSYLGLVPSEHSSGQKTRRGSITKTGNGHVRRVLVEAAWAYRLPARVSRVLLKRQEGLPPSICEIAWKAQLRLCSRYRHLWAKGKIKPVIVTAIARELCAFMWAIANETKVPAAV

SEQ ID NO: 422023 - protein, 388 aa, unidentified
MDILYKSCAGIDVHQSNIVVCVLHGSLTSTRPKREEARFDTTTSGLKDCRDFLSQFEVEAVGMESTGVYWKPVWHALCQDFELILANPAHMKAIPGHKTDKKDACWIAKLTRIGLLPKSFVPDETIQELRDLTRQRKHFVEARTKEVNRIHKILQSAGIKLTTYIEDIMGASGRNLMTLLCDEADIHATSVRQAVYTSLKKKVPDLLKALDGYFSEHHRFMLKQALRIDDHYQEEIQLLEERIESYLTQFQEEMEILDSIPGIDRLTASVFIAEVGTDMSQFPTAGHLASWAGLCPGNNESAGKKRSTHIRHGNAYLKRCLCQSVYAARRQKDSPIAHRFNQLKSRRGPQKATIAIAHYLLKLAYHLLSTHQTDEQVLDSRKGLLEAS

SEQ ID NO: 422024 - protein, 371 aa, unidentified
MEHSRFIGLDVHKERISIAVAESGRSGAVEYLGEISNDPVAIGKLCDRLGRPDKALAFCYEAGPCGYGVHRQLTSLGHRCDVVAPSLIPHKPGDRVKTDRRDATMLARLHRAGELTPVWVPDADHEAMRDLIRLRSVVRQIVTRARQHLQGFLLRHGRNHGRGTAWRMAYRRWLSTLAFEHPAQQIAFQDYVDAVMDAERRLKRVEEQISGLLPEWNLRPVVDALQAMRGIALINAVVLVAEVGDFTRFSNPRQLMAYFGLVPGERSSGETIRRGGITKTGNTHARRALVEGAWAYRMKARIGRHKVDRIEALPKVVRDIGWKAQVRLCTRYRRLRARGKTANVVNVAIAREMVGFIWSIACTIQSAPKTA

SEQ ID NO: 422025 - protein, 267 aa, unidentified
MKIVGCDLHARQQSIALLDTETGELVERSLEHGTEQPRGFYSSLSGPVVVGIEASGAMQWFLQLMGELEIECRVGHPAKIRAAEARKQKHDRRDALLLLQLLLEKRFPTIWMPTTEQRDLRTLLRDRHQWVRMRTRVQSTYTAQRRNELQRLYAQLQKRIEELNQQADKVIVGHPQAQRLLTHPGAGPVTALATEVFLGDPRRFENGKAVASYIGMIPCEDSSGPQQRFGQLSKQGNALLRYLWCEAAMHAVSKDGDLKRFYRRKLV

SEQ ID NO: 422026 - protein, 366 aa, unidentified
MLRNAELSRKADSENNLGGSSETMYYIGLDVHKKTISYCVKDAAGCVQSEGKIDSTRRELDAWVRTLPQPRMIAMEATIFTGWIYDHLLPHAEKVKVAHPLMLRAIAAAKRKNDRIDAAKIADCLRCDFLPECHMASTEIRDRRRLLRYRRLVIRQAVQMKSRVSGLLMETGMSYDKLRLHRMGYFSRLLTTNTEIPDSIRPLLGLCREHIDRAIQVDRVLLKSLERDPLLMDRLERLRTIPGVGPITALTWALEVGDTSRFRSIKQAISYCGLCGDEKSSADKAMRTPISKKRNKHIQQVLVEAARLAPRYSQELALLYERERQRGHGGRATLAVARKMVAHMLAVDRRKTAFVPAGEFKQIAAA

SEQ ID NO: 422027 - protein, 412 aa, unidentified
MKRIRERVAGLDVHRDTVVACCQVKQPDRSIEVTKQSFATTANGLGQLAAWLSDTGVETVAMEATGVYWKPVYYCLEGLFDELWLCNAQHVKNVPGRKTDLSDAEWLADVAAHGMVRPSFVPPPEIRELRDVTRYRKTQVEALAKEIQRLEKTLQDAGIKLSSVASKVWSQSSRAMIEAMIDGERDPAVLAQMAKSRLRAKIPQLEEAFSGRFGSHHALVCRQVIEHIDFLDHSIATLTADVTERLCPFESAVTILCSIPGVSRTTAEVMIAEMGVDMTRFPTSGYLCAWAGVAPASHESAGKRHPAGTRKGSTWLQRALVEAARGASRTKGTYLSAQYSRLARRRGSNKATIAVAHSILDVSWHLLTNGALYDDPGARFFELRHDPAVEAKRLQRRIEDLGFEVSIAPAAA

SEQ ID NO: 422028 - protein, 310 aa, unidentified
MESITVGIDVSKDRLDVAVRPSGEAFAVERNAAGLEQLTIRLWELAPQVIALEATGGFETIAAAALAAARLPVVVVNPAQIRAFAKAIGQRAKTDPIDAAAIAHFAEATKPVPRPLPDDATRLLGDLVARRRQIIEMIGAERQREQRVTVPHLRQSITRLLKALEKELASLNTDIGDAVRGSPAWREKENLLVSVPGVGRVISSILIAELPELGQLGRREIAALAGLAPFTRQSGKWRGKSFIGGGRTAVRTALFMGAFVAKRHNPVLKAFFDRLVAAGKPKMVALIAVARKLLTILNAIIRDNRPWQIA

SEQ ID NO: 422029 - protein, 468 aa, unidentified
MSKDTQIKRIKSKKMSTLPKHLAHINKMAAGIDIGSKSHFVAVPEGVCSECVREFQSFTSDLHALADWLEACGIETVAMESTGVYWIPLYELLESRGFEVLLVDARHVKNVSGRKTDVLDCQWLQQLHTYGLLSSAFRPSKEICTLRVYLRQRSMLIQRKASHVQHMQKALDQMNLQVHNVLSDITGETGMNIIRAIVSGTRDPKLLASYRNYRCKNSLEVIEKSLTGNYSEEHIFTLKQALFLYDAYQTQVDECDSKIEQYLSQFELFKENKIEKTTQMKLRTAKDKNAPLFDVHNYLRQITGINLTAIPGIEAYSALKIISEIGLDMSRWKTSKAFASWLGLCPGNKVSGGKRQSGKTKRTANYAASTLRIAAGTLHRSQSSLGAFLRRLKSRMGSPKAITATAHKLAVIIYNMLKNKQEYIKTDQNYYEEKFRERLIKNLAARAKSLGFDLIENLDFSNNYDAVI

SEQ ID NO: 422030 - protein, 421 aa, unidentified
MGKLIERCAGIDIGKRFLVCCVMTGAAHEEPRSETRRFDTTVPGLERLRNWLNEERVTDVVMESTGSYWIPVFNLLEGHVTVVLANPEEVKNRKGHKTDRKDAVHLADLLRHNHVKSSYIPAEPVRQLRDLTRRRVQLTQDATRERNRVQKLLEQVNVKIGSVLTDVFGVSGLHMLLALLDVRAAPEEIAGLARGSAKRKTPQPIEALEGNRMSDHVRFLIRGCLRHLACLEEEVEELDAEILRRMQLSTFQKAFTLLQTIPGVGQLSAATILAETGPDLDSFPTIEQMASWAGLCPGNRESAGIQKGPQTTHGNPYLCTALVQCAWAATRKRDSVFRSRFQRLAPRRGEKRAIIAVAHHMLVILYCMLKRGVPFLGAEHAPKQRRRERRAHHHLRCLRRLGFSVEIRLSSESAPPDTISR

SEQ ID NO: 422031 - protein, 327 aa, unidentified
MPVYVGLDVHKRTCHATVVDEQGKILVQEKFKNEPRELERFFKGIDDAKVAMEASYCWQPTYELLESMGYEVKLAHPKRTRAVAEAKIKTDAKDSEVLAYLLELDWLPTAYVPVQDIRDLRELVRLRTCLVQEQTRFNNKVRAELAKHGVQVSRNPFSRRGREELGRLNVRTVNDCLEVLETLAQRIRELERELRSKAGESREAELLMSIPGVGYFSALAILAEIGDINRFPNPEKLCAYAGIVPSVEQSENTRRLDGTTKEGSALLRWVLIQCAWMHLYHTEDTRLTRFFWKVSRRKGRKVAIVAMARKMLVAIYWMLRRGERFRA

SEQ ID NO: 422032 - protein, 331 aa, unidentified
MDTDTGEAAERRLTHRDEAEQFYRTLEARRVRIGMEASGHGRWFERLLNELQFELWIGDAAEIRTKRVRKQKTDRQDAQLLLKLLMEDRFPRIWVPDAENRDLRQLLWHRHRLVQMRTRIMNQLHVVALNEGVRRKKALWRPAGRSELESLALAPWALRRRRDLLDLFDQLTPKIHDLTRALEEEVEKRPIARRLMTHPGVGPLTALAFELVIGTPERFHCGKQIASYVGLVPSEESSGDRRRLGHISKQGNALLRFLLVEAAQVTVRSQPQWRSKFFHLAMRRGRKIAKVAMARKLAVHLYWMWRQGLDYGQFEKLGSHAGEPGNRHGVR

SEQ ID NO: 422033 - protein, 341 aa, unidentified
MKHYAGIDVSLECSSVCVVDAGGKILREAKVSSEPAALIVWFRCCGFDLERIGLEAGPLSQWLFAAMREAGLAVELLETRHVRRAFEAMPVKSDRNDARGIAQLMRLGWFRPVHCKSMSAQETRALLTARKLVQTKLRDVENSVRGILRGFGLKVGETTERKFAGRIEELVADHPHLQGIAKSLLAVRAVLHTEFKALDKQATRMARSDARTRLLMSTPAVGPIVSLTYASAIDDPARFKSSKRVGAHFGLTPKKYQSGETDYTGRISKIGDESVRTALYESAHIILTKPIKGCSQLKSWAMRIARRAGMSKAKVALARKLAVIMHRMLADGKPFNATAAA

SEQ ID NO: 422034 - protein, 395 aa, unidentified
MKRPCVALDVSKGSSHYQGWINEDKKLGNPKKIEHNQEGFREILAKAKELEGITNEKPIVVFEATGVYHRTLQHFLEENGMDYIIVSPLASAKVRKSNIRSTKTDKKDCKNIAKVYYSKNLKIHGKGDEIYDRMLDLNRYYQYLTSQLKKIKVQFRLVLDIVFPNIDKLWGQLYGEVPMAILRKYSHPNQLRSKNPETLARYLMKETCHHYGEAIKEANRAIEYCKACCSGCSEASVNCQVLKDLVSQLSEKTQEQDNCLNQIIDLAKGLPNYELLLSIPGISDNLASRIIAELGDLDRFSRVRQITAYAGLDPNIYQSGQICGLHLKITKKGNKNLRCLLYLAIQNTLKSENKVSEFYHKKIAAGMNPKAAKIACMNKLLRIIYSMCKNGCFFQ

SEQ ID NO: 422035 - protein, 385 aa, unidentified
MHVGIDAHKRTCTVCVIEDGAVRESFAFPTTREGVSEFMKRIPSRATVVVEASTTGKVISRMLADKHEIHMVAPPERKRSIKTDRRDAERIVREDMLQYLRRCYIPSAAIEETRFLVFQQIQVGRKIGRVKNQVHALLERNMIHDLDGFSDIFGVQGLRRMVMVQLPTQEKVALARYLEELKLHAAHHRQLETELARLAESDRDALLLMSIPGIDFFTALAMKSRIGDVVRFPTKKHLCSYGAVVPGASNSGEYVSRHNRVKHGDMILKSALTCAVRGAVSAMKNSAVKRFYLKHSKRMGAQKAEVAAARKMACIVWKVLTTQQPYMEEDKRLTARKRRILSLKAKRQDSAPSDIHQLAEDLVGDVTILERYPVDFNQEFEGKLT

SEQ ID NO: 422036 - protein, 405 aa, unidentified
MVDYYTGIDWASDHHDIQVLDKEGDEVRSFQVKHNPEGIRQLCNSLKELAGGDPSRIAIAIETSHGLLVSALIDEGFLVYPVNPKESERRRKSSGAKTDFIDANNLAKMLRTEIKDMKPFKPSSETIAELRQLTRDQNGLIQTKTALVNQLQACLRDYFPAFLGLFSELDSDVSLAFLRRYPTMEKALRLSVEQLAEFLRAHRHPRPYEAARLIHAKLRQPYLTAKPHVVRAKSRLAVALVEQIQVLKKQIDSYDKEITALFRSHPDSVIFASLPGAGKRLAPRLLAGWGDDRSRFASAQEVGALAGTSPTPYQTGKFSRPRFRRSCMKDFRYALQIFAWESTQSEPWAREYYDNQRRRGKTHHQAVRALANVWVRIIFAMWKNHQPYDREVFLAAQMAHRRQVA

SEQ ID NO: 422037 - protein, 361 aa, unidentified
MSESMALVGLDVHKSRTVAAVLDPSSGELRMERLRGEPERVVPTFLEELDRPVAAVYEAGPTGFVLARVAEQRGLDIRVVAPGSIPRAPGDRVKTDRRDAKRLVRLLAAGELGFVFVPSETDERFRDLVRCIDDVRRDLMRARHRLSKFLLRRGVRFQGKTWTQQHARWLCTLHFEDPLSQAVFVDYLSAAQGLAQRRKTLGGVLEGAVPDSSHAETVGRLRCFRSIDTLTAAGLCAEVGDFSRFGKPALLSGFLGIVPSEYSSDEKRTQGQITKAGPSNARRLLVEAAHNYRHRPAVGENLKARQSGQDPRVVEIAWRCQQRLHERWLHLAGKRGKPAGKVAIAVARELAAFCWEAATLN

SEQ ID NO: 422038 - protein, 398 aa, unidentified
MIYVGVDIGKDRHAAAAVSEAGESAMPPFYFTQDAGGFAALFGALEKLGGPGAAAVGMEATGHYWKVLRHALAKRGYRADVINPLITSREASADVRGRKSDKLDAVAVANVMRKGGHSPAPAAGAADTLKTLARHRRALVARRSDAKNRLAAALDVAFPEAAETLGGLSGAAAMAAVRAFPSARLAAKADIRTVTSVFKKASGGRLGREDAKKFREAARHSLSLGMDTGGEEFVIPQTVDEIRALDGRIDGVERRMQEEPRPEFAARLMSIKGAGRIQPLVIAAEIGDPARFAGAGMAGKVLAYAGCDPRVRESGKWKGRTKMSKRGSPTLRNALYLMATTVRLHTPHFNEIYKKHADKGKHHNVALSHVIRKIVDVMCGMYKTNTDFVPPKTEVKPC

SEQ ID NO: 422039 - protein, 339 aa, unidentified
MKYTPVGVDIAKHVIQIHFINEHTGEVVDKQLRRQDFLTFFGNREPCLIGMEACGGSQHWARELTKLGHKVRLLQARFVKAFVMGNKNDVMDARAIWMAVQQPGKEIAVKTEEQQSVLVLHRTRMQLVKFRTAQINALHGTLLEFGETIHKGRAAMAREFPEALERMKERLPPYLITVLENQYNRLNELDSLIEDIEKQLTSVARQNETCKRLLDIPGVGPLIATAAVATMGEASAFKSGREFAAYVGLVPKQTGSGGKVRLLGISKRGDTYLRTLFIHGARAVALVAKEPAPWITELKKRRPASVAIVAMANKLARTVWAITAHDHKYDRNHVSIRPY

SEQ ID NO: 422040 - protein, 454 aa, unidentified
MAQGSGLTRGDRNRNRRIGALRGVVRRDRAVLAVDLGEDKQAAVLVDHEGRVLARKTVTAKAYQLGGLLEWAAGQAARAGFAGLVVACGPTGHRWMALMGLADGAGHGFCCVQSLAVHREREKDDYTRDKTDHRDAYLIGRLVIRLDCYLPERAEEAWARLRHLGARRFALVADLICCAQQVSDLLACAWPAALGTAARPLESTTWLAGMGVVTDRCCGDPSRLRKMGYDTFLAAVRRELPRWGASRAYRKIVRGLWEALADAGGVAAQRRGALERVHLLMADWRSLLARLADVEARMCAVLDELGLTGLVTSIDGLSAVGAAVILAETGDLSRFASARSVVKHAGLNPAENTSATLAGTTRISRRGRPGLRTAAWRAAWAGLRHNRVLRARYAHLTGRDGGNRLSDGQARAACAAALLRWLYAVVTRRQAWDARIAAGTIPARAGAVTVPAAA

SEQ ID NO: 422041 - protein, 341 aa, unidentified
MYYLGIDYHKKFSQVAAMDESGRTLMNVKLPNEQSAFLSLKSKLGDVQLKAVVEACRNWGTIYDLLESIGIETVVAHPTKTRAIAEAKIKTDSIDAATLAHLLRTDLIPKIYIPNSKIRAQKNLLRHRLWLVRQVTKTKNRIHCILDRNHIKITEVTTIFHPTGRRIMDKLSLPDIDSKLLKDHLKLLDTLEDHISRTETWIDQELDNCPEISILDSIPGFGKIFAALATLEIADINRFLTPPKFASYCCLVPSTYSSGGNTFHGKLIPTGNKWLKYLFIDAAWSSTRSSPYCRQYFNKLKERKGWSTAIVALARRLSNIAFLCLKEKRFYEERVCAAYSF

SEQ ID NO: 422042 - protein, 341 aa, unidentified
MRKTLFCGVDLHSNNAMYVITDGRDKQLLAKRLPNQLPLVLDSLEPFRPRLQVVAVESTYNWYWLVDGLVDRGYPVVLANPSELEQYDGIKEADDLTDAAFLARLARLNILPTGYIYPKQDRPVRDLLRRRTLLVQHRTGIILSLQNLAMRQSGRSLPWRDIRRLDPPERVELLGDHDCLTFVADEQVDLIEQLTEKIGRFEKKVLEHVQLKPAYERLLTMPGVGVILALTIMLETGDIARFETVGDYTSYCRCVRATHTSNGKSKGKNNSRNGNAYLAWAFVEAVHHAIRVCPQAKSFYDRKRAKRNGALATKALAAKWAKAAYYILKRQEPFDLSRVFG

SEQ ID NO: 422043 - protein, 339 aa, unidentified
MSKPIQPIQAMAFCGIDVSAATLAVAVQQQDQRFEERIFDNTASGHKALIRWLHKLKVHVRVSLEATGIYSLDLALALDGADGIEVAVLNPKLIHRFAQTLRRSKTDSADAQVLAEYSMRMPFTPWSAPGLSGLQLRSVSRHIQSLVVEHARECNRLHAAEKSASTPRCVVEDLKRSMASLKRRLARLRSAALELVLSDELLQKRFELLIGIPGIATISALELLGELAPLSSEMSARQWVAHSGLDPSHRESGTSVHKPSRISRAGNRHLRRALYMPALVAVRHDPHLKAFYESLLGRHKAKMQALIAVARKLLHAIYGIFKSRIPYDGKKLFPQQATA

SEQ ID NO: 422044 - protein, 378 aa, unidentified
MNRTIVHHEGAAALTVAGHQVKNQPATIKLGVDIHQEFYVVAAQHDHATPQPARRFRPEEFVAWVERLRARGHAVFAVYEACGFGFGLCRRLEALGASCYVIAPRKLDEQGKRVKTDNLDAGTLCQRLSRYVDGNKKELAVIRVPSEEEERLRHIHRQREDLVRARTKLQAQGRSLLVNHGQAAPQRWWRQQGWTALEKLLPAWLLERLLVYRPLLAVLDTQIAALTVALEKAAAPGLPAGLGKLTSVIVSREVCDWRRFQNRRQVSSYTGLCPGEYSSGAKRVPGAVTKHGNPRLRAALVELAWRLVRFQPHYPPVRKRLAILARGAQATGGARKKAIVAVARQLAVDLWRWQSGQCSAEKLGLARLSPHATSTQPA

SEQ ID NO: 422045 - protein, 356 aa, unidentified
MSKTNPVKIIIGVDTHKDIHVAVAINGIGAHLGMLTIPVSPKGYQNLETWARAFGSIHAFGIEGTGSYGAGLARFLQAKGHTVVEVNRPNRQLRHQNGKSDPLDAESAARAVLGGQANARPKSADSSVEMIRHLKVARDTAVKSRTQAMVTLKTIIINAPAALRQALDRIIGKMALIRHLAALRPGPIVSVTASAKGALRAIARRWLTLDAEIRAHDADLEALTASCAPAMLEAHGISTGTAAEMLILVGDNPERIRSEAAFAKLCGACPIPASSGKTNRHPLNRGGNRQANAALYRVVIVRMRNHQPTLDYVKKRKADGKGKMEIIRCLKRFVAREIFGYLCGARRSLPSISKAT

SEQ ID NO: 422046 - protein, 406 aa, unidentified
MENRFAVIIGLDVGKTAHHGCALDATGHKLFDKPLPQDETQLRELFTSLQERGEVLMVVDQPNTIGALPIAVARDTGCAVAYLPGLAMRKAADLYPGRSKTDARDAFIIADTARTMPHTLRQVDHDNEVLSALKVLAGFDEDLAHETTRALNRIRSLLTQIHPALERVFPGGTLSTDLVLELLEKFGGPTGFTSAERGRVLRFARSHSRRDPSALVEKIFTALSEQTVTVPATAAVELVIPRVAGQVKELKAQRATVAHEVEAMLEDFPLASVLMSMPGIGIKTAAQILLAIGDGTGFETAGHLAAYAGIAPITRRSGTSIRGEFPARSGNKRLKNALFYSAWIASNRDPISKAYYDRKRAEGKRHNAAVICLARRRCNVIFAMLRNGTYYQPPTAPTPEPTALAA

SEQ ID NO: 422047 - protein, 312 aa, unidentified
MDAIVIGIDVSKDRLDVAVRPTGETFVVARDAEGLDVLIARLTPLVPAAVAVEATGGYETVVAASLAAAGLAVVVVNPAQVRNFAQALGKRAKSDPIDAGVIAHFLEATKPEIRPLPDAETRLLADLVARRRQIVAMIVAERQRQKRLTNKRLQKSIARLLAALQKELSSLETDIDESVRGSPAWREKEDLLASVPGIGKTIARTLLAELPELGSLDRRKVAALVGLAPWTRQSGKWKGKSFIGGGRADVRAALFLGAMVAARHNPELKAFRDRLVAAGKPKLVALVATARKLLTILNAILRDHKPWRQQTA

SEQ ID NO: 422048 - protein, 387 aa, unidentified
MEVRVVSTPSAGADNEPVHCYVAIELSKSSWIVGFQTPLTNKTSQYQVKACDANALLELIERIRTRVARELRRPIEVMSCYEAGYDGFWLHRVLKAHGIHNHVLDPASLQVSRRARRAKTDRIDADRMVRALIRYLRGEPEACSVVRVPSVEQEDAKRLHRERRRLIAERVQHVNRIKGLCATQGIYHYAPLRKDRLARLDDLRTGDGRALPTRLKAEIARELKRLEVLLEMIATVETERDVILTSAASTHLNAGKIKMLAKLKAIGPEFATTLVGEVFYREFANRRKLGSYVGLGSSPFCSGPVDRDQGISKAGNPTARSMMIELAWTWLRYQPGSALSIWFRERVGNLKGRPRRIAIVAMARKLLVALWRYLQTGLVPTGALLKA

SEQ ID NO: 422049 - protein, 408 aa, unidentified
MDVVYSHVCGLDVHKKTVVACILTPDEKEIRTFSTMTDDLLQMVDWIKSKGCTHAAMESTGSYWKPVYNLLETEQIQTLVVNAQHIKHVPGRKTDVKDAEWIASLLRHGLLQGSFIPPRDQRELRELIRYRRSLIEERAREVNRIQKVLEGANIKLSSVASDILGKSARAMIEALISGNEDPEALSELALRRLKNKKEDLRRALKGLIGPHQRLMLQTQLRHVDELDALIQQLDEEIKRRMLPFEEDLERLDTIPGVARRTAEQIVAETGTDMSRFPSAAHLCSWAGLAPGNNESAGKRKSGRTTKGNPKLRSALIEAARAAARTKNTYLSSLYHRIAARRGANRAAVAVAHRILIIVYHLLKDKQNYRELGPHHYEERRREQVAKQALRKLQSLGYTVTIETINQTA

SEQ ID NO: 422050 - protein, 341 aa, unidentified
MQITTIGFDIAKNVFQIHGIDAAEKVVIRKQLRRGQVLKFFAALPPCLVGMEACATAHYWARELTKLGHEVRLMPAKDVKAYVKRNKNDAADAAATCEAVRRPTMRFVAVKSAEQQAQLMQHRARDLLIRQRTQVINALRAHLAELGITAAQGREGIRDLLAIIADDGDARLPIDARASLMVLAAQLQALQTLIGSIEKRIVARHRSSEASKRLQTIPGVGSLGASAIATIVTEPKAFRSGRDFAAWVGLVPRQDSTGGKCKLGPISKQGDRYLRRILVVGAHAVLKRARLHPQKYPWLTQLLARRPFKVVAIALANKMARIAWALLAKGETYRMPRLAAV

SEQ ID NO: 422051 - protein, 343 aa, unidentified
MQTVTAIGLDIAKSVFQVHGVDAAGQVVIRRQLKRRYVLAFFQKLPSCLIGIEACASSHHWSRELQALGHTVRLMPPAYVKPYVKRQKNDATDAEAICEAVTRANMRFVPTKQPEQQSGLVLHRTRHLFIRQQTSVINAIRAHLAEFGIVAPVGRRGVEELLHAVTDPNDKRVPEIARACVLALGAQLRRIKEQVLEFDRMIAAWHRSSETSRRLDDCPGVGPALATALVASVADPRAFRSGRNFSAWIGLVPKQRSSGGKDRLGRISKQGDRYLRGLFVAGALAVVRYAKIHGTKHRPWLTALLARRPAKVAAIALANKIARMVWAMMAKGERYKEPVALAA

SEQ ID NO: 422052 - protein, 316 aa, unidentified
MERYVGIDVSKAALDAHVLPEGEALRVSRNAAGIDELVRWLRAWQPQVIALEATGGYERVVAAELDAAGLPVAVVNPARIRHFAFAVGQHAKTDTIDAAVIAHFAEATRPAVRPLPDKQTRELADLVTRRRQIVEMLGAERAREQRAANRRLARSCQRLIKALERELADADDDIGRAVQASAEWRTKQELLQSVPGIGPTISAQLIGELPELGTLDRRGIAALCGLAPWTRQSGRWRGKSFIGGGRSSVRSSLFMAAMVAARRNRVFAGFYQRLLASGKPKIVALIAVARKLLVVLNAVLRTGEPWNEAKHVQPSI

SEQ ID NO: 422053 - protein, 421 aa, unidentified
MKEIQAKKFKKINNKTLIATVDIGKNTMMGYWRCPDGTEGKPFEFFNNGRGFNKFWKKISDAQKTHELENMVVGFESTGCYGEPMVHYLRKRKVELVQVNPMHTKRVKELQGNSPLKTDKKDPRVIADIIELGHALTLVVPEGAAAELRRLTNARERSIVKRTALFNQLQDDIFLIFPDFLRVMKDIKTKSAQYLLKWAPTPQAIMGYGTNLVSKALKKVSRGKLGKERAQALVQASWQPVGIHEGRESILLEVQHIQNAIEESNRFIHDVEKKMASYLEQIPYSRFILSIKGISNITAAGLIGEVGDFSKFKTVEEIKKLAGLDLFEISSGKHKGRCRITKRGRSLLRKILFFAAINVVRKGGILHKQYESYLERGMVKMKALIAVARKLFSIIFAVVRDHRDFVENYNETSKLPIKKYA

SEQ ID NO: 422054 - protein, 411 aa, unidentified
MEVVYECCCGLDVHAKTVVACLVTKGRKEIRTFATMTDELLQLGDWLSSVGCTHVAIESTGVYWKPVFNILEGLLTVILVNARHIKAVPGRKTDVRDCEWLADLLRHGLLKASFIPPLEIRELRELIRYRQTLVTEHTAVANRIQKLIESANIKLGQVASEVLGLSGRLMLRALAAGEQDATKLAEMAQGKLKSKKSELRRALAGHLTPVQRWVLAELLTRVEELETALTRVEARIGEEVTACPDPFVPEAVELLESIPGVGVRTAQTIVAEIGVDMGRFPSAKHLASWAGVCPGNHESAGKRKSGQPTKGNKSVRTILVEAAWAATRAKGTFLQAKYQRLVKRMPKQKALGAVAHRLLVISYHLLSRRVRYAELGSAPRDQQQVVRRRRRLVEELTTLGVKVTIEEAAAL

SEQ ID NO: 422055 - protein, 307 aa, unidentified
MRAAGIDVGKANLDLAWNGRPGVTRFANTRAGISKLVKRLQAAKMERIVVEATGGYEEPLLEACCDAGLWIARVNPRQARDFARATGELAKTDAIDARLLALMAAMFGDRLRRHLAPPVWQRELRDWLRRRGQVVVLLQAQKQQAAMAPPEVRKLVSRTVAALDWELAAIERSMKVLIQEHASPALRSSKGLGPVFQATVLALLPELGHLDRRQIAKLTGVAPMNRDSGQGQGKRRIRGGRAPVRVALYMATLSAVRWDPLMKAHYQQLRARGKLGKVALVACMRKLLGIVNAKRRDELRTEGLALA

SEQ ID NO: 422056 - protein, 339 aa, unidentified
MNEHSVIGLDIAKSVFQVHSVDTTTGQIVRTKLRRKQVLAFFAKQPPQRVALEACGSAHWWARQLASLGHRVTLLPPRLVRPFVLRNKTDAADAQAIWSAAQQPGIKVVAVKSPLQQSILALHRIRAQLLKMRIMQSNAVRGLLYEFGIILPQSDRAMSQQLPAQWAALERQVPAFLLESLREQWQRVCEFNHQLAAIDRRLEHIRQQDPHCEAVSAIPGVGVLTATAAVAAMGDPRTFRSGREFAAWLGLVPRQSGTGGRVRQLGISKRGDAYLRTLLMHAARSIIIRRPNSTWLIELLKRRPFNVAVAALANKLARTIWAVLAHGRPYEPLLHGEFT

SEQ ID NO: 422057 - protein, 334 aa, unidentified
MKQVNDVGVDVDSKELVCALHCSGQGAALTVFANTAAGHKKFVRWATKGGRSARVCLEATGIYSLQFALALHAAKRVELMVVNPRAIKDFARACMQRGKTDALDAAVIRDFLRRMPFTPWQPPAPEILELQAINRRIDQLHTELTREKNRRHAADFAGAIAKTIAQDIEVNIRHLEGRLERMHQSALRLVRGVPALAAKLAHLVSTKGIGETSAMRLLAELLVLPDDLTAPQWVAHAGLDPRPYESGTSIQRPRRISKVGNRHLRAALYMPALVAIRHQPNVRAFYSKLVAAGKRPMQAVVAVMRKLLHAIWGMLKHDQNFDGNKFFKLAEHTS

SEQ ID NO: 422058 - protein, 409 aa, unidentified
MQVVHEVCCGLDVHKKSVTACVLWASGRRRQTREFGTFTRELLELADWLRACGVTHVALESTGVYWKPVWNLLEGQFEVLLVNAQHIKAVPGRKTDQKDSEWIANLLQHGLLRASFVPPTPIRELRDLTRYRASLAQEINRIANRIQKVLEDANIKLGSVATDTLGASGRAMLEAIVSGEQDSQRLAEMSRGLLRNKIPQLQQALEGRVTEHHRFLLRELLDHLYFVESKMRRIEQEVEERLGPFQHEVVRLCTIPGVDRVTAWGLLAEIGLNMRQFPDAQHLASWAGLCPGSHESAGKRKSGKIRKGSLWLRRYLCQAAWAVSTKRNNYLSALYRRLAARRGSKRATIAVAHNLLVIAYYLLRDQTCYQDLGPDYFDRLNPEGLRRRLTKRLENLGFKVILEPSAHAV

SEQ ID NO: 422059 - protein, 353 aa, unidentified
MKGISTIGLDLAKRVFQAYGVDELGRVVVEKRLQRSDVLVWFGKLAPCLVGIESCATSNYWARELSKLGHQVKLIPPAYVKPYVRRQKNDRADAAGICEAVSRPSMRFVEVKTQEQQAIQVLHRTRALLIQQITQTGNALRAHLAEFGLIYAQGNMGLSQAVNAAHDTKNNDIPSVAQQAMVSLTEQLKTLKQEVMKLDKQMMTWHKSNADSQRLATIPNIGVVTASAIVAAVGTGKQFKSGREFSAWIGIVPRQNSSGGTERLGRISKKGNPYLRRLLVLGATSQLQGGRAGSGVGDQWFGELRRRKSARVASVALANKMARVAWAVLTRGEGYRAAGSATVTENTLMATAA

SEQ ID NO: 422060 - protein, 346 aa, unidentified
MTTVDVTRLVTGGVDHPPRRERCGGTRSARRAVRSSRVPDDACGPPFPREFLASFGTLTRVGVEGTGSYGAGLSRYLRGSGVEVVEVDRPNRQSRRRTGKSDPVDAIEAARAALSGRAQGAGKSRDGNVEAIRALVVAKRSGGSTKIQTLNQIRHLGFTAPEELRARLKGISRQHLGAEAAALRPRAGGDPVVFATKTALSLLGHRVLVLDAERERLNLLLGELVEKTAPQLLEIHGVGVDTAATLLVTAGDNPGRIRSEAVWAHLCGVAPIPASSGKVSRVRLDRGGDRQANSALWRVVITRLRSDPRTQAYMERRLKEGRSKPEVIRALKRYVAREVYQRLPRA

SEQ ID NO: 422061 - protein, 439 aa, unidentified
MPTPCLPVLDPRAAAIDVGSEQLHMSIAGGPPKIFGTTTGQVYALRDYVVAQEVRSVAMEATGIYWLCVYEVLEKAGLEVVVVNGKYVKNLPGRKTDMSDCQWQATLHAHGLLKPGFVPPEHIRRLQDYLRLRTDHIVMAGSHEQHMQKALERMNLKIHDVISDLTGVSGLKMVEAIINGQRNPAALLALCDPQIQKNKAGRLREALEGTWKKEHLFALRQAYELWQFYQKKIAECDQAIEEVLKVLAGPEDPKNPAPAATKRGGVNAPHITGLHSMLWRLCGGKDPTTLPGVADYVLLQLLAEVGTDLSKNWKSEKHFTAWLGLAPGSRQSGKRRGSQRRSRNRAGRLFCVIARSVGRSVDKALGGFYRRLKGRRGGLVANLALARKLAELFWRLMVHGISYVEKGLKKYEEKVAQTEQRLLQKLARKYNLVLQPKAA

SEQ ID NO: 422062 - protein, 391 aa, unidentified
MIYVGIDVAKDKHDCFIINSDGEVLFRAFSIANNRNGFNDLYQKIESVMDDVTKVKVGLEATGHYSYNLLGYLIDKGLPTYVINPLHTNLYRKSLSLRQTKTDKVDARTIASMLMSDVNLKSYSDTSYHNEELKSLTRYRFDKVKERAKLKTSVSRLVCILFPELEKLVPTLHMASVYALLSEFPSAKHVATAHLTRLTNLLSKSSKGRYGKDTAITFRDSARASIGSNMPAKSLELKHTIKLIQELDSEIDEIENEIKIIMDEINSPILSIPGINYRMGAMIIAEIGDFNRFDSPDKILAYAGFSPSTYQSGQLDGAYAHMEKRGSRYLRYALYNATKYVCHWDPTFAAYLAKKRAEGKHYNVAISHAVKKLVRVIYHLEKTKQQYIKAA

SEQ ID NO: 422063 - protein, 411 aa, unidentified
MEAIVERAAGLDVHQGSVVACVIIGAAGRRTPRETRTFGTMKRDLAGLRDWLIEMGVTHVGMEATGIYWHPVHAALEDAFVVSVGNASHMRNVPGRKTDVKDAEWIADLVRHGLVRASFVPPPEVRVVRELIRHRKAVVGTLASERNRTLQLLESANIKLASVMSKLFGVSGMLMLQALAEGRAAPVEMADLAKRRLRRKVDQLALALDGRLAEHQRLLLGLHIRRLSEIDRDLAEIEAAIGAAMRPCVAQQACLATIPGVDELTAASIIAEIGVDMSAFGTAQRLAAWAGVCPANHESAGKQKQRGTRKGNTYLKATLVNAAISASQAKGTYLRDKFHRLKARMGMKEAAMAVAHKILIAVFHMLQRGVGFADLGGGYLDRVNKHSTAKRLARRLTALGYDVMLRPKATA

SEQ ID NO: 422064 - protein, 365 aa, unidentified
MAEHSEAPHVVGGVDTHKDLHVAAVVDHQDRVLGVESFPTTRHGYRLMLTWMRSFDDLQRIGIECSGSYGAGLLRYMQAAGVEVLEVTAPDKHDRRRRGKNDHFDAESAAHAAFAERHTVTPRSRDGMVESLRVLRVCRKTAVQARRIALQMIQTTIVCAPDRLRDPLRQMTRMQLIRTLAAWRPDLTAYREVEEAYRISLKSLARRYLELHDEIADLDDMIKAIVKDLAPVLLEQTAIGLNSAAQLLLTAGDNPERLRPEASFAALCGVSPVPASSGKTVRHRLNRGGDRLNRGGDRAANSAIHIIAIGRLRLDPRTQAYVAKRIAAGNSKLEAIRSLKRYIAREVFGIIIRRQNQINQSQIAA

SEQ ID NO: 422065 - protein, 461 aa, unidentified
MAKQSDKRKKGGAKADATEGLPPLNLHAAGIDVGSAEHYVAVPLDRDVEPVRRFGSFTADLHRMAHWLKDCRITTVVMQSTGVYWMALHDVLESHGFEVNVANARHTKTLPGRKTDVQECQWLQKLHTFGLLNNSFRPPEKIRVLRGYLRQRENLVAAAATCIQHMQKALTEMNIQLANVISDISGTTGLAILCDIVQGERDPYKLAMHKHSRIRASRQEIARSLQGTWRQELLFVLEQSLDLYQTYQQKIQTCDERIDGQLRSMEPKIDPVSEPIPEPRRGKDWRGHPSGFDLRGQLYRITGVDLTRIDGIEVQNAQTIISEVGVDMSRWKTEKHFASWLGLCPDNRISGGKVLKRGTRHVVNRASTALRLAASALLRSQSALGAKFRRLRSKLGAPKAITAMAHMLARLVYRMLKFGHDYVDRGVEFYEAKYQHQQLQRIRKQAAAFHMQLIPLTRVVS

SEQ ID NO: 422066 - protein, 475 aa, unidentified
MNVNGKRKKNQVVTANIFEQQELLKKAEVIRENLTASTWRELETNGKFDKNEKLSFISDDMLILGCDVGSEIHYLRAIDTRGRELSKSAFSFSNESEGFQSAKEWAVKIAAEHNKNQIVLGLEPTGHYWFCLATWMISNGISVVQVNPYAVKQTKEVEDNSQMKDDRKDPKLIANLVKDGNFGMPYLPEKLYAELRRLSMFRDQLNEDRIRTINRMHREMKIYFPEYKDALGKVDGAFSLELLKQAPFPEDLTALGEDGIGQIWHDAKLRGRGYSRAGAILRYAKTSVGIKDGAAAGKTAVKWFVQKIMELDVELAVIEEQINQKCQEIPHAGNILEISGIGENTLSGILAEMGDILRFDDVKEIQKLSGLGLVACSSGKHKGENKISHRGRKRTRYWLFQAAKSAVAHAEEFKELHMYYTTRADNPLKKMQSLIVIACKLLRIIYTILKNGTVYDPKKMLMDIRRPEKKEAIAA

SEQ ID NO: 422067 - protein, 338 aa, unidentified
MDHYVGIDLHSTNSYIVIIDNDNKRVFKKKTKNDLRLVVEALKPYQEQIKGVVVESTYNWYWLVDGLIEEGYTIHLANPSAIKQYEGLKHSDDVTDAFHLADLLRLGILRTGYIYPKEERPVRDLLRKRLQLVQQRTLQILSFQNLVARNLGKSMNGNAVKKLSEDDGEHPFHDKHLVVSGKASISTILFLTEKIKQLEKTIHKVAKLKDEYTLLMTVPGIQKILALTIMYETGPIERFRKVGNYASYCRCVGSKRISNAKVKGKGNRRNGNKHLSRAYVEAAHHAMWHYEYVQRYYQKKMVKTNTLVARKTIAHKLARACYYIIRDQTVFDPKRVFV

SEQ ID NO: 422068 - protein, 316 aa, unidentified
MPLQPCFVGIDVSQASLDIAVRPTAETWQVSNDEAGITTLVTQLQALAPTLIVLEATGGYHGPVTAALATASLPVVVVNPRQVRAFAQAVGILAKTDRIDARVIAHFADAVRPTPRPLPDAETQELRALVLRRRQVIAMLTAERNRLGTAPARIQPAIQQHIAWLEGQLAALNDDLTATIERSAVWQAKADVLRSIPGVGSVLSRTMLAQVPELGTVGHKQVAALIGVAPFNRDSGTLRGRRTVYGGRGEVRAVLYMGTLVATKHNPVIKAFYTRLLAAGKCKKAALTACMHKLLTIMNAMVRDLTPWQPREVAIA

SEQ ID NO: 422069 - protein, 339 aa, unidentified
MKLYTGLDLHSSNSFLGIIDETGKRVYRQKLPNDRERILAALNPYKNDIAGIVVESTYNWYWLVDLLMGEHYHVHLANPAAIKKYTGLKYADDQHDAFWLAEMLRLGILPEGYIYPKEDRPIRDLLRKRMHLVRLRTSLIVSLQNILSRNNGFKLKTSDVKALTEDRVAPYLAGSEDLALAGLVSKESIDFLSRQIKKIETVIEDKVELKPSYEKLQSVFGIGKILALTIMLETGPISRFAKVGNYVSYCRKVSSKWLSNDKVKGKGNKKSGNKYLAWAYSEAAEHARRSYTQARTYYNRKMQKTNFMAAHNALAHKLARAAYYVMRDEVLFMPEKIFV

SEQ ID NO: 422070 - protein, 364 aa, unidentified
MAGAMGKRMGFILKDKEIFVGLEDSKRTWKLCVRSGGVVANETSMPADYEALRNYFNNKFPGCRIRVMYEAGFGGFYLHDQLLADNWECVVTPPHTVTQEKCSRQKNDRIDCRRLAKNLENGDYRSCCVPDKELREDRQISRTYGQVQKDIVRVCNRIRRTLEFHGLDKLFPPGSWSGAAYKQLEQKLEEMNISRSLEISFAVMFKELENLRQLKKELLLELRNLAKSDRYRQSVDLLKSAPGIGILTAIRLALEWGDMSRFQRKEAFASFLGLIPSDYSSGEQDRRGHITKQGNRWVRSWLVEAAWRAIEHDPVLLDKFRRVFSHSGSKKKAIVAVARMLAMRLRRVLLDGKPYENGLVSCCS

SEQ ID NO: 422071 - protein, 344 aa, unidentified
MQIVRIGLDLAKYVFEIHGVDAHGKTVVRKTLRRHAVSAFFANLPPCLIGMEASNGAHFWAKALSDLGHDVRLISPQFVTPYVKSNKNDRNDAEAICEAVGRPNMRFVPVKSAEQLAVQAVHRIRSRLVADRVRLVNQVRGLLGEHGIVIAKDIGNLRRSLARIVGDDEDRVLNPLVRALMAELREELTELDARIAGYDRKIRELYRNSEICQRLGKVEGIGPVTATALAAAVGDRSSFKNGRQFAAWLGLVPKQRSSGGRARLFGISKRGDRYLRTLLIHGARSALGRVRDKQDPRSLWLGRMRQRRHPNIVAVALANKNARIAWSLLTSDSVYDVKLSVGAA

SEQ ID NO: 422072 - protein, 254 aa, unidentified
MMSTQVFVGIDVSKAQLDLALRPEGRFSAPNDEAGCAQVLERLRAVSPTLVVLEATGGLEIPLTGILAAAGVPVVVVNPRQVRDFAKATGRLAKPDALDAQTLAHFAEVIRPELRPLPDEQTQALAAILARRRQLVEMLTAEKNRLGSARQPVRTSLRTHIAWLERELTHRDRDLVHAIRESPVWREKDALLQSTPGGGPVVTTTLLANLPELGTVTGKQIAALVGVAPLNRDSGSWRGKRAVGGGRAQIRAVL

SEQ ID NO: 422073 - protein, 432 aa, unidentified
MSYRIAGIDVHKKMLAVVVSDVEVDGEFRFERRMFGSNPEQLRTLAAWLLEQEVEEVVMESTAQYWKPVWETLERYWKPIREKREGARRKSGTLHLAQAQSNRGPRGRKKDFRDAERLVKRLVARELTLSFVPDAEQRLWRTVTRRKYQLTRDRVRLQNQLESLLEEAHIKLSSLVSDLLGASARRMLKALAEGETNPAALAALADQNLRATPEQLCDALGACTDLKPVYRRLLKMVLEQLQFLEQQIGQLDKEMASLLSQHQDAVERLAEVPGLGVDSAQQIIAEVGPTAATFPSAKCLSSWVGACPGDEESAGVNYSHRSPKGNRHMRRVLNQCANAAARTKGSIFEIVYRRSVPRLGHNQTIGAIAHRQCRLIWLILHQAVRYEERGPAVTKQSKQRRTAKMIRQLRSLGYRIEPPIPQHQSSAQRQGQ

SEQ ID NO: 422074 - protein, 320 aa, unidentified
MSKKKSQSFIGIDVSKQQLEVAAHESDYQFRCRNKMSAFGELIAELINLRPALIVLEATGGLERPVVSALRASGLPVVVVNPRQVRDFAKALGQLAKTDRLDARVLAHFAAAIKPPLRPLKSQEEQELDALTGRRGQLVEILADEKNRRAAASSDTVREQIKQHIDWLEDRIAELDQQIKALLQTSSAWQIKDQILRSVPGIGPVASFSVIAGLPELGTLNRQQISKLVGVAPLNRDSGQQRGTRHIYGGRAGLRRVLYMAALTAARHNPVIKEFYQRLRTNHKPFKVAITACMRKLLAIINVMVRDSTCWKTKVEPVSV

SEQ ID NO: 422075 - protein, 341 aa, unidentified
MSIVGAFDVHRRQLTFEYLDTGSGELKRGRVIPADRQHLREWLARFAGQDDVHFALEGCTGWRYVAEELVAAGITPHLAEPADTAALRGRKRHAKTDKTDARHLRVHLLAGDLPECWIPPEHVLEARAVVRLYKDLLDERGAWHQRIAATLFHQGVPAIGSAAKPEGRAALAGVELSPAGWQAVQAGLRQVDRLTAELDVLRRQLGMLARRQPGCRALREAWFGIGPVTAVAIWAELGDVRRFGNSSDVVRHTGLDITVRSSDGKGPPGHLSRQGPQLLRWALYESAKCAARPAAPDHGYYTAARDKRTAGLATLSVARKLARRSYHTLRELGEEALAPAA

SEQ ID NO: 422076 - protein, 356 aa, unidentified
MSREVKYIGMDVHKEAIVIAVQNTRGHLVMESIVETKASSLLQFMHGLQGELHVTWEEGTWAAWLYDLLKPHVHQVLVCNPRRNALLKEGSKNDKVDARKLADLLRTGMLRPVYHGEHGLRTLRELARTYQTLSQDLNRVMNRVKALYRGWGIACGGTQVYAPRYRDEWLGKIEHVGVRRRAELLYQQLDGLQALRRTLRSELLAESRKHKAAKLLRQIPCIGPIRAARLIALMQTPHRFRSKRQLWTYSGLGIETHDSAQYRFVRGELQRAKKPQQIRGLNRNHNHEMKDIFKGAANRASCGMGPLRDFYVALLDKGMKPEMARLTLARKIAAIALTLWKKEERFDAEQLKTQAA

SEQ ID NO: 422077 - protein, 355 aa, unidentified
MLYLGIDQHARQLTISLRDDNGDVLLARQVSTRPEKINEFFQRLTRERLSNDEQFIAVVEVCGFNDWLIRMLRDYRCHRVILIQPEERKNCKTDRRDAAALSEVLWVNRDRLLQGKSVRGLRQVDIACTADQENRRLTTLRKDAGRAKTRLILQIKHMLRRHNMQWEMPTKTFPTKPAIAWLKKLVLPEIDRLEMDHLLTDRQHVQTRLAELEKMIAQRCSGSDEAILLGTIPGVGAFTATSLACRVGRVERFPRSHSLANYWGLTPGCRNSGEKTQRLGSITKAGSGMARWLLAQVTQKVLRKDARLREWFKRIKRRRGANIARVAVMRKLTTIIWHMLMKRKSYAECRAFAAT

SEQ ID NO: 422078 - protein, 493 aa, unidentified
MKSASNTAIQASRTALSETAPHDVTAGIDWARDDHAVCIVDGHGRQVARTTVEHTAAGLRDLLGFLGRHGACEVAIERPDGPVIDTLLGAELTVVVVSPNQVKNLRGRYGSAGNKDDRFDAYVLADTLRTDRARLRPLVPDTEATVALRRACRARKDLVSHRIAAANQLRAHLRNVFPGAVGLFNDLDSAISLAFVTRFDTQDRADWLTPKRLGDWLAKQGYSGKVDPHVLHQRLFDAPRGATGDHATDQAHITAALVALLTTLSTQIKALSAQISHQLDTHTDQHIFTSLPRSGRVRAARLLAEIGDSRARFPTPESLTCLAGAAPSTRQSGKARIVGFRWSCDKQLRDAVTERALAADGSRVYAAATGAGGHLRAFSAASGADIWAVTADGDFQAVTLVGDTVYFGGHMDQICHSDRTGAKGVCLDGYDSRHKIGAVSAADGALLPFDPQASGGFLGVLDLDSSAGRVTAGGVFHKFLGGAVSQPYFASFS

SEQ ID NO: 422079 - protein, 426 aa, unidentified
MKVIYEKACGVDVHKSFIVAVICDSTSITPKYLRKRFSTFNNSLIQFRNWLIDNDCQNVCMESTGKYYIPVYNALEGFISNVVVANPKWVAVIKGEKDDNKDAKWIADLFKLGIVRSSFIPDKDFRILREFTRYIYKLTCNKSSEKNRFTNALTVGNCKLDMVFSDTFSKSAQSIIDIILNNDNFSDEDIIGCLRKNCKSTHEDILSSVSGVTFTFEQKLRIKIVEDHIDYLTNQINTLRDIVDTLVSPYEDYINLLMSIPGVDRKSAITILSEIGTDMSQFSNHYRLTSWAGLAPGCNESAGKKKSVKISRAGVYLKPCLVEVAHCAIKDKTNTYYANKFNKISKRRGKKRSYIAIARKILVAIYHMLSTGEVWNPTDLATNETNDKDRIKYTKNNFKQSLKQLLSLGLTSEELLEIVNQNAMLE

SEQ ID NO: 422080 - protein, 324 aa, unidentified
MFFIGIDVSKAKLDCTLLTAEADKRKTKVVVNTAAGVQALLAWCAKHGAQPAQLHAILEPTGLYHEQAATALHDAQVRVSLVNPAQARDFAKALAMRSKNDALDSYVLARYGQTLSPALWHPAPLHARQLRALLTRREALGKDLLRELNRKEKSQFSPSAPLVDGSIDKAIAFLREQIKQIERAIDQHIDNHPDLKQDRELLNSIPAIGPQAGNAILAVMHNRRIDSAQTLAAYLGVVPVQRQSGSSLNSCARLSKAGPSQVRATLYMAALVGTRHNPHIRALYQRLLKAGKSKKAALGAAMRKLVHLCFGVLKTASPTSLITP

SEQ ID NO: 422081 - protein, 366 aa, unidentified
MKKSSTVRVNGNMIFKGHKLTIGVDLGDHWSCYCVLDEAGRIILEQKVATTPEAVKQAFAKIPRSLIALETGTHSPWVSRLLTELGYKVIVAHAQKVQLITKSSRKDDRHDARTLARLARIDPELLGPVRHRSAKAQIHLTVIRARAELVSARTALVNGARGLAKSYGERLPKCGTYQVSRELAAGLSIELRDVLEPLFREIESLNERIKEYDGRMEKIAKEVYPEVSLLQQVKGVGTQIALTYVLTIEDPHRFLKSREVGCFLGLKPGRRNSGQSEPQKKISKEGDRYLRTMMVQGAHYILGPFGEDSDLRRWGRKLAERGGANAKKRAVVAVARKLAVLLHRLWVSGEVYEPLRNSNKAMQAVA

SEQ ID NO: 422082 - protein, 331 aa, unidentified
MSVWVGVDIGSRTSVVAVRKDGRPAGQWDIAQTPAGRKAAVKKLLALKPKSIVMEATGIYYLDLALELHAADLPVSVINPKSFHNFAKLMLVNSKTDAIDAQLLSEYGERMTPRLWTPPSLVQLELRALGRHINRLVGHRTRAKNELHALQATATTVSMLIEDQEEAIASLDNRIERFRKAGRELVAQCPTLTRQYKQLLAGPGMGEVSALAALAELTILPQILKSSQVARHAGLDVRQTQSGTSIDKPGRLGKSGNAYLRAAMYMPALTAVRCDPYAKAFYESLVNRGKKKMQAIAAVMRKYLTGIWACMRGDEPFDTAKLFSSEHLRKA

SEQ ID NO: 422083 - protein, 412 aa, unidentified
MDVVYERCCGLDIHKKTVVACRIVPGPAGKPTKEIRTFGTMTEDLLALSDWLASEGVTHAAMESTGVYWKPIYNVPEGSFELLLANARRIEAVPGRKTDVRDREWIADLLRHGLLKPSFVPDRRERELRELTRYRSSLVRERTAEVNRLQKTLEGANIKLAAVASDLMGASGREMLAALAGGSTDATALAQLARGKLRQKLPDLGRALAGRCGAHQRFLLARQLAHIDFLDEAIEQVSAEVRERVRPFEAVVQRLDTIPGVGRWTAEVILAEIGTDMGRFPGAGHLASWAGMCPGNNESAGKRKSSKTRRGSPWLRVALTEAAQAAGRTKGTYLAAQYHRLLARRGKKKATVAVGHTILVIAYHLLTDETGYRDLGGHYFDERDRGLLERRLVRRLEGLGYKVTLARVDPAA

SEQ ID NO: 422084 - protein, 315 aa, unidentified
MNERSVKFVGIDVAKDHLELYCPGLKLPTRLNNNPKTIAAWLRRLLVVHPTIHVVCESTGGCENALMRACWQAKVPVSQLNPTWVRAFARSKGLLAKTDAIDARVLADYGSVFTPKPTPEPSARQVRLAELVARREDLKAQRAAESNRLSYLQDAAMRRMIKNHLRWLDTHIAQIEKLMEETINQDPVLRHKRQVLVATQGVGNVVAATLLADLPELGSLPRQAAPALAGVAPFNRDSGNLRGKRSIRGGRATARKALYMAALVGSRRNPVLRDFYQHLISKGKAPKVALTALMRKLVVHLNSQLKTHTLQPAQC

SEQ ID NO: 422085 - protein, 337 aa, unidentified
MDVHKKSWVVHFKTDLFDFKTVTMPPDPMCLEEYVEKNFPSHEVNCCYEAGCCGYWIARRLQHLNWKVLVVNPADVPRTNKQDWQKTDKIDCRKLCEQLQKSNLHSIFVPGEEQEQLRSLFRRRNHLVKQLRTIKNHVKSQLLYYGIKLPEQFDNPSWSHEMKTWLASIKWKFSSAAETMQSRLKQLDFLWYEELHISNELRAYCRKHHKKDYYLLKSVPGIGGITASALLAELGDIRRFDRLDELAAIVGFVPGIYQSSNNKICLGLSGRSNRYLRSLLVEAAWMATRQDIALQTYYRKHAAKEPNKAIIKVAHKLLSRIRAVINSGIPYQTGLIK

SEQ ID NO: 422086 - protein, 334 aa, unidentified
MHYIGIDFHKESTHVVVLNEAGKLLERTRIPSRREELVRFFANRTEPAKAALEATRNWYWPYDTIEPLVEELKLASPPKIRIIAESTVKTDHIDAKVIADLLRSNFLPTCYVPDAETRQKRELLRHRAFLVQIRTRVKNRIHIILDKLGIEHPFDNLFSKRGLEFLRGLELPWAYQKELEDSLEMLEFLNGKEKEQNKIIEKLCKESEEAALLMTIPGIAYHNALLIMSEIGDVNRFATGTKFCGYCGLVPTVHISDKTVRYGQMMEGGNKWLRWVFIEAAHISRRKSLRFSRLYERVKVKRGPQVAIGAVAREMAVVSFYILKSGKPFRDAKW

SEQ ID NO: 422087 - protein, 347 aa, unidentified
MNYIGVDYHKRYSVATVVDEQGIVLASKRLDNRSEAFHAFLKPFASAKAVLEATRNWGVGVDLLEAEVEEVILAHPAKVKVIAEAKIKTDKISAFDLAQLLRVNWIPKAYLRNRVNRGQQLILRTRVFFVRLRTRVKNRIHDLVDRQAEPIRETAQTFSDLFGKKGRTWLKGLQLDPPYSTLLSKLLVTYEALNQQVAESDDLVAELFAADPDCQLLASIPGFGPFFAVLIKVEVGDIKRFASSARFCSYAGVVPSTESSGGKTHHGSIIKQSNHWLRWAFIEATMPATVADDGLRAYYTYYRRMKGVKTAKVVTGRRLACIAYRVLSEQKPFYPQPAGSHGQRHAA

SEQ ID NO: 422088 - protein, 342 aa, unidentified
MSRLVIVGLDLAKNVFQVHGADASGKVLFRKKLRRGQVLEFFNELPACVIAMEACGGAHFWGREIGKLGHEVRLIPPSYVKPFVKRQKNDAADAEAICEAAVRPTMRFVSVKSEETQGAAMVFRVRELLIRQRTQTINALRGHLNEFGQIVPQGVANASKLVAIVEGSECELPMEAIATFQALIATLGHFETEIAKLDAEITRRAKEDELARRLMTVPGIGPLIATAIATLAPPPENFRRARDFAAWLGLVPRQHSTGGKQRLGATTKMGERSLRRLLIIGANSVIIKRHTHQDAQPGTWLGNLLLRKPPMLVRVALANKMARIVWALMARGGVYQSPVAAA

SEQ ID NO: 422089 - protein, 313 aa, unidentified
MTMPQTTLGIDVSGARLDAYVQPAGRTRSFANSPAGVAALVIWANELDAFVVLEATAPWDQPLIRALEQADRPFHRANPKRARDFARSLGALAKTDAVDARMLALYGARLPLARTPPVTPERLALQGLNSRRDQLVEMRKAERIRLKGVFDPFLIDSLKAVIAVFDVQIQALERRIAETVARSAELAREAAVLRSAAGVGPVCAAVLLAALPELGQVDRRAVASLAGLAPIARESGLFKGKRHVQGGRKRVRDALYMAALAAIRIGRWKQAYDRLRALGKAPKAAIVAVARKLLVALNAAVRNQTMVLNTPVA

SEQ ID NO: 422090 - protein, 340 aa, unidentified
MNATTYGLDVAKRVFQMYWVDAQTGEIVNRRFGRDELIGFLAQRPAGRVALEACGSGHWWARRIKALGHEVVLLHAKFIRPFVQTNKTDAADARAIWTAVQQPGMRTVAAKTEDQQAMLSLHRMRALLVKFRTMQVNQLRGLLYEFGATFRAGRVAGWTEIRARMAELEDALPGAIIGNLQEQLQRIDTLEQDIDRLEHRIGTWQKQEAACRALAAVPGIGKLTATALVATIGDAKTFRSGREFASFLGLVPRQSGTGGRIRLGSISKRGDPYLRTLLIHGARSVLYHAKVPTPWQQNIQARRPANVAAVALAHKMARTAWAMLAHGQAYRKDYVSVKPA

SEQ ID NO: 422091 - protein, 416 aa, unidentified
MLAVVVADVEVESEYTFERRKFSSTPEQLRSLSTWLLEQEVEEVVMESTAQYWKPVWGALERYWKPPCEKREGARRKSGTLHLAQALSNRGRQGRKRDFPDAERLVKRLVAGELTLSFVPDAEQRLWRTVSRKKYQLRCDRIRLQNQLESLLEEAHIKLSSLVSDLLGLSARRMLEAIAKGETDPTTLAALADQRLRATPEQLRDALGACTELNSVYRRLVKMALEELRLIDKQIGRLDQEMAGLLSKHQDAVQRLAEVPGLGVDSAQQIIAEVGPTAASFPSEKCLSSWVGACPGDDESAGVNHSHRSPKGNRHMRRLLNQSANAAARTKGSIFEVVYHRSVPRLGHNQAIGAIAHRQCRLIWLILHQGVRYEERGTEVSKRSKQLRTWKMLRQLRKLGYRIEPPNPQPSQAPAQ

SEQ ID NO: 422092 - protein, 368 aa, unidentified
MKDYNGKTIFVGIDVHKNTYSLTAICDKCVIKKDTLKADPQGLILYLKKRFGSGKIETVYEAGFCGFHLHRSLEFVGIKNMVVHAAGVETSNTRVKTDKRDSLKLAVHLSEGRLRSVYIPTIEQEDNRTVTRLRDVFSKERARISNQIKSLLFLHGFIPANDKKKVSLSWIESLSKLKMTPGIRFTIEKFKAMWLEFNAKIKEIDKEIKEQAARNHVIDAMYQSVSGIGPTSARILANELGDLQQFKNERELFSYIGFTPSEHSSGEHTRQGHITKQGKPIVRKILVQIAWVAIRYDKKLQAIYEKIAARSGAKRAIVAIARRLIGYIRACFRTGEMYKAEKVERATIKFGKLVKHKKAELSKTKQVA

SEQ ID NO: 422093 - protein, 354 aa, unidentified
MRRDPKFTGLDVHAATIVATVDRQSGRAIARSVLPTQAAAVLEFFRGMRGPIHVAFEEGTQAQWLYDLLLPVVDEVVVCNRRGQRRQGNHGDFVDSDRLADDLRKRNLKPVYHGSRGRETLKELVRVYDSLVQDASRVMQRIKAVYRARAIPTPGTSVYGTKRREEWLATLDDRGARTRVEVLLTELDLLRELRPRARAAMVAEARRDPAFKGLDAIPFLGPIRVAQLLAVLQTPWRFRNKHSLWGYAGFAVVLHDTAQFVIRSGTVVRRQRRPMSRGLNRNHNAAVKRIFKAMAKDAARRSGPFRDWYQQRLAQGLDPDLALVTLARKIASVVLRLWKTGEGFDPSKLTVQAS

SEQ ID NO: 422094 - protein, 389 aa, unidentified
MSQPFDASRSLTVLEQDSTIIAVIEMSQSKWLVSAVVPGVERQPLKKLDPDEEALRKLLHRWRNEAGQAGREIKRIVVAYEAGRDGFWLARWLQARDVEAYVIHPASVAVSREHRRAKTDRLDTELLMRAFLGWLRGEKRHCSMAAIPTAEEEDAKRPNRERGNLVTDQTRIVNQIKAILARFGIRTFRPTLRKAAEKLDGLRTAEGTPLLENTRAELRRHLARLRVVREQIRAIEHERLRKFAAAPAGVKGPHAMVRLIARVVGVGVETADMLVNEVLSRHLRDRKAVARYAGLTGSPDESGRRRRERGLARAGNARVRCGMMQLAWRFLRFQKDSALAQWFDARTADGRGSTRKTMIVALARKLLIALWQLVTTGEMPRGVVLRPAS

SEQ ID NO: 422095 - protein, 339 aa, unidentified
MQTAQQFFIGIDVSKLTFDAALMAITDHQKNPIVTERFANNAAGLKDFGKWLKSHSVTGTNTLLVMENTGIYHRLLWQFCGKAAIPVHIGNAAHIKWSLGITRGKDDRTDSIRLCRYACKEADVLKAAPPLNPSLIRLKDLQTTRTRLLLQLNSNKTYLRELKNVSDASDQKILEGVYKAAIEGIAKSIKAVETQIKAILAGNEALKANYKLLLTVPGIGDVTAIYLLCCTANFAARPSGKQLACYAGLAPFERSSGTSIKGKPRVHKMANKELKKLLYMGARAVIQHNPEMRAYYDRKMTEGKHDLSVVNAVKNKIVLRVAAVVNNQRPYVNKMKMAA

SEQ ID NO: 422096 - protein, 342 aa, unidentified
MKDTMIGVDLAKSVFQLHGASMAGHLQFRKKVTRIQFRHFMAKHEPAVVVMEACGGASYWAREMVKLGHEVRLIAPQYVRPFVKRQKNDAADAEAIVVAAQRPEMRFVEPKSADQQACAVLFRARERLLHQRTELVNALRSVLYEYGHVFPKGIAHLRRIEAVLTDPASDLPALVRDECHDLLEQISEQTARIEAKTAKARGLAGTDDTARRLQTMPGVGPQTALAISGFAPPMDSFKRGRDFAAWLGLVPRQYTSGGKERLGRISKAGQTDIRYLLIIGAMSRLTVLARKSIQEGSWLARMLHRKPLMLVAIALANKMARAIWAMMTKKEDYRDPARAVSA

SEQ ID NO: 422097 - protein, 440 aa, unidentified
MPLRCPKEVSKFAMSKIRSTQQEPEFAAFIGIDWADQKHIWSLQTADSEQRESGELEHTPEAVESWVAHLYQRFAQRPIAVAVEQSRGALVFMLSKYEPFHLFPVPAQMAASMRQALYPSGAKDDPRDADLLLDLLVQHRNKLRRLSPDSEATRRVQNLVEERRKLVDEKTAQINRLTDHLKVYFPQVLEWFGRLDTELVCALLVRWPALEELQKASPASVRAFFRKHRCRDRERIEHRMEAIRRALPAIQDRAVIEAKSAVVKVIVQLVRILVEGIEDLDGQIEEAAAAHPDFFIFNSLPGAGPVMAPRLLAAFGSQRERYRSAREIQSFSGIAPVTESSGKRKWVHFRWACPKFLRQSFHEWAGHSIVQSEWARVYYHQQRSKGNTHHAAVRALAFKWIRIVFRCWQDGVAYDENTYMAALVKRGSPLGAGVATGKTL

SEQ ID NO: 422098 - protein, 324 aa, unidentified
MIDGILGIDVSKNTLDVSICSFTKVRTKRFANSFDGWRHLLDWLIAQKVQRVHACLESTGRYSLGIACALYEAGHVVSIINPAQLRDFVRTKLGRNKTDGVDASHIREYCELFKPSPWAPPSEAHRRLGELQTIRAGIIAGLTEWKNRKNSGIADAEAQALAAATISHFMSQLGAVDKAIALTIDNDSELRSKRDLLLSISGVGETLAGVVLAELPGPDVLRSSAEVVAYAGLNPRQHQSGASVDRATRISKIGNAVLRAALYMPALSAMRYNPAIVALATRLKSRGRLKPKQIVVAAMRKLLVLCFGVLKTGKPFDAAIAMGC

SEQ ID NO: 422099 - protein, 339 aa, unidentified
MQITVVGLDIAKHVFQAHAADADGRAVAQVKLRRAQVLDYFRGLPPCLVGLEACATAHHWARELIALGHTVRLMPPAYVKAYVKRNKTDAADAEAIAEALTRPTMRFVPVKSVDQQSMLMLHRVRELLVRQRMMLATALRAHLAEFGIIAPQGIHRIEKLAAQVHDPAVPPPARDALKLLVAQLASTWRQIDEIEKKLVALHRTEAVSRRLASIPGVGPITAMAIASTVPDPTMFRSGREFAAWLGLTPKSHSSGGKDKLGRISKRGDRYIRHLLYIGAGNAIRFAKARAATGEAWIRALQARRPPKVVIIALANKMARIAWALMMRGESFRSPAAAAG

SEQ ID NO: 422100 - protein, 412 aa, unidentified
MTATNQFAAHVGLDWADKKHDVCVQFKNGERVFHVIEHTAEALDAWLTELHQKVKGRIAIALELKKGPVVYALQKYPFITVFPVHALSLARYRQAFSPSGAKDDPQDAELALELMLRYPQKIKAIEPDNADIRLLQQLVELRRQLVEDKRRFVNRIINTLKQYYPQPLEWFSHRGSLLLCELIIRWPSLQQLKRARRDTIRNFLNAKGGRAMALTEQRVVSIDNAIPLTTDPSVIEANALMATALATQIKVVSEIIKTYDERIETLFDTLPDAGLFKSLPGMGPCMGPRMLAALGDNRDRFNSAEEIQNYAGIAPVTERSGQKSWVHWRWQCAKFVRQTFVEWAAKTVNSSYWARLYYQGQRDKGKSHQSAIRALAFKWIRIIYRCWKTRTRYDEVKYLLALEARHSPLLRP

SEQ ID NO: 422101 - protein, 349 aa, unidentified
MAKRITETIGLDLGDRYSTWCVINQATGEEVESGRVRTTPKAMECFFGARRSARIVMEVGTHSPWVSRIAAEACAEALVANARELRFIFQGKRKSDTVDAMLLARVGRMDPELLSPIRHRGEVAQRDLVSIRARDALVAARTKLVNSVRGLMKSSGFRLRKQAAKSVGHRSLEEVPAELRAALRPMLHAIEALTDEVKEYDAQVEAIANERYPETECLTQVAGVGRLTALAYVLTLEDPAHFATSRDAGSFLGLVPKRDQSGETDKQLRISRCGDRMVRTLLVQCAHYILGRNGPDSDLKRFGERRASRGGAAAKKRAVIAVARKLAVLLHALWRTGEAYEPLRHSRAA

SEQ ID NO: 422102 - protein, 320 aa, unidentified
MGAIWVGVDVSKQRLDVAIRPAGEVLTIGNDEAGIKALTKVLKEWSPQLIVLEATGGHEYAAAYCLMKAGLAVAVVNPRQVRDFARAVGKLAKTDPIDAQILAHFGEAVQPPPRPIADQKLEEIGHLVTRHRQLIEMIVAEGNRRMSLRGTAQHDVDVTIRFLRDRLDKIDEQMKTLIAQHPEWKAKAELLNSVPGVGPVLISSLVAELPELGSLNRKQVAALVGVAPFNNDSGQSRGRRRIWGGRAHLRSLLYMSVVAGVRFNPTIRTFYRHLRAAGKPPKVALVACMRKLLVILNAMLKSQQPWRLSVSDPSPWQSGR

SEQ ID NO: 422103 - protein, 404 aa, unidentified
MGLDIHRDVIVACLAKGELGTDPEIEIRSFSTLIPEMRKLRDWVLEAECRYVAMESTGIYWQPIYEMLEPCFDGQINILVVNARHMKNVPGRKTDMRDAQWIATLLRAGLLKGSFIPDKTFRELRHLTRYRKSIVRDITAQKNRIDKFLQSSGFRFTAFLSDAFGASGRNIIRHLMEYGNISREALDRCLKTQTRKRIDEILIALNGSLSEHQRGFLRMIFGHLEALEQHRHTVEDAITKEITKHEEALSLLCSIPGIDVTAAAAIIAEIGTDMSAFPDSQHICSWAGLSPGNNESAGKRKSAHINKGNPYLKSMLCEVGWVISGKRSLYLSGWYWRIKQRKGAKRATIALARKLLALIYTMLKTGSPYNEDCFEIRRKQSERKRTSRMVNELQKLGYFVVAPG

SEQ ID NO: 422104 - protein, 302 aa, unidentified
MRRVIGIDTHRTFGEVVIWEDGRLRHVGRVDMTRTALEGFGKKLLATDEVVIEATGNCMAVSRVLTPFVKRVVIANPLQVKAIAHAHVKTDKVDAGTLASLYAAGYLPEIWTPDAATERRRRLVARRYQVVRHRTRIKNEVHSILYAHLIPRCPHADLFGRLGRTWLTSQPLPDDERAAIERHLRELDRLGDDLRVLDQEIAQSALDDAAIKRLITITGVNLAVAAGLVAAIGDIGRFSSPQKLVSYFGLNPRVHQSGLGAAHHGRISKVGRSHARAMLVEAAWATAKAPGPLHAFFAVVKT

SEQ ID NO: 422105 - protein, 411 aa, unidentified
MRLFVGDDWAEDHHDVELMDGAGKVLARKRLPEGVAGMAQLHGLIGTWLGEEAGDSEVLVGIETDRGPWVAALLAAGYRVYPVNPLLSSRYRDRHGVSGAKSDAGDAHMLAGLVRTDSHQLREAAGDSPEAEGIKVLARTHKTMIWERTREVQRLRHQLREYFPAALDAFDDLDAPDTLELLAKAPDPERARKLTRAQVSAALKRARRRNIPDKAGAILAALRGGQLSQPPALTAAYAATVRSLIAVITALNEQVKVLEAQVREHFGRHPDAEIILSQPGLGPVLGARVLAEFGDDPHRYRDGKARRNYAATSPITRASGKKKVVAARFVHNDRLAGALNSQAFAALTASPGARAYYDELRERGIEHNDALRRLANRLVGILHGCLKTRSLYNEATAWSHREKIPQSGIAG

SEQ ID NO: 422106 - protein, 387 aa, unidentified
MQIADRSEAPTAIRTDLGAIFVSLELSRSTWLITSLSPGSGEKMSKHSVRGGDIAALLKRFTQLQEKTQARTGKRFEIIVIQEAGLDGFWIHRVLQSKGIDSHIVDPASIATSRRRRRAKTDRIDGEALVRALLAYKRGEPRVCAMVKVPTPEEEDRRRLCRERKVLIAEQIEHVNRLKGLLFSQGISGYEPLRRNRWTRLEELQTGDGRPLPKHLTAQIRRELNRLELLLEQIKAVEVERDALLAAEETSAPAPAAILLNIRGIGPEFAAVLWSEGLFRHFDNRRQVAAYAGLAPTPWQSGAVDREQGVSKSGNPRLRTTLIQLAWLWVRYQPRSALTLWFEARVKRNGGRLKKTTIVALARKLLVALWKYVTAGVLIEGAAMKVA

SEQ ID NO: 422107 - protein, 402 aa, unidentified
MKEDIAKAIGRQAAATLDNAKCWSRYGGFIGLDVHKDTIAVAIAKPGRDEPVYRGEVANAPKAIGKWLDRLSTEFDGALLLFCYEAGPCGYGLYRQLLGAGHACQVVAPSLIPKKPGERIKTDRRDALKLARLLRAGDLTAVWVPDAEQEAMRDLTRARDDMKSQERKARQQLNAFVLRHGHHWPRGKTRWTKTHFNWLDSIRFEQPWLQIVLQEYIDAVKAATQRVADLTDQLLRALPGWSLAPVVDALVALRGIDTLAATVLLAELGDISRFGSPKQLMAYLGLVPSEHSTGLRRRQGAITLTGNGHARRMLVECAWSYRFPARQTMHLKRKAKDASAQAKAIAWRAQKRLCGRYRQLSQAGKNVKLVCVAIARELVGFIWDIVRHEMRRLMPQKSAVAG

SEQ ID NO: 422108 - protein, 429 aa, unidentified
MNFRPIAGIDVGKFFSEMAILSPSNELVARMKIKHDSYSDIERAFELLKKVEKDFDSRPFIVMESTGHYHKILFHSFYRFGYEVSIINPIQSDCIKNIGIRKVKNDKVDAKKIALLYRFQELKATNIPNEDIECLRSLCRQYYKLNDELTAYKNRLIGVVDQLMLNFKEVFSDICSKTAIAVLEECPTPSLMIKADRDKLISVIKKNSRKSHEWATKKYDLLILKAKEFEPLSIDNPANIAMLEIYISMIKTLQENLKKVLKTIEQLIANDLSKDMPVMWLTLELLQSIPGVGLITATTILAEIGDFSAFSKPKKLVAYFGIDPSVVQSGEFTGTRNKMSKRGSKYLRRVLFTIAIANVRTKRNGQPTNPVLLEFYNKKLQSKPKKVALGAVMHKLIFIIFAVLRDKKPFELRTPEEHAKRLKTKHIAA

SEQ ID NO: 422109 - protein, 457 aa, unidentified
MSRARKAPKTVKPVAEVDALTMLNPNAAGIDIGMDEMWVSVRADRDAEPVRRFGMNTPDLIAVAEWLKACGVETVAMESTGVYWIPLYEILEERGFKVYLVNARHAKNLPGRKKDETDAQWLRRLHTFGLLNNSFRPTGEMCAVRAYWRHRADLIEHRAAHVQHMQKALHQMNVRLSPTVKDITGVTGMAIIRSILAGERDPVQLARLRNPRCAQPEAEFVKALTGNYRDEHVFALKQAVALYDAYTQQILECDQELERKFSAIKPIHDDDLPPLDTTDKRNTHSKNAPTYDGRSLLYQLLGVDLVAVDGLNEVTTQIIISEIGTDMSRWPDEKHFCSWLGLAPHTDISGGKVLRSRTLKTRNRAGQAFRLAAQAVSKTNTAYGAFFRRMRAMHGPMKAIVATAHKIARAVYFMLRDRKPFHDTSAEDYNQREREREIARLKKKATKLGFTLAPTSA

SEQ ID NO: 422110 - protein, 391 aa, unidentified
MIFVGIDVAKDKHDCFILNSEGTVLADVFTIANNRIGFETLLSRIQSCSQGESKIKVGLEATGHYSYNLLGFLLDSGLTTYVINPLHTNLYRKSLSLRRTKTDRIDARTIAMMLMSDVDLKSYSNTAYHNEELKSLTRYRFDKVKERAKLKSSVARLVNILFPELEKLVSSLHIAVVYALLSNYPGASYIANANTEELAETLCTASKGRYTKSKTAEIQVAAGVSIGSKMPAKSMELKHTIVLIRELDKEISEVESAIDKITSQMDSPIFTIPGIGRHMGAMILAEVGDFSNFASADKLLAYAGLSPSTYQSGQLQNCYAHMEKRGSRYLRYALFNAAKYVCLWCPTFSAYLEKKRSEGKHYNVAISHAAKKLVRLIFAMQRSGKAFLDDY

SEQ ID NO: 422111 - protein, 372 aa, unidentified
MKKVRVLGLDVHADTIAVAIAEPGEGEVRSLGEIPNREESVRRLIKKLGPPEQLKACYEAGPTGYVLYWQLTGLGVHCDAVAPTLVPVKAGDRVKTDRRDTAKLARSYRSGDLTPVWVPDEAHEALRDLVRAREAAKQDQLRARHRLSKFLLRCGRRPAMGVKPWTAKYMEWLRQEVTFAQPAQEYTRADYLHEVEHANDRVRRLDVAIAEAVKLAPVQMQEVVQALQSLRGIAQISAVTIVSELGQMSRFPGARQLMAYSGAVASEDSSGKRVRRGAITKTGNAHLRRVVVEAAWAYRHRPAIGATLRKRQDGVSEEVKQIAWKAQHRLHKRYHRLAAAGKTPPKIITAIGRELLGFIWAIGVQVEKSNAA

SEQ ID NO: 422112 - protein, 341 aa, unidentified
MKSFIRIGIDLAKNFFQVHAIEREGAPAVARKLSRGKVLGFFAQAAPCRVGMEACGSSHYWAREIQALGHEVVLIPPAYTKPYVKRGKNDANDAAAICEAMSRPDMRFVPIKSADQQAVLMLHKTRELLVKQRTMTVNALRGHLSEFGLIAPKGIHRVKELLALALADETLPEEAKQASAMLASHSGGLDEKIDDLEKTIARASGKNQTSQLLDEIPAFGPLIASAIAALTPDPRVFRSGSDFSASLGITPSQHSSGGKDKLGAITKKGNRYLRKMLVVGCTSVLRAPHKHKGALAEWIVAMRARKPERVVAVALANKLARIAWAMMSTGESFRTELYTKA

SEQ ID NO: 422113 - protein, 348 aa, unidentified
MKKIVKQVVGIDMAQKELVVCLGKMYDDWSPELYAHKTFTNTVKGFVTLLLWLKKMTDETIPVRFVMEATGVYHESLAYFLDEKGYELSIILPNKISNYFRTLDVKTITDKTASEAIALFGLERKLDCWQKPKAVFKELRQLTRERDQIVEERTRVKNQLHAEQTEAEPNKKSIRRIKERIKMLNRQEKEIKEEIGALIKQDEQLTGHIKTICSLTGVGLLTAAIVLGETNGFELIRNKRQLASYAGFDIREKQSGTSVKGKPRISKKGNRYLRKAMHLPALCAIRYDERFKAIFARLVSKHGIKMKAVVAIQRKILEMMFTLYKTGNTYDKNYLNRKEIKNLATDVI

SEQ ID NO: 422114 - protein, 347 aa, unidentified
MDHIGMDVHKKESQICILAEGGELIERRVRTEPERFTAILGDRPRGRILLEASTESEWVARCLETLGHEVIVADPNFAPMYATRTRKIKTDRRDARALAEACLLGAYRRAHRLSDPQRHVRGRLLVRDALVRTRTCYISLIRALLRQHGYRVPSGSAEAFLRRVLALSLPGRLLSQIAPLLAVMRHVNRQLSYSDQVIEDVTAQDERVQRLRTVPSVGPVTAAAFVATIDDVRRFRRAHEVEAYLGLVPRELSSGESQRRGRITKAGHARMRWLLIQAAVSILRRRPPQAEALHAWALHIAARRGKHVAVVALARRLAGILYALLRDGSVFAPGRPRHPGAALALPA

SEQ ID NO: 422115 - protein, 350 aa, unidentified
MYYIGVDYHKRYSYMVVKDGDGKLERRGTVNNSREEFRRFLEPYQPGKAVLEATRNWGLIYDWLEDILDDVALAHPLKVRAIAEARIKTDKISADILCDLLRSNLLPEAYVPNKETREAKNILRQRMFFVRVQTMVKNRLYAILDRHPEVLSQAPEVSDLFGASGMQWLRQVVLPGQDNQLLPSELELLEVLKQKISESNGVVKELAKGDKRVKLLRSIPGLGPFFSVLVAKEIDDISRFSDEKKLCAYAGLVPSTYASGGKVFHGRITKLGNKWLRWALIEAVQPAIRSDPDLYAYYQRLRIRKGNNAAKVATARRLLTIVYRVLTQERLYQRRISTQRDLAPAALVTS

SEQ ID NO: 422116 - protein, 414 aa, unidentified
MSVQAEVGAVPPVVVAVDVGKRMVALSVTDAGRHRLLGPVDFEMTARGLSGVLALIRSRLDGVDAPVRVGIEAAGHYHRPLLVPAVWPAGWQVLELNPAHVAEQRRVQGRRRIKTDALDLEAITELVLAGRGIPVTAREVVIGELGAWAAHRTRRIEARTATKNQLLGQLDRAFPGLTLVLPNVLGTKVGRLIAAEFADPKRLAALGAGRFVRFAAARGLQVRRPLAERLVQAARDALSTADGGVARQVLAADHALLRELTAQIDAAEAEFARLLPLSPFATLTTTPGWGVVRAGNYGGALGDPRRWPGAAQIYRASGLSPAQYESAGKRRDGSISREGSVALRRALVDLGMGLRFSDTSSRAYAAALKARGKHGGIIGCAMANRACRIAYAMVRDQTTYNPDRWACEVAGFPG

SEQ ID NO: 422117 - protein, 422 aa, unidentified
MLQNTEEREEIVERVAALDIGKAELVCCTRVPRPDRAGQRMQEVTTYSTMTRSLQVMVDRLRELGVTRVVMEATSDYWKPPFYLLEAAGFETWLVNAKDVKHLPGRPKTDRLDAVWLCKVAERQMLRPSFVPPKPIRRLRDLTRYRFSLVANASAEKNRVEKLLEDAQIKLSVIATDIFGVSGRAMMAALIAGQRDPKVLAQMARARMRVKIPQLEEAFVGHFDDHHAFLLGQMLAHVDALQADISRIEERIDAEIAPFAQMVARLDEIPGVGLTAARVIIAEVGVDMTRFPTASHLCSWARFAPGVKESAGRKKGNGATGHGDRYLASALGEAAVSAGKTNTFLGERYRRIARRRGKKKAIVAVGRSILVIIWHLLNDPETRFIDLGSDYYDTRLGTQRATLNHVRRLQALGYRVTLEPAA

SEQ ID NO: 422118 - protein, 341 aa, unidentified
MEYIGLDTHRHYTVAARVDESGAVIEQRRLKNEELPCYLAGLCGPTRVALEATANWYHIYELAEPLVAEVALGHPLKTRIIAEAKIKTDKVDATILAQLLRADMLPRAYIAPAAVRELRELLRLRASLVRQRTMVRNKVHAILIKRGLKPPVSSLFGKRGRVWLEEEAARLPQAYGDAVACYLRVLDALQEEIRGVSAGVEERAQLSEEACWLDTMPGIGPYTALLILAEVGDIKRFPDAAHLASYAGLVPSVHSSGGRTRYGSLTKQGSPWLRWAMVEAAHSAMRVRGPLRERYERMRRRKPHGTAIVDLARFMLGCIYAMLTERRSFKSVPRGSREDMV

SEQ ID NO: 422119 - protein, 429 aa, unidentified
MSLHENRADNRRKRGFSQNENEIQKILVRIYACIGITDSNNRTEYKQARFSSFSKGLHELCTWLAKYNCSDVCMESTGKYWIPVFNILEQHKIWVTLSHPKYTKPMKGNKTDRKDAKWICDLYMCGMVKPSFIPPADIRELRDLVRYRFKLTCMITGEKNRAQNCLTVSNLKLDDVFSDVFGKSSRSITEQILQHPGEKFDVSPFVDARCKTPMEEIQAAVDGNISKEQAVKLRQCLDHIDELQKHISEVEQEILRLSDKYEAALNLIRTVPGFDKNPLTAIQVLSEIGGDMSVFPTAKHLVSWAGCCPRNDKSDRKIKSTRISRAGSYFKPVLVQIANALIKSRKHFEFTTRYKRIKARRGHKKAIIALCRMILTAIWHILSDLKPYTPDGFLESRPVKEEKVLSTSQALNLLKQRGYIIKDEPLSVS

SEQ ID NO: 422120 - protein, 403 aa, unidentified
MERTAGIDLASEEHRLVVVDADGRRLEERRYAHSEQGIAALLRQLVELAVDRVALERPNGLVVDRLLEAGIAVVAVHPNQLAAARDRYRSGGGKSDGFDAYVLAELARTDMHRLSVLEPDADETRALRALTRAREDLVEQRVALANQLRAQLDAFWPGAGKIFAEVDSPIALAFLERYPSPSDARGLGEKRLAGFLARHGYCGRKSATELLGRLRSAPEGRAGELEAEARRAIVLALVAALKPLVEQIKLLTSEIRGLLAEHPDGAIFRSLFRDPNSVVTAAELLAEIGDRRERHPARDSLEAIAGQSPVAVESGKKKVATFRWACNKTLRSAVSVLADASRKHNPWARKIYADAIARGCDHPHALRILGRAWLRVIWRMWQDGTPYDPARHGNLNRLLSTAG

SEQ ID NO: 422121 - protein, 392 aa, unidentified
MEPVVGIDVSKGSSVLQAFLARNEPYGKLESISHGKNDFERLGERLAELQAKTGIAPVIVLEATGHYHRGLVRYLERSGWEYIIINPLQSKRAKSTQLRKVKTDAADAWHLAEMYYRGDVKPHRSWEETYTELQYATRQHEFVTGLFVQAKLNTRALLEQVFPAYTGVFYNLFSTTALRVLQRCLEGHVEDLVDIIQEGTGRSHSKVWVQKKVEQLEEILFFWQEEPKSTSQTRALISMISLLLEFLEQLTELEEQIEEMAAALPEVEFVKSIPGIGDKLAAAIVAEIGDARQFKDAKQLVAYAGLDPSIYSSGKFVARNARITKRGSKRLRRALYLAVQCGLRRSTNKRIKDYYDKKRREGKPYKVAVIACANKLLHHIYAILSHSEPYRA

SEQ ID NO: 422122 - protein, 460 aa, unidentified
MNEYFIGIDASKGYSDFVMINAKKQTVIENFQLDDTFQGHTRLYELLHGFNQDYPEATIYAAVESTGGYENNWFQSLLKFQASLPIKTAHLNPLGVSHNSKADLKRNNTDKISAKNVAEYMIAHPEKVSYQHQDSLASLRKQWGFVTMLTKQSTQLLNQLESLVYNANPEILIYCKGDTPQWILKLLTSYPTALRLSRAKVKLLARIPYISLDRAKQLIATAKKSVASASDKVTEQLIVATVKQIVHLKKTIKVQSEVLANECQIPEVALLKTFTGIGDYSAIGLMLQIQSVNRFLTSKKLSSFFGIHPEYKKSGDGTYRYRMSKKGRKEGRRILFIVAMSAVQSNPLIRDVYQQAVERGMEKMSAMGLCMHKILRILYGMLKHNKAFDPQIDLKNRQKKPPQKRKISQDKNRRYQNFDSKAPISRRQKMRRKERKQSQNVNNVEYGISEASVPSTQLAN

SEQ ID NO: 422123 - protein, 408 aa, unidentified
MQKATTTKPRKRYTQFCGIDVAKRKHVACIIDSDGRFVTRSQSFHNSAEGFQQILVRLKDAGGPQKVSIAMEATGHYWYSLHDFLVRQGYSVAVLNPIQTAQQAKKGIRKSKTDKIDARHIATVLKNGEQRAALVPGEFAMSCRQLTRLRYTQVQQGAKLKQLLWARLHPVWPEYEGLFAAPFGKTGRTLLRTAPTPAEVLALAPEQLAELVGKASRGKFGPAKVEQIRQAATRSVGMRRGGEGAAICIRSILTQIEALAPIREQLETDIKALADRIPAYVLTLPGADPFKAVSLFGETDPIETFRTPEQLVAFAGLDPTVFQTGQYDAPRRSISKRGSSFLRRTLWGMAMRSLQQEGELHDYWLRKRREGTHHLTAVTAIAAKICRRAWRILTDERDYLPQPPCTQS

SEQ ID NO: 422124 - protein, 373 aa, unidentified
MKLVLGMDVHVRNSFLHASDQNGRRLAHGRCANTPAALAAFCDHVLAVVEGELHPVRVVLESTTNSRAMQRLIRQAWQPRAQTVQVDVLDARKLRIIAESVSKCDAVDARVLNELARANLALPTCYMPDDDEFTLRELLRGRSDLVRLRTNVKNRIHAVLHRRVIAAPPGGLFTQDGLRFLAQLELDEAGRRLIDSYLAVLDELEKRITAATRFLREVMRRERWARPAALLQTMPGIGLMVALTLLAELGDWRRFKGRAAVANYAGLVPVIRDSNSKHYAGGITHRGPSHLRAVLVQAAWVAIKRVPAYTELFERVARRRGRQVAIIAVARRMLEDAFTMLRKDEAFRFVPAVAQRRVGTTACDPPVASSVAG

SEQ ID NO: 422125 - protein, 403 aa, unidentified
MPLFAGCDWGGEEHAVCVVDETGAVRLKSTVTHDAEGLGKLVQMLAKLGPAAELPIAIERPTGLLVDTLVEAGHPVVPLHPNVVKACRPRYSAAGGKSDPGDSYLIADVLRTDGHRFARLHPQSDAMKALRALVRTRDDLVAERVAMANQLRALLQSCWPGATEIFAEIDSPITLAFVQRYPTADSAARLGEKRLASFLAQHSYSGRRPTAELLARLRDAAKPCIGELEAEAKGELVRALAQVIEQLVAQLKRLTARIEHDVAQLPEGRIVMSLPRSGRINAAQILAELGDQRARFVSDEHLAAEAGVVPVTYSSGKQRSVVFRWACNHRLRLAITTFADHSRHASPWAADVYRRAMSRGCDHPHATRILARAWVRVLYRIWQTNETYDAAKHGAASRILATA

SEQ ID NO: 422126 - protein, 338 aa, unidentified
MNIKTLGIDLAKNIFQIHGVDYKGKRLINKAIKRNKLPEFINQLPPCLIAMEACGGSNYWGQKFKEMGHDVKLISPQFVKPYVKSNKNDMVDAEAICEAVTRPNMRFVAIKNKEQQDIQCIHKVRARLVKEKTALVNQIRGLLHEYGVVIPQGISYVKSELPLILEDSNNGLTLRGRELFNDLYIQLKNIVLKVEEYDKKVEKICASNPICKLVCKLPGIGPLTATAIVALIGNINVFKNGRELSAYLGLVPRQHSSGGKTRLLGISKRGDRYVRCLLIHGARAVLFRAKNLPASKANWLKELILRRGFNRTVVALANKNARTIWAIMTKGEEFVWNM

SEQ ID NO: 422127 - protein, 387 aa, unidentified
MPQPNDLSRSLVALDQNSTIIAVIELSQSSWLVAGMLPGIERQPRKKLEPSPERLLGLLHRWRDEAVRAGRTITRIALAFEAGRDGFWLARWLAARGIEAYVIHASSVAVSREHRRAKTDRLDTELLKRGFLGWLRGERGHCSMARVPTIAEEDAKRPNRERDCLVGERTRIVNRIKSTLTRLGIRNFKPTLRKAAERLATVHTPEGMPLPPNTLAELQRDMARLGFVVSQIRQIEDARQQRLEQQPETGPHAMVRLLARIVGVGVETADMLVHEVLSRPMRDRRAVARYAGLTGSPDESGAQRREQGLARAGNARVRRGMIQLAWRFLMFQKESALALWYRARTADSRIGTRKTMIVALARKLIIALWRFVTTGELLEGVVLRPAS

SEQ ID NO: 422128 - protein, 346 aa, unidentified
MLYAGLDLSRQRLDVHVLDEGGQTIEVTAVRPDVDALRTLAVHVLRQGQEVSAAIESMTGARFVHDTLEFAGWDVAIADAAKVKGIAPLAAKTDKIDAWVLAELARRDLVPEIWLPTPEVRAERERARFRLHLVHHRTALKNRIHATLMTFGHPVAVADLFGVAGRELLAGLALPEPWTTTLSTSLRMVDRLGAEIDACERDLRRLGADHPSIPLLLTVPGVGWVLAYTIASEIGDIGRFPSPKKLTGYTGLCPLVRQSGNRDVRGPLAKNGPKYLRWALIEAATHAARDAHYRERYERTKQRLGRQRGAKVARIDIARKLAEAIWHVLTRNEPFAPAGPTMLLVA

SEQ ID NO: 422129 - protein, 329 aa, unidentified
MQTILHNCCGMDIHKDTVVACVLKTCETVDAKTSEENTVQELRVFKTFPDDLAQLRSWLESENCCHVAMESTGVYWTPVYDALEDACGGKMKLIVTNARHMRNVPGKKTDIKDAEWIASLLRAGLLDGSFIPPLEVRELRQLTRYRKNVVQDINTQKNRIEKSLQQAGFKLSTFLSDVFGVSGRNLIRVLIKKGKLTPTDVEYATTRISQEKKAEIKLAINGKLTKHQRKFLELQISHLDQQIAHLDVIEQSITELSEPFADEVSRLDTIPGIAETSATAIVAEIGTDMSKFPTAEHFCSWAGVTPGDNSSAGKKKVQESLLATPTSKA

SEQ ID NO: 422130 - protein, 411 aa, unidentified
MIKENYIYVGIDLHKETHTAVMIDCYNQKLGEITFPNRPADFPKLVAKVKKCNTDGKTIVFGLENAYGYGRALAVWLIDKGYLVKDVNTAISHRQAKHRGAMYRKSDSDDAKAIALATLNMLDKLPDACPNDAYWSLGQLVHRRDNIMKQRTRLVNQLHEQLCIAYPSYKQFFNDISRPTALYFWEHYPSRKYLKGKSVEDLRAELVPVSHNKCSTKTCEKILDAVASDKVKNNAYQDARDMVTLSIVSDLQHYDSQLAEVDKMLEQMYKMLGCTLTTIPGVNVITAVKILAEIGDIKRFSNANKLAQFAGIAPLHLSSSGKGKDVATKQGNRRLQATIYFLAIQMVQVSSKDTPRNSVVRAYYEKRKAEGKTSQQALICISRRLISIIYGMLKYGTEYRMPVVENAGENR

SEQ ID NO: 422131 - protein, 331 aa, unidentified
MNTHVGIDIGARTSAMGWRQNGKTSGQWEIQHTPKGRKTAAAKMLGLKPLSVVMEATGIYYLDLALELHAAGLPVSVINPKSFHNFAKLMLQNSKTDQIDSQLLAEYGERMAPRLWVPPTADQMTLRAIGRHINRLIGHRTRAKNELHALQATETNVELLIEDEKEAIAGLDARIDRLKKAARDAIAKCPDLSLQFRCMMAAPGVGEASAIAALAELTTLPVTLKSAQVSRYAGLDVRLTQSGTSVNRPGRMSKCGNAYLRAAMFMPAMTAIRCDENVKAFYEALVARGKKKMQAIGAVMRKYLTGLWACMRSGEEFNTAKLFSEKHLAKA

SEQ ID NO: 422132 - protein, 408 aa, unidentified
MNAVGIDVSKGKSMVAALRPMGEVALLPQEFLHTGVGLEQMAYAILALGEDTRVVMEATGRYHEPVAAALYEYGIYVCVLNPLFIKQSGGGSIRKVKTDKADAMKIAKYGLDNWVDLREYTPMDTVRQQLKLCSRQYNLYMKTVVSLQNNLISLTDKTFPGVNELFSSPERADGHQKWVDFVMTFWHCDCVCRVSEKAFTERYQKWCKRKGYHFSAEKALDVYAGSCGHFTTLPKNDNTKLLITTAAQQLLAGKMTLAALRAEMTRLAKQLPEYDTVRAMYGVGETTAAQLMAEIGDVRRFPRRSSIVGFAGVDPAVDQSGKHEAKSTPTTKRGSPHLRKTLYQIVCTYLKRSPVDEPVYQFLDKKRSEGKPYFVYMTAAQNKFLRIYYARVKECLEAFDARQSLAQS

SEQ ID NO: 422133 - protein, 325 aa, unidentified
MEKLYGGLDIHKEKLAGCIMDRDGNITREHTFPSSKKAIERFLCDIPSSGITIAIEACGMWRGTYKILTDMGYEVKLANPKKTHDIACKKKTDRVDAKILADLLRTKYLPEVWIPDEQTLKFRDLARHKSSLTRLKTQVQCKIKSYLLRKGVKYGKLWNEKTLSTLAEEDQDIQNLINVYNSLKEEEKEVMKRIKQIARNRKETTLLMSMPGIAEFSSLMILAEIGDIQRFRSPKELVSYAGLCRGIYQSASTERSVRNTAVNKWLKWIIYECSGRAIMLDQRFQQYFYPIQKRKGANTARRATARKMLTIIWYMLTNKETYRAS

SEQ ID NO: 422134 - protein, 389 aa, unidentified
MLCVGIDVAKRKHDCCIIDSDALKTVESFTFPNSREGFDMLLSKISELGIPKDKIRVGLEATGHYSSNLAHFISEHDLPLLTFNPLLTNRYKQGFSLRKTKTDKVDACAIAQMIVSGKGSQTYSSSLYHNEEMKSLSRYRSQTMQKCSKLKISVSRLVTILFPELEGLTSSIHLASIYALLKAYPGHEQIAHCSMKRLTHLLSDASQGRFDKSKALEIHQAACRSIGKVSLSASMELVHAITDIEVLKQHIAEIDEKLKEMVDQEESSIIDIPGIGYTLCASILGEVGDFKRFPDVDKLLAYAGMSPSKHDSGNYHSKHNKMEKRGSPYLRKTLYLAARLVAQNVPKFKEYLEKKLSEHKPYKVALSHVAKKLIRLIYRLGISGCPYLA

SEQ ID NO: 422135 - protein, 344 aa, unidentified
MVTIGIDPHKASLTAVAVDPSGRPLGRRRLLVHAGTLGQLTAWATGWPTRRFAVEGAYGLERPIAQQLAAAGEQVLDVPATLAARARLLSVGGGRKTDAADAASVAQAALHCARLRTVAAEDHCMILRLLAERRGDLTGERTRILNRLHGLLRDLIPGGAPTNLSAAKAAALLRGVRPATATAACRRELARDLLADLRRVDARLKVNIVQVRDALAATGSTLTEVHGLGVVVAAKLLGHVGDIGRFPSQDHFASYTATAPLDVSSGNQQRHRLNTGGNRQLNAALHTIAVCQARDPGPGRRYYLRKLSEGKTPAEARRALKRRLANVIYRRILADQQRHQPAGG

SEQ ID NO: 422136 - protein, 336 aa, unidentified
MSYIGVDLHTTQITVCYLKTAEDYRFKQYRLDEMEDFLASLADTDELAVEATGNTRWLVNLVSAKVGRVVIVNPREFEVIKRSVKKTDKHDALNLARFLAVDLLPQVRAKSETAEAVGRLNETRNKLVGLKTALLNKIHALAVSKGWKLKKESLGGKKGLDKVLEFEWSAVERLELEIISEQIAALKASIRRLETAISQAGAKLAGFENLVTVTGIGERSASVLLAVIGQIKDFPDENKLASYFGIVPKVANSNETVHHGRITKRGSKTGRTTLVQCTLVAIRYSPYLKKYYEQVKARRGHGKAKIATARKYLGIIYNTLKHNWVFADFNNFVLAE

SEQ ID NO: 422137 - protein, 409 aa, unidentified
MRIIGMDIHRVFAEAVVLEDGEIKRLGRIGMTRDHLEDFARTLLPTDHVVVEATGNATAVTEILAPHVARVAVANPLQVHLIAKAKIKTDAIDARVLAQLYGAGFLPEVWIPDAATLARRRQVTRRRQLVRQRVRLKSIVQSVLHANLIPPCPFADLFGGKGRAWLRAQYLPDDEREAVERHVEEYDRLSEALKGVERDIARAALADTNVTRLMTIPGVDMVVAVGLMAAIGRIDRFDRPDKLVAYIGLNPSVHQSGIGPAHHGRITKRGRSDARHLLVEAAWQTVRGPGPLHAFYERVRAKRGNHIAAVAVARKLVVIIWHLLTKAEDYSWVRPSLHAKKIRDLELRAGYPPRRGQKGASYDYNIPQRRRDERNRAQQAEGAYRRMTTGWRRSGPRSEPTGATNEERQ

SEQ ID NO: 422138 - protein, 342 aa, unidentified
MLGEKGEVLEEGSVGNNRAALSELGGRYPEALVVMEAGCHSPWVSRHLEQAGCEVVVSNPRKTRAIYQHERKSDRRDALMLARIARMEPALLYPVRHGSEEAQQELLRIKLRDSVVRARVALINSLRFTLKSLGYSIANPSTERFHKVIQSALPQSVAQVIAPSVQALEELTLRIKLLEREISDQARSKYPDTAWLEQIPGVGPITALYFVLKIEDPARFKRARDVGAFLGLCPRRDQSGENDPQLRISKRGDAYLRRLLVSSAQYILGPFAPPSALRQYGLALASGATARAKKRAVVAVARKLAVLLLTLWKNKSSYQAFPQRSSREKMRTNDLERLRCIA

SEQ ID NO: 422139 - protein, 417 aa, unidentified
MKCFVGLDVSSTKLDVCIMLSDTTTPFTASLPNDLVGAQEIKKQILELNDTYSFERIVIGMEATSLYSFHPAMFFHEDSDLKALSVEVRVEQPNKIKKYREAFEESKNDTIDAFYIADYFRAERFSPAFLKEEKYLALQHLTRTRLQLIEQLTRTKQHFIENIYYKCNTLSTEIKNESLTTSLWSSTIISLMTEDYTLDELATVPLNDLADFIQKLGRGRFKAPEKLAKAIQSAVRGSYRLPKLQQDSVNVILGLLAREIRNLEKLIKDIDKAIEDMVEVIPEYQCLTSVPGVGKVYAAGIIAEIGQIDRFKDHPQVAKYAGLNWKQNQSGNTNSQNTELVKRGNRYLRYYLVEAANSVRRHDSEYQTFYKKKYHEVPKHQHKRAIVLTARKFVRLVDALLRNRQLYAPPRRLMEDR

SEQ ID NO: 422140 - protein, 319 aa, unidentified
MAQNGLVVAGIDVAKGKVDACIRALSQRRTFESTAEGRRQLISWLRKHKATKVVMEASGGYEREWAKALRNARIEVRIVDPKRVRHFAQSAGRLAKNDAIDADTIAWFAETFGEAPGQAYDAEREKLLQIVNARRGLLETETMLANQGEHSVPDVVRKMQARLLKKIALEVAKLDAAIAAMIKATPHFAKLAEIIESVPGLGEGASAGLIAGMPELGQVSNKVAAALLGVAPYDDDSGKRRGERQIKGGRRRIRNLFYMPCMGAATRHNPVLKAFYDRLIAKGKLKKVAIVACMRKLIVILNIMISRGEKWDAKRYAVG

SEQ ID NO: 422141 - protein, 394 aa, unidentified
MKLVGIDVGKNSHHFCVMDKETGEFNVTPTSFSNNKEGFDFLINSLKPYSKKSILIGMEDTGHYHVALLKFLLSNGYPVALINPKTTDLTRKMEGGITKNDKLDTITICDVLDTPERKKQYRITKVDRFDLYEQRQLTRHHHNLKEELNVYCNRLQKSIDLVFPEFNTLFSSKYSIVYMNLLKTFGSAEAIASTDIRTIRKCFEIKGRGNRISLTPEKLKECAKNSIGISSEVETIQIKHLVSQITLIKEQIAEIDKKIEEFSITNNSPILSIPGISHFSGTSILAELGDIGNYSKPSQIIKFAGVAPYHYESSQYNAQHTGITKKGSKYLRKTLYQIILTVINNNPVFKKYYLLKISQGKGHRCAQGHCIRKLLRIIYHLLETGQSFDPALLR

SEQ ID NO: 422142 - protein, 323 aa, unidentified
MLIHYIDIAKRNFVIAVSSLSKTKTETNNPKGIAHTIEYLKKHKVALVVTESTGGLEIPAAKAIRRAGIAVIIANPRQTHQFAQSQPLTKTDAKDAKMPAFFAQMTAQKEDSQTMPYQPPTEAEEVLEALVNRRNQSADMRTAEKNRLHQVHETQVGSVKQLIAHFDRLIDELDKQIDNHTHTHFDGKAQVAEQIKGIGSITTATLMAMLPELGRLSHKRIASLAGIAPHPRESGETKFKSRCFGGRSAVRKALYMATVAATRFKPLIRDFYQRLPSEGKPYKVAVTACMRKLLTISNARMRDYFAENDTAENDTAENGIRTA

SEQ ID NO: 422143 - protein, 328 aa, unidentified
MIMLGIDVSKTKIDCCIFPQGLTGKRKNKIFTNTESGFGSLLKWLITLKIEPDQVTAIMEATSVYHENLGYYLYDAGVKVCVANPSRVRAFAKGMSMLNKTDKADSEALSRYGYTAKLIIWQPEPENVRLLKALLGRRDVYLGSLLQEKNRLEKAQSTHTSVVVIKLLEENIEYLNQQLEHIDKLINNHIDQDPTLKQDLKLLQTIPSIGERSGLLLLGLFHSHKFEKASQAAAYVGLVPVHQLSGSSVNKQSHLSKASDSKIRSVLYMSALTAIKYNPHIEALYQRLLSQGKNKMCALGAAMRKLIHLCYGVLKHQTAYQRDYLLAE

SEQ ID NO: 422144 - protein, 414 aa, unidentified
MALARWVGRAIGLDVHREFCEVAICEDGEVRSGGRVPATPDGITALAESLVASDRVALEVTGSCWEVARILEPHVNRVVVVSPDDTGITSARAKTDKLDARTLASLLWKGELEAVWMPDERCRILRRRLARREQLMRARTRSKNEIHATLQRRLQPKPPCSDLFGVKGRQWLTELELPPEERESVHAAMRHIEFLDAEIKAVEKLIAKQALSWPEIRRLMTVPGVNLICAASFIAAVGDANRFLSSRKLVAYLGLDPRVKQSGDTPVRSGRISKRGSPMARWALVEAAWSAVLQPGPLHGFYERAKQRRGHGKAIVATARKLAVLFWCMLTRSEDYAHQQPSLTRKKLRRLEITAGARKNTRKAAGIWSTNDLMRTAELELAQQAEASYKRMVQDQQAGSPARKAGASVTLEHA

SEQ ID NO: 422145 - protein, 432 aa, unidentified
MNPFSVSSPPSNVAAWVGLDWADQQHVVCLYEVGTGQTELSCLEQKPEALQSWLGQLRQRFEGRPVAVVLEQARGAVIYALLSVDFLVLYPVNPQSLASYRKAYATSGAKSDSADAVLLMEMVRHSPQRFRPWKPDDADTRSLQLLTENRRQLVNQRTAFTNQLTGLLKSYYPQALELAGELDSLQACDFLQKWPTLEALQQARPAQIRKLYLDYGKPRPESLQQRLEQIRQARPLTTDPAAVLSGTMMVRALIEQIRPLLATLERFDQQIAALFRKHPDRLLFESFPGAGAVLAPRLVAAFGTDRDRFESAQDMQQLSGIAPVTEQSGKQRWVHWRWACSKFLRQSFHEFADHSRKWCGWAKALHQRLRRSGKGHHAAVRMLAFKWIRILFHCWKTRTCYDEQIYLKSLEKRNRTLWAETQALPPRKKKVA

SEQ ID NO: 422146 - protein, 424 aa, unidentified
MKNTAAMKRRQVPEGYLIIGVDPHKKRHAAVAITQDFATQAKFKFDNTREGLEAMLERARVEMVKSGCRGVMFAIETGGHYWRNIAYYLDERGIPFRFINQYTLKRRREGKDLNRRKNDYRDSEVAAQLLCTGEFTESKLPQGVYAELRTSHSAYQRLVKERTRITNLVKGLLDALFPEFTRVFKDPGGLTALSVLSTCPIPRAIAGMTEDEFVATIEARHKGRRLMRKKLKALHYSAKTSIGIGAGARSLSSEIAFLVDKFELIRRQICIMEGTLVRLVDETEEGKYLLSIRGLNYIAVAGLLAELGCFKLYRSAKQMIKMAGSNPTESESAGKKRSKTPMSKQGRPLLRYCAWTSVIPMLRFNSDFRAWAKQRRERPAHANPLSGREVVGAALNRLLRLAFALVKNQTYYQYVKPALIPVAV

SEQ ID NO: 422147 - protein, 395 aa, unidentified
MSKIVHYIGLDVHKETIAVSIAPQNSSEVRRYGIIGGTLDAVDKLVNKLAQDNIELHLVYEAGPCGFVLCRHLRNKGFVCEVVAPLLIPKRASDRVKTDRCDADQLARLYRAGELTAIHVPDQEDEAIRDLVRARTSGMTDQRQARNRLKGFLLRLGFRYTGKSSWNDAHKRYLSGLVMPQGPQQIAFQEYIHAINDATDRLERLAKAVEDALPGWKWEPVVHALMSLRGVQVLTAMTLVAEVGDFSRFDDPRSLMHFFGLTPSEHSSSDKRVQGGITRCGNAHCRRVLTEAAWHYRLKPKVSEAIQKRQEGQSKEVQIIAWNAQERLHKRFKQLSAKKKSVVAATAVARELAGFVWAIACQVKPAEQPAAPEIIRTCRGKVYRLDPEKKFQKNK

SEQ ID NO: 422148 - protein, 360 aa, unidentified
MRESTTLIAFDQHAASVVAAVLPPGMKTPATQPVPSDLPAIGRFVARLKQRGPIRCCYEAGPCGFALQRYLAAQQIPCDVIAPSLIPRRPGSRVKTDRRDAAQLAVLYRADALTVVHVPSELEEAARDLLRCREDIRADLLRARHRLSKFLLRHGRRWPGRAWSKQHQAWTRAQRWDTPALEQTYLAYQRAIADATTQLRTVDQDLRTLLTLEPLQTRIQRLRCFRGIDDLTALTIAAELGDARRFARAQQVMGYTGLVPSEHSSGSSRHQGRITKTGNAHLRRVLVEAAWHYRHRPALGHRLKSRHQGAPAPAVACAWAAQQRLHRRYCRLLARGKRPQAAATAVARELAGFVWAALTQ

SEQ ID NO: 422149 - protein, 340 aa, unidentified
MNEAALYGGLDLHGDNVLISLLDETRRIVFERRFPNNLATILESLEPYRKRIRALAVESTFNWYWLVDGLQAARYPAKLANPARMQENIGLKHANDKTDARFIARQLVNGILPEGYIYPEETRGVRDMLRRRTRLVHARTGELISVSSLIARHTGQEVSCKDLELAELKEILAGQPHALIMGEANFRHIEFLDKEIAFLEEAVMKELPDRKDYLRLMTAPGIGPVLARAILLETGPIERFKDAGNYASYCRTVKAEHTSNDKKKGACNSKNGNKYLAWAYVEAANHATRYSPEIRAWFQRKLAKSGKRVIAIKALANKMSKACFFMLRDGKDFDVKRLVG

SEQ ID NO: 422150 - protein, 371 aa, unidentified
MDSIVYVGMDVHKESYTLCCYCYDTDKVEYKQTIPSDYKLILKYMESMRKVYGEDATFICGYEAGCLGYSLYHQLTDHAVDCKILAPTTMAITNTNRVKTDKRDAANIARCLAFHTYSEVYVPDDEDNSVKEYIRMRDDQKLMLKKIKQQILAFVLRQGKKFEGGKTYWTIAHMKWLKNLDLTGLDKETLSEYLVTYEYLTEKIERLDNRIEELASGEKYKEKVRNMGCFLGIKTHTALSMVVEIGDFNRFEKAPKFAGFLGLVPSENSSGDDRNRYSITKAGNSHLRRLMVEAAQSYTRGNVGHKSIALKQRQQGCSAEVIAYADKANERLRRRFYKMTLNKGINRNIATTAIARELACFMWGMATGNMS

SEQ ID NO: 422151 - protein, 414 aa, unidentified
MNESPNPQFFAGFDWASRHHQVVIVDAHGQIVAHFQFENTAAGWDLWRQKTAEFAPLAVCVETNQGALVERLVQTAGCAVYPIHPKAGKAYCARKAPSGVKTDFRDAWAFADALRVDGHAWKRLQPADPLLTELRLLCRDELALIGERTALVNQLRKALEEYYSVALEAFEDWTVPAAWRFVQRFPTPAALAKAGKRQWEKFLHTHRLFRPETAPQRLALFATALAFTAGDSITQARSRLALTRVRQLLLLQQELDDYREKIEALFARHPDHDLFGSLPGAGSKLAPRLLAEIGQDRTVFENAQALQCYAGTAPITFQSGQVHKTRIRWGCNTTLRSTVHLWVDLSRQRCSWAQIYYKAARDRGKTHACALRCLGQRWLKILWKMWQSRACYDAELHAKNQLAHGSWLLQIKPA

SEQ ID NO: 422152 - protein, 392 aa, unidentified
MYIVGIDIGKNHHEASIVSPEGKQIGRSLRFATTHKGADSLMSFIFKNIGNSPCVFGMEATGHYWYPIYSFLKAKGYTICVINPIQSDSLRKMYIRQTKNDSIDSFLIAEVIRFGQFGTTSMADENILAMRQLCRYRDSVISSRTEIKLRIGTIMEQIFPEYEKQFSSLWVSTSMGILEKYLTPENIENAPIDELFEIIKDKSHNRLTKAKAISIKEAAADTFGIKIAQDAFSFQLKQLIDRMNFLDKQIEALDCQILEYYEKFDCYLHTIPGIGMIAAATILAEIGDINRFKSSSALVAFAGIDPTVRQSGEFNSTHNHMSKRGSPYLRHAIFLAATTCSFHNSPLNAYYKKKRDQGKHHLTATGAVARKLTTVIYAVLRDSKPYEPKKFC

SEQ ID NO: 422153 - protein, 385 aa, unidentified
MRFYTNQHQFYCGIDLHARSMYVCILSQDGGILLHRNMKAAPEHVLQAVAPYREGLVVAVECIFTWYWLADLCVQEGIPFVLGHALYMRAIHGGKANNDKLDSHKIATLLRGGRLPQAYVYPAEMRATRDLLRRRMHLMRKRSELFSHVQHTNSQYNLPEIGTNLAYKANRGGVAERFADAAVQKNIEVDLALITYDDERLRDLELSIIQTAKKHDANPLYLLQTVPGIGTILSLGLLYEIHDIARFPRVQDFVSYGRLVKCAKESAGTRLGTSGKNIGNAHLKWAFSEAAALFLRNNPQGQKYLVRLEKKHDKEKRSPSWRISWRGPSMTCSSAKRPLIWTCSYVPKRAERVSLRSHWTPRGMSLNRACAQSCLTASWNAKVCT

SEQ ID NO: 422154 - protein, 359 aa, unidentified
MKSQDGKYVGIDCGKKSLEVVRINTENLLERRQFSTTENGINSLLKWLTLNDIVGLEAGSQSFRIAKSILNKGIQVIVLNPGDLATIYQSLKKTDKEDSLKIARLIQRYPKEELPVVPIPTDEEEDNRRLCTEHENWTKQLTQGKNRLHSLFTQAGLTHITKKHLRTKTSREASVTLLPDRYKKEAERILKVLDLVELNLKLIEEEIKEALKKNQSYVQTIMSMPGIGIITSLAIMSYMGDCKRFSIFIRKTSSYYAGLVPRVDISGDTVRYGRIVSRGCHAIRRVIVQAAWSLVRCQHGGKIKEFYERLYVKKGTKKSIIATSRKMIEVLYTMIRTGNLFDSMPEEALNRKLAQYGLM

SEQ ID NO: 422155 - protein, 415 aa, unidentified
MHPFEQLTHFAGFDWAKDHHDAVILDRQGATVDSMTFAHTAEGWVQWRERIKAYPALGVAIETNQGAAVEQLLQSPVTVYPMQPKAAERYRDRHVPSGSKTDQRDAWCFADALRVDGQHWRALAAEDPLTEELRLLCRDEVELITQRTALVNQLQQALYEYYPAALEAFDDWTAPYAWEFVLAYPTAGQLVSAGKRRWEKFLHTHKLWRPDTAPKRLEIFGRADRFCGSEAVTRAKSRLAVSTAQVLRALQKQLEDYRSAIEQLFTKHPDHDLFGSLPGAGSKLAPRLLGEIGSDREQYPEARGLQCVAGTAPVSFESGKIRRAKIRWHCNRHLRHAVHLWADCSRKFCAWAGTYYQAQRGKGKSHACALRCLGQRWLKILWKLWQSRQPYDETVHALNQQRHGSWVLQLKPKTT

SEQ ID NO: 422156 - protein, 456 aa, unidentified
MKQRRRKSAPQSKSDHSSFPLINKDAAGIDIGSEEHWVAVPEDRDGEAVRSFGCYTADLHAMARWLKACGVTTVAMESTGVYWIPCYQILEEHGFEVKLVNARHVKNVPGRKTDVLDCRWLQRLHTYGLLSGSFRPDDQICVLRSYWRHRANLVRYASDHIQHMQKALTQMNLHLHKVLSNLTGVTGMNIIRAILAGERDGRKLALMRERGVKNSPEVIAKALEGDYRQEHLFALKQAVELYDFYHRQIEACDREIERYLHTFETKGDVVENPLPKQKRPKQMRYQSFVDLRTELYRVSGVDFTQMPGLDVVSVQTILSEIGLDPGRFPTEKRFVSWLGLCPNNRITGGKVKSTKTRKTMNRAANAFRMAAQALANSNTGLGGFYRRIRARLGSPKAITATTHKLARIFYRMWTTRQSYTDAGSDYYENRYKERVLRNITKRARELGYNAVLQPIE

SEQ ID NO: 422157 - protein, 366 aa, unidentified
MASLPSGPGVVHVGMDTSMREIVCGVLRPGMEVPAVDRIPNDEESVRRLIGKLGDRRRLAVCYEAGPSGYELHRLLTSMGVACEVIAPSLVPKGASERVKTDRRDAVRLALALRAGMLTAVRVPSPQEEAVRDLVRARGDLLDDRRRMQQRLNALLLRHGRVWSGGAKWTYAHRTWVDQQRFGQPALQEALESYRGALEAREAELRAAEARLLAWAGREPLAPAVARLGAYRGIAELTALTLAAEVTDWHRFPSARAFMGFTGLIPAEYSSGSRTRRGSITKAGPEGVRTALAESAWAYRCRPAIGATLRRRQAGADPGTLARSWKAQQRLHATYTKMTARGKPPGVVITAVARELAGFVWAEMTS

SEQ ID NO: 422158 - protein, 421 aa, unidentified
MFVLYQRCAAVDIGKDVIAVAVRLPGDGPDHRQTIKRTFKTFYGVLKHAARWLTEQQVTHVAMEATGIYSMPVYHALIEHGGFEQVLVCNAGHVRNVPGRKTDLSDAEWLVHLLECGLLRGSFIPPAQIKAARDVIRYRTKLTESRTSELQRLGNILQDAAIKVDSVASTITARSVRAMVEALIDGERRPLVLAELAKGRMRAKIPDLQRALEGRFDSHHALMCRLHLDHLDYLDEMIVRLDTQIEDMMQPFRAQRDLLTTIPGIGPFVAAAVISEAGADIAETFPSADQFASWIGVCPGNHESAGKRHSGKPRKGNQHLQHVLVECAWAASRTPGYLQSHYRWHVRKFGGARNATAKNKAIVAVAHKLAIIIWHVLATGKPYADLGADYFDRRIDPAAETRRLIARLQALGHTVTIEPAA

SEQ ID NO: 422159 - protein, 433 aa, unidentified
MHEVEDEPLFAERAAGIDIAKAGVEVTIRVPSDTRAGRRQQETRSFATTRRELLSLADWLRAWGVAKVGMEATGDYWKPVYFVLESRGFDCVLYHAAQVKALPGRPKTDRADSVWLARITERGSLPSSFVPPAPIRALRTHTRYRRHLTQARTAEKQRVEKLLEDGHLKLSAVISDIHGVSGRAMLEAIIAGERNPTVLAQLARGTMRGKIRQLEEALDCSFLTEQHVAILAMMLAAIDSFTTQIDQLTARIEILAEPYWHQIQQLDAVHGTGITSAQDVIAEIGVDMTVFPTAAHLVSWAKWCPQVAQSGGKRKGNNAAGRGNPYLSAALGEVSISAGRTQSFLGAKYRRLVKRMPKKKALVATGNSVLAIFHALLSDPAATYHDLGPAYHEQRTSTRRQARNHVRGLERLGYHVTIEVISPDTGELLTATA

SEQ ID NO: 422160 - protein, 329 aa, unidentified
MQHEAQREAPPTDATLPVAGVDVSKDRLDVFIDAVGERLEVGNDDEGIARLVATLRRRDVRLVVLESTGRYHRAAAAKLLDAAMNVAVVNPKQVRAYAVAEGRLEKTDRIDARVIAAFGRSIGPRAAAKPSEKRVELADLVSRRRGLVQVKVAEANRGAGKLPQLARDQSRKLLRLVERQIHDLDRAIAKLIEADDDWHNTSRIVDSVPGIGADSANRLVAGLPELGKLNRQEIAKLVGVAPLNCDSGKQRGQRHIRGGREHLRTCLYMMAFNVRQKCARFKAYFDGLLARGKHYKVAMTACMRKLLVTLNQMVKNNTHWKSDSHGAIT

SEQ ID NO: 422161 - protein, 350 aa, unidentified
MLALRRYWVGLDTGFTSTAVCLIDEHGEILFEGMRDTVAGQIKDILRRFGIESVQLITIEAGVGTHMVRELRDYGLPVQVVEVRKASKFLAIRRQKTDSNDARGLAELGRLGRSIGAQVFVKTLDCQNIRSQLNVRKNLVQQRMKLDALVQSIVRLHGGKLSTRVGIGKLASGIEDQLPRLQSDGLDVDAEVRPLVEIAESLRVHITEMDKRFRALAYSHPVCSVLMTVPGVGPITALSFFSAIGDPFRFDRNRDVGPYLGLTPSVHQSGVLSRPGRISRFGNKLTRTHLVTAATVLLCKTKQQSALQTWGLELSRKVGLSKARVAVARKMAVIMLGMWKAGAAFDPGHT

SEQ ID NO: 422162 - protein, 443 aa, unidentified
MNPLTPYDLVIGLDRSDKKADLSVIDIHTDQRRTVVIDTAPEALWEWLLQLRQQHPQARVGLCLEQPAVHLISFLEAYQWITLHPINPITLQKYREAFVTSRAKDDTKDAEYLADLLLSHQAKLPVWSPEDSATRAVQQLVFHRRAVVDERTALSNRLIALLKQYFPQALTLCGEDLWRPLATAFLLKWPSLQAVQKAKHATLKQFYHLHGSRSAKLLAERLALLAKAVPVTDESAVIESFVLRVQLVCRQLQLVQQSVTAFDRQIAAAYAAHPDRALFASLPGAGPVFQPRLLASLGSQRERFDSAASLQCYTGVAPVTKKSGGSGYIHRRYLCPKFHRQSFHEYAKESILWSRWAAAFYLQQRTKGSPHHTAVRALAFKWQRVIWRCWQDRRPYDERIYEAALRRAGSPLVALLDRVELGKSPWKNPVKKTKKSLVGLPQR

SEQ ID NO: 422163 - protein, 357 aa, unidentified
MREYIAFDSHKRYTIMERENRQTSVARQRRIEHAPGAICGALRDCEPGTPVAVEATGNWYWIISEIEQAGLRPLLVHPRKAKLMMGLINKTDQLDVHGLNRLQRNGTLPTVWIPPAELRDLRELTRVRMVLAAQRTRLKNRISATLAKYGLAVTAASDPYSQKGREQLLGLLGQLPPQTQWAARTLLAQLDFIEGQIREQEQRVKALIAVTPEMRLLMSLPGVGVILAAVLWLEIGNVERFASAEHLASYAGTTPRVHASGGMVRYGRLRPDVNRYLRWALVEAGNSVAVNHLRCPQRHVSELYRRLKTRKGHAKAIGAVARHLAEATYHVLYRNEPYQEPSVCAGALQGGVSAGLS

SEQ ID NO: 422164 - protein, 356 aa, unidentified
MITIGADVHLKTSTMTVLDNDGTKIVRKKLDNNPEELLAFVRRFKEPKRFSMETCYNWPCMYELIKDEVDQFNLLHARKLKSIIESQSKCDGHDSDEIAYLTHIGHIPKAYMAPADTRQFRHLLRTRVGVSFQIASVKNRIHALINTNTFYGQRPRNFKNLFCKRGLVYLVSVPLPEQERTIITELLKEIRFLEQLRSRFDEHIENANFRSDDIGILETAPAMRGKILKYIIISEIDNIQRFRNSDAIVAYAGLVPRERSSGDKIRKGRLRTDCNQFLKWAMIEAVIPALRQDKELRRYYKEVKTRCNSSAARVATARKLLIAIYHMLKEQKPYHTREQKPRITHSCALPSSLIRG

SEQ ID NO: 422165 - protein, 345 aa, unidentified
MTKLMAGIDLHSNNIMAGLVEMNGKRVVHQKLPCDLKEVLEFLKPFKDRLEKVAVESTYNWYWLVDGLQQAGYPVVLANPAKIEQYSGIKHADDKNDAYFLADLLRFDVLPTGYIYDAQLRPVRDLLRRRLGLVRQRTALILSFKGLYTRTTGATLNLREVKKMQPEDGPKLYEHPANQLIAKLQLEHIGKLGESIQNIEKVIFKCIRHLPYYGKLTTLPGIGPILAMTITLEVGDIKRFTQPGQFASYCRTVAAQRLSNDKKKGNNNRKCGNKYLSWAFVEAAHFAKRADKQSRQWFDRKAAKTGTSVATKALACKLSKAAWYVMAEDTVFDPQRMFGQSETKK

SEQ ID NO: 422166 - protein, 391 aa, unidentified
MIFVGIDVAKDKHDCFILNSEGTVLADVFTIANNRIGFETLLSRIQSCSQGESKIKVGLEATGHYSYNLLGFLLDSGLATYVINPLHTNLYRKSLSLRRTKTDRIDARTIAMMLMSDVDLKSYSDTAYHNEELKSLTRYRFDKVKERAKLKSSVARLVNILFPELEKLVSSLHIAVVYALLSNYPGASYIANANTEELAETLCTASKGRYTKSKTAEIQVAAGVSIGSKMPAKSMELKHTIALIRELDKEISEVESAIDKITSQMDSPIFTIPGIGRHMGAMILAEVGDFSNFASADKLLAYAGLSPSTYQSGQLQNCYAHMEKRGSRYLRYALFNAAKYVCLWCPTFSAYLEKKRSEGKHYNVAISHAAKKLVRLIFAMQRSGKAFLADY

SEQ ID NO: 422167 - protein, 431 aa, unidentified
MESVIVAGVDVSKYFSDMCVLSADNLVLKELHFTHDHAGLNKAADTLRQIEKKSGLNVVIIMESTSHYHRLPYYFFRNSGIDVIVINPLQSNAIKNIAIRKVKTDKVDAYRIALLYRLQHFEVTDQPIDILFDLRNLTRQYGDIVKSRTAFSNQLVACLDQAFPSFRKVFKSVTTVTALSLLQHWQAPQSILSADRTQIYELIRAVSRSGSAYALRKTDMLYQLATLDSQINLQAESNGILIRSIVSIILSLNENLKLLHDEVKRLINTDRFAFTQVTLLSTIPGISWFGAALLLAEIGDFTRFKKPAQLVAYCGLDPSQRQSGMFKGTKNKISKRGCRYIRRLLNMSAVTAVSKNSTGEYNNPVLAEYYQGKCLSKPKKVVLCAIMNKIMHVVFAVLRDQKPFELRTPEEHAIKLHQKMSHNSKKLLDIA

SEQ ID NO: 422168 - protein, 418 aa, unidentified
MKLFVGLDVSSKNLDACFLTDDEELTILKEGRFENSFIGASQIKKLILDFAHELAFTKVVIGMEATSLYSFHPAMFFKEDKELQALNLDVSVEQPQKIKGYRDIFEEEKNDQIDVFYIADYFRVRRYATSIVKEEQYRALQHLTRTRLQIVEQLVEAKQHFIENIYYKCNRLPIELKADGSTTSVLSATLVSLMTEDYSLDQLAQLPLEDFAALIQKMGRGRFKNPEGTAKAIAKAIRGSYRLGKIQQDSVDIVLSVYAREIRSLTSLIKELDQAIQEIVETLPEYQCLTSIPGVGPVYAGGILAEIGQIERFENEAKIAKYAGLHWPKNQSGDKNSENTSLAKRGNRYLRYYLVEAANLVRSRDAEYREFYHKKYNETAKHQHKRAIVLTARKFVRLVDILLRNHQLYMPQRGLIEK

SEQ ID NO: 422169 - protein, 438 aa, unidentified
MEEAGDEPLFCERAAGIDIGKQVVSVTIRVPSDTRRGGRQQETREFGTTRRQLLEMADWLRCWQVERAGMEATSDYWKPVYFLLEREGFDCLLYQASQVKALPGRPKTDRLDSAWLARITEQGSLAGSFVPPEDIRRLRTHTRYRRRLTQARTAEKDRCEKLLEDAHLKLSSVISDIHGVSGRDMLRAVIAGERNPEALAQMARTRMRRKIAQLREALDCSFFTGDHAFVLQMMLDNIDQLTAQIAVLDERIAILCEPYERQLAQLDGIPGFRVRTAQDLTGEIGVDMTAFPAAGHLCSRARLAPRVRESAGRRKGKNATGRGNPYIGGTLGEAAAGAGRTQTFPGAKYRRLCTRMPKKKAQGAIMRDQLVITHALLSDPEAGYRDLGTGYYEQRERTRRRASSHVRSLERLGYKVTIEPLAPEADPETGELITRTAS

SEQ ID NO: 422170 - protein, 343 aa, unidentified
MYYIGLDVHKKTISFCVKDTAGCVHQEGKIGSTRRELDAWIKTLPQPRVIAMEATIFTGWIYDHLLPHAEKVKVAHPLMLRAIAASKKKNDRIDARKIADLLRCDLLPECHMASTEIRQRRRTLRYRGLLVRQMVQMKNRISGLLMETGVSYNKRRLHKVGYFAELLSTNEEVNQSIRPLLKLSRETIVRCQKTDYALVSSLERDPLLAERLKRLRTVPGVGPITALTWALEIGDVTRFESIKQAISYCRLCSAEKSSADKVMRTPISKQRNKHIQRALVEAAKLAPRQCHELAVIYQKEKQRGNSNRATLAVARKMVAYLLAVERRKQDFVPAEDFASRAAA

SEQ ID NO: 422171 - protein, 310 aa, unidentified
MEQTFVGIDVSKDRLDVHVRPRGEAFAVARDGKGLEELVERLQALTPNLIAVEATGGFETIVAAAIGGAGLPLVVINPAQVRHFAQAVGQRAKTDPIDAEMIARFAEAVKPAPRPVPDAAARLLGELVARRRQIIEMLVAERQREKRAGNMRVRKSLARHIKVLERELQQLTDEIGDLIRASPAWRETEDLLVSMPGVANKTSSSLLAEVPELGRLTRRRIASLVGVAPYTRQSGRWKGKSMIAGGRAPARSAVFMAALTASQHNPLLKAFYRRLLAAGKPKMVALIAVARKLLIILNAMIRDKKPWQYA

SEQ ID NO: 422172 - protein, 343 aa, unidentified
MQTVTTIGFDIAKSVFQVHGVDAAGQVVIRRQLKRRHVLAFFQKLPPCLVGIEACASSHHWSRELQALGHTVRLMPPAYVKPYVKRQKNDMADAEAICEAVTRANMRLVPTKTPEQQSCLMLHRTRHLFIRQQTAVINSIRAHLAEFGIVAPVGRKGVTELLHVVADSNDKRVPEVARACLAALGNQLLRLKEQILEFDRLIMAWHRSNQTSKRLHYIPGVGPILATALVASVADPRTFRSGRNFSAWIGLVPKQHSSGGKDRLGSISKQGDRYLRSLFVAGALAVIRYAKIHGTGHRPWLTALLARRPTKVAAIALANKIARMAWAMMARGERYKQPVALAA

SEQ ID NO: 422173 - protein, 336 aa, unidentified
MSPSAWLGIDIAKETFVASLLLEKRSAQGSFDNAPAGFTKLDHWLKKRKVAQIHACLEATGRYSEGVAEHLHAAGHIVSVINPARLKAFGQATLVRTKTDQTDAALLAEFCRRQQPAPWTPPDPARRGLRALVRRRESLLNVRQQEANRLSSGEDDPWVVTSLETVLTCLDEQLAQVEQAITDQVARDADLQRRVELVDSITGIGLTTATALLAEIDFGAYPSARQVAAQAGLTPRQRQSGTSVHGKPRISKQGASQLRQILYFPAISAMHYNPVVRAFAERLAKAGKAKMAIVCACMRKLLHLVYGVLKTGLPFDPNYKSTPAQPAKPVQLLQPA

SEQ ID NO: 422174 - protein, 332 aa, unidentified
MTDLQYAGFVGIDIAAKTFTATWVPSGPARPRQVDQTTHGYTTFDAQLRAAMPDPTTVLVVMEATGSYWIALAVFLHDHGYHVAVINPAQIANFSKSLPRRPKTDPHDSLLLLQFAQERQPTCWTPPPAVYHELRQRLVARDALMEMRQQARNQRHALEQWPVHVAPVLTQFTTIIADFDTRIAELDRAIAQVLADGAWAASAALLASIPGLGSTTSAWLLVATMNFALCPTPEAAAAYAGLAPMAHESGTSVRGGSHLGRGGHRRLRTAVYMATLSAARYNPVIRPFFQRLRAKGKPFKVAHCAAARKLVTLAWAVVTKQRPFDPQQGSVA

SEQ ID NO: 422175 - protein, 349 aa, unidentified
MVILGADLHKRSHTVVVIDETGRKLDEKTVAATSEGHLELRRWAIRWPDRRWALEDCRHLSRRLEADLVVAGESVVRVPPKLMAGARRSAREPGKSDPIDALSVARAALREPDLPVARLDGPERDLRLLVDHREDLVADRTQAINRLRWHLHELLPGDEPKPRSLGRSNVLAELERRLAPLEGTVARIARELVTRIGDLSLAIDALEREIARLAERLAPVLLALQGCGHLSAGKLLGETAGIGRFSRSAQFARHNGTAPVPVWSGNAVRHRLSRGGNRQLNVVLHRIAITQIRLGGPGRAYFEHRLAAGDTKTEAIRALRRRISDEVFRRMRHDEAVQAAIPANLPAAA

SEQ ID NO: 422176 - protein, 332 aa, unidentified
MSVYVGIDVHRKRSQVAVINGDGEVLANRNVTNGVAPVLSVIGGLPAGTPAAFEAAFGWGWLLELLEDYGFSPHMVHPLQCKAIASARLKNDKVDAATLAQLLRADLLPEAWIAPPEVRQLRALLRHRVQLVRLRTLLRNRIHAVLADHGHGRPAGCWSGPGRQWLAALELPAVSREVIDDALTLTGAVEEPAGRLDREVRQRARSDPRVQVLTRLPGVGEFTALVLLAEIGDISRFGSARKLAAWAGLTPTVRGSDRAVRHGHISKQGPAWVRWVLCQAAQTAKRHPDFAAGYQVIARRRGSKIATTAIARKLLTRACHLLTDAASGGAPS

SEQ ID NO: 422177 - protein, 351 aa, unidentified
MNICHYIGFDVHKKTISYCVKAADGTILEEGRLQATRHALRKWALERTQAWHGGMEATLFSGWIYDALKPFAAKLEMGNPSRMKAIGAAKKKSDKLDARTIADLVRCNLLPVCYVAPPEMRDLRRMLRYRNLVVGQAVQMKNRVSGMLMEVGAEYNKRRLHGKQYFSELLDQLEEVPESVKELLVTSRGALEAFEATQRQLLNRLQKEPLLVRRVKLLRSIQGVGEVTALTWALEVCDPRRFSSIGTALSYCGLTSALNSSADKAKRGPLSKQRNAHLQKVLIEAAKLAPRWNKQLAAVYEQEVKHGDRNRATLEVARKLVAYLLAVDKAGKPFEIRNPAVKEREEVGQVA

SEQ ID NO: 422178 - protein, 412 aa, unidentified
MNQKVENCVLDNEKVVANTCDSTYFVGVDISMKSFHVALIQEKKKVLWDESFSMNQKGFEAFYQKLQSYSNCIVGMESTSTYHLNLLLYLLEKEVFVVLLNPMLVKRYISSQTLRNCKTDKADASVIASFVKDTRESLTPYTETQTHHLFRLARCKEDMTHQITALKTKLKQLLRLTFPELVDSYKIYTATMLQLVTFYPSAQAFYKAGEKKIDKRLLALSKGKGKPVSYTGHSICHLAHHSIGRTDPSVEFVIQQTIQTLQFFETKKKEVKAKLEEEVKKFAVEDVQILSSIPGIGKDSAVHFMAEIGSMDRFRNYKALTAYIGTDPGIEQSGQSLHRKKISKRGNASLRRLGYIIAQKVIQYCPRFQEYYQKKRNEGMAYKKALIAVWNKLLRTIFSMLQRRTYFVLSDS

SEQ ID NO: 422179 - protein, 409 aa, unidentified
MADNAAPARRAVLGLDVGKACHWACMLTRDGEVAVNRPVANSEHELDRLFSQVGEGTLVVVDQVRNIGALPISRARRAGLDVAYLPGIAAHQASRMFAGDAKTDERDAHVIARTAMGLPDALLPVPERDGGLEAARSLASRRDHMVTCATRDKNRLRSILLESCPAFEALVDPSDPRWLRVLARLGGAWGVADAGRASFSALMRGAGGPARADAWTAINSSTRPPEIMVRAENPQVKMLARRISEAMEEASRLDAEIASLLESDGTYACLLTIPGIGPRTASGLTIAIGISSFPDHDHLASYCGIAPRNRRSGTSIASVAASRQGNKRLKNLLIFSCNSLTRSANRFGEHYRACRGRGMCHGEALEAVARKRLKVIYAVMRGKAPYAALPRKNGRELPRRWAGANMERI

SEQ ID NO: 422180 - protein, 417 aa, unidentified
MDADATTVAQAGAATFVEVVVDHSEFEVFLGIDVGKDKHYAVALGRSGATLLERELPQDEARLRTLIAGLATDGPVLAVVDQPASIGALVVAVARAEGAEVAYLPGLAMRRLADVHRGEAKTDARDARVIAEAARSTPYALRSLQASDEQLAELSMLAGFDDDLHGQIVQASNRLRGLMTQIHPALERVLGPELEHFGVLDLLVKHATPAALRKAGKARIARVVAARSPRIAERIATAVIAALGEQSVVVPGTDAAGMVIPRLAAQLAQIRTQRREVVQQVERLVEDHPLAQVLTSMPGVGVRTAARIITEVVGKDFPTPGHLAAYAGLAPVTWRSGSSIRGEHAPRGGNRRLKNALFRSAFSALGDPASRAYYDRKRAEKKTHTQALLCLARRRSDVLFAMLRDGTHYDPQHAQGA

SEQ ID NO: 422181 - protein, 418 aa, unidentified
MIPNKPSFYIGIDSHKFTHTACVINYDTEKLLTFTFKNELQYFDEVLQKILSITKTKNIIFGLEDVNSFGLHFSQFLTDKQYLVKHVNPAFANAYRASLPNFHKSDMYDSFCVAKVLKDSYKELPSFQYEQVFSSIRLLSGQRTILAKQKATNYKLLHQQLEKVYPGYTQFFSSIHTRSGLSFFQHFPSQRYLKGYTKEKLVKEMKQHTKIFRITTAEKILHIVRVNKLPYHDVIVEETIIELVNDILVKEAKIERLEQLLEPLIKETGYQLQTIPGVSIATAAMLISHIGNIHRFKSERQLAKFCGIAPVSIGSGGKDFEQSSKGGNRQLRATFYFLAVGSITVNKEDTARHPMFRDYFLRKLLEGKSKSQAMVCIMRQLVKIIFSMMKNKTEWKQPDYTRQIPSEPLKATVLKKKH

SEQ ID NO: 422182 - protein, 316 aa, unidentified
MERKVFVGIDVAKDTLEVATTTGVKVNFLNTAEGHEDVEALLKPLNPALVVMEATGGYEWNLAEHLVRGKLPVVVVNPKRVRDFAKALGILAKTDRIDAGVIVRYATAVQPELRLFKDDKTQKLDALVARRKQLVEMIAAEKNRLPLAKKWVREDIAATIAWLTNSVEKINKQIDELITKHAVWCAREKLLRTVTGIGRVTSMGLICDLPELGSLSRQKIAALVGLVPFNRDSGKARGKREIWGGRSYVRSLLYMAALAAKRSNPLIRPLYERLIAKGKLPKVALVACMRKLLTILNAVVRTNTPFEVRACGSYHS

SEQ ID NO: 422183 - protein, 342 aa, unidentified
MLEIITVGLDLAKNVFQAHGADASGRAVLRKKLRRDQVLVFFGQLPTCVVAMEACGGAHFWGREIGKLGHEVRLIPPAYVKPFVKRQKNDAADAEAICEAAQRPTMRFVPVKSEETQGAAMVFRIRELLIRQRTQSINALRGHLGEFGQIVPQGAANAARLIAIVEDPDSGLPADAIATLKVLVGALTHLEAEIGRLDAEIARRAKEDEVARRLMTVPGIGPLIATAIAVLAPPPDTFRKARDFAAWLGLTPRQHSTGGKHRLGATTKMGERSLRRLLIIGANSVIIKRHVHVAARPGTWLGGMLTRKPPMLVRVALANKMARIVWALMAKGGLYESPAAAA

SEQ ID NO: 422184 - protein, 355 aa, unidentified
METAYDGRQIVGMDLHRRRSVLVRMTGDGRQLGTARITNSPEELRREIGRAGKSPKVVLEATYGWYWAADTLEAAGAEVHLAHPLGVKAFTYRRVKNDVRDASDLADLLRMDRLAEAWIAPPQVRELRELTRYRHKLVHLRTSCKDQVHAVLAKLGIPVTCTDIFGVAGSAWLDGLGLPQPYAGKVTSLRQLTAELTAEITMLSEVIADLLAGDRGAQVIQQLPGIGPVLAAVITAEIGDVTRFRNPGQLCSWAGLTPRHRESDVKVARGHVTKQGSRMLRWALIEAIQHAPADSAAGALKAAIIARRGKEARNIAKVAAARRLLTLVFYGLRDGQIRCLSQPPAGPPGTPAARA

SEQ ID NO: 422185 - protein, 417 aa, unidentified
MEEEQKASPCRYIALDIHKYYSVVAGVDREGKEILSACRVEHMDLEDWLPKHLLRTDRVVIESTTNAWHVYDLLEPLVAEVLVANPIKVKQIACARVKTDIKDTFILARLLAANLVPTVWVPPQHVRELRQLISHRRRMAGMHTQVVNRMHSVAHRHHLNHPKGKDFQAKNTGWQRDESLSRLEKMQLELDMETREHLEKQIERMTRELGRMSHEEPWASDMLYLMQIGGCGVVTGMTILAAIGDITRFETPKALASYSGLTPGLEQSGVKLRGKGITKEGRRELRWVMVEVAWRAVKADPHWKKYFEELKRRMHPNQAIVAIARHLLTMVWYVLTRHEPYSHYTPERIAYKYLTWSWALGDEQRQGMTGPQFARYYLMRLGIGNDLKRVALNPKFPYKLASVEEVLALWPELRPPN

SEQ ID NO: 422186 - protein, 365 aa, unidentified
MQKISTMRTSGRKIFNGQLTIGLDLGDRSSSYCVLDEAGKILLEQKLPTTPEGMKQTFARMPRSRIAMETGTHSPWVSRLLKGLGHEVIVAHAQSVRLIVKSRRKDDRMDARTLARLVRIDPELLSPVQHRSAQAQLHLTEIRARAGLVSARTALVNAARGLVKSHGERLRKCGTQQVSREIAGGLSTGLREALEPLLREVESLNERIREYDRRIERMTKERYPETALLKQVKGVGDLIATSYVLTIEDPHRFRKSRDAGCFVGLQPGRRNSGDSEPQLHISKEGDRYLRTLLVQGAHYILGPFGEDSDLRRWGQKLAARGGKNGKKRAVVAVARKLAVLLHRLWVSGEVYEPLRNSQKMMSAAA

SEQ ID NO: 422187 - protein, 418 aa, unidentified
MNATEWNQQPYFAALDWARAHHDVVVMDRLGQVKEMIRFGHTVEGWRKFQELARRYPALPVAVETSQGTVVDQLFAAQVRVYPVNPKAAERYRERQAPSGVKDDQRDAWSLADALRLDGHTWRALSPQDPMVAELQLLCRDEIALIEQRTAFVNQLQQALHEYYPAALQAFANWTCPAAWELVLSFPTPAALEQAGRRRWEKFLHTHRLWRKDTAEERMAIFARATALSGTAPTVAAKSLLAVSLVRLLRTLEAQLDSYRERITAVFARHPDHDLFGSLPGIGPKLAPRLLAEIGDDRSRFVDAEGLQCVAGTAPVTFQSGKLRFQKVRYACNDTLRATVHLWVEHSRDDCAWAKAYYQRHREKGQSHACALRCLGQRWLKILWKMWQTRTPYDEARHTRNQTEHGSWILKLNPAPAS

SEQ ID NO: 422188 - protein, 347 aa, unidentified
MDHYAGIDVSLEYSSVCVVDASGKIVREGKVATEPEVLMAWLGSLGFDMARVGLEAGPLSQWLYAAMQKTGLAVELLETRHVRAAFEAMPVKTDRNDARGIAQLMRLGWFRPVHCKSLPAQEVRALLTARKLVQSKLFDVEMSLRGILRGFGLKVGRTTPKRFAGRIRELVAGHATLEVVAVSLLAVHEVMRREFGSLEKRVRSMAREDARARLLMSAPGVGAIVALTYVSAVDNPRRFTSSKGIGAHFGLTPKRYQSGERDVTGRISKIGDASVRAALYEAAHVILTRPVRGSALKSWAAKLVKRAGMKKAKVALARKLAVILHRMWVDGREFIFTTPRNAAAAAA

SEQ ID NO: 422189 - protein, 362 aa, unidentified
MEYYVGLDVSQRQTAICVVDGTGKKVAEGKALSLPSDIHNWLKTKIPDPTDIVRVGLEAGAMTRWLCGDMTKLGLPMVCLEAYQAHQFLKSNRNKTDKNDARGLAQLVRMGGEFIRPVIIRTQVSQEDRMLLTLRQNLVRQRVCLENNIAGSLKAFGFIVPRGNAASKTFHARVMAALDKADERGLKLRDAVLTSLDLYVSIREQIDKLTKQVEAAAKNNPVCQRLMTAPGIGPIVALSFVTAIDVPERFSNGDDIGAYFGLTPRQFQSGETDFRGNISRLGDSMTRSHLVQAATVLLSHSKKWSSLRAWGMKVAKRRGFHKARIAVARKLAIVLHRMWINEQDFRWSSKEAEQELTGTAPA

SEQ ID NO: 422190 - protein, 411 aa, unidentified
MYKPVLSLDVSKGSSYAATYLSMHEPFKKPVSVPHTPQGISLLIDRLKNMECLTGERPQVILESTGNYSKPISCILQEAGYSVIVLNPIQTHQQKRRSIRKVKTDPVDAKRIAELFYMQNFKAQKPINPAIAELRVLCRHYDGINSLYIESQLRFQSVLDLLFPYYSNVFSTLCGDSSLHLLAAFPTPESVLAAAKEDVLALLKAEYQRKGWVENIYDKLLAAARASLPYKVSQQSNIRVLREYIGILMTHKAQLADIRAQIVAAAKEISVYSLLRTIPGVGEITAAVILAEIEDVNRFSVDHQLTAYAGLDASVFESGKFKSSRNKISKRGSAYLRKALFQAAKAAIRTTKKGPVNPLLQNYYLKKVSAGKPKMVALVATANKLLRIIYGMWRKNEPFKLTWNQHGYCFS

SEQ ID NO: 422191 - protein, 383 aa, unidentified
MRKIALDLGARETTYCEVQDGKVVDRGTVREIASLVAVLGPERPPATVAFEAGRQAWFVHDLLVGWHNEVVVVDTTRVKQLGVGQHGRKTNRIDAEVLARALERGGIPTAHVLSPARRELRQVLAVRRTLVETRASLVTTIRGLVREQGGKLPSCSTQHFVQRVREQRLEPKISTRIESLLGLVQHIDEQLEPMDEQLEQLCAREPITEVLTTAPGVGAVVAASFISVVDQADRFRHAHQLESYIGLVPGENSSGSKRRLGAITKEGNSYLRSLLVQAAWNILRTKGDDPLKSWAAKVAERRGKKVAVVALARRLVGVLWALWRNGAAYDPRALAREGARGLRHAAREMEQQADALVNSKQPNSPAATPKRGTPRITAATPNA

SEQ ID NO: 422192 - protein, 369 aa, unidentified
MNKTLYVGLDVHKDRIAVAVAEDGRGGEIRFHGVIANSADAVLRLTKTLTRNDHRPSFCYEAGPCGYGLHRHLVKLGFECAVVSPAMIPRKVGDRIKTDRRDAEMLARLWRAGELTPIWTPDEEQEAMRDLIRTRKQAMDAVKVAKQQLLSFLLRHGLTYETGSYWTQRHRRWLAELRRFRFTHQQLVFEELKRAVDQAEERVATLDQAIETAIVDWHFAPVVDALRALRGVNTTIAATVVAEIGDITRFENPRQLMSWLGLVPSEHSSGSTVRRGRLTKAGNALARTMLVEAGWSYRHPPKEGHPYLKRSAHLPQEIKDIGWKAQTRLCKRYRDLSRTGKPQPRVLAAIARELAGVIWDIARKTPLTA

SEQ ID NO: 422193 - protein, 420 aa, unidentified
MLAESQDEEQIIARVAALDIGKAELVCCVRVPGPGHKRLQEVSTHSTMTRSVTQLASHLVELGIERVVMEATSDYWKPVFYLLEAHGLQPWLVNARDVKHLPGRPKTDVLDAVWLCKVAERQMLRPSFVPPPPIRRLRDLTRYRIDLVGVRTAEKNRVEKLLEDACIKLSVVASDIFGVSGRAMMAALIAGERDPKALAQLARSRMRTKLDRLEEAFNGHFGEHHRFLLARMLARIDGVDADIAAVDEQIEAQLAPFAQAAARLDDIPGIGPVAAAIILAEIGTDMSRFPTAGHLCSWAKFSPGIKSSAGKTKGTGSTGHGNRYLARVLGEAAVVAGRSDSFLGERYRRIARRRGKKRAIVAVGRSMLVIIWHLLADEHAHYTDLGADHFTRHHNSDSRKRNHIRQLEALGYTVTLAPAA

SEQ ID NO: 422194 - protein, 370 aa, unidentified
MHQSTTLYIGMDVHKESIAVAYIAQDHGAEVTYLGTIGTRQADIDQIVRKLQSKAKHLSFVYEAGPCGYWLYRYLSQKGDHCWVVAPSFIPQKAGDRVKTDRRDAVQVARLMRSGDLTPVYVPQVDDEAIRDLTRAREDTIGDLKAAKSRLTAFLLRHDSRSTGRANWGAAHLRWLSEVVCPTPAQQIVFQEYVRAVTEHTERLERLEQALKEHVPSWRLNPVVEALQALRGVQFTVAVTLVAELGDLTRVEHPTELMKYLGLTPSEYTTGERRRQGSITKTGTTHARRVRVEGAWAYRYPANVSRHLQLRLEKQPHVIQAISWKAQVRLCQRYRRRLARGKHANQVVVAIAREFVGFMGAIAKQVPVQP

SEQ ID NO: 422195 - protein, 326 aa, unidentified
MSTCSVGIDVSKATLVIATHPARESWTSEQSPGALEQVVHRLTALAPSVIVVEATGGYERPVVAAAAAAGLPIAVVNPRQVRAYAQAIGRTAKTDPLDAAVLAEFGARLQPPIRPLADAVTQALAALVARRRQLLEMLGMERNRLEHAPPTGRVTRDLRNHIRWLEKRVTDVDDDIGTAIQDSPLWRVQEDLLRSVPGIGPVTARTLLAELPELGQLDRRAIAALVGVAPFNCDSGHHRGQRHIWGGRTTVRATLYMAALVAARCNPPIAAFYQRLVALGKPKKVALVATMRKLLTIVNALLKHQTRWQGASTSGSPAGPARAATV

SEQ ID NO: 422196 - protein, 376 aa, unidentified
MKKIRFVGLDVHAETIAVAVAEPDGEVRSLGTIPNREESVRKLVKKLGPPHQLRACYEAGPTGYVLYWLLTSLGVKCDVVAPTLIPVKAGDRVKTDRRDGLKLARLHRSGDLTAVWVPDEAHEALRDLVRAREAAKQDQLRARHRLSKFLLRHGKRFPEAGKAWTLKYMAWVRQVRFTQPAQEYTMLDYLHEVEHMNERVLRLEQAIEEAVKLSPAWMQEVVQALQSLRGVAKISAATLVSELGEISRFDNPRKLMAYSGAVPGENSSGERVRRGAITKTGNAHLRRVVIEAAWSYRLRPGIGPALRQRQKGVSEEVKEIAWKAQNRLHKKYQRLMAAGKDQRKIITAVGRELLGFIWAIGRATETRCRQQSAMTA

SEQ ID NO: 422197 - protein, 472 aa, unidentified
MIRSVGIDLHQGQHRARCLDERAQPCDSFSFQTTPEGLATLEEHVFRDGANPIIVLEPAGLPWLMVAVYLRSCHPDCRLVKAKTQKVAALRRYLRGPVKSDRLDALTLAKMPFIDPEQMDEIYLPPAEIHALQRLTRQRKRIEQDITGRKVRISAIVDGYLPGVRRTFNDAWSSPIRAFLKSRLNPFIVVRDGEDALHAFLSKNSYHSKWSKAQTRLVFLACQSVAAVCKLSEPAGTVNEDFFMDLQDEIARELRMLEADEIESEALARRIAELYQKLHSSDNLRTIPGVGEHTAPIFLATVGDPARFPNQSAFANYEGVVPGARQSSNVEAKGLRMTKAGPSIMRMALYQAGDIGRRWDPQLAAVYYREMVYHGKNHKQAMGAVMSHLGARILAVLKEDRPYELRDPEGKLISKDETRKLILSKYHVSEDIRRERRRRNSKISKARETATYRTNEAAEAPQPVPVQAVSRK

SEQ ID NO: 422198 - protein, 344 aa, unidentified
MDHFAGLDVSVKETSICIVDDAGRIVKEVKVASEPEALLKVLGNPIHRFKRIGLEAGPLSQWLFSALAEAELPVVCVETRHMQAVLKAQINKTDRNDARGIAQMIRAGLYRPVHVKTLRSQKLRMLLTHRKLLQSKAIAIENDLRGTLRNFGLKVGMVGKVRFEARVQELVENQPDLAVLVEPLLIVRRALLEQIVILHRRLLAIVRDDEVCRRLMTTPGVGPVVALTYRATVDVPTRFRKSKSVGAVFGLTCSRYQSGEVDWSGKISRCGDEMMRTMLYEAAQSMMHSKKWSWLKAWAMQIARRRGMKKAIVALARRLAVIMHRIWVDGTEFRWTREQAAAAA

SEQ ID NO: 422199 - protein, 323 aa, unidentified
MSLSAVLGIVLAKQKFDAALLVDGKTKHKTCKNSVEGFEALTLWLTKQEVEKVHACLEATGSYGEDLAVYLHDAGHIVSIINPARIKGFAQSEMIRTKTDKMDAALIARFCLAMKPKEWTPPLPEKRSLEALVRRVYSLIDMRSQEKNRLSTSHESVSSMIKEHIAYLDREIEKLRKQIDELIRKNPQLKEKEELLESIPVLGKATIPRLMAELDDLDKFNHVRELVAFIGLAPREKLSGSSIKGKPRLSKIGHAKLRKALYTPALVSIQCNPVMIDFYKRLKNKGKNEKVIVCAIMRKLVHVIFGVLKSGKKYDPNFKPILA

SEQ ID NO: 422200 - protein, 359 aa, unidentified
MAQAKKRRAKEAPELPVLNATAAGIDIGAREIYVAVHPDSDPEPVRCFATFTEDLHRIANWLQACQVRSVAMESTGVYWIPLFQILEARGFEVCLVNARYYQNVPGRRTDVSDCQWLRHLHSVGLLRTSFRPADQICALRSLVRHRDSLIQSASSHVLRMQKALNQMNLQIHHVISDITGITGLRIIDAILAGERDPTKLAALRDGRIRASQETIRKSLVGDYRREHLFALRQSLAAWRNYQDLIAECDREIEEQLNAFKAAADVQSKPLAQPKVHRRSQYTNEPNFDLRGHLYRIFGIDLTAVPGISALTAHTLLAEVGPDLSRFRSGAAFSSWLGLCPDNDISAGKILSVKTRRVSN

SEQ ID NO: 422201 - protein, 364 aa, unidentified
MKNSITWVGMDDSANKINVAIFQGQEHEPREEIVVVNDSSGLGRLAKKLKTIPGQVRCVYEAGVNGYHLHRYFKNHGISCDIAAPSLTPRRAGKRVKTDRLDAKKLATLYRAGELTSIAIPEKEQESLRDLVRAREDALEDLQRARHRLARFLMRRGLRYGIGKNWSCGHMKWIKNLRFEDDRDQMVLDEYRFTLDERTERLKRLQQRIEELATQEPYQKRVRYLMALKGIQALTAMTIIAEALDLRRFMDAPAFMAAIGVVPSEESSGDIEHRGSITKTGNRHIRRVMIESSWHYRHSASIGKTLKKRREGLPIEILEIARGCDHRLHQKFRRLINRGKDRRTAAVAVSRELAGFIWAIGQVA

SEQ ID NO: 422202 - protein, 322 aa, unidentified
MNENTNYFGIDISKDVFDVMGSDGLFHQFSNELTGFKKFIKLMDGNSHCVMESTGVYHLRLAYYLIEHNIKVSVENPLSVKRFIQMKLSKIKTDKSDSKMIYEYAIMNSPSLWTGQTKSQIECSHLLSLSNLYTKEIIVLKNKLHSEEAQGSPVPRVIRSINRSLNFYKKEIETLEMTVLKLVKQEYQDLHSRIKSIPGLGAKASALLIVLTDGFERFDTASELCSFAGLTPIVRESGSSIRSRPRISKMGNRRLRKILFICSFSASKHNKACRELYNRIVAKGKSKKLALVAVCNKLLKQAFAIAKSHLWYDENYRSVLVK

SEQ ID NO: 422203 - protein, 412 aa, unidentified
MEILYERCCGLDVHKRTVVACLLVPGPAGAPSKQIRTFGTMTGDLLALSDWLAAAGCTHVAMESTGVFWKPVYNLLEDRFALVVVNAQHIKAVPGRKTDVRDAEWIADLLRHGLLRPSFIPDRPQRDLRELTRYRTTLIHERASEVNRLQKVLEGANIKLSSVATDILGKSGREILQALVGGTSDSAALAQLARGRLREKLPQLEQALAGQFSAHHRFLIAQQLAHIDFLDASLERVSAEIAERVRPFEAEVVRVQSIPGVGRRTTEVLVAEIGVDLTRFPTARHLASWAGLCPGNDESAGKRRSGRTRKGSPWVRTALVEAAQAAARTKDTYLAAQYRRLAARRGAKRAAVAVAHSLLVMVYALLTQQTGYHELGGRYFDERDRQAVERRLVHRLEALGYTVSLAPTSPAA

SEQ ID NO: 422204 - protein, 413 aa, unidentified
MTGKVLFAGIDWASTGHAVAVNDDAGRALASFMVEHSAEGFDKLVARLRALGEPGGLTVAIERPDGRLVDHLLEAGHPVVAVSPNAIKAWREGEVVSGAKSDPGDAAVIAEYLRLRFHLLEPLQPFSDHTRALRAAVRARGDLVVQRTAAHNQLEATLDAFWPGAKEVFSDVTCKIALAFLRRYPTPASAAKLGEKQMAAFCKKHGYSGGRSAAELVERLRRAPAGITAVAETAARKAAVGAYVGVIASLNAAIKDLDKEVATALGEHPDGKIFASLPRSGLINAAQMLAEWGDCRPAYDAPEAVAALAGMSPVTKRSGKYKAVHFRWACNKRFRTAVHTFADNSRHGSDWAAGVYAQARARGADHPHAVRILARAWIRVIYRCWSDGVAYDPAKHKAAVALSAGDKPAPQAA

SEQ ID NO: 422205 - protein, 318 aa, unidentified
MPPAASVFVGIDVAKAELVMAIRPSGERWTATNDDAGIQRLLPRLREAAPALVVLEATGGYERAVVAALATAGLPLVVANPRQVRDFARATGQLAKTDRIDADTLALFAERVRPDPRALPTESAQALDALLTRRRQILGMVSAERNRLEHAVPAVRRGIVQHIRWLERQLHDVDDDLDRTIQASPVWRAKENLLRSVPGVGPVVSRTLIGDLPELGTLPGKQIAALVGVAPLARDSGTLRGKRLVWGGRAPVRAALYMAALVATRHNPVIREFYQRLLMAGKPKKVALTACMRKLLTILNAMLRANTVWRHTAQTATT

SEQ ID NO: 422206 - protein, 463 aa, unidentified
METAENKDVKEKEKEPEFAAFVGIDWADREHAWSMELAGHKERRRGKVENTPEAIASWAVELAACVGVGGVIAVALEQARGALLYALSAYGHFVLYPIHPTTSARYRAALRPSGAKDDPADADLLLDLLVRHRDQLRVWSPDSAEIRKLQTLVEKRRQLVDERTAQTNRIRDSLKLYFPQVLGWFDRMDLPIVAAFLDRWPTLEQAQGAGQEELRKFFHRHHCRSPKAIAKRLAALGRACPLTRDAAVVEPARLMVSVSLAVVAVLREGLGRVEAEIEQVTAAHSDYAIFASFPGAGPALAPRLLAAFGSRRERFASASEVLSFSGIAPVVSRSGQTEWIHFRWACPKFLRQTFHEFAAHSIPHCDWAAAFYHLQRDRGKDHHAAVRSLAFKWIRILFRCWQARQPYSEERYLAARNQRSAPRASAAAPTAPLPSVPAPACGRAVDSELKHIGEVLKNLLAGA

SEQ ID NO: 422207 - protein, 317 aa, unidentified
MSKFNTKVAGIDVAKAKLDVAIHGQAATLTVVNGPSGFAELTAFLKKSGVQRVGMEASGGYERAVARHLEDEGFKVAMLQPIQVKAFAKAQLRRAKNDLLDAALIAAFTALLAKERGPTDWRLAPLSDHLTFIEQIEDDIRRAKTRLEHQRDARIRLLIEEDIARLSELREDELARLVNAIRVHGDLAVRLDLVESIDGLGERTAVTLVVRMPELGALEREEAAALAGLAPYDDDSGARQGVRKIEGGRKKVRRALYLAALPACHRWNPKLVALRERLQAKGKKGKLILVACARKLLIYANTVLKRGTPWTKTAPAT

SEQ ID NO: 422208 - protein, 350 aa, unidentified
MTSVARHFIGVDLHKKALQFCVLDDRGNLLHEQAVKIAPDAAGELVFANFQPWQGACRVAVEAVGMNRWFVNGLQARGYDVVVADPIKLNLKVLGKKTDKRDAREIARRLWLGDIDRNAKTWYPNDEVYGDRKLVRTRQQLMKHRLGLNNEIRAQLRAYNISPPARTLHSAKGVSGLLAIEMPNPALTACLHALTRAMADTETQIAALTEQIDKRVASDDRLQRLQKQLPSMGAITTLTLVCELGDVHRFRNAKAIASSGGVVPRVYQSSDTAHHGRMTKRGSRSLRSVLGQWSVRLMARDDLVSAWAAPKKQRLHKNKVRMMLARKLLVGVAVSLRRDEPFDLQRCLGR

SEQ ID NO: 422209 - protein, 409 aa, unidentified
MDVIYERCCGLDVHKKSVVACLLISRPGGEPVRAVRTFGTMTADLLDLADWLTEAGCTHVAMESTGVYWKPIWNLLEDAFALLLVNPRDSKAVPGRKTDVTDAEWLADLLRHGLLRSSYIPARPQRELRELTRYRTSLVRERTAEANRLQKTLEGSNIKLASVATDILGASGREILHALVAGATDAAALAQLAKGRLREKLPDLERALAGSFNAHQRFLVAEHLAHIDFLEAAIERVSVEIAERLQPCAAAIARLDTIPGIGPYLAEALIAEIGTDMSRFPTSAHLASWAGMCPGNHASAGKRRSGRTRKGNPWLRTLLVQAAHAGARKKDTYLGAQYRRLAARRGKSRAAVAVGHSILIIAYHLLSDDTDYHDLGARYFDERDRRAVERRLVHRLEGLGYKVSLAPAA

SEQ ID NO: 422210 - protein, 521 aa, unidentified
MVEREGPLLGLRARSRVSSFPPGLSRGLTWCMTPDNHKHDDAWHPAILNKGGNTMKSFYMGIDVSKGYADFVIINQQKQPVVKGFQLDDTFDGHSCLHEIVSRFLTDHPQAVMCAAVESTGGYENNWYNTLIRLQASLNIKTARLNPLAVMHNSKADLKKNTTDKISAQNIAEYLIAHPEKVVYQQQNQLANLRKQWGFIQMLTKQCTQLLNQLHSLLYTANPELLNYCRNEMPAWVLKLLLKYPTAAKLKKARDKTVAKIPYVSLTRAKQLIAGAKLSVASATDPLTAQLVTATVEQILQLKKTIAEQTNLMAAQCDVPEVKLLKTFTGIGDISAIGLILEIQSVARFKNVKKLASFWGLHPVYKLSGDGSGAFKMSKQGRVNPRKILYTVTLSAIEHNPVIKPIYQYHLQQGKHKMDAIGICMHKILRIIYGMLKNNTAFDPKVDAANRQRSLPDMTAYPKKTKNRRFQSYDSKAPVSRRQRKKRLERERSHSVITDTKCGISAPVPIADIISDMLSNI

SEQ ID NO: 422211 - protein, 380 aa, unidentified
MRHLGLDVHQTFCEAAIREGKKTYSAGRVATNREALELFAASLGASDEVAMEATGPAMEIARILAPHVARVVVANAQDVRAISHARVKSDRFDARTLADLLAAGMLNAVWVPDAETQALRRRVARRASLVRQRTRAKNEVHATLSRCLLGRAPVGELFGAEGRAWLAAQQLGGEEAETVAGCLRQIDFLDEEIKALDARLAEWAASSGEAKRLMTIPGVGAGVAVTLMAAIGDVSRFEGQRQLVAYLGLDPKVRQSGEEAPRHGRISKRGNAQARTVLVEAAWMALRAPGPLRAFGERVRARRGAQVAAVAVARKIACLAWQLLSKEEDYAFAQPSSVRAKLRRLELCAGATAAPGFPRPAPSEKPTASSASAPRRPIGD

SEQ ID NO: 422212 - protein, 404 aa, unidentified
MDIIYERCCGMDVHKDTIVACFIAGRKKTTKTFSTTTSSLLQLVDWLKINECQYVAMEATGSYWKPIYNVLEMEEMPTLVVNAQHIKAVPGRKTDVKDSEWIADLLRHGLLNGSYIPKRDQRELKELVKYRRSLIQERARELNRIQKVLEGANIKLSSVVSEIDGKSSRQMLEMLAAGETDVKAMASKAQMRLKQKISQLEEALQGFMGAHQKLMLKMMLNHIDSLDSQISVLDEEIEHRLLPIQDKVDLIDSIPGIAKRSAQVVISQIGINMNQFPTAAHLASWAGLCPGNNESAGKRKSGRTRKGNDMLKTTLIECSKSASHQKSTYFYAQYHRIASKRGKNRATIAVAHTMLTIIYQILKNNVPYYELGADFFEQHRKKEIVQKSVKRLESLGYSVTVEAV

SEQ ID NO: 422213 - protein, 317 aa, unidentified
MNDNLSNEYVGIDVSKPLLDVAIGKDGQLWQANNDRVGIQRTVTRLKDLQPALIIVESTGGLETALITELYAAGLPFSLVHPGRVRDFARSIGLLAKTDKLDARLLAHFGEAIQPAVTRLPGEAEQYLNALMLRRRQLLDILVAEKNHLVSTCLSLRPMVETHLAWLEAEVADLDQQIEEQIRLIPHFHEKEIILRSAKGVGPVLCAKLLSALPELGQLNRKKIAALVGVAPFNNDSGRKRGKRRIKGGRVDVRNVLYMATVAAARSNPVIKSFYQHLLQQGKLKKVALVACMRKFLTILNAMIRDMRPFTAAHLPA

SEQ ID NO: 422214 - protein, 326 aa, unidentified
MQVLYARCGGLDVHQKTVVACVMITQPNGKVDKSTRTFATTTAALLTLADWLASLQVSHVAMESTGVFWRPIYTVLEDQFELILANAHEVKALPGRKTDVRDCEWIADLLRHGLIRPSFIPAKPIRVLRDLMRYRKSLVYQHTQEINRLHKVLETANIKLTSVVSDVWGKSGQSMINAIIQGESDALTLSELARGTLRGKLPQLQAALEGRIQPHHQMLLQRIFAHLRFLESSMQQVLTEIEAQMEPYQEAVELLMTHPGVQAVAAMGFVSEVGIDLSRFPSAKHFASWVGVCPGNHTSAGKRKHGKTTKGNSYLRALLAEIVWGD

SEQ ID NO: 422215 - protein, 483 aa, unidentified
MKRKSIFRNNSQKLDSAFIEAGLPEKVLLVPLDFAKLTHYACFCDGRGRYIRNAFTVKNNRDGIDYLIEQIEKTRKARSIRSKQHVIIGGEDSASYTCNFMDQLFERGYLTVRLSAKEVHQQAESLDSSTDKTALRAIAKTMLNRDARQASGSDPYKELRGLTRQRRRIVHLSTAVKNRIHTHVDRLFPGFLSKDSAVAPFSKASLQLMEKAFSAAAISRKSERVLTRLLSGQGVREPALAAARLKEQADRVICGDDSSTRLSGQLITGELSLYQSLQSTLSDLDLECARILAQLPEAFVLSMRGIGITLCASIFAETGSLARIQHCDQINAYAGIVPKVKQTGGPEAPARVGGKRRSFNRVLKDYTLQAGNHIYLHGPKDLMEDAVRRKLEGKAVDTAMARRFLRIARALTKGRCIYLPKSLRTDQEEPDAEARAQYILQTWPDQLLKWKRLGLHREAFAPETPLGQWREIVQQIYDIELPL

SEQ ID NO: 422216 - protein, 422 aa, unidentified
MMDKERRWFVGIDWGSQEHVVSLYDEDGNKIGQRKFPHGGTGLTDMIAWLLKASGGKPSEIHVAIETPHGPIVEALLERGFVVYSINPKQLDRFRDRFTVAGAKDDSRDADVLADSLRTDMRAFRKLSVADPVIVELREWSRIDEELKVEHVRLTNRLKHQLWRYYPQMLELADDVGANWFLDLFEAAPTPEKAANVREKTIARILKSHRIRRFDAAYVLAELRKRALTVAPGTIEAATAHIRSLIERIRIINGQLADAQRQLDRLCKKLSEPVADENGETTQGQKNEQPDAAILDSLPGVARTVLATLLAEAPDPLQHRDYHALRALCGSAPVTRRSGKSCMVVRRYACNRRLTNAAYHWAQNAIQRDPTSRAKYDALRARGHGHARALRSVIDRLLGVACAMLNNGTLFDPEFASKRAAA

SEQ ID NO: 422217 - protein, 313 aa, unidentified
MSPEVFVGIDVSKGHLDVHVVPSGKVYAFSTEGGDVDSLIKMLKEISPTVIALEATGGHEYVVAAALKAEGLPVAVINPRQIRDFAKAMGRLAKTDAIDAYVIARFAQTFRPRQRPFPTEEEKAIKELVVRRRQLVSARAKEKNHLVQVSSQRVLKSIQCVIDTLNREIQEIDNQLDDEIRSDPVMIEKYELLQTVPGIGPNTACVLVVQLVELGNLNHREIASLVGVAPMNRDSGTMRGRRMICGGRADVRNILYMATVVATRFNQRIRLFYERLRETGKPAKVAIVACMRKLLVILNAMVKKNEPFEAICA

SEQ ID NO: 422218 - protein, 262 aa, unidentified
MTKTYVGIDVSKRHLDVARYPHTQAWRVDHNEAGISAIVARLKELAPALIVLEATGGWETALARALTEAHLPVAVVNPRQVRDFAKATGTLAKTDRLDAQLLARFGATVQPEPRPLPDPATQQVQDLLARRRQLVEMLTAERNRLGQAPAHLRERIAKHIEWLEAELAEVEGELEAVEQACAAWQQQSQLLQSVPGVGPVVARTLLAQLPELGRLNRKQIAALVGVAPFNRDSGTLRGKRAVWGGRAAVRAALYMAAVAAVR

SEQ ID NO: 422219 - protein, 440 aa, unidentified
MEQVIIGVDPHKLSATIEVVDEHERVLGSGRFSTDRAGYAAMRRYAKSWPDRVWAVEGANGVGRPLAQRLLEAGEQVLDVPAKLAARVRLFDTGHNRKTDALDAHSIAVVAVRTANLRVLRVDGELEALRLLSDRREALTRRRVQTVDRLQALLAELLPGQAKRDITTGQAKAMLARVRPRDIAGKTRRRIAAEERAELVVVEAKIKKASAELKSMVLARDSRLMNLPGVGPVVAARVLADVGDVARFADRNRFASWAGTAPLDASSGEQNRHRLSRAGNRRMNHMIHIAAVTQLRCNTEGRAYYRRKRADGKKPMEAMRCLKRRISDAIYRQLVADAQRAVAADAVEEIGAGPGGHCGATQESSAVDLPPHIDTSDQPLPGPAYATLPRAPGLANPHAASAPQPPRRRAGAVKVERPTGRTTLTATSAGAPSSKPKPRP

SEQ ID NO: 422220 - protein, 402 aa, unidentified
MNFFVGLDWASQAHAVCVLDATGQVCWQGSVEHSAEGLAELLRRLTRFGPPASLPVAIERPSGLVVDTLMAAGHPVVPIHPNALKASRPRYSAAGGKSDPGDAFILADLLRTDGHRFRPLQPLSDDTRALRALVRGRDDLVAERVALANQLRALLDRFWPGAAAIFADVDSPIALAFLSRYPTPHSAERLGEKRLARFLGQHAYCGRRPAAELLARLRSAPIAHPGELEAEASGEIVRALVAVLLPLVTQIQQLSTAIAAALPQHPDGPLLQSFPRSGRVNAAQILAELGDDRRRFATDEQLAAEGGVAPVTRESGKHRGVAFRWACNKRLRQALTSFADHSRHASPWAAAIYAAARRRGCHHPHAIRVLARAWVRVLWRCWQDRRLYDVALHRAAQRLAAA

SEQ ID NO: 422221 - protein, 367 aa, unidentified
MNHLSGKSRKLYCGIDLHSRKSYLHVLDEEGNRIKSGEIDTTGQSFRVFFEELIDGENDVSAAIEIGSLTFRYCNVLREIGISVHVVNTLKNAYIAKSMKKTDKEDARRLAIQLWKNILPEPVHVPDHSEHLLRTMVSHRASLVKSHTRLINRAHHRLRNHEIQLQKRSLKNVSKWEDVLEGISSTEQPLLHLEVSQMMEQFRTLQNQIRETENQMLHLIHQDPEFNIMYSLLQTIPGMGIVTAAAVLALIGHHVERFKNVRKLASYFGQCPKVRESGGKTLGNSGITKQGNSRIRGYFTQVALAVLRTEKANAIPLHIWYENIRRRKGWKAARVALSRKMAAIAYGVLKHRQPYDPSRVTWKEESA

SEQ ID NO: 422222 - protein, 361 aa, unidentified
MSDIETKGVRKCVVGGVDTHKDLHVAAVVDDLDRVLASACFATTRHGYKQMLTWMRSFGELTRVGIECTGTYGAGLLRYLEHAKISVLEVTAPDRSDRRKRGKDDTLDACNAAHAAFAGIRTVTPKKRDGMVESLRVLKVCRKTAIQARRVTLQLIQNTIVSAPDELREQLRSLTRMQLIRMLAAWRPDLSDYRQLASAYRIALKTLGRRYLELHDEIADLDVMIASLVDQLAPELISRNAIGYETAAQLLLTAGDNSDRFRSESSFAALCGVSPVQASSGKVSRHRLNRGGDRAANSALHIIAIGRLRTDVRTQTYVAKRIAEGHSKLEAIRCLKRYIAREVYGIIQSRNLTINQSTIST

SEQ ID NO: 422223 - protein, 359 aa, unidentified
MAKSNVTSLNNFVEKFSGHEFWVGADVHKRSYHIAIYRVDGKVRTFVCPACPARLLRKLQSLNVTIAGLAYEAGPTGFSLARIIQSAGIRVIVAAPSRIPRPVLCGAKTDRLDCIKLAEYAAKGMIKSIVIPTEKEEAKRSLIRRRHLLVDSIRKCKQRIKGKLLFLGLQEPQEVRNWTKNAPEVLLALPMDDVAKLALESFLREFAFLQEELKTILKKLNNILQEEGIKKTMACLKSVPGVGMVVASTFCMELFRPERFTRAEEVTSYVGLAPMVYHSGENNPSGRLKPVGQRRLRSLLIEAAWMWRSRDKYAQKIYNRFLGKTGIPQKAITALARKLAVILWRLSVEKRTYRKIEAA

SEQ ID NO: 422224 - protein, 377 aa, unidentified
MSKIRFVGLDVHAETIAVAVTEPDGEVRSVGIIPNRLESIRKLIGKLGSAQHLKVCYEAGPTGYVLYWQLTQLGVACEVVAPTLVPTKAGDRVKTDRRDAEKLARCYRAGDLTAVWVPDAAHEALRDLVRAREAAKKDQLRARHRLGKFLLRRGQRPTEAGKAWTKKYLEWIKTHVRFDQPAREATLAHYLQEVDHAAEQILKLEKAIDESVAQSSPEIRSVIEALQALRGVAQMTAATIVCELGSLSRFESPRQLMGYSGLVSREHSSGNRIQRGAITKTGNAHLRRVLVEAAWAYQHRPNVTGFLLRRQKSLALSDEVKQMAWKAQYRLHKRYQTFALRGKNKNQIVTALGRELLGFIWAIAVHTEAQLKLTKAA

SEQ ID NO: 422225 - protein, 409 aa, unidentified
MDLVITRCAGLDVHKATVVATVRVPGEAGRRQVVTETFGTMTPDLIALREWLQAYGVTQVALESTGVYWKPVYYVLEDAFDLWLINMLHLQHVPGRKTDVKDSEWLAQLLECGWLRRSVVPPAPIRELRDISRYRVQQTRDRSQEVNRLQKVLEDAGVKLTSVLTDIMGVSGRAMVEALVDGTTDPQVLADLARGKLRKKLPLLRRALVGRVRPIHALLLQEILAKIDYLDEALERLTAEIDRRVAPFEPMLTALDTIPGLDRIGAISVLVETGGAMDRFPSAAQLCSWGGMCPGHDESAGKRRSGRTRKANRYLRTTLIQAGVAASRKRASALQALYARVKTRRGHKKAVVATGHQILEIAYYVMRDGITYHELGADYFQRRDRDRTVRRHVKQLQALGYVVTVNPAA

SEQ ID NO: 422226 - protein, 364 aa, unidentified
MVVVGTDAHKYSHTFVATDEVGRQLGEKTVEATTAGHATAIMWAREQFGLELIWGIEDCRNMSARLERDLLAAGQQVVRVPTKLMAQTRKSARSRGKSDPIDALAVARAVMRETDLPLATHDETSRELKLLTDRRDVLVAQRTSAINRLRWLVHELDPERAPAARSLDAAKHQQALRTWLDTQPGLVAELARAELTDIIRLTGEINTLAQRISARVHQVAPALLEIPGCAELTAAKIVGEAAGVTRFKSEAAFACHAAVAPIPVWSGNTAGQMRLSRLGNRQLNAALHRIALTQIRMTDSRGQAYYQRLQDAGKTKRAALRCLKRRLARTVFQALRTVHQPSSEHTQPAAACHRSYCSRSCLSG

SEQ ID NO: 422227 - protein, 319 aa, unidentified
MAQNSLVVAGIDVAKDKVDVCIRALSLRRTFAATAEGLRELASWLRRQKVGKAVMEASGGYERDWAKALRNAKIEVRIVDPKRVRSFAQSAGRLAKNDTIDAEMIAWFAETFDEARGQAYDATREQLHQMVNARQALKDMQTKLESQGEHALPATVQRIHARIIRTITVELVKIEAAISALVQTTPRFTELAEIIESVPGIGRTTAAVLIAAMPELGQANNKIVAALLGVAPYDDDSGRRRGERHIKGGRRRTRNVFYMACLGAATRHNPVLKAFYDRLVAKGKEKKVALVACMRKLISILNIMIERRQKWDASRYALS

SEQ ID NO: 422228 - protein, 438 aa, unidentified
MSNKVIFNLDELFISVGIDVGADFSWMSIALPNQQFVGKPYKILHNSIDSLTTAVSKIKEAEELYSLESRIFLESTGIYHYPLFCYLRDKGFNCSVINPIITKNSTNINIRKVHNDRFDSKKAALVGLKPDLKVSLMPSDLALNCRNLCREYYDLMDNRSAYVNKLQGELRIAFPQYLGIFSKVTINTSLTLLETYTSPSAFLKADKQEIIDSIKSTARFGLTYAQNKYNAIIQAATDANQFGYIIDSNIKRIRLYISFIRKYDEEINSILESLHELVDANEDSDFVKQIHLIETFKGAGFLSAVSIMGEIGDFSAFSKPKQLFAYFGLDPAVKQSGKFEGTKVQMSKRGSAIARRVIHTLTLQSISISRNREAKNPVLREYYLKKCDSKPKLVAMGAVSHKVCNMIFAILRDNKPFKIIAPQEHIKQYNSAKCDIAA

SEQ ID NO: 422229 - protein, 342 aa, unidentified
MGDYIGIDLHKTKSFVTRMTAQGHILEQVNLLHTTGALQQYMTSLPADAHLAVEATGNWMWLYEQIEDHQLDLVLAHPLKVRAIASARIKTDKIDATTLAHLLRTDLLPTAYIPPRTIRDQRELLRYRASLVRLRTQVKNKIAAILTKTGVQTPTKTAFGVKSRRFLATVPVRACYRLALDGYLRQMEHLTTEIQGADRVIEAHVTADTQAQLLCTIPGIGAYSALLIRSEIGDIQRFPDSRHLCSYAGLVPSVHASADTTRLGRLTKQGSSWLRWILVEVSVHAINGAPQFRSLYHRVAKKHGHNVGRVAVARALLKTIYAMLTTQQPFRPIRRRGTPVSA

SEQ ID NO: 422230 - protein, 312 aa, unidentified
MTDQIFVGVDVAKDWLDIHHASHGATRINNLHAAVRSFAARCAKEGAWVVFEASGGYDHQLRDALESAQVRFSRINPRQARDFARAIGVIGKTDRVDARMLAELGARLTPAPTQPLPPERRALQAQATRRRQLVEMRKQEATRLQQTADPLARADIRGVIAMFDRRIAKIEARMTDLVTAAPELATIERRLRTAPGVGPIVAATLIAELPELGQIDRRSIAALAGLAPIARDSGRRSGPRSIGGGRPIVRTILYLAALQASRRSPQFIHFRERLQAAGKSLKTAIIATARKLVVVLNAMLASGTDYRPTAVV

SEQ ID NO: 422231 - protein, 404 aa, unidentified
MSKDVFAGLDWAVHAHEVCVVDADGKPMDHKGFAHNREGLTELMRWLARFGKRLRIAIERPSGLIVDALVEAGHLVFPIHPNAVKASRPRYRSHGGKSDASDAYLLADLLRTDGHRWQALSPQSDSIRALRALVRSRDDLVHTRVALGNQLTSALESFWPGAACIFAELTSPLALAVLARYPSPASAARLNEARLQRFCRSQHYSGRRSAAELLARLHAAADGLAGPLAVDALAQVVTSMVAVLQPLVEQITALTRRIEQFTESLPDGQIIMSFPRAGHVCAAQILAELGDVRERFPSVERLAAEAGAVPVTYESGEARSVTFRWACNHRLRQAVMCLADNSRHANAWAHNIYAAACARGCDHPHAIRILARAWLRVIWRAWFDRKLYDPELHLGARKLANQGG

SEQ ID NO: 422232 - protein, 355 aa, unidentified
MSQEKYIGMDVHQATISVAVMDGRGKLTMECLLETKAATILEFLQGQQGTLSLTFEEGTSAAWLHDLLKPHVNRLVVCDPRKNALLKDGSKSDRIDARKLAELLRTNQLKPVYHGEHGVRTLKELGRSYLTLTKDVTRVMNRIKALYRSWAIPCSGTTVYAPRHRAEWLAKIVEPGVRVRAQRLYQQLDGLQPVRLQARRELLRESHQHAAVELLRQIPAIGPIRAALLVALLQTPHRFRTKRQLWAYSGFAVETHDSGEYRCVRGKLQRNRERITVRGLSDNYNKDLKNLFKGAAISASTHPGPLHDFYVALVAKGMRPAMARLTLARKIVAITLTIWKKGVGFDPQQLHRHAA

SEQ ID NO: 422233 - protein, 340 aa, unidentified
MKNIKYYIGLDVHKEHTTYVVRDKIGNILLENETATLYSELYPQLKPYLATSLIGLEASTSYYTLYQTFLKNNYNIKVANTIQLRQLITKNDKLDAKRLSEMLRLGTFPCSYIPNEKIQHLRSLVQVRHSLMEEKVRCNARIQAFIDKNGVMMPPQEAFSKHWRQTLTKHLITGTVSGELQYEYDHFLFLEKKQRQVEQEMKHYTQMNWKKEYMLIQSVTGFGPVLACYIIANVCPIERFPSNRKLRRYAGVIPVTKQSGETTSKGHIPKGSSRKQLRWALVQAANTAGRTDTPLGRYYRKKKKQKKITAIAKIAVASSMIDILYKVLTTKQPYQPNMVS

SEQ ID NO: 422234 - protein, 355 aa, unidentified
MTMLSDNYEYVIGGDPDRDTIDLAVLDTATGATRAHIEASADGAGYVRMLDWANDHAPGRRVWALEGTGSFAAGLAEALAQAGEDVVEVGGLKRARGAKNDRLDAVRAARTAMAREHQASPRVRGLREAIRALSVTRHGVLVSRTKAINELKSLIVVAPEHLRAALRGRALAKQLTLIESMTTTATAAVDHRITIVTLHSITARIRFLTGQLKDIDPELASLIAAHPAGPALLAEPGVGPVVAAQMLISWSHSGRCRSEAAFASLAGVAPLEASSGQRSRHRLNRGGDRALNRALHTVAITRMRCHPESRAYEARRTLQGKTHRDIRRCLKRSIARSLYRIMESSARGQAILTAA

SEQ ID NO: 422235 - protein, 354 aa, unidentified
MTIAKYVGMDVHKESISIAVMNSAGKFVMECVIETKASMLLQFINGLRGDVRVTFEEGTWAAWLYDLLKPHVSEVVVCNPRKNALLKDGSKSDRIDARKLAELLRGNHLKPVYHGEQGLRTLKELARSYLTISKDVTRVMNRLKALYRSWGIACAGIQVYAPRQRSEWLGRISEAGVRRRAEHCYEQLDVLRLLRQQVRRDLLLESKKHQAWRLLGLIPGIGPIRAALLIALIQTPHRFRTKRQLWTYSGLGLETHDSAQYRVVEGQLRSKKSVTLRGLNQNHNHDLKDIFKGAATRVSSSNGPLHDFYEHLLAQGRKPTMARLTLARKIAAITLIVWKKEVHFDASYLKSQAA

SEQ ID NO: 422236 - protein, 347 aa, unidentified
MKRIAVDLAKSVYQVAESVRSGQVVQRKRLNREAFRRYIQEQAEPVEWVMEACGTAHYWGRVAQSLGHRVKLIHARYVRPYRRRNKTDRNDCDAMLEAARCKDIYPVPVKPHEQQLLQQLHGLRETWKKSRTQRINLLRGILREAGIEAPASTAAFIRAAHELVDRPELAPLRHQLHIVLAEINLYEQCMAECEQQLKRWHADDEVVRKLDEISGIGLLTASALTAAVGKPERFASGRRLSAWLGMTPNEYSSGERRRLGRISCKGNIYVRTLFIHGSRAALLAAQRCQARTPEKLTELQRWAVETAARIGHNKAAVALANKLVRICWAVWCHERRFNGNWQSTKPA

SEQ ID NO: 422237 - protein, 371 aa, unidentified
MEHTRFIGLDIHKERISVAVAESGRSGAVEYLGEIANEPGAISKLCDRLRRPGKPLAFCYEAGPCGYGIHRQLTRLGHRCDVVAPSLIPTKAGDRVKTNRRDATMLARLHRVGELTPVWVPDADHEAMRDLIRLRSVIRQIVTRARQHLQGFLLRHGRKHGRGTAWRMAYRRWLSTLAFEHPAQQIALQDYVDAVMDAERRLKRVEEQVFGLLPDWNLRLVVDGLQAMRGIALINAVVLVTEVGDFTRFSNPRQLMAYFGLVPGERSSGETVRRGAITKTGNAHVRRALVEGAWAYRMKARIGRHKVDRIEALPKVVRDIGWKAQVRLCTRYRRLRARGKTANVVNVAIAREMVGFIWSIACTIQSAPRAA

SEQ ID NO: 422238 - protein, 342 aa, unidentified
MEELYYIGLDLHKKIIAYCIKTASGVIVSRGTVAATRSALLEWVKSLPQPWVAAMEATMFTGWVYDFLKPHAKQLFVAHPEMLKAITAAKKKNDRADAEKICDLLRVDLLPLCYMAPEEMRELRRILRYRNHVVRMATTVKNKMSGLLMEVGAEYSKKRLHGRTYFKNLLETVEDVPSSVKELLNLSRAGVELFAAVQKKLLAALRENELIRERVRRLMTIPGVGEVTALTWTLEIGDPDRFSIRQAISYCGLCSAQKESAGKEIRGPISKKRNKHLQAVLIEAAKLAPHWNPRLAEIHERELTKGNRNRATLAVARKLVTYLLTVDKTGKDFVLTREADAA

SEQ ID NO: 422239 - protein, 381 aa, unidentified
MSRQLAAPAAKLSALMNKQLTAKSIEQGSGERKSNRVLKLGLDVHYRQVTVAMQEEEGRIKAVGRMGHDGFENWVERKREAGWEIYSCYEAGASGYWLHRELEQMGVKNLVVAPKAMGQDKRQKTDRRDSAELVDQLDRYLRGNRKALSAVAIPTTEQEQKRALLRYHRQIMADRTRYEARGKGLLCAQGIEVQGKWWQPQAWKELKTHGRFQGWMETQLKGWRRKLLSAEQEQQKLRKQIEALAPALLPKGVGAYSAVALEYELKGLARFKTARALSSYTGLCPGIHSSNGRGKEGSINRCGNAAVRWNLVEMVWRLLKWQPDYQPVRQLGAGLVRSKRARKRLVVKAARQLAIDLWRLETGRVTAQELGLVMQPSPKTK

SEQ ID NO: 422240 - protein, 345 aa, unidentified
MSMVKTPAITGGVDTHADAHVVAALDGIGGLLGVSEFPATPAGYAQLIAWLQGFGTVCLVGIEGTGSYGAGLARHFATAGIRVVEVDRSDRQDRRRQGKSDPLDAVSAARAALSGRAAGAPRGRDGQVEAIRALMVAKRTARAQRTQTINQARALIITGPDDVRTRFTGQTPGELVAELAALRPRTGSMVRYHTLLSLRELGRRAQYLDDQLTRLDQLIVPLVTARAPCLLSLFGVGPDTAAMLLIAAGDHPDRLRSEAAWAHLCASAPIPANSGKTKNRHRLNRGGDRQANHALWRIVITRMGSHPPTRAYVARRSKEGLSKLEIIRCLKRYAARETYRYLRPS

SEQ ID NO: 422241 - protein, 419 aa, unidentified
MAQRHDKPIISVVHPICCGLDVHKASIAVCCVATAADGSEDMEIAEFDTFTDDLIRLRDWLIERDCPVVAMESTGVYWRPVHNVLEAYVKVVLVNARHTKHVPGRKTDLADSQWLAGLLRHGLLRGSFIPPQQVRQWREMTRLRKAYQESLADFKRLIHKLFECANIKLGVVVSDLFGATGRYIMNLLATQEAELSADDIAAGAHGQLKQKINELCRALQGFFTDHHRYQLRLLLATVTELEHQSEQISQRVKELMADHYPVLSRLQEIPGVSEVAAASILSEVGATLDEFPRCAALTSWSGLCPGNNQSAGKRKSGRSPVRAHRLKTIMVEVAWSAIRKPGSYYKDKFQRLRARRGAKRAIVAIAHRLLKAVYYIIKHSQRFRDLGAEYLTHKHQASKLGSLKKQAKLLGYELTPLAA

SEQ ID NO: 422242 - protein, 352 aa, unidentified
MQCIAFDSHKHYTWALVQDETGKVLREQRIDHARGALQGFLEEFEPGSPVAVETIGNWYWITDEIEAAGMVPQLVNARRAKLMSGSINKTDKLDARGLNRLQRSGTLPTVWIPPRELRDARELPRTRMVLVRQRTKLKNRIHANLAKYGLTSKGTSDLFGVRGRKVLEEQLTELPPETRYATQCLIEELDHLQQEIKGLEERMAEQFGESEPLSLIQTLPGVAFILGVVILTEVGDVERFPSAGHLASYAGMTPRVHASGGHVRYGRTRPDVNRYLKWAYAEAADASMIHRRCHPERHVSHLYERVKRRRGHPKAIGAVGRHLAEATYWMMKKSEPYRDPAAERTEEPKREA

SEQ ID NO: 422243 - protein, 427 aa, unidentified
MQEVTDEPLYRDRVCGIDIGKAEMYATIRVPSDKNPARRASETRSFATTRRGVQELADWMRCWQVPAAVMEATSDYWKGPFYRLEAEGFECVLADARQVKNLPGRPKRDPSDSSWLAQCFERGSVRPCFVAEPEFRVIRLHTRYRRDLTEDRTREKNRAEKLLESAAIKLSSVVTDLHGVTGRDIMDHLIAGERNPRTLAQLARGRARVKIGELEQALDGAEFFTSRHAALLQAMLARIDQINAEISELSAIIEDLLAPWEEQLQQAESMPGWGRISAQDILAETGPDMTRFPTGRHLASWCGRTPLDKQSGKRHGQARHKKGNKYVAGATGETAISAGKTQTREGARYRKLARTRGKNKACVALGNTQLKVYHKLLSNPGMRYEDLGPDYYDNPANVRRQLNALEKRARELGYALVPDLTGCPEAA

SEQ ID NO: 422244 - protein, 360 aa, unidentified
MNATTVAVDLAKNVFQLAVADGQWHVVESHRLTRAQFERWFPNREVSLVIMEACGSAHHWARWLNGLGIEVMLLPAAYVRAYVKRNKTDAADALALLEAARCADIVPVRVKSVEQQALQALHRTRSLWMGTRTSRINALRGFCREFGLAVPQGARTGIEAIARTLADPHTPIPAMIHRAMRFLVEEIRLLELRIGQMERELSELAKHSPACTTLLSIPGIGLLTATAMVAATGGSVSHFKDARHFASWFGLTPREFSSGNSRVLGRISKKGDRYLRMLLTHGARAVLRAASMARQAGKTLDGLRGWGLAVQERANHNKAACAVANKLARICYATLRDGEPYGTPSRLAHKLNRSDFAIAV

SEQ ID NO: 422245 - protein, 378 aa, unidentified
MPDVSSVAPEVVRKFVVFDVHKNSLVAGVLPPSGGAPEVERVENTERAVRRFVKRQGGPDGLAVAYEAGPGGFALYRLLSELGVACDIIAPSLVPVRAGDRVKTDRRDAKKLVRLYRAGELVFVRPPSVEQEGLRDLVRCRDDVGRARTAARHRVAKQLLRHGRVFREGKKSWTLRHRAWVRRQRLDDGLAQRALEHALAHLDSLDAQLAAIDSELEQIAGQAPWCDPVRWLTAFRGIGIRTALGLLAEIGDWKRFGHPRELMSYLGLTPSEYSSGDQQHRGHITKCGNEHARRLLIEAAWHYRHRPRRARTGPDVPPDVSARAWRAQVRLHHRHRTLTGHGKRSTVATVAVARELAGFLWAAMTHQPLRDSQEVAAA

SEQ ID NO: 422246 - protein, 313 aa, unidentified
MNPHIPYLGLDVAKLTLDLSLQPGVTQRTVSNSASGHRKLIKAVRALPGPVHLICEATGGYEHDLLVALHQAQIPFTRINPRQARDFARASGLLAKTDRLDAAVLAEYGRIFQPAPTVARTQIQERLSALVTRRQELIGLLTQEQLRAEHHHDAFVCRHALGLKRTLQKHLDQIEAQIAALEQSDATLRARVERLSSIQGVGQRTAWLLLAALPELGTLARGQAAALSGWAPYNHDSGPCRGPRHIAHGRPLARTALYMAALVAARCNPVLRPLYQRLRIAGKPAKVALVALMRKLVELANLLLKNPQLALSK

SEQ ID NO: 422247 - protein, 309 aa, unidentified
MNIHPDAIGIDVAKHHLDVFDGRTAKLMRLANDPLAIETWLKTIGERRRVIFEATGAYDEALRRGLTAAGVAYARVNPTTARHFAKAAGFLAKTDQVDARMLAAMDALSPKPAEPRTAAAERLARLHKRRDQLVLARKQERTRRRETKDAELADGIQRHLDFLDEEIKALETQIARLIAQEPTLKRDAKLLVSLPGVGSVTGVCLLALMPELGQRCPKTIAALVGLAPINQDSGLRRGQRTIRGGRKRVRDALYMAALSAIRSKNSRFYVDYQRLRNSGKPAKLALIAIARKLLVTANAIIRDQQPFAA

SEQ ID NO: 422248 - protein, 326 aa, unidentified
MTALSASDNTFIGIDVGGTSFEAAWHRGGCTQHANRPDAIAAFVEHLHAGPPIERIVIEPTGGYEKPLVRALRRAGFPVEMIHTSRFKAYRELVGTRAKSDTSDARLLAAYAAAPDEVRGRKANHVVLPEDAGREQLAELAARRDQLKQMIHAESCRLATVRNEEIRREIALHLQALQASAHNIHAAMMRLVRQRDDLNRAKTLLKTIKAIGDKSALTMLALLPELGHIDNKAAAALVGVAPFVRKSGTMNAPARIYGGRAAVRNAIYMAAVTATRHNPVLKPFYERLIAAGKPVKVALVAVMRRLVVFANAVLKSGQPWKGAIAA

SEQ ID NO: 422249 - protein, 359 aa, unidentified
MNATTVAVDLAKNAFQLAYADANWKVVSTSRLTRSQFQRCFHNSSVSLVIMEACGCAHYWARQMQSLGIEVRLLPARYIRAYVKRNKTDAADAAALLEAARCADIQPVRIKSVEQQALQSLHRTRSLWMSTRTSRINALRGFCREFGIDIAQGARVGLEQIARALADPNSLLPQLLRTSMRSMLDEIRLLEVRISDLEKQLGELARQSAACTTLLSVPGVGLLTATAMVAATSGEVSHFKDARHFAAWFGLTPKEHSSGSTRRIGRISKRGDRYLRMLLTHGARSVLNAANVATRMQRPIDPLRRWALQIQQRSNHNKAVCALANKLARICYAVLRDHEPYGAARLKHKLQRASFAMPA

SEQ ID NO: 422250 - protein, 420 aa, unidentified
MSEMFDWYVGIDWASEVHQVCLVDDRGVVRGERAVRHGGEELAALAAWLIATTGAAPERIAVGIELPHGPVVESLMERGFAVHAINPKQLDRFRDRFSVSGAKDDRRDARVLGDSLRTDTRCFRRLKPDEPRLIDLREQLRMTEECKHERIRLTNRMREQLWRYYPQMLDLSDDLSAAWFLDLWALAPTPAKALRVRESTIAKLLKKHRVRRFDAAEVMRRLRRPALTVAPGTVEAASVHVSALRDRLRLVTRQIAAAERRVDRILTELAASPEEPEAAPGQPPQQSDVTILRSLPGVGRIVCATLLVEAGGPLKAGDHQALRALAGVAPVTRRSGKSCVVLMRQACSQRLRDAVYHWSRVAVQCDAACKARYQALRKAGHSHGRALRTVGDRLLETACAMMRSRSLYDPQRTAREPQAA

SEQ ID NO: 422251 - protein, 343 aa, unidentified
MQIRSVGIDLGKTTFHLVALGDNGKVLLKKKFTQKQLIAFTANMQTCLIGMEACSGSHFLGRALREQGHDVKLIPAQFVKPFVKSNKNDFIDAEAIAEAVDRENMRFVPIKTDDQLDLQALHRVRDRLMTRRTALINQIRAFLLERGIVFAKSPIRLREALPEVLENVNENLTPRMRNLVAMLWSEWKDLELQIVEMNDEVERIASSDDACRRLRQIPGIGPLVATAIVASIGNGAAFRKGREFAAWLGLLPNQHSTGGKVRLYGISKRGNSYLRKILIHGARAVVLRSKRDRIAMGAWMTSLETRAPRNVLIVATAHKLARIAWAVLSTGQDYRAVPEALTV

SEQ ID NO: 422252 - protein, 387 aa, unidentified
MKRDLEKSNGGRTVVGIDPCSEFLQLAILAPNKETEFKKLPLSPSITEEIVKSTEPATTQIAIESYGSYGKLFVYDLLRKGYDVREVNPHISKKLSGLYSEEHSDQKDAESLAKALLLIPDLPKILITDKKQWLAKLTRTRRKLVKDLNGYLNRLHIALTESYGVVYKSLFKILFAKKALKFFEDYPTINDSISDNDAKKRLGKENRDLLIQAGKWEDDYYLDTLRTEIRGLIGIIRSINNTKMALEENIKEIADQVEEMRILRTFPGIGGIAGATLLSEIGDIERFSQESYLSAYCGVSPVIWQSGTGRIRTKRRKRYSRRLKGILYFISLTQIRLNPESRAYYQRKRKEGKTHWQAMNALSRQLIKIIYYMLKNKEPYRREPLVN

SEQ ID NO: 422253 - protein, 346 aa, unidentified
MEGYAGQQFVGIDLHRRRTVLVRTTAAGEVLESTRIVNDADRLAEVMARAGESPEVVIEATYGWYCAVDALQDGGAKVHLAHPLGAKAFEYRRVKNDVRDAADLADLLRMGRLPEAWIAPPATRELRELVRHRAKLVGLRSHCKAEIHAVLAKCGVQVVTSDLFGVDGTALLDRLKLPAPYAARIASLRRVIDLLEFEIDVFAHLIRGRLAHDPGYTAVQTIPGIGPTLGAVLVAEIGDITRFARPEQLSSWAGLTPKHHESDTHVHRGRITKQGSRLVRWAVVESVQILPKTTVVGMMREQIGARRGRGIGVVAAARRQLEFVFYALRDHHVRALTKQPRLSSAA

SEQ ID NO: 422254 - protein, 343 aa, unidentified
MDYFAGLDVSVKDTSVCIVDSTGKIVREVKVASEPDALLAALRNPAYDFKRIGLEAGPLSQWLFSALAEAELPVICVETRHMRAVLKAQINKTDRNDARGIAQMMRVGLYRPVHVKTLRSQKLRMLLTHRKLLQAKAIAVENDLRATLRNFGLKVGVVGRVKFETRIKELIESFPDLVALVEPLLVVRRVLREQIAILHRRVLAAVRDDEVCRRLMTVPGVGPVVALTYRATVDVPARFRKSKSVGAVFGLTPARDQSGERDRPGAISRCGDEMMRTTLYEAAQVMLLRSAKWSWLKAWAMKIAKHRGMKKAIVALARRLAVIMHRIWTDGSEFRWTRGAAAV

SEQ ID NO: 422255 - protein, 419 aa, unidentified
MSFKIIKNNCCGLDVHKTWIFACIGITDSNNRTEYKQARFSSFTKGLNELCDWLAKYNCKDVCMESTGKYWIPVFNILEQRSLWVTLSHPKYTKPMKGNKTDRKDAKWICDLYMCGMVKPSFIPPADIRELRALVRYRFKLTCMITGEKNRAQNCLTVSNLKLDDVFSDVFGKSSRSITEQILQHPGETFDVAPFVDGRCKTPIVEIQAAIDGAISKEQAVKLRQCLDHIDELNKHISEVEQEILRLSDKYEAALNLIRTVPGFDKNPLTAIQVLSEIGGDMSVFPTAKHLVSWAGCCPRNDQSNQKIKSTRISRAGSYFKPVLVQVANALIKSKKHPEFTNRYKRIKARRGHKKAIIAICRMILTAIWHILTDLKPYTPEGFLESRPVKEEKVLSTSQALNLLKQRGYIIKDEPLAVS

SEQ ID NO: 422256 - protein, 320 aa, unidentified
MTLTLGIDVAKAKLDVALRLPTGQIRSTIIANTDAGFVELQAWLAPHDRTALHVCLEATGVYWEAVAETLAEAGFTVSVVNPARIKAYGAARQVRTKTDAVDARLIADFCASQHPPAWTPPPPAQRELRAWVARREALVVMRTQEQNRLPVAHPSVRPGIEALIAHLDRVIAEVEAAIRQRIDDDPTIKHQRDLLDSIPGLGEKTIPVLLSFYGGPERFDHARQAAAFAGLDPRQHQSGSSVHGKPRLSKVGHAGLRKALYMPAMVTLHKTAWGRAFRDRLAAAGKAPMVIIGAMMRKLVHVAFGVLKSGQPFKPALHGA

SEQ ID NO: 422257 - protein, 455 aa, unidentified
MKTKKQKDFEQMPVVNAKAAGIDVGSKTHFVAVGQQKDEVREFGCYTSELHELCNWLMEHSITKVALESTGSYWQPLFIMLQAYGLEPILVNGRFTKNVKGRKTDVLDCQWIQKLHSLGLLEGSFIPDLFTETLRQYCRHRQSLLENAASYISKMQKALRMTNIRLDVAVSDITGVSGKMIIEAIISGEKDPVVLASLVKYKVKKSKEEIIKALTGEWREEYIFELRQCYEVYNYFHGKIAECDKHIEAHLNQRIEDNEKLDGEARIEYLGKDKYLNKNDPKMNLQRISYQLTGGVDLSVIAGVGSTTIITLLSETGIDLSAFPTARHFTSWLRLAPNKKVSGGRVISSRTLKGKSRLADALRHVAVAVGNRLKEGSLHQFYRRIAYRKGKLAAVTATARKIAVIIYNMLTKRQAYKPIAETEYLEKIRMAQVKAMQRRINQLGVRPDELIFASC

SEQ ID NO: 422258 - protein, 386 aa, unidentified
MQTVADRPEAPTAIRTDLGAIFVSLELSRSTWLITSLSPGGGEKMSKHVVRGGDVAGLLERFAQLREKTRARTGKVFSFVVIQEAGLDGFWIDRVLQNAGIESHVVDPASIATSRRRRRAKTDRIDGEALVRALLAYKRGEPRVCAMVKAPTPEEEDRRRLCRERKVLIAERVRHVNRVKGLLFSQGISGYEPLRRDRRGRLDTLQTGDRRLLPDHLKAQVLRELDRLELLLEQIKAVEAERDVLLAAQQAPAPAAMLLDIKGIGPEFAAILWSEGLFRHFDNRRQVASYAGLAPTPWQSGSVDREQGVSKAGNPRLRTTLIQLAWLWLRHQPQSALALWFEERVRRNGGRLKKPTIVALARKLLVALWKYVTAGVVIEGAVMKAA

SEQ ID NO: 422259 - protein, 356 aa, unidentified
MSIVAHSYPFVVGVDTHAKNHVYAVLNALSGELLQTRNFPTTSAGINRAIAWVARLTGADLAALWVIEGAASYGALLAGAVGAAGYPVVEAARMDAKARHGVGKSDRLDAHRIAAAVLPLEEQKLRRPRLNEGVRAALRILVCARESMTTDRTRATNALTALLRVNDLGLDARKPLTAIQIEEVSRWRAREEPLALSVARSEAVRLAKHVTKLGADIKSNNNQITELVEISEAAPLLQETGFGPFTSAVCLIAWSHPGRVRSEAAFASLAGVNPIPASSGNTIRHRLNRGGDRTLNKALHMIALSRMAFDAQTIDYVEKRQADGRTKKEIRRCVKRYLARRIYRTLNATNLMPCGA

SEQ ID NO: 422260 - protein, 360 aa, unidentified
MIRQRTSIGLDVHARSVLGCALDGETGEVIERRMTAHHGEVLEWARSLPGPVSAVYEAGPTGFGLARALLAAGIDCQVLAPSKLIRPAGDRVKTDVRDARHLARLLHLGEVVSVAIPSLAQEAARDLVRAREDCRGDLMSARHRVSKLLLRQGIVYHGGEAWTGKHEQWLRKQQFGNAGQQAAFDAAFDAMLATVDRRDRLDHAIAEMAADSQFTGVTERLQCLRGISTLTAFGLAVEIGDWTRFTGRTIGAYVGLVPTEYSSGDTRAQGGLTKTGNGHVRRLLIESAWHHRKPYRPGQRLRRRWATATPALRARSHAANRRLHTRWVRFDQRHKRPVIANAAIARELAGWCWSVAVLDG

SEQ ID NO: 422261 - protein, 410 aa, unidentified
MDVIVQCCCGLDVHKRTVQACVRRVDGQGQGQEQIRSFGTTTGQLLALSDWLGQQQVSHVAMESTGVYWKPVWHLLQGQFTLLLVNAQHIKHVPGRKTDVKDSQWIAQLLQYGLLHGSFVPPSSQQQLRDLTRLRTQMIARHSQTANRIQKVLEDANVKLASVASDVLGVSGRAMLQAMIDGQSDPQVLAGYARGRLKAKAAALREALEGRVDGHHRFLLSLLLEELADSERLLERLERRIEEAMAPFASELTHLDEIPGVDARVAQVIVAEVGLDMSRFPSAAHLCSWAGMCPGSHESAGKRKSGRTCKGNRWLRAALVQAGWAASHTKQTYLSALFGRLVGRRGKKRALVACGHSILNSVYYMLRDGVGYKELGSGHFDELAGGRMTRNLVRRLEAQGYRVTLEKQVA

SEQ ID NO: 422262 - protein, 340 aa, unidentified
MSLVMGLDQHRAQISAEWIDTMTAEVFRARIAPADRAGVRKFLTRFAGEDVEVALEATTGWRFLAEELERVGAEVHLAEPTETSGMKSKKKRAKTDWADARHLRELLLLGRLPESWIPPAHILDLRGRVRLRHTLSHQRTEWQQRIQAVLYHHGAPQRRDLLTLEKRQWLARQKLPAAAREQVTIALEMIDALDIQLAPFDVALRAYARKQPGCRALIDQIYGVGELTSVTILAELGDARRFGSSRDTVRYSGLDITVYQSDQRRAPGHLSRQGPPALRWALYEAAQRARFPASPDRGYYLQLAERIGGNRACLALARKLLKRSYHILKALGDDALKPAA

SEQ ID NO: 422263 - protein, 319 aa, unidentified
MHCIGVDVSKQELVTFDGTRERVFPNTRGLSEFGRFLRRSKDALVVFEPTSTYSRRLETLCRTKKVACCLLNPRVVPHLRLVGKGRSKTDSTDAELLYRYGMERGHREAAPLENDALAEAIQARLACYRVAQKARVAYQNVLEALSQDPATSEALLADLRVEIAALKEKEKRHLDAAQQRVEGDDEASQRLGTLLSIPGVGPITALTLLSLFRKSPDANRSQIVALVGFDPIQIQSGTSVHGKSRISKRGNREVRKRLFEATLSAARYNPCIRSIYRRLKEAGKPEKVARIAAARKLLLIAHAIYKSGRPFLHPTEKES

SEQ ID NO: 422264 - protein, 364 aa, unidentified
MKEKKVEPRFIGIDLGKRTYEMAIVGKGGKVTKSNGKTYVEGRQKLYQKLRQTDKIALEAGSLAFVMAKEIEAAVGCQVYVLNPFRLSIIYKSMKKTDKEDALKLAHIIEDFQEERLPLVPVPSDKEMERRKILAGYRRVQQSRNREINRLHALFVNQGITTIVRKDLSTGEERKTFIEKLNGLDREEANYIVEVLELHEKRIEALEKKVKEESKEDEMIQRLQSIPGVGPMVSFAFAAHVGAERFENAGQLSNYIGLVPRVYMSGDTVRYGSITKRGNGYLRALLVQAAWALTRTRKGGGLKERFEHMTMQRAIGKKKSIVAIARRLAEIMYVLMRDGTKYEFRPFIKNGEVVRDISEIKFCA

SEQ ID NO: 422265 - protein, 343 aa, unidentified
MQVTTLGIDLAKNVFQVHGVDAQGRQVFSKTLRRSQLRNFVAQLPACRIGLEACGSAHYWARELQALGHEVRLMAPQFVKPYVKTNKNDRADAEAICEAVTRPNMRFVPIKTPDQQAVLALHRVREGQIKARTAQANQVRGLLAEFGIVVPQGMTTLFRELPGILEDAENGLPDLFRTLLADRLEELRRLDQAVKEQERQIQAWHRSHAVSRRLAEIPGIGPISATALVAAIGHARHFKNGRQLAAWMGLVPKQHSSGGQSNLLGISKRGDRYLRMLLIHGARSALLADQRRGEGGDPWLEGLRQRRCPNVATVALANKNARTVWALMAHDRTFDPGLRGAAA

SEQ ID NO: 422266 - protein, 391 aa, unidentified
MIYVGIDVSKDKHDCYIVNSDGVVLADVFSVENNLDGFDLLLQRLKSVAPDLLNVKVGLEATGHYSYNILGFLLDKGLATFVLNPLHTNLFRKSTSLRRTKTDRVDARTIAAMMSSGIVLKSYTAISYHNEELKSLSRYRFDKVRQRAKLKQAVSRLVTILFPELEKLVPSLHIASVYALLAELPGAKQVASCQLTHLTNLLSAASKGHYDRSKAVELRNAARRSIGSTMPAKSLELQHTIRLIRELDAEINEIEAAIKQFMDQIASPILTIPGISYRMGAMILAEIGDFARFDSPDKILAYAGLSPSTYQSGKLDNAYAHMEKRGSRYLRYALYNAAKYVCHWDASFCAYLAKKRAEGKHYNVALPHAAKKLVRLIFALQRSGQPYCPTA

SEQ ID NO: 422267 - protein, 320 aa, unidentified
MQTPTEVLNIGADVAKDEIVVACSQGSFPVRKLANQRSALLAFLKDLPAGSRIGMESTGAYHELLADAAHKLGFVVFVLNPKDARHYAKAVGLRGKTDRVDAELIARMVAHEHTKLHPWIPPTAEQREMARLIKRRAKLSSLRQALAMSLKGLDGFATDLKALRARFDQVLVRIDQRVKALVEASPDRKQHVTHLRTICGVGPVVSAALVNTLERVPLKSADAFVAFTGLDPRPDDSGQHRGKRRLSKRGPAELRRLLYVAAMSAKKKQAWKPLFEHYRAKGLSSTAALVIMARRIARTAWSIYTYKTDFDPARLTKSLT

SEQ ID NO: 422268 - protein, 324 aa, unidentified
MKMSKPDTVGIDVSMLWLEVVVLPRGVRFSVTNDAAGWAELVQKLRPWSVAAVGLEPSGGYERGVIRALLAAGLSVRRINPNQLRQFARARGVLAKNDRLDARLIAEYVAIMPTRSVQSDPAAERLAELVTVRRQLCDEHVSVANQVSHLEDAMLRRLSKRRLARLEADIALLDNRLAEMVGSDAELARRYRRLVTMPGVGPTLAYTLLALLPELGQMSRKQLAALVGLAPYDFDSGKLKGLRRIYGGRTPVRNVLYMAALSASRFNPPLKRFHQRLVAAGKKPKVVIVAVMRKMITTLNAMLRDRADWTARCDTGRHTVPATT

SEQ ID NO: 422269 - protein, 355 aa, unidentified
MKKIIQEDNIVNLIYPGIDFSKETFDATLLDCRNSELSEAVQSAVHEKFTNKKEGFQAFLTWIKSFVKKINSDELLLCGEKTGKYSLALSNFLYAKGYSIWLDSGLRIKRSFGISRGKSDKADSLKIALYAYRYQDMAVCYVPLSKNVSRLKELFLYRQHLVSQMKAMAVRKNITDDFKKELGDVRFIVDSATKIIQQIKATIKKCEEKMQELIEEDEELKTTHDSITSVKGISLINAAAFIAYTNNFKDFGGNAKKIATYWGVAAFAKESGTSVHKVARVSKIASKMLKSLLTQAARIAVRWEPKFRQYFEHLISRGKHQGVALNNVKNKLIHVITALAVSKEKYNPEYECINR

SEQ ID NO: 422270 - protein, 355 aa, unidentified
MSQEKYIGMDVHQATISVAVLDSRGKLIMESILETKAATILEFIGGLHGSLSVTFEEGTSAAWLHDLLKPHVSRLVVCDPRKNALLKDGSKSDRIDARKLAELLRGNQLTSVYHGEHGMRTIKELGRSYLTITKDLTRVMSRIKALYRSWAIPCSGTSVYAPRHRGEWLGKIPEPGVRLRAERFYQQLDLLQPVRQQARRDLLTESRKHHAVKLLRQIPSIGPIRAALLVAQLQTPHRFRTKRQLWAYSGFALETHDSGEYRYVRGKLQRNRERMTVRGLSNNHNPDVKNLFKGAAISASTHPGPLYDFYIALLAKGMRPTMARLTLARKIASITLTIWKKGVDFDATQLRGQEA

SEQ ID NO: 422271 - protein, 384 aa, unidentified
MNKHNILFIGLDTHKEFVEVAYIEGQRGTQAVHFGRISSAKTAIVKLAKQLQSKYSQATLHFVYETGPCGYWIYRLLTSLGHCCYVVAPSLIPKKPGDKIKTDKRDALKLAKLLKTEDLTPIYVPEPEDEAVRDLSRARETAMKDLKDAKYQLKALLLRNNINYAGTANWSAKHLRWLTELVLPHPAQQIALQEYLHTINERVARLKRLDNELTHQVQAWRYYPVVKAVQAMRGVRLLVATGLIAELGDIRRFDHPRKLMSYLGLVPSEHSSGGKRHIGAITKCGNGRARRLLIEGAHSYRYPANISSDLQLRQEGLPKAIVDKAWQAQLRLCRRYQRLMHKGKHYNVVVTAIAREMIAYIWAIAKQVVLVDVNPKLRLARVPA

SEQ ID NO: 422272 - protein, 360 aa, unidentified
MDKHKYVALDVDSANIVAGVYDSKGKTVMQCCLRNEGQAIQEFLKLLPGTVHVTFEEGTQAVWLYELIRPLVAEVVVCNPRQNKLLKAGNKSDRIDVAKLGKLLRLGELRPVYQGPSATQGLKQLVHGYAALVDDTTRVKNRLKALYRGRGLSCKGKRIYGREQRQQWLSQLETKELQRRATYLYEELDCVLRLRVEAEKVMCRAARKIEAYKWISSTPGLGAIRTAQILATAITPHRFRGKRQFWPYCGLAVVTRSSSDYEWVDGGARRKRKPIQTRGLNQNYNRTMKAVFKGAAVSALQQHQEFQEYYQRLCGKGMRPEMAQLTLARKLAAIVLILWKKGELYDSERLNQAAPGAGQQ

SEQ ID NO: 422273 - protein, 366 aa, unidentified
MDEGTTYVALDDSKRKVVVAILRPGSSEPEQRELPKEPQLIRRLFQRLTREGPVQACYEAGVSGYDLHRQITACGVGCQVMAPALTPRRPGQRIKTDRRDAIKLVRLFRAGELTAIHVPDEAEEAVRDLLRCREDGRRDVLRWRHRLLKFLDRHGRLYVTGKNWSQRHWTWIRAQHFELPTLQRTFEATLFALEQALARVADLDKDIAALAATEPYRTPVGWLRCFRGIDTLSAMILLAEIVDFQRFEHPRALMAYLGLVPSEYSSGEAQRRGAITKAGNTHARRVLVEAGWHYRHRPTVSGALRQRTAGQPPHIVGHAWRAQQRLHRRYRHLLGHGKRPPIAVVAVARELVGFLWAAMTQRVVAA

SEQ ID NO: 422274 - protein, 342 aa, unidentified
MYTLAFDNHKKYALATALDKNGTYMNSAKLTMKKESFEQYIKGFDGPCQAVIEAGYSWGQVYDILTELGVDVTVAHPLRIKAIASAKIKTDEIDSRTLAELLYANLIPEVYVPSTDIRQQKNILRQRCWLVKLRTMVKNRTHNILNRNHIETPFTDSFGKGGRKFIESVQLPDSEKELLTQDLSLLDYLTKEIKITEKWIGECLKDNPMYKIIMSAPGFGETFSGLTTLEITDIARFKTPGKLFSYAGLVPTTYASGGKVYHGALLPTCNKWLRYAFIEASWSAITKSDYFRSLYLRVKSRKGPNPAIVTVARRLCEVIFYCLKEQRNYYEKPYIYYNQKSA

SEQ ID NO: 422275 - protein, 432 aa, unidentified
MEPNYRRCCGIDIHKKSVTVCVLPPVDKPESGIRKRNFPTFTRDLKQLRTWLKNCKVTEIAMESTGQYWRSVWNLLEGHFEKLVLVNPQHIKGLNGYKTDPKDAEWIAGLLEGGKLKGSWVPPREIRELKDLTRQRVHVLEDMNRVKNRIEQLCQAGNIKVSSVATDLFGVSGRKMLKAIVEGKHDAGWMADYARGALRGRKRELELALDGSFTGNQRWLLDRELLQLEWLEAQARVLEQEIERRVVPFAEPMRRLMTIPGIDQKTAWTIMAEIGVDMNVFPDARHLASWAGLCPGNRESGGRRMSGRTRKANRYVKSALCQAAWAASHSKQTYLSAFYKRLQVRKGAQKAVMALAHHLITVVYNVLARSEEYVEMGADYHDQRNKPKVVSRLVKRLTRLGYYVVLDPIVREPGKSEVSRMQMPGTTIVGSL

SEQ ID NO: 422276 - protein, 403 aa, unidentified
MNAVGIDVSKGTSTVAIMRPFGEVVASPFEVKHTDSELSKLAEMLRKLDGETKVVMECTGAYHLPIAYALNEAELFVSTVNPIITHNYDNNSIRKARNDKTDAIKIANYAITNWLKLPRYIPEEDVRHMLKAYSRQYNKYKKINTMLKNNLISLLDSTFPGANELFSSPPRKRDGHEKWVDFVAHFWHCKCVCSLSQKSFTARYRKWCKHAGYNFSQSKAEDVYIESLGHVCVIPMTETTKLLITQAASQINTISETIETIACEMKALAASLPEYPVVMEFRGVGDILGPQLIAEIGDIYRYFKKSSLVRFAGLEPVENQSGKFRGNESISKQGSAHLRKTLFQVMDCLLKQAPANDPIFQFLDRKRAEGKHYFSYMTAGSAKFLRVYYARVKEYLDKLESDE

SEQ ID NO: 422277 - protein, 388 aa, unidentified
MRSAVASRSLTALEQDSTIIAVIEMSQSKWLVAALVPGVERQPLKKLDAQEEGLLKLLHRWRTEAGQAGRAIKRIVVAYEAGRDGFWLARWLRAHDVEAYVIHPTSIAVSREHRRAKTDRLDTELLMRAFLGWLRGEKRHCSMVAIPTIEEEDARRPNRERQNLVTEQTRLVNQMKAIFTRFGIRTFQPMLRKAEDKLKGLRTAEGTPLPENTRAELCRHLARLRVVREQIRAVEQERLRKLAAAPAAEYGPHAMVRLIARVLGVGIETADMLVNEVLSRHWRDRKAIARYAGLTGSPDESGKRRRERGLARAGNARVRCGMIQFAWRFLRFQKDSALAQWFAARTADRRASTRKTMIVALARKLLIALWRLVTSGQVSDGIVLRPAS

SEQ ID NO: 422278 - protein, 343 aa, unidentified
MQEVTTIGLDIAKSVFQVHGVDAIGKVVIRRQLKRRYVLAFFEKLAPCLVGIEACASSHHWSRELKALGYTVRLMPPAYVKPYVKRQKNDAADAEAICEAVTRASMRFVATKTPEQQSCLMLHRTRHLFIRQQTAVINAIRAHLAEFGVVAPVGRRGVEELLEVVADSNEERVPKVARACVGALGAQLRMLKAQILAFDRQIMAWHRSNETSKRLDEIPGVGPALATALVASVADPKAFRSGRNFSAWVGLVPKQHSSGGKDRLGSISKQGDRYLRSLFTAGALAVIRYAKIHGTKHRPWLTALLARRPTKVAAIALANKIARMAWAMMAKGERHKEPAALAA

SEQ ID NO: 422279 - protein, 393 aa, unidentified
MVCVGIDVAKDKHDCFILSSEGEVLADVFTIQNNAEGFDMLLQTIRRCARPEDKIKVGLEATGHYSYNILGFLLDKGLDTYVINPLHTNLYRKSLSLRKTKTDRVDARTIAAMLMSDVDLKPYTDTAYHNEELKSLTRYRFDKVRERAKLKQSVSRLVTILFPELEKLVPSLHLASVYALLIEFPGAKQVAGAHLTHLKAILSDASKGRYGRDMAVTLRDAARCSVGSVMPAKSLELQHTIRLIRKLDAEIEDIETAIQSMMDEMQSPITTIPGIGVRMGAMILAEIGDFSRFDSPDKILAYAGMSPSTYQSGQLSLSGPYSHMEKRGSRYLRYALYNATKYVCLWDPAFAAYLAKKRGEGKHYNVALSHAAKKLVRLICALEKSQQSYRNAA

SEQ ID NO: 422280 - protein, 346 aa, unidentified
MEHQVGIDVSLELSSLCVLDTTGKVIREAKVASEPEALVAFLRGLGLTVVRVGLEAGPLSQWLYDGLQAAGFEAVLLETRHVKAALSAMAIKTDRRDARGIAQLLRMGWYRPVHRKSVPSQEVRALLAARKQMQIKAMDLEQTLRGLLRGFGLKVGDVSRGRLAARIRQLVSGHVMLERIAEPMLTARETLWREFAKLHREVLAIVKEDQVCRRLMTVPGVGAVVSLTYRAGVDDPARFAKSKSVGAFFGLTPKRYQSGETDVTGAITKIGDAGVRTVLHDAANALLTRASKFSTLKRWALEVAKRRGMRRAKVALARKLATVLHRIWADGTEFVWGKDPAATAAA

SEQ ID NO: 422281 - protein, 343 aa, unidentified
MSEISMIGLDLAKNVFQVHGIDASGGVVVQRQLRRGAVEKFFAQQPPCLVGMEACGSAHHWARVIGRYGHQVRLMPPAYVKPYVKRNKNDGRDAEAICEAVGRPTMRFVAVKSVEQQATMAVHTTRALLVRQRTMAANALRAALGELGIVAAQGIKGLRELMARLETANAEIPEMMRGALLVLARHWQGLDADERALERKITQAARADREARRLMEVPCVGPIIASTVLAKVADAKVFRTGRDFAAWIGLTGRDHGSGGKHRPGHISKRGDRMLRALLISGASGYLRHQIRRGVSDPWLRDLLARRPYKVVMVALAAKTARIIWAMLAKGESYRARASASAAA

SEQ ID NO: 422282 - protein, 340 aa, unidentified
MKQFSRIGVDLGKNVFHIHGLESEAGPGATRKLSRIGMHKYFASIAPCLIGMEACGSAHYWARELRAMGHDVRLMPPAYVKAYVKRGKNDAIDAAATCEAVSRPDMRFVAIKTEEQQATLMAHKARDLLVKQRTMMVNSLRGCLAEFGVVVAKGVHRVEELAEKAIEARLPETAMLAANVLLEQLARLDAAKAELTRQIAKAKSDNAVARLLTEIPGVGALFASRVTASVPDAKVFKSGRDFAAWLGLTPRQDTTGGKIKLGAITKKGNRALRQLLVLGAISVLRMAPKRKGVLAEWLSALRARKRGKVAAVAVANKLARIVWAMMTTGEGFRIEVFARA

SEQ ID NO: 422283 - protein, 410 aa, unidentified
MAERFVGIDVALREHRIAVLDRDGEAVGPSFTIVASQDGVTTLLRTLAARGATAAPTLIGLEASGHLWENLEAALVGAGYRVLVLNPLQTRRYRDVVRRKAKTDDIDAHLIAGLLRSGVAQASYVPDEQIQSLRELARLRARLLADRQDYLRQLIAQLDVVLPEHRAVLGDLLTARARGILAQFPTAQHLATASSRAIRRAAEDAGARGFSLDDATSVRDHARRSLYSGKAAAARAHVVRTLVSQLERLTTAMDEVDRAATTLLPPSEPGTGPSDAELLQTIPGIGPHTAATLIGELGALSRFTDARALVAYVGFYPVISESGDHAVPPRMSRIGPRIARHSLYLAAVNAVRLSGEWRTIYLRKKAQGKTAKQALVVVAVKLLHAVYAMLKHRQPYNPSRLLVAPATMRT

SEQ ID NO: 422284 - protein, 354 aa, unidentified
MSQKLNTAIAVIGIDIGKNSFHVVGLDHRGAIVLRQKWSRGQVETRLANIPLCLIGMEACVGAHHLSRRLKGLGHDARLMPAKYVRPYSKGQKNDFRDAEAIAEAVQRPTMRFVATKSAEQLDLQALHRVRERLVSQRTGVINQIRAFLLERGVAVRQGLRFLRAELPDILATRTEVLSPRMARVIEDLTGDWRRLDERIEGLSTEITAIAHQDAACNRLMTVPGVGPIISSAMVAAIGTGDVFSKGRDFGAWLGLVPKQISTGDRTILGKISRRGNRYLRVLFVQAAWVVLIKPKTWERYGLKPWIEAAKKRLHHNVLAIALANKLARIAWAVLNKERNFECISTNKMESRPA

SEQ ID NO: 422285 - protein, 443 aa, unidentified
MCGGSVNAFSSPNLFQGGRILKVVYPICCGVDVHKTFLVATIITTDGITPHYQKRRFSTFNNQILAFKQWLLENNCLDVCMESTGKYYIPVFNLLEDSIRVTVASPKWVAAVKGNKDDVKDSKWIGDLFRLGLVPGSFIPDKDTRILREFTRYRFKLVSCKSGEKNRYQNVFTVCNVALDAVVTDMFGKSASSVTDYIVNSDHFDINHCASLLKGKLKKKADEVLASIDGFLMTDSQKVRARLVKGHYDFLLGHIEKLDSAIDTLAMPINDAVNLFCTMPGVDRDSAITVLSETGVDMSQFGSSKRLCCWGGLTPGNNQSAGKKKSVRINRAGVYLKPMLVQIAHAAVKSTVSPYYRIKHERLVKRRGKKRAIIAIARMILTALFHMLSTGEVWNPSDLTQIDIPPDLRQKELQKTLRKAAKLLIAHGVVSPNVITMPDSVPA

SEQ ID NO: 422286 - protein, 348 aa, unidentified
MTVYIGVDFHARQQTISYLTTEEGAIQHLVLLHDNPVTVRAFYAQFAGQRVVVGFESSGYAAWFEELLEELGCELWIGHATYIRQFAKRRQKNDRRDADLILELLHTGDFPRIHRYSRTTREMLQQLRYRQRLVKMRTMAMNMLLFMASSRGVSLRTQLQSKRGQAKLQQLALPATLGRQRDELLSLLQTLNEKISTIERWLEQQTKADLAVQRLQTHPGIGLLTSICLRYTLEDAGRFANTRKVSAFAGFDPMQDQSDERNRMGAISKQGSRWLRFYLVEAGQVAIRKDADLQRVYQRVARRGGHTKAKVAVARRLLVRAFIMLRDEIDYAEFQRRGVAARSSRGTA

SEQ ID NO: 422287 - protein, 435 aa, unidentified
MTITHPNAAGVDIGSAAHFVAVPPDRADEPVREFSSFTDDLHAMADWLKACWVDTVAMESTGVYWIPLYELLESRGFTVLLVNARHVKNVSGRKSDVLDCQWLQQLLTYGLLRGAFRPAEEVCVLRSLWRQRGMLLRSQGRQVQHMQKALTQMNVQLTNVIADVAGETGQKIRRAIVAGERDGLALAKLKNSRIRASDEDIARSLRGTWRAEHLFALKQAVDAFDFVGTQLAECDLQIEAQLQLLQTHDGDPAKGKKRGRARNAPKFDMRTQLFRMCGVDLTRIDGIDVTTALAVISETGADMSRFPSVKHFTSWMGLAPGTKITGGKSISGRTLRCANRAAQALRLAAAALRTSQSALGAYFRRLCARMDKPKAVTAAAHKLARLIYTLLTKGEEYTDQGQDYYEERYRERVLRHMALRAQKMGMRLVATEQPA

SEQ ID NO: 422288 - protein, 373 aa, unidentified
MPKYSTAFGMDVHLRSTTVCALDADTGEAVTRRFPGNPWGEIAGWMDGFPGPSLAAYESGYLGFAPQRELAGLGVECVVAAVSKIPRSAADSASKNDRNDAARMAKAILAHDISPVWVPSPEVEGIRDLAGAYDGATARLATAKQRLLAFLAKRGFVYGGTTPAGNPRKYWTYDFLRWLDKVRPEDDGGVRTLAALRNEVEAAAEARADLLSEYRAAVDASPIAAEVAALQSIKGCAFALAAAFSAEVGDFTRFRSGRQVTAYFGLAPSQRSSGGSVRLGGISGAGNALVRKLAVEGSWCYAAARHQPKLMPRDTGVPLEIRMHGRKGSERLLRRREEMLARGMPAAKANAATAAELVRWLWALGMMCREGAE

SEQ ID NO: 422289 - protein, 331 aa, unidentified
MKNLLFIGIDVSKLVLDVYILTCKYHFQVENSPLGFARLLEICCGKLAKPRNQLFFCFENTGRYSRMLAVFLEQTEITFSQIPALDIKASKGISRGKTDKADAKDIALYAWRKRDELVPTKLNSPQTSELRQLIALRDKLIKHRTAYKNSLKDLHDCFYEGETDFIRKTQQKMIENLDLEIKNVEQRMDSIIIAMPDWNENFQLITSVRGVGPIISRYLIIYTENFTRFTNYRKFACYAGIAPFEYASGSSVKGRTRVHNCANKQLKSLLNLAAMNAIKTNGEYRQYYLRRQQEGKNNMSTLNIIRNKILARIFAVANRKSPYVDLYKFAA

SEQ ID NO: 422290 - protein, 553 aa, unidentified
MGRRASLLGELAEPPQLCCSGISSLKFPPNQINSNKKGEAPLFNEPSGFHLWHNLWAVCNEAAAETKGASPMKKRNIYQNQSQELLSLFEAAGNSAKVMCVPMDYAKKDHLVMFCNGHGDILRKPFSVKNTPEGIAYIDDQVTRSCRRRGIQKKHVFFGGEDANSFAKNFVSTLRSKGFLVANVNAHDAKKQRGNVQASTDRIDLMGIATMLLNCRANCGPAQSGIYRNLRTLVRHRRKLVQMLTEVKNRVHGIVDELFPGFLNEKNSGIIPFTQSSLYLMEDRFSPKQIRRRRRQKLIEILKRFGTSKAEKTAAKLQQYAAKVLHAPVEYVDTMQLSLAQHVKHIRCLKESVAQMDKEIALNLAQTQGAFLTSVRGIGLVLAAGVTAEIGDLNEQKPLNNLASYSGIIPRVKQTGGSDGKTYTGPVAKRCNRILKDYVVKSAYHLGLHGPQDLMTDYKRRDASGQHANFGMGRRYLRMAINLMRTSQVYLPPNLRKDDYTLEERAGYYLMSWPYLKEKWKKVGAFEAAFAKDRPLGLWRQIVQELYDIKLKL

SEQ ID NO: 422291 - protein, 462 aa, unidentified
MQDSQKRKSSSGNRREIEGLPVIRRRIAGIDIGSERHWVCAPTIEESGREVADFGATTPELIRMAKWLKERNVESVAMESTGVYWIAPHEVLEAEGLEVMLVDTRQLARVPGRDKKTDPVDCEWIQRLHSCGLLMGSFRPQEAVCMLRTLVRDKGNLVAEAGDWLRRMQKSLDQMNVRVHRAVADLQGATGMAIVEAIVAGERDPRKLAKLRDHRCHKSEAAIAEQLSGHWREDHLFSLRQALKMYHSILERISDYEQELLKKLAAMEREECRGQEAPKVNNPQKAHAIRRRGEEPMRHALYRMSGVDLTGIDAIGVATVEVVLTEYGPDMSRFPTEKQFISHVTLAPHRPTSGGKPVKKKKRNSASTRVAAALRMAALSLRHSDTALGAYYRNIARRKKGDVAVFATARKLATLIYRLLRWGQPYVDEGAQAYERRYQQTRIRGLMARAKELGYQLTPTTA

SEQ ID NO: 422292 - protein, 357 aa, unidentified
MGSSNVKYIGLDVHQEAIAIAVLNSAGKLVMESIVETKAATLLEFLHGLRGELHVTLEEGTWAAWLYDVLKPHVSEIVVCNPRRNALLKEGSKSDKVDARKLAELLRAGLLRAVYHGENGLRTLQELARSYLTISKDQARVMSRLKALYRSWGIPCSGRQVYTPRHRGQWLSRIAHPGVRRRAELFYQQMDGLSAVRHTVRGELLAESRKHEAVKILRQIPLIGPLRAALLLALMQTPYRFRTKRQLWTYSGLAVVTHDSAQHRYVDGQLQRSKKPQQIRGLNQNHNHEMKSIFKGTALSASQCAGPLQDFYAGLLTKGMKPEMARLTLARKIAAIALTLWKKGGRFDAEHLKSQAA

SEQ ID NO: 422293 - protein, 427 aa, unidentified
MNESKATRVDAFRQFKRQIRGSKDYLIVGLDIAKRKHHGFFGDANGRTLLKGLIVENSAEGFRHLLSQVRFYMDREALSRVVFGLEPTSVYHKPLAEHLIEQGHLVVYATNEAIKKNRSLIDGRWDKNDTKDSANVADLVAQGKCHYYDLPELRLRDLRSLLLLRKRLKKQQHSCRVRIRNNLVAQYFPELDRFWNNSEAENLAIVRWFLDPESIRQLTCEQFIAKVTTHNGGLRQQRRLRHIWEAAGNSIGCRPGPAMQLEAELLVETLQSIQAQLGRLEKAIRKLAEGFEEYGYLKSIPGFGPYVSAMALAAIGNPHRFENRAQLIRLAGFDLCASRSGEKSKTAVPVISKKGKADLRYALYQAALIASSLTTHFRDYYNRLLEGRQREKGIRTKMRVKLAAKLLVIAWTLMKRKEPFSPAYIQA

SEQ ID NO: 422294 - protein, 352 aa, unidentified
MIIIGVDYHPEFQQIALLDQDTGELQEKRLSHPGEAEKFYRALAVSQKVRVGMEASGHARWFERLLGELQFELWIGDAAAIQSKRGRKQKTDRQDAEHILKLMLKDDFPRIWVPSGENRDLRQLLWHRHRMVQARTRIMNQLQAVAINEGLRCKKRLWRTGRQQLALLRLAPWASRRRHDLLELLDRLNPTIAELSQAIEQEAAKCAEARRLMTHPGVGALTALAFVLIIGDTERFQCGKQVASYLGLVPLEKSSGNRRRLGHITKQGNSLLRFLLVEAAQVTVRSLPEWRSHYFHLLMRRGRKTAKVAMARRLGVDLYWMWREQRDYQSKSSVRTQDSPEQAMVCNRTPRN

SEQ ID NO: 422295 - protein, 347 aa, unidentified
MNKIKLVAVDLAKRCYQVGAIDEHGKLLYNRRYSPAKFALAMQQLEPTVVAMEACAAAHYWGRRLKALGHEVRLVPPQHAKAFRRVHKSDAHDTLSIAEAAQRPGIHFVPVKTIAQQDLQVLGRMRERLVAQRTALVNQARGFAREYGVSFAQRRDVLMAQLPCALADASNELSAIAREALSELLAQIRQIDAQLKALMQRLTALADEDPAYQRLLSIPGIGPTIAPAVLASIGHAQQFANARCCSAWAGLVPRQYSTGGRVQLGGITKNGERSLRVMLIHGARTVLRWADKHSHAQSRWIKDLIARRGKNKATVALANKLMRIVWVVLTQGVSFDMRKAFRPQPAR

SEQ ID NO: 422296 - protein, 425 aa, unidentified
MEPIVERSCGLDVHQATVVACLLVGSANQRPRKEVRSFGTKTRELVELRDWLRENGCTHVGMEATGIYWKPVHAVLEDDFEVVVGNAHHIKNVPGRKTDVKDSEWIADLLRHGLIAKSFVPPKPIRELRDLMRYRRKLIESRTAERNRLHKLLETANIKLASVISDVFGVSGKAMLQAILRGDSTPQQMAQLAKKKMRNKIPELELALEGRVEEHHRFVLEMQLERIAQLDEHIARLDERIDAKLAPYREHHTRLTAIPGVDRVVAATIIAEVGTDMSVFKSAAHLAAWAGVSPGNNESAGKRKRGPARKGNVHLMTALVEAAHGASATRGSFLRDKFQRLKARRGYQRAAVAIAHKILTATYVMLSTGADYRDLGAAYLDAIDTQRVKANLVRRLERLGYDVAISQRLSPEQRPEPTLPPATMG

SEQ ID NO: 422297 - protein, 345 aa, unidentified
MQITTIGLDLAKNVFQVHGVDAEGRVVVRRKLRRAKVREFFAGLAPCLIGMEACGTAHFWARELIAMGHQVKIMPPSYVKAYVRRGKTDAADAAAICEAVMRPHMRFVPIKTEDQQAALMLHKARELLVRQQTMLTNAIRGHMAELGMVAPQGSAKIKDLIAVIQDSEYQSIPVLARAALQPLVHQMQTLDGQVEVLDREIMAWHKTNETSRRLATIPGVGVITASAIAATVPDPSFFSSGREFAAWLGLTPKQNSSGGKERLGRISKKGNTYIRRLLVTGATSMLRYARAKTAAAADWVNGLLQRRPARLVTVAMANKVARIAWAVMVKGENFRVPVRPVTEAA

SEQ ID NO: 422298 - protein, 324 aa, unidentified
MSDSILGIDVSKETLDAYCARGQRKQGRTFANSPDGWKLVRAWLKAMGSKQAHVCMEATGRHSLGVALALHEAGHVVSVVNPAQIRDFARTKLGRNKTDKVDAALICEYAELFQPEPWTPPSPAMRRLCELQTMRAGIIGSRAEWKNRIGSGLGDSTATKLAAATIDHFTSQLEAIDRAIGETIEQDAELRGRRDLLLSVIGVGETLAASLMAEMPEPGVLRRSGEMVAYAGLNPSHHRSGTSIDRPTRISKIGNATLRSSLYMPALSAMRFNPAVAILVARLKSAGRLKPKQIVVAAMRKLLVLCFGVLKTGKRFDLAIAMPA

SEQ ID NO: 422299 - protein, 349 aa, unidentified
MSEYDGKQFVGIDLHRHRSVIVRQDADGNRLSVRRIVNDPVALAQEISQAGTEPEVVLEATYGWYWAADVLAAVGATVHLAHPLGIKGMSQRRVKTDLRDATDLADLLRLGRLPEAWIAPPELRQLRELVRHRVKLVNQRSGLKASVHAVLAKQGLTIGVSDLFGVRGQALLAAAPLDAAYRARVNALCRLITEFDFEIDLAGRLIGTQLARDPVYGPGYRVIQQIPGIGPVLAGVLVVEIGDVHRFAGARQLCSWAGLTPKHRESDLHVHRGRVTKQGSRLVRWAVVEAAQKVPASCAWLAGARAGITVRRGRNIATVAVARKLLTLVFYGLRDGHIRALQQADRAAG

SEQ ID NO: 422300 - protein, 387 aa, unidentified
MSKQNDLSKSLVALDQDATLIAVVEMGQASWLVAGIVPGLDRCPLKKLGPDRDALLQLLHRWREEAVKAGHAINRIAVAYEAGRDGFWLARWLRAQAVEAYVIHPSSVPVPREHRRAKTDRLDTELLKRAFVGWLRGEPKHCSMAAIPTLEDEDARRPSRERQTLVGERTRILNRLKANLARLGIRGFRPNLARAEGQLEALRTPEGAAIPKNTLAEMRRDMDRLQVVKRQIKEIEKTRAKRLSKEPSEQRDAMVRVLGRVVGVGVETADMLVQEVFSREIRDRRALARYAGLTGAPDESGQRRRERGLAKAGNSRVRRGMIELAWGHLLHQKGSPLTEWFWKRASDHRGGTRKTMIVALARKLLIVLWRLATTGETPAGLQLRPAA

SEQ ID NO: 422301 - protein, 341 aa, unidentified
MKNLFIGVDFSKEKVDVAIIFADGLTETAPRVFNEFKTTVSGYKQLVKWVEQNSYGIDSSLWLFCGENTGDYSKGLCNFIYGKGYDMWLENAKSIKDASGLRRLKSDRADASMIAEYAMRNYDKAVMYEPLSESLAQLRELFLYRQMVVRHRCSFQVRRGEKRLTMEKSPVKTMISQSGRHIVSELNKEVEKIDKRIAELIKSDEELTEVFTIVTSVPGIGTQNAVCLMVYTDNFRRFNYDSRKISCYYGIAPFGKDSGTSVHSDPHVHYMANRQIKAMLTQAALAAVKFNPVMARYYMRLVERGKKKQVALNNVKNKLVHLVTAMVRNRQTFTPEYKISA

SEQ ID NO: 422302 - protein, 363 aa, unidentified
MARTSLWVGLDVGADETTVCATDDRGAVVFELLVASSPAALHAVLKRDKRRINLIGLESCSFGIVLFRALLKLGYPVVMFEARQASKFLAIRKNKTDKNDARGLADIARLGRGSVSEVRVKTPECQRLRSTLVTRQKLVQLRTAIEGNMRSLFRLNGGKLNSSYSAAALRRNVSEELRRLRRSENIDLSEEIEPLLALSAAMRGYIEDLDQKLSQRAEEDPVCQRFLEIPGVGPITALAFYSAVEDPHRFRKNADIGAYFGLVPRVRQSGQTLTRTRISKIGDRLTRSYLTSAAQHHLRAANSSLALWGTDLSERLGKTGVHVALARKLAVTMLAIWKSGEHYDPYYGLRKEGLFMSKTIDRN

SEQ ID NO: 422303 - protein, 347 aa, unidentified
MRFYTQSHEHYCGIDLHTQVMYLCILNQAGEVLLHRNMKSEPQAFLSAIAPYREDLVVGAECIFCWYWLADLCAREGIRFVLGHALYMKAIHGGKVKNDRIDSAKIAGLLRGGMFPLAYVYPAAMRSTRDLLRRRQYLVRQRAELLAHVQNTNSQWNLPQFAKKLDRKSNRVDVAERFEDAAVRKSIEADCALLDRLGELIKALEAYIVRNVRVHDARTWYRLRSVPGIGKVLALVILYEIQDIARFASVGQFCSYARLVRGSKESAGKKAGPMGRKIGNAHLKWAFSEAVCLMMRELPQASAYVERQEKKHGKGKAMSMLAHKLGRAVYFMLKRNDAFDVKYFFSN

SEQ ID NO: 422304 - protein, 359 aa, unidentified
MTVIEGKERRIVGGVDTHKDLHVAAVVDERDRVIGTRSFATTRQGYRQMLAWMCSLGDLQRVGVESTGSYGAGLLRFMQQAGIAVLEVTTPDRHDRRRRGKNDDLDAQNAAHAAFAGKRTVTPRSRDGMIESLRVLMACRKTAVTARRVALQLIHNTVVCAPDGLRDQLRNMTRMQLIRTLASWRPDLTAYRDVEMAYRITLKSLARRYLELHDEIADLDAMIAAIVDELAPNLVARNSVGHAGAAQLLLTAGDNPERLRSEAGFASLCGVSPVPASSGKTVRHRLNRGGDRAANSALHIIAIGRLRTDQRTKDYVARRIAEGHSKPDAIRALKRYIAREVFTLITQRRKEINATQIAA

SEQ ID NO: 422305 - protein, 334 aa, unidentified
MKKIFIGVDVSKLKLDFCSYQDGQFCKEEIVANHSLAIKNHLATILNDALKDELLICAEYTGQYIYPLTCACNDLGIDLWVENPVQIKYRSGMQRGKNDKLDARKIAVYAQRFEDQAHLFSMPEKSIQALRQLVSERDMLVCDRAKYKGQLTDQRDFMDQQFYKKKHKRLSGLIENLNKSIKQIEDEIQSIIDNDETLSKQHQLLCSIDGVGQRTSLKMILETNAFKDFKDPRKFCCHAGVAPFSYTSGSSVHSKRKVSKRADKSIKSLLHMAALSASKTDGDLGQYYNRKVAEGKNKMTVLNAIRAKLVLRMFAVIKNENFYIQNYFNPLSLS

SEQ ID NO: 422306 - protein, 411 aa, unidentified
MAYKIAGIDVHKKVLMVVVIDATTPEEKPERRRFPTMPSDLRRLSTWLREQGVEEAVMESTAQYWRSVWLELEPYMRLQLAQAFSNRAPRGRKHDFKDAERLVRRLIANELILSFVPGGEQRIWRNMTRMKLQLTRDRVRLQSQMECLLEEMRIKLSLVVSDLLGASGLRILRALAEGETDPKQLARLGDKRLQCTEEQLVDALTGRVQPMHREMLALQLERLQLIDTQIAKLNGMIAQAMKPHQEAVMRLAEVPGLGVDSAQQIIAEVGEQASTFPSAAELTSWVGTCPGKDESAEQNHSSRSAKGNKYLRRVLNQAAHAAVKRKGSYFQVVFRRLLPRLGYQSAIWAVAHRLCRVVWKILHEGVRFIEHGIEPDPKAKMRHARRLAQALRKLGYQVTITPTNLASGMQM

SEQ ID NO: 422307 - protein, 379 aa, unidentified
MNAITLYLGLDVHKDSITIAIAQAGPKGEVRLFGTITNDMQALEKALGRIRKAHPGAHLEVAYEAGPCGFVIARRLKQLKVPCLVVAPSLIPKQPGSPFKTDQRDAHTIARLLRVGELTGVYVPEPTDEAIRDLCRARTDAVDDLRRCRLRLKAFLLRHGYRYQGKANWSAAHMRYLRELVLPHPAMKAILEEYLQGIDAADQRILRLQNSMFDLLPTWRLQPAVKALMALRGFQLVAAMITVSELGDIHRFEHPRQLMTYLGLVPTEDSSGPRQRLGHISRCGNGHQRWLLTECAEHYLLPPKVSKELARRQEGQPPEVRELSWKAQHRLHLRFNRLLARRLQRNKAKVAIARELCGFIWALLRTQKCYLLSTGGAAS

SEQ ID NO: 422308 - protein, 338 aa, unidentified
MGVYIGIDLHSNNSLVVVIDGTGRVVYEKRLSNELPVILLELERYRKRCEGVVVESTFNWYWLVDGLMKAGYRLHLANTAGIQRYKGLKHSDDRSDARWLAEMLRLGVLPEGYIYPKEERAVRDLLRKRSQLVRQKVSQMLSIQDLVARNAGVSLSGNAVKTLTGWDLGRLLPDPLVARAATSNLKVYRCLVREIADLERTILAQVKNDAGLENLLGVCGIGKTLGLTVLLESGDMGRFPSAGHFASYCRCVGSEKLSNGKKKGKGDTKNGNKWLAWAFIEAANFAIRYNTLVKRFYQRKRARTNGVVAIKAVAHKLARATYHVLKDGVPFQVERAFA

SEQ ID NO: 422309 - protein, 285 aa, unidentified
MQKISTLRTSGKTIFKGQLTIGLDLGDRFSSYCVLNEAGEIILEQKLPTTPEAVKQTFAKMPRSRLAMETGTHSPWVSRLLTALGHEVIVAHAQNVRLIVKSRRKDDRLDARTLARLARIDPALLSPVQHRSAQAQLHLTEIRARAGLVSARTALVNAARGLVKSYGERLRKCGTQQFRWEITSGLSAGLSEALEPLLREVESLNERTQEYDRRIARMAKERYPETALLKQVKGVGDLIATAYVLTIEDPHRFRKSRDAGCFVGLQPGRRNSGESGATDAHQQGG

SEQ ID NO: 422310 - protein, 337 aa, unidentified
MTQVHILAIDLAKRSFQVCGTDRGGAVLFNRVLTRARLIQLLNEQSPCIVAMEACATSHFWGRFAQSCGHNVRLIPPIYVKRFVRRQKNDAADAAAIAEAAQRPNMHYVEVKSAEHQARAVAFRTHQCFVRQRTQLINALRGHLGEFGIMVAQGPANLTAVVGILADETNDLPAGVREIGQLYLDQISLLTEKIDGLMLKLREATKANEDMRRLCTVPGVGPVTAGAILAFAPDLRAFKSDRNFAAWLGLVPRQHSTGGKTRLGGVSKMGQTDIRKLLIVGAMSLIRWIVRKGVLPDNWLGGVLGRKPRMVAAVALANKMARIIWAMMTREQNYRMA

SEQ ID NO: 422311 - protein, 398 aa, unidentified
MMVIGVDTHKRSHALAAVDEGTGRVRGNREIKADEAGHQAAVRWARGLDAERVWAIEDCRQVSRRLEQALLAAGERVIRVAPNMMGASRRSQRARGKSDEIDAQSVARAVVKDGVESFPAAYLDERAMEIRLLFDHREDLVRERTRMQNRLRWHLLELCPELEAKLKRGALSELRALERLDRRLRQLAPCVRLRIAREELGHIRALTRQADQLERELLELIRAYRPALLDEQGCGALTAALLIGRTAGAQRFRSDACFGRQSGTAPIPCSSGQQTQHRLDRGGDRQLNRALHTIAITRAQRDPATKEYLARKQADGKTKKGALRCLKRYLARRFHRLLSEPPLPGQRAITGKQVDAPVCDASRDMSRTVEPRAIAERPAPKPETRRINAAPNPMICIA

SEQ ID NO: 422312 - protein, 422 aa, unidentified
MSDFLSAPLALFYVGIDWAAETHAVCVLDDTGRVKSRFTIAHTADGFADLIRRLRRLGECVDVSVGIERPDGRLVDALLEAGHPVIPVSPNAIKAWRDGEVISGAKSDAGDALVIAEYLRLRQHRLRVATPYSDQTKAVRTAVRTRGDLVEMRVAATNQLSALLDMHWPGAKTIFADVESPIALTFLSRYPTPASAARLGEKRVAAFCAANGYSGRRPAAELLTRLRAAPAGTTSPALTDALKHAVLAMVTVLSALNAAVKDLDRTVVAHLGEHPDGQIFTSLPRSGQINAAQMLAEWGDCRQAYGSADAVAALAGLTPVTKESGKHRAVSFRWACNTRFRVAMTTFADNSRHASPWAADIYNRARAADKDHPHAIRILARAWTRVIYRCWLQATPYDPARHGNATALAARPAAATQTVVAA

SEQ ID NO: 422313 - protein, 349 aa, unidentified
MCSLGTIANREDSVRKFIKKLGPAEQLRACYEAGPTGFVLYWQLTQLGVECAVVAPSLVPKKPGDRVKTDRRDALKLARSHRSGDLTAVWVPDEDSEALRDLVRQREAAKQDQLRARHRLTKFLLRTGRRPALGLKAWTERYMAWLEQIRYAQPAQEATLVDCLNEVEHMSARGKRLEEAILEVVKLAPQSMQEVIRGLQALRGVAHISAVTIAAELGNISSRFESARKLMGYCGLFPSEDSSGKRIRRGGITKAGNAHLRRIVVESAWSYRHLPRVGAKLRKRQQGVPAEITEIAWKAQNRLHKRYMKLTMAGKDQRKIMTAVGRELLGFIWAIGIKAEAACEQQLAA

SEQ ID NO: 422314 - protein, 351 aa, unidentified
MDIIGLDLHKRESQLCLGAEDGTITERRIVTSRERFTVVLGNRPRAKILLEASTESEWVARHLESLGHEVLVADPNYAPMYATRSRRTKTDRRDARTLMDACQTGAYRLAHRLSDPRRHVRAELAVRDALVRTRTRYVALAKTLVRRDGLRVASSESHLVAQRIGALSLSPVLAAELQPLFTVLAPLNEQIAAADGRIATLAASDPLVARLATAPAIGPVTASAVVATVDDIGRFRSAHQFEAYLGLVPGERSSGEKRHVGPITKAGNSRVRWLLVEAAWRLLRTKSAEAAALRAWAHGVAGRRGKKIAVVALARRLAGVLYAMWRDGVPYDASRIRGPRSAAAEVTARAG

SEQ ID NO: 422315 - protein, 382 aa, unidentified
MSRQLAAPAAKLSALMKQTLITGKSLHQQKVEEKCNQVLKLGLDVHYRQVTVAMQEEAGALKAVGRMGHDGFGNWVEKKLKAGWELYSCYEAGASGYWLHRDLVKLGIKNLVVAPKAMGQDKRQKTDRRDSAELVDQLDRYLRGNRKALSPVAIPTTEQEEKRALIRYHRQIMADRTRYEARGKGLLCAQGIEVQGRWWQPEAWKELKTHGRFQAWMQTQLQGWRRKLLSAEQEQQKLRKQIEALAPAQLPKGVGAYSAVALEYELKGLARFKTARALSSYTGLCPGIHSSDQRGKEGSINRCGNAAVRWNLVEMVWRLLKWQPDYQPVRQLAAGLVRSKRARKRLVVKAARQLAIDLWRLETGRITAQELGLVMQPTSKAK

SEQ ID NO: 422316 - protein, 366 aa, unidentified
MKKPSTTSARGRGKVQGEQLTIGLDLGDRSSFYCVLNGAGEVIVEERVATSPGAMKKTFGKMPRSRIALETGTHSPWVSRVLSDLGHETIVAHARNVRLIGQSRRKDDRLDAQALARLARIDPQLLSPIQHRSVQAQADLSVIRARYALVRARTALICSARGLTKSFGERIHSRYVRGFKPAMGETLSPQLQVALAPMLSALEAITARIREYDAQIEKLAGESYPDVALLKQVKGVGTLIALTYILTLEDPRRFRKSRDAGCYIGLQPGRRNSGQSEPQLHITREGDSYLRMVLVQGAQHILGPFGEDSDLRRWGLKLAERGGKRGKRRAIIAVARKLAVLLHHLWISCEAYEPLHNTRKRRQLAA

SEQ ID NO: 422317 - protein, 326 aa, unidentified
MEHELHYIGIDTAKEKLDVDVLRPDGRHRTKKFANTTKGHDELVSWLKGHKIDHAHICIEATGTYMEPVAECLYDAGYIVSVINPALGKAFAQSEGLRNKTDTVDARMLAEFCRQKRPAAWEAPHPLERALRALVVRHQALTDMHTQELNRTETAREVQRPSIDAHLLWLEAELKRLEKQIKDLTDDDPDMKHRRKLLESIPGIGEKTSAVLLAYIGLKDRFAHARQFATFAGLTPRRYESGSSVRGASRMSKAGHVSLRRALYMPAMVATSKTEWGRAFRDRLAANGKKGKVILGAMMRKLAQVAYGVLKSGVPFDASRHNPVAA

SEQ ID NO: 422318 - protein, 402 aa, unidentified
MTENQKRYVGLDGHKHYLMVGAVNATQEVVLPPRKVSLIEFEGWAKKHLRPTDEVVLEASTDAWYLYDLLEPLVARVVVGHPPLIKLIAAAVVKTDKKDTMTLAKLLAVGMIPAVWVPPTPVRELRALISHRKRLIAQQTRLKNRLRSLLQRHHLVPPGGELFALVNRPWWLKLDLSSSEKLRARQDLTLLDQLAPLIQEVETELNCLSLAEPWAEQVLYLLQLPGIGLITAMTILGAIGEIERFPTAKKLVGYAGLGAKVHSSGQTHRTGGITKQGRKELRAVLIEAAWIAVRYDQHWQEQFERLADHIGRQKAIVAIARKLLVVIWHVLTAKVADRRAEPQQVARYFIRWGRQLRVKTTLGIKASEFARQQLDRLELGQELERVPYGTVTYCLPPSTTAP

SEQ ID NO: 422319 - protein, 368 aa, unidentified
MKEVTTYVGIDAHKKDLFVAMLNGTQSTPVTWQLANEPQAVRRLVRKLEREAPGPVRVFYEAGPCGYALQRRMTTPRVQCDVIAPALIPRKPGERVKTNRRDARKLVELGRAGLLTTVQPPTPADEAVRDLARARDDAREDLQRCRHRLGKLLLRRGLHYAGRNWTRAHRQWIDTLPWTHVAERAVVDDYLLAIDHTEARLQELDARLAEIAESEPYRDPVGWLRCFRGIDTLTAMLMLAELHDFRRFASAPALMAYLGLVPGEDSSGEKHRRGRITRTGNALVRRLLVETAWHYQHRPSVGVALTRRRKGQPGRVIAIADKAQQRLCRRFRKLAAEHKPAPKIAVAIARELAGFLWAALQPAPVAVK

SEQ ID NO: 422320 - protein, 439 aa, unidentified
MSRRAYRATGVNEVNWEQIAHGKDGLDVTLGVDVGKFDMLVVCRWADERFERPWRVKNPQEIPTLAALAKQVQADRNLVVAMESSGTYGDTLRQALTDNGIEIQRVGGKAAHDYAEVFDGVPSQHDGKDAAVVAELAALGKARPWPYEAADSWEEELTYWVEDMVIQRQLVTFWQGRLEGLVARHWPEAFQVLKLSSGTLLRMLKRYGSPQALAADPQAPRQLARWGGALLSAKKIDQLLAGARSSVGVRLGPWQQRQIQEYAEKALAARRQSNQAQRRLRQLAVGHQVLQAQGKVVGIPTACVLWVCTGDPRKFDSAAAYRKAMGLNLVERSSGTYQGQLRISKRGHARTRQWLYFAAMRLVQKRGVRPWYEAKKARDAGDARRLLVAVMRKLAVALYHVGVRNEEFQPRRLFGRIGKHRGRGAQRAIAVAEPSKIQG

SEQ ID NO: 422321 - protein, 385 aa, unidentified
MSQFSGFPQGAVDYNSTIIGALELSEKKWVLAVQLPGVDRHSRHVLDACGERLVSFVERLKARCASAGRKIARVILTHEAGRDGFWLARFLARRGIEVHVMQPSSLPVDRRARRAKTDMIDAEMLLRTLMAWLRGEPRVCSMVPIPSEADEEARRAHREREDLTRERRSIVNKIDGILATLGVKGYKALRRDRREQLNCARQPGGDPIPQKARARIERLLDRLDLVLKLIDQVELARDAVLNKDAPADEAERMIRSLTDLRSIGPDVATLLVREAFVRQFRNRRALAGYVGLGGTPFSSGGSEREQGIGKDGNRRARAAMVELAWMWLRWQPDSALSAWFRARVGAMGGRIRKIMIVALARKLLVALWRYVTDGVVPDGAKLKAA

SEQ ID NO: 422322 - protein, 356 aa, unidentified
MSAVAERVLPSQGVVIAVDPHKASWTAVAVTAGLAAAGAVRVEANRAGYRQLRRFAAGWSDVRWAIEGATGLGAPLAGRLGEDGITVVDVPAKLARRVRLLSTGHGRKSDPADALSVGIAAWSAPALRTVETGQAIAVLRALTEHRDDLVRTRTQLINRLHVLLVKLIPCGLARGLTAESAAEALRRIRPRDSLGRTLRALAVDLVAELRRLDRRIAETTQALSDAVTASGTTLTQLLGIGDVVAAKILARTGPITRFLSAAAFASFCGVAPIEVSSGDVVRHRLSRAGDRQLNYALHVMALAQIRYDGPGRSYYQRKRAAGKSHKEAMRCLKRRLADVVYRTMINDSVSSLTAVA

SEQ ID NO: 422323 - protein, 361 aa, unidentified
MHATTVAVDLAKSVFQIAIADDKWNVVEQQRLTRSQFERWFHNRDVGMVVMEACGSAHHWGRWFSQRGIPVKLLPAAYIRAYVKRNKTDAADACALLEAARCADIVPVQIKSLEQQALQGLHRIRSRWMATRTSRINTLRGFCREFGLVVPTGARTGIEAMSRALADPNSSVPLLIRESMKLLIEEIRLLELRIAQLEKELTSLARQSPACTELLTIPGIGLLTATAMVAATGGSVSHFKDARHFASWFGLAPKEFSSGNRRTLGRISKKGDRYLRMLLTHGARAILRAAELARRAGKPLDGLRTWATEIQARAHHNKATCALANKLARVCYAVLRDHTPYGSPQPRQEKKLTRTAYAIAA

SEQ ID NO: 422324 - protein, 342 aa, unidentified
MKDTMIGVDLAKSVFQLHATSLTGELKFRKKLSRQGFVRFMEEHGPAVVVMEACGGANFWSREMVRLGHDVKLIAPQYVQPFVKRQKNDAADAEAIVIAAQRPEMRFVEPKTEEQQARAVVFRTRERLLYQRTELINVVRSILYEHGLTFPTGFEQIGRIETALRDPAIVLSGIVRAECLDVIQQIAEKTNRINAKTLMAKELAKDAETARRLQTMPGLGPITALAIETFAPPMETFKCGRSFAAWLGLVPRQHSSGGKARLGRISKAGQADIRRLLITGAMSRLNWLGRKRIQPGSWLANMLDRKPRLLVAIALANKMARAIWAMLTKGEDYRDLAHAAAA

SEQ ID NO: 422325 - protein, 411 aa, unidentified
MIKENFIYVGIDLHKETHTAVMIDCYNQKLGEITFPNRPADFPKLVAKVKKCNTDGKTIVFGLENAYGYGRALAVWLIDKGYLVKDVNTAISHRQAKHRGAMYRKSDSDDAEAIALATLNMLDKLPDAYPNDAYWSLGQLVHRRDNIMKQRTRLVNQLHEQLCIAYPSYKQFFNDISRPTALYFWEHYPSRKYLKGKSVEDLRAELVPVSHNKCSTKTCEKILDAVASDKVKNNAYQDARDMVTLSIVSDLQHYDSQLTEVDKMLEQMYKMLGCTLTTIPGVNVITAVKILAEIGDIKRFSNANKLAQFAGIAPLHLSSSGKGKDVATKQGNRRLQATIYFLAIQMVQVSSKGTPRNSVVRAYYEKRKAEGKTSQQALICISRRLISVIYGMLKNGTEYRMPVVENAGENR

SEQ ID NO: 422326 - protein, 363 aa, unidentified
MRGRAKSQAFCPIPPKPCKYDYFNPTKINAFLPLSAFFTGDQVHAIGSDGAVLVRRKLRRAEVIGFFTDLPGCVVGMEACASAHHWARELIALGHEVRLMPPAYVKPYVKRGKTDAADAEAICEAVMRPTMRFVAVKSVEQQAVLMVHKSRDLMVRQRTMLINALRGHLAEYGIVTGIGVGGVTAMLKALHDQQEGLPAHARSALHGLAAQMRALASEIDRLEAQILAWHRADETSRRLATIPGIGPITASAISAAVPDASLFRPGRQFAAWLGLTPRANSSGGKERLGGITKQGDGYLRRRLVVGATAVMRMTRKNADRQPWMAQLLERKPAKIATVALANKTARIAWAVMSRKEVYAAQAA

SEQ ID NO: 422327 - protein, 421 aa, unidentified
MSDDRCRLGSDDVVIGLDLASAEHQAVVVTAAGKRLTRFRMPHTRAGLEELLRRTTPAALGRPGGARVFAFEATGHLWEAVAYVLRARGEPYVVVNPLATFRVREARQLSREKTDLTDAEQIAELCRTGLVTRTQLEARPYLALRRAWGEYARLREERARLKVLVAHQLYGLFPEFLRVWADLLQPGALAVLRTGLTHAAMAALPLTEFVAQARAHGAGHRLWRDTLAQVHRAAAQTMACPDGLDVLAREVQRAVARMDMLTAHMTAVAAEIDSMLAELEEVPSLRPIPGLGWTSVAGLLAPVGAITKYHHGRQLIKLAGTNPSRRDSGQTVGHGQRMSHRGRAGLREVLYLATISCLQHNPRIRAHDDRLIQRPDRPLPKMQALGACMNKLLLYAFAVMHRREAFQLDHDWPRTTMARVA

SEQ ID NO: 422328 - protein, 388 aa, unidentified
MLWASGRRRQTREFGTFTRELFELGDWLRACGVTHVALESTGVYWKPVWNLLEGQFEVLLVNAQHIKAVPGRKTDQKDSEWIADLLQHGLLRASFVPPNPIRELRDLTRYRASLAQEINRIANRIQKVLEDSNIKLASVATNTLGASGRRMLEAIVSGEQDSQQLAEMAQGKLRNKIPELQEALQGRVSTHHRFLLRELLDHLYFVESKMQRIEQEVAERLGPFQSEVARLCTIPGVDRVTAWGLLAEIGLDMNQFPDAQHLASWAGLCPGSHESAGKRKSGKIRKGSLWLRRCLCQGAWAVSTKKNNYLSALYRRLAARRGAKRATIAVAHKLLVIAYYILRDGTCYSDLGADYFDRLNPEGLRRRLTKRLEGLGFKVTLEPSAQVA

SEQ ID NO: 422329 - protein, 413 aa, unidentified
MGNTVAGIDIHKKVLMVVVVKRSGVSREGEVQRHRFGTGSSDLHRLQAWLVEQGVEEVVMESTAQYWKPVWYELEPHFRLQLAQAHSNRAPRGRKHDFRDAERLVRRLLAEELILSFVPQPEQRAWRVMTRAKVQLARDRVRLHNQVEALLEEMRIKLSSLLSDLFGVSGLRILHALAEGETDAKKLAALGNQRLHCTEEQLVDALSATPRPIHRKLLGHFLDRLQLVDKQLAELNRETAEAMAQHADTVARLAEVPGFGADSAQQVIAEVGVQASTFPSAAHLASWVGTNPGRQESAEQNQSSRSAKGNKFVRRILTEAAQAAVKTKGSHFQVVFRRLMPRLGYKQALWAIAHRLCRLVWKILHDGVRYVEQGAQRDPKALKQRMHTMARSLRQLGYDVNLDITPHSALARS

SEQ ID NO: 422330 - protein, 377 aa, unidentified
MSKLRFVGLDVHAETIAVAVAESAGEIRSLGTIPNRSESVRKLIGKLGPVGKLKCCYEAGPTGYVLYWQLTKLGVLCEVIAPSLVPVKAGDRVKTDRRDAEKLARCYRAGELTAVWVPDAAHEALRDLVRAREAAKKDQLRHRHRLGKFLLRHGKRPTGAGEAWSKKYLNWIRVHARFDEPALEATLAHYLGEAEHAAERIAQLEQNIDEAVAQSPPEVRAVIEALQALRGVAKTTAATVVCELGSLSRFESPRQLMGYSGLVPREHSSGNRTQRGAITKSGNAHLRRVLVESAWAYRHRPNGQGPVLRRQKALALSEETRQIAWKAQLRLYKRFVALTGRGKTSGQAMTALARELLGFVWAIAVQTEKQLRLPKAA

SEQ ID NO: 422331 - protein, 346 aa, unidentified
MLYAGLDLSPQRLEVCVLDEDGRTVETLAVRPDADALRTLAAQIARYGEPVSAAIESMTGARFIHDTLERLGWDVEIADAAKTKGLAPLAAKTDKIDAHVLAELARRDLVPAIWLPDPTVRAEHERARFRVQLVRHRTALKSRIHATLMTFGHPVPVSDFFGLRGRELLDSLTIPEPWATTLARSLALVDELEGEIARCEAELRCIGADHPYVPLLTSIPGISWILGYTIASEIGDISRFASPKKLAGYTGLCPRVYQSGAMDRRGALAKTGPKYLRWALIEAATQAVRDPRYGARYQRTKRRLGKQRGSKIARVELARELTTAIWHMLTRQEPFRAVGPTCGLVA

SEQ ID NO: 422332 - protein, 326 aa, unidentified
MGLPILGIDIAKDKYVVSLLHNGKRQQREFTNQPVEFKRLQAWLNKHGAPKVHACMEATGRYGDALAQWLHDREHIVSVVNPLRIKAYSRARLTRNKTDPVDADLIADFCQSEQPAAWTPPTPEIRELQELLHQYDVLQATRTQVLNRLSSGFTSPIVLAQLKTQLNFLEGQLADLVKLIQDHIDRHPDLKRQHDLVASITGIGDLTAAKIIAADPSRFEDARAFAAFAGVTPMQFKSGSSVHRQPRLSKIGDADLRRALYMPALSAWQSNPIIQKLIERLLDRGKTKMTVVGAVMHKLLVLAYGVLKSGQPFDPHYQPLLTRLAA

SEQ ID NO: 422333 - protein, 337 aa, unidentified
MAFSFFVGIDVGKETLEVALFKEGEEVQVVSVANDPQAIKAHLLGLKKVPGFQISNALFCMEHTGVYNNPMLSVLQKQKANIWVEHAEQIIRSIGMTRGKNDKMDARRIARYAYRFVDQVRLWQPVRQVVQQLAVLSSLRDRLVAARKQLATPLKELSGFVDKKTAALMATNCKSSLDALNKDIQAVEQKIRDLIDQDPQIKDMYKRISSISGVGHVTATAVIVATNEFKNFTEPKKFACHAGVAPFEHRSGISIRGKTKVSHKANKRLKTLLHLAARSILTTKGELRQYYDRKVAQGKPKMAVLNALSNKIILRIFALVRNETMYQKNYQYPLAKP

SEQ ID NO: 422334 - protein, 308 aa, unidentified
MTTIYTGLDIAKLNLQLHLAGRLHDLPNTPAGHRRLLKLLTSQPGVHVICEATGGYERDLVAALHQAGLPVSVLNPARVRHFARAAGQRAKTDPIDAAVLSAYGQALEPKPTPPRTEQEEQLTELIRRRVQVLEILVAQRQQAERLTLPALRRQAQSLVRRLERDLEHIQALLRELRTQVALLDQRVQKLEAITGVGSITALAVLAELPELGTLNRRQAAALAGLAPHPRESGQWHGRRSIGGGRAPVRRALYMAALVAARSNQTLKAFYQRLRTAGKPAKVALTAVMRKLIVLMNHTLKHPNLVLQN

SEQ ID NO: 422335 - protein, 365 aa, unidentified
MRKAELSCEADSENYLGGSSETMYYIGLDVHKKTISYGVKDAAGKVHQEGKIGSTRRELDSWIKTLPQPRMMAMEATIFTGWIYDHLLPHAEKVKVAHPLMLRAIAAAKKKNDRIDASKIADCLRCDFLPECHMASTEIRDRRRTLRYRGLLVKQMVQMKNRVSGLLMESGVSYNKQRLHKLGYFTDLLSTNEEISQSILPLLKLGREHIVRAQRLDSALIGSLEKDPLLSERLRRLRTIPGVGPITALTWALEIGDYTRFRSVKEAISYCGLCSAEKSSADKVMHMPISKQRNKHIQHVLVEAAKMAPRYSPDLSLVREREIQRGNKNRATLAVARKLVTYMLAVERRQQDFVPAEEMAGRAVA

SEQ ID NO: 422336 - protein, 314 aa, unidentified
MEAAAVYVGIDVAQDHLDIATTADQVWSVKHHPRAMTALAKRLVKLSPARIIVESTGKLEQELVIVLAEAKLPVVVINPRQVRDFAKATGVLAKTDRIDAQVLARFGEAVKPEVRSLPDEQTRDLMALVARRRQLHQMLRAERHRLLRAARPLKKSLEQHIAYLEKQLAKLDDELQDKLRQSPLWQTQFDLLQSVPGIGPTTAATIIAELPELGRLSRHEIAALVGVAPFNRDSGKWKGKRATWGGRAPVRSALYMATLVATQYNPYIRAHYQQLVARGKAKKSALVACMRKLLVILNTMLKNQQPWNPKSTVA

SEQ ID NO: 422337 - protein, 367 aa, unidentified
MKKISTVATQQSRKISEQKLTVGLDLGDRSSWCCVLDEAGAIVREQKLGTTPKAMKEVFGAVPRSRIALETGMHSPWVSRLLSQLGHEVIVAHARNVRLIGESRKKDDRIDAQTLARLARIDPQLLSPVKHRSAKAQADLTVIRARAGLVRARTALVNTARGLAKSYGERLRGCNVRNMNAEKAQGLSPELRTALEPLLAGIESLSERIRECNEGIERLARESYPEVAQLKQVKGVGTLIALTFLLTLEDAHRFRQSRDVGCYLGLQPGRRNSGQSEPQMHISKEGDPYLRTLLVQGAHHILGPFGADSDLRRWGLKLAERGGKSGKKRAIIAVARKLAVLLHHLWVSGEVYQPLRLSKLRAMPTAA

SEQ ID NO: 422338 - protein, 454 aa, unidentified
MEQEFVSMQVVNPQAAGIDVGSRSHWVAVGQSEKDVREYGVFNQDLFALVDWLKEKDVKTVAMESTGTYWQNLYVVLISKGLHVVLCNGKFTKNIKGKKTDIKDCQWIQKLHTLGLLTSSFLPDGKTEELRTYCRQRANLLQLAASTSKKMQKNLRLLNLRLDVVVKDICGLTGLLIIRAICDGETDPEKLASLRHGNCRKSEEEIAKALQTNGRKDYLFALQQELETYDHLQKKIDEGDKEIDKMLDEIIHSDDNKRQHYIEAKPHKRVNKNTPKDIDLNLKSYQMFEGTDLLAIEGMSYSTVLALMSEVGLEGIRKFKTAKHFTSWLRLAPNNKVSGGKVLSSKVPKGSNRLKIALRNAANAIGNLKDSTPLRDFFHRISFRKGRVSAISATARKLAVIIWNMVVKGVPYINPEGYLFLDQKRKLGLVKRIKKQIDKFGLTNEDLGLEIETI

SEQ ID NO: 422339 - protein, 456 aa, unidentified
MSKVSKHRKRIPRLEALKQINLDAAGIDIGSTEIFVCVPEDCAEQNVKAFDTFTRDLHAIAGWLEACEIKTVAMESTGIYWIPLFEILTEKGFEICLVNAREIKHVPGRKTDVLDCQWIQQLHTYGLLKASFQPDERIGQLRSLIRQRDSLLKNRGSHIQHMQKALHQMNLLLDNVISDITGLTGMKIIRAILAGQRHPGQLAQYRDRHCKNSEEVIAKSLEGNYSDEHIFELHQAVKLYDFYTELIGEVDREIERKYDWFPKKIELEDKPLLPQKRSNKKPLKNEPHFPLRESLYKMCGVDLTLIDGINSLTVQTVVSEVGLDMSRWKTVKHFTSWLGLCPSNDISGGKVLKSRTKKTNNRANTALRIAAMSLHRSNSALGAFYRRMRAKAGAPKAITATAHKLARIFYFMLRDSKEYVDMGADYYEAKYQQRVLKYLNHRANSLGFRLMPVEVS

SEQ ID NO: 422340 - protein, 409 aa, unidentified
MVLQVIYPNCCGIDVHKTFVFACIAITDNKGIPSYYRKRFSTFTHGLRDLAEWLEYYSCFDVCMESTGKYWIPVWNVLETAGIHQTLAHPKYVRAIRGKKTDKKDAKWIADLFRHDLVVGSFMPPALIRQLRDLIRYRWKLGNNMVSEKNRFQNSLTVSNIQLASVVSDTFGVSAQKIIKSILDKKLGDTEQLEDLIHGSLKKKLPELELAVDGAITSDQEAKLRVIMDHYKSLVLARTTIETEVEMRAQPLAQEIALVRTVPGLDKPFTAISVLAETGVDMSQFPDAKHLCSWAGLTPTNNESAGKKHSVRISKAGAYLKPLLVQVANGLIKSDKYPEIKQRYQILKKRRGHKKTIIAIARQLLTAVYHILANHEVYNPKQFVDRPERSMSVREAVEFAKARGFDVLA

SEQ ID NO: 422341 - protein, 366 aa, unidentified
MKKISTVQVFGNDIFKGPKLTIGLDLGDRWSFYCVLDEAGKIILEQKIPTTTEGMKQAFAKIPRSLIALETGTHSPWISRLLTEWGHEVLVAHAQKVELITKSNRKDDRHDARALARLARIDPELLGPVRHRSAKAQIHLTVIRARAELVSARTALVNGARGLVKSYGERLPKCGTYQVSRELTTGLCTELREVLEPLFREIESLNERIKEYDERMEKIAKEVYPEVSLLQQVKGVGTQIALTYVLTIEDPHRFLKSREVGCFLGLKPGRRNSGQSEPQKKISKEGDRYLRTMMVQGAHYILGPFGEDSDLRRWGRKLAERGGANAKKRAVVAVARKLAVLLHRLWVSGEVYEPLRNSNKAMQAVA

SEQ ID NO: 422342 - protein, 323 aa, unidentified
MNKDIIYFGIDISKDVFDVMDSNGNYFQFENDFNGFKNFVKLLGKKSHCVMEATGYYHYKLAYYLIENNIRVSVENPLSVKRFIQMRLSKIKTDKSDAKMICLYAQSVDLKLWEGQSKSQIECLQITRLLSLYFKQTTALKNKIHGEEVLGNPSLLVVRSLKRSLKQTQKEIKSLEEKRTQIVKQDHQELLTRLESIPGLGRKTSIMLIVLTDGFERFTSASELCSYSGLTPIIRQSGTSIKGRSRISKMGNRKLRNLLFMCSFTACKNNKACKALYDRIVAKGKSKKLALIAVCNKLLKQAFAIAKSGLIYDETYRSTLVKN

SEQ ID NO: 422343 - protein, 359 aa, unidentified
MKIIGCDLHARQQTLAMLDSPTGEVVNVTLKHEGDNVREFYSKLARPVRVGIEATGSMQWFVNLMEELGIECLVGHPAEIRAAEPRKQKHDRRDADLILTLLVENRFPAIWLPTKELLDLRALLRHRHQWVCLRVKIQNALQAIALANGLRRGSSLWTQAGQHAIASLPLSPHAAYRRNELQAMYEKFEREIENLSQRVQQQARERVGARLLMTHPGVGPITALATEVFLGDPARFADSKELASYVGMIPGEHSSGKRQRLGGLTKQGNPLLRFLWSEAAIHAVRRDPQLKQFYRRKLIQKGLGKARAAVARKLGIRMWIMLRDGIEYNEFCRRGQMQQRVVPVRGCQDRVMVRKSPAD

SEQ ID NO: 422344 - protein, 390 aa, unidentified
MSFDHHSKEPTVILTNLGAIFASLELSRSTWLITSMSPGGGEKMSKHSVSAGDIGALLACFSELKQKALSRTRKSFSIIVIQEAGLDGFWIHRVLEREGHESYVVDPASIATSRRRRRAKTDRIDGEALVRALLAYKRGEPRVCAMVRAPSPESEDSRRLSRERKTLTVERVQHVNRIKGLLFSQGVSGYEPLRRNRRQRLDELKTGDGRPLPPHLKAQISRELDRLELLIEQVKIVETERDALFAPAVKTGQLPAPQAMLADLKGIGAEFVAVLWSEGLCRSFTNRKQLGAYAGLAPTPWQSGSVAHEQGVSKAGNPRLRTTMIQLAWLWLRHQPQSALALWFKERVSHNGGRLKKTTIVALARKLLVALWKYVTAGIVIEGAVMKSTA

SEQ ID NO: 422345 - protein, 349 aa, unidentified
MSESYEGRQIVGIDLHRRRSVLVRMTETGERLETVRISNDPEYLREVMTRAGEAPDVVLEACYGWYWAADTLAELGATVHLAHPLGVKMFSYRRVKNDERDAADLADLLRMGRLPEAWIAPPACRELRGWVRHRAKLVGLRSNLKCQVHGILANAGITVPMSDLFGASGQRLLATADLATESRSRIDSLQRMITALDFEVELFAKLVAGRLRTHPGYQAIQLIPGVGPILAAVFVAEIGDITRFRRPEQLASWAGLTPKHHESDTTVHRGPITKQGSRLVRWAAIEAVQRLPGHTRIGQVRDRVAARRGRNIGVVAAARELTELVFYGLRDHHVHALAVHSPARTPLPA

SEQ ID NO: 422346 - protein, 262 aa, unidentified
MDCYIGIDVSKATLDVASLPNGESWTVTNDDLGLAELTPRLVALTPVLVVLEATGGFEMLAAITLAKVGLPVAVVNPRQVRDFAKAMGQLAKTNALDAGILAEFAQRVCPKPRPLPDEAAQLLDSLLTRRRQIVEMLTAEKNRLGFARGPVTTLTLLASLPELGQLSRHQIAALVGVAPLNRDSGTQRGKRMVWGGRAPVRAVLYMAALVGIKHNPVLRQFYERLRTAGKPFKVAVTACMRKLLTILNAMVHQNRRWDPQHP

SEQ ID NO: 422347 - protein, 485 aa, unidentified
MKATRAKASRSIKKFLSDKPGPIRPAASMPVINRHAGGIDVGATEHYVCVPQDAVPEGESNVRCFGAFTADLDKLVEWLQACGVTTVAMESPGVFWIALAQKLEAAKIEVVLVNARHLKYVPGRKTDVKDCQWLQQLHSYGLLNGSFRPAQDICRVRSLMRHRQNLIESCGREVQHMQKALQLMNVHLHHAVSDLVGATGLRILDAVLAGEQDPKKLVELRDSQCSKTTSEELEKALKGDWREEHLFVLKQALETYRHLVAQVAECDAQVERALATVVIPKRIEPEGPIPKNPKAKEPDQSKKKRFHHRKTGTSVKQDLREELKRICGVDLTQVIGLNVLSVLIILSEIGLDMSRWRSAKAFCSWLGLCPGNKISGGRVLNSRTAHVVNRVAILLRTLAPSIGKTDTWLGIFHRRMRARLGPAGANTATARKLAYLIYHLLKYKEEYIDVDHLLLLERIRRQRIGRLHKQAQELGLEVVETQMAA

SEQ ID NO: 422348 - protein, 400 aa, unidentified
MPFVKPQEIRVSVDVGCHQHSIAIGLSTGELLDEFDIEHKSSGFKSFFKRIEHWEKHYKASVSVAMEGYNGYARPLDRLIRVRNYRLYNINNLKLARFKEIFPGAAKTDPIDARKGLELFQLSDQLPLAKGVLQEIASTPKENEHLKRMTRRRRRLVNERASIINALQSDLQAVSPGITEITKDVNNMWFINFLSSSPDLRKLARKRRSSLLKIRGVGKKYADKIEHWQQQAFFSDEIDIVSPMIHEDGLRIIELNENIKQLNAHIEQLNDRSEISTILRSIPGFGTTSCAEIAGEIGTIERFAGESSLALYLGMAALDNSSGSHKGSKKPKHVNTRAKAALMVAVDRHRKLVPESQRYYDKKRNEGKKHNQAIRSLGRHLTRVIYKMLLNGNVYEVKKL

SEQ ID NO: 422349 - protein, 474 aa, unidentified
MGKVSGLSRSERRRNARRERLRGLLPRGGAVLGIDLGEDRQALALVDHDVRVAWRKTVRVKAHQLGEALDLAVAAARAGGFPGVTVACEPTGPRWMQVQRLCAERGLALACIQPLVSHIAREQQDYTAHKRDEPDAVLIARLAAELHCYVPEELDEQWALLRQLGRRREQLVAGATASVVRVRDFLSVACPSATGACKVPFESATWLSAVHAVTSRCGADPARLLAGEGREDAAAAARAGVAGWGRTRADGRVLRAVLDALAGDRDGVSWSRRGLFRRIADELGDLQRCRSQLRAVEADMVAVLGELGLSRLGGIPGLTATGAAVILAEAGDPRRYERSSSLVKHAGLSPADNSSGAFEGASRISRRGRPRLRSAAWRAVWPLLLHNPVMAAKYQALVAAAEDAAATAAAAARPGSAQAAQAARAVRSARARARVACAASLLRWLYYMTVHDASWDPVAASGGRWAPAAAIQAA

SEQ ID NO: 422350 - protein, 340 aa, unidentified
MPIVGGFDVHRSQITFDYLEVVTGEVRSGRIQPATREHLRVWLGRFEGREVAFALEGCTGWRYIVEELEGAGIEAHVAEPADTASLRGRKKRAKTDRADAAHLRDLLVQGRLPESWIPPAHVLDIRTLGRLYSSLMSERQKWQQRIRAQLFHQGVPRTKGILTEEGRAGLAAAELSAAGRQVVEVALFQIDQLDLSIVPLRHQLAQVARTQPGCRALLPIWGIGQLTAPIIWAEMGDTRRFSNSDKAVRHTGLDVTVYSSDKKRSAGRLARQGPAALRWALVEAAQTAARSNSPDHSYYRSVAERCGPGRAALSVARKIARRVHHILQDLGDAAWVPATT

SEQ ID NO: 422351 - protein, 313 aa, unidentified
MANAQVHIGVDVSKGTLDVFIPDGKTLRIRNTLSVVRKLVRGVKAKDPSAIFCCESTGGYERTLLDVCREEGQPVCLMNALQVRRYAEHRGMLEKTDRIDARIISMAADDKRPAPLVHADERQRKLKELWTLRTCLTGARDAERNRLEHLREKAAVAAVLKIIAAYDKQIASLEKQCREAVSQDGDSLALTERLQLVKGVGPLTALALAALLPELFVLDDKRLAKLAGVAPICDQSGKLDGPRHIMKGRGLVRRALYWAALSASRHNRILAAFYDRLVRQGKAKKVALVAVMRKLLCLLRRIAQNPDFVPAAT

SEQ ID NO: 422352 - protein, 309 aa, unidentified
MEKVYVGIDISKDSLDMAVHTSSHQWQFSNNTAGITRLCNVLKKLNPVLIVFEATGGYEMPLYLSLDEAGLSVAPVNPRQVRDFAKSTGKLAKTDFLDAKIIAHFAYAIQPMPHRVPDTQELKVVLSRRVQLLEMVTMETNRLKGTSGALKKRIEAHIAWLRQELDDTDYELREMIEKDPIWREKDSLLQSTPGVGPALSGTLIAQLPELGNLDRRQIAALVGVAPLNRDSGMMHGRRVIWGGRPHVRAVLYMSTLVATRYNPVIRDFYLHLCSTGKRKKVALIACMRKLLTIQNSMLKHRVPWNYSPS

SEQ ID NO: 422353 - protein, 406 aa, unidentified
MKLQNHVFVGVDTHKNQHTACVLSCVHQKIASIETPNNPAKFKKFIQEIRSVKSPDKNLLFGLEDTQGLGHSLSQWLLDKGYTVKEVNPALTKRERHHSTNPDKSDEVDAEAIANVLITDFNELPDAFYDANFKAIKHLNDQRQTMVKEKTKIKNRLHNLIHQQYSQYQKFFSNPFCKTGLAFFEEFPYPSDLNYYAEDRLNKFLKKQVKSIGNDKAATILSLVNKDKKKAADAKARTTIIKSLIKQLKLLSESLNKINQKLKSSVEKSQYQLTTMPGIGFKMAAMFISNIKNIDRFDSASKLARYAGLAPVEHSSGTSKSLNLKKYGCRDLNHAFYMLAFQQIGNNKNPASYSYYQKKLKEGKSKKIALICLQRRLVDIIYAMMRDRSTYKLPENISYEMFNKAG

SEQ ID NO: 422354 - protein, 409 aa, unidentified
MNSVGIDVSKGKSMVAALRPLGEVAIAPREVIHTQSNLEMLGYDIIGLGEETRVVMEATGRYHEPVASALHDLGISVCVLNPIVIKQSGAGSVRKVKSDKKDALKIAKYGLDNWTLLRQYTPTDATRQLLKLFSRQYNLYMKTSVALQNNLISLLDKTFPGANKLFDSPTRADGHQKWVDFVADYWHCDCLTHISGKAFAERYQKWCKRKGYHFSAAKAEDVYISSAGHVTTLPKNDNSKLLINSATAELTATRKVLMSVKAEVIRLAQQLPEHEVVVSMYGVGEITGAQLMAELGDVRRFDNRKSIIAFAGIDPEVNQSGSYQRESNPASKRGSSHLRKTLFQVVDTHLKKSPAEEPVYQFLDKKRAEGKPYYVYMTAAANKFLRIYYARVKEYLNENNIIHDTTTPK

SEQ ID NO: 422355 - protein, 374 aa, unidentified
MSMMQHRQARYIGLDVHKASIAVAIAEAAGTPTSYGSIANDPSAIRKLMTRLGGAEVQLRVAYEAGPTGYALHRQLTHMGIECMVVAPSLIPKQPGDKVKTDRRDALKLARLLRSGDLTPVWVPDEAHEALRNLVRARADAKADQLRARHRLSKFLLRQGCWPPSGTKNWSQRHFQWLRQLHFAHVPDQIVFADYLAVVTAATERIKHLEAALHQCAQSSSQVAVIRALQAFRGIGFLSAVTIVAEAGDLRRFRTAPQLMAYAGTVPSESSTGSKQHRGPITKTGNSLLRHVLGEAAHHARHAPRVAGTLKQRQADLPPEIVELAWRAQLRLHTRYRHLGLRIGSHKALTAVARELAGFIWAAGQLLKEAPAAA

SEQ ID NO: 422356 - protein, 415 aa, unidentified
MDVLHDRCAGLDIGKKDLKACVRTPSPTGRRSRRQEIRTFATTTNALLELRDWLLDQQVTLVVMEATGDYWRGVYYLLEDTLNVILVNAAHAKGLPGRKTDVSDSAWLAQLGECGLLKASFVPPEPVRHLRDLTRYRTILTVERTREAQRLEKELEDAGIKISSVASNILGVSGRAMLTALIDGQDDAQAMVEMARGRMRSKIPALVQALTGNFGEHHSFLCRLHLTRIDELCATIEELSARIEAEMRPFAPQIERLVTIPGVKKSTAQVIIAETGADMTRFRTPANLASWAGVCPGHHESAGIQRSGKRRHGNRWLGGALGTAAMAAGRTRERTYLGARYARLVPRLGKQKTIVAVEHSILIAAWHMLTDNVDYHDLGGDYFTKQDPERAMRRIIRQANALGLTVRFDPIPDVA

SEQ ID NO: 422357 - protein, 345 aa, unidentified
MTYFAGLDVGLEETAICIIDSNGGIVRELRACSEPEALVRALRGLDVRYGRVGLEACPLSSWLFEGLAAAGLPVVCLEVRHLRAALAAMTHKTDRNDARGIAQVLRTGWFKAVHVKTAWSQERRTLLTARKRMLEQAFDVENTIRGLLKGHGLKVGRVTRTTFAPRVRELVAAVPVLAAAIEPLLTAHATLRKSFTELHRQVLAVTRIDPVSRRLMTVPGIGAVTALAYCSAVDIPERFPRSRAVGAHSGLVPREHQSGTTDRNGRITKAGDAMVRTALYEAANVLLTRVTRWSPLKAWAVRLAQRIGGKRAKVALARKLAVILHRIWIDGTTFTWTRERAMAAV

SEQ ID NO: 422358 - protein, 348 aa, unidentified
MEHYAGIDVSLECSSLCVVDAMGKIVREVKVASDPEALITWFGSLGLRMGRIGLEAGPLSQWLYAAMKQAGLAVELLETRHVRRAFEMMLVKSDRNDARGIAQLMRHGWFRPVHCKSLPAQEVRAILTARKLVQSKLQDTENSLRGILRGFGLKVGQTTPVRFAGRVKELVAGHPSLELIAQALLAVHAVLQREFKGLEKRVRLLARSDAATRLLMSTPGVGAIVALTYASAIDDPARFRSSKQVGAHFGLTPKRYQSGQTDYTGRISKIGDAAVRTALYEAAHVMLTKPLKGCTELKSWAMRIAKRAGMSKAKVALARRIGVIMHRMLVDGTPFNSAARTAPVAIAA

SEQ ID NO: 422359 - protein, 372 aa, unidentified
MLYAGVDVSKDKVSVAVLTSRGTKLTSGDFDITTEGLRLLELTLKHLKDEISMFIEQTGTYSMPVILYLMERVERLRIYLVDGLNFSRFIKLEGRKKQDKADAISLAEYGRRGLPTRLITDKDIKAYGLKVLISEREHLLKTKNQIENRLRQLIETVFPDSKTLTKPVFWSEIRKGRSLINWKRITDKAEVLSTILRERKIWLEIVHSLEETEREINAFLRANYPEDVKILKSFGFSETTIAYFISVYADVERFKDVKAFKSYMGLGLRIYQSGKKEKNVVNSYTNKYIRKLLYMYVIQAVRERSNHRRVKDYYLKQVEKSGSKKKAIIKTAGKVIEWVYYCLKYKEPFNWEANHETQQKDLSQVNSGQAED

SEQ ID NO: 422360 - protein, 345 aa, unidentified
MGIVDSPRLVVGGVDTHLDTHVAAVVDHNGGVLGIETFPVNAAGYAALSSWMADFGALERVGIEGTGAYGIGLARHFGELDVPVVEIDRPNRQQRRRQGKSDQLDAVEAARGALSGRCSGVAKSSDGQIEALRALMVVKRSARANRIRTVVQLRYLMFTAPDELRQRFAGATPARMVKEAARLRPSGDPVMHATKTAAIALSRRVQALDAEIAAVDEQIEPIVKASGPRLLDIYGCGTDTAAILLVAAGDNADRIRSEAAWAMLCGVAPIPANSGKRDGRYRLNSGGNRQANHAHWRIVLTRLGQRDERTVAYMNRRLEEGLAKPEIIRCLKRYVARETFNALPR

SEQ ID NO: 422361 - protein, 312 aa, unidentified
MEATTVEFEQVVSLGCGIDVHKKMVVATINGKGLKQETREFATFTSSLTELKEWLLEKGITHVAMESTGVYWKPVYHVLEPSGIKIWIVNARHIKYVPGHKTDKKDSKWICKLLLAGLLKPSYIPPKEQRELRDLTRYRKKMVQQVASEKNRIVRILEDCNVKLSSVLSDTSGVVSTKLINILCAGKKVTMQEIDQVYHKKLQCTKEDLYEACNGVITEHSIYLLQMVQDNIATTQKCIEKLNQRIKALLSPYDNVLELLKGVPGLSTKSVEDLVAEIGLDMSVFPSEKHLASWAGISPGNNESAGKKKVDE

SEQ ID NO: 422362 - protein, 397 aa, unidentified
MIAVGIDVSKSKSTVAILNGDGSIRAKPFDVHHVADELQALVDYIKRTSEPPTILMEPTSHYHYPLLKAFQEAELPVCLINPYQMKKYGDTELRKAKTDKRDSLRIAQYALEKSYSLIPYTPQDQKYEDLRFLSRQYSQRISTLTVAKVQLLSLLDETMPGITTILPLKSRDPDNCVLLRFIKRFKSFDVIRKMGKTRFLDSYQVLVKKTKDRFAGSKGLAIYEFVLNSVTTRGENPLSAMTQDQCVDLVSTSQKAADEINLQMRIIAETMPEYKVLRSMAGVGDRLGPIILGEIGDIRRFHSGKALNAYAGNDAPPYQSGQFESRNRHISKRGNPALRKACFEVMQALKLTKPQDDPVYLFLLKKEQEGKPYNVAKMAAVNKFLRIYYARAMELYK

SEQ ID NO: 422363 - protein, 384 aa, unidentified
MSQDGIHAAETTQRDLGAIFASIELSKKTWLLTSMSPGAGEKMSRHIIAGGDITGLFAQLTMLRRRAHDRTGSDYPFVIIQEAGLDGFWVHRALTAEGYESHVVDAASIATSRRKRRVKTDRLDGESLIRALLAFKRGEPRVCSMLRVPTPDEEDRRRIVRERKVLMEERIRHSNRIKGLLFSQGITGYDPLRRDRREQLETLRTGDGRALPLHMKRQVLRELARMELLIDQIKEVEAERDDMLAEERQSAREVVLLSKVVGIGPEFAAVLWGEGLFRRFDNRRQVAAYAGLAPTPWQSGSIDREQGIGKSGNPRLRSTLLEMAWLWLRHQPASTLSRWFNERVAQNGGRFKKVMITALARKLVVALWKYTSAGVVIEDAVVRP

SEQ ID NO: 422364 - protein, 355 aa, unidentified
MESVKYLGFDVHQSTISVAVVNADGKLVMQSVIATHAATILDFIHGLRGTLYLTFEEGTHSAWLYDLLARRVARVVVCNPRQNALLKAGNKSDTSDARKLAELLRAGLLAPVYHGEGSTRTLQELVRSYAALTEDTTRVMGRVKALYRSQAIACAGKKPYGRRHRREWLSKLSEAGLHRRAERLYEELDALQGLRRAAKRELVLESRKHAAAKLLRTVPLLGAIRAALLIGRVQTPHRFRSKRQFWAYCGLALETRSSADYRFEDGQLVRAKKPVFIRGLNRNHNHDLKNLFKSAATTASALHGPFREFYEGLLAKGMQPAMARLTLARKIAAITLSVWKKGESFDAEQLKPQAA

SEQ ID NO: 422365 - protein, 316 aa, unidentified
METAPVTLWVAMDVAKETLEIGCSTPDAVRVRRVANAPAGFRELWKGLPPRAHTAVVLEATGGYERNVIAEWLEAGDRVAVVNLRQVRDFAKGLGILAQTDRIDARVIALFAQHVQPRMLREMPEQQWELADLVTRRRQLLDLRTRESNRSKQTATKAARKSIPQVLNGQINKLDKAIAQLIDSDDDWKAQSELLQSTSGLGRVTAATLLAELPELGELNRQQIAALVGLAPFNDDSGQHQGQRHITGGRAAVRCVLYMATLVATKHNPTLKAFAQRLQKSGKKFKVVQTACMRKLLVILNTMLKNKTSWNPAFDA

SEQ ID NO: 422366 - protein, 360 aa, unidentified
MKIIKQNLGIDVDSKELKISFQALTADLSIKIKGRRTFKNTVKGFKDLEQWAEKKRVKDLALDLTMEATGVYYENVAYYFQEQSSYLVHVVLANTSNAYLKSLNFKSKTDEIDAQGLGQMGLERKLAIWKPVSVQMRDLKKLARERLRLLKEKTMVINQLHAEQASYDPSSTAFRRYKKRIDFLVEQVNEIEKELEQIVDKDPSLRQKIDHVCTAKGIGFITAIGVVAELNGFILFNNRNQIVSFCGYDVIKNESGTSIRGKTKMSKKGNSYVRQMLYMSAMSAAVHDEHHKAYYLRIVSKTGINMKANVAIQRKLLLLIYTLFTNNVPYDPLHFLKAQKRVQPKKNVSVNKKTVKELAP

SEQ ID NO: 422367 - protein, 411 aa, unidentified
MQRVIGMDIHRTFAEVVFWEAGRLRPAGRIDMTRSGLEGFGRSLSKEDEVVVEATGNAMAVVRVLSRYVARVIVANPLQVKAIAHAHVKTDKIDAGVLASLRAAGFLPEVWLPDAETELRRRLVARRNQVVRHRTQIKNGVHSILQAHLIPPCPHADLFGRLGRNWLGRQELPADERAAIDRHLRELDRLGEDLAVLDREISERMIEDPSVKRLLTITGVNIHVAAGLVAAIGDVRRFSSPQKLVSYVGLNPRVRQSGLGLAQHGRISKRGRSHARAMLVEAAWAAAKAPGPLRSFFLRIRTRRGHQIAAVAVARKLAVLCWHLLSKDADYQWARPALVASKIRAMQLQAGQPARKGNKRGAAYAYNVKELRDREIDVARHAEYAYEQFVSRWQPRRPEKRRTGAANEERR

SEQ ID NO: 422368 - protein, 338 aa, unidentified
METYAGIDLHSSNNYIGIINEQDQRLYGKRIPNKLNRVLMALEPFKKELSGVVVESTYNWYWLVDGLKDNGYKLHLANPSAIKQYEGLKHTDDKWDSFWLAHMLRLGILPEGYIYPKEGRPLRDLLRRRLLLVRQRTTHILSLQSMINRNLGMRMSGNGIKKLKEADAEELFDQTHLLLAAKSSISVIRFLKEKISIIEKEALSLLKPHHGFNYLQTIPGIGNILALTIMLEVGDIDRFPTVGDYSSYCRCVKSERFSNGKKKGNGNRKNGNKYLAWAYVEAANFAIRYCPYAQKFYQRKKAKTNGIVGIKALSNKLARASYYIIRDQVPYDAKKLFG

SEQ ID NO: 422369 - protein, 366 aa, unidentified
MTSITHLGLDVHKDSISIAMLPADGGPAVQWRITHTPQAVTRLIRKLRAAGPVQCVYEAGPTGYALQRRLTAAGIDCMIAAPSLIPARAGDRIKTDRRDALKLAQLLRAGLLTAVHPPDERQEAVRDLSRCREDAQKDLVRSRHRLGKFLLRRGLIFRDGCNWSQRHRTWLGGLRFERDVDRIVFQDYLLAVEQHEDRVRALDDRLAEVADSDPYREPVARLRCFRGIDTVTAVALVAELHDVRRFRTAPQLMAYLGLVPSERSSGASSRRGGITRAGNGHVRRLLVEAAWHYRHRPAVGKALRARRRGQPPQVVAHADQAQRDLCRRYSRMTAAGKHHNTIVAATARRLTGYLWQVLTDAELERV

SEQ ID NO: 422370 - protein, 389 aa, unidentified
MPTMTYPTTASEQTYIEVTGGVDTHKDTHTAAALDASGRLLGHREFAATAAGYAALLAWLGTLGQLVRVGVEGSGVYGAGLARFLQAAGVELVEVDRPDRKTRRWQGKSDPVDAEAAARAAQAGRARGVPKTRGGKVDALRALRVARRSAVAARADAQRQIKALIVTAPDALRMTLRGLGDRELIAQCATRRPDRAAAGDPTVATMLALRALARRHQQLSVEIDELDALIGPLVTAINPTLMGLSGVGTDVAGQLLVTAGDNPQRLRSEAAFAMLCGAAPLPASSGRTHRHRLNRGGDRQANAALYRIVLCRLRWDPRTRAYAQRRTTEGMSKPEIIRCLKRYIAREVYTALLDPQPSSVPAITSTAPEESTCSARSAARTNDVDTDKR

SEQ ID NO: 422371 - protein, 318 aa, unidentified
MKTQTNQNINVGVDTGKFTLDIYIRPLDIYFTVSNDDKGIKEAVKTIKKHKPERIVIEATGRLEMPFILACANAKLPFTIANPIHVKRFAGAIGQRAKTDKLDAQLIAHYSEAIKPPLSKLKPENMQAMSDLVTRRNQLLTMQTMEKNRLQIMPKELAMTIKPVLTLFKNQIIKIEDKIAKLIDSCPEYQAKNMILQSMTGIGKIAAASIISNLPELGYINSKQASALIGVAPINRESGRYKGKRKIQGGRPQVRTVLYMAMMSAMQSNPVFKATYQRLLAAGKPKKVAIIACIRKMIVILNSMLRDGVMWDATTVKN

SEQ ID NO: 422372 - protein, 416 aa, unidentified
MNAAGIDVSSRKSTVAVLRPFGEVVKLPFDVRHSAEDLAALAAQLKSIDGETRVVMEHTGRYYESIAKVLHEAGLYVSAVNPLLIKEYGNNSLRKVKTDKADAMKIAKYALDNWSELRDYTPMDTIRYDLKTLNRQFQLASKQKTATANNLIALQEQSFPGIRKLFDSPVRSDGTQKWVDFTHDFWHVDCVRSGSQNAFAERYRKWCKRNRYQFSMEKATEVYALAKSSVVLVQKTSVTKTLVQEAANQLTAISRSVETYRSEMNKLASQLPEYPVVMEMYGVGESLGPQLMAEIGDVRRFERKQSLVAFAGIDPAPSESGDYCSRSNRTTKRGSPYLRKTLFNIMKVHLQRAPADEPVFQFLDKKRAEGKPYYVYMTAAGNKFLRRYYGKVMAYFSTLEGLPPVDMDSTGLHHAE

SEQ ID NO: 422373 - protein, 425 aa, unidentified
MNYKQNEKINQVKESTLVVGIDIGSTTQYARAFDWRGIELGKVFTFSNSREGFEAFKAWMQHLQDKYRKSDVIVGIEPTGHYWFDLGAYLEDEGILLVMVNPYAVKQTKELDDNSQSKNDRKDPKVIAKLVTEGRYSAPYTPDGVYADLRIMVANRKRLIREMTQIKNRFARWFAIYFPEYTDVFGDYEAQSSMLLLKKVCTPEAIVELGAEKINQIWRDAKLRAVGMKRATTLCETAKRSIGLKKGSSAARYEMKLLLEDYEYKKAQLDAVMEEIEKLCRKIPESEQMLAIKGIGVITVAGFLAEVGDVRRFESPRQIQKLAGLSLRENSSGKHKGQTTISKRGRSNLRAVLFNVAIPLIATNPEFKSLHEYYTTRANNPLKKKQSVIAISCKLIRVFYAILANGVTYDAQKMLSDIHRQPQAA

SEQ ID NO: 422374 - protein, 328 aa, unidentified
MKYVGLDVHKEYIHGTVLDESGRVVKRGKFQYTRDGFEEFFNNIDDAKVAMEAGYCWQPGYELLEDMRLKVSLAHPLKTRLIADVKIKTDAKASEALAQLLMMGWLPTAYVPPEDIRRLRELTRLREYLVNIQTRFKNKVHSALMKEGIRGRRGIFAKKRRGLLQELEIDEVNRCLSILDGLDKHIRELSAMIRSIAGESQEAKWLMSIPGVGYYSAVAVLAEIGDVSRFSDAEKLCAYAGLVPSTKESGGKSAHGKITHQGSPVLRWVLVECAWNHLINAEDTSLTRFFHRVARNRGKQKAAVATARKLLKVMYVLLKEKREFRDFR

SEQ ID NO: 422375 - protein, 360 aa, unidentified
MNDGNRAPTMLTAGLNLGDKYSYLCVLDTDTGKLLEEGRLRTTPQALRRRFDSERRMSVAIEAGTHSPWVSRVLKECEHKVLVANPRKTGLIYGQGRKTDKLDAEKLARLARVDPKLLSPLEHRGEQSQAHLALIRSREVVVRSRAQLINHVRGTVKSFGARLPKCSTASFHKKVAACIPEELRPALEPLLETIASLSTRIRHYERELEELAQQHYPETKLLRQVQGVGTLTALTFVLTLEEPGRFEESRQVGAYLGLVPGKEQSGERDPQKRISREGDEMLRRLLVGSAHYILGPFGEDCDLRRHGLKIAGSTAANNARKRAVVAVARKLAVLLHHLWISGEVYEPLYNLRWQPRRRAA

SEQ ID NO: 422376 - protein, 407 aa, unidentified
MEAVHKRVAGIDVHRMKHVVTILIEQGDGTVSRETREFGGFKRDMRALVAWLQENRIQHIVMESTGIYWKSVFSHLEAAGLAALVVNAFHVKNVPGRKTDVSDSEWLAQLARFGLLRGSFIPPKDLRELRVVSRYRRKLTATLAGEKNRLHKLLDDAGIKLGGVVVDIDGVYARKMVEGLIEGRAPEQLSALGRGRLKSGREVLEAAMDGDLSARHRLVLKMILSHLRYLEQELAHLDRYLVAAMNPYAWAWRLLQTISGIDQISAAMILIEIGDDLSRFGSASRLASWAALCPGNNESAGKRKTGKVRHGNPIVRYLLCEAANAARRTKTIFRAKYESLVIRRGHKKTIIALAHKLIRTIYVLLGRRKPYRDSTFDYEAASVAKNAPRWIRALKKYGYWPQVAAAS

SEQ ID NO: 422377 - protein, 411 aa, unidentified
MEQIHDRVAGLDVHRDQVTVCVRTPGPGGGVQTEKARFDTTTGGLAALAGWLAGREVTLAAMEATGVYWKPIYYALEDRFLVWLCNAHHVKNVPGRKTDMSDAEWLADVAAHGMVRPSFVPPPPIRELRELTRYRKTQVDARAAEIARLEKVLQDAGIKLTSVASKVLTQSGRAMIEALIAGERDPAALAGLAKGKLRPKIPQLTAALHGHFGEHHAIAAARILAHLDFLGDTIAVLDGQIAARVAGHCQSAARLLADVPGLERRSVEVIIAETGADMSCFPSPAHLASWAGLCPGNHESAGKRRKVATTPGNPWLRRTLIESARAAARTRDSYFGAQYRQIARRRGPNKAAVAVAHSLLDVIWHLLTTGEVFADLGADYFTSRQDKEHQARRLISQLEKLGFTVQLTDAG

SEQ ID NO: 422378 - protein, 314 aa, unidentified
MNKEEEKKYYVGIDVSKNQFDIYLLPTQKHITITNDAKSIKSLIKVLSTLSDALIVMEATGGYEKPLAIALKKAGFSIAVVNPRQIRDFAKALGKLAKTDKIDAHVIALFAEKIQPQPSFSIDEKREKLAELTTRRTQLLDMMTMERNRLDKLSLESKKSINRILKALQKELVDIEAQQQTLIQQDAHYSELLNILLSVKGVGVVVATILIANLPELGHLTSRQIAALVGLAPFNHDSGKLRGKRAIRGGRASVRCPLYMATLVAIKHNLKIKTFYQRLLAAGKLKKVAITACMRKLIVCLNAMVKNRNSWITC

SEQ ID NO: 422379 - protein, 337 aa, unidentified
MNNSVIGLDIAKNIFHLYTFIEGKAVKKKLKRAELLAFFANYPVSLIGIEACGSAHHWARELIKLGHEVILLNARYVKSFVVGNKNDFNDAAGIFDAVTRPNKRVVSIKTIDQQDIQLIHKIRQGLVGKRTALANQLRGLLSERGIIIPKSINQVRKHLPLILEDAENDLTPLSREVFAEHYEKLTALDEEVKRQDQRISRLCNNDALSRRFLDVPGVGPMTASIVASDIGEGKGYQSSRDYAASLGVVPRQHSSGDKQIYLGISKRGNRYIRTLLIHGARAVLKNCHHKQDKLSLWLQALIERRGFNKAAVALANKNARILWAMATQEKDYDALLV

SEQ ID NO: 422380 - protein, 372 aa, unidentified
MKPVNYSAYIGLDVHKDTIAVAIASPERQGEVRFYGNISSAKDSVIRLMKKLIKLHEPILVCYEAGPTGYGLYRLLLSMNIDCIVVAPSRIPKLSTNKIKNDHRDAVALARLLRAGELVDIWVPDITHEAMRDLVRARSCAKKDTKVAKQRIQSILLRAGKIYEKKMWTVRHRVWLANQSFPLPSQQIAYEHYRQSLEQIENRITQLDQEIDRLLPDWSLNNLVNQLQALKGVGRTIAISVVAELGDFSRFSNPKQIMAFLGLIPGEYSSGATVRKAGITKAGNVELRRLLYEAAWSYRTNAKVGNWLVTYRPDSVCQEAKDISWKAQQRLCFRYRSLVAKGKKSQVAITAVARELLGFMWDIAVTTQNQRV

SEQ ID NO: 422381 - protein, 400 aa, unidentified
MKQFNPKAVAIESETALALIQQQHITANQYGRYIGLDVHKDTIAVSIAAVDGGKPRYYGEIANTQKAMEKLVRKLSPDSEVLSFCYEAGPCGYGLYRQLTQIGHDCIVVAPSLIPTKPGDRVKTDRRDSESLARLHRANELTPVWVPDSEQEAMRDLTRAREDMKCLERQSRQRLNAFLLRHGKNYDSGKSKWTQAHWRWLETIKFDQPVQQIVFQEYIDCVKKQQERVKGLEKEMEKALDSWRLAPVVEALMALRGCKLITAMTVMAELGDITRFDSPRQLMAYLGLVPSEYSSGKSTRRGGITKTGNGHVRKVLTEAAWCYRFPARKTAHLQRRAERTPEAVQAIAWKAQKRLCGRYQHLMDRGLLKVKVCTAIARELTGFIWAIACEVMGKNPSLAA

SEQ ID NO: 422382 - protein, 340 aa, unidentified
MTIAIIGLDLAKSVFQAHGVDDDGKVVLVKKLHRKQMLPFFSKLSPCLIGVEACGTAHYWARTLAAMGHEVRLIPPSYVKAYVKRGKSDALDAEAICEAVQRPTMRFVPVKSVEQQGILMTHRARSLLVRQRTMLANALRAHLAELGFVANPGIANLAKLAEQVMADKDALPSYARAALEILIRQIMAVSAEIAELDQQLAVWHARSEASRRLAAIPGLGIITATAIAATVTDAEQFSSGRQFAAWLGLTPQQHSTGGKTRLGGISKQGDRYLRRLLVVGATAVMRHVKDKPTPMADWIRKLSEKKPFRVVSVALANKLARIAWVVLTRKEAYHPYARLT

SEQ ID NO: 422383 - protein, 411 aa, unidentified
MGERVRLFIGDDWAEDHHDVELMDVAGRVLARKRLPEGVAGMTRLHELIGQHLGAADEDAQVVIGIETDRGPWAAALVAAGYAVFAVNPLQASRYRERHGVSGAKSDRGDAHMLTDMVRTDSHQLRAVAGDSPDAGAVKVVARAHKTLIWERTRQVQRLRHQLREYYPAALAAFADLDAPGALELLARAPDPARAAKLTRAQVSAALKRAGRRDIPGKATAIMAALRSGQLGQPPAITAAYAATARSLIAVITTLNEQVKVLQGQVEADFGRHPDAEIYLSQPGLGPVLGARVLGEFGDDPHRYATGKARKNYAATSPITRASGKRKVVAARFIRNDRLTDALMAQAFTALSASPGARALYDAERARGAEHNPALRKVANRLVGILHGCLKTRTRYDEAVAWPHHEIKLAA

SEQ ID NO: 422384 - protein, 466 aa, unidentified
MNRKERKEWQQRLYAEDAGLEVVHPDAAGIDVGNASHFVAVPPDREEQPVREFGSWTADLRRMAEWLKGCGIRTVAMQSTGVYWVAVQEILEREGFQVCLVNARGTKNLPGRKSDVQECQWLMKLHTYGLLRDSFHPPEQIRAVRTIWRQRDRLVKEAGREVQQIQKALTTMNVQLANAISDVSGVTGQAIIRAILQGQRDPWQLAKLRDYRVAASEAEIAHSLEGNWREDVLFELQQVVDAYDFHQKQIAACDVQLQRYLSAVPMRSSPGAAEPSTADAPAEKPKKQRQHKWQKNQPVFDLAAELHRTMGVDLTAIDGVDVMTTQVILSELGPDLSSSFPSEDHFASWLELAPRRDVSGGKVIRQKSRKSNNRVATALRMAAQSLWRSDSYLGARYRHLKAPLGGQKAVKAMARYLACLIYRLLTKGQAYVDRGAAHFASKRTERELLGLRRKAAELGMQLVAVS

SEQ ID NO: 422385 - protein, 428 aa, unidentified
MKYTQNEKILQVTEKTLVVGVDIAKERHVGRAFDFRGVELGKRIEFENRKEGMEKFLDWANKIMKANGKENVIVGIEPTGHYWLCFEQYLRENGIKVVLVNPFHVKRSKELDDNTQTKSDIKDPKTIAMLVKDGRYTEPNIPEGIYAEMRVAMNIYERLQKQMNVLKNQIINWLDIYFPEFLEVFSDWEGKTAIATLREMPLPCDVVEKEVEGIIEYWRDKVDKRAISRRRAMDLAEAAKRSIGKKEGRKLARQEIKYLLEEYELLKKQIEEIEGEMAELLREVPNGEQLLEIKGVGVKTAVGFISEVGDIRKYEDARQIQKLAGLNIIENSSGKYKGQTCISKRGRGRLRSSLFKAMITIVAKNEEFKQLHRYYTTRQNNPLKKKQSLIALCCKLIRIFFAILKKGIRYDGNKMLSDIKREALARTA

SEQ ID NO: 422386 - protein, 462 aa, unidentified
MPRRKLKTTTRPRQARLVYREDAPTLQVQNPHAAGIDVHTDNHVVCVGPGLVQTFGAYTADLQAIADYLRQAGVTTVALESTGVYWIPLFEHLQALGFECYLIEPGQLRGCGARPKTDALDCQWMQRLHTYGLLKASFRPPESVRALRAYHRQRQMVIRHAAAHVQHMQKALEQMNVKLTEVLSDITGVTGLRIIRAILAGERDPHTLAGLASPICAKSRDEFALALQGLWQPEHLFELRQAHDLFQTYQRLVDECDRQIKAELAGQPDRAGDKPGPGPRPRRSRKKNDLRFEATGPLFRALGVDLTEIEGIDVGTALVVLAEIGVDVSRFPTEKHFAAWLGLCPNTARSNRREKRQSPRQGASRLKQALRMCAQSVGRTQTPLGMFYRRIKSRIGGMGACTATAHKLARLVYRLLKYGRAYVKQGMDEYAAKMHTNAERILRKKAAALGYELTPRAAGATT

SEQ ID NO: 422387 - protein, 336 aa, unidentified
MYKVGLDYHLKRSVFAVLDENGKEVMIRTVPGPIDKLLDELRQVKRPFEICFEASTTYGHLHDRLAKMARRVVVAHPGKLRLIFQSKRKNDRIDARKLAKLLYLGEVPRAYVPKPDARAWRAMIEHRHTLIAERTRIKNRLRAFLRTNGIAAPRGLWTKRGLAWLTEVTFDQPFHTIMRDIEMERLASLNKMVKRVERELNRVGNHHAGVFLLRSIPGVGIRTGEAVAAYIDDARRFGKNKNIGSYFGLVPCEDSSAGRIRLGHITRQGPGVVRKLVTEASWQAIRRSPRILAYYERVRRDDANRKKIAIIAVAHYLLRAMHAMLRTGQTWDEQAA

SEQ ID NO: 422388 - protein, 392 aa, unidentified
MYIIGIDIGKNHHEASIVSPKGRQIGHSLRFATTHKGADSLISFIFKNIGDSPCVFGMEATGHYWYPIYSFLKFKGYTIYMINPIQSDSLRKMYIRQTKNDSIDSFLIAEVIRFGQFEATSMADENILAMRQLCRYRDSVVSSRTEIKLRISTIMEQIFPEYEKQFSSLWLGTSMGILEKYLTPENIQNAPIDELFEIIKDKSHNKLTIKKAVSIKDAAADTFGIKIAQDAFAFQLKQLIDRLNFLNEQLEALDHEILSYYEKFDCYLHTIPGIGMIAAAAILAEIGDIHRFKNSSALVAFAGIDPTVRQSGEFNSIHNHMSKRGSPYLRHAIFLAATTCSFHNSPLNAYYKKKREQGKHHLTATGAVARKLTTVIYAVLRDGKPYEPKSFC

SEQ ID NO: 422389 - protein, 363 aa, unidentified
MTKNQLDFSGIIIYCGIDVHKISWRVNIQDGEFELEDFTQSPDPEVLNKHLNRRYPNATFKIGYEAGFCGFSIQRALRNLGKDCLVINAADIPTSDKEKRQKQDKIDARKLCHHLQTRKAKSVYVPDMGMEHVRTLVRTRERLVNTQTRCKNRIWHLLHFSGLSLPEACEEGRYWSKRFVNHLLKMDCGGSPSLKQSLELYIKEHLHTRELLHQAIMAIRETCKMDAHAESIRILRTIPGIGEVNAAVILFELQDIRRFKRFDHLCSYAGLIPETSDSGDTKRTRGITNRRNHHLRVALVESSWSVVRKDPALLMKYKNYCKRMEKNKAIIRIAKRSYRCLNPKTGTLMAQKPKLYCLILIIL

SEQ ID NO: 422390 - protein, 338 aa, unidentified
MKLYCGIDLHSNNSVIVILDEEDKMVYRKTLTNNLPLILQQLSVYSSKIIAIAIESTFNWYWLVDGLKEAGYSVKLVNTAAVQVYSGLKYTDDVDDARWLAHLLRLGILPTGFIYPKEERAVRDLLRKRSQLVQQSTTNILSLQNILMRNTAQSLTSYRIKKLEDDQAEQLINDPNITLALKSNLKVIRCLQNTITEIEVTILQQVRIRAEFKQLLTVSGIGEILGLTIMLESGDMNRFAKVGNFSSYCRCVKSGRFSNGKKKGEGNRKNGNKYLAWAFIEAANFAIRYNDKVKAFYQKKKSKTNGIIATKAVANKLARACYHILKDQVPFDVNKAFT

SEQ ID NO: 422391 - protein, 344 aa, unidentified
MSMIRVVGIDIAKSVFQVCVWMVDGSVAWNKKISRSKLLDTLRQFEPGTLVAMEACATSHFWGRTLASMGYCVRLIPAQHVKAFVRSQKNDANDALAICETAFRPGIHFVSVKTTEQQDIKALRNTRQLMVEQRTALANQLSSLLAEYGFTIPVGILRLQQQLPELLEDASNNLTFTLRRLLSSLREDIQALNERITSLDKEIAALSSQQIAYRHLLTIPGVGPLIAAAFLSEVDATQFSSGRELSAWCGLVPRQHSSGGKQRLSSVTKNGNRSLRTLIIHGARSVMRCVKKRDDSLSSWLQRLEARRGFLKTTIALANKLTRIIWRVLTDGVDFNMQKAVAMN

SEQ ID NO: 422392 - protein, 364 aa, unidentified
MQCVITNTELSSHEGTRCQFNGGTGAIKLGIDVHQDFYVVVEQVDGSNPKPPQRFAKAAFLHWATKLKNGKGEVYAVYEACGFGFSLQRQLSSLGVQCHVVCPQKLDEQNRRVKTDGLDAKALVLKLDRFVQGNRSALALVRVPTEEEEQKRAIHRQREQLVKARMQLEAQGRSLMVNHGLEPVKSWWKGRTFAALQVPEWMKELLGNSQSILLALQEKIGALTLQLQAAALAQQPRGLGKMTSVIIDREIGDWKRFNNRRQIASYTGLCPGEYSSGNTRLQSCVTKHGNPRLRAALVELAWRLVRFQPNYKPIKKCKRLLGKGALATGAARKKAIVAVARQLAVDLWRIKTGRLRAEELGLIN

SEQ ID NO: 422393 - protein, 435 aa, unidentified
MNNDPPIQSSSNSSQSSGNSSDSLIVGIDWADAKHDLTVIDGNRTLHFRVSADNNDVAELIAHLGQLAAGRPIAVCLEKARVRIIYHLMLHENITLYPVDPKQAARYRESFRSSGAKDDNRDSYYLARMLLERQSDLKPLQPDDPLTRRISLLCQTRRQLVDDKTSVIQQLHAVLKMFFPLLLALPGARLDSQLKQEVLRRWPDPRKFKKVNSLTLQKLFKRHRCGNKEQIDAIIGQVRGATLATSDASLIEPLVIRAKTLADQLRSLDKGIEELEQEIAKAMNQHPDAKLFTSLPGAGAALAPRLLAAMGSDRERYADASELGSYSGILPVTRQSGKTKHVCRRRACPKYLKQTFHEFADGARKFSDWSGAFYRLQRSHGMAHHAALRKLASRWQRILLSVWKSRVPYDEARYLESMRSKNHPLMQFLPQKQAV

SEQ ID NO: 422394 - protein, 413 aa, unidentified
MCALCGRADVEPEAELRLFGTYNAELGKLRQWLQETGCTHVVMESTGSYWKPVYAALEGSGMQILLANGEDVKGRRGHKTDWQDCQFLANLLRHGMIRPSFIPPQAIRDLRDLTRRRRQLIGESASERNRVQKVLEEANIKLGSVLSDVFGVSGQLMLEKLLQGEPDMELIANLAQRRARARIPEIRQSLEGHRLRDHHRTMLHLSLDHLAFLEQQINKIDSEALLLIEREGLQPAFELLQSIPGIQELSAAALLAETGPDMTVFPSAAQLSSWIGVAPGNRISAGRNQSGAIARGNRWARTALVECAWAAAAKKNCHLKERFRKLCVKGRKPALIAVAHSLAIIIHRTLASGIPYREPDQTIQDDRKRQRLIRHYVRRLGRLGVTVHSLRPESAGHYKSPSGTRTQHIHRRP

SEQ ID NO: 422395 - protein, 325 aa, unidentified
MAKRITVCAGIDTGKRKLDVAIDGGCEQLQVENTAEGHKVLLEWLQRHKVKRIGIEASGGYEQPVVAALRRKRFVVVVFQPAQVRAYAKFHLQRAKNDKIDAALIAACTAAVKQIYPAPDPRLSPFAEQLTMIDQIGEDIMKLKNRIETCRNERIRAVWKEDIARLAKRERTELKALVAAIRQYPDLAERLELIHSVGGAGLPTSVAILVRMPEIGQLTREQAAALAGLAPYDDDSGDQVGARHIDGGRERLRRALYLAALPASFRWNPQLIALYQRLRAAGKEHKRALIACARKLLIFVNTVVARGTPWQGEPPAARTANPSTA

SEQ ID NO: 422396 - protein, 359 aa, unidentified
MITIGVDPHKRVNEARALDAQGRLVGQWRGDNDRAGWQAMSAWAAGLGQERQYAVECAWSYGRGLSQHLVRQGDVVTNISPHLTAGGRRRARRPDKNDGRDAEAAGRVLLAEPPGSLPLVQPEDETTELAVLNNERETLKGQSVAIQNALHGLLSDLEPGYQQRFKSLKTKGSLAVLVAYEAPGGADGVQAVRAASVRRLAERLRLTVEHMAALEVMIRERAQRFAPLVEQDGVDWLRAAQIAARLGPGQRFRGEAALAAMAGTAPIETSSAGTVRHRLSRSGDRQLNAIVHGIALTQLRYSDEMKAYITRRRAEGKTFPEARRAVKRFIARRIYRNWVKCWDEQPSCPAAPYSTSGCT

SEQ ID NO: 422397 - protein, 449 aa, unidentified
MMEQEMGTSKVKPARGKLEVLHPDAAGIDVGGTAHYVAVRNEAAVESVRQFGVYTRDLHALADWLRTCGVKIVAMESTGVYWIPLYELLESRGFEVMLVDARQVKNVSGRKSDVLDCQWLQQLLSYGLLKAAFRPQDQFCQLREFNRLRTRLLVDQGRSVQHMQKAMTLMNIQLSQAISDVAGVTGQKIVRAILAGERDPMVLAAYRDSRIKASEEEIAASLQGTWKAEHLLALKQAMGRYDFFAEQLQECDQQIEAVMQQLQAHTKELAKGKKRSKAKNAPKFNLRERLLKMCGVDVTRIDGIGETTALNVVSEVGTDLSRFPSDKHFASWLGLCPGTRISGGKVLGSKTKHSVNRAAQAFRQAAAALRSSKSALGAYYRRLCARMDKAKAVTAAAHKLARLFYALLTKGQEYVDQGQQYYEERYRQRVISQLQRRAQSLGMALVPTA

SEQ ID NO: 422398 - protein, 310 aa, unidentified
METIYVGIDVSKDRLDVHVRPSGEAFAVTRDGKGLNELIERLRSLAPMLVAIEATGGFETIAAAAIAGAHLPLAVINPAQVRHFAQAVGKRAKTDPIDAAVIARFAEAVKPEPRELPDEAARLLSELVGRRAQVIEMLVAERQRDKRATAVRVRKSIARHIATLEKELPEIDRDIDTMVRGSPVWREKEDLLVTAPGVGNTLARTFLADIPELGRLTRRQIASLVGIAPFTRQSGRWRGKSMIAGGRAIARSAVFMAALSAIRCNPPLRAFYQRLLARGKPKMVALIAVARKLLTILNAMLRDKKQWQHA

SEQ ID NO: 422399 - protein, 346 aa, unidentified
MKYIKKVIGVDISKDSFVIRFGTLDNNLEQRISATFKFKNNKFGFNQLLKTINKTKYFSYDDQTFEETSIWFVMEATGVYYENLAYFLTENKFSISVILPNKINHFAKTLEIKSKTDEIDAAIQTQFGLEKKLKPWTAPSSTLKTLKELTREYHTINKFLTQIKNRLHAKSYAHKPTIETVKRINEQKKLLKKQLKQIREQIVTITKNDNQLYSKIKKITTTKGLRIITVVSVICETNGFALIQNNNQLTSYAGYDIIHDQSGTHKGKTKISKRGNAYLRKAVYMPAISAARYNENFKALYKRLCITKVNKKIALVAVARKLLILIYTLWKKDQEFIPNYKNIKAA

SEQ ID NO: 422400 - protein, 355 aa, unidentified
MNSEKYIGLDVHQATIVVAVMDSSGKLVMESILETQAATILQFFAGLRGTLAVTFEEGTWSAWLYDLLHSRVDQLVVCNPRKNALLNDGNKSDRIDARKLADLLRGNQLKPVYHGETGVRMLRELSRSYLTIVKDLSRVMNRLKAVYRSWAIPCAGRDVYYTRHRAQWLAKIREAGVRRRAERLYEQLDMLQHLRQQARRELLAESRKHAITAKLRQIPYLGPIRVALAVALIQTPHRFRTKRQLWAYSGLALETRTSAEYRFVEGQVRRSKKLLSIRGLNKDHNHDLKGLFKGAATMASVRPGPFQDFYQAALTKGIKPTMARLTLARKIAAITLTLWKKGENFDAEKLKSQAA

SEQ ID NO: 422401 - protein, 420 aa, unidentified
MKPLSDDEFTAFIGIDWADRKHDICLQGAHGERREFARIEHKVDAIDQWAISMRQRFGGPIAVALELTKGPLVYALQKYDFFVLFPINPATLAKYREAFKPSRAKDDPTDAEHALELLMHHRDRLAALKPQSVPMRTLLHLVEQRRRVVDDKTRFTNRLGYALKQYFPQALEWFDHTDTIVFCDFLTRWPTLLQVKRARATSVRAFFWSHNVRHVNVIDERIQAIKSARALTQDVAVITAYRLQALVLVDQLRVTLQAIDRFDAQIAEIAPSLPDYALFKSLPGAGPHLTPRLLVAFGEQRERFATAAEIQKYSGVAPVTERSGNKCWIHWRWQCPTFLRQTFVEWAAQTINKSFWAGAFYRQQRDKGSSHQAAVRALAFKWLRILYRCWQTRTPYDESIYLNALKQRGSPLLSKLVTQT

SEQ ID NO: 422402 - protein, 421 aa, unidentified
MSNCTLSKKLAGVKPGTLFVGVDLALDRNVAVVLSERAEQLARFGFPNERDGYDYFYRRLEAIQEQQQAPAVLVGMEPTNYFWKLLAADMEQQRPEYSYRLVNPYTVKKNREGDHLDRSKDDNRDAFTIGDLLRTGKYTETRLLHGGYAELRQYVTLHKRLQGDIRRQKTLIRNIAGQLFPELPHVFKDFTGETALAMLRNHAAAVTLRSKSQEMFITDVWADFHGRRLYKAKLRRVHALAERSVGLKNGVAALQLALRTHIETLQVLQRQSEEVCTALIDAFLALPESAYWLSVHGLGVITAATILSEIGDPGNYTSGRQWVKLAGTQPVPNTSGRKSRSQTPMSHKGRPQLRTALFFAVMCLVQVDQAFARDYLHLQTREKNPLTKMQALGVLMNKLLRILWALMRNSTFYTPGFPGTA

SEQ ID NO: 422403 - protein, 341 aa, unidentified
MQITTIGLDIAKNVFQIHGIDAAEKVIVRKQLRRCQVTAFFEALAPCLVGMEACATSHHWARELTKLGHEVRLMPAKDVKAYVKRNKNDAADAEAICEAVRRPTMRFVRIKSAEQQGQLMLHRARDLLMRQRTQVINALRAHLAEFGITAAQGREGIKELLAIVAQEEGSRLPSDAHASLTVLAAQLQAVQTMIGSLEKRIVAQHRSNEASKRLETIPGIGVIGATTIAAVVPDPRAFRSGRDFAAWIGIVPRQDSTGGKQKLGPISKQGDQYLRRILIVGAHAVLRRARQQPETYPWLTQLLARRPFKVVAVALANKMARIAWALLAKGGTYRAPQLVAA

SEQ ID NO: 422404 - protein, 418 aa, unidentified
MIHPKMKRLYVGIDSHKDTHCAVVLNCFYEKLGEVTFQNAPSAFDGFIKELGKLKPKGVSFIFGLEDVSAYGRSLTVFLAKRKYQVKHVNASLVAAERKSRNIPHKTDSYDAECAARVLLNRSDQLPDADPQDKFWVLSNLVARRRSIVKMNIMLKNHLHSFLTSHYPSYSRFFTNLDCNTSLIFYEKYPSPSKLQGVTIEELTELLEENSAKTLRAAKARQILDCVKKDGDTTTDYQDARDRAIKSTINQINNNIKEIESIEGILEELLEHFDYKLTSMKGIDIVTAANLIAEIGDIKKFPTPAKLARYSGVSPVTYSSGKTEAQYANQRGNRVLNSIFYQLAVRVTMPVGKNKRLINPFFFEYYQKKLREGKTKGQAFKCVQRRLVNIIWRMMTYHEEYINPPTFDAPKEPKEKTS

SEQ ID NO: 422405 - protein, 424 aa, unidentified
MQVLYPRCAGLDVHKETVVACVRVVAGGRVTREVRTFATTTAGLLALRAWLGGTGCTHVAMEATGVYWKPVWHILSDDGPFELVLANAARIKNVPGRKTDVNDATWIADLLAHGLIAPSFVPAEEIQELRALLRTRKQLGREQASHVQRLQKTLEDANIKLDSVLTDLRGVSGRAMLEALIAGESNPERLAALADRRLKAPPAVLREALRGRVTEHHRFLLRLHLGQIDALEGALQQLDRQVDMALARMDAARATGQAPYQALILLLMTMPGIGPLAARMILAEIGGDMSRFPSAGHLVAWAGLCPRHDESAGKRRSTRLRKGAPWLKSLLIQCAWAASRTKNSYLRAQFYRLRSRLGPKKAICAVAASMLTAIYHMLKNGTPYQDLGPDHFDRRPKEAKAKRLVGQLANLGFDVAIKPLPAAA

SEQ ID NO: 422406 - protein, 342 aa, unidentified
MSDTIIGVDLAKRVFQVHGATVTGHVIFRKKLAREQFRIFMAAQPACVIVFEACGSASYWAREMEALGHEARLIAPQYVRPFVKRQKNDATDAEAIVTAARQPEMRFVTPKTQEQQAKAVLFRGRERLVHQRTELVNALRAVLYECGNVFPIGLSHLKRIDALVKDPACDLPALIIAECQDLLLQIAAKTERIDVKTKTLKALAAKTDTSRHLQTMPGVGPLTALAVEAFAPDMAQFKCGRDFAAWLGLVPRQRSSGGKERLGRISKAGQADIRRLLIIGAMTRIMGRARHKISANSWIGRMLARKSKMLVGIALANKMARQIWAMLSKKEDYRDPALATAA

SEQ ID NO: 422407 - protein, 397 aa, unidentified
MYIVGIDIAKRKHEAAVIDGEGTVIIKPFSFTNNCSGYNRLLAMLTKAKLPLDEVSFAMEATGHYWLALFTRLQKEGFRVQVINPVQTNSIRNFYIRQAKTDPRDALLIAEVIRFGHFSESTLHPENIYELRELCRGRHAIVSMQADVKRKVVALLDQVFPEYETAFTNLFGDTSMAILQTCPTPKELSEMPFEELCHLIEVSSHKRFRMAKAQELQALARNSFGFAMAGDVFSTMIRLYAKHLDFLKQQVREMDRKIAEIMDTLDTPITTITGIGPTLGAYILSEIGDISRFSSAAKLAAYAGIDPTMRQSGEYNGVRNRMSKRGSPYLRHAIWLAASSAVLHDPALKLYFQKKRDEGKPYMASVGHACRKMVSIIYAVMRDNKAYTPYIPNEISA

SEQ ID NO: 422408 - protein, 315 aa, unidentified
MATGSKVYVGVDVSKDVLDVAILGEKRVEQYANTKAGIKDLVKAMSQVSPGVIVVEATGGYERAVVQGLFVAGLPVARVNANRVRQYARARGLLAKTDRLDAQNLADYGKHVQPRLYEAKSEQGQRLSAILVRRRQLVELVKAEKNRLRTVYPEMGVSIERVLSCLQEEIKRLDQEIRTFLDNNPAWLEQEQLLRSTQSVGAVTAATLLAELPELGRLDRKQIAALVGLAPINRDSGKRSRYRKTGKGRPLVRSVLYMATLTGIRYNPVIRKHYQQLLSRGKEKKVALTACMRKLLVILNAMMRDQEPFRYAATS

SEQ ID NO: 422409 - protein, 413 aa, unidentified
MLKIVYPICCGIDVHKKFVVACIATTNGKGVTTYKSKRFSTYTKNLRALSEWLAEHNCRDVCMESTGKYWHPVWNVLELTCNLVLAHPKYLKAIRGKKTDKKDAKWIADVFKHDLVSGSFIPPAEIRELRDLLRYRTKLTNHMTGEKNRAQNSLTMSNIQLAHAFSDVFGKSATAILSYLLEHPDEKNFDVAPFVDPRCKTPIEEIQLAVDGNVSHAQAEKLKVIRSHMDSLTLCKLNLESAILELAEPFLPQINLVATVPGIRDFSAITVIAEIGTDMSVFPSSKHLCSWAGLAPQCNESGGKKKSSRVSKAGAYIKPLLIQCTNAVATSDKHPEIRNRYLAIKKRRGHKKAIIAIARMLLTAIYHMLQKNEPYDPELYRKADVSPVDPVEQAVKFLEKRGFVVVEATSPSP

SEQ ID NO: 422410 - protein, 421 aa, unidentified
METGKKERIFIYEKRKTAFIGIDMHKDIHVAVVIDCWTNILGEITFENRPSKFDKFMQDVKKIYKDLTPCFGLEDTRGFGRNFASYLLGHKFTVKHVNPAYTDSMRSSAPMSKKNDSFDAFCVAKVLRDMVDTLPDEEHNDLHWTIRQLVKRRNSLVKGIVIAKNQLNSNLTNVYPSYKKYFCDVDNKTALLFWEKYPHPQYLKGVKPETLLEELRTIHKGMKQEQAEMILTLSEQNNPKEKEFQTERDLIIKSLVREIRFKKQENEDIDNELERLVDLTGYKLQTMPGINLITASNIISEIGNVQRFPNSDKLAQFCGVCPVNFSSAGKGKDQRSRQGNRVLNAIFHFLAIQLVQISPSGKPRHPVFREYFEGKIKEGKTKPQALVCVSRRAVRIIYGMMRTKTEYKPFEKVQEVTGIQK

SEQ ID NO: 422411 - protein, 424 aa, unidentified
MEVMHERVAGLDVHKETVVACVRVMVGGRRPKRECRTFATTTEGLLSLLAWLTANRCSHVAMEATGVYWTPVWKILSDGDFELIVSNAAHIKQVPGRKTDMNDATWIADLLACGLIRASFVPEEEIQELRSLMRTRKQLVREQTRHVQRLQKTLEEANIKLDSVVSDIMGVSGRRMIEAMIGGERNPQRLAALADRGLKASPKQLYDALHGRLREHHRFLLKLHLTQWDALDATIRDIDRQVDGQIERMDETTEDQQPPFRQLILRLCSIPGVSHLSATSILAEIGRDMRRFATAGHLVAWAGLCPGQNQSAGKSKSSRLRKGAPWLKTMLVQCAWAAKRRKDSYYMAQFQRLKARRGPQKAICAVAASILTAIYHMLRANAPHRDLGADYFDRRSPDAKARRLVRQLTKLGFAVNLQPLDAAA

SEQ ID NO: 422412 - protein, 317 aa, unidentified
MQKTINFVGIDMAKNDFYACLKDTVEPRKFNNDTTGIKSFFKHLLKNDFQKGNTILGVESTASYHLKLCIDTMERDYKIKVINPLIIKKQNQTDLRRVKNDKKDSRLIRFCLIGGAGYLFNNDPEAIILKSLIRQRDSLVFSKLKFTRQQADIRLKEKCLKQSISPVYVEIINVLEEKINLLKTELRLYRPKEQYLLESIPGIGPITAASFISEVENINRFKRPEQLVAYAGIDPRVHQSGTSINGKGYISKRGNKILRTRLFNAASVAVLHDNMFKIFFQKKKGEGKPYRVALVATMRKMTHVIHAVWTRGTPFVK

SEQ ID NO: 422413 - protein, 322 aa, unidentified
MSVSVLGIDIAKQKFDAALLLDGKTKHKSCKNSVEGFETLIIWLEKQGIQKVHACLEATGNYGEDVAIYLHEAGHTVSIVNPARIKGFAQSELIRTKTDKIDAGIIARFCLAMKPEPWIPPAPEIRSLRALVRRVDSLIDMRSQEKNRISTAHESVMHLIKEHIAYLDKEIEKIRRQIADLIDQNPDLKQKKDLLDSIPGLGKATIPHLLAELNDLEKFRHVREVVAFIGLAPKETLSGSSIKGKPRLCKIGHARLRKALYMPALVSIQCNPMMIAFYNRLKEKGKNGKVIVCAIMRKLVHVIFGVLKSGKKYDPNYKPVLA

SEQ ID NO: 422414 - protein, 402 aa, unidentified
MNAVGIDVSKGKSMVAIMRPFGEIVSAPFEIKHTASDINSLVKLINSVEGESRIVMEHTGRYYEVLAHQLSEANLFVSAINPKLIKDFDNDSLRKIKSDKADAVKIARYALDKWQNLKQYSVMDELRNQLKTMNRQFGFYMKHKTAMKNNLIGILDQTYPGVNTYFDSPARSDGSQKWVDFASTYWHVDCVRKMSLNAFIDHYQNWCKRKKYNFSQSKAEEIYGKAKELVPVLPKDAITKLIIKQAVDQLNSASTTVESLRTLMNETASKLPEYPVVMAMKGVGTSLGPQLMAEIGDVSRFTHKSAITAFAGVDPGVNESGTYERKSVPTSKRGSADLRKALFQVMDVLIKTHPQDDPVYQFLDKKRAQGKPYYVYMTAGANKFLRIYYGRVKEYLSSLPES

SEQ ID NO: 422415 - protein, 388 aa, unidentified
MQVIADRPEAPSAIRTNLGAIFVSLELSLSTWLITSLSPGSGEKMSKHMVQGGDIAGLLRRFAQLQEKAQARTGRNFPIIVIQEAGLDGFWIDRVLKNEGIESHVVDPASVATSRRRRRAKTDKIDGEALVRTLLAYKRGERRVCAMVKAPTPEEEDRRRLCRERKVLITERVKHVNRLKGLLFSQGVCGYEPLRRNRRLRLDELRTGDGRPLPKHLKAQISRELDRLELLLEQIKAVETERDALLAAQQIAAPPSAAMLLAIKGIGPDFAAVLWSEGLFRHFDNRRQIASYAGLAPTPWKSGSIDREQGVSKAGNPRLRTTLIQLAWLWLRHQPQSALTLWFKERVVRNGGRLKKATIVALARKLLVALWKYVTAGVVIEGAIMKAV

SEQ ID NO: 422416 - protein, 346 aa, unidentified
MGMLAHQVDHVIGVDTHRDSLTAAVTDPTGAVETQTTLLADAFGYRRLLAFAKLNAPGKRVWAIEGTGSFGSGFCTYLLEKGEWVVEIDRPGRARNGAKSDEVDAARAAREALSRAHLAQPRRRGDREALRVLVATRQSAVVGRTKAINLMKGILVTAPESLRNSFRNVSTDQQLVRCARLRASANRTEEHRCTVMALRSAARRVLALEAEATDLEAEIERIVMRLAPRLLEEPGVGPISAAQILCAWSHPGRLRSEAAFAAIAGTAPLPASSGNIVRYRLNRGGDRQLNRALHTVVLSRLSHHEETMAYAARRTAEGRTPREIKRCLKRHLARRLFKLLESTVVA

SEQ ID NO: 422417 - protein, 367 aa, unidentified
MMGWMAPLRHLSAKLLSDRISSEWEPSMGKVTTIGLDLAKHVFQVHGVDAEGATVLRKQLRRAQVLAFFSRLPPCLVGLEACATAHYWARELRALGHEVRLMPAQYVKAYIKRNKHDAADAEAICEAVQRPTMRFVPVKTADQQAAVLLHRGRERLVRQRTGLVNALRGHLAEFGVIAPQGLRNVSKLIAIVRDEGDARLPDLARQVLQVLAAQIEQLEAAVAAIEKQLMAWHKSNPVSQRLASVPGIGPIIATAIAATVVEPSGFRSGREFAAWLGLVPRQNSTGGKHRLGGISKRGNQYLRRLLINGASANLLRSKATNADPWVIGLRQRRPSLVVAVALANKTARIAWAVMHRHENYQRVAAAA

SEQ ID NO: 422418 - protein, 392 aa, unidentified
MQENQQHSSVDVFVGVDVGKGHHHAVALDRRGKRLYNKALPNDEAKLRALITELKTHGQLLFVVDQPATIGALPVAVARAEGVLVAYLPGLAMRRIADLHAGEAKTDARDAAIIAEAARSMPHTLRSLRLADEPLAELTMLCGFDDDLAAQITQTSNRIRGLLTQIHPALERGLGPRLDHPAVLDLLERYPSPAELASASEKTLASRLTKLAPRMGKGLAADIVQALSEQAVIVPGTQAATIVMPRLAQQLASLRKQREEVASEVERLVHAHPLWPVLTSMPGVGVRTAARLLTEVAHKAFASAAHLAAYAGLAPVTRRSGSSIRGEHPSRRGNKVLKRALFLSALAALRDPISRDYYARKVQQGKRHNQALIALARRRCDVLFAMLRDGTL

SEQ ID NO: 422419 - protein, 354 aa, unidentified
MTHTDKYVALDVHQATTLASVRTETGQVIARSILPTEAPAVVEFFRGMRGRVHVVFEEGTQAQWLHDLLVPLVHRVVVCDRHGEKRRGNKGDRVDADGLSARLWRGELRAVYHGSAERSTLKELTRAYRNLVEDATRVMLRLKALFRARAIPVRGARVYQIRDRVSWLAQLPERGVRFRAEALYAELDVLRELRPKAKAAMLAEARRDPAWAVLRRIPFLGPVRVALLLATLQTPWRFRTKRHLWAYAGLAVVTHSSADHEIQHGRPVRRRRAPLTRGLNPNHNRVVKDVFKGAATAATARPGALQDFYHGMLARGMREELARVTLTRKLAALTLRLWKKGAPYDPRQLTQQAH

SEQ ID NO: 422420 - protein, 343 aa, unidentified
MEHFAGIDVSLEHSSVCVVDGVGKIVREAKVASEPEALVRFFRGLETGVTRIGLEAGPLSQWLHAGLVAAGFEVVLLETRHVKAALSAMVIKTDRKDARGIAQLLRMGWFRPVHAKSPGSQEVRALLVARKLLQAKLLDVEFSIRGILRGFGLKMGEVSKGRFAARVRELAAGHAMLERITEPMLRAREALRTEYARLHGEMLAIVKPDPVCRRLMTVPGVGALVAITFKSAVDDPARFARSRVLGAHFGLTPRKYQSGETDVTGAISRVGDAMVRMALYEAAHIMLSRVTRFSSLKRWALNVARRRGLKRAKVALARKLATVLHRMWVDGTSFRWGKQAASV

SEQ ID NO: 422421 - protein, 353 aa, unidentified
MNSLTDLREVVDVVIGVDTHVHTHSAAVVDTATGGVLDEITVEATAQGYAELVEFANNHATLRAWAIEGTGGHGAGLSRHLLEMSEIVIELDRPKRAARRNGAKSDPLDAIRAAREAMARPRLGTPRTGGERQALSVLLAARRSAINASTEAQQQVFSLVIAAPEPIRVRFRGQKLAAMLNTAANLRVHASWDTETTSTVVALRTLARRAHAMLKEARELQKAIVAIIRSWRPDLLEEFGVGPIVAATVLCAWSHPGRIHSEAAFAMLAGVAPIPANSGKVTTRYRLNRYGDRQLNNALHTVVQSRIQYQPATRDYVARRTAEGKTSREIKRCLARYVARDLYRLLENTATAA

SEQ ID NO: 422422 - protein, 336 aa, unidentified
MNGSTGRWVGIDVSKGKLDVAVLDERDKIKSHVFANDGKGHAALKTWLELRGCGAQLAQVCLEATGCYSESIATALVDAGWQVSVVNPARVKGFAQSELVRNKTDRADAALLARFGQALQPEQWTAPPLEVRELRALVDRVQSLKEMHQQEVNRLEGATNQAGTRESIESHLQWLQQSIQQLERQINDHIDGHPGLRDDAKLIASIPGVGSATAAKVIAYLGDVRRFRNAKALAAFIGVTPRLRLSGSSVRGRSTISRSGHAEMRRSLYMPALVALKHNPIIKTFGARLRATGLAPKAVVAASMHKLVHLIYGILKSGTPFKANFLVATLDIQDGI

SEQ ID NO: 422423 - protein, 366 aa, unidentified
MDTIYIGVDFHARQQTICYLKTETGELVTCELKHQDKEVVRAFYAQFVGQVIVGLEASGYSSWFERMLEELGCQVWLGHATEIRRRARWRQKNDRRDAELILDLMLHNEFPRLHRPAVQSREVLRMLRYRQKLIKMRTMSKNSLQAIALQAGLAKGSRLFTKAGQQELGTAEMSPVLHWQREHWLQLMEPLNQQLLETMVWFKSQSKDDDRITRLRTHPGIGLLTSLCIVHTLQPVSRFRNTRKVAAYAGFDPIERSSAERKCFLGISKAGSRLLRYLLVEAAQTAVRKDEDLKRFYQRLADRRGRPKAKVAAARKLLIRAYIMMRDEIDYAEFRHRAVAARLARRSQGPANVPEVLIGQPASPEQ

SEQ ID NO: 422424 - protein, 438 aa, unidentified
MTPLPILDPRAAFVDVGSEQMHVSIAGGEPKVFGTVTLQLHALRDWLTSQHVTSVAMEATGVYWLPLYGVLEAAGFEVLMVNGRPIRNLPGRKTDMKDCQWGATLHAHGLLQAGFVPPAEIRRLQDYLRLRADHLSLAATHVQHLQKALERMNVKLHDVISDITGTSGLAVIRAILAGEREPLTLLRLCDVQIQRKKAERVIESLRGTWKEEHLFALQQALDSWEHYQRQIADCDRRIDEALTRFSGPDDPAGPVPRRHKRPGINAPDIADLHAMLVRLCDGKDLTVLPAHTEYSVLQLIGEVGTDLTQWHTEKHFTSWLGLAPGSHQSGKRHGKAKRKRNRAGRLFCLMARSLARSKNIALGGFYRRLAARRGGLIANIALARKLATLFWRVMVKGIDYVEYGLQHYEAKVIEHKHRALKRLARQLGQQVVPIAVAQ

SEQ ID NO: 422425 - protein, 340 aa, unidentified
MPGPRARIRKAGRSGVLNPSRKEHVNSTREIFVGIDVSKARLDIHVLPSGDTWDTENQTDAIATLVLRLRSLHPSLIVLEATGGLERRVLAALLTANLPAVAMNPRQVRDFAKGMGYLAKTDAIDARVLALFAEKARPEVRPLPDAQTQELEALMVRRRQVVDMLTAEKNRLSSAPPSKRVIRAIRKTISCLEDQLEDLDKDIDNAIRESPAWREKDEVLQSVPGVGRVLSRTLLGHVPELGTISKKKMGILIGVAPLNCDSGKYRGQRHCWGGRTEVRNVLYMATLSAIRRNPVIKAFYDRISSGKLRKVAIVACMHKLLTILNAMVRSNSRWSPALPA

SEQ ID NO: 422426 - protein, 352 aa, unidentified
MWYVGLDVHFRQSTYCVLDEHGRKVKTETVKGPWDKVLLALARIKEPWAVCFEASTGYGVLWRRLQAMARRVVVAHPGHLRLIFRSKRKNDRIDAERLAKVLYLDEVPAVHVPGAEVLAWRGLIAHRNRLVKERTALKNGLRALLRGQGIVAPRSLWSRKGIAWLRALELPTLLDALRRDQLLERILTVHGQIHRVEQELNRIGEKHPGVTLLRTIPGVGMRTAEAVVAYVDDVKRFANLRKVGSYFGLVPQQDSSSTVNHLGHITKQGPGLVRRLLTEAAWQGIRRSPRIRSYFERIGQGNRERRKIALVATAHYLVRVMVAMLRSGECWRPEEAEATQGAKAEPASTPAA

SEQ ID NO: 422427 - protein, 351 aa, unidentified
MPYFIAFDTHCEFTEMAVLNSRGKLVRRQRCPTTIPALVEAIEAVKRPRQVTFEEGPLAGWLSRNLRDHADQVLVCDPRRNAYVAKEGDKDDPIDAERLAQLLRGGFLKEVHQVDSLDRSMLKQHVAFYHDRVRERVRQGHQLTALLRRYGVFASISKVNDPDERRLLWKQLPRRKVLHEDLDCVLKVYQLLLEKEERLRARLTQLARKEPAIRRFREVPGFGWIRAATFYVYIDAPARFRSKSALWRYCGIGLERRHSGSGPQRVRLCKGGSRPLKNVLMGAAKSAITQTGGPFADRYEEWTQQKGVNPATARRNIARSLAATLWSLWKNDAKYDPDKSRRPEKSSLETR

SEQ ID NO: 422428 - protein, 361 aa, unidentified
MSESTFSTFIGLDVHARSVVAGVLDAESGEVRTVDAPVATAELVAWLGAQGEAVSVAYEAGPTGYLLARACEAAQIPCIVAAPSKIAAAPGDRVKTDRRDALRLAKLLRLGELTPVRVPTPVEEAARDLVRAREDARADLMRARHRLSKLLLRQGLVWEATTWTQAHERWLAAQRFPEGGLQTAYHESLAAVASVEARRDALDAAIAEEAGKEPWAEVVSRLCCLRGVSTLTAFGLASEIGDWERFDGRSIGAYLGLVPSESSSGERRRQGAITKTGNGHARRLLVEAAWHHRRRPYPSRELARRREGLPAPVRERAALAERRLHCRWRSFDARGKRSTVTAVAVARELAGWCWSLAVMDC

SEQ ID NO: 422429 - protein, 318 aa, unidentified
MTGQTSAYVGIDVSKGRLDVAIGEQGEFWNVVNDEKGIAKLVDRMKAEQPELVVLESTGGLELPVMTELYASKVRVALVNPGRVREFARSIGLLAKTDKLDARLLARFAEAVKPAVTRMPDEQEQHLIALVTRRRQLIEMLVAEENRLITVRLSLRENLEEHITWLRQALKDLNREMREFIRQSPIWKDKEDLLQSVPGVGPVTASTLLAELPELGTLDRKRIAALVGVAPFNDDSGHRRGKRKIKGGRSSVRNVLYMAALSSSRFNPILRPFYKRMIQRGKLKKVALTACMRKLLTFLNAIIRDQKRWNPSLKQFAS

SEQ ID NO: 422430 - protein, 429 aa, unidentified
MARVVEYLTSMMIYKEVEDSPTIWLIFHTGGVSMHYLGIDISKKEHEAGLIDNNGKPIGKSLRFANSKRGSEKLLTFINNHQLTIENCVIGLEATGHYWLSIFTYLNQLGFKVTAFNPLRSDALRNFFIRKTKTDARDAFLIAQVIRIDMPDATPFLEEDLLQLKQLERLRYSLVDQSSDIKRKIIALLDQVFPEYEDMFSEVFGTSSSELLKHYPMPEDIQAIDTETLAKFLNNASKNSYGERRAHEKATKIKESAEDTFGINMATDAFRMQIHLLLEQISLLDKQIDELDKKLMKLVDNQNTHLTTINGIGYPTAAVILGEIGSIKRFERPEQLVAFVGLDPAVKQSGNFEASYVKISKRGSPYLRRAIWYAAFSASQCDPALSQHYKRLKSRGKSHQVAVGAVARKLTHIIFAILRDQKPYEPHVK

SEQ ID NO: 422431 - protein, 368 aa, unidentified
MNSVKFIGMDVHKKSISIAIADAGRDGNVRYYGKIPNDLTVLDKFCRKMVSTGSELHFVYEAGPCGYGIYRYLNRKEFDCKVVAPSMIPRKSGDRIKTDHRDAVMLARLHRAGELTAVYVPDEQDEAMRDLTRAREDAVITTREAKQRLKAFLLRNGVVYSGKSKWTKAYFNWLSDLAMPHRAQQIALQEYIDAVHENCSRVERLTEQIRQMVPDWRLAPVVSALQSARGVSLIVSTTLLSEIGDLSRFDKPAQLMSYLGLVPSEHSSGDSVKRGGITKAGNRHARKALIEAAWAYRMKPRVSRLLLKRQQDVPEKICRISWKAQLRLCGRFRRLAAKGKPRQVVNTAIARELSAFLWAMAKQVQPVA

SEQ ID NO: 422432 - protein, 438 aa, unidentified
MSNKVIFNLDELFISVGIDVGADFSWMSIALPNQQFVGKPYKILHNSIDSLTTAVSKIKEAEELYSLESRIFLESTGIYHYPLFCYLRDKGFNCSVINPIITKNSTNINIRKVHNDRFDSKKAALVGLKPDLKVSLMPSDLALNCRNLCREYYDLMDNRSAYVNKLQGELRIAFPQYLGIFSKVTINTSLTLLETYTSPSAFLKADKQEIIDIIKSTARFGLTYAQNKYNAIIQAATDANQFGYIIDSNIKRIRLYISFIRKYDEEINSILESLHELVDANKDTDFVKQIHLIETFKGAGFLSAVSIMGEIGDFSAFSKPKQLFAYFGLDPAVKQSGKFEGTKVQMSKRGSAIARRVIHTLTLQSISISRNREAKNPVLREYYLKKCDSKPKLVAMGAVSHKVCNMIFAILRDNKPFKIIAPQEHIKQYNSAKCDIAA

SEQ ID NO: 422433 - protein, 374 aa, unidentified
MPKYSTAFGMDVHLRSTTVCALDADTGEAVTRRFPGNPWGEIAGWMDGFPGPSLAAYESGYLGFAPQRELAGLGVECVVAAVSKIPRSAADSASKNDRNDAARMAKAILAHDISPVWIPSPEVEGIRDLAGAYDGATARLATAKQRLLAFLDAEGGFVYGGPPPAGNPRKYWTYDFLRWLDKVRPEDDGGVRTLAALRNEVEAAAEARADLLSEYRAAVDASPIAAEVAALQSIKGCAFALAAAFSAEVGDFTRFRSGRQVTAYFGLAPSQRSSGDSVRLGGISGAGNALVRKLAVEGSWCYAAARHQPKLMPRDTGVPLEIRMHGRKGSERLLRRREEMLARGMPAAKANAATAAELVRWLWALGMMCREGAE

SEQ ID NO: 422434 - protein, 324 aa, unidentified
MTDAVLGIDVSKNTFDANLGAGTKARSKSFANSPAGWHHLIAWLGEHKIGQVHACLEATGRHGLGIALALHEAGHVVSIVNPAQIRDFARTKLGRNKTDQVDAVHIREYAELFKPRPWTPPSPAMRRLCELQTIRAGTVAGLTEWKNRRGSGMADDLALSLAETTIQHFTSQLKAVDQAIAETIDNDVELSAKRDLLVSINGVGEALAGIVLAELPGPDILGSSAAVAAYAGLNPQQHQSGISVNRPVRISKIGNAVLRTALYMPALSAMRYNPAVVALVDRLKAQGRLKGKQIVIAAMRKLLVLCFGVLKTGKEFDPAMAMGK

SEQ ID NO: 422435 - protein, 322 aa, unidentified
MESQVSFNQVVSRGCGIDVHKKMLVATISGEGLNTETREFGTVTRSLTELKDWLLENRVTHVVMESTGVYWKPVYHVLEPSGLTVWIVNARHVKNVPGHKTDKQDSRWLCKLLLAGLLKPSYIPPREQRELRDLTRYRSKLVQDISSNKNRIIRILEDCNVKLSSVLSDTSGVTATRLIDKLCQGKEVTMGDIEEVYHKKIEATKEELFEACNGYITDHHIYLLGTIRGDNHHLESLIRDLDEKIKHALAPYENALERLREIPGLNRKSVEDLIAEIGLDMDVFPNENHLSSWVGVSPGNNESAGKKKTDAPPTGTSRPNPS

SEQ ID NO: 422436 - protein, 362 aa, unidentified
MHDSITWVGMDVHAGNIAVAAIRGDPEKLLSRWETPNTRKGLERLSERLGELGEIRCVYEAGPCGYELRRFLEAKGIRCDVAAPSLIPRKPGDRVKTDKKDAEKLARLHRMRELSTVHVPTPAQEAVRDLVRAREDAKEDLMRRRHRLSKFLLRQGRRYEGNKWTQKHWSWIHSQTFADRNSETVLGEYLVAIEQELERIKRLEERIEEESKSPELASTVGRLKTLRGVGTITAMTVVSELIDINRFASPRRLMAFIGLVPRERSSGGKERRGSITKTGNAHLRRVLVESAWHYQRVPLIPAKSIQIRRQGQPPEVVETARRAERRLHKKYARMIGRGKPKGVAAVAVARELAGFIWALGRC

SEQ ID NO: 422437 - protein, 312 aa, unidentified
MKKVFIGIDIAKDTIDISVLSSGESWTVGTTPTELLETVDRLAALKPTNIVMEATGGYETRLAVSLATAGLPVAVVNPRQVRDFARALGILAKTDAIDAHVLALFAEKVQPECRPLPTDDEQALKELLTRRHQLVDMRTAESNRRQQIISKQVYESITTLIESINHELDVIEREIDNRIKASPVWRAKDKLLQSVPGIGKTTASMLIAALPELGYLNRRQIVSLDGLAPMNRDSGTFRGRRMITGGRALIRAGLYMPILSAVRYNPKIKPFYDRLIAAGKLEKVAITACMRKLLTMLNAIVRENATWQPFPA

SEQ ID NO: 422438 - protein, 310 aa, unidentified
MDAIYIGIDVSKDRLDVHVQPSGEAFAVIRDGKGLEELVERVCRLSPTLIAVEATGGFETIVAAAVAGAGLPLVVVNPAQVRHFAQALGKRAKTDPIDAAVIALFAEAVKPELRALPDEAQRLLAELVGRRRQIIEMMVAERQRERRASNTRVRKSILRHIRVLEKELPEIDDDVGTLVRGSPVWREKEDLLVSFRGIGKTLARTILAEVPELGSLTRREIASLVGLAPFTRQSGRWKGKSMIGGGRATARWALYMAALVASRHNPLLKAFYRHLLAAGKPKMVALVAVARKALTTLNAMLRDNRKWQNA

SEQ ID NO: 422439 - protein, 438 aa, unidentified
MNGVDYWFPALACRAKPGALGRNDVTGKAKPKRQGVGSRNSCSTQPCISATCYVCSFREERSGPGGRPGRTARSSDRAQPKPRGLSFVAGSRSALHRTRMVEGTVGSHHKEGSSKMSKHITICAGIDTGKYKLDVAIDGCVDQLQVDNTIDGHAALSAWLKRHRVSRIGIEASGGYEQNVVAHLRRDGFVVVVFQPAQVRAYARFLLQRAKNDQIDAALIAACTAAIKKIHAPPDSRLAPFAARMTLIEQLTDRVACWKNYREGHREPQLREFCKKEIARFNKLLRTELKALAAAIRQHGDLAERLNLIESVDGVGLKTAVAILVRMPEIGRLTREQAAALAGLAPYDDDSATHLGIRHIAGGRERLRSSLYKAALAAAFHWNRQLIALYRRLTQAGKPHKVALIACARKLLIFVNTVVERGMPWGTVAPPSAASNAV

SEQ ID NO: 422440 - protein, 408 aa, unidentified
MRVIGMDIHRTFAEAVMIDGDRLIRLGRIKMSRDHLAAFAAKLTSEDHLVIEATGNAHAVVEAVAPFVGRVIIANPRQVHLIAKARIKTDVIDATVLARLYASGFLPEVWVPDQSTLRLRRQVTRRNQIVRQRVRLKTMIQAILHAHLVPQCPHADILGPKGRAWLLTQLLPDDESAAIERHIREYDRLTDDLRVVERELARDALGSAETKRLMTIPGIDMIVAVGLLAAIGPIDRFTSPGRLVAFLGLNPSVHQSGNSPARHGRITKQGPCHARTMLVEAAWQAVRGPGPLRAFYERVRGRRGTHVAAVAVARKITVIVWHLLTRGEDYAWVRPALHAKKLRDLELRSGCPARRGQRGAGYAYNLARSRREERQRGERAEAAYKRFTQGWTKRGRRVSADASKEERQ

SEQ ID NO: 422441 - protein, 359 aa, unidentified
MIVIGADTHKGTHALAAVDEGTGRVRGSRQIQAEEAGHLAAVRWARELDDERVWAIEDCRHVSGRLEQALIAAGERVLRVPPRMMGASRRGERTPGKSDQIDALAVARAVVRDGVDRFPAAYLNERAMEIRLLSDHRQDLVAERTRAQNRLRWHLLALCPELERTLKRGALEHRRSLDRVDRKLRRLPASARIRVARDELSQIRMLTRQADALHQELGALVTDHRPQLLAETGCGALTAAILIGRTAGAERYRTDSSFARQAGVAPIPASSGQRNQLRLDRGGDRQLNRALHMIAIIRARHDPATKQYLAHKEAEGKTKKGALRCLKRHLARRFHHILRLPSDPTRSHEKVANSKILLT

SEQ ID NO: 422442 - protein, 402 aa, unidentified
MLNSRPLDATTSELRVGIDVGGHVHAVAVGLSSGELLEDFEISHSAAGFRDFFARIEAHAGRHGLPVAVAMEGYNGHARPLDGLIQARRWRLFNINNLKLARFKEIFPGPAKSDLLDSRKALELFQLSDHLPMARDVLQEIPARPRENDLLKRLTRRRRQLVDERVRLLCILDSDLRAVAPGLVEITGDIANLWFLRFLTCRDDLQQLASMRRAGLLAVPGIGVKYAEAVRAWQKRALFSAELAVVGPMIREDATRVLELSQGIKALEGEIGQVRSAMARCLRSIHGFGLVCAAELAGEIGTIERFRGEASLALYLGMATLDNSSGRKKGSKPPRQVNRRAKAAMMTAVDRHRKGVPQSQRYYEKKRAMGKTHNQAIRALGRHLCRVIFKMITTDQPYRIMP

SEQ ID NO: 422443 - protein, 378 aa, unidentified
MNRIIKIGMDVHTTNYTLCIFEPSFEHDGTVHCITQVKPEVKNIIHVIETFKKKHENEELNIVCGYEAGCLGYSLYHELKEKGIECAILAPTTMKTEKGGRKLKNDYRDAKMIAECLAYGGYSAVHVPTELDNSVKEFIRMRDDIKENLKSIKQQIIAFLTRNGKQFEGKSYWTRKHIDWINTISFSEPLLQDTLKEYMIEYNHLCDRVEILDRQIEEISLKEEYVEKVQQLQCLIGIKTHTALSLIVETSDFNRFKKGNMYSAYLGLIPGDDSSGGHEKKLGITKAGNNHLRRLLVEAAQGYTRGRVGFKSKDLKSRQEKCNSEVVAYADKANERLRRKYYRMILRGKKYNVAKTAIARELACFIWGIMTDHIDLCS

SEQ ID NO: 422444 - protein, 345 aa, unidentified
MKLYGGIDLHSNNSVIAIINEQGETLTVKRLNNDMSVILSFLTPYKDNLTGLVVESTFNWYWLVDGLMDAEFKLHLANPAAIQQYSGLKHADDHSDARWLAEMLRLNILPEGYIYPRELRAVRDLMRKRMDIVQQSTKNLLSVQSCYMRHLGYKLSSNKIKQMAAIRKGVDVEQVHSDFSSTNTALSVISNLTLIRCAQQQINAIESAILQQTSLSPEFINLTSIDGIGNTLALTIMLETGTIKRFDSPGNFSSYCRCVKGARYSNGKKKGATNQKNGNRYLAWAFTEAANFAIRYNPTVKKYYQRKLAKTNKVVAIKTVAHKLARACYHVLKDNVPFDEHKAFA

SEQ ID NO: 422445 - protein, 325 aa, unidentified
MNNEKLCCGIDVSQNTLDVAYQNNLGEIFHIKVGNNNKGFETILEHTGTFYHFVMEATGVYYVRLAFFLHGKNCTISVVNALKIKRYIQMQLEKNKTDKKDAQWICRYAIDQRPALWEMPDSTYFESKQMYNTIRQYSEEIKRFNNQLHSLRILPVQNKETIKSLEKMKLQFEKEIKILEVKLEVLLMKWKPEQVKNISSIKAIGRRATAMLIIYTQGFRYTENHRQLISFAGLSPKEYGSGTSIKGRPKISRKGGKPIRDVMYMCAMSAIKTNTACKALYQRLRENGKSGKLALIAVCNKLLKQVFAVVKNNTLYQPNYCSAKP

SEQ ID NO: 422446 - protein, 343 aa, unidentified
MDYFAGLDVSVKETSVCIVDGTGKIVREVKVASEPDALLAVLINPSYRFKRIGLEAGPLAQWLYSALAEAGLPVICVETRHMRAVLKAQINKTDRNDARGIAQMMRAGLYRPVHVKTLRSQKLRMLLTHRKLLQSKAIAIENDLRGTLRNFGLKVGMVGMARFETRIKELVENLPDLAVLVESLLVVRRVLREQLAILHRRLLAIVREDDVCRRLMTIPGVGPVVALTYRVTVDVPARFRNSKAVGAVFGLTCSKYQSGEINRTGAISKCGDEMMRMMLYEAAQVMLTRTNKWSWLKAWAMKIARHRGMKKAIVALARRLAVIMHRIWVDGTEFQWTREVAAA

SEQ ID NO: 422447 - protein, 412 aa, unidentified
MLWGERRGYGTFGAVERLPMERPMSQTFDASRSLTALEQDNTLIAVIEMSQSTWLVAAVVPGMKRQPLKKLDTDEEALLKLLHRWRNEAGQGRRQIKRIVVAYEAGRDGFWLARWLRARDVEAYVIHPTSVAVSREHRRAKTDRLDTELLTRAFVGWLRGEKRHCSMVAIPTAEEEDARRPNRERGNLVTEQTRIVNQIKAILARFGIRTFQPTLRKAEEKLEGLRTAEGTPLLENTRAELRRYLARLRVAREQIRAIEQGRLRKLAAVPAGEIGPHAMVRLIARVLGVGVETADMLVNEILSRRLRDHKAIARYAGLTGSPDESGRRRRERGLARAGNARVRCGMIQLAWRFLRFQKDSALAQWFQARTADGRGSTRKTMIVALARKLLIALWRLVTMGEVPQGVVLRPAS

SEQ ID NO: 422448 - protein, 332 aa, unidentified
MENFYFIGVDVLKKKLNFCVMFEGKVVHEEETSNHQGAIMSLLHHLEEDYGIASGQMLVCAEHTGQYTFPLACACKAVECRLWLENAAEIKYSFGVQRGKSDKVDAKRIAIYASRFQDKVRYYERPTEDIERLKQLESERTLYVTDFAKYKGQMKDQKEYMPKSLYERKMKRLQALMDDLEEAIQSITDEMDEVIASCPVLFRQRELLMSIDGVGRVVATNMIIATEAFTRFDDPRKFNCYAGVAPFSYSSGSSQHSKARVSHRADKVMKRLLHLAAVAVTHRIGGELKKYYERKVAEGKNKMSVINALRAKIVARMFAVIKRNERYKPILS

SEQ ID NO: 422449 - protein, 413 aa, unidentified
MSVTGTVTARRACAGVDWAKDNHAVCVLDADGEVLHRVTVAHTKAGLARLIRTLGQHNVEAVGIERPDGPVVQALLAAGRTVFVIPPSQVKALRRRYGSAGNKDDRFDAYVLADTVRTDRRRLTPLLCDSAATTALRGLCRTRKDLVAHRVAVANQLRAHLAIALPAAVDLFADIDSAISRRFLTRFTTQDAVDWLSPKRLAAWLASVGYCGRCDPAALHTRITAAPRGATGEHSQTLAGITRAYLALLDTITTQIDALAGQIAEALTLHPDRDIFTNLPRSGSVRAARLLAEIGDARGRFPTPASLACLAGVAPSTRESGKVRIVAFRWAVDKQLRDAVCDFAGDSRRANPWAADLYAKARARGHDHPHAVRILARAWLTIIWKCWTTNTPYDPARHGALQHLLNQHQQATA

SEQ ID NO: 422450 - protein, 343 aa, unidentified
MKHYAGIDVSLEVSHVCVIDDLGRVVKEPIAGSDPRSLAESLEPWRGSLVKVGLEAGPLSQWLHAGLARAGLPVECLETRQLKAVLSASPVKTDRKDAHGIAQVVRMGWYRQVHVKSRGAQERLALVTARKLLVNKLKDVENGIRGLLRGFGLKVGQVGRSKFEWRVRELVSLEPALHSLFEPLLGARGALRSQFALLDRHVRQIARRDADCRRLMSMPGVGPVVALTYQAAMDNPGRFAHSRSVGAHFGLTPRRYNSGEIDRSGQISKCGDELVRTALYEAATTLLSRVARFSALKAWAVRVAKARGLKRARVALARKMAVVLHRMWQDGTEFRWSKAEIAA

SEQ ID NO: 422451 - protein, 389 aa, unidentified
MAAANDSSRSTTAFEQNSTLVAVIEMSLSSWLVAGVVPGLERHPLKKLDVDQRTLIRLLHRWRDEAIKAGRNIARIAVAYEAGRDGFWLARWLQAHGVDAFVIHPSSVAVSREHRRAKTDRLDTELLKRAFLGWLRGEPDHCRMAAIPTLAEEDAKRPNRERENLVGQRTSLINRMKACLIRLGIRSFKPTLRCAQERLEDLQTPEGAPLPPNTLGELRRDMARLQQVREQIKEIEADRMRSLEGASDADPEPRAMVKLLTRIVGLGVETADMLVHEILSRRLRDRRAVARYAGLTGAPDESGGRRREKGLSRAGNARVRRGMVQLAWRFLQFQKQSALTQWFQSRTADRRAGTRKTMIVALARKLLIALWRMAMTGETPQGVTLRAAA

SEQ ID NO: 422452 - protein, 443 aa, unidentified
MTRKNQKRFEVIHPDCGAVDVGGREHLAAVEPTKCDEPVKRFSTFTDDLHAMADWFESMGVKVVAMEATGVYWIPLFEILDRRGFEVYLVNSRATRQITGRKSDVLDCQWILQLMTHGLLRGAFRPSDDVCSLRSLVRQRGNKVRDQAKALNRMQKALVQMNIQLAQVISNIAGVTGMSILRAIVNGERDPEVLAMLRDKRVKADQATVARSLRGNWRAEHLHALSQELAAYDFQEKQIGECDQAIAFALERLPVLQSEVVCPAKTLRNPHRSNDQQLILHRALNKVMGVDLTAIPTIGIDTALVLASELGPDLSRFPTSQHFCSWLGLAPPTRISGGKTLPGKSVTVINRAAQALKQAASIARNDKSFIGASHRARLTRMDTCCAIKATAHQLARLIYAMLTKGQPYVEKGIAEFEERSRDRQMRALERKARKMGLQLVKAA

SEQ ID NO: 422453 - protein, 399 aa, unidentified
MDVHRDSVMACVRVPGKGTRREVVQSFGTTTRELLVMRDWLKAHEVEVVSMEATGVLWKPVYYLLESDFTLQLVNPAHIKNVPGRKTDVKDAQWIAQLTECGLLRASFVPPPEIRELRDLTRYRTALGHEWTRDVQRLHKVLQDAGIKLSSVATDIMGKSGRAMIEALIGGGKDPEVLAQLAKGPMRRKLEQLRAALEGNFEARHAFLAKELLAHLDYLGAADERVTLQIEECLRPFAPQVAILKTIPGVADKTAARIVAEVGVNMKQFPNAQHLASWAGLCPGNRESAGVHKPCGTRKGNGWIKTGLVEAAWAAVRDRKSALSGQFYRLRARLGSKQAIVAVAHSMIVIIYECLSKGVPYHEFGADYFDQIEKKRATDRYVKKLIALGYDVTLKESAA

SEQ ID NO: 422454 - protein, 357 aa, unidentified
MFRTWLLTVKLTKKLETMFTNFVGIDVSKSKFDLALIKELDKDHVFQGIFENTPKGIKSMVKFLEKEHEISLSETIFCMEFTGIYCRPLTRFFVEQNCHVWIEMPVNIIRSLGLQRGKNDRVDAHRIALYAYKNRDDIKLWKPQRDVILKLRDLLALRERLISAQKSLNMPINELISMGDEKGAELVRRGCQKSLSSLENEIEQIDKNLDDLISNDPKLKEIFRLAKSVPGVGKLTALFMICFTDEFSIYNNPKQLACYCGVAPFEHSSGSSIRGKTRVSHMANKVLKHMLHLGAMSAIQWDPELRDYYKRKIAQGKNKMLVINAVRNKIIHRLCAVIKRGYEYQSQNIFKERLVLS

SEQ ID NO: 422455 - protein, 408 aa, unidentified
MKRYYMGVDWGDRLHQVYVGDEEGKKVREVKVPETVEGLAEMGRWLDEKRAEEIELWAAIEKPAGRIVDFLLDHGVVVYPVNPKAVDRVRDRYRMSGSKSDPFDAYVLAEFLRTDQVHLRALQPNSEKAQELKLLSRDQRRVGRQKTRLLNQLTSTLKEYYPRVLEAFNDLETQIVLDFIKQYPTPAHLSVLKRKEFNRFATKQHHLGKARCEELWEELKKPQLAVPEHVVRAKAQLVEVLIEQLQASIKAVKIYHERVESFFASTPAAEIAKTLPGGKSGVVVPGIWAELGDARGRWKSSRHLQAEAGAVPVTKASGKSRVVQFRFACNKHLRHTMYWFSFGSLKHCEWARHYYRGQKAKGRTHPQTLRALAAKWLKIIFVMWRDHKPYDENYHLANIARQKIRQEA

SEQ ID NO: 422456 - protein, 469 aa, unidentified
MTPRKSKNLRPSASRERLHVTHAHAAGIDIHAGQHWVAVAAEAAPPPGREHPPNLPAHVRCFGTCTADLICLADWLAQCGVQTIAMESTGIYWIPLFELLEARGFEVFLVNPRQARHVPGRPKSDVHDCQWLQRLHSYGLLTASFRPADQVVVLRSYLRQRQMLIRYAGQHAQHMQKALEEMNVKLPEVVSDVTGATGMAIIRAILQGQRDPLELAKLRNKRCKRTQAEIARALYGSWRAEHLFALKQAVALYEFYRQQLRECDVQLQAHLGTFADQRHGRPRPRRQRRCRERRPNDPAFDVGSALYRMAGVDLMLLEGIDANTALVLLSEIGPDVSRFPTVKQFTSWLGLCPQHQGSAGKIRSRRIRHGMNRAGRALRLAVQGCYHAQHVLGAFYRRIRARAGAPKAIVATARKLAERVYGLLKYGADYTCQKIDAYEAAYRARVLKGLARKAAELGYRLEAASPAGG

SEQ ID NO: 422457 - protein, 331 aa, unidentified
MEEVKRFVGIDVAKLALDVFIGSAGGAFSVANDEVGIRELLRQMKPADCVIVEATGGLETPVASALAAAGIAVAIVNPRQVRDFARATGKLAKTDRLDAEVLARFGEAIRPEARPLADEQAQALEALVTRRRQLVEMLTAEKNRRARAPKVLHRSIDEHIRWLEKRLSEFDDELGELIRHTPLWRERDELLRSVPGVGKVLSSTLLAQLPELGMLNRKQIAALAGLAPFNRDSGNMRGSRCIWGGRAQVRRVLYMATVAGVRSNPTIRTFYLRLRTNGKHAKPALTACMRKFLVILNAMLHNKTRWQTPAPTFLTSSLSPLLGAVSEHGCC

SEQ ID NO: 422458 - protein, 399 aa, unidentified
MDRKRSRTTSPGATCGVGEAPERRTCGSAKSVVKDLPCSRPQALRETKPGQEQGSLRGRRRKSPDTCKSQKVLATQGREKPSSGRTKVIVSNVGIDVSKRRLEVAVRPSGQRFSIGNDEEGLRELVKRLQELRPERIVMEPTGGYERGAVAELARAGLPLVVVNARQMRDFAKATGRLAKTDRIDADVIAQFGEAIRPEFRPFPDDTHRILEAMMTRRRQLLDMRSDEMRRKHTALRALHASIETVIEFLTQQIDDVDGDIEKLMRSTPLWREADDLLRSVPGVGPVLAATLTAFVPELGKLNRKQIAALVGVAPLNDDSGAHQGKRKTSGGRAPVRSVLYMATLTARQANPALKAFHDRLIERGKPRMVAIVATMRKLLTLLNAIVRSRRAWTPQLTG

SEQ ID NO: 422459 - protein, 377 aa, unidentified
MSIVMGVDQHRAQITAEWIDVASGEISRARVRPADRAGVRRFLARFAGQRLEVALEATTGWRFLVEELRAAGAVVHLAEPAETAARRGNKKRAKTDRADARHHRELLLAGRLPESWIPPDHILDRRARVRLRHTLIEQHSEWQQRIQAVLYHHGCPRRRGLMQGDGRDWLGALALPETARQQITVSLELIDALELQIAPLDQQLRRYARRQTGCKALIEVHYGIGELCAVTILSELGDVGRFHNSRDAVRYGGMDITVYQSDRHRSPGHLSRQGPPALRWALYEAAHAARRPGSPDRDYYLQAAERLGGNRACLALARKLLKRCYHTLRELGDDALTPPANDRRESVSSRAARRASSGGSPRSERPETRERADALAA

SEQ ID NO: 422460 - protein, 372 aa, unidentified
MTTQPTAIPKLYIGMDIHKKSWAVHFRTDISDHKSLTLPPVCDVLYNYIQSHFPDHQVAITYEAGCCGFSAAREFLNYGWEVKVVNPADVPRGHKQTHQKTDKIDCRNLAKQLQTDQLHGVYIPGEEQDMLKSLVRQRAEVTRQFRSVKANIKSLLLYHGIQLPEQFDNPNWSKDFLLWLNGIQWPHPTGKSCLDSKLRIFNAVKAEYLQLANELRAYCRKHFKTDYYLLKSIPGVGGYLAASILAEVGDLRRFNNYKQFASYIGLIPSVRNSGGTENIYGVTPRCRALLRSYIIESSWVALRLDPSIQTYYRKHKGRNPKSILIKIAHKMLNRMLSVIKNNKPYQISNSDMESLKIKMKSTSKKQTAKQQE

SEQ ID NO: 422461 - protein, 370 aa, unidentified
MLDTTTFVGLDVHARSIKAVSLDVMTGEVRCATFGYDAGAVAEWVRSVDPKARCVYESGVTGFDLQKRLSGLGVDCVVGAVSKMIKPSADRRRKNDRNDAEFLARMLSVGNVVEVWVPDDECEAARDLTRALEDARDDLSRSKQRLSKFLLRHGLVFDERTPTGRRKGNWTRAHWSWIESIRFAEGADNDVLAYYVDAVRRAAEEKARLEGLVEAEARKPRWRKRVDSLRCLKGVDTATAADLVFEAGEFSRFRNARSFAAWVGLTPSEHSSGENDRRGAITKAGNKHLRKTLVEAAWHYLTCSGRPKDLAKGQAPDRVARRHAAKGVRRLVERREALLARGVHGNKANVATARELACWVWAVGLMAEEA

SEQ ID NO: 422462 - protein, 344 aa, unidentified
MDHFAGLDVSVKDTSVCIVDDTGKIVREVKVASEPEALLAVLKNPAYRFKRIGLEAGPLSQWLFSALAEAELPVVCVETRHMQAVLKAQINKTDRNDARGIAQMMRVGLYRPVHVKTLRSQKLRMLLTHRKLLQSKAIAIENDLRGTLRNFGLKVGMAGTVKFEARIRELVENLPDLAALVEPLLLVRRVLREQIVILHRRLLAIVRGDEVCRRLMTVPGVGPVVSLTYRATVDVPARFRKSKAVGAVFGLTCAKYQSGEVDWSGRISRCGDEMMRVMLYEAAQSMIHSKKWSWLKAWAMQIAKRRGMKKAIVALARRLAVIMHRIWVDGTEFRWTREQATAAA

SEQ ID NO: 422463 - protein, 353 aa, unidentified
MSKVARKMGEGKRKMCLKASDRAFVGLDVHKASAHAALMVNGMIVKTWSMPYDPAVIAASLEPYRAALRGVVYEAGPTGFSLARHLIRLGYAVTVAAPSKIPRPSGPQAKSDRLDCRRLVDFFSKGQLVAVAVPTETEEADRQVMRARGQCLGKVKRAKQQIKSFLLQHGIVEPDGLAHWTNGSIEALHDLKLNAQLRFCLDRLLEELAYLRGELKAFEEHLDQLARTPRLRKAIRILDAHPGVGPLTAMAFAVEVYRPERFTQGKGIAGYTGLAPKISQSGPTRREGPLMKTGRGELRALLVEASWRWVSKDAHGRQLFAHLVRNTGSKQKAIVGVARHLSIELWKRLVQAA

SEQ ID NO: 422464 - protein, 358 aa, unidentified
MGRRALLVSVIEPEQLRGPVESPDLQGWADDHGVGRWRPKMSSAPIVGIDVAKDELVIATWPASEPWQVANRAGGLTELVERLAVLQPRLVVLEATGGYERQAAAALAAAQLPVAVVNARQVRDFAKATGHLAKTDAIDAVVLAQFAEAVGLEPRPVPDEQAAALGALLVRRRQVVEMRAAEKARLHQAPTKAVRTRIKAHLAFLDAELADVDGDLGTSIRQSPVWRERDELLRSVTGIGPVVSITLLAELPELGQLSRGQIAALVGVAPLNCDSGTMRGRRKIWGGRAHVRQALYMATISASRHNPVIRAYYQRLCAAGKPKKVALVACIHKLLTILNAMLRDHRPWQPALLRPQGA

SEQ ID NO: 422465 - protein, 388 aa, unidentified
MIYVGIDIAKLNHFASAISSDGEELIKPFKFTNDNDGFQLLISKLDSLDKDSLIIGLESTTHYGDNLVRYLVAKNYKVCVLNPIKTSTMRKNNIRKTKTDKVDTYIICKTLMMQESLRFVTFYDLDLMDLKALGRFRQKTIKQRTLLKIQLTSYVDEIFPELQYFFKSGLHQKSVYALLKEAPTPEAIASMHMTHLAHLLKVNSHGRFDKKMAQQLRVLAQKSIGASDSSLSIQVTHTIQQIELLDSQLERVEAEMTEIMKFNDSVIMTIPGIGYINGGMILGEIGDIHHFSSPNKLLAYAGLDPSVYQSGNFQTKKTRMSKRGSKVLRYALVNAAHNVVKSNATFKTYYDAKMAEGRTHYNALGHCAGKLVRIIWKMMTDNLEFNLE

SEQ ID NO: 422466 - protein, 345 aa, unidentified
MEHFAGLDVSVKETSVCIVDDTGRIVRELKVASEPEALLPLLTNPIYRFKRIGLEAGPLSQWLFSALAEAGLPVICVETRHMRAVLQAQINKTDRNDARGMAQMMRAGLYRPVHVKTLRSQKLRMLLTHRKLLQSKAIAIDNDLRGTLRNFGLKVGVVGASKFEARIRELVESLPDLAELVEPLLIVRRTLRQQIGILHGRLLAVVRTDDVCRRLMTVPGVGPVVALTYRATVDVPARFRNSKAVGAVFGLTPSKYQSGEIDRTGGISRCGDDMMRAMLYEAAHIMLVRSTKWSWLKAWAMKITRHRGMKKAIVALARRLAVILHRIWVDGSEFRWTREQAAAAA

SEQ ID NO: 422467 - protein, 385 aa, unidentified
MRVRGLGRRNGPSADTRIMGGADVHNHRTLVGLDVHAKATIAAGLELDTGELRFRRINGPPRSAVNYLEELPGPVMATYEAGPVGYGLAREAAARRIEVRVCAPGSIPRKPGERIKTDRRDAERLVRSLLAGELSFVRVPTVEEEQFRDLARCREAARADLMRARHRLSKFLLRREIEFPGPGASWSVAHWQWLRSIDLADHPSRSVLNDYLAAVLALEQRRDGLDAQIEIAAPRSPWALTIANLRCLRGINTVTAYGLCCEVGAFHRFEHPATLTAYLGIVPSEHSSGEQVKRGPITKAGSPHARRLLVEAAHHYRHKPAIYKDLARRQRGQDPRACEIGWRCQQRLHRQWQRLRLERGKPGNVVVIALARELANFVWEVGQLK

SEQ ID NO: 422468 - protein, 402 aa, unidentified
MKKVCGLDVHKDNIFCAIYNGEVYSIVKEFTTMTPEIYSLGEYLQSEGVEEIALESTGIYWIAVWDLLYEMGFKLTLVNPYLIKQMPGRKSDIKDAQWIATLLYKDLIRGSFVPPPIIQELRIYSRKQGKLKQQITRVLTTMDSILVKCGIRASSCLSSISTKSFMCIVEAIIQGQTNPDYLVSLVYGNKKNKESGRLKSALTGNIRDHHIRELSWAKQEYDMYQVQVKECLSEMERICNEHFSLMVKLLQTIPGISQISAMTIVAETGGDMSAFESSDKIVGWTGLRPRNDESAGKYKNTATTKGNKYLRTILVQVAWAASRTKGSFFKDKFQRLAIRKPRKKALIAIARKILVVAWNIMRDGCEYNPRLVPIQDPVKMKAKLKYYKKEYENAAKMLNIIV

SEQ ID NO: 422469 - protein, 342 aa, unidentified
MEQYVALDVSLKEISVCIVDSNGDVFFEGKTAAEPATLVALIRSKAPQVKRVGLETGATSPWLFHALAAAGLPVVCMDARHAHAALSMRPTKSDRSDARGLADMLRMGWYREVHVKSVTSHERRTILGARHQLVTMRSELDAQIRGILKTFGLILGTGNKYTLIQRAEKLTAEHPVLSGLVAKLAEVRRHVTSQIAAIDRDIRHLVHTQPPLKRLISVPGVGPITALAFLSAVDDPSRFKHARDVGPYLGLTPTRYQSGETDRQGRISKCGDTFTRTCLYEAAHVLLTRVQRFSPLKAWGMRLAKRIGGRKARIAVARKIAVILHCIWTDGTEFWWTRGKAA

SEQ ID NO: 422470 - protein, 318 aa, unidentified
MENISQWVGIDISKATLDVYLRPLGKAMKVANTKEDISKLVETLKSYTLNLIVLEATGGLETELVIQLQAAGLPVALINPRQGRDFAKATGKLAKTDAIDAQILAHFGEAMQPQILAVESEESRQLGDLISRRRQLVEMRTAEKNRRERARGKALVDIEAHLEYLDNCLEKLNQEIEELTQANQQWLEKVNLLKTVPGIGQVISTTLVSDLPELGQLTAKQISRLVGVAPINHDSGQHKGKRMIQGGRAQIRATLYMGAVVAMRHNPVIKTFYERLVGRGKSKKLALTACVRKILVILNAMVRQNQPWQLADNLPPCS

SEQ ID NO: 422471 - protein, 463 aa, unidentified
MKQNHRRCCGIDVHKNSVTVCVLPPVGQPRTGIKKRKFRTYTRDLMQLRGWLKNCQVTEIAMESTGQYWRPLWNLLEGEFAKLLLVNPQHIKGLNGYKTDPKDAEWIADLLESGKLRGSWVPPRPIRELRDLTRLRVNVLDDLNRAKNRIEQLCQSGNIKISSVATDLFGVSGRHMLKDIVEGERDAGWMADTARGKLRAKRGELTRALEGTFTAEQRWLMDRELRQVEWLEQQVAVLEEEIERRVTPWEEVIQRLVTIPGIDRKTAWTILAELGPDLSAFPDAQHLASWCGLCPGNRESGGKRMSGRTRKSNRYIKRAMCQAAWAASHTKKTFLAAFYRRMSLRKGALKAIVALAHHMIVVVYNVIHRQEKYVEFGADYYDERNKPKTVARLVKRLGGLGYEVELREVPAATVVPVPAVEPEPTVPKRGRGRPCKCAERGIPCRHQTAPQANSLMEQTSSPA

SEQ ID NO: 422472 - protein, 345 aa, unidentified
MQIRSIGIDLGKTTFHLIALGDRSQVVIHKKFSRSQLLVYTANLPSSLIGMEAGVGSHFLGRALREQGHEVRLIPAQFVRPFVKSNKNDYRDAEAIAEAVERENMRFVPIQTEDQLDLQALHRVRDRLVARRTSVINQIRAFLLERGISFRKGPASLRRQMPEILENADEKLSTRMRRLLDFLWQEWKGLQSQIESLNADLEQIASSDPSCVRLQQIPGVGPLVSTAVVSAIGNGAAFKKGRDFAAWLGLVPRQWSTGGKAKLLGISKRGNPYLRKMFIHGARAAVLRVKREGSSLGEWRSGLETRTARNVVIVATANKLARISWAVLASGNDYRPMHKAAVFSN

SEQ ID NO: 422473 - protein, 347 aa, unidentified
MRYVGIDVGKQRCRAAVMDQGGFIIDEFTFTNNHRGIGDLASRLTMEDKVVMESTGSVWTNLYNSLDDRHIPLVLANPLKTKAIASAKIKSDKIDARILAHLLRAGLIAESYVPPKELREIRALIRHRASIVKIRTMVKNKIHALIDKYGFEYGYSDLFGKGGIRWLRTLELNPLDRLMLDNHLQHIESLSNQIKRVDEEIHGKASQDEDVKLLLSMTGIDIYTALLIKSEIGSIERFPDYKKLVSWAGLAPSLHQSGSVEYRGSITKQGSRMLRWIMVEAARVAVSHDDRLKRFYERVKHRRGDQKAIIAVANKMLKIIWFMLTRREPYQSANQKLYERKLNSLVN

SEQ ID NO: 422474 - protein, 429 aa, unidentified
MSNFFNDFVVGIDVSSKSSVITILMPGGEAYGKKINITNDLKGFDKLLLILTDITENFSKKPKIFMESTGLYHMPLLNYFNKNNFECYVINPIHTKNFAKQSIRKVKNDKVDSLRIAQLAQSPTFFSESFFDEDIFLLKKLCREYDSLVSHRAHYKKKVLSSLNLVFPKFNDIFSDTFSAVPLAILSNYPTYKDFLSAHKSDVVTLMRSTVSHSSEWADKKYKLIYTTAKEAEMLKLPTTCLGTELTCFINIIKTFSKSIDDLKEQILIFHKQIPNFEDNAKLLCTHPEVGLLSAISFLAEIGDIKNFSSPKKLVAFLGVDTSVSQSGAFTSTHNKLTKRGSNLARKILYNLAIASIKTLRNGASANPVLLTYYNKLIKSKPKKIAICAVMHKLINHFFAILRDKKAFELRLPETYKQIYIDKNLLVVI

SEQ ID NO: 422475 - protein, 400 aa, unidentified
MDKDRIVAGLDVHKDTIYLCVMDNTEAVIFAKVYGTLTPDLELMCSEMVSHGVTEAAMESTSTYWVPVWNALCESMSLKLVNPYFIKQLPGRKSDVKDAQWIAECLLKNLIRGSFVPDKTVQDMRKYNRRIFDLNEDLTYNSNKQDAALQRCGFRLSNYVSRVNGKSYQKCVRAIITGITDPEELVKLIHGKTLRKYGRNIIKDAVTGDFHQADICLLKQYAELIGVIERQIEECRNALISMCQEHFPKQFKRLQSIPGVKERAASAIIAETGADMKPFEKATNLVGWCGLKPRNDISNNKVKSNRTTHGNRFLRQILIEISWVASRTRNCFFSNFSYVQCTQRHKNKMKIQVAIARKLLVAVWHMLTKDEDFIDVYLKRLEKEAEWQNDLQALESLLVG

SEQ ID NO: 422476 - protein, 348 aa, unidentified
MTESLFAGIDLPSNNLMIGIMDQNGQRLKHQKLDCDLQQVVNFLEPFKPRFKSLAVESTYNWYWLVDGLRARSYPVLLANPAQIDQYSGIKHADDKNDAFFLAELQRLGILPTGHIYDPVLRPVRDLLRRRLSLVHQRTALLLSFKSLYGRTTGQPMSLSRLKSMKLKEAKTLYEHPANCLIAAVQKEHIEQLDQSIERIEKAVLKSARELPSYDQLTTLPGIGRILGMTITMEVGDIQRFKTPGDFASYCRTVDSKRMSNGKKKGDNHQKCGNKYLAWALVEAANFAKRYDDQSRKWFDRKSAKTSQVLATKALACKLAKAAWHVMAEQSDYDPKRMFAESAQSPGK

SEQ ID NO: 422477 - protein, 336 aa, unidentified
MAEVTFPQLIQRACGIDVHLKVVVATIDGAGIQRETRSFKTFTSSLNELKEWLLSNGVTHVGMESTGVYWKPVYKVLEDSIPNVWIVNARHIKNVPGHKTDKMDSEWICKLLLAGLLKPSYIPPKEQRQLRDLTRYRNKLIQQIASEKNRMMRILEDCNIKLSSVVSNTSGTTATSLIDMLCEGKVLTLDDINSVYHGKLSASPEELLEACTGFVEEHHIYLLQMIRKDIDQTQTLVDDLSERIKRLLSKYENVLELLREIPGFSTKVVEDLVSEIGLDMSHFPSEKHLSSWAGLSPGNNEVRVKKKRTNHSRKQTGKGGNHRSRMGCDPYKEYVF

SEQ ID NO: 422478 - protein, 343 aa, unidentified
MEYFAGIDVSLEASSVCLVDAAGKIIRETKVASDPDALIEHFVSLEFAVRRVGLEAGPLSQWLHEGLTKAGFDVVLLETRHVKAALSAMIIKTDRKDARGIAQLLRMGWYRAVHSKSPGSQDVRALLTGRKLLQAKLRDVELSIRGILRGYGLKVGEVSRGRFEARILELVDGHPVLKTVIGAMLQARHALWTEFTKMHREMLKIVRQDQVCQRLMTTPGVGALVAITYRSAIDDPSRFTKSQTVGAYFGLTPKKYQSGETDLDGGISRVGDTMVRTALYEAAHIMLTRATRFSALKRWAVDVAKRRGMKRAKVALARKLATILHRMWVNENEFRWGKEASAA

SEQ ID NO: 422479 - protein, 407 aa, unidentified
MRTATDVFVGLDWATASHAVCVIDAAGTVLERFEISHDRDGLADLMRRLARYGARVRIAIERPSGLIVDALVEAGHQVFPIHPNAVKASRPRYRSHGAKSDASDAYLLADLLRTDGHRWAALSPQSDSIRALRALVRARDDLVATRVALANQLRSTLEAFWPGGATIFAAVDSPIGLAFLRKYPSPELASKLTEAGLRRFCRAQHYSGRRTPAELLARLHAAAAGHAGELTGAAMAQVVGALVRVLEPLIEQLSTMTRDVERFVESLPDGQIIMSFPRAGRVCAAQILAELGDVRERYPTLDRLTSEAGVVPLTYQSGKSRSVGFRWACNHRLRSAITTLADNSRHVNDWARQTYSAARARGCDHPHAIRILARAWLRVIWRAWTDRKTYDPALHLGSLKTISSTGG

SEQ ID NO: 422480 - protein, 422 aa, unidentified
MLRDSEDTEEIIERVAALDIGKAELVACIRVPHPDRPGRRAQEITTYSTMTRSLLGLADRLRELRVTRVVMEATSDYWKPVFYLLEAQGLDPWLVNAKDVKHLPGRPKTDKLDAIWLAKVAERQMLRPSFVPPMEIRLLRDLTRYRTDLVRSRSAEKQRVEKLLEDAQIKLSVVASDIFGVSGREMMAALIAGERDPKALAQLARARMRAKIPLLEEAFVGHFTNHHRFLLGRMLARVDQTSADIVAVEARIEELILPFARSVDQLDEITGVGITAAHVLVAEIGVDMTRFPTPAHLCSWARFAPGIKESAGKNKGRGATGHGNPYLAAVLGEVAVTAGKTDTFLGERYRRIARRRGTKKAIVAVGRSILVIIWHLLSDPETQFHDLGSDFYDNRTSTDRRKRNHVRQLEALGFKVTLEPAA

SEQ ID NO: 422481 - protein, 436 aa, unidentified
MKRIERVIENAAGIDIGSQRVFVSTGDMPVRNFETFTSSYNELIGYLKGCKVTHVAMEATGVYWVTLFDMLEQAGFTVYLVNPADSKNLPGRKTDVQDCQWIRELFSMGLLRNSFIPNDVIRELRAYTRLREDKIQMASSHVNHMQKAMVQMNIRLTEVLSQVHGASGMAMIEAILRGERDAEKLLSLCHKSLRKTKSGRIKEALNGNYRQEYLFELQMAYDGYMFYQKQIANCDRKIESLLEKATEGKSYDRDKIKPHPIKPIRHNSPVVAGLHENLLKLNQVNATSLPGITDYSFLRLTAELGTDLGKWPSEKHFTSWLGLAPGKNQSGKMNKRSKRKSVTRAGQIFKQAAQTILISKKIALGDFARRIRSKRGPGVSIMATARKLAELYYKMFTKGMDYVEQGLQLYLDQQKEKQLKYLKKKAFEMNMQLVEM

SEQ ID NO: 422482 - protein, 343 aa, unidentified
MKTITTIGFDIAKSVFQVHGVDAAGEVVIRRQLKRRHVLAFFQKLPSCLVGIEACASSHYWSRELQALGHTVRLMPPAYVKPYVKRQKNDMADAEAICEAVTRANMRFVLTKTPEQQSCLMLHRTRHLFIRQQTAVINSIRAHLAEFGIIAPVGRKGVTELLHVVADPSDRRVPEVARACLAALGTQLLRLKQQILEFDRMIMAWHRSNQTSKRLHYIPGVGPILATALVASVADPRTFRSGRNFSAWIGLVPKQHSSGGKDRLGSISKQGDRYLRSLFVAGALAVIRYAKVHGTKHRPWLTALLGRRPTKVAAIALANKIARMAWAMMAKGERYKQPVALAA

SEQ ID NO: 422483 - protein, 432 aa, unidentified
MPFARGDVRDHIVSYKNDQGASYGRYAVLQWWSQLKISFCEIFGVIQFPTFATWDYSGIEPDKGIGNQLSRDGGVSLMWPQQRWRGAMECYVGLDVSLKQTSICVVNEKGLVVREGVVDSVPEAIAGFVRSKAPGAVRVGLETGPTATWLWTELARLDLPVICIDARHAKAVLKMQVNKNDRNDAAGIARIMQTGWFKEVRVKDLDSHAVKALLASRALLVKIKRDLENQVRGLLKNLGLVVGHGTFNVFAVRAKELIADRPELTSAVSPLLTARTAIEQQIGKLDRQVLKLSRQDAQTRRFMTVPGIGPITALCFKATIDDPARFRRSRSVGAYIGLTTRRHASGELDWSGRISKCGDAMLRMYLFEAAGVLLTRVPKWSALKAWGTRLTKRNGLRKAKVAVARKLAVILHRMWVDGTEFNWSNNNKEVAA

SEQ ID NO: 422484 - protein, 356 aa, unidentified
MSRDVKYIGMDVHKEALVIAVLNDGGKLAMESIIETKASTLLQFIHGLRGELHVTWEEGTWAAWLYDLLKPHVHQVLVCDPRRNALLKEGNKSDKVDARKLADLLRTGMLRPVYHGEHGLRTLRELGRSYQTISKDLNRVMNRVKALYRGWSIPCAGTQVYAPRCRQEWLDKIEHAGVRRRAELLYEQLDGLQALRRTLRPELLAESRKHKAAKLLRQIPCIGPIRAARLIGLMQTPHRFRSKRQLWTYSGLGIETHDSAQYCYVNGQLQRSKKPQQIRGLNRNHNHEMKEIFKGAATRASCGVGPLRDFYVTLLDKGMKPEMARLTLARKIAAIALTLWKKEERFDAEELKTQAA

SEQ ID NO: 422485 - protein, 480 aa, unidentified
MATRKTTHTHTKRPQPRASPQHLRDQAQQCARLADTPVTNPHAAGIDVGDTTHWVCVQTTPDGSDTVCEFFAHTPGLRQLVAWLTSCGVTTVALEASGSYSHVLYLTLLEAGFDVLMTSPHFTRQIKGRPKTDKRDCQWIQRLHKHGMLPPIFQPDDATHTLRDYVRQRANLVRLSAQHVQRMQKALELMNLKLTTVLGDVTGVTGQKIIRAIVAGERDPQTLARLRDRRCKHTAQQIATALDGRYRPEHLTELRLCLKMWDAYQEAIVELDRTIETHLTTMRRTTQLPPLPKQTRVRGKKPHDPGFDVRQALYLATGVDLTAIEGIDAIHALTLVSELGSDFTKWPTVKHFTCWLGLCPNWQKTGGKVKSSRVRRGKNRAALALRLAAWSLMRSKSYLGAYLRRQRTRLGTPKAITATAHKLARIVYHLVRFGEAYMQQTEEVYAAQVRERLEKQLHRRARELGYTLTKVESPAPTAAE

SEQ ID NO: 422486 - protein, 401 aa, unidentified
MKGSIIMISIGIDIGKNSHTFCIFNQTTGQEILAPTNIKNNKTGFDFLLSKIKDYKKEDLLFGMEDTGHYHFALLKALLSKNYTVALINPVATDLTRKMQGGISKNDNLDSYTICDVISSNSRKKPYRITKINKFDLFEQRELTRHHHNLKEELNVYTNRLQKCIDIVFPEFNSLFTSKYGIVYMDILKNFGSAANIARTDIRTLENYFNYKGRGKRISLTADELKASAKTSIGIDSISEVIQIKHLISQIELINVQLEEIDKKIEEFSRQTNSPILTIPGISHFSCTSILSEFGDISNYSSAKKLIKFAGVAPYEHQSSLYKAEHTSITKKGSKYLRKTLYQIIMPVIWNNEVFKQYYQFKISQGKSHLCALGHCVRKLLRVIYHLCTTENGKFDASLLK

SEQ ID NO: 422487 - protein, 416 aa, unidentified
MTEHYDWFLGIDWGYDAHQLCLVDAAGQVHDTRRVEHDPAAVDSAIAWVLTRTAAAPSQIAVAIEQPRGALVATLLQRSFPVYAINPKQLDRFRDRFSAAGAKDDARDAHVLGDSLRTDRRAFHRVPVADPVILQLRELAHAEADCQRDLTRLTNQLRDQIYRIAPPVLRLCPAADEPWFWTLLEQAPTLAEQQQLTRTQVLTVLRAHRIRRLTAADLLAALRAPAFAVAPGVHEATREAISLLIPRLRVADAQRKRCVVRQEALLTELRERPAEAEPKEHCDVEILESLPGVGRMVSVAMLTQATEPLATRDYDRLRAHLGTAPITKASGKQRLVQMRTACAARLRDAAYHWGRVSIQKDASAAAYYRRLRARGHTHGRALRSVVDRWLRILVAMLRHRRLYDPKRFVTSAAVPV

SEQ ID NO: 422488 - protein, 433 aa, unidentified
MKVLYERVAGIDVHKEMVKVAIRSPGEKPWTRKTEVLEFRTFYGVLQAMARELRRRGVTHVVMEASGVYTEPVYYALCEQDFEQVAVINPAHAKALKGHKTDAKDCARLAELFECGLLRGSYIPPAELKEVRDLTRYRIKTVQARTSEIQRLAKALESAGIKLGSVASDITGVSATAMIESLIDGERRGAVLADLAKGRMRTAGKLADLSMALTGRFTEHHALLCRLHQDRIAGFDAAVADLDERVAGKAARWRREADLLTSVPGFGDVVAQAWLGEIGPAPHRHFATCEKLASWVTLCPGNNISAKKRKHGRTGDAGTYIKPMLIQAAWAAIRVKGRLQARYNRLVRRFGGDKNPAAKKKAITAIAHTLLKIAYQVLKSGMPYQELGADFYTRRESPEQRQSWLERQLQKLHPGCTVTITISPPEAALLPGA

SEQ ID NO: 422489 - protein, 334 aa, unidentified
MLHVGMDVHWKTTTICILDENGHEVKHQQIRGGWDRVLSVMKQIRQPFQVAFEASCGYGYLHKHLSMLARRVVVAHPGHLRLIFRAKRKNDRVDAQKLAKLLYLDEVPPVYVPSASIQQWREMIEWRQALVAKRVACKNALRALPRSGGIQAPRGLWTGNGRVWLAELALDEMTAWRRDMLLEQLTMLSDQIKRVTQRLDRLADQSAAVTVLRTIPGVGPRTAEAMVAYVADPQRFSDNRSVGTYFGLVPSQDASAGVNRLGHITKQGPGTARKLLVEASWQVIRRCPRTRERFERLCQGRKERRKIALVAIARHLACTMLSMLQTGEAWRKAA

SEQ ID NO: 422490 - protein, 342 aa, unidentified
MTHYAGIDVSLEQASVCVVDANGKIVAEGKVASEPAALLAWFRSLGVELARIGLEAGPLSQWLYAGMTAGGLAVELLETRHVHAAFKTMPVKSDRNDARGIAQLMRLGWFRPVHCKSLAAQETRALLTARKLVQSKLHDVEMSVRGILRGFGLKVGKTTACGFAGRVRELVAGHPTLEVVAAALLAVRATMVRELSGLEKRVRTIARSDARARLLMSTPGVGAIVALTYVAAVDDPTRFKSSKGVGAHFGLTPRKYQSGETDITGGISKIGDPSVRAALYEAAHVILTRPIKGCTSLKSWAMRLARRAGMKSAKVALARKLAVILHRMWVDGTTFNAAAAAA

SEQ ID NO: 422491 - protein, 349 aa, unidentified
MAVTIVEEARAITGGVDTHADVHVAAALDPIGGLLGAGEFPATAAGYARLLGWLGGFGTVCLVGIEGTGSYGAGLARHVTAAGVRIAGVDRSDRQDRRRQGKSDPLDAVSAARAAQSGRARGASKGRDGSVEAIRALMVAKRSAAGERTRTIGQARALVLTGPDDLRARFAAHTPAALVAGLGSLRPRPGGDVAGHATRVALRELGRRAQFLDSQLERPGELIVPLVTAHAPGLLALYGVGPNTAALLLIAAGDHPGRLRSEAAWAHLCGAAPIPASSGKVTRHRLNPGGDRQANHALWRIVFTRLGSDPATRAYAERRTAEGKSKAEIIRCLKRYVAREVYRYLRPGG

SEQ ID NO: 422492 - protein, 451 aa, unidentified
MRSTTYAGVDWASEKHDVVIADETGEQVLAATFAHDETGVRGLCRALVRHGVSLVAIERPDGLLVERLLEAGLRILPLHPNQVAATRDRFRASGGKSDGFDAFVLCELARTDHHRFRVLEPDTDQTKALRALTRAREDLVGTRTALTNQLRAELERFWPGPLGLFRDLHSQISLAFLERYPSPADARGLGEARLQGFLVRQHYTGRQQPGQLLAKLRRAPEARVGELELGVRRALVLSLVATIKTLNEQIRQLERQIATAIREHPDGHIFLSLFKKPNSVICAAELLAEIGDCRARYPTRDTLAADAGQAAVAVESGKRKAASFRWACNKRLRQAFVTLADTSRHHNPWAHDLYAAAIARGHDHPRAIRTLGRGWCRIVWRCWQDRMPYDPARHRALQRHVTVTIPTSSGPVPDTAATQRMLGTAVTRRAARRAEREVLDGTPTSANTLGG

SEQ ID NO: 422493 - protein, 458 aa, unidentified
MNIHNLAHLQVAVDIGSHEHYVAIGLSEGGILDEFSITHTPAGFQYFFSRIELQEYLYNRPVDVAMEGYNGWARPLDSQIQSHGYQLYNVNNLKLARFKEIFPAPAKSDLVDTHKMLELFQLQDHLPLAKGVLQAVLPVPDANRRLKRLTRRRRQLINEKVALQNRIQPDLQATCPTLLDMTGSIDNLWFLHFLTCRDDLTKLMRLQTKSLLAIQGVGRKYLNLILDWQKQAEFSNEIEEVGPMIQEDARRLLALMASIKTMDAKIDSQIQKSAYAQHIDSIPGFGLVCSAELAGEIGTTDRFPKQSSFSIYIGMAPLDNQSGGYQGTKSPKHVNTRARKAMMTAVCRHMAYVPESRAYYDKKRSEGKTHNNAVRALGRHISRVIWSMLRHDRDYIELASISALHYFSRKLRRGPSGLRSEKLRGVYAFGGPRSSCVRTASPYHRKLGTGFAVLPQMT

SEQ ID NO: 422494 - protein, 415 aa, unidentified
MSLSVLYARCAGLDVHKLTVVACVLLTAASGKVSRAVRTFATTTAGLQNLSDWLAQEGVTHVAMESTGIYWRPVFNLLEGRFEVILVNAQHMKAVPGHKTDVKDSEWIADLLRHGLLSASFIPPKPIRDLRDLVRARKTLVRQRAQAILRVQKVLETANIKLSSVATDVLGKSGRDMIEALVVGISDAETLADLARGRLRKKLPALREALEGRVEPTHRVLLHQLLSQIDFLQGQIDSLSVDIDRLLLPYEPFIGRLMQLTGIGRLAASAILAELGTDMARFPSAKHLSSWAGVAPGNKQSGGKRKKAHANKGNTHLRAVLAEVVWVISHTKDNYLAAQYHRLSRRIGKQKAIVAVSHSVLVIIYHLLRDQEDYHDLGAHFFESLDSTRQRDSAVRRLQTLGYQVTLAQLKEVSG

SEQ ID NO: 422495 - protein, 327 aa, unidentified
MNFIGIDVSKKKLDCSLIRAERPDARLHKVVPNTPEGVATLLNWVKDKAKCDDIGAFHAVLEATGPYHEIAAEALFDAACKVSVVNPAYTKSFAQSLGVKTKTDHTDADSLARYAMLAQPPAWQPPPPQYRQLQILQTRKQALETDLQRERNRLEKQQATRGEPLVVESIQRMIQHLETERQVLEQALETHVQAHPDLSRDRGLLQSIQGVGPVVSTLLLRILQPGRFKDAPQAAAYLGVVPVEHQSGTSVKGRPRLSKAGNATVRAKLYMAAIVAARYNPDVKALYERLLAKGKSKMSALGACMRKLVHICFGVLKHQSAYSPKAA

SEQ ID NO: 422496 - protein, 331 aa, unidentified
MGAASTAVVIGIDVSKATLDACLLLPDGAAREKAFPNTAAGFAALLAWADRHAAGADAHFGMEATGGYEDALATHLHAAGHAVSVVNPTRIKYAGVVRGRGNKTDRADARLIAAYTRDHRPAAWSPPSPEVRELQALVRRRDDLRALAAREKGRADGPLLTPAARKSVARVVKFLSKEADAMQAAADALIAAAPGLATDRDLLASIPGVGAQTASTVLAELPSLDRVPSAQSAAAYCGLSPREFKSGSSVRGRTRLSESGNARLRTALYLPTLTAVRFNPALKAFFDRLVAAGKPKMQAVGACMRKLVMICYGVLRNRAPFDPAWGSRIAT

SEQ ID NO: 422497 - protein, 417 aa, unidentified
MKIRTQKIRNINKKTLVVALDIGKSVHYGYLRAPNGKEIEPFCFHNFKKSFEKFWAKVVQFKRQQNLRHIVIGFESTGPYAEPLFHYLRHKPVKLVQINPMHSKRLKELTGNSPNKTDKKDPRVIADVICLGHSLTVVVPEGPAAQLRRLTQARERSIESRTAMFNQLQHLVFVIFPEFTAIMKPSTKTAMYLIKNHTTPESIFAMGLEALTGVVRKISRGKLGHERAKKLFEAARDSVGIYEGKESIVLEIDHFVSKIENEDRFIEHLKQQMADYLGQIPYSGSLLSINGIGDITAAGLIGEVGDFRKFRTISEIMKLAGLDLYEVSSGKHKGQRRISKRGRSLMRKLLFFAAINTVKSKGIMHEPYQQMLDRGMPKIKALTAISRKLLGIIFALARDNMVYVDNYNQQHHFQLAA

SEQ ID NO: 422498 - protein, 496 aa, unidentified
MNPTKKEVLAMAKRKKSTFERLRDGEKLKQWERKEVERQFRAEDPGWEVVHRDVAGIDVGSESHFAAVDPKLALPSVREFGSWTAGLQTMADWFKQCGVKRVVMQTTGVYWIAAQEVMEGNGFQVAVVDARGTKNLPGRKSDVQECQWLRKLDRFGLLRESFQAPEAIRGIRTTWRLRQRWVSDAGRSIQQMQKALTTMNVQLANTISDVSGVTGQAIIRAIVGGERDPWKLAQLRARNIQASEEEIARSLEGNWREDVLFELGEVLEAYDFQQKRIVRCDEQLKKYMGTQPTREVGGGVEVAGEEVAEGPKPRGRKKKGPRKPRKNQPAFHLEAELKRVMGVDLTRIDGVKVMTAQTIYAEVGADLSDFPTESHFASWLMLAPKRDVSGGKVIKHLSFKGSNRVANSLKMAAESLKDSDSYLGARYRSLRGRLGGVRAVKAMARYLSCLIYRMLTKGEAYVDRGAAYFEKKRQDRDLVYLQRKAAALGLQLIAAV

SEQ ID NO: 422499 - protein, 321 aa, unidentified
MNYVGIDVSKATFVVAYSSAKGSETKTFENTTKGVHKFIQTITPEDTHCVMEATGNYSMLLVYLLSKAGITVSMENPLKIKNFARVMLSVVKTDKIDARMIAMYGEKMNPAPFKLRSDSLMVLKQKRTVLRQLKKQLNANTNLQESMEALPFIDSVCKKILDKTVKFLRKQIQEMEEELSSLANIEYKKQMDLLTSIKGIGVTLATALIVATGGFTYFDNAKQLTRYLGLSPTYQQSGTSINLKGHINRNGDSYLRSQLYVAAFSSLRCNTECKACFDRLRANGKPGKVAVVAVANKLVRQAFAVVTQGKEYVDGFISAKE

SEQ ID NO: 422500 - protein, 343 aa, unidentified
MNACYCIGLDIHKKMIAYCVKTIDGRLVDQGMVASDRASLSTWMQGLPGPWVGAMEATIFTGWVYDFLAPHALALKVAHPEMLKAITAAKKKNDRADAEKIADLLRVNLLPECTMLPQEIRELRRILRYRNHLVRTAVNMHNKMSGLLMEVGAGYSKNRLRGKKYFHELLERLDEIPPSVKEMLLLSRAGFEMFQTFQKRLIHTLRSNPLIQARVARLMTITGVGEVTALSWVLEIGPVARFGSIRKAISYCGLCSAQRESGGKQQRGPISKKRNKHLQTILVEAAKLAPRWNPQLAAIHQRELSKGNRNRATLAVARRLVAYMMAVDKGEGNFVLREEQKAA

SEQ ID NO: 422501 - protein, 464 aa, unidentified
MALTLGIDVAVRAAHQAALTRDGATVWRGRRFWTRPADLEKLWTDLDLADPGELTVVIEPTRNAWIVIAEWFRRRGAKVVMVPTTQSADLRKYYSKHTKNDRIDSELLARLPLLHPEGLREYSGQGPADPLRRLVKQRSTMVKRRVAVYARLDALVELLGPAWYAVLGSNYGLASLEFLARYADPNAVIRLGQARLARFLIARSRGAWREDHAAGLVAAAKETLALWGPGGMDFAELAEDIAHEAEQALFLTRQIKQIDERIANLYADADPDGIVASAPGVGPVISAVIAGRIGDPHRFTSLAAIRAYTGLVPKVSQSGVSKVESSITKAGDPLLREMLCNAADQARKVDPQIAAKYQRLMAGDRHHDSAICHLATLLVTRIATCMRSGQLYALRDVDGTPITEAEGRAIVKERYQIDPRRRDNVRHKRMRDRRKQAADRESQESPGAPTSQPANTQPTSRRVA

SEQ ID NO: 422502 - protein, 321 aa, unidentified
MNYVGIDVSKATFVVAYSSAKGSETKTFENTTKGVHKFIQTITPEDTHCVMEATGNYSMLLVYLLSKAGITVSMENPLKIKNFARVMLSVVKTDKIDARMIAMYGEKMNPAPFKLRSDSLMVLKQKRTVLRQLKKQLNANTNLQESMEALPFIDSVCKKILDKTVKFLRKQIQEMEEELSSLANIEYKKQMDLLTSIKGIGVTLATALIVATGGFTYFDNAKQLTRYLGLSPTYQQSGTSVNLKGHINRNGDSYLRSQLYVAAFSSLRCNTECKACFDRLRANGKPGKVAVVAVANKLVRQAFAVVTQGKEYVDGFISAKE

SEQ ID NO: 422503 - protein, 355 aa, unidentified
MKILGCDLHARQQSIALLDTETGELLERSLEHGTDQPRGFYSSLRGPVVVGIEASGAMQWFLQLMEELEIECRVGHPAKIRAAETGKQKHDRRDALLLLRLLLEKRFPTIWMPTIEQRDLRTLLRDRHQWVRMRTRVQSTLQAIALNHGLRKGKGLWTQAGLATLEALPLPCYTAPRRNELLQLYTQLQKRIEELHQQVDTVIVGHPQAQRWLIHPGVGPVTALATEVFLGDARRFENGKAVASYIGMIPREDSSGPRQRFGQLSKQGNALLRSLWCEAAMHAVSKDGDLKRFYRRKLVQKGMGKARVVAARKLGIRLWIMLRDEIDYQEFCRRKRQEGEVRAGMPGHNHGPAVQ

SEQ ID NO: 422504 - protein, 350 aa, unidentified
MMLIGVDYHPSFQTIAFFVEETGECGEQELNHSDGQAEKFYRDLKQRGICVRVGMEATGYARWFERLLAELGFELWIGDPAEIKAKRVKKQKFDREDARLLVRLLRENNFPQIWVPGPENRDLRQLLWHRHRLVQMRTRIMNQLQALAMNEGYRWKKKLFSERRAQFEKLALGPWASRRRQELLELLDRMNPTIEELTAAVEWEARQRPEAIRLMTHPGVGPLTALAYVLIIGTPTRFQCGKQIGTYVGMIPREDSSARKQRLGHISKQGSSLLRFLLVEAAQSAARSNPEWKRRYVYLTMRRHRSIAKVAIGRRLAVRLYWMWRNGCDYSPSLEFGSYVGQLGSGYGVK

SEQ ID NO: 422505 - protein, 402 aa, unidentified
MNAVGIDVSKGKSMVAIMRPFGEIVSAPFEIKHTASGINSLVELINSVEGESRIVMEHTGRYYEVLAHQLSEANLFVSAINPKLIKDFDNDSLRKVKSDKADAVKIARYALDKWQNLKQYNVMDELRNQLKTMNRQFGFYMKHKTAMKNNLIGILDQTYPGVNTYFDSPARSDGSQKWVDFASTYWHVDCVRKMSINAFIDHYENWCKRKKYNFSKSKAEEIYGKAKELVPVLPKDDITKLIIKQAVDQLNSASTTVESLRTLMNETASKLPEYPVVMAMKGVGTSLGPQLMAEIGNVSRFTHKSAITAFAGVDPGVNESGTYEQKSVPTSKRGSADLRKTLFQVMDVLIKTHPQDDPVYQFLDKKRAQGKPYYVYMTAGANKFLRIYYGRVKEYLASLPES

SEQ ID NO: 422506 - protein, 358 aa, unidentified
MKYVGIDVHKKMCQAAILDEDGKLLDEIRFANTPEEIEEFSGKLATFRDEVKAVVESTGNLWIQIHDRLEEHGFDVALSNPSKTRLIAEAKVKTDKVDARTLAMLLRADMLPTCYVPGEELRSRRELLRHRLNMVKIRTGVKNRVHGLLDKHGLRMPGITPFSRENITWLREQSFGFMDDAIVRSDLAVLEAVDGQVTLIEEKIATIAAEDKRVRLLMTMTGVGYFTAMLVMAEVGDVGRFRGDKEFASWMGLVPSVHQSGERIRMGCVSGPGNKRLRWALVESAQAAVRFDPRFSGLYERVSRRRGKGCAVVAVAHEMARIMYYMLSRGEAYRGENRGLTERKLKSLGKKAFNGLRN

SEQ ID NO: 422507 - protein, 410 aa, unidentified
MSVPDEGGLPRSVTGGVDWSKDTHAVCIVDHEGGVVERVAVAHSKAGIDRLVCVLVRYQVSGVGIERPDGPVVDAMLAAGLTVFVIPPSQIKSLRRRYGSAGHKDDRFDAYVLADTVRTDRLRLTPLTRDTQDTIVLRSMSRARKDLVRHRVAMTNQLRAHLDLVLPGVVGLFTDLDSPISRAFLATFATQDAVDALTVDSLTQWLVGQKYHKTAPQVLLQRLHDAPRGPAGAAFIGVTHAYLAAISAIADQIKAIDTHLDEALTAHPDGKIFTSLPRAGTVRAARLLAEIGDARGRFPTPASLAGLAGVTPSTRQSGTLTIIAYRWAVDRQLRDAVCDFAADSRQSNPWAANLYHQARARGARHPHAVRILARAWLTVIWKLWTTHTPYDPNRHGALKRLLEQESTEGV

SEQ ID NO: 422508 - protein, 409 aa, unidentified
MKLFVGIDVSSKDLKVCIMNHEGDTLKSFTVDNNLHGAGHLRDQIMDLADKHSCQDIQIGMESTSVYSWHPAMFLNGDEALKNRQAKVYTINAKLINKFKEAYVDLDKTDDIDAWIIADRLRFGRLPLTMVMQEQYVALQRLTRMRYHLTHNLVREKQYFLQNLFFKCSAFTNEVESSVFGNAIMELFLEQFSIEEISSMDVSSLADFLKEKGKNRFADPEKVAKCIQKAARSSYRLSKCVEDSIDILLATSIETIRSLKAQIKQLDKAIEKILDGIPNTLQTIPGIGPVFCAGILSEIGDINRFKDQASVAKYAGLTWRRRQSGDFEAEETKKIRSGNRYLRYYLVEAANSVKTYEPEFRSYYQKKYREVPKHQHKRALVLTARKLVRLIDTLLRNDQIYTPERKVNR

SEQ ID NO: 422509 - protein, 352 aa, unidentified
MILVGCDLHSRKQQVAALDTDTGEVLEQELLHEGDAVERFYGALPRPVTVGIEATGYALWFHALMQKLGHTLLVGEAAKIRAMVVRKTKTDRRDAQHLLDLLKHDRFPTVWMPDPATRDLRGLIAHRVRFVRMRTMVKNGLHAIALNQRIALGPALWTKRGLAQLQALALPPHTAHRREDSLELLTWLTTRIDQLDAQIAAAAAADARAQRLLTHPGVGPLTALITVLVLGPAARFPTSKHVVSYVGLAPAISASADKYHLGKITKQGNALLRWILGQAAPLAARADDELKRGYFAVLHRRGRPKAKVALARKLLVRLYIMLRDQIDYDEFRRRGRARRSQPDRHPVAAPAM

SEQ ID NO: 422510 - protein, 324 aa, unidentified
MIDGVLGIDVSKNTIDVSMSGSNKVRARSFANSADGWRHLLAWLISQKIQRVHACLESTGRYSIGIASALYEAGHVVSIVNPAQIRDFARTKLGRNKTDGVDASHIREFCELFKPQPWAPASEAHRRLGELQTIRAGIIAGLTEWKNRKNSGMIDAVAQSLADVTISHFTSQLVAVDEAITQTIDNDPVLRRKRDLLLSISGVGETLAGVVLAELPGPDVLRSGAEVVAYAGLNPRLHQSGTSIDRTTRISKIGNAVLRAALYMPAMSAMQHNPAIVALVARLKSRGRLKPKQIVVAAMRKLLVLCFGVLKTGKPFDPAIAMGC

SEQ ID NO: 422511 - protein, 366 aa, unidentified
MKKISTVQTFKSEIFKEQELTIGLDLGDRWSFYCVRNEAGQIILEQKLPTRPEAMKQTFGKIPRSLIALETGTHSPWVSRLFTQLGHEVIVAHAQKVQWITKSSRKDDRHDAQTLARLARVDPELLGPVRHRSAQAQIHLTVIRARAELVSARTALVNAARGLVKSYGERLPKCGTCQVSGKLAEGLSAELREVLVPLLTEIESLNERIKEYDERMEKIAKEVYPQVSLLKQVKGVGTQIALTYVLTIEDPHRFLKSREVGCFLGLRPGRRNSGKSEPQKHISKEGDRYLRTMMVQGAHYILGPFGEDSDLRRWGLKLAERGGKNAKKRAVVAVARKLAILLHRLWVSGEVYEPLRNSQKAMRAVA

SEQ ID NO: 422512 - protein, 349 aa, unidentified
MTVTCATDWASDHHDAALADHEGTLAARARTTDGLEGLHQLLELPTTRGDTADTPVPVTIETSRGLLVACLRATGRPIYAINPTAAARYRDRHAVTRKKSDHLDAMVPANTLRTDKAAHRPLPDDSKPAQAIAVLARAQQDAVWDRTQTGNKLRSHLREYFPGFPAAFQHDREGISSKIARTVLAAAPTPDQAAKLTRVQLRALLKKADRQRGIEAEAEQLREALPMPQTRQPHQVGQAMGHQAIALLRQLDAACISVDDPAEATVESSDAHPDAATITSFPGLRSPTGARVLAEIGDDRSRFTDAKGLKAFTGAAPATRASGRSLAVMARRVKNQRLAPVGYVWGSPA

SEQ ID NO: 422513 - protein, 351 aa, unidentified
MTSLQDIAEVVIGVDTHVATHSAAVLDSRTGGVLGEITVTADAGGYQELIGFAGQHSGLRAWAVEGTGGHGAGLARLLASRGELVLELDRPERARRRNGAKSDPLDAIRAAREALSRTKLGTPRATGDRQALSVLLAARRPASDAGAAAQRQLSSLVIAAPGCLRGRFRGHKLPAVLRLAARLRISPRRDTETATTGRVLRGLARRALDLAAEAARHENDIRAIVAAWRPDLLTQRGVGPITAATLLRAWSHPGRFRPEAAFAMLGGVAPIPADSGSGSTPVRFRLNRYEDRQLNWALHTIMLSRLRWDPATQAHARRRTAEGKTRREIKRCLKRHIARDLYRLLEHPSTA

SEQ ID NO: 422514 - protein, 385 aa, unidentified
MTGQYRVPVFIPRDYEIFAGLDVDKQSIAVTFADHEKLVRSLRLPYSSEQLVSYVRKHFPAQRVAFVYEAGPTGFGLYDDLVAEGHPCLVVAPSMVPSAPGQRVKTNRLDSKKLSEGLRGGQLHSIHVPSPVYRDLRHLVQLRDTHVRQMTATKCRIKSLLLYQGMAFPAEDGRWSARALGELKLMPCSGAVRFKLDQLIRTLQFHFQSAVTVQKEIRRFCQNDPELQQSISLLTSIPGIGWIVASHLVARLGDWREINNVRQIGGFLGLVSSEHSTGDHQDRGAITRAGDSRLRNKLIQSAWVAIGKDPELRAFYRRIYQRHPIKVAARKAIVAVARKLTTRIYAVLKEQRPYEFRVDSSAAPLTAEETGGPRERLGMAQSEQP

SEQ ID NO: 422515 - protein, 392 aa, unidentified
MVVSVGIDVSKDKHDCFILSSEGEVLVDVFTIPNTMDGFNCLLQRIQDCTTPQDKMKVGLEATGHYSYNLLGFLLDNGLATYVLNPLRTNLYRKSLSLRKTKTDRVDARTIASMLLSDAGLKPYTDTAYHNEELKSLTRYRFDKVKERAKLKSSISRLVCILFPELEKLVPSLHIASVYALLTEFPGAKQIAAAHLTRLKALLETASKGHYKRDMALEIRDAARNSIGSWMPAKSLELQHTIRLIRELDDEIVEIEEQIHAIMDALNSPITTIPGLGFRMAAMIFAEVGDFTRFDSPDKLLAYAGMSPSTYQSGQLKNCYPHMEKRGSRYLRYALYNATKYVCHWDPTFAAYLAKKRAEGKHYNVALSHAAKKLVRLIFAMEKSRRPYCLAA

SEQ ID NO: 422516 - protein, 357 aa, unidentified
MLNTGIDLHRRSIVMCTVNDSGAIAARSKMKTDPSAVTTYFQQWPGEAHRAVVECTSNWYWLCDLLRSLGIIVVLAHAKYLKAIAYAKVKTDAVDAHTLAQLLRMGFIPEAHQLPPEYRALRDLLRQRMVIEHHRTHIMQHISSMLVKFNITELPMAPSDPRFADFLASCAVPDEYRLTLQLYHQECLQASTHKKQLEQYFKQQLRPTPRLQRLVSIPGIGDITGAIIATETGDIGRFADHKHYASYCRLAPGACDSGGKHKHRSGSKDGNQYLKYAFTEAAIKAKQFYPPIRGFADRLERRSNASIARTVVAKELSKIVYVVLSRQEYCTTFKGIEIRKPRDWPRTCKPVRLTGEI

SEQ ID NO: 422517 - protein, 341 aa, unidentified
MYYIGLDVHKKTISYCVKDVSGHVQQRGTMAATRTELDSWMKTLPQPWTVALEASIFTGWVYDHLLPQAAQVKVAHPLMLRAIAVAKKKNDRIDASKIADCLRCDFLPECHMAPTAIRDRRRTLRYRHLLVRQMVQMKNRVSGLLLETGVSHNKERLHQVKYFQELLTDKEVTESVRPLLRLSHETIRRLDKTETALIRSLERDPVLAERVKNLRTIPGIGVITALTWALEMDDVSRFRSVKQAISYCGLCGDERSSADKVLRTPISKQRNKHIQRVLVEAAKFAPQQSHELALVYEKEKQKGNSNRATLAVARKLVAYLLAVDRERRPFKPAEEFSSAVA

SEQ ID NO: 422518 - protein, 337 aa, unidentified
MTIVFVGIDLAKNVFALHGVDDAGKVRLVRPAVRRDQLVETIAKLPPCTIGMEACSGAHHWARQFMAFGHTVRLMAPKFVVPYRMSGKRGKNDAADAAAICEAVQRPNMRFVPVKSELAQARLAVHTVRQGLVAGRTATINRLRGVLSEFGQVMPLKAKTVRLEAATRAEGLSQWSQTACMDLLAEIRRLDEQIEAYDRHIRLMAQADDRSKRLMDMPGIGPTTASALLAAIGNGHDFNNGRQVAAWLGLVPGQYSSGGKNRLGRITKAGDSYLRTLLILGARAVLAAANGKQDRISRWAQALAERRGYWKAVVAIAAKNARMAWAMLAKGEAFKPA

SEQ ID NO: 422519 - protein, 334 aa, unidentified
MGTVAVFVGLDYHDEAVQVCILDGQGRQLANRECRNDSEAIAGFVGRHGGRVRAAIESCAGAADLAEELVGRAGWSVDLAHPGFVARMKQNPDKTDCQDARLLADLERVGYLPRVWLAPEPVRELRQLVRYRQQLAERRRNTKLRIRAVLREQRCPGPAGVNPWTRAWRRWLTETAPLSEQGRWVVQQHLRDLTRLADDLRAVEERLTALTVDDPEVKRLLAQPGIGPVTAWTLRAEIGRFDRFRSGKQLARFCGLSPKNASSGRRQADAGLIRAANPQLRAVLIEAAHRLARLDPRWRALAQRLRAAGKPGSVAAAAVANRWVRWLFHQMQAA

SEQ ID NO: 422520 - protein, 406 aa, unidentified
MEDNSATNFIQEVLPMSLYFVGIDISKYKHDCCILSAADQKVVSKFTFKNDLQGFEQFLSALSSLSSPEDIRIGFESTAHYALNLELFLENAHHSFMEINPVLIKEYKKSTSLRRTKTDSVDCESIAHWLMTVEYKPHSKGFYHAYSLKSLTRLRDKLVRQRSFYLVKITNVLDHTFPEFKPFFHERLSKTALYLLETYGSAERMSRMDSASYDKLRSLSRGKFSPRQFLRLKELAANTVGVNNSIFDTELNSLLTLYKSLVKEICILEEEINRLIREVHPHYMSVPGIGTISAAVIYSEYGDISNFSSPAQMLAFAGIEPGINDSGTESHKGRMVKHGSSQLRYVLINCCLPLIRFDMTFAAYYAKKRAEGKPHRVAITHVAKKLVRVIYALEKQGIDFNAQKLR

SEQ ID NO: 422521 - protein, 409 aa, unidentified
MNDIHYIGFDVHKKTIQYCIKLADGTLVSEGRIQATHAGLAEWVARQKVPWKGAMEATMFTAWIYDDLVGHAVELKVAHSAMLKAIAAGKHASDRLDARTICDLARVDMIPGVWMAPPEQRALRTQLRWRNLVVRQATQTRNRIAGTLMEHGVEYAKSKLHGKRYFQNLLDGLTELPEAVRTALRFGRGSLEMFQSTQRLLLNHLNTHPQLSERVRLLRTIPGVGEVTALTWALEIGDPHRFRSEDRAMSYCGLVTPLQESAGKRYRQPLSKKRNPHLQTILIEAAHLAPRYHPVLRRLYDETKASSHAGTAAIEVARKLVSYLLSVDKNRKPFEIREKAEALSSPAGKGAFPSKPPVEGAPIARRSSPSRVRSAAAAQPAAPRTAAGCRAKRPHATGGSGGKATPGAC

SEQ ID NO: 422522 - protein, 341 aa, unidentified
MDHVAIDLGGTESQICVRGPDGKVLEEIRWGTRRLAAYLKKRPPSRVILETSTEAFRIADAARELGHDVRVVPATLVPSLGVGARGVKTDRRDAQVLSEVSSRIELPSVHIPTEISRTWKSTCTARESLVSARTQLVNTVRGWTRSQLLSIRSGSLCTFPDRVRKAAIASSIGLPEFIESVLQVIATLNDRIAFADKQLKDLAIEHPVCERLMTIPGIGPVTAVRFVAAIDRVDRFRNAHALECYLGLVPGEDSSSKRQRRTAITKAGPPQVRWALGQAAWVLRQKYKSDPLALWAAEVEKRRGKMIATTALARRLAGVMFAIWRDGTRYEPTRHRPPTPL

SEQ ID NO: 422523 - protein, 309 aa, unidentified
MNSTVVYIGVDVSKAYLDVAWAERSRRFANGKSGWSALMKWIKQGALPVHLICEASGGYERGLLDAAEQNGIKLSLVQANRVRQYARAAGILAKTDKVDARVLCAFSGAMQPAPTLPLSVQQKQLRELETQRRHLSRMLVAEQNRLAQLKDKELQRLTRSLLATLKKQMALIDARLAALVAQDQTLREKAQKLTAIAGVGTRTAVLLLAQMPEPGTLNRTQAAALAGLAPFNRDSGTLRGKRAIFAGRHALRCGLYMAALVAAGHNRILRAFYERLRTNGKPHKVALTAVMRKLILALNQVLKPTACFA

SEQ ID NO: 422524 - protein, 333 aa, unidentified
MKNYFVGIDISKDTLDVCVMSENDEKEIFFKVENSVEGVEKMISTNVRKDSQLRYCFENTGNYGLLLAKILENHNLPYYQIPALEIKLSQGIQRGKNDKVDSWRIARYAKVHCHELTLHALPEKEILMIKNLLTYRNHLIKIRTQFKNEKQSFYQINKIADVSYQIDEITEHIKRLDKNIDLVEKRIQQEIDKQQQISTNYKKITKVKGVGMLTAAYMIVLTNNFTSFQNPRKFNCYAGLAPFEHSSGTSIKGKTKTSKLRNKRIKTVLFNGANSAVIYDEELKSYYKRKKEEGKAHNSIINAVCCKLVYRMFAVVKREEPFVNLVRYNLHMS

SEQ ID NO: 422525 - protein, 397 aa, unidentified
MFQKSKSTIAILQPGGTIIRKPFNVPHTSQNLIELADYLGSLEGSTKIVMECTGRYHEPMLKALYEAGLFVSLVNPHLIKNFGNNSLQKVKSDPADGRKIARYTLDNWAELRQYSGMDNTRTQLKTLNSQFSFFMKQKVAAKANLIALLDNTYPGVNKLFDSPPREDGSEKWVDYAYSFWHVDCVRRIGLKTFTERYRAFCRKHHYIFQPDKPEKLFHASKELVAVFPKEKTYKLLIQQSIQQLNLASGHVERLRQEMNALASTLPEYSTVMGIYGVGKTYGPQLIAEIGDVSRFTHREALTAFAGVDPGVDESGQHKSKSNRASKVGSARLRKTLFQIMTTLLQNAPEDDSVYRFLDKKQVQGKPYYVYMTAAANKFLPIYYGKVKECLRNLEQAE

SEQ ID NO: 422526 - protein, 410 aa, unidentified
MKIAGIDVHKKVLMVVVMDAGVPEAKPVRRRFVTLPSELQRLRGWLQEQGVEEAVMESTAQYWRSVWLELEAHMRLHLAQAFSNRAPRGRKHDFKDAERLVRRLIADELILSFVPNGEQRIWRSLTRMKVQLTRDHVRLQNQMECLLEEMRIKLSVVVSDLLGASGLRILQALAAGETDPKKLAQLGDERLQCTEEQLVDALTGRVQPMHREMLALQLQRLELIDQQMAQLNRMIAQAMKSQQDAVIRLAEVPGLGVDSAQQIVAEVGARASTFSSAAELSSWVGTCPGKQESAEQNHSSRSAKGNKYLRRVLNQAAHAAAAKKGSHFQIVFRRLLPRLGYRSAIWAVAHRLCRVVWKILHEGVRFIEYGPSVTPREKKKRAQMLARALRKLGYQVTITPINQVAAEPAT

SEQ ID NO: 422527 - protein, 369 aa, unidentified
MGQSTEVFVGIDVAKARNAIAVADGERGGEVRYLGEIDASAESMRRFVKRLASKYDRVHFCYEAGPTGYGLHRLITSLGHPCTVVAPSLIPRKPGDRIKTNRRDAVALAKLLRAGELTAVWVPDEGHEAMRDLVRARAAAVESLRVHRQQVSAFMLKHGRVYPRKTGWTMRYLRWLQEQTFDHPAHQIVLQEMVEAVRLAKERVDRLEQTIVEFLPHWSLAPLVRALQALRGVDLIVAVTFVTEVGDVSRFESPRQLMAYLGLVPSERSTGETVRRGGITKAGNSRVRQMLVKSEWTYHHPTRIGKVKLYRLEATTPKVREIAWKAQTRLSARYRALSGGGKKTTVVCTAVARELAGFMWAVAREVQPT

SEQ ID NO: 422528 - protein, 442 aa, unidentified
MARKPSKQRFTVVHPDCAAIDIGGREHFVAVDPRHENPVQSFTSFTDDLLKMANWLESLGVKVVAMESTGVYWIPIYEILSERGFEVYLVNARATRQITGRKSDVLDCQWIWQLMTHGLLRGAFRPDDLTCCVRSLVRQRACKVKDQAQTLNRMQKAMSQMNIQLANVISDISGVTGMKILRAICAGERDPVQLAELTDRRIKAGKEAVARSLQGNWRCEHLHALTQELAAYDFLEQQIADCDEAIKTALEQLPVLQNKPEPSNKPLRSPHRSGAQQTELHQTLWKVLGVDLTAIPTIGVDTALVLAGEIGTDLSRFPSSQHFCSWLGLAPPTRISGGHRLTGGGPKIVNRAAQALKQAASNARNDKGFIGASHRARLTRMDTSCAIKATAHQLARLVYNLLTKKQAYVEKGLEEFETRSQDRQVRALLRKARKLGYQLVAA

SEQ ID NO: 422529 - protein, 409 aa, unidentified
MEVIHPRCCGIDIHKESVVACLRLQEGRRVKTEVRRFGTTTAELLRLHEWLSHAACTHVAMESTSVYWKPVFNLLEGSFEVVLANAYHIKAVPGRKTDVKDCEWIANLLAHGLIRASFIPPPPIRDLRDLTRHQKSLVRDRVKATNRVHKLLETANIKLANVVADVLGVSGRAMLDALVAGETDPEPLAKLAKGSLTPKVKPLAEALRGRFTSHHAFLLGQMLTQLDQLAALIARCDVRILEVSKPFEPEIQRLQTIVGVGRRSAEVLVSEIGVDMSRFSSAGHLASWARICPGSYESAGKRRSAGTGTGNNWLKTTLLESAWAAAHSRKSYLGAQFRRISKRRGPKRAGIAVAHSILVIAYHTLRNGVDFNDLGADYFDRMNSAKLKRYHLRRLAELGCDVSALAVSA

SEQ ID NO: 422530 - protein, 417 aa, unidentified
MEVLYPRCAGLDVHQANVVACVRIANGARASHEVRTFETTTKGLLALGDWLREAQCTHVAMESTGVYWKPVWHVLEGEFELVLANATHIRNVPGRKTDVSDATWIADLLAHGLIRASFVPPAQVQELRDLTRTRKQLVRELARHTQRIQKTLEDANIKIVGLISDILGTSGQAFLQAIIAGEDDPHKLADLARTRLKAQREKIVEALRGRVQAHHRFMLKLHLDQIHSLEKAIAEIEQRLGERLEPFREEVRLLVTIPGISQIAAHVIASEMGLDMTRFANANSLVSWAGLCPRSDESAGKRRSTRIRDGAPWLKTTLIQAAWAAVRTKNSYLRSMFHRLKARRGAMKAIVAVAAAMLRSAYYMLTRHMPYQDLGPSYFEKKTRTRTANRLLKRLKDLGIEVLQTRITEPSVMSVSL

SEQ ID NO: 422531 - protein, 343 aa, unidentified
MKLFVGLDVSLAKTAICVVSEHGKIMKEAQVASEPEELVRWVREQEGTIAAIGPGGRPLSQWLHRGMSAAGLDVVLMETRQVKGALKAMPIKTDRRDAEGIARLLHMGWFRPVHCKSVSAQEVRAVLGARKAIQQAMLSLEMPLRGLLRNFGLKVGAISRGRYEHRIRELAVGNPMLEAATGPMLRARASLRQELARLERHVRQLAQDDPVCRRLMSMPGVGAVVALSYRSAVDDPSRFTSSKKVGPWVGMTPSRNQSGERDVSGGITKAGDVNLRRALCQAATVMMHSGRSTWLRTWAVHVARRRGSKRAMVALARRISVILHRMWTDNADFRPDTATLHVA

SEQ ID NO: 422532 - protein, 350 aa, unidentified
MLIIGCDYHPGFQQIAMLDTETGELQERRLKHPEEAEQFYRTWATSAAKVRVGMEASGHARWFERLLAELNFELWIGDAAEIRARRVRKQKTDRQDAQHILKLMLKDDFPKIWVPSWENRDLRQLLWHRHRMVQTRTRIMNQLQATALNEGLRYKKKLWRDRGRQQLESLSLAPWASRRRQDLLDVLDRINPTIAELTHAIEQETEKCPPAQRLMTHPGVGALTAIAFVLIIGEAERFDCGKQIASYLGLVPEEDSSGERRRLGHISKQGNSLLRFLLVEAAQVTVRSDGRWRNQYFHLAKRRGRKIAKVAMARRLAIRLYWMWRRGWNYEQVESFGSHAGQPGNPHGVQ

SEQ ID NO: 422533 - protein, 385 aa, unidentified
MPKPNDLSRSFTAFEQDSTLIAVIEMSLTSWLIAGILPGIERHPLKKLNVDEEGLLQLLHRWREEAINAGREISRIVLAFEAGRDGFWLARWLRARNIEAYVIHPNSVAVSREHRRAKTDRLDTELLKRAFLGWLRGESDHCSMAAIPTLEEEDARRPNRERENLLGERTRIVNRMKACLVRFGVRNFKPTLRKAPERLKTLRTPEGGPLPPNSFAELRRDMARLRFVMEQIREIEEARLQRLEHSPNEGSHPMVRLLARVIGVGIETADMLVHEILSRNLRNQRAVARYAGLTGSADESGKRRREKGLARAGNARVRRGMIQLAWRFLMFQKDSALVQWYRSVTNETRGARKIMIVALARKLLIALWRLVKTGEVPQGVAFRSA

SEQ ID NO: 422534 - protein, 320 aa, unidentified
MSQHSLRNEVAVGIDVSKDFLDVDVAPARQPLRVPNTPEGHAALVKHLRSFKVDIIVVEATGCYELAVTAELLAAGLPVRVMNPRQIRDFARATGRLAKTDRIDAAVLADFGLAVQPEPRPLPDAQTQQMREKLARRRQLVEMITAETNRHHRATAEGVRRSIEVVLNVLKDELRRLDEDLDQAIRQSPAWREKVELLQSVPGIGPQNARTLAVELPELGQCSRQQIAALVGVAPMNRDSGQFRGRRTIRGGRGRVRHCLYMATLTATRWNPKIRHFYQRLLAAGKPKKLALVACMRKFLTILNAMLRERKPWTETAVTT

SEQ ID NO: 422535 - protein, 334 aa, unidentified
MKQVNLIGVDVGSKELVCALQCAGQRSPLARFANTAAGHKKFIRWATKGGHPARVCLEATGIYSLEFALALHHAKSVEVMVVNPRAIKDFVRSCMQRAKTDAVDAGGILDFLERMPFVAWQPPAPEILELQAINRRLVQLTTELVREKNRRHASEFAGDSADAIAHDIEVNIHHLERRIERMEQSGLDLVRGVPALATKLAHLVSAKGIAEASAMRLLAELLVLPDGLAAPQWVAHAGLDPRPYESGTSVHRPRRISKVGNRHLRAALYMPALVAIQHDPNVKAFYDKLVRAGKKPMQAVVAVMRKLLHAIWGMLKHDQDFDGEKFFRIATKNT

SEQ ID NO: 422536 - protein, 401 aa, unidentified
MTGQLWAGVDVGKEQHWVCVVDDAGAAVLSRKLVNDEHQIRELVAEVDALGEQVSWTVDLTTVYATLLLTVLAEAGKSVRYLSGRSVWQASVAYRGGEAKTDAKDARVIADQSRMRASDLPVLHPDDGLITELRMPTAHRADLVADRTRTINRLRQQLVAVCPALERVAQLTSDRGWLVLLARYQRPKAIRQSGITRLTRILADARMRNAATIASAAVAAAKTQTVRLPGEQVAAGLVAELAQGVIALDDRIKTTDADIEDRFRRHPLAEVITSLPGIGFRLGAEFLAAIGDPALIGSADQLAAWAGLAPIARDSGKRTGRLHTPKRYSRRLRRVMYMSALTAIRCDPHSRAYYQRKRDQGKRPIPATICLARRRTNVLYALIRDHRVWQPDSPPITKSAA

SEQ ID NO: 422537 - protein, 381 aa, unidentified
MSKSSTLFVGLDVHKDSIDIAVADAPRDGEIRHIGSIGGDLAALDKALRKLLSRGQPLHIVYEAGPCGFVIWRHLTAQGLQCEVVAPSSIARPSGDRIKTDRRDAMLLAKLARSGDLSVVRVPDGVDEAVRDLVRAREDAVREQRNGRHRLKALLLRNGIAYTGKTSWTSAHLRWLAKVKLAYAAQQIAFQEYLHSITEAGARIARLEQALRDALPDWGLMPIVQALQAMRGVQLIAAMTLVAELQDFLRFDSPRQLMAYLGLVPTEHSSGPKRRQGAITKAGNSAARRMLVEVAWHYRFDARVSPVIAVRQDGLPKAVTDIAWKAQLRLSNKFKRMSARRVMKTKVVVAVARELAGFVWAIGREAQLSGWQGLKTIPAEH

SEQ ID NO: 422538 - protein, 418 aa, unidentified
MSKIKTKGRKIVNEKTLLVTVDIGKTMNMGYCRCPDKTEVKPFEFQNGYQGFNKFLNIIFKTQATKKLEHIVVGFESTGAYAEPLMHFLRRKGIQLVQVNPLHTKRLKELQGNSPNKTDKKDPKVIADIIELGHALTVVIPEGAAADLRRLTNARERALQRRTALLNQLQDIVFISFPEFLGIMKDVKTQTAHYLLKHYPTPADILASGLDRLISEMKKVSRGKLGIERATALYEAAKTSVGIQEGDIGLALELQEFLLSIEECERFIERVEKEISCCLRDIPYSSLLLSMKGIGKITVAGLIGEVGDFRKFHSISELLKYAGLNLYEISSGKRKGSRRISKRGRSLMRKLLFFAAIRTVRKNGIMYDHYQRYLQNGTKKIKALVAVSRKLLGIMFALVRDHNLYQENYVKIQYLNAA

SEQ ID NO: 422539 - protein, 317 aa, unidentified
MNTNSLTCHVGVDVGKDHLDFFCHESAVHFTVTNTPAGIRQAFRQLPLRAIACLVVEATGRLERALVDAAQRAGLPVVVAQPIAIRRFAGALGILAKTDQLDSRVIAHYAATLQPPVRALPDAKTRQLKDLTVRRKQVIGMLTMEKNRLQIMPAFLRAEIRRSIAGLQRQLARLDERLRQLSEEVAAWRERRRILESMPGVGVTLATTLISDLQELGTLNPKQIAALVGVAPMNRDSGRLRGKRRIRGGRAQVRTVLFMATLCAVQHNPVIRGFYRRLLAAGKHKKVALVACMRKMIVLLNAMVRDGTCWEGTRIMA

SEQ ID NO: 422540 - protein, 333 aa, unidentified
MNPVVGIDVAKDESEVQAFLEKGKPYGENFSIKHNREELDKLLGFLGEIRSITGSKPVVILESTGHYHTPIIQCLEENEILYILLNPIISYQAKKSSLRKVKTDAFDAYQLCVLYYKEEFEPYKMREIQLLNLRNLSRQQEIITNMYVEAKLQFHTILDQVFPEYRKVFGDLFSKVSLLILKEYPTSEKVLESNEDDLSNSIREYCPSRSALWARVKARKLIDSANQNPFQKVMYQSHLFNLNMYIDILFHYQGHLLELESQMISLASEIEEYKIIQSIPGIGEKIAATIISEIGEIDRFNHPKKLVAYAGIDPSVYSSGKFTATTNRITKRG

SEQ ID NO: 422541 - protein, 421 aa, unidentified
MTEEAPQWFVGVDWGREAHQICVLDAAGAIVGERAFTHGGAGLADLCDWVVASTGAEPAAIAVAIEVPHGPVVETLLERGFRVYAVNPKQLDRFRDRFTVAGAKDDRRDAHVLGDSLRTDRHCFRSLAVADPVVVELREWSRMSEDLQQERTRLANRVREQLWRYYPQALDVAGGDVAAEWFLDLWSLVPTPAKAARIRESSVDRVFKKHRIRRLDAAETLGRLRQKPLTVAAGTTEAAVAHIGTVVQRLKLVNRQIKQAHRRLDALCDALAGGGEDETPEPSDEPSDVAILKSLPGVGRIILSALLAEASEPVRARDYRALRTLSGVAPVTRRSGKRCIVVMRNACHGRLRNAVYHWARVAIQHDAVSRGRYAALRKRGHSHGRALRSVADRLLAVACAMLTHRRLFDPNHATREVTEAA

SEQ ID NO: 422542 - protein, 411 aa, unidentified
MHNRQNYLYVGVDLHKEHHTAVIINCWQEKLGEIQFDNKPSAFSKFLLEVETYVSDGLSVVFGLEDVGGYGRALGKYLVDHEQVVKEVNPALSFLERKSHVTTQKSDSWDAECVARILVNKFNQLPDAKPNDLFWSIQQLVSRRNALVKAQSALKNQLHIQLNHHYPSYKKFFSELDGKTALAFWQQYPSPSCLEGANIKQLTAFLLDVSNNTCSVKKASEILKLVKEDGHTMKEYQETRDFLVRSIVRDIEFKKTEMKYIERELKQLVKLLAYQLETMPGIELVTASALIAEIGDVRRFPNANKLARFAGIAPVYFGSGGKGKTHKSKQGNRALHALFYNLAVQQVQVAKGSKMPRNPVFHAYYQKKLKEGKTKGQALVCIMRRLVNIVYGMMKYKTAYELPIVEEKEVV

SEQ ID NO: 422543 - protein, 418 aa, unidentified
MAFKIFRKNCCGLDVHKTWIYACIGITDSNNRTEYKQARFSSFSNGLKELAEWLAKYSCTEVCMESSGKYWIPVFNILEKTCWVTLAHPKYTKSQKGNKTDRKDAKWICDLFMCDMIKPSFIPPPDIRQLRDLLRFRMKLTYQITGMKNRALNCLTVSNLKLDDVFSDVFGKSSRSIIGQILEHPGETFDVTPFVHKRCKHPIEEIQAAVEGAICPEQATKLKICLDFIDEQEKRITELDSEIFRLAEPHKAVLDFIRTVPGLSKEPLTAIRILSEIGADMSVFPTSKHLVSWAGCCPRNDSSAQKVKSTRISRAGSFLKPLLVQIANALIKSKDHPEFQERYRRIKARRGHKKAIIALCRMLLTAIWNVLSKLEPYYAKGYLADKLTEHSVVISKAEGLPLLRQRGYIFKDEVADFS

SEQ ID NO: 422544 - protein, 344 aa, unidentified
MERYLGMDVHAESCSFCVLEASGKELRRDVVETNGQALIQYLKQFSGGLHLCYEESEWAGWLWEILSPHVSELAVLQAERKKGSKSDAGDARALAERIRTGQVGTPIFKAPRRFAKLRELAQVYGLLTRDVVRAKNRLRSRFRRRGVRCSGEEVYSFERRKRRLAELPAAMLPAVELLGLELDSLEALKAETEKAMVEASHAAPISRILETIPGLGPVRVAQILPIVVTPHRFRTKRQFWAYCGFGVVMHSSGDWVRRDGGWVRDRVAQTRGLNFNFHRTLKYIFKGAATTVIAHARPNPFREAYDRLCAEGTKPNLAKLTVARKIAATTLAMWKSGEEYDPTR

SEQ ID NO: 422545 - protein, 400 aa, unidentified
MHLTANISVPQKNFIAIDLHSDNAVICVRRNALNKAGELVGKNIWCGRVSIRDGLDNFIKALLPYCQDFDHVAVVESTHNWYCLADVFEERGRLLRIADPSTVSQANLKASDDRTDAQYLAERLRVGSLKHYLPLSYSSRALRDLCRYRMAIVQDCASLKIKLINLYRNQLSKNLRVADLLDRCRNHMQSNYRFDPDILEEFKDPNIRLRVAFEISRITMLEEMIEECNAEIQKQCKDQELVKLCKTIPGCGPVLSAVICTEIGTMQRFKSAGDFVSYCRLCSTSKLSNGKSKGLGNAKNGNAYLSWAFTEVAQYASRNPVIREILQRLLRKYGGLRVKAIRTLAAKIARVTFYVLKNKQPFNAAKCFGIELTKSIKKKLPHKPLRKDAAVVLPAVAGQA

SEQ ID NO: 422546 - protein, 342 aa, unidentified
MTTPLFSKRPERTPGGHAPETSVGLGKDESYPSAKHRRRHLKRLLDVATSPAGEAIRFANDAKGHRALIKRLAAFEVIRVVFEATGAYHRLFERTLAKAGLPMVKVNPRQARRFAEASGQLAKTDRSDAAMLARMGSALELEPRPVISQTTDELKELLGARDALIKDRVAALNRRKTALSALIKRQLAQRLRQIDAQIDAIDQQQKKLRSADSNVQERYQILTSIQGVGDVTANVLIVEMPELGQLEHAQVASLAGLAPIANDSGKSSGKRSIRGGRSRARQALTMPALNAVRFYPHCKAKYDAMIKAGKPKKVALVAIMRKLAVLANALLRDSRKWSPQRA

SEQ ID NO: 422547 - protein, 375 aa, unidentified
MKIIGCDYHPSFQQIAMVDTETGEVTERRLYHGNGEAQRFYESLSGSVLVGVESSGNMLWFERLLARLKQELWIGDAAAIHWQNPRKQQLTDKRDAQHLLDLLLENRFPRIWVPSMEERDLRQLLKHRHTLVQMRTRVKNQLQHIALNQGLQKKSKLWSQEGQEWLKKLELDPWTQRRRDDLLQMLEDLDRQVKQMNQEAEKAAAARKDAQLLMSHPGVGPILALATVLTLGDVSRFPCGRQVASYIGLVPTEMSSGQHRWLGSITKQGNSFMRFLLVQAGLSAARGDAELGRVYKRLGQKKHHGVAKVAVARKLLVRLYWMLRTQKQYPEVVRMQGSPSHSVAEAKADRLSGRPASRPEPKDQKQTKKNCKKQK

SEQ ID NO: 422548 - protein, 319 aa, unidentified
MRKHSIICAGIDTGKRRLDVALDGYPDEQLQVPNSEEGYRRLSAWLRQRKVRRVGIEASGGYEQAVVCRLRRAGFSVVVFQPAQVRAYAKFHLQRAKNDKIDAALIAACTAAVRKLHAAPDPRLVRLAEHQTLIDQIVDQISRIKNYLESCRDPRLRRFWQDEIKRFRGLFKTELKALVAAIRRHRDLSERLDLIASVDGIALRTATAILVRLPEIGRISREQAAALAGLAPYDNDSGERDGARHIAGGRQRLRNSLYGAAFAASFHWNAELIELYKRLIAAGKEHKVALVACTRKLLIFANAVVARGTPWESRAATTR

SEQ ID NO: 422549 - protein, 391 aa, unidentified
MNKNISVIGFLKPIAMLFPSSALQRLDGTLGLKPVLSTMITYREFTTKQMRSKEMNSLSTIIGIDVSKEKLSVCLLSSEREEYFTVPNNVKSFGSFLKKIDYLDLSNAKFVMEATGIYHLLFAKYLAERDYDVRVLNPLIIKRYSQMSLSRVKTDKTDSFMIAQYGITFADQCTKFKLKPKINYEIELRLKAIDDFNKQKGILNNQIEALKHHPFADNDIKGCYKRLIGNIDGAIYRLTREIKEVMEKRFPLYCNLLKTIPGIGTRMNAIIISILSSFKDFSNAKKVTSFLGICPSPYESGSSVRGKGSISKKGSPYIRKMLFMCALSAVRYNLPCKNMYLRLKAKGKTWKQIAIAVANKLIRQAFGVLKSGLAFDANFVEKRFEKSCKSA

SEQ ID NO: 422550 - protein, 350 aa, unidentified
MTTLARQITGGVDTHLDVHVAAALDERGGLLGVESFETTPAGYDKLLTWLQGFGTVELLGVEGTGSYGAGLTRHLHSEGIRVVEVDRPNRQRRRRHGKSDPQDAISAARAAQGGDATGEAKTRDGNVEAMRVLRVARASARKARTQALNQMRSLISTSPDSVRAELRGLNVYRMLERASTYRPGAKRDLVSINKLTLRMLARRAMELEEEVKEIDAILKPMVAETAPALVALSGVGTDIASALLVSAGDNPERLRNEASFAHLCGTSPIDASSGKNQRHRLNRSGDRQANSALWHIVITRMVSDPRTREYIARRTKDGQTKKEAIRCLKRYIAREVYNNLPMGQLALDSP

SEQ ID NO: 422551 - protein, 377 aa, unidentified
MSKLRFVGLDVHADSIAVAVAEMGGEVRSLGTIANNPESVRKLIGKLAPTATLKCCYEAGPTGYVLYWQLTQLGVACEVIAPSLVPSKAGDRVKTDRRDAEKLARCYRAGELTAVWVPDAAHEALRDLVRAREAAKKDQLRHRHRLGKFLLRHGKRPTDAGQAWTQKYVNWIRIHARFEQAALNATVAHYLEEIDHIAGRIVKLEQAIDEAVKQSAPEIRAVIEALQALRGVAQTSAATVVSELGSLSRFQSPRQLMGYSGLVSREYSSGNKTRRGPITKSGNAHLRRVLVEAAWTYQHRPNVQGRVLRRQKALELSDEAKSIAWKAQQRLHKRFTAMTARGKNHNQTVTALARELLGFMWAIALHTEAQFNLTKAA

SEQ ID NO: 422552 - protein, 317 aa, unidentified
MAQKGTIVGIDVAKGKIDAAIRFGAEASFANSAEGRRELLAWLKEHGVCKAVMEASGGYEKSWATLLRGAGVEVVIVDPSRVRHFARSAGQLAKNDPIDARMIAWFGEVFGHASGQPHDEERQELDQIVTARLGIVRLKEQIENWGEHEQPKAVQKAQQALLKAVAIQLAKLETIIAAKIDKTKRFAQRAEIIQSVPGLAGTAAAGLIAFLPELGLVDRQAAAALLGVAPFDADSGQRRGERHIQGGRHKLRKLLFMPVLSAATQHNPVLKACYQRLIAKGKKAKVALIACMRKLIGILNTMLARGEKWNPAWHAIA

SEQ ID NO: 422553 - protein, 427 aa, unidentified
MPYKVAGIDVHKRMLHVVVSDVQVDGEYDFTRRVFGSLPEALRSLAAWLVEQQVEEVVMESTAQYWKPVWGTLERYWKPICQTREGALATSGTLHLALALSNRGRRGRKKDFRDAERLVKRLVAHELTLSFVPDVEQRLWRTIVRTKYQLTRNRVQLQNRLEALLEEAHIKLSSLVSDLLGASARRMLEAIAGGEINRETLAALADRGLRATQEQLQDALGVCQELNPVYRRLIKMVLDEVASIDKRIDQLNQEMANLLRPHEDQVKRLAEVPGLGVDSAQQIIAEVGATAATFRSEKHLSSWVGACPGDEESAEVNHSRRSPQGNRHMRRILNQAANAAAKHKGSIFQILYGRYVPRLGHNQTIGIIAHKLCRLVWKILHRGIRYEERGPEVSKASKQKRTRKMILQLRRLGYRIEPSPSQSAITA

SEQ ID NO: 422554 - protein, 368 aa, unidentified
MAKNMLANSEELRCNFPAAAQTATIGIDLGDRYSHCCFLGPDGTVLSEGRVRTTPAAMANHFKDLPSTRIAIEVGAHSRWVSQLLQDWSHEVIVANPRNLPMITSSVRKSDTVDAHMLARLVRVDPKLLSPVVHRGREHYPAIAQLRARDLLVRARTRLINAVRGISKTVGVRIPPCSSPSFAAQAEPFLKEELKASLGPLLQTISHLSKQIYCCDKEISRLGRQEYPETAQLRQVSGVGPVTALEYVLVIGDPKRFATSRDVGPYLGLTPKRDQSGDTDHQLRISKAGNKHLRSLLVQCAQYVLGRFSPDSNLKRWGMKLSSRGGKNGKKRAITAVARKLAVLLHHLWNTGEVYEALHNAPTPYVSS

SEQ ID NO: 422555 - protein, 338 aa, unidentified
MELYCGIDLHSNNVYCGIVQKNGKRMYDKRLPNDLPLILQSLEPFRKNMRSIAVESTYNWYWLVDGLMDKGYDVKLANPSAMHQYEGLKNVNDRTDAFLLAEQLRLGILPTGHIYPKEERPVRDMLRRRMMFVQHRTAHILSLSNLVVRQSGTSVRKNTMLRLEPEELGKLVGGGENLFMGRQSMDMVRFLTGKIKMIEERVSERIRLRPEYERLTSIPGVGKILALVIMLETGDIRRFAKCGNYTSYCRCANADCYSNEKKKSENNQRNGNKYLSWAFVEAAHHCIASCEKAKRFYERKKSKSNGAVATKALASKLTKAAFHIMRDGVSFDERKIFG

SEQ ID NO: 422556 - protein, 509 aa, unidentified
MKSKKYRRCCGIDVHKKNVTACILPPVGKPEVEVRKRTFRTFTRDLKQLRTWLKNLKVTEIAMESTGQYWRAVWNIFEGHFEKLILVNPQHIKGLAGHKTDPKDAQWIANLLETGKLKGSLVPPRELRELRDLTRQRVNLLEELNRAKNRVEQLCQAGNIKISSVASDLFGLSGRTMLKAIVEGRRDPGWMADYARGTLRGKRRELELALDGSFTDNQRWLLHQELGQVDWLEVHIQVLEQEIARRMAPFEEPIRRLTTIPGIESKTAWTIVAEIGVDMSAFEDVQHLASWAGLCPGNRESGGKRMSGRMRKANRYIKRAMCQAAWAAAHTRNTYPAAFYRRLQARKGPQKAVMALAHHLVAIAYNVLKRGEEYVEIGGDFYDRRNKSKVVSRMVSRLAKLGYQVTLTPTEPSELALDKPSSEPTSQISLEPEFHADLVGEEPPPEPTAPARVSPEVTVEFSAPDITSVRRLKRGRPCKCAERGIPCKHQVGLRLNSFETQGVERGKFS

SEQ ID NO: 422557 - protein, 321 aa, unidentified
MSSKKSQPSWIGIDVSKQLLEVAVHKSDYHFRCPNNPQKFPALIAELIALQPVRIVLEATGGLEKPLLQALQAVALPVVLVNPRQVRDFAKALGQLAKTDRLDARVLAHFAAAVEPPIRPLKTTDDSELDALMGRRNQLSDILGAEKNRRGSAATDSARADIEAHIEWLEQRLKALDKQLKEQLKRSVVWQQKDQILQSVKGIGFVTSVALLADCPELGQLNRHQIAKLAGVAPLNRDSGKQRGARHIFAGRAQVRAKLYMATLTAIRCNPVIKAFYQRLIARNKLKKVALVACMRKLLTIINVMVRDNKPWTVKAEPLSA

SEQ ID NO: 422558 - protein, 325 aa, unidentified
MRQPQLQVKPQTQVGLDVSSQTLDAHIRVDGKAFSVPNTDAGFDQLCEILSAYSVSMILMEATGGYEDNVACYLQLQGFDVVVINPRFARRFAQSMGRLAKTDRIDAAILAQMAFMIDSGPDRDRYIKPVTDEQRKQLSRLSSRRRQVVDLITIEKQRLTHADDYARESINSIISLLNVELKRIESDILRYVKKNFSELANRLLSIPGVGEQAMIVLIADLAELGHVNRRRISALLGVAPFNHDSGKFKGQRRIRDGRQTVRNVLYMGVISATRFNPVIKAFYDSLLLRGKPRKVAIIACMHKLIRIINAMMRTGKPFDMSLHGV

SEQ ID NO: 422559 - protein, 319 aa, unidentified
MQRTFIGVDVSQDHLDAYARPTALRQRFANTAAGIADFLAWARPLAAERIVFESTGPYQKAAVGALLAEGLPAVVVNARQVHDFAKAMNYLAKTDRLDAAAIAHFGEVARTTVRPLESQEMRDLRELYDRRGQLVRMLAVEKNQRHAATVAGASPRVLRSIEKHIDYLEGHIRDLEERMDRIIEGSAAFQARDEILQTITGIGPQVSRTLLAYLPELGRYSRQAITALVGLAPFNDDSGTYTGARHIRGGRRKVRVGLYQAAVAAIRHCPRMKAFYAGLKARGKASRLALIAVARKLLVLANALIRDMVPYRAPANSVC

SEQ ID NO: 422560 - protein, 412 aa, unidentified
MKKTDYIYIGMDIHKETHTAVLMNYMEERIGKVRIKNNLTGYRRLLAYVEKYRKNLVPMYGLEDVTHFGRNLAIYLQERDYLVKEVNSALSYMERMSYATAKKSDTWDSQCICSVLIRRQDILPEAKPHDYYWTMRYLVNRRDALIKALTKLLQQFHDQIQNVYPSYKEFFHEVECPTALAFYEQYPSPECLKGITDGELAEFLRIPSHNTCSTKRANEILDLVEKDAIKVRDYQYARDGVIQSIVRTIRFQSEEMKRIEEVEAEMLKELNYQLETIPGVNTVTASALVAQIGDIKRYKSADKLASFAGVAPIYQGSAGKGKNYQNKSLGNRELYHVLYFLAIQQVHIDRKKNPRNPEMRAYFEYKISTGKTKIQALICIMRRLVRIIYAMMKYKTAYEMPEIKEKEEVKVS

SEQ ID NO: 422561 - protein, 375 aa, unidentified
MAWTSLLYTASVVPKWKCQATTLTSRSVHDEHYPGWDRFGKASFQIHGLDARGKIALRKQLKRSQVGTFFAQLAPCVIGMEACGGAHFWARKLTELGHTVKLIAPQFVKPYVKANKNDAADAEAICEAVGRPNMRFVPIKNSEQQALLGMHRARQGFVTERTAQANQIRGLLAEFGLVIPVGIRSIGRKLPEFLEDAENGLSGASRALFARLFEHFRALDRQVEELERAINAWHREDTASQRLQAIPGIGPLTASALVASVGDAKVFHNGRQFAAWLGLVPRQNSSGGKTNLLGISKRGDTYLRTLLIHGARSVLLHLKSHPDQAEGWLARVAHRRNPNIAAVALANKNACTVWTLLAHGRDYQAGYRSANIAAA

SEQ ID NO: 422562 - protein, 405 aa, unidentified
MIMNNSPQIYVSVDIGCRQHSVAIGLSNGDVLDEFAILHRPEGFKQFFGRIEHHRQHYGGVVAVAMEGYNGYARPLDSLIKVRGYQLYNINNLKLARFKEIFPAAAKNDRIDACKGLELFQLRDHLPLAKDVLQEIMPTPRENDMLKRLSRRRRALVDEKSRLQSRLQGDLHAVCPGLLDITKDAGNLWFLRFITSVDELTKLARLRLSTLLKIPSVGRRYAGYIVAWQSHASFSHEVAWIGEMIIEDARRILALKNDIKALELRCKTLMQESQAARLIDSIPGFAVICASELAGEIGTIDRFASERSLALYLGMANLDNSSGKFRGSKAPQHVNKRAKGAMMSAVDKHRKCVPESQCYYEKKRIEGKSHNQAIRALGRQLCRIIFRMLKQNRAYEIRTKINEST

SEQ ID NO: 422563 - protein, 339 aa, unidentified
MNATPVGIDIAKSVFQVHYVAPETGEIVNKQIKRSQFLEYFANRAPCMIGMEACGSAHHWARQLMQMGHQVKLMPAKFVKAFNVGNKNDAMDAQAIWLAVQQPRKAVAVKSEMQQAVLMLHRQREQLVKFRTMQINGLRGMLAEFGEVMGKGRTAMIKAVQDALARAEARLPKLLIDTLREQWTRVNKLDEEIATIERRLREWKKDDKAVQAVIEIPGVGLLTATAAVAMMGDPKAFKSGREFAAWAGLVPKQTGTGGKVSLHGISKRGDTYLRTLLIHGARSVLTNAKEPGPWVEGMKKRRPSNVVVVALANKMARTIWTVLAHDRPYRKDHVSVKPA

SEQ ID NO: 422564 - protein, 328 aa, unidentified
MSTTSPEKGHHHHHHHHAGVDVSKWRLDVCLLPGRQAFCVANDPQGIDELVRRLEEARPELVVLEATGGYERPAATAIAASSAGIAVAVVNPRQARDFAKATGRLAKTDKIDAEVLARFASAVGPEPSVLPDEEMRALQAILARRRQILEMLVAEKNRLQMAPEAVAKRIAAHVNWLQRELIRTDRELEEAVADSEVWRRNEGLLRSVPGVGPVLARTLLAELPELGSLAPKRLSALVGVAPFNRDSGTRRGKREVWGGRAPVRAALYMGALVATRHNPVLKEFYGRLLEAGKPKKVALVACMRKLLSILNALMRDCAIWRCPHRLTP

SEQ ID NO: 422565 - protein, 447 aa, unidentified
MSSLLQEPLPAETLVVAIDPGKVANRVWLVSGERGLVHDPLSLPTLRTGVDELVRLIGASGSAGEPLIAVEATGSLHRPWTAELERRFPGRVRLLAPSETQAARAQLGSRRFKSDDRDCAALVWLARQGLGRLPDDPATEALLGVVRHRRQLVAELKVLRQRLHDQLNRLCPGLSAPQGHGRALDLLRPSGRAVLACAVAFTGRAPSLRSLLARAPGRLARSNAEYWLQRWQTCLAPPADAELRAQRLGFDLERLDALLGALANADDQLTTLLAQTPGQVLTSLPGVAVVRAAAFAAHSLPIDRFPTAERLYSATGLAPASYESASVSRRRGISRQGLPDHRDALMAIAWGLSQSAPAFQERDPRIPGARLRADPDTRRARTPCLPSLSRPPSQPRALRRGALSSGAQARAVTANVAMPPRRRKLACRPPASAAPNGDNESLPHDGA

SEQ ID NO: 422566 - protein, 351 aa, unidentified
MKDITVIGVDIAKNVMQIHGEDSNGKVLLKKRVTKDKFLSNLANIPKCLIGMEACAGAHYWARKLQELGFKVKLMSAATVKKYAEHQKNDANDAKACAVAVIRKDIRFVPIRTQAQLEMQSVHRIRSYYVKEKTALMNMIRGLLLEHGVAIAQGEKKLIEKLRNILAGEEPELSEGMKSSMVSLLEELHHLNEKITEQNKKIEKVAKEDRYCQRIQTIEGIGPISASAIIAKIGNGSEFKKGRELSAFLGLVPRQYSSGNKQMLLGISKHGDRYIRQLLIHGARTVVRWAKRMDKETGAYCKQDKHSEWIRKLCERIGINKTCVAVANKNARMIIAILKTDADFDVQLAHA

SEQ ID NO: 422567 - protein, 376 aa, unidentified
MERGSLMLNTTTFVGLDVHARSIKAVALDAMTGEVRSATFAYDAAAVAEWAGSLDPAAKCVYESGVTGFDLQKKLTALGVDCVVGAVSKMIKPSADRKRKNDRNDAEFLARMLSVGNVVEVCVPDDECEAARDLVRALDDAREDLKRCKQRLSKFLMRHGYAFSETTPTGRRKGNWTAAHWAWIRSIEFPEKADDEVLAYYVDAVRQATENKKRLEKLVEAEASKPRWKKRVDSLRCLKGVDAMTAADIVFEAGEFSRFKNARSFAAWLGLTPSEHSSGESARQGGITKAGNKHLRRVLVEAAWHYISASPHPKDLAKGQAPDPAARRHAAKGIRRLVKRREEMLGRGVHKNKANVATARELACWCWAVGRMVENG

SEQ ID NO: 422568 - protein, 313 aa, unidentified
MSERYVGVDVGLPSFDVAVRPDALHWAPPYTPERIRQFVGQVRAMHPQLVVTEACGNLERGLARELKHAAIPVAVMNPRQIRDFAKSTGQLAKTDKLDAAVLAQFAETMQPEPRKLPEEDEEQLRDLLARRCQLVGMITAEKNRLCRASASIRAGIEAHLGWLGEELAKLENEIRRRRNSKEVWRERARLLESAPGVGAVVSTTLIGYLPELGTLGRRKISSLVGVAPFNCDSGVRKGRRAVLGGRGQVRGALYMSVMVGIRYNNRIRAFYQRLREQGKPTKVALVACMRKLLTILNAMIRDHVPWQPQSVST

SEQ ID NO: 422569 - protein, 407 aa, unidentified
MEVLYPRCAGLDVHKDVVVACARCVSTPVHQEVCSFRTTTSGLLSLAEWLNSCGCTHVAMEATGVYWKPVWHILEEDFQLVLANAAHIKNVPGRKTDVNDATWIADLLAHGLIRSSFVPPTAIQELRDLTRTRKQLVREMSQHSLRIQKILEDANLKLGSVLSDVLGRSGLAMLEAIIQGEADPEKLADLAQGNARKKRAELIEALRGRVSAHHRTMLKFHLDVIRALKKTLEELDAAVGKALTSIQERAQLLTTMPGISDIAAQVLVAEIGVDMSRFPDPGHLISWAGLCPRNDESAGKRRSTRVRKGAPWLKTTLVTAAWAAVRTKNSYLQAQFLRIKSRRGAKKAILAVAASMLTAAFFMLRDGVAYKDLGPDHFSRHDKTKTIQRLLRRLSDLGCTVAMAQPA

SEQ ID NO: 422570 - protein, 410 aa, unidentified
METIVERAAGLDVHKAQVTACVRVPGQGRERAQALAEFQTTVRGLLSLRDWLQAHRVTQVAMEATGVYWKPVWAILEDEFDCLLVNARHVKQVPGRKTDVSDAAWLCQLLEAGLLQRSFVPPKPIRALRNLTRYRKAQIGERQREANRLHKILEDTGIKLDCVATDILGVSGRAMLDALVAGTTDPELLSELARGRLRTKIPALKEALVGRFDAQHALIVSAILAHLDFLDEQIQLLSDGIEEQLAPFAGAVELLCSIPGVQRRTAESVLAEIGTDMSRFPSDRHLASWAGQCPGNDRSAGKRRSGKTRHGSKWLDTALTEAALAATRSNDVYLAAQYQRLRPRRGHGRALGAVKHSILCACWHMLTTGELYREAGGDYFSRRDPERATRRLVAQLERLGHHVTLDAAAA

SEQ ID NO: 422571 - protein, 358 aa, unidentified
MTQVKKLDFSGTTIYCGVDVHKKSWRVNIQDSEFELEDFTQNPDAVLLHKHLTRSYPGASYKIGYEAGFSGFSTQRSLSGSGCQCWVVNAADIPTSDKDKKQKGDKADARKLCAYLQSKKLKGIHIPDASWEHARTLVRTRERIVNNQTRSKNRIWQLLHFSGLPAPADQQEGNYWSKRFIEGLQKIDCGGSVHLQQSLQLHIKDYLQTRLLLLEATRAIRGLCREQKYAGDIKLLRSIPGIGEINAAVLLFELQDVTRFKRFDYLCSYVGLVPDTADSGDTKRTKGITHRHNYYLRTALVESSWSVVRKDPALLMKYKEYCRRMEKNKAIIRIAKHLLSRINFVLKNKKEYVTGVVA

SEQ ID NO: 422572 - protein, 401 aa, unidentified
MNAVGIDVSKGKSMVCVMRPFGEVVLEPFEVLHTAQNLRDLAEKLKALDGETRVVLEATGNYHKPVAFVLHDAGLFVSVVNPVLIHDYDNNSLRRVKTDRKDAVKIANYTLDKWTRLRQYLPEDDTRLALKNCYRQYQQAVAIRTMLKNNLISSLDLTFPDANKLFASPPKSNGCEKWVDFIGDFWHSECVSSLSEEVFAKKYLKWCQKHGYIFTRSKSDEIYACALNSASLPKSPTSKLLIQQQVAQLKAVSQSVAAFQQEMLRLSQQLPEFDTVMEMYGVGPSLGPQLMAEIGDVRRFSSKKSLIAFAGIEPLPNDSGKVVGNDKGISKVGSAVLRRTLFLIMSVILQTQPQDEPVFQFMNKKRSEGKPYKVYMMASANKFLRIYYARVKAVMDSERSQ

SEQ ID NO: 422573 - protein, 422 aa, unidentified
MLGIGIDWAEEFHDIALGTQEKGVVEQFRIDHGPVGVATLIEHVARLEPDPAEVRVVLETRHGLLVEALVDAGFTVVPVNPDVVARRRGPARKKDDAEDARICCLLALDRHVALKTLIPHGENGGELRAIGRDDERAARDQRRLLNRLRADLQTTYPAALVLAGKDLGSPTVLRLLERWPTQPELAEASREELVTFARAGRHGWPDRFADRVAAALTAPSLPTRDYLVRAKAAGIRLGAVQLLALHEARRGWQARMAELLLGGPRTGRDHTVKDPDPGKAFPGGEIYLSMPGLGDLLAARVAGEIGEHINQFDSPAGLQCYAGSAPVTRRSGKSDFVVARRLAHNHYLGAAVHQWAFCSLLRSAWAREFYDSKVAAGKSHHAALRALSNRWLEILWHCLTKGVLYDEAVHVANRNRALGHAA

SEQ ID NO: 422574 - protein, 343 aa, unidentified
MNVTTYAVDTAKNVMQLHWVDGHTGEIGRRKLSRARFFEFFAQRPGSHVVMEACGGSHHLARRLGALGHDVELLPARQVRPFVSGNKDDAADARALWLASRHPDIRRVPVKTEQQQAVLSLHRMRAHWSSVRTATLNALRALLYEFGVVLPRGKACGLKTLAERRAEFDAQLPALMQRLVDQHLAALRQMDLEVKRIEAELAAVQAADQNARRLREVPGIGLLGATALSATLGDARAWRRARDFATSTGLTPRHTGTGGKVRMGGISKRGDPYLRTLLVSGARSLLNSPSAPQWARQMLLRRPVNVVVVALANKLARTAWALVAHDGAFDRRWGRPGAVGTTG

SEQ ID NO: 422575 - protein, 492 aa, unidentified
MKPKPKRKSVYRSQNATLRALFERAGEPRKVLCVPLDYAKRKHVALVCDGHGDILKGAFPVDNNPAGVAYLIEQISATARHRKIPKNQIFLGGEDEPAYVANFTAALREAGFLVMRVNAHEAKENRETHAASTDQLDLIGIAKTLLSSRARSSGDSSPENPAYHHLRELARCRRSLVRQQTATANRIHALVDQLFPGFLDDSKTGIPAFCEASIELMKDRFSAPEFAKRKPTALAKTLRRSLVHHPDEAAAKIINLARSVLPPAPNRVATLQRTLKATVDLHQCLSRNAGELRTDAALTLATTPYAMLTSIRGIGFVLAAGVAGELGDPAALGTTDSLCCYAGIVPKTLQSGGPDSPPVQGRVSPRCNRILKDWVVQSAQKIHLYGVPEHKDRITRWNAEGRSGLYAGARHYLRLLRSLVKNQVPYLAPAGRARSAAPEDIAAASQDTWKVMQNKWRTIPGGLDLMLDEAHPLGFWRRVIKETHDIQLPTRL

SEQ ID NO: 422576 - protein, 343 aa, unidentified
MQSISTIGLDIAKSVFQVHGVDADGQVVLRRQLKRRQILAFFQKLPPCLVGIEACASSHHWSRQLQALGHTVRLMPPAYVKPYVKRQKNDTTDAEAICEAVTRPNMRFVPTKTVEQQSCLLLHRARHLFIRQQTGVINSIRAYLAEFGVVAPVGRRGVEQLLEVVADPADCRLPEVARTCLAALGSQLRALKAQILEFDRRIMAWHRSNATSKRLDAIPGVGPALATALVASIADPKAFRSGRDFSAWVGLVPKQNSSGGKDKLGSISKQGDRYLRSLFTAGALAVIRYAKIHGTGHRPWLTALLARRPTKVAAIALANKLARMAWAMMARNERYKEPAALTA

SEQ ID NO: 422577 - protein, 361 aa, unidentified
MDATTVAVDLAKSVFQLAVADSSWRVTESHRLTRNQFEHWFANRTVSLVIMEACGSAHHWARWLNSLGIEVRLLPAAYIRAYVRRNKTDAADARALLEAARAADIDPVRVKSVEQQALQGLHRIRSLWMSTRTSRINALRGFCREFGLSIPQGARTGVEAISRVLADPRSPVPVLIRETMRLLIEEIRLLEQRVAQLEREFTGLARHSPACTQLMSVPGIGLLTATAMVAATGGDVTHCRDARHFASWFGLTPKEYSSGSARKLGRISKRGDRYLRMLLTHGARAVLRAAALARDASRPLDGLRTWATEVQRRTNHNKAACALANKLARVCYAVLRDHATYGNPQPRPNKRLERTAFAIAA

SEQ ID NO: 422578 - protein, 346 aa, unidentified
MEYIAMDVHKKYTWARVENERGDKLYECKLSHSHGTIENFVKRWTAGSGVAVETVGNWYWVVDEIEAGGGKPQLVNARLAKLMMGMVNKSDKLDAKGMNRLQRTGTLPTVWIPPSSVRDARELPRTRMVLSKQRTQLKNRVHATLGKYGFVVEGASDAFGKRGREILTELMAKLPPHTEQALGRVLDQLDHVCENLKWIEEKMMEVFAPCPQTTWLKTLPGVGDILAVVIWSEIGTIERFSRAEQLASYCGLVARENSSGGKIRFGPVRRDVNVYLKWAFVEAANSSVLNRKRCGYDHISRLYERIKARRGHGKAKVAVARHLSEASFWMLKKGEPYREPMSSTQR

SEQ ID NO: 422579 - protein, 334 aa, unidentified
MSCRNTWFAYKAGATKMRKVSTGAVVCAGVDIGKSTLVYAIAGGHGAVESANSSEGRARLVAFLKRHNVRRVGMEASGGYEIEVAAAVRAAGLEVTVFQPMQVKAYARFKLQRAKSDPIDAVLIAQCTAACDRARNAPDPRLAPFAEHLTMIEQIEEDIARAKVRRERYRDPRLNRMIEDEIRQKAALKRAELRLLLKAVRMHKDFARKLSLLLSIQGVGERTALALVVRMPELGNLSREEAASLLGVAPFVHESGRYKGLRRTGGGRARARTSLFAAALAAARQWNPALIALYDRLVKAGKPHTLAIVACVRKMIIYANTVLAQDRPWQIRQG

SEQ ID NO: 422580 - protein, 351 aa, unidentified
MIIIGVDYHPSFQQIAFVDKETGECNEQQLNHSEGEAEKFYRDLKLRGVNVRVGMEATGHARWFERLLAELGFELWIGDPAEIKTRRVRKQKTDRKDAQLLLKLMLEDRFPRIWVPSPENRDLRQLLWHRHRLVQMRTRIMNQLQALAMNEGKHWKKKLWGERRRAEFEKLPLAPWASRRRQELLELLDRMNPTIEELTAAVGQEANKRPEVLRLMTHPGVGPLTALTYVLIIGTPTRFHCGKQISSYVGMIPSEDSSAGKQRLGHISKQGNSLLRFLLVEAAQAAVRHDPEWRRRYLHLALRRESRIAKVAMARKLGVRLYWMWRKEWSYQQVLQFGSHAGQLAAAHGVK

SEQ ID NO: 422581 - protein, 420 aa, unidentified
MEVLYSRCCGLDVHKASITACCRWLDAAGRPRKEIRRFGTYTSELLELARWLEPQQVEQVAMESTGSYWRPVWNVLESRGLPLLLANAHHIKNVPGRKTDVQDPEWISDLLMHGLIRPSFVPQQKMRDLRELTRMRNKVVQDHTRVANRIQAVLEDANIKLGNVVSDILGVSSRAMLQGLMEARPPGELAEMARGRMRTKLEELGKALEGHFRPEHGFLLKRMLMQTRFLEQQEQALGRQIVRHLDSQGQHAVALWDTIPGVNEKTAWVLAAEMGTRVEQFPDAHHAASWTAICPGNHESGGKRRSGKTRKGNRWLRAALCEAARAVSRSKGTYLASLYRRIAARRGDKRAIVAVAHAILLIAYQMLKHNEPYRELGENYFDRIKPEKTANRLVRRLEQLGYQVSITTTVLAPPATTSDA

SEQ ID NO: 422582 - protein, 426 aa, unidentified
MRVIHDRVAAIDVHKDMVKVAVRVPGEKRGKRRTDVLEYGAFYGVLQEMGRELRRRGATHVVMEASGVYTDPVYYALAELDFEEVMVINPSHAKALKGHKTDARDAIRLLDLYECGLLSGSYVPAPDLREVRDLARYRMKTVQARAQEIQRLQKTLETAGIKLSSVVSDVTGVSAMAMVEALADGERRGAVLADLAVGRMRTREKMADLSMALSGRFTAHHGVMCRLHLDRIRLFGEAVADLDARIAPRVARYAREAELLKTVPGFGDVVVAGWLGAIGPAPHEYFATAQRLASWATLCPGNYMSAKKSKGGRTGDGGAYIKPLLVQAAWAAVRVPGRIQARFNRLVRRFGGARNKGAAKRAIIAIAHTLLKIAYQVLKAGAPYADLGAGFYDTRESAQARQDYLVRQLQKLNPGCVVTITPPEAA

SEQ ID NO: 422583 - protein, 351 aa, unidentified
MAEKRTGVIGGVDCHSRTHHAVALDGRGRRLGDAEFPATLAGYRALHSWLEEFGAVETVGIESTASYGAGLTRWLSSRQIRVLEVNQPHKHTRSRKGKSDPVDAEAAARKVLAGEVVVVPKDTTGAIEAIRQLRVVREGAVKARSAALCQLGDLIVTAPAELRESLPPKTLQGQARVCAKLRPNPRRLAEPLHAAKFALRSLALRIATLDREIDRLDQALEELVRRAAPRTISLLGIGTQHAGQLLVTAGQNIDRLRNEAAFAHLCAAAPIPASSGLTRRHRLNRGGDRSANRTLHMVAVVRLRYCPRTRAYATRRMAEGLSKREIIRCLKRYIAREAYRTLCADLREINL

SEQ ID NO: 422584 - protein, 371 aa, unidentified
MKKDSTTKFIGLDVHSKTISVAIADEGREGEVRHYGTIENTIEAIDKVIKKLTATGVELKFIYEAGPCGFALYRYLTGNGFTCIVISPAMIPRRKNVRIKNDRRDAMTLARLYRAGELSGIYVPEPEDEAIRDLARTRDDARVAERKAKQRLNSFLLRQNLIYPGKTKWNRTYFNWLGSVGMKYPAQKIALQEYIETVNECTGRVARLSEQIGLAVEEWRMAPMVKALQALRGVSLICATVTVAELGDLSRFQNPKELMAYLGLVPSEHSSGETIRRGGITTTGNGHARRVLVEGAWTYKHHARVTLPLIKRQRDLPKSICQISWKAQLRLCARYRKMVARKKPNNVVVIAIARELAAFMWAIAQEVRAAT

SEQ ID NO: 422585 - protein, 348 aa, unidentified
MNKKVTKSNSDGRISNMYIGMDLHKKYLQVAVVDEKGKVMKNSKIDNDLDEIGKFFNDVNNQDAKVVMESSGVWYNIYEYLSEQKHLDVVLSNPIKTKAIATAKIKTDKLDALKLADLLRGGYIAECYIPDKKTMGLRELVRHRLALVKTRTRMKNKIHGIILMKGVRITGIHPFTRKHIEKLKEIKDYRIDGYLRMIESLDSEINDVSRKIKTCVSENDIAKLLMTIPGIGYYSALLIVSEIGDITRFPDSHHLCSYAGLVPSTHSSGGITYHGSITKIGSRYLRWVMVECVRAHIRNYKNTSITKFYERLAKIKGNSKAVVAAASKLLKVVYWIIKERREYVSYHS

SEQ ID NO: 422586 - protein, 356 aa, unidentified
MAPIYIGVDFHARQQTICYLKTETGELVISELKHQNKEQVRAFYQQFQEPVIVGLEASGYSPWFEALLEQLGCEVWLGHATEIRRRARWRQKNDRRDAELIWDLMVHDEFPRLHQPALSSREVLRMLRYRQKLIKLRTMTKNSLQAIALQAGLAKGPQLFTAAGQEQFKAAEMSPVLQWQRDHWFELLKPFNQQLLETVVWFKAQSKDDVQIQRLLTHPGIGLLTALCILHTLQPVSRFRNARKVAAYVGFDPVERSSAERQHFLGISKAGSRMLRYLLVEAVQTAVRHDEDLKRFYKRLAERRGRPKAKVAAARKLLIRAYIMLRDEIDYAEFRRRAVAARLARHGQGPTKCPRY

SEQ ID NO: 422587 - protein, 418 aa, unidentified
MEIIKAYAGVDWASATHQVCVLDAEGKLLGERAFPHDGEGLAGMAAWISATAMAEALEIAVSIEVPHGPIVETLMERGFVVHAINPKQLDRFRDRFSMSGAKDDRRDALVLADGLRTDRHCFRRIEPVDAQVVELREWSRIAEDLQGERQRLVNRLRDQLWRYYPQMLDITPDLGADWLLDLWALAPMPAKAKWLRETTVAKLLRAAHVKRISAAQALEILRRASVATAPGATEAAVAHIRTLIERLRLLNRQHKQAQRKLDILSDALLGQENEPGQARKQHDVTILRSLPGVGRIVLATLLAEASEPLRRRDYQALRALSGIAPVTKRSGKQIVVVMRRACQVRLRTAVYHWARVAVMQDAHTRTRYAALRKRGQPHGQALRSVANRLLAMACAMLSSGTLFDPNRMSQRQSAAQAT

SEQ ID NO: 422588 - protein, 402 aa, unidentified
MNAVGIDVSKGKSMVAIMRPFGEIVSAPFEIKHTASGINSLVELINSVEGESRIVMEHTGRYYEVLAHQLSEANLFVSAINPKLIKDFDNDSLRKVKSDKADAVKIARYTLDKWQNLKQYNVMDELRNQLKTMNRQFGFYIKHKTAMKNNLIGILDQTYPGVNTYFDSPARSDGSQKWVDFASTYWHVDCVRKMSLNSFIDHYQNWCKRKKYNFSQSKAEEIYGKAKELVPVLSKDAITKLIIKQAVDQLNSASTTVESLRTLMNETASKLPEYPVVMAMKGVGTSLGPQLMAEIGNVSRFTHKSAITAFAGVDPGVNESGTYEQKSVPTSKRGSADLRKTLFQVMDVLIKTHPQDDPVYQFLDKKRAQGKPYYVYMTAGANKFLRIYYGRVKEYLSSLPES

SEQ ID NO: 422589 - protein, 333 aa, unidentified
MALNTLAIDIGKHSFHLFGIDDDGVIVSRKVSRLKLVATVDRLDPKIIAMEACGSAHHWGRMFQEAGRMVRLISPYFVRPFVRGSKNDATDAQAIFEAAGRPTMRFVPVKSLECQDLQSLHRIRDRLVHNRTSLINHTRGLLAEYGIVLPQGAKRFTLQVRQAVVEAELSDLARELFEALLDQLGDLDRRIAHIDKHLIAICRDKAACRRLVGIPGIGPVVATALLAAVDDGRQFGSGRDLAAIGLVPRQYTTGGKPRLGGIGRRANHYLRRQIVHGARAVMSQAGRRSDPRAEWMKAVAARRGFNRAVIAVANKMARAAWAILVRGEDYAAA

SEQ ID NO: 422590 - protein, 391 aa, unidentified
MIYIGIDVAKDKHDCFITNSDSEVLFKAFTIFNNLDGFNDLYQKIESVMDDVTKVKVGLEATGHYSYNLLGYLIDKGLPTYVINPLHTNLYRKSLSLRQTKTDKVDARTIASMLMSDMNLKSYSDTSYHNEELKSLTRYRFDKVKERAKLKTSVSRLVCILFPELEKLVPTLHMASVYALLSKFPSTKHVATAHLTRLTNLLSESSKGRYCKDTAITFRDAARASIGSNMPAKSLELKHTIKLIQELDSEIDEIENEIKIIMDGINSPILSIPGINYRMGAMIIAEICDFNRFDSPDKILAYAGFPPSTYQSGQLDGAYAHMEKRGSRYLRYALYNATKYVCHWDPTFAAYLAKKRAEGKHYNVAISHAVKKLVRVIYHLEKTKQQYIKAT

SEQ ID NO: 422591 - protein, 348 aa, unidentified
MPVYIGVDFHARQQTVSYLTSEDGEIKQQQLSHEQPAEVRRFYEQFGGQQVIVGFEASGYAAWFEELLEELGYEIWIGHATAIRSFARRRQKNDRRDAELILDLLVRGDFPRIHRHSAASREVLQQLRYRQKLVKMRTMIVNSLVFMGASRGVSLRTKLKHRRGVERLQELEWPAPLAQQRDELCQLLLELKTKVDAVESWLVAKAEADVRVQRLRTHYGIGPLTGLCLVSTLEQVERFANPRKVTAYAGFDPVEDSSAERQRIGSISKQGSRLLRFFLVEAGQVAIRQDRDLARVYQRILRRRGHATAKVAVGRRLLIRAFIMLRDEIDYAEFQRRGVAARSSRATA

SEQ ID NO: 422592 - protein, 426 aa, unidentified
MNTQNSDPLQTTEFAAYVGLDWGDQKHAFGWCTGSDKTPAQTGSLVNSPEVLHTWLQELAQRFEGRPVALAVETSRGPLIHLFGAYPWLTVYPIHPATSARYRAAFKPSGAKDDLPDALLLLELVRDHRHKLRPLQIPDAATRKLAALVELRRDLVDRRTQVLLQLMALLKSYFPQALELVGHDLTSGLALAFLRRWPDPVALKAARPSTLKSFYYQHAVRSETLVTHRLALVQQARALTTDEAVLMPARLHLAALLEQLRTLAKHIELVQRQSQALFKEHSEAYLFRDLPGAGKALQPRLLVAFGEDRSLYPDPGSLQKYGGLAPVIEKSGRQAWVHWRWHASRFLRQTFVEWAGQTVVYSTWAREYYQHMKAKGKSHHVILRALAFKWIRILWKCWQTRTAYDEARYLKQLLARKSPHAVKISS

SEQ ID NO: 422593 - protein, 377 aa, unidentified
MKTAIGIDVHKEKCAAFAVFAGNGEPRPRQTAFLERFNRDFNRFPADARGMTELAGRLAGHEAEVLIENSTKSHDVYWMLTGLGLKVTVAHATDLYLITKAADKNDTNDGEKLAGYMRRRMMGEREFAVSHIPSRATLLLRELCRFDLNDRSELTVLKCQLQAHLLVRGWKLTRTYRDITAAAALRELKATGDYIFLLDVQKAEGLKQRIVMTEKLLRQLLGDSRMFEIVWSIPGVGVLTAAYVTCMIDDLARFPDARAFAAATGLIPMQRESADRPKECPISRRGDADLRRLLCQAAFVHVMNEESFITEKYRRLRAGGKKYKETLVACANSLARLIWTLVREDRKYVSDPQVLAAARAAAESDVLEDEMEAQLSE

SEQ ID NO: 422594 - protein, 322 aa, unidentified
MQHDSSSRPVVGIDVAKHKLDGFADLPGGRSFSFANDDDGRAALVAELRRIDAALVCVEATGRYHRRLAADLLDAGIPVAVVNPQRVREFARATGRLEKTDPIDARVLAEFARAIGPRVEEKARENQAELRDLVSRRRALVQMRVAEKKRLADDAPELARAQAAKLLRFVEQQIEDLDRAIAKLVERDDHWTNRAALIASVKGVGQSTANQLVADLPELGKLDRGQIAKLVGVAPLNCDSGNRCGQRHIRGGRHDVRLTLYMGAFNACLHNPRFKAFAARLKAAGKPFKVIVTAAMRKLLVILNQMVKTNTPWNQELAFKFN

SEQ ID NO: 422595 - protein, 351 aa, unidentified
MIVLGADTHKRSHTIAAIAGATGELLGEQTVPVGRRGFGALLQWARGLDGERVWALEDCRHVSGSLERFLIERGECVLRIPTHLTADARRSARQRGKSDAIDAVNVARAALQEGLDCFPAAHLAGPELDLRLLVDHRERLVRHRVELNSTLLWHLHDLWPELHLPGGALFSKKWTTRIGRRLARAQQSMRVRIARDELRRLRELTQAINQLEREITELVQQLAPQLLTEPGFGPLVAAKLVGEVAGAQRFTTSAKLARAAGVAPIPASSGTTQRQRLDQGGNRQINAALHRVIVTRARCHQPTRDYIARRRAEGKSTREAIRCLRRYLARRVWRLLQAAPPGPGHPHPSIS

SEQ ID NO: 422596 - protein, 328 aa, unidentified
MVGSGLTPVAALRVEVNRAGYRQLLRFAAKWPQARWAIEGAAGLGAPLTERLRAEGIAVIDVPAKLARRVRLLSTGHGRKNDQADALSVGIAAWSAPALRTVEVDEAIAALRALTEHRDDLVRTRTQLVNRLHAMLVKLVPSGLPRGLTAESAAETLRRIRPRDPLGRTLRRLAVELVGELRRIDRRIAEATQALSDAVAASGTTLTRLLGVGDVVAAKLLARTGPISRFPSAAAFASFCGVAPIEVSSGDVVRHRLSRAGDRQLNYALHVMAMTQIRYDSPGQAYYQRKRAAGKSHKEALRCLKRRLADVVYRIMIRDTVSSLTLAA

SEQ ID NO: 422597 - protein, 320 aa, unidentified
MNQANNITRIHVGVDVSKKKLDCHKPSTKNTGGTFKGFANDGKGIGALLRWIPKGGHVVVEATGGYEEALVATCHDLGVPVSVVNPKSVRDLARACGQRAKTDKIDAGSIARFADMVKPAPAPRPTRAQRALAAHVDLRERLVADRASHRNRLARETNPSLSLHLRSVTAHLSKTIAGIEKQIDALIASCPKMSAMRRELRKLPGIGPVISATLIALLPELGTLSRKQVAALCGLAPYARDSGAKNGKRYILGGRAKLRRRLYMGAVSAVKARTPLAAQHKAMVARNKPKKVSLIAVARKLVIRANTLCKPLASLSYAND

SEQ ID NO: 422598 - protein, 400 aa, unidentified
MRAVFGIDVSKASSEVAILVNGEKVHGYTMSNDAIGFTRLLGDLKTVHKPEIIFEATGVYSRRLQAFLDEHGYAYTRLNPLEAKKQLDSLRVRKTDQIDAEKLAQSQFVLNRKPTYAQEEVYQNLRDLSRFYQNLTEDIVRAKNRLHKVLQVTFPELETILSTPTGEQYWNLVIAFPCKDFVLDLSKDELSESIRLSTSKRISDKRVAYLAEKLTALANQSYCAVKKTSPMLEEVRYYAKELLRLSEQRQTVLDQMVELAQPLPEYDILLSIPGIAETTATSIIGELGDIRRFQSANQINAFIGIDLRHYESGNFIAKEHITKRGNPYARKILFKCIHNIASASHTNPCHIADFYEKRKRQSQTTSTKPHTIASIHRLIRTMYYLIMHNKLYDYTSTQNQ

SEQ ID NO: 422599 - protein, 339 aa, unidentified
MGQRPFIPQEYDVFGGLDVDKKSISVTFINHQQGFIRSLHMPYSVEHLVKHVRKHFAEQKVAFAYEAGPTGYGLYDGLSAQGYNCLVAAPSMIPRALGQRVKTNRLDSRGLSENLRGGQLKSIHVPSPIYRELRHLTQLRDTLVSEGAGSKQRIKSLLLFEGIPFPLAPAGSQWSLKVKAQLRKLQCSKSVRFKLDQLLDRVEFSEKQGVKVSKEIRQFCHNDPELSQCIEYMMSVCGIGWIVASQLLARIGDWRELQNVRQLAGFLGLVPSERSTGEKTHRGAITHSGDGRLRSKLIQASWSAIRQDGELREFFRSVCRRHPRGVGARGWPLWRWRVS

SEQ ID NO: 422600 - protein, 407 aa, unidentified
MDRVYRCCAGLDVHKETVVACVRVNGRDQIEKFGTSSRELLRLGDWLVEQGTQIAAMESTGVYWKPVWNLLEGRLQLMLINAQHIKQVPGRKTDVKDCQWIAQLLEHGLLKASFVPPRPQRDLRDLTRQRTQLMGERTRVVNRLQKVLEDANIKLASVASDITGRSGQAILNALVEGKLSPEQMAELAHRKMEAKKPLLREALLGRVTDHHRFMLRQLLIQLDHVDHLVASFDQRIEEVMSPLEQEAVRRLDEIPGFDIRTGQVVIAEVGTNMSQFPSAQHLASWAGLCPGNNESAGKRKSGRIRKANRWLKASLAQAAWGAGRTRRSYFSAQHRRLTTRRGIKRANIAVAHSLLIVAHNLLSQPAPYTDLGPNYFEQQRDPQRQADQLIRRLERLGYKVEVQRPAA

SEQ ID NO: 422601 - protein, 401 aa, unidentified
MYFAGIDWADDHHDVCIIEEEGNVIVRFKIPHDQAGLDTLFEHVSSVTPLPERIPFALETDKGLLVSALLDAGYTVYSINPKAVDRYRDRYSVAGSKNDAFDAEVLANILRTDRHRFSSILPDSEQAQELKMLTRDHQELIRQRTRLTNQLIACLKAYYPVALDLFSKISCLTALDFLETFPSLEKARGLNLEDLKAFLKTHRYPGVDQKADELYALLRKPELTARALIIQAKMMLMLSLVAQLKALIPHIHAFEKRIKQVFEAHADKDIFTSLPGAADNLAPRILAEFGDNQERYKGYSQVQAEAGTVPVTKASGKSHHVSFRYGCKKPFRATMQQLAFCSLKQCDWARSYYDQLRKRGKSHQHALRALANIWVKIVYTMWRKHTEYDENLFLRAREAHS

SEQ ID NO: 422602 - protein, 339 aa, unidentified
MLNDAKYIGLDVHQATISVVVLDGTGHLVMESVIETKAATILQLLHGLSGSLHVTFEEGTCAAWLHDLLRPHVAKVVVCDPRRNALLRAGNKNDRIDARKLADLLRSGLLSAVYHGENGVRTLKELARSYLTLTRDTTRVMNRLKALYRSWAIPCAGQKVYAPRYRNQWLAKITEGGVRRRAEFSYQQLDALQALRQHVRRDLLTESHKHSAMNLLRQIPSIGPIRAALLLALMQTPHRFRTKRQLWAYSGLALKTSTSGEYRFVEGQLKRSKKFLAIRGLNANHNHDLKNIFKGAATRAAAVPGPFQEFRAALVAKGMKPTMARLTLARKIAAITLIA

SEQ ID NO: 422603 - protein, 337 aa, unidentified
MKYCGIDLHSNNSVVIVSDEEDRIVFSKRLPNDLGQIRAALEPHREDLAGVVIESTYNWYWLVDGLMDTGYQVHLAHPSAIKKYEGLKHSGDFADATYLAHLLRLGLLAEGYVYPREERGVRDLARKRLQLVRYRTAQILAIEGILMRQTGARLKGEAVKRLTAEQVDAFAFAPDVSLAVEANRAVSQTLSQQIEALEKRLQQRVILRPEYRLLKTVPGIGEVLATTIMLETGTISRFTRVGNFSSYCRCVDSLKESNGKRKGQGNTRNGNKYLAWAFIEAANFALRCCPQARSFYDRKKSRSNRILALKALAHKLARACYHMLQDQKPFDVHLCFG

SEQ ID NO: 422604 - protein, 351 aa, unidentified
MNYIGIDCHISTLDFAVVDERGKIKKRACVDTGVKGFMEFIRSVPKPRKIFIEEGTLAGWLLETSLRYGEDLVVTDPKTNKWIGKSGNKNDEIDAEKLAQLGRGGYVKEIYHPVDKRRRFKDLVYAYHDTVKSQTRIKNKLKARFRMEGIKCTGATVYSDIYREKWRDKLSNNQITRLIADGLWNQLDQLQEAKKNLKRNLGIQSKQYPEIKRFMKVPGIGLIHASTISAIIDTPHRFANKKKLWMYAGIGLAKRSSGDKVYSKKLTREYNRHLKNAVKKAVESAIFVKDSKFNRQYSRLMIVQGLPSHKAKLTVARSLLATLYGMWKSGEEYDPDINKKKEEMISCALYC

SEQ ID NO: 422605 - protein, 337 aa, unidentified
MRYLGVDLHSNNFTVCFLEEDGTHTFEKYPIKEFDAFKSILHLDDHVAVEATGNSRFFHSQVAPLVSKCIVVNAGQFGVIKQSVSKTDRNDARALAQFLSKGLLPSSRVKDELHAQINSLAQTRDRLVKLRTALLNKVHAHLKAHGRESRKEAYDHPGNLRKVLREEWSPSVKLELEVIATQIGSLGEGIKKLEREICELGKQLEGHNCLTSIKGIGDYSGAVLLSIIGDVKDFADEDKLASYFGIVPRVKDSNQTQHHGAITKRGSKLGRLVLVQCTLTAKRFSPYLKQYYERIKGRRGSGKAIIATARKFLGIIYRTLKHGWVFSDFPNFVLTES

SEQ ID NO: 422606 - protein, 362 aa, unidentified
MTVYLERGYKRRELCGPKQYLNLLLRSVLMIYVGIDVAKDKHDCFITNSDGKVLFPVFTIQNNRDGFDVLFSRIQSSSSDVSNIKVGLEATGHYSYNLLGYLIDKGLHTFVINPLHTNLYRKSLSLRKTKTDKVDARTIALMLMSDVNLKSYSDTSYHNEELKSLTRYRFRKVQERAQLRQSVSRLVTILFPELEKLVPSLHIASIYALLSEFPSAGTIASCHLTHLTKRLENASKGRYSREKAIEIRNAARASIGSNMPAKSLELKHTLRLIGELDSEISEIESEIKRIMDEIHSPILTIPGIGYRMGAMILAEIGDFSRFDSPDKILAYAGASPSTYQSGRWNPLIPTWRNGDRAIYVLL

SEQ ID NO: 422607 - protein, 343 aa, unidentified
MQAAITIGLDIAKSVFQVHGIDAEGNVLIRRQLKRRYVLAFFQKLPPCLVGIEACATSHHWSRELKGLGHNVRLMPPAYVKPYVKRQKNDAADAEAICEAVTRANMRFVETKTPEQQSCLMLHRTRQLFIRQQTSVINAIRAHMAEFGIVAPVGRQGVEALLEVVADVGDSRVPEVARACLAALGAQLRMLKAQILEFDRRILAWHRSNATSRRLDAIPGIGPALATALVASVADPKAFRSGRNFSAWIGLVPKQHSSGGKDRLGSISKQGDRYLRSLFTAGALAVIRYAKLHGTQHRPWLTALLARKPTKVAAIALANKLARMAWAMMARGERYKEPVALAA

SEQ ID NO: 422608 - protein, 313 aa, unidentified
MIITLRCVGIDVSKHHLDIFDEGIGVSERVANAPHAITELVARWRCDALVVFEATGVYDLELREALCAADIRFARINPARARDFARASGQLAKTDPIDARMLAAFARAMRPATEQVSTPARNALARLAKRRDQLVLMRAQEKNRRSEAGDRAMVERICRLIEVLDREVTEIEADISALIKAEPEISHDAQLMRSLPGVGPVACMQLIAQMPELGHVGPKQAAALAGLAPFNVDSGAYRGKRKIRGGRKRVRNALYMAALNAVRRADRFKVFYAKLRKAGKPAKLALIAVARKLLTILNAIMRDRKAYMPAQQT

SEQ ID NO: 422609 - protein, 350 aa, unidentified
MNIIGCDYHPGFQQIAFVDTETGDYGEQRLENSEGAGKFYRDLAAQGKKVRVGMEASGHAHWFERLLAELNFELWIGDATEIARKRERKQKTDRQDAQHILQLLMENRFPKIWVPSGENRDLRQLLWHRHRMVQARTRIMNQLQAVALNEGLRCKKKLWREKGRQQLEAFRLAPWASRRREDLLQLLDRLNPTISDLTQVIEQEVEKCPEARRLRTHPGVGALTSLAFVLIIGRPERFQCGKQIAAYLGLVPLEDSSGNRRRLGHITKQGSSMMRFLLVEAAQVTARSIPEWRSKYFHLAMRRGRKIAKVAMARRLAIALYWMWRKGWDYEQLRKFGSHAGKLGTGHGVQ

SEQ ID NO: 422610 - protein, 340 aa, unidentified
MSGAQAIYRLWCGIDVAAKTFTVSWTLDRNTYTQPITLLQTPDGITTLQQYLRELQIPPSETLIVLEATGSYWIRLAVALHAAGYILSVVNPMQAHHWAKSLPRRGKTDPLDARMLTQYAVERQPRRWSPPPEVYHELRQRLTAREGLMAMRHQARNQLHALHQWPVQVVAALQAIEQVVAELDKQIAALDAAIVEVLRDGAWAASAELMQTINGIGPLTTAWVLVLTVNLELCPTAEAATTYAGLTPLARESGTSVRGRSQLGRGGNARLRTAFYRATINAARFNPIIKEFYERLRAAGKPRKVARCAAARKLLHLTYAVVSKRQPFDPRYTVQRTVAG

SEQ ID NO: 422611 - protein, 337 aa, unidentified
MRLYSGIDLHSNNCVLTVIDEEGLTVYEKRVPNDIEVIKRALLPHQEALVGTVVESTYNWYWLVDGLLDANFKVHLANTTAIQQYSGLKHTNDKTDARWLAELLRLNILPKGYICPTDQRAIRDLARKRLQMISQRTRNLLSLQTLISRITSKTMSCSSIKKLTEEQLQNILTNPNNFFAARSNLRLLKQIISEEDVIKKEILCQIKPTPAYQKLTQVPGVGEILAITIMLETVDINRFDGVGNYASYCRCVGSKRESNGKKKGENNTKNGNKYLSWAFVEAANFAIRHYPTIKKFYQRKMSTRGRVVAIKSVAHKLARASYHILKNGEDFEIGKVF

SEQ ID NO: 422612 - protein, 340 aa, unidentified
MSLEQSSVCVVDADGQIVREAKVASEPEALISWFGSLGLQLTRIGLEAGPLSQWLYAAMRAAGLAVELLETRHGRTALQTMPVKTDRNDARGIAQLMRLGWFRPVHCKSAGAQEVRALLTARKLVQSKLFDVEMSLRGILRGFGLKVGPTTPKRFSGRIRDLVAGDARLEVIATALLAVHAVLLRERSGLEKRVRSMARADGRVRLLMSTPGVGAIVALTYASAIDDPSRFKSSKMVGAHFGLTPKKYQSGETDVTGRISKIGDSGVRAALYEAAHVILTRPIKAAGPLKSWGMKLAKRAGMKKAKVALARKLAVILHRMLVDGTVFAAETPRDFAAAAA

SEQ ID NO: 422613 - protein, 313 aa, unidentified
MDTKNEVVFEQVIERGCGIDVHKKVLVATIRGSGIKEETRSFDSFTSSIELMRDWLLENKITHIAMESTGVYWKPVFNVLEEYFEIILVNARHIKNVPGHKTDKKDSRWISKLLISGLLKGSFIPPRPIRELRDLTRYRRKIVGQIASEKNRIHKILEDANIKLSSVVSNMSGATSSKIIEQMIAGEEDIEKLIAYHHGKMQASKDDLREALKGFLTDHHRFFLRMVRISIQSKESLIGQLEKEIDQHLERNKLKASVELLQSIPGVGKDGATEIIAEIGNDMSQFPNEQHLASWAGMCPGNNESAGKKKVDE

SEQ ID NO: 422614 - protein, 348 aa, unidentified
MWESPDRCVHILSVVENPNGCLGPSPNFARMGVNEMKLEEFIGIDVSKARLDVCVHSSGELSSARNDANGIEELVRILTSIAPSLVVLEATGGYETAFATAAYAAGLPVVVANPRQIRDFAKATGMLAKTDALDAKVIARFAAQIKPDVRPMKDEETEALASMVSRRRQLVLMRTQEKNRLAGANPRQKVDIKEHVSWLDERIRRLETDMTAALRKSKAWKVQEDMLKTVPGIGCVTSATLLAALPELGQLNRAKIAALVGVAPFNRDSGQHRGRRMIWGGRADVRSVLYMATLTAIRFNEPIKTLHARLIARGKPAKVAIVACMRKLLTILNAMLKSKTPWNPQFTS

SEQ ID NO: 422615 - protein, 346 aa, unidentified
MLHAGLDLSRRKVDVCLLSSRGEIVDEWASPPDADGLRGLAARAAMWAPAVRGVIESMNGARFVHDQLEEHGWDVLIADATKVKGLAPLACKTDKIDARVLATLSARDLVPEIWLPDPSIRRERELARFRLHLVRHRTTLKNRIHAALIAFGHPCPVSDLFGHAGRELLNRLAIPDPWRRNIEVSLRLIDDLELQIAQLTVQLKRQGADHRYIPLLVTAPGLGWINAFTVASEIGDIGRFASPAKLCGYTGLCPRVIQSGASDRRGPISKHGPKYLRWALFEAALNACKHPYYAERYQHTKRRLGRQRGPKVAQIDLARRLTEAIWHMLTRNQPFAPAGAPFRLAA

SEQ ID NO: 422616 - protein, 488 aa, unidentified
MGDRRLVGIDLGIASAHTVRVLDGEGNTIAKRKAWPTVESLGQVEAAALAGTAEGTRLEVVIEPTGPAWLPIAVFFASRGHVVHRVSSAKAADLRRFLSRHAKSNGIDADTLARLPLVDPAGLQPLALPEAERAALDRRVRATDRLTRQAALHKTRIKDFVRQLLPMTPLTGALGAADLAVLERWADPHALLKAGQARLTKVIAKASRNHHGALRAEQWLHAARAALELYGEHPAVAFADLAAEVATEVRLLKATEAELAAHAAERESCYRWVDPLALARSLPGLAEVGGPALVACMGHPGRFARGKQFRSFTGLAPKASETGEADRKGQPMSKAGSSLLRTTLVRAADTARRQDPQLARIYYLQMVERGKDHLGALCVVAAHLAERAWAVMDRGMPYVICDTDGTPVTAEQAKAIIAEHWTVPEEVRQRRRSKKTGKAPQKVHAGHSKSGARSADTRGDLPRHASSPPPQRPVNQRAPAEDRSHAVA

SEQ ID NO: 422617 - protein, 357 aa, unidentified
MIVVGVDCHKKTHTAVGLDRATGECKGELTVKARDGGHQRLLEWARSIDPEITFALEDCRHVSGRLERHLLVSGETVLRVPPKLMAGARRSSRTRGKSDPIDAEAVARAAIREPGLPVARLDGIERDVRLLVDHREVLVNERTRAQCKLLWLVHGIDPEISVRPKGLDSYCHLDRLEEHLAALDQTVEVRIARRLLVRCRELTREVNALEREITSLVRTLVPELLAVPGCGPLTAGKILGEVAGVTRFSSEAKLALHAGVAPLEVSSGERRRHRLNRTGNRQLNTSLHRIAVTQVRMHDRAKIYIARRMSEGLTKREALRCLKRHLAKIVYRRLGEAERRRREASCPSTDTVAVAAA

SEQ ID NO: 422618 - protein, 349 aa, unidentified
MTDIATHNDRIATIGMDLGKRSFHLIGMDAHGKVIMRQQLSRGRFERHMTNLQPCLVGVEACAGAHHIGRRLSAFGHNVRLIPAQYVKPFRKGQKNDYRDAEAIAEAVQRPTMRFVPIKSAEQLDLQALHRIRSRLVGHRTAVINQLRGFLLECGVIVPQGPAMLRKILPSVLAQRTDVLSPRMVRLIEELADDWRRLDDRVDAVTGEVQALARQDEGCRRLMSVPGIGALTASAVVATIGNGAAFTKGRDFGAWLGLVPKQLSTGDRTILGRLSKRGNKYMRTLFIIGSRAVLAKPGSWAKFGLEGWLAAAARRLHHNVLAAALANKLARIAWGVLYHSRSFARDFEL

SEQ ID NO: 422619 - protein, 376 aa, unidentified
MDTIYIGVDFHARQQTICYLKTETGELVISELKHQDKQVVRDFYVQFRGSVIVGLEASGYSPWFERLLEEMGCEVWLGHASEIRRRARWRQKNDRRDAELILDLMIHNEFPRLHRPAVQSREVLRMLRYRQKLIKLRTMSKNSLQAIALQAGLAKGSRLFTKSGQQELRTAAMSPVMQWQCEHWVQLLEPLNKQLLETMVWCKAQSKGDVSITRLRTHPGIGLLTSLCLLHTLQPVSRFRNSRKVAAYAGFDPVERSSAERKCFLGISKAGSRVLRYLLVEAAQTAVRKDEDLKRFYKRLAERRGRPKAKVAAARKLLIRAYIMLRDEIDYAEFRRRAVAARLARRGQGPTSVPEVLIGQPASAECQEPTHYAQSK

SEQ ID NO: 422620 - protein, 345 aa, unidentified
MEEHTVVAVDVAKAVFEVAVSEEAGRVKLHRRLSRGELEVFFAQTRKATVVMEACGSAHHWGRRLESLGHKVVLLPPHQVRPYVTRNKTDRADAKGILEAYRNADIRPVPVKTVPQQALGSIHRFRAGWIAARTAQVNTLRGLLRELGFVIPEGIEKVLPQVRLLVADADSGLPDSLRWTITTACDEIESLGESIRQAERQLEAIAEQTPVVERLRSVPGIGLMTSTALVAFVGAARRFPSGRHFASYLGLTPREYSTGLRHRLGRISKRGDSYLRVLLVHGARSVLCHAKKATTHDRLRTWALALQKRSRHNKAAVALANKLARIVWAVWKTDEGTFVSIPAAA

SEQ ID NO: 422621 - protein, 339 aa, unidentified
MENFVGVDLHKKVSQLATLREPKPASQVRFPNHTVTVEKVLKKLPQGSKIALEATGSWWWFVDLAQRTGHEVVMWHPKQTKAIASARLKSDKVDALMLAKLLKADLLPTVWIPPAAQRYVRELLTHRARLVRQRTSVINELHALYAKRNIDAGMIFHRVRPPAFRAEDLSGYGPRIVEEDVAFLGFLNRQVQGLDKELKAIAEKDPESKRLMTIPGVGPVNAVAGSCWIGTIERFSNSKKLSSYFGLAPRVRQSGERERHGHITKEGNRMVRSLLIQAALWHIRLGKGASRKHYLGVLKRRGKQIARVAAANKLLGIIFQMMKEKIDYEEFLRRGGNAQ

SEQ ID NO: 422622 - protein, 410 aa, unidentified
MSNSQKRYVGLDVHKHYVMVGAVNAAQETVLPPRKVSLLELEGWAKKYLRPTDEVVLEATTNAWYVYDLLEPLVARVVVGHPPLIKLIAAAVVKTDKKDTMIPSTSLRTGLAKLLAVNMIPAVWVPPAHVRELRALINHRQRLIGQQTRLKNQLRSLLHRQHLAPPGGQLFAAANRPWWLGLNLSPSEKLRLRQDLTLLDQLAPLIAEVEAELQRLSLAEPWAPDVPYLLQLPGIGLLTAMTILSAIGQIDRFPTAKKLIGYAGLGAKVHASGLTHRTGGITKQGRRELRRVLVEAAWTAVRYDQYWQDQFESLAYRIGPEKAIVAIARKLLVVIWHVLTARVADRRAAPQQVARYFIHWGRQLRVKSTLGLKASEFARQQLDRLGIGQELEQVPYGAVTYRLPPSASSA

SEQ ID NO: 422623 - protein, 358 aa, unidentified
MKQTTKYVGLDVHQATTVAVVGDDTGRVIARSVVPTEAAALLEFVRGMRGAVHVAFEEGTQAQWLYDLLVGRVARVIVANRRGEPRRGSKGDWHDAEWLMDRLRTGELRAVYHGSPHRATLKELGRAYRTVVEDATRVMSRLKALFRGRGIRTTGRGVYDPAQRAEWLAKLDGAGVRLRAATLYAELAALHTLRPMAKTALVAEARRDPAWDVLRTIPFLGPVRVALLLATLQTPWRFRTKRQLWSYAGLAVVTETTSEYALDAGGQPVRRRRPPMTRGLNRNHNHVVKEVLKGAATAAVARPGALRDFYQGLLARGMRAELARVTLTRKLAALTLRLWKTGERYDPAKLTIPAVPAR

SEQ ID NO: 422624 - protein, 323 aa, unidentified
MMKKEFPFTQVVGVDVSKAKLDFVLADGDQPLSINNTPKEIVGKLIGRIKDPESTIVVMEATGGYEGLLVTLLHRHKIALAVVNPRRVRDFANGIGRDAKTDPIDAQVIAFYGRVAQPEAQMAKSDEEKKLKSLVERRRQLLDLINQEGNRLQQTADEEIRGYIRESLETLKKQVKTIDQRLAKCVNTNTKDSRKIEILRSTQGIGPVFVSTAVAELPELGRLNRGQIAKLVGVAPMNRDSGQFSGKRRTFGGRSYVRRVLYMATLVATRHNPKIKAFYRRLVAQGKPKKVALTAAMRKLLTILNTLIKNDVLWSEEPNKAGV

SEQ ID NO: 422625 - protein, 434 aa, unidentified
MSVLNKIYPNSAGIDIGSEKVYVSVENQTVRNFRTFTSCYRELSAYLKECSITHVAMEATGVYWITLYDVLESDGFEVTLVNPADSKNLPGRKTDVQDCQWIQQLFSYGLLRKSFVPEDIVRKLRVYTRMREDKLQMASSHVQHMQKALTLMNIRLPEVLSQTHGASGMAMIQAILAGERKPEKLLACCTPSLIKNKGTDILLALEGNYKEEYLFELQQAFDGYMFYIDQVSKCDIETGKVLQDYNNSSNKDYKDRHPVKPIRHNKPNIDQLHQLLLGIHGANPTTLPGLTDYSLMRLTAELGNNIKQWPSIKNFVSWLGLAPGKHQSGKMNKRSKKKPATRAGQIFKQAAQSILLSKQPGLGAFARRLKAKKGSGIAIKATARKLAELYYRIFDKGMNYVEQGVKRYQEKLKEQQIIFLQKKAGELNLQVVEN

SEQ ID NO: 422626 - protein, 375 aa, unidentified
MNEITGVRITRVGVDLAKQVIQVHAVDASGQRVAARAIKREQFFAWCTQLPTGCVVAMEACSSAHHWARKLRAQGLEPRLIAAHFVTPYRMEGKGGKNDATDAAAICEAASRPSMRFVPVKTCEQQGVMSLHRVREGLKEERTACINQIRGVLTEFGLVFGKSPKVLRAVLTDIIEDASNELSTMARLVLQRAFEHWRELDEHMRWCDRQVGLHVRSSPAAKRAAKVIGIGELGASALTAGVGDFTQFKSGHQFGAWLGVVPRQASSGGTIRLGRITKRGDDYLRTLLIQGAKAAVMSADKRDDPISRWLAQLTVRVGWQKACVAMANKNARILWAVMTREEGFNSEHISIKPHAKQQEGKAVVDPASICAAGVA

SEQ ID NO: 422627 - protein, 352 aa, unidentified
MNTIKYIGMDVHVATTVIAIRNCDGKVLTEAIVETKAATIKDFFRGQRGTLHVTFEEGCQAEWLYDLIRPYAAKVIVCNPRKIARSDRRSDKIDAKRLAELLRTDALKATYHGEHSTQDLKELVRSYMALVHDRTRTKTRLKALFRGRGIPCPGTSLYNKENREDWRRKIDNTARLSRADRLWKEIDYLTELAEESEKDLLKEARKHTSIKILRSVPGIGPLRSAIILAITATPYRFPTIKQFWNYCGLAVRSKITGEYELLEGRIRRTKRQPLIRGLNRNYSRALKEVFKGAAVNVAMGAWKFHYEARIAEGTKSSLVLLTFARKISAITLSIWKKGERYNHKKLKFKHAA

SEQ ID NO: 422628 - protein, 343 aa, unidentified
MSIVILGVDLGKNACSVVGVDAAGAVIVRRSMRRQSLIDYVAKLPACVIAMEACCGAHHLGRLFKAGGHEIRLMSPEYVRPYVKAQKNDDRDAEGIAEAASRPTMRFVELKSQEQLDIQTLHRVRSRLVAERTNLINQLRAILLERGIIFPVGRRKLELGIDDVIADKGDVLSTRLHQLVGELRDEWKKLDEKIETLNGEFVALARNDPATRRLTTIPGVGVLNATALVAAVGDASSFAKARDLAAWLGLVPRQHTTGGKPRLLGISKRGNTYLRTLLIHGARAALPSLSQSDTPLGRWLKAMIERGAHRNVVLVALANKLARIAWATLRKETDFDRSDPVAA

SEQ ID NO: 422629 - protein, 401 aa, unidentified
MVSDFRKGRYNLMKIYVGIDIAKLNHFAAAISSDGEIIIEPFKFTNDADGFQLLVSKLESFDKNSLIIGLESTAHYGDNLVRFLVTELYQVCVLNPIKTCQMRKNNVRKTKTDKVDTYVIAKTLMMQDNLRFVSFFDLDMMDLKALGRFRQKTIKQRTRLKIQLTTYVDQVFPEIQYFFKSGLHQHAVYALLKEAPSPKEIASMHMTHLANLLKVNSHGHFTKELAKELRVLAQKSVGANDSAISIQITQTIQQIELLDSQLEKIEAEMTDIMKFNDSVIMTIPGIGYINGGMILGEIGDIHRFSNPNKLLAFAGLDPSVYQSGNFQAKTTRMSKRGSRVLRYALVNAAWNVVRNNATFKAYYDAKRAEGRSHYNALGHCSGKLVRVIWKMLTDNVEFNLK

SEQ ID NO: 422630 - protein, 387 aa, unidentified
MTVRTVTNLPAVTHGETVRCLFAIELSTMSWVVAFNTPLSEKISRHTLTGCKWKRLLELIEEVRARVSRETGRAVEVVSCYEAGYDGFWLHRKLEAHGIRNYVIDPASLQVDRRARRVKTDRSDTDRLLRSLMAYLRGEPKVWSVVRVPSVAEEDARRLHRERDRLVSERVQHVNRIKGLCALQGIYDYNPLRPQATARLEQLRTAQGGAFPPRLKSEIMRGLQRLEMVVEMIATLEAERNAIVENEASTHLNAKKIQTLHKLKAIGPEFAAVLVGEIFHRDFNNRRQVASYVGLAPSPFQSGNVAHDQGISKAGNRKGRTTGIELAWMWLRYQPESDLSVWYRARVGATKGRIRRIAIVALARKLLVALWRYLETGLVPRGAVLKG

SEQ ID NO: 422631 - protein, 344 aa, unidentified
MKRITTIGIDLAKNSFQLHGVDAHGKAVLRKTLRRDHVIPFFANLPECLVGMEACASSAYWARAIEECGHIVRRIHPRFVKPYLMADKNDANDAAAICEAVGRPRMRFVPRKSQEQADIQAIHRVRQGFMQRRTAAINQARALLAENGIIFKQGASQVRLRLPTIVDDANNGLSDRMRRLFGSLYEHIVCLEASIARQDRELRTIAKEHDACKRLMKVPGVGIMTATILLTMTGAAADFKNGRQFAAYLGLVPRQHSTGGKQHLLGITKRGDSYARTLLIQGARAVLRAMKYGHAPLGEGAQSSWLARLVDRRGPNRACVGLANKTARIVWSMLAHGSPYQAAA

SEQ ID NO: 422632 - protein, 382 aa, unidentified
MDTSKNWSRIIGLDLSKATFKGCILYGEGFVQRKNFSGEMKRDESGYVLINNTIQAGDIVLMEAGSSSFNLARYLQKNSKALDVIVLNPAHLRIIWDSQKKNDKADAMKIACIARDMRPEAWPRVTVPSEKEQSERSVIMHWVFLRKQETMICNRFFALFNSLGFPEIDKSRLKKDSDFRIQTINDLLSFNELAFTDAIMLEQQISIVQQQLAIMEDRLRNICLDHPQQALAWFSIPGIGLVNAATMIAYIGDGSRFSKPDQLMNYAGMVPKQNQSGTVDIKGKITKRGCSAIRRNIIQGAQVVMQQPPVCALTKYAYRRKKECPFNGKVAVAVANRMLRTGLALLHHDDLYRPMIQDGFDKLRRKLAENKLQALVPYLTSR

SEQ ID NO: 422633 - protein, 361 aa, unidentified
MKCALKDNQDAFAGQDFYIGIDVHQKQWTISVQSHQMALAKPLTIDPSAGSLSSYLKRQYPGGKYHAVYEAGYSGFWPARDLLSHEVETIVVNPADIPTMHKERSTKTDSVDSRKLARSLENKELRAIYIPERKADEYRLLNRYRSQLVRDETRIKNRIKAILAEFNYRVPVDLEGNRWSGAYVRWLQTNTFETPYAQIAYNERLEQLAESRKRLAKVLRELKLMATQEPAIASLVKLLQSVPGVGFLTAILLVVELIDMTRFKRFDELASYIGLAPSIHESDERSYSRGLTKRQHHELRSRLLESAWIAVRKDPVLTMKFGQLCKRMNKNKAIIRIAKMLLSRIRTVWKTETPYVYGVIE

SEQ ID NO: 422634 - protein, 475 aa, unidentified
MTTPFRIFTLPKAHLRRASKLDGMSDKSISMEVVNPNAAGIDIGSRSHWVAVGQREKDVREFGVFNEDLFALANWLAHRQVVTVAMESTGTYWQNLQAVLISRGFHVILCNGKFTKNIKGKKTDIKDCQWIQKLHTLGLLSSSFLPDQQTEQLRTYCRHRANLIHTAASTSKKMQKYLRLLNLRLDVVVKDVCGLTGLKIIRSICDGEKDPIKLAALRHYNCKKSEEEIAKALQSNNRKDYLFTLQQELETYDHIQNKIKQCDIEIEKILNEIIDNDDNKKQHFIESKPHKRINKNTPKNIDLNLKAYQMFEGNDLLAIEGMSYATVLALMSEIGIEGIRKFPSAKHFSSWLRLAPNNKISGGKILSCKVPKGSNRLKIALRNAANAIGNLRDSTPLRDFFQRINFRKGRVSAISATARKLAVIIWNMIVKNVPYKNPEGYLYLDQKRKLGLVKRIKKQIDKFDIKPEDVGFMST

SEQ ID NO: 422635 - protein, 419 aa, unidentified
MSFKIYLKNACGLDVHKTWIYACIGIADANNIVHYHEKRFSSFTKGLNELAEWLAFYGCKDVCMESTGKYWIPVFNILEKNCNIVLAHPKYTKPQKGNKTDRKDARFICDLFMCSMIKPSFIPPADIREIRDLVRYRFKLTNMITGEKNRAHNCLTVSNLKLDDVFSDIFGKSSLSITEYMLAHPGEKFDVTPFVNGRCKTPVEEIQAAVDGAISDGQAAKLRECLDHISQLEKHKEKIEQEILSFTGKYKDSLDLIRTVPGFDKNPFTAIQILSEIGADMSVFPTDKNLVSWAGCCPRNDRSASHVKSTRISRSGSYLKPVLVQIANAIIRSKDHPEFRDRYRRIKAHRGHKKAIIAICRMLLTAIWHILTDKKPYTADGFTISTPVREKTILTRSQALYLLRQRGYIIKDDEPQTAS

SEQ ID NO: 422636 - protein, 346 aa, unidentified
MDVYIGLDVSLASTAICVVSAQGKVVKETTAPSEPEDLVRTLRALPWTVIGVGLEAGPQSQWLYRHLVDADFDTVLMETRLVKGALQAMPIKTDRRDAEGIARLLQMGWFRSVHCKSVSAQEARALLSARKAILKALVDLELSLRGVLRNFGLKMGKVSKGRYEDRVRELVDGNTMLEATAQPILTLRREIRTELAGLEKKLRDLVKDDPECRLLMTMPGVGAVVALTYKSAIDDPTRFQSSKDVGPWVGLTPRRDQSGERDVQGHITKAGDADLRAALYQAATVMLNRGKPNWLTAWAWNVAKTRGKKRATVGLARRIGVVLHRMWRDGTEFRFKRAEAMMAVAA

SEQ ID NO: 422637 - protein, 339 aa, unidentified
MKYIPVGVDIAKHLMQVHFVDEHTGEIIDKQVKREKFLEYFSNREPCLIGMEACGGSHHWARELQKLGHKVRLLKGRFVKAFVMGNKNDVMDARAIWLAVQQPVKSVAVKSEEQQATLGLHRMRQQLVKFRTAQINALHGLLLEFGETTHKGRAALAKEVPEALERLKERLPLYLINMLDEQYQRITELDEHLDHIEKQLQAVARQNETCQRLLNIPGVRPLIATAAVATMGDASAFKSGREFAAFIGLVPRQTGSGGKIRLLGISKRGDKYLRTLFIHGARAAALLTKEPGPWITELKKRRPASVAIVAMANKLARTVWAIAAHGRKYDKNHVSIRPD

SEQ ID NO: 422638 - protein, 430 aa, unidentified
MSYRIAGIDVHKKMLAVVVSDVEVESEYQFEGRLFSSNPEQLRSLAAWLLEKEVEEVVMESTAQYWRPVWEALEQYWKPLRQKREGAGRMSGTLHLAQAQSNRGPRGRKRDFRDAERLVKRLVAQELTLSFVPDGEQRLWRTVTHKKYQLRRDRVRLHNQLESLLEEAHIKLSSLVSDLLGASARRMLKALADGETNPAALAALADQKLRATPEQLCDALGACTELKPVYRRLLKMALEQLQFLEQQIGQLDQELATLLHPHQDAVERLAEVPGLGVDSAQQIIAEVGPTAATFPSAKQLSSWVGTCPGDEQSAGVNYSHRSPKGNRHMRRILNQTANAAAKTKGSIFDIVYRRSVTRLGHNQAVGAIAHRQCRLIWLVLHQGVRYEERGPAVNKQSKQRRTWKMIRQLRSLGYRIQPPNPDQPSQAQEQ

SEQ ID NO: 422639 - protein, 423 aa, unidentified
MDVLHERVAGLDVHQKTIVACVRRIDDGKVARECRTFETTTAGLLTLLAWLRECRCTHVGMEATGVYWKPVWNILSDGDFELIVANAAHIKNVPGRKTDLNDAMWIADLVACGLIRASFVPDEPLQQLRSLMRTRKQFSREQTRHVQRIQKTLEEANIKLSAVISDIMGASGRRIVQAMIAGVRDPGQLVQLADRRLKASRTELYEALRGRLTEHHGFLLRVHLEQHDALAATIRQIDRQVEVALTRLDQERATGRITYRDLIALLCTIPGVSTLAAITILAEIGRDMSRFHTAGHLLAWAGLCPGQNESAGKRKATRLRKGAPWLKTMLVQCAWAAKRKKDSYYRAQFYQISARRGPQKAICAVAASLLTAIYHMLKDGTEHQDLGANRFDRRPVEAKVQSLVARLAKLGYQVQLQPLAEAA

SEQ ID NO: 422640 - protein, 574 aa, unidentified
MNNQAPPKPVHIGVGIDTARYAHHVSFLDEEKRTATKPFHFTEAAAGYQKLQDAFDRLAGKHPNLHLHIRIDAAGQYAENLLQWLHQLDLNTTISVGQPARNKAYRKVHFDKRKADPTESLACARFAIVERPRATPHNPPEFQQLRDTVALLEVATKQHTRLVNQLHGLLARVFPELAVLAKDLSANWALILLDKYPTPAKLARAKAETIAAIPRLPTDLVPMLQAAAAHSLGSNRGLVAEQLVRQKVRAIRIQEAESRDLHKLLEKAWEALPAGPYRRLTTIKGIAVQTAAALAAKIVSIDRFPTASSLIGYFGVFPEEVDVSGTDPQGKPKPGTEIHMSRKGNDLVRRLLYTSAQCAAKWNPPVRALFARLMAEGKGYNVATGHCMAKLLRQVFALWKKDCDFDPQFETRPKAEPPTESNAAEARGIEETKTVVGHREADKPQEKVVTTTASNILSSTNGSKRRPLNFGLLRQQVSITRVLESIGWHAQSAHGPQWRGVCPLHEANGTTSRCFAVHTENNIYCCHRCGSQGNALDLWTALCGKPMLEAAWELVENQGLNPPLLKEGPPGANH

SEQ ID NO: 422641 - protein, 347 aa, unidentified
MTTLEAVRGITGGVDTHRDVHVAAALDPLGGVLATESFATDVAGYQALLKWLETFGDVTKIGIEGTGSYGSGLASFLRRSGVEVIEVDRPDRQKRRRSGKSDPLDAVEAARAAQSGRATGKPKSRDGSVEAIRVLVVAKRSARQARVKALIQMRHLGFTAPEQLRCRFKGLTVPAMVAEGIKLRPTRSGDPVMSATKASLSSLAHRISALDDELAELDERIEALLVRTVPELLDLFGVGPDTAAALVMAAGDNPERLHSEAAWAHLCGASPIPKGSGKSSGRVKVHDGGDRQANSALWRIVMVRIAHDPETKIYFERRVKEGKTKPEVIRILKRYVAREVYRYLPRG

SEQ ID NO: 422642 - protein, 344 aa, unidentified
MICVGVDWAEEHHDVAVMDDAGVVLGERRVDDTMTGVALIHELVGEHETDPAQVVVGTESVHGLVPQALVAAGYAVYEINPKAASRYRDRHHISGAKSDRADAKMLADAVRTDRHNHRTYAGNSDLSDVVKVLARSHQSLIQERQTQINHLRSTLRQFYPGLLQAFPKVASPSERDSQDAMVLLDRAPTPAQGRTLTTSQIATVLRQAGRKRSVDQRAHEVHVALRIPQLEAPPLVARAYGSSVLAIAGIVRTMTAQIDRLGTELNARFEEHPDAEVILSLPGLGPVLGARALGEFGDEPNRYVDARARKNYATTSPVTRASGKLRLVSARWGGNHPADRLSAP

SEQ ID NO: 422643 - protein, 350 aa, unidentified
MEYVGIDWSYRRAAWCALSGAGAIVGEGAVSSDDDGLARLVIKRGTEVRAVVEMMSGAIWVRDTLVTAGWEVQIAHARKVRDVAPLACKTDKVDARVLAELCRRDLVPELWVPALADRELRERLRRRMHLVRMRASAMNRIFGLLTQWGLRLSLKRLREPDAMTLLEQRGVPLVWRRSIAEALDVIELLDARIGPIDAELGTLARADTRVALLDTIPGAGALLGLTLASEIGDVARFGSPRKLVGYAGMAPKVSQSGDRSRTGALSKAGSRTLRWAAAWAAQHAWRPTNPWHQLYTDVAKRAGKNPAKSAVARKILIAAWHVLSRQQPFKPAAPRRPHPASASSRCFLAA

SEQ ID NO: 422644 - protein, 416 aa, unidentified
MKIVRPICCGMDVHKNIIVATIGITNKKTRITEYIQETFSTLNHDLLNLKQWLINHKCFDACMESTGKYWIPVFNILEDEINIYLTHPKYVKAIKGKKTDKKDSKWICDLFKHDLIKFSFIPPKEIRALREISRYRYKLVGMRSSERNRYQNCMTVSNIGIGSVFSDPFGKSAQAIMKEVLESDIIEDEKILKCIHGSCKNKDKILDSIKHCNIETDQRFKMNESMTHMEELQVHINNCEIEIMKRAAPMFDQFMHITQLPGISTLSAILIISEIGVDMKQFESDKQLTCWAGLAPANNESANKKKSVRISKAGQYLKPLLVQCALGAIKDKEGYFGIKYSRIKKRRGHKKAIIAIARMMLVSIYHMILTGETFNPSDYESFRNPKPPIKQQDLTEESAIEFLKKSGFDVSKLTKP

SEQ ID NO: 422645 - protein, 342 aa, unidentified
MDHFAGLDVSVKETSVCIVDDTGRIVREVKVASEPEALLAVLANPAYHFKRIGLEAGPLSQWLFSALAEAGLPVICVETRHMRAVLKAQINKTDRNDARGIAQMMRVGLYRPVHVKTLRSQKQRMLLTHRKLLQSKAIAIENDLRGTLRNFGLKVGMVGTVKFEARIKELVENLPDMAVLVEPLLVVRRVLREQIGILHRRLLAVVRDDDVCRRLMTVPGVGPVVALTFRVTVDVPARFRNSKAVGAAFGLTPSKYQSGKSSRTGAISRCGDDMMRMMLYEAAQSMLRSARWSWLKAWAMKIARHRGLKKAIVALARRLAVIMHRIWVDGTEFRWTREVAAG

SEQ ID NO: 422646 - protein, 415 aa, unidentified
MKKVCGIDVHKPFLVATILDRDGKSESRRFPQSTESLLELQKWILEEHCESVAFESTADYWRPLYLVLENRVPVTVANAHHIKHIPGRKTDITDSRWIAQLELNGLIEPSRIFSGDSYDLRSLTRSRELLIQNRTELKNKIHHLLDAASIRLSSVFSDLFGKAGIIVLTGILHGESLEKIIASLPKKEKRKASAISAALPATIPQNTLFLLQSYLKLVDDLTHEVQLIEENIRESLTDKSREFQILTSIPGVGFIGASTLIAEIGNVRDFENADKLAKWAGLTPAVYQSANVTRTGAITKQGSRHIRWILVEIAHIAIRSPGKIRSFFERLLPKKGYKKSIVAVARKMLRIAWHLLVHDEMFVDDSPRSKHVTLRKIPKKIQSFGIERIIELLSKASEVVIRDHNQDLVRLDLSD

SEQ ID NO: 422647 - protein, 361 aa, unidentified
MNGVGTEAAPSIIEGTTMEHYAGIDVSLESSCVCVVDRTGRVIREAKVASEPDALIGWFRSLGVELARIGLEAGPLSQWLYAGMREVGFAMELLETRHVRDAFKTMPVKTDRKDARGIAQLLRLGWFRPVHCKSLPAQETRALLTARKQLQSKLHDIELSLRGTLHGFGLKVGRTTARTFAGRVCELVSGHPTLATIADAFLSARTILAAQLHRLEKRVLAVARSDTRTQLLMSAPGVGPVVALTYVAAIDDPARFKSSKATGAHFGLTPKKYQSGETDVTGRISKIGDASVRTMLYEAANVILTKPVKGSSLKSWAMRVAKRAGMRKAKVALARKLAVVLHRMLVDGTKFIADKAAAAAA

SEQ ID NO: 422648 - protein, 466 aa, unidentified
MCPGRLAATKVQWEVCAPSASTGIDDRRGGPGKQRGEAMTDAIEWFAGLDWASEMHRVHLHDRTGRNAGELDVPHGGEGLTRLCDWLVEKTGAEPAQIAVAIEMPRGPLVEILLERGFQAYAINPKQLDRFRDRFSPAGAKDDSRDADVLADSLRTDTKAFRRLAVDDPLVIELREWSHIAEELQQERIRLANRVRHQLWRYYPQALQLTEDHGADWFLALWQLAPTPAKAAKLHKETIARHLATHRIRRLDAAEVVRILRAPPLTVAPGTTEAASAHIRTLAPRLKVVNDQLKAAQHKLDELAALIVPPTPQPSAPAGEPHEPGQSYEQRDGAILRSMPGLGRIVLAALLGEASQLLQRRDYHSLRCLGGAAPVTRRSGKMRLVIRRYACNGRLANALYHWARGAMQREPRWRARYGALRARGCSHGRALRTIADQLLALLCALLSRQELYDPHHATRTPQPAGP

SEQ ID NO: 422649 - protein, 346 aa, unidentified
MNQIIRIGMDTSKHIFQLHGVDAAEQPVLRKKLRRSEVLTFFAKLAPTVVGIEACGAAHYWARMLIGLGHQVKLMAPQLAKPYVKRNKNDGRDAEGLCEAMSRPTMRFVPVKTPEQQAALMLIGVRERLVARRTQLSNAIRGYAAEFGLTAAKGLDKIEPLLAEIAANEALPKLARELFAMHGKEYAHLQAELKKIEARLMAWHRANADSRRLAGIPSIGLIGATALVMKAPDPHLFPSGRHFAAWIGLTPKDHSTAGKLRLGKITRAGDEMLRSVLVAGATAVIQQAKLGRGRPSPWLLALLSRKSPKLAAVALANKTARIAWKLMVTGESYHAERMPMASANAA

SEQ ID NO: 422650 - protein, 477 aa, unidentified
MNKKQGDNLQPPKAKSKRRRRNKGMCLEDRPVLEPNAAGIDVGAREMFVAVPPGRDEKPVRVFATFTEDLERLTDWLEQCGVTTVALESTGVYWIPLFEILEQRGIRPCLVNARHMKNVPGRRTDWHECQWLQFLHSVGLLRASYRPGQDVCAVRTILRHRNELVAAASQHVQHMHKALTQMNLQIHHVISDITGSTGGAIVDAILAGQRDGAELAKLRDPHIKANTETIRKSLEGNWRPEHLFTLGQSRDLYRIYQQQIVNCDLEIEKMLQGFAPRIDPGERPLPPDQKRNRAGSKRRRKNGHPHPEFDLRTEAYKLFGVDVSQIPGLEENALPLFSEVGRDLSRWPSAAHFVSWLALCPDNDISGGKLLWRGARRVKNRAGHLFRMAAYALHRSLTPLGNYLRRMKAKLGPQAATMATAHKIAVIFYTMIKNQVEYDETIWNARDAEREKKLQAKLKRQAKQLGYELVPIEPQAA

SEQ ID NO: 422651 - protein, 402 aa, unidentified
MIPFRCNPTTSIGESDDGPHSSNLPAAMHVETARCLFAIELSKESWLIGFSTPLSGKISRRILSGGDWKGLLDLIEEVRARVSRETGRAVDVISCYEACYNGFWLHRILEAHGIRNYVIDPASLQVDRRARRVKTDRIDTERLLRSLMAYLRGEPKVWSVVRVPSVAEEDVRRLHRERDRLVSERIQHVNRIRGLCALHGIYDYQPLRPQAMARLEQLRTAQGISLPPRLKSEIKRELQRLELVVKMTATLEAERDTIVEDEASTHVNAKKIQNLHKLKAIGPEFATVLVGEIFHRKFSNRRQLASYVGYAPSPFRSGNVAHDQGISKAGNRKGRTTGIELAWLWLRYQPDSDLSAWFRARVGTTKGRVRRIAIIAMARKLLVALWRYLETGVVPQGAVLKG

SEQ ID NO: 422652 - protein, 445 aa, unidentified
MAMKVKPPAPWQIRHPNAAGIDVGSAAHYVAVPADRCEQPVRCFSSDTQDLQALAEWLSECGVDTVAMESTGVYWIALYELLESRGFTVCLSDARHVKNVSGRKSDVIDCQWLQQLMTYGLLQAAFRPQEQICALRTVVRERQRLIEDQGRCVQHMQKVLTQMNVQLANQLSDIAGKSGLAIIRAIVAGERDGMKLAALRDYRVHASQEQIARSLQGSWREEHLLCLASALSLFEAYATQIEQFDRAIERMLVREARIHGEVPAAKKNKRGGKHAPSFDARSALYHWAGVDLTQIGGIDVSTALVVLSEVGWDLSKFNSSKCFANWLGLCPSTRITGGKRIGGATKRARNRAAQALKLAAQGLQRSHCALGAYYRKVAARSGAGKAITATAHKLARIIYAMLTHKSEFVARSQEHHEQQHRQRSLRQLQRKAALMGFQLQPIPAA

SEQ ID NO: 422653 - protein, 312 aa, unidentified
MEAKFVGIDVSKATLDVDCLPVSTPRQFSNDGSGIAGLVEGLVGSGVERIVLEATGGYEVAVASALAAAGLPVVVVNPKRVRDFAKAQGILAKTDRLDARVLALFAQQIAPPVHALPDAAQRDLAELLDRRHQLVVMRTQEQARMATVLPVARSDVKQHIAWLDQRIRKHEGALLKRLRANEIWDAKVTLLDTVPGIGPVNLFTLVGRLPELGTLNRQQIAALVGVAPFNDDSGKRRGQRYIRGGRADVRCALYMATLAAKLWNPVIAQMYDRLIAKGKPFKVAMTACMRKLLTILNAILKSKKPWEDRLAT

SEQ ID NO: 422654 - protein, 412 aa, unidentified
MDVLHPHCAGLDVHKDSVVACVRHVAAGTVKREVRTFKTTTAALIALSEWLSAEGCSPVAMEATGIYWRPVWHILADGERQLVLANAAHVKNVPGRKTDVNDATWLADLMAHGLIRSSFVPDEPTQAMRDLLRSRKQFVRERGSHIQRIQKTLEDANIKLDSVIADIVGLSGRRMIEAIVGGETNPARLATLADRRIKASPADLAAALRGRVTEHHRFMLRLHLYHLDAVDAAIARIDQEVDANLEPFRQAIRILSTIPGISTLSAQVLVAEIGIDMHRFPSEGHLLSWAGLCPKNDESAGKRRSNRMRKGAPWLKTTLVQCAWAAVRTKGSYLQAQFHRLRSRRGAKKAVGAVAASILTAAYHMLKNGTPYEDLGAGHFDNRAKGRQVLRLVSRLQNLGFAVQITPSQAAA

SEQ ID NO: 422655 - protein, 337 aa, unidentified
MDVSTSDPTSPSTAAPPADGPHVGIDVAKDKLDLARSDSVAPATFPNDPAGIGRIVELMVKARPAVIVVEATGGLERPLVEALLEAGLPVALVHPGRVRHFARGLGILSKTDRIDAVVLMRFGQLAAPRLAEKRSKNRTELEALVVCRRQLCVTRAQQSNRRASTASKAALKSIDAVLGTLDKQIDSLDGQIRDLVDADDDFKHLDSLLRSVPGVGPTLSATLAAELGELGKADRRQVGALAGVAPFNHDSGRLRGRRSVRGGRAAVRCVLYMGALTAMRVNPLIKSFAARLRAAGKLNKVIIVACMRKLLSLINAMVRDGLRWDQLDVVKKLSTAH

SEQ ID NO: 422656 - protein, 323 aa, unidentified
MSQPNLQCMGIDVAKLSLDIATTDTIEPFTVGNDEDGFAVITDKLKHTKINLILMEATGGLEAAIACKLQSEGYDVVVINPRQARDFARSMGYLAKTDKLDAAMLAQLALVIDRHPDRSRYIRHLPDEARAVLAAMVVRRRQLNHMLVAERNRLYPSHPQSRKSIDNIIDALQNELDRINEQMKQHMTAFIQEQARLIGSVKGVGDITVASLIAELPEQGKLNRREISALTGVAPLNRDSGKMRGKRTTFGGRAGVRATLNMAVLVATQFNPAIKLFYQRLLAAGKPKKLALVACMRKLITILNTMLRKGEEWNASFQSQVIS

SEQ ID NO: 422657 - protein, 316 aa, unidentified
MTTTAEYIGVDVSKVRLDVACWSSKEFKQYSNDPKGILDLIEWLKVVQPELIVMEATGGLELPLVAELAYAKMPVTVINPRRIREFARAIGQLAKTDKLDAKVIAHFGAATHPEARKLPTVEEEKLTALITRRRQIIEMLTAERNRLHSARFSMKDRIETHIAWLEEELLTLDDEIKKFVQQSPIWKEKDKLLRSVPGVGPVTSATILSMLPELGTLNRQKIAALVGVAPVNKDSGKRQKKRRVFGGRASVRSVLYMAALSASIHNPRIKEFYDHLIKVGKEKKVALTACMRKLLIILNAMVRNNHMFVIDSIISN

SEQ ID NO: 422658 - protein, 308 aa, unidentified
MAKPVTKITLGIDVSKDKHDIYNWQTDKLTTLANERSAIKTFLKAFHGPVQIAIEPTSHYHLVMIEEAHALGYEVYLINPRQLVHYRQAVNVRNKTDPLDAWLLARYLEREGSQLRPFKPQDPRAQRLWQLILRRATVVKSRQQLRQSLAGVRLPIKALLTQFQQLLDRIDRQVIALIKELNWWSDYLYCHSIPGIGDGNASALVAAYHRGAFAGSDAFISYLGLDVKIRDSGYFKGRRKLTKRGEPELRRLLFCASQGARSYHLFADYHQSQLDKGLSKIAARVILSRKLARIAFTLMRKEEMFMKH

SEQ ID NO: 422659 - protein, 349 aa, unidentified
MSMLCGLDLHRGQITFDALEVESGEVWRGRLWSPDRARFRRWLNEDLAARAKDGSVAVAVEGCTGWRYVVEEITSAGFEAHVAEPADTQAARGRKKHAKTDRSDARLLRELLQSGELPESWIPPEAVLEWRERVRLYKTLLDQRGMWIQRIHAELFQHGVSLPEAQICSCETRDWLASDTVPLSGAARQRIAVGYHIIDATDAVRLPLRADLDRFGRRQPACKALAAAHYGVGPLTAVAVWAELGDCRRFSRSMQVVRHTGLDVTVDASDRHRGHGHLSRQGPETLRWALFEAGMCASRATSPDRAYYQAVKQAHDGKLAAISMARKLARRCYHTLRQLDPEVVYAMPA

SEQ ID NO: 422660 - protein, 466 aa, unidentified
MKHNRRRSPGKRRVSPTVLERINPDVAGIDCGAAEHYVAVPADRDPQPVQSFKTFTTDLQWLADWLTACRVTSVAMEATGVYWIPIYEILEARGLQVLLVNARHLKNVPGRKSDVSDAEWIRELHSVGLLRGSFRPTDTIVALRAYLRHRQTLIESAGTYIQRMQKALVQMNLQLPLVVSDITGVTGLRILRDIVAGHRDPHHLAEHRDHRCRASKADIIAALTGHYRPEHLFVLQQNLELFDACQTQLTACDRAIEAQLQTLTAATVPPATAVPPPRVTKKPRDNEPRFEIRTPLHQVTGGIDLTQIDGITSYTALKLISEIGTDMTRWPTEKHFTSWLTLAPKNKISGGRLLSSRTQPSANRAAAILRMSVMSLNRTQTALGAFYRRLAARIGKPQAITATARKLAILVYRALKGTLVYRDPGADAYDAQQRTRMIRYLRQRAASLGFDLVNCQTGEVLAAPAS

SEQ ID NO: 422661 - protein, 482 aa, unidentified
MKSRPPEKVKKAPDHATRGHWNEMNRQQRRDMMRKIQSEDLSLEVVHPDVAGIDIGNESHYVAVPPNRDSQAVRRFGCTTVELKAMTHWLKQCRIQTIAMQSTGVYWIAVYDILEAAGLDVYLVNARDTKNLPGRKSDVQESQWLMKLHTYGLLRNSFRPSQEIRTMRTYWRQRNDLVQAAASHIQRMQKVLTQMNIQLANVLSDISGVTGQAIIKAILAGERDAHKLAALRDPRVKASEEQIARYLEGNWQEDLLFVLKQEQHGYEFCQKQMAECDRQLNHYLEQREDRSQGTRLPEEMRKGRLQKKKGNKPQFDLRAELFRMSGTDLTQIDGLDVMTATTILSEAGWDMSKWADEDHFVSWLRLCPDNRISGNKIIGKGRLPTNNRASIALRMAASTLRMSNTYLGAQFRRFRTKLGSPIAIKAMAAKLARLVYRMLRYGMNYVDQGAQFYEAQHRKLQITQLKWKATKLGFRVVEAPAA

SEQ ID NO: 422662 - protein, 464 aa, unidentified
MTDKKLWRNRKERKEWARRLQSEDPGLEIVHPHAAGIDVGNGAHYVAVRPDRDPEPVRRFECFTADLHHLADWLQSCKVKTVAMQSTGVYWIPIYEILEERGFQVYLVNARHTKNLPGRKSDVQESQWLLKLHTYGLLNNSFQPPSEIRVLRTYWRQRGEHVHGAATCIQRMQKALTQMNVQLANVISDVSGLTGQAIIRAIVSGERDPRKLAELRDPRIHATHEEVAKSLEGNWRPELLFVLQQEVEMYDIYQRRIAECDQQLQKHLASFVDIIPSPTSEVEPKRKKAKPAKNAPRFELSSELQRITGVDLTRIDGIDIMVAQTLVSEIGLDMSRWKTEAHFASWLGLCPDNRVSGDKVLGRGTRRVINRAATALRMAAVTLMRSRTYLGAQYRRLRTKLGAPKAITAMAHRLARLVYRMLKYGQGYVDKGAEYYEQRYRRQQIEFLTKRATKLGLQITVAHA

SEQ ID NO: 422663 - protein, 344 aa, unidentified
MLHLGLDLSRRRIDVCVLDDAGELVTTTSCPPDVDGLRVLAERFAGVGVRAVVESMTGARFVHDTLEAHGWWVEIADAQKVKAIAPLAAKTDQIDARVLAELSWRDLIPAIWLPDTQIRSMRELGRFRLHLVKHRTALKNRIHATMITHGRWIPLSDLFGTAGRQALAELELPQAWAQTTAVTLEVIDHLDTQIGECVQLMRPAAQQHPDTALLATLPGVGDILGFTIASEIGDVTRFPTATKLVGYTGLCPRVHQSGDTDRRGPLTKHGPRWLRWAYVEAAIWAARHPAYQPRHQRLTQRLGPHRGPKVARIDTARRLATASWWMLTKREPFTPPAPTLPLAA

SEQ ID NO: 422664 - protein, 407 aa, unidentified
MGITCGVDWAEDHHDVVVMDDLGRVLEGRRIEAGVDGYADLLALIADHDGSAADTPVALETDKNLLVLALRAAGFTVYPINPRAVARYRERHYQAGKKSDHGDASVLADILRTDRHRHRPLPATSDHALTIKALARQHQEAIWALHQTTSRLRSMLLEFYPQALKAFPKLNHKAALTILAAAPTPTAAQRLTGRRVVALLHRCGRRNDPDLVALILTELKAPALRQPPSVEEAMGLAAKTLIDVLTQMHAAVASLNDALAEQFSQHALAPVLTSAPGLGTVLAARILAEVGDDPRRFQTPASLRAFAGTAPVTRASGRSSYVKARKVRNKRLGDACHWWAFSTLTKSPGARAHYDHRRTIGDTHNAALRNLANKLLGRLWWCIQNQLPWDESAAWPMASSSSQTTAA

SEQ ID NO: 422665 - protein, 347 aa, unidentified
MSVFIGVDVSLATSAICILGEGGKIIKEAKIDSEPAAFVTFMQGLPYEIDGIGMEAGPLSQWLHKALTDAGFPIVLMETHKVKKALSAMPIKTDRRDAEGIAHLLQLGWFSAVHCKSVTAQETRAVLTGRSALKKALIAIELSMRGILRNFGLKMGQISKKGYEERVRELIDDNDALKQMALPILAARADLRKQLAVFERLARSMAMKDPGCRKLMTMPGVGPVVALTYKAAIDDPTRFRRSKDIGPWVGLTPSREESGERSVIGGISKTGDVGLRCALFQAANIMLNRGGANWLKTWALQLAEKCGNRKKAKVALARRIGVVLHRMWMDNTDFQSIREEAMALRAA

SEQ ID NO: 422666 - protein, 379 aa, unidentified
MFMQNFTHQCVGIDISKLSFTACVCKRQLAGQQSTNDVVEFENNKRGFNQFVKWSRKHTEISIPAVYAMEATGIYYESLAYHLSRLNLQVSVILPNKVKHFSKSLNIKTKTDIVDARIIGKMGVERTLELWEPPDPIFKKLRSLTRLYTDLKKEKTTFTNRLDSCKSGESPLLFIVNSNKTIIKGIELQIVKCGAEIKSLLYSEEWLASKVNKLLSIKGVGLITVGIILAETQGFKLIRNGKQLASYAGYDVVQRDSGTSIKGKTRISKKGNSRIRGALHFPSLVSSRFNPKMKSIYTRINTDKASKMVGATAIQRKILLLLYTLWKKDEIFNENYLEPATDQQPDPLLTFRNEVGRSMDLPTQDEHKVDRSTVVLLRE

SEQ ID NO: 422667 - protein, 500 aa, unidentified
MKTKGSKAKIRAGRKSISVPCSEPAQELRILRPDAAGIDCGAQEHYVAVPPDRASAGQPTVRRFSAFTEGLDAVVDWLKDCRVTTVAMESTGVYWIPLHQKLETAGIEVYLVNARHVRHVPGRKTDVQDSQWLRQLHRFGLLNASFRPEDIICRLRSLHRHRDNLVSSSASEIQHMQKALQQMNLHLHHVVSDITGLTGLRIIDAVLAGQRDPEQLVRLRDRRVYKSTPQEMQAALVGDYRGEHLFVLSQSLQAYRFYQARIEECDREMEPLLEKLAQQIEATSANLMLDALEPSGSKGESNRPEQLPEPKPTYGPKSKRKRKPRANEPKIQLAGLLERICGIDLTQVVGLNVLNVLLIVSEIGVDMSKWRSAKAFCSWLGLCPGNKISGGKLLDSRTRQVVNRVADALRLAAQSAGRTQTCLGIFYRRKQAHLGAPKATTATARKLACLIYHLLKNKQPYQEPDSASYQLRLQKSALSKLQRQAIALGYTLLPTAPVPA

SEQ ID NO: 422668 - protein, 349 aa, unidentified
MDYAQIDSTYYCGIDLHARSMYVCIMDRTGNILFHREMRNEFSLLLDALAPYRPQVVVGVESTFNWYWLADGCHQAGIPFYLGHALYMKAIHGAKKKNDRLDSKVITDLLRGNLFPLAYPYPQQMRATRDLLRRRHRYVALRAEAYTHIQNTCSQHAVLDLPATEVKKKTTRRTIPQRLPHPDLSLTVDCDLEVIDTLDALIAQLDKHIWQQAKDHDRHAREILTTTPGLGEMIALTILYEVHTIQRFPTPQCFASYARLVKVERTSDGKPVAGGQGNNKIGNPHLRWAFGEILVHAPRQSAPIRETYQRLQDKHGPAKAKSILAHKFAVAIYYMLKKGQAFDEQRFVN

SEQ ID NO: 422669 - protein, 419 aa, unidentified
MTQKEDSKIIEIVHPICCGLDVHKESISACVIFPDKVGADQYAIKEFGTFTDDLQRLRSWLLEHECFVVAMESTGIYWRPVHNVLEDVIEVILVNARDIKNVPGRKTDISDSKWLAGLLRHGLLRGSFIPSKAVREWRDLTRLRKKYVQTVGDYKKRCHKLFESANIKIDSVVSDLFGVTGRNLMNLLISDRQHLTLTDVEGCVRGKLKGKEKELYRSIQGFFTDHHRFVLKRLLKTVAMLEKEIAVFDHQIRQLMEDQKELLERMKKAAGISDVSACDILAELGTDLGGFPTGASLVSWSGLCPGNNESAGKRKSGRSPVRKHHLKTIMIEVAWAAVKKKGSYFKDKYYRLKARRGAKKAIVAIAHRILHGIYHVIKHGVEFRDLGEDYLTQRNKSQKVSYLRRQAQLMGYELVPQTT

SEQ ID NO: 422670 - protein, 413 aa, unidentified
MDILYACCAGLDVHKETVVVTVRRRLDNGKVQQRTRTYGTMTTQLLELADWLEAEGVTHLAMESTGVYWKPIWNLLEDRFTILLVNAQHIKNVPGRKTDVKDSAWIAQLLQCGLLRGSFVPPTPQRELRELTRQRRQLVHAKASVANRIQKVLEDANIKLGSVATDVLGVSGRDMLRAMIAGQDAPEALAELARGKLRAKIPALRLALCGRLTKHHRFLLELFVDELTHLEGLIARLTSRITEVLPAPFVEAIERLTAIPGIEVRAAENIVAEIGVDMEVFPSAGHLASWVGMCPGQRQSAGKQKSGRTRKGNGWLRATLVQVAWAASHSKHTYLSAQYRRLASRRGKKRALVAVGHTILVMIYQMLRKGKTYAELGGDYFDRLDSDRLTRSLVRRLERLGHEVELKPKEPAA

SEQ ID NO: 422671 - protein, 420 aa, unidentified
MKATMKTEKINREKELILACDVGKAKITCHAEYEGKWAGHVLDGGFMNRGREIQKNLESIAREARARGYERLCVICESSGGFEKRLLRTARALCNSTKYVSGEAVSKMKAVESNDNEKSDEKDPRVIHVLGMLGKVFKDRQLEPDYRKLRILGGHYEDESVAAARVRTAISSIADRLFPDLEFNSKLLYGNTGCALVKLFGLNPWKIIDAGYGSFVKKMRGMTRADKMVLDKIWKGAESSTLQIIDEWEVEIYERRLAELYAEWELHKGRKECMRKEMLEIYRQLPEAGKLSHVGKGLEFQFARILAETGNPGDFKDARQILRYAGLNIRRRASGKYEGHNKISKKGRSLLRKVLYQCVFSSLICKGGIYHDYYQRKKKELASGMKAIVAVMRKALKMIYGIAVSETEFSVERVFICNAA

SEQ ID NO: 422672 - protein, 311 aa, unidentified
MTYVGIDVSKKTLDCCVLDTDNELYLKVQNSQAGYDELMSLLVLYDDVHVCMEATGAYWQSLVEFLTANDVRLSVENPAKIHYFAKASMLRMKSDKRDALLIADYCKVMTPRLYSPVTEAVAELKLLVGMYQRLKKQKVSERVKLLEAPALVKPLISSNIEHFNNQLLETKEMLKAFFRSNADLAHKHEILQTIPGIGFSSGVVLLSILASGYTFESANQFVAYLGLNPRKMESGTALKGRERISKIGKPEYRAALYMPAVVAYSKKLYPDIVARLQSNGKTPKVIIVALMRKLAIYAYTVYKTNCAYVAK

SEQ ID NO: 422673 - protein, 379 aa, unidentified
MSTTETTRRVYRTASEICLFVAFELGEMEWKIAWATSLGEKPRLHTLRARGTQRLLEWIRKAQRQANATQITSCYEAGRDGFWLHRFLHANEIDNRIVDSASIEVNRRARRMKTDRLDAEKLLSMLLREALGEKDLWSLVNVPSVEDEDARSLQREYRTLVKERTRSVNRIRGLLASHGLVPDRIDERLPIWLAEARLWDGSPLPSGVRQRILREYERWKFTQTQVREIEQERRHRTQDLTDPSLDEVRRLHALKGIGLGAAWTYGLEFFSWRAFRNGKQVGALAGLTPTPYQSGESEHELGISRSGNRWVRGLAIDIAWGWLRHQPCSALSRWYQERFARGGPRARKIGIVALARKLLVALWRYLETGALPEGAELKS

SEQ ID NO: 422674 - protein, 390 aa, unidentified
MAKTNTKSSTQAVIVPVGEITGGVDTHLEFHVAAARDGLGRVLGTEKFPATQAGYTDLLAWLRAFGPVAVVGVEGTGSYGAGLTGYLTNQGVRVVEVNRPNRQKRRLRGKSDPQDAINAAAAVQAGDATATPKLRTGPIESLRVLRVVRDQLITARTATINALKALIITAPAALRETLHGLTVPALIRHCTTLPALDLPTPKPGSKTRSHTAATLVDHLLNATTGAEHTVHLALNELARTINYYDTRIRDLDTLLDGLVHRIAPRTTALHGLGTDTTGQLLITAGNNPDRLRTEAAFATLIGTAPQDASSGQHQHHRLSRAGDRHANAALYRITITRLASHQPTRTYMHQRHKPGTKTTKKHIIRCLKRYITREIYPHLTADLHNLPNIT

SEQ ID NO: 422675 - protein, 436 aa, unidentified
MTTRLQVGVDFSLKRADLCLLFPDGRPLDLHTSVANSVPGYAQAKRLLLEALDTYAFDGVDLSGEATGYLWLPFFLQLAADPDLEPYDLQLFLLNPRWVKWFKKCFAQDDKSDQKDPFYIAERTRTRRPEATWSPSPYLSLRFYTRLRFHLVQSLAREKCYFTTFLFLKASSYRCLEPFSNVFGVTSRRVLTEQPTLDELAALPVADLAAQLYELSGHHLPDPTSNAQKLQRVAQESFHLDEALAVPVQRILDLTLAHIRFLEAQVQQVEEWIAIEARAYPGIAQLATIPGVGPVFSSGLGAEIGPTERFLQAPKWDPQRKGYRARNLRDVEDAVAKIAGLWWPRADSGDFVAEDRRLAKTGNRYLRYYFIQAANRMRQCCPEYQTYYQRKYAESTKHHHQRALVLTARKSVGLVVGLLHRHEPYRSREAQQTPAR

SEQ ID NO: 422676 - protein, 355 aa, unidentified
MKQEKYIGMDVHQATISVAVMDSSGKLIMECILETKAATILEFIAGLCGTLSVTFEEGTSAAWLHDLLKPHVSHLVVCDPRRNALLKDGSKSDRIDARKLAELLHGNKLHAVYHGEHGVRTLKELGRSYLTITKDLTRVMSRIKALYRSWAIPCNGATVYAPRHRAEWLAKILEPGVRLRAERLYQQLDLLQPVRQEARRDLLVESHKHHAVKLLRQIPSIGPIRAALLVALLQTPHRFRTKRQLWAYSGFAVETHDSGEYRFVRGKLVRNRERITVRGLNRNHNHDLKNLFKGAALSASTRPGPLCDFYVALIEKGMRPTMARLTLARKMAAITLTIWKKGVEFDGKQLDRQAA

SEQ ID NO: 422677 - protein, 381 aa, unidentified
MGWPGRAQRPNLLDSGWEGVKQGLKEEHAMRTSQKTAGIIATIGIDIGKNTFHLVGLDQRGVIVLQQKVSRGQLERHLANIPRCLIGMEACSGSHHIGRQLAALGHDARLIPAQYVKPFLKGHKNDYRDAEAVAEAVQRPTMRFVTIKTPEQMDLLALHRVRSRLVGQRTGVINQIRGFLIERGITVRQGAAPLRRVLPDILSSNTGVLSPRMVGLIADLAQDWRRLDERIAAVSAEIEALARQDENCERLITVPGIGPIISSAVVAAIGNGAGFKQGRDFGAWLGLVPKQESTGDRTILGKISKRGNIYLRTLFVQAAHVVLGRRSSAAMRGLWPWIEQASKRLHRNLLAIALANKLARIAWAVLARGHAYQTRIVANAA

SEQ ID NO: 422678 - protein, 343 aa, unidentified
MKLSRVGIDLAKNVYQLHGVDRSGKTIWKRRLKRHQWFKALLDKTEPGCEIGMEACASAHHWGRELQSRGYTVKLIPPQFVKPYVKSNKNDARDAEAICEAMSRPNMRFVTVKNVEQQDIQATHRIRAELITQRTAKANQIRGLVAEYGLVAPKHMSSLRAAIPCWLEDAENGLTGDFRTLLHGVWNDLLGLDDRVCEMDKLIKQLAENHEECVRLQQLRGVGPMISTALIATVGDARQYRTSRQMAAAIGITPKQHSSGDRDRLLGISKRGDVYLRTLMIHGARAVVARAKYKDDRLSRWMTGIATKRHPNVAAVALANKTARMAWAMLRHETDYDPDYAIS

SEQ ID NO: 422679 - protein, 391 aa, unidentified
MSMYFIGIDISKYKHDCCIISAANQKVVSKVIIKNNKAGFNELLTIIHSLANPADIRIGFESTAHYALNLELFLENSILTFMEVNPVLISEYKKSKTLRRTKTDSVDCEAIARWLMTVEYKPHSKGFYHAYSLKSLTRLRDKLIRQRSFYLVKITNVLDHTFPEFKPFFNERLSKTALYLLENYGSAEKMARMNSASYEKLRSVSRGKFSPQQFLRLKELAVNTVGVNNSIFDVELNSLLSLYKSLVKEIDTIKKEINQLIEEVHPHYMSVPGIGPLSAAVIYSEYGDISNFTNPGQMLAFAGIEPGINESGTESHGGKMVKRGSSQLRYTLINCCLPLIRFDMTFATYYAKKRGEGKPHRVAITHVAKKLIRVIYALESQDIDFNAQELR

SEQ ID NO: 422680 - protein, 406 aa, unidentified
MAVVMIGIDPHKGSHTAVAVDQQEVVLGEIRVRSSSGQTDQLLAWAAAWPERTWAVEGAAGLGYLLSQQLVNVGEKVLDVQPKLAAKVRLLESGSTNKNDPNDARAVAVAALRGKGVAQVRREDHAEVMKVWIRRRRELQQTRNRVANRLHALLCELMPGGFAGPISPAKAERVLVKVETSGAVVAARVDLAQEMIEDLRRLDGQRRAVIKRLEQVVAASGTSTTGIVGVGPVVAAMAVSITGDIGRFKSIGHFAAYNATAPVEVSSGPQKIYRLSMRGNRQLNHAIHIAAVSQIRHTNNSGRVYYDRKLAEGKSPKMALRALKRRISDALYRAMIADARKQSAAKVEGPGGQPGNDSHSSAASSHPEHQLFGQATPGPASSLRPIKTPGASKTTSHRKTRVKKVS

SEQ ID NO: 422681 - protein, 442 aa, unidentified
MARKPSKQRFTVVHPDCAAIDVGGREHFVAVDPRHDNAVQSFTSFTDDLYKLADWLKSLAIKVVAMESTGVYWIPIYEILSERGFEVHLVNARATRQITGRKSDVLDCQWIWQLMTHGLLRGAFRPDDLTCCVRSLVRQRASKVKDQAQTLNRMQKAMSQMNIQLANVISDISGVTGMRILRAICAGERDPVQLAELTDRRIKAGKEAVARSLHGNWRREHLHALTQELAAYDFLEQQIADCDDAIKTALEQLPVLQTKPEPSNKPLRSPHRSGAQQTELHQTLWKVLGMDLTAIPTIGVDTALVLAGEIGTDLSRFPSSQHFCSWLGLAPPTRISGGHRLAGGGPKIVNRAAQALKQAASNARNDKGFIGASHRARLTRMDTSCAIKATAHQLARLVYNLLTKKQAYVEQGLEEFESRSQDRQVRALLRKARKLGYQLVAA

SEQ ID NO: 422682 - protein, 371 aa, unidentified
MTDDIIFVGLDVSKATISVGMAPGGSREAAHYYGTIEYRPAALRSLCRNLSRDGAQLHFCYEAGPFGYSLYRRLREWGHSCDVIAPSLIPKRPGERVKTDRRDALMLATLLRAGQLTPIWVPDATHEAVRTLVRLRALAARDVARSKQQILSFCLIHDRVYRLGRSRWTKTHRNWLADQKFEHGALAFAYAELLGRLERAEETLARTRIELKEQLAAWALYPLVDALQALRGFDWENATMVVAEIGDFRRFPTPGHLMSYVGLVPSENSSGDRRRQGEITKAGNSLARRVLIEAAWTHRYPARQSYRIRNRANHLPEPIRDKAWKAQVRLCRRMRDLRRSGKHRNTVLAAVARELTGHVWAVARMVEPGPA

SEQ ID NO: 422683 - protein, 354 aa, unidentified
MLIIGCDYHPSFQQIAFVDTDTGELQERRLEHREEAEKFYRELADQGGKVRVGMEASGQARWFERLLAELNIELWIGDATEIARKRERKQKTDRQDAQHILRLMLKDDFPQIWVPSGENRDLRQLLWHRHRMVQARTRIMNQLQAVALNEGVCCKKRLWREKGRQQLESFRLAPWASRRRHDLLELLDRLNPTIAALSQAIEQAVEKCPAAQRLQTHPGVGPLTALAFVLIIGKPDRFECGKQIASYLGLVPLEDSSGNRRRLGHITKQGNSLLRFLLVEAAQVTARSLPEWRSKYVHLTMRRGRKIAKVAMARKLAVRLYWMMRKDWDYQQLKKFGSHAGQPGNRDGVKQNIE

SEQ ID NO: 422684 - protein, 310 aa, unidentified
MYVGIDVSKERLDVAIRPSGERFATTRDEAGLADLVNRLQTIKPELVVLEATGGYEQIVLAALVNAGFAAVAVNPQQVRHFAKALGQRAKSDPIDAEVMAHFADAVRPAIRALPDEATRTLAELMARRRQLVEMMAAERMRRQQASVHRIAKSIDRHLLALQKELSKIEHDIDDLIRGTPAWRDKEDLLTGVSGVGPILARTIIAELPELGQLSGRQISALVGVAPYVRRSGKWTGQAHIAGGRAGVRSVLYMATITAMRCNPTIKAYYQRLRAAGKLTKVAIVACMRKLIVILNAIMRDATRQQVPENA

SEQ ID NO: 422685 - protein, 430 aa, unidentified
MGLIMPSVMHPERVEQPLPYEWFVGIDWGSQQHQVCVLDRDRRLVGERAVDHDGASLAQLAAWLWTLSAGQPQRVSVAIEVPRGAIVEGLVERGFHVFAMNPKQLDRFRDRHSVAGAKDDRRDAFVLADSVRTDRPSFRRLQLDAPQLLLLRELSRAEETLLEDFRRSANRFREQLHRFYPQMLQLCSAADEPWLWDLIDLAPTPAHAALLREEHVQRVLKAHRIRRITATEVLACLQAPALPVAPGAAEAAQAHCEFLLPCLRVLAEQLQACSQQVSALLRTLADEPGESAGPSDVAIVLSLPGVGRKMTAWLFAEAAQPLAERDYQVLRTHGGVAPVTKQSGKRRLVVMRHGCNPRLRHALYHMARVAMQRDAHFSSVYAALRAKGQRHGQALRNIGDRLLRILMAMLRHRTCYDASRIRCEPVAQMG

SEQ ID NO: 422686 - protein, 348 aa, unidentified
MKHYIGLDAHSASCTFVVVDENGNVTHRSVVKTSEATLLGFLSTLPGEKILTYEESHVSQWLYVLLNDKVDRLVVCNAVYLSKKQGPKTDYRDALHLAQELRGNFLKPVYHDESHWIQLRVLVNGYLDLVSEIVRAKNRLKAVFRSEAIDTSDYKFYSQKERISELSHEHGRFVAEKLFLQIEHLDHRKAEFKAVFQRNSKTYRQLKNLATIPGIDVIRANIIMAVVCMPHRFKNRYRFYAYCMLVRYIQISDGRIYGNKRIRARHDLKAVFMGAAESAIKVDGSLKNYYESRRKSGVDARGAKIAVARRIAATTLSILKNNGKFDELYHEAKAERTKLRKTLNEVSI

SEQ ID NO: 422687 - protein, 344 aa, unidentified
MIAVGIDVSKSKSTVAILNGDGSIRAKPFDVHHVADELQALVDYIKRTSEPPTILMEPTSHYHYPLLKAFTEAELPVCLINPYQMKKYGDTELRKAKTDKRDSLRIAQYALEKSYSLIPYTPQDQKYEDLRFLSRQYSQRISTLTVAKVQLLSLLDETMPGITTILPLKSRDPDNCVLLRFIKRFKSFDVIRKMGKTRFLDSYQVLVKKTKDRFAGSKGLAIYELVLNSVTTRGENPLSAMTQDQCVDLVSTSQKAADEINLQMRIIAETMPEYKVLRSMAGVGDRLGPIILGEIGDIRRFHSGKALNAYAGMMLRHISPDNSRAGIVTSPNVATRLSEKLVLR

SEQ ID NO: 422688 - protein, 372 aa, unidentified
MNYNTVYVGMDVHKESFTLCSCKYEDEKASHYQRTPASYKNVLRYLAFLRTIYGEDTRFVCGYEAGCLGYSLYHQLENFNVECVILAPTTMLEQRSKRRIKTDKRDAEIIARSLAQHNYSPVHIPTETDNQTKEFIRMRDDHKAELKKIKQQILSFCLRQGYQYDGSGNWTAKHVKWLRSLKPAGLYKEILDEYLLTYTILTDKLNRLDQRIEELASKEEYKESVSKLTCFLGIRTHTALSVIVEVGDFQRFASARKFAGYLGLVPGQHSSGDDRNGLGITKAGNTHVRRLLVESAQSYTRGKIGYKSRVLRSRQAGNSPQVINYADRANERLRRRYYKMVLKDGKKYNIAKTAIARELACFIWGMMTDNIY

SEQ ID NO: 422689 - protein, 417 aa, unidentified
MKKHSNSVKKSESPMKRRSSRAEERRDSSEVMAELVSQLRQQLAVKSVPTAESAGDEGDPVRPNLDRLTVGVDLGDQWSNYCILGLGGETLREGQFRTRRQEVGEFFQDLAISRVVIEVGTHSAWVREVIAGFGHEVLVANARRMEGSRRHRRKNDRIDAIKLARLGRVDPKLLYPIQHRSTEIREDLLVVRVRDSLVESRTKLISTVRGMVKTMGARVAGCSSVSFSGKAADQIPPEVRETLQPLLRLIQTLSEEIKSYEKRIEKLGSEKYMDTKLLRQVNGVGPVTSLAYVLTLETPQRFKRSRDVGPYLGLVPQQEDSGDSQPQLSISKAGDRMLRRLLVGSAHYILGPFGPDTDLRRFGMKLCQRGGKNAKKRAAVAVARKLAVLLHRLWWSGEVYEPLGYGIKKTITEPAAA

SEQ ID NO: 422690 - protein, 373 aa, unidentified
MFHFFTPSVMTSFLRYCVGLDISKDTLQVCYSVIDSAGRVTVKATTKVVNKPTGFAALLNWVARHRKLELPLTYLMESTGVYHEAVAWYLHQHDQQVSILLPNKAKHYLKSLGYKSKNDKIDAQGLSRMGLEQHLPLWTPLSKNLYALRLLTRQHQRLQELKTQSTNQQHALQHSAFDSTFIDKQLTKLVAVYDAQIEALETAIKDLIEADPVLKPRVERLVVIKGLALLSVAVLVAETNGFAGFSNQRHLVSYAGYDVVENQSGNHSGKTRISKKGNSRLRRILHMPAFNAVRFNEPTCKALYDRVFERSGIKMKAYVAVQKRLLLMAYALWRHEVDYDPEYFANQASKGKKIVPTGGTTQDQLAVAELSYL

SEQ ID NO: 422691 - protein, 345 aa, unidentified
MNHVAIDLGSKESQVCVRLPNGDIELEKKHPTRRLPELLRNLTHSRVILETSSEAFRIADAAIAAGHEVRVVPSTLSKQLGVGERGVKTDLRDARALSEVSRRIDLPSVHIPSEAARFARSVLCSRQIMVESRTKLINHVRGWMRTQIWKLRGRGTATLPKRLRDQATEDSTRALPEHIEAVLTTIETLTAQMRRSDQQIKQLARSNTVCVRLMTMPGIGPVTSLAYFAALDDHKRFAHAYRVASYLGITPGEDSSSDRQRRTGITKAGPSWVRRTLVQAAWTALRTRPNDPMVRWALKIAERRPLPVAVVALARKMSGIMFALWRDGSTYTPEKGAQMMEQPTS

SEQ ID NO: 422692 - protein, 356 aa, unidentified
MAMLAELVDGVIGVDTHRDTLTAAAVTNLGGVLAQTTTSADAAGYQQLLDFADRHVVGRRLWAVEGAGSFGAGLTVALQQCGERVVEVGRPKRPASRSGAKSDALDAVRAAREALGQVRPAIPRRRGEREALRALLSTRRSATTARVAAIGQLKALIVGAPEELRAELRGRNTTSQIQHCASLRTRPTRSLEHQATVRALRATAQRIQFLAAEADQLQAELTVLVQAAAPWLLEVPGVGPLSAAQVLVSWSHAGRLRSEAAFAALAGTNPIPASSGQVIRYRLNRGGDRQLNRALHTILLVRLRTDPDTRAYMARRTAEGKSRRDAKRCLRRVIARQLFRLLERYDRPGVEILRAA

SEQ ID NO: 422693 - protein, 437 aa, unidentified
MGNLYRDGHLYTKDIIRVYDHDFPYLADGVVIPYTIYDIMKRFIGLDIHKEYFVAVGVNLQCETIFGPQKVSNYRLDEWISRYLSMEDAVVLEMTTNTYLFHDSLLPFVHSVIAVHPPNVALVTNAQVKTDKKAALALAQLHAAGMLTGVWIPPHNIRDLRSLIAQREKMVRLSTIAKNRLHALLHRKHLIIPDKPFAPEQQAWWEGLPLSKTEQFLVHSDLDTLEFAQKQLEQIEACLKQQSAQDERIPFLIQLPGVAMLTAITILAAIGDITRFPDAKKLVGYAGLGTRVHDSGMTHTGGRITKTGRRDLRRAMVNAANHAIENHPHWKKEFERMEPHLGRSKAIVAIARKLLVAVWHVLNEQKVDRFAEPGNVACSFFRFAYKVGVKNLPEGQSALAFTRTQLDRLGIGVDLQEVPWGRTHHKLPPSKLLLEQK

SEQ ID NO: 422694 - protein, 454 aa, unidentified
MRKPQVIPDEDHEVVYERVAAVDVAKASGVVCMRTPDPARPGRYVNQIWDNVPATRARITELGLELIRCQAQMVTLESTSDYWRIWYYVLESTGLAVQLVSASQAKNLKGRPKTDKLDAMWLARLTQRGMLRPSFVPPAAIRAVRDFTRARTDLVHERTRCLQRLEKLLEDAMVKITSVARDGMKAKSVVAMVAALIAGERDPRKLAELARGRLRAKRDALAEALDGMFDSHHGVIAQALLDQVAFLDQRIAQMEAGAIEALAQVKESWGVDATGDTGPQAGTSPDSPVLAAAYRLAEIPGISVWLAIVIIAEIGLNMAAFPTPAHLVSWIGLCRSAAQSGTRHGKGKQKKGNSYARAAAGQAALGAAGTATFLGERYARIARRRGGAIAQVAVARSIMIIVWHLLSDPGARYRDLGPDWHATHVNRDKKIRNHIRGLQALGLTITITADEQAA

SEQ ID NO: 422695 - protein, 400 aa, unidentified
MRVVFGIDVSKASSEVAILVNGEKVHGYTISNDAIGFARLLGDLRTVHKPEIIFEATGVYSRRLQTFLDDNGYAYTRLNPLEAKKQLDSLRVRKTDQIDAEKLAQSQFVLNRKPTYVQEEVYQNLRDLSRFYQNLTEDIVRAKNRLHKVLQVTFPELENILSTPSGEQYWNLVIAFPCKDCVLELSNDELSKSIRLSTSKRISDKRVAYLAEKLIALANQSYCAVKKTSPILEEVRYYTKELLRLSEQRQAVLDEMVELAQPLPEYDILLSIPGIAETTATSIIGELGDIRRFQSANQINAFIGIDLRHYESGNFLAKEHITKRGNPYARKILFKCIHNIASANHTNPCHIADFYEKRKRQSQTTSTKLHTIASIHRLIRTMYYLIMHNKLYDYASTQNR

SEQ ID NO: 422696 - protein, 343 aa, unidentified
MKISRVGVDLAKNVFQVHGVDASGQRVWKRQLKRSNWLQVLVEKLDTDCEIGMEACGGAHHWARELKARGYAVRLIPPQFVKPYVKSQKNDANDAEAICEAMSRPTMRYVPVKTLEQQDIQAMHRVRSSLIGQRTATANQIRGLVAEYGLVAPKQLGPLRQAIPCWLEEAENGLTDRFRRVLHGLWDDLLSVDEQIKRFDHEIKVIANQHPVTKRLMRLRGVGPLIATALVARFGDGAHFQRGRQAAASVGLTPRHYGTGGKNRLMGITKQGDSYLRSILIHGARAAVSRAEGKEDRLSRWVTELKQRSHMNVAAVALANKTVRMAWSMLRHGTDYEPEFVMR

SEQ ID NO: 422697 - protein, 356 aa, unidentified
MEKIGNVEDLPSVEEVILGVDTHLDLHVAVALDQLGRRLGQITVPTSTRGYARLLRWAEGFGTVGCVGIEGASSYGVGLVRYLQCAEIPVVEVERPKRRHLRRNGKSDPIDAEAAARAVLAGEAAGEPKSADGQVGMIRTLRSARQSAVKARSQAANQLQALLVTAPEELRHTLRKLPTKALVSTCARFRPVKEPDDVRTATKIALRSVARRHEALSEEIAELDERLDRLVARTSPGLISLPAISTHHAAALLCVAGDNPRRLGSEASFASLCGVSPIEASSGKVVRHRLNRGGNRDANRALHMICVVRMGSDRRTQQYVARRTAEGKSKREIMRCLKRYTAREVYRVLVQPTATS

SEQ ID NO: 422698 - protein, 338 aa, unidentified
MFIIGIDPHKGSHHAAVLNGNEVVIDELRVQADRTQRDRLLAFAEGFEPHTWAVEGANGTGALLAQQLVAVGEVVLDIPPKLSARVRLLDTECADKSDSHDARSAAIVALRHPRLRVVGPEDHTAVLRLLAKRHHDLIALRTQAICRLHALLCALVAGGLPPRLSAARAARELRRIRPTDAAGTQRRQIAVQLLGEVRRLDAELFALKTRIGDAVTAADTTVTDLHGVGAIVAAYLIGYTGNIARFPSAGHYARYNATAPIEASSGPRPRHRLNPKGNRMLNHAVHMAAVTQIANDTDGRAYYLRKQREGKTKKEAMRALKRRISDAVYRQLVSDADR

SEQ ID NO: 422699 - protein, 428 aa, unidentified
MTVRDYTSAKDFLQFKKEIRGSRAHLIVGIDIAKDDHHAFFGTASGKTLLRRFTFKNDIEGFRNLLERTKLVGQKHGLSEVVLGMEPTANYHKPLGDYLIGCGHRVVLVSGVAVKKNRELLDGRWDKNDTKDSANVADLISQGKCLFYDYTPVLIRELRNLLSLKRRLKKQEHGLRIRIRNNLLALYFPEIDRYYSKWETEILSVVRWCLDPSVIAGLEYDQFVDVVYPGNKTVRRQGRLEWIWKKAVDSIGCTAGEAAEFEAEVLVEELRHIREVIKETDAKIKDVCKRCPEYDYLLTIPGFGPDVSSKVLAAIGDPFRFNSASQVLKMAGMDLNAERSGKGSNTAVPIISKKGSGHLRYALYQAAFIASCRPKLFKKYYTNILTGREKEKGIKTKMRVKLAAKLLVIAWTLMKKREPFDPEHIPIG

SEQ ID NO: 422700 - protein, 351 aa, unidentified
MHYVAVDYHKQYSYLVVKDREGRVERRGAVNNRREEFKQFLEGCRPGKAVLEATRNWGLIYDWLEEILDDVALAHPLKVRAIAEARIKTDKISADILCDLLRSNLLPEAYVPNKETREAKNVLRQRMFFVRVQTMVKNRIYDILDRHPEIVSQAPDVSDLFGASGMEWLRRAVLPGQDNQLLASELELLEVLKRKISESNGTVKELARGDRRVKLLRSIPGLGPFFSVLVAKEIDDVTRFRDEKKLSAYAGLVPSTYASGGKVFHGKITKLGNKWLRWALIEAVPPATRSDPDLFAYYQRLKVRKGANAAAVATARRLLTIVYRVLSQERLYEKRSRRTMKHPTPAALVTS

SEQ ID NO: 422701 - protein, 424 aa, unidentified
MSSDLEIVAFIGLDWADQQHVIRLRVAGSTAIEAQLLDQKPETLQAWIGDLRQRFGGRPVAIALEQSRGSLLYALMNVDFLLLYPVNPQNLAQFRKAFYPSGAKDDPQDALLLLEMLEKHRDRLRVWVPDDASTRCLRLLAENRRKLVNRRTALTNQLTSLLKESFPQGLDWAGPLDSLQACDFLEHWPSLQLLQKTSTSRLRKFYRDHTRLDSEALHQRLDQIRQAQPLTRDSAVLAAAELMIPALVRQLRCLIESIQQFDQQLKDRFQQHDDYTLFHSFPGAGPALGPRLLSAFGSNRDRFECAAEVQTLSGIAPVTERSGKSHRVHWRMACPKFLRQSFHEFAAQSILVSPWARAFYDQLRSHGTSHQAAVRTLAFKWIRILFRCWKNRTPYDEQIYLASLRRHGSPLCAALSSQTTGANL

SEQ ID NO: 422702 - protein, 425 aa, unidentified
MNDNINQKINQVTEDTLVIGIDIAKRKHYACAVDDRGRVLRKAFPLAQSLEGFACFYQELLTLQNKHDKSHMLVGFEPTGHYWMNLAAYLTAHDIPYVMVNPMHVKKSKELDDNLQTKNDAKDAMVIAKLIRDGRFSFPRILEGVEADLRNGANMRAILQQEIIRVKNRMIKWLDSYFPEFQLIFKDFGKNALAILNKTPFPADIRSKSFEELLLLYKEDTDLKYVSSTKVKQIKQAAEATIALSTGLDTARTVIEMLLAQYKLYTHQYEMLAEKLEQIVQDLPEYAFILSIPGVGPNTAIEIISEVGSFSNYNNPRQIIKLAGLTLRENSSGEQKGQKKISKRGRRRLRASLFRAALPMIRYNSAFKALYTYYIERPVNPLKKKEAMVVLCGKLLKIIHGLCKNKQYFDANQMMKDIPVLQATA

SEQ ID NO: 422703 - protein, 342 aa, unidentified
MKFYCGIDLSARDCHVCVIDQHLKVIVQQKLRNELPKIVQLLAPYKANLKIVVESTFNWYWLIDGLQAEGFEVVLAHTLGLYLITGAKVKTDRRDAYALAKLLLVGAIPAAYIYPVETRPVRDLLRRRLHLVQVRAGEYGSLRRLLLRQGILSSKQQEIKTATEIELEQWFEHPLVRLHASQELRRIELYSEQIAELEKTILELAQTERSYELLQQLPGVGQTIALTILYEVGELTRFANVKVFSSYCRVVPGIAQSGNVTGRGRASKQGNHYLKAAFSQAAVHAVRCYPKVRRYYERQLKRHQGRGRQMICYNIIAHKLAQAAFHILKEQTEYREELLFGR

SEQ ID NO: 422704 - protein, 343 aa, unidentified
MNTKYSVGIDVAKDKFDACLAVIDVNQAVTIKATKSFTLKKDYKPLLEWVKRHQKEILPLCFTMEATGNYFEKLASFLFENGCFVSVVLPNKAKKYLQSLGIKSKTDKIDAKGLAQMGAEQRLRPWQPFSRNIYKLRALTRQNESLNKQKTAISNQLHSQKYSMYEINEVMKQLKTMIRLIDKQLKQTESMIRELINQDLVLKSKAENLLTIPGVGLLTVATIIAETNGFYLIENVGQLISYSGYDVVENQSGKRVGRTRISKKGNSHIRRILYMPALNVVRLRVGALKVFYDKVYDRNKIKMKSYVGVQKKILILLYTLWRTNKPFIPGYYQESNKKEVVPA

SEQ ID NO: 422705 - protein, 358 aa, unidentified
MSKIKSNKLDFTGQPIYVGLDVHKKSWSVSISTQYGQYKSFSQPPEVDKLVHYLRHHFPGAQYWSAYEAGYCGFWIHDRLKENGVGCLVVNPADVPTKNKERKTKRDRIDCRKLSRSLRNGDLEGIYVPPRWKVEDRSLIRTRLSMGRKQTRCKNQIKSMLLFYGVVIPEEKEMGHWSRRFIRWIEGIRMERASGDIALQIHLEELSHLRQIIAKLNRAILALSRTEEYRSWVLLLRTVPGISTLTAMILLTELGEITRFPSIDELTSYVGLIPDTEASGEKEHVGGITQRSHSQLRWMLIEASWKAVQKDPALMMAFDQYCKRMRKTKAIVKIARKLLNRIRYVLKNRSEYVPAVLE

SEQ ID NO: 422706 - protein, 451 aa, unidentified
MSKASRLSRGDKRRNDRLSKFRGIVRRDYAVAAIDLASKKQVVAVVDHDSRIVARRTFHCAPPQLATAIEWSRTAATAAGFAGIVIACEPTGHRWKTVRDLTAAVGVQMVCVQPIAVARARETEDFTHDKSDDKDALLIARLTTQLHIYLPEHADEQWTRLRHLGVRRSQQLTRRGAAQQQARDLLEGAWPHALDCAGQPFKSVTWLAAMAVIGCTPETLTAQGSREQAVAWLREHVRAELPCWGGRRVTTRILVAIVDAAFAVQTETTITAEAGALERARYALADFHHARTACEQVEAAMIEVLTGLGLHELAGSIPGVSAVSVAAILAETGDLTRFDSARAVVKHAGLCPRENSSGAYRGATRISGRGRPLLRVAAWRAAFAALTHNEVYAARYRHLTSREANRLNPNQARVAIAAALLRQLYVVITTATPWNPDIAAGRTRPVERTAA

SEQ ID NO: 422707 - protein, 599 aa, unidentified
MEGDHRKVLGAVVAYAPMMGIGGYLAVPPTGSPEAVARPRFPQNVACRFPALRSSEDDSQHCANQPARLAHLDDGNDRAILVQGHEGPAQIVRLGHRGTPSIDVSDEIAILVPLARAWLACRKLARRADPPGATVAILCLKHLGETCAPADWPRRMPCRKLRPRAPVQGAAGVVTARALFVKGINMAEEETISWFAGVDWGSERHQVCLLDARGTIAGECEFPHSGEGLAELGDWLVSMAGDASTVAVAIEVPHGPVVDALIDRGFVVYAINPKQLDRLRDRFSVAGAKDDRRDAYVQADGLRTDRRLFRPLQVADPRLIELRAWSRLAEELRRERVRLSNRIRHELWRYYPQMLKLTDDLAATWFLELWARAPTPAKAGRLRKSTVKRLLKQHRIRRTDAETVLCILQEPAIKVAEGVAEAASIHLRSLLARLRIVNRELHEAERKLDQLCTTVSEIEQTSGESLQRRDVAILRSMPGIGRINLGTLLSEASGPLSRRDYDALRTLSGAAPVTKRSGKSLIVVRRYAAHVRLRDTVYHWARVATQRDPKCRARYSAMRKRGHSHGRALRGVADRLLALACVLLQRQTLFDPYFGRPAA

SEQ ID NO: 422708 - protein, 391 aa, unidentified
MSMYFAGIDISKYKHDCCIIAAADQSVVAKFTFKNNKEGFDQLLTTINSLSSPEDIRIGFESTSHYALNLELFLENASLTFMEVNPVLISEYKKSTTLRRTKTDSVDCESIARWLMTVEYKPHSKGFYHAYSLKSLTRLRDRLVRQRSLYLVKLTNVLDHTFPEFKPFFNERFSKTALYLLENYGSAENMSAMNETDYNEIRRISHGKFSPQQFLELKRLATDTVGINNSIFDVELESLLSLYKSLAKEINTLESEIIRLINEVHPHFMTIPGIGPISAAVIYAEYGDISNFSSPAQMLAFAGIEPSVNDSGTESHGGKMVKHGSSPLRYVLLNCCLPLIRFDMTFATYYAKKRHEGKPHRVAITHVAKKLLRVIFALEKQNIDFNSQKLR

SEQ ID NO: 422709 - protein, 389 aa, unidentified
MILVGIDISKYKHDCFILTDFGDVLNEGFSFANNAEGFGQLAKELAQCKNGDEIRIGFEATGNYGINLKLFLEKHGYTYMQINPMLIKKYISSNTLRRTKTDKLDARAIAYYINEKDYRANSTSFYPKFALKQLTRLRSSLVTGRSRYLIQLTNVLDCIFPEFKPLFGNRFSVTALYILANYPSPEAIANMNSRSYEILRRKSRGKFGMDKFVKLKSLAKNTVGVFDECYRIELETILELYSQIDAKINELETQITEIIETLSPPTLSIKGVGAMSAAVIVSEFGDFSRFENPGKMLSFAGLEPGYFQSGTTEHNGRMVKHGSSPLRCSLINCSRAVTLHNEVFAAYFRKKMDEGKPYNVAISHVAKKLVRLIFTLETRGEMYNADNLR

SEQ ID NO: 422710 - protein, 415 aa, unidentified
MVMDVMHPRCAGIDISKKDAKVCVRIQGSNGARTSSTVTTWGSMINQILALREHLVEQQVTCVVMEATSDYWRPFYYLLEEQLGVMLVNARDVKNVPGRKTDVSDAAWLADLGAHGLVRASFVPPEPIRQLRALTRARTAITRERSREIQRLEKLLEDAGIKLSSVATDITGVSGRLMLAALIEGVQDPASMAQLAKGRMRPKIALLSEALTGHFSEHHAFMAQLFIDRIDAHTADIELLSKRIETLMEPFSSARELLISIPGFSTDVAEIFIAETGADMAQFPTAEQLASWAGTSPGSNESAGRIKSTKTRPGNRYLKGALGVAALSQARAKGTYYSAKYRRIAGRRGPMKALVAIEHSMLTAAWNMLTNGEFYRDPGPDYYTRRQPAKTKARAVAQLESLGYHVDLEPLQETG

SEQ ID NO: 422711 - protein, 367 aa, unidentified
MQNTIVHYEGAASLEAAATKVKPSGARIKIGLDVHARLYVAVAQYDHLLPKAAQRFSPGEFVPWVQALLARGHSVHVVYEACGFGFSLYRQLIAAGAHCYVIAPCKLDEERSRVKTDPRDATTLCQRLSRYLEGNTRELALIRVPSEEEERARHVSRQRGQLVHHRQKLEAQGRSLLINHALPAPAHWWKEQTWTRLGQHLPAWIRTRLQTARPALLSLQEQIDALTSELEASAPSILPRGVGKLTSVVLTREICDWHRFNNRRAISSYTGLCPGERSSGSKRVPGSVTKRGNPRVRAALVECAWRMVRFQPQYPPVQKRLAILSKGSRALGAARKKAIVAVARRLAVDLWRLHTGRCTAEQLGFTI

SEQ ID NO: 422712 - protein, 359 aa, unidentified
MDGSRSEPKMTAGLDIGDKYSYLCLIDTESGEVVEEGRLRTNPKAFRRRFASEQPMRIAIEAGTHSPWVSRLLEECGHEVLVANARKLRLIYANKRKTDEMDAENLARLARVDPKLLYPLKHRGQECQAHMAIVRSREALVGTRTQLVNHVRGTVKSFGGRLPKCPARSFHKRASEHIPEALLAALGPILEQIGSLTERIRQYDRQLEAISKEHYPETDLLRRVEGIGPLTALTFVLTLENPHRFEKSRSVGAYLGLVPATDRSGDSDPQKRISKEGDQMLRKLLVSSAHYILGPFGSDSDLRRHGEKIASRGGKNSKKRAAVAVARKLSVLLHRLWVTGEIYDPLYNTRRRAQQGEAA

SEQ ID NO: 422713 - protein, 363 aa, unidentified
MSIVGGLDIHRKQITFDYVDTETGEVRRGQICPADREHLAKWLARFAGQDAHFALEGCTGWRYVAEEIIAAGLTPHLADPAETAHLRGPKRRAKTDRADARHQRVLLEQGRLPECWIPPPRVLECRALLETYLDLREQRTGWVQRIHAVLFHHGAPHIARQRLGTAEGAAALHAAAAQCSPAGQLQLAIAAQMLSVYDERLHQVRRQLLDQARHLRGAAELTARLYGVGPVTGLALTCWLGGAGRFSSSRKAVRFAGLDVTVYSSDGKGPPGRLSRQGPPVLRFSSALAVSGCIGVAFHRRSRRAGGAVVVPPLRLLSDARAGYGCGARHMDGLGSRCLAGERRRGGSPSVARTGMPARAVGG

SEQ ID NO: 422714 - protein, 308 aa, unidentified
MLCVGIDVSKDRLDVHVWPHATAFVVARDGKGLADLVERLRPLAPDLVAVEATGGFETVVAAALAGAGLPLVVVNPAQVRHFAQAISQRAKTDPIDAAMIARFVEATRPALRPLADDAARLLSDLVARRRQIIEMIVAERNRERRTTVRRIKKSIARLVAALEKELAEIDLEIDAGVRGSPAWRDKEDLLASVPGVGPVVARTLIAELPELGTLDNKKIASLAGLAPYTRQSGQWKGKSMIGGGRKSVRSALFLAALVASRHNAVLKAFRDRLVQAGKPKMVAAIAVARKLLTTLNAILRDQKPWQPA

SEQ ID NO: 422715 - protein, 388 aa, unidentified
MIYVGIDIAKTNHYASIVNYSTGEVIESPFLVTNNKQGFNLLYSKIKDFDKDKVLIGLESTAHYGNNLIFYFHEKQFKLGIINPIQTATLRKTRIRKVKNDKIDSMLICEALSLGYYNLLSDYDIELLEIKSLCRFRKELKDKAAEAKIQLASYVDQVFPELNFFFKNNLDIKTAHELLKLYQSPKDISKINLTKLSNLLINSSRGKYDKSRAVELKNLASNSVGINNNALCIQIKMTIELIELLESQIKDIEKQVSDFIKKSDNVITSIPGIADMTAAIIISEIGDINRFNNPGQVLAFAGLDPSVKQSGTFNASATRMSKRGSSILRYALILAANNVQLNTKTFNDYYNTKRAQGKLHYNALGHCAGKLVRTIFYMLKNNVTFNLD

SEQ ID NO: 422716 - protein, 449 aa, unidentified
MSDRSGVSRGDRNRNARLARLREAVPLSNAIAGIDLADSKQMVVVTDHESRVLARRTFRRRAWELGVALDWAAARAAAAGFAGVTVAVEPTGHRWRVVGQLAGERRMPFVCVQPLMSAWARRAEDLTFDKTDDKDAVLIARLAGQLRCYLPEPADAIWGRLRHLGIRRARLVADQVAQVQQMRDLLECVWPAVLDAARQPFKSTTWHAALTVALARADGGDLGRVTRLGRRRFDAAVRRQVARWDAVHPWQKIINAVLAACADPAGVTEMRHGALERVLLLLADWRDTRARLADTEQRMVAVLGELGLTELVTSITGLSAVGAASILAETGDPARFTSGRALVKHAGLAPRQKSSGNYTGRTRTTGQGRPALRLAAWRAVWGALKSNPVYAARFAYLTSREHNPLSTGQAHAAIAAALLRHLHAVITTGQRWDPAIAAGGKPNQTLIAA

SEQ ID NO: 422717 - protein, 413 aa, unidentified
MEQVLERCAALDVHKAQVTAWVRVPDGRGGREDLRARYPTMAADLLALRDWLKELGVTHVAMESSGVYWKPVYYVLEDDFELLLVNAQHVKNLPGRKTDMKDAEWLCQLLECGLLRGSFVPPREIRELRDLTRYRKSLIAERQRQANRLHKVLEDAGVKLACVATDVLGVSGRAMLEALIAGTRDPEVLAELARGKLRKKIPQLQQALAGRFSGHHALLVSHILAHLDFLEEQIASLTGEIEERLAPFAQKAERLDEIPGVGLVTAQAIIAELGLDMSRFASHRHAASWVKICPGNHESAGKRRSGRTGKGNQHLRAALVEAAQAAARTNNTYLRAQYEQIKRRHGHNKAIVAVAHSILVAAYYILRDDVAYHDLGGDYYARRSDPERMARRLVAQLERLGHKVTLEALPQAA

SEQ ID NO: 422718 - protein, 353 aa, unidentified
MPMKTNTPLNSETQDRIQQLKLGVDWHADHFRVVRMCDGQSPQPAQRFTPASFLLFVQKQLTLADQLFVVYEAGPGGFHLHRQLSALGVTAFVVHPHKLDPNHKGVVTDKTDARELALNLDRYLRGNQRAMSIVRVPTEAEEQRRALSRQREQLRRERQRLAAQGRSLCLTQGIRLRGEWWSQTLTLPEWLIPRLNVWRQLITAVEEQLEALTQQVEALAPKARPKGLGPLTLGMLIAELCDWSRFKNRKQIGSYTGLCGGVSSSGQSHCDLSITKAGNARVRWSLIELAWRMVLYQPQSKAVQRWKHVLLNPKAAARQKKRALVALARQLAVDLWRWQTGKVTPEQLGWVMV

SEQ ID NO: 422719 - protein, 339 aa, unidentified
MRKLCIGIDVAKSKFDVMYTIDGENYFGYSTFPNDKKGIKKFVKQAEKFLKQEKCEQIHFCMEATGIYHCELCEYLQNSAHKVSVVNPVRTKSFSKSLQLRTKNDKVDSQMIAHYTFLYNPTQTPKVPKELQHFRRLVKFKETLVEDRAKELMRIKSALDSDVKQLINKRINFLEKQIKETMYKIETIVKDNEFLSRNFNLLITVDGINFNVAWRILAELNYETINDITPKSLVAHAGLSPRENSSGDKYGKVTISKIGKSDLRKIMYMPALSCIRHDNYFTDFYLHLVEKGKAKKVAITAVMRKMILTAMGVLRNQEPFDPNWAKKVQAKYQENLKIA

SEQ ID NO: 422720 - protein, 321 aa, unidentified
MTYVGIDVSKATFVVAYSSVKTDRTKTFKNTVKGVHEFIQTISAADHHCVLEATGNYSALLVYLLSEAGITVSLENPLKIKNFARAMLSVTKTDEIDARLIALYGERMQPVPYKLRSDSILILKQKRTVLRQLKKQLIATRNLKGSMEALPHFDPECRKTIEKTIVFLEKQIKAMEEKLASLAQGEYKKQMDLLTSIKGIGVTLAAALIVATGGFTYFDNAKQLTRYLGLSPTYQQSGTSVNVKGHINQNGDSNLRSQLYVAAFSSLRCNAECKACFDRLRSNGKPGKVAVVAVANKLIRQAFAVVTQGKPYVDGFKSEKP

SEQ ID NO: 422721 - protein, 425 aa, unidentified
MKNTQNQKISQIKFETLVVGIDIGKETHYARAFDYRGMELARLLKFSNTDQGFERLGQWMRDICKQQEKTGIIVGFEPTGHYWFTLGDHLKRQGHKLAIVNPFHVKRTKELDDNSPTKNDRKDPKTIAMLVKDGRYREVYIPDDIYQELREAVSERERLQEQLTSIYNRVVRWLDIRFPEFTTVFKDWRRNASLITLRSFPTPEKVMEMGVDKIVETWRKQMKRASLKRAERLVKVASRSVGRTSGKVASEVSLQNLLAEYDLYCQQYDKLEQLMQELLMQVPNADKLLDIKGVGLITAATFVGEVGDISRFQDPRQIQKLAGLNLVENSSGKHKGRTTISRRGRRRLRHSLFFSMIAILGKNQEFRLLHQRNLMRENNPLNKMQSIIALCGKLIRVFYAILTKGVDYSPEKMLGDMEQSIRVAA

SEQ ID NO: 422722 - protein, 335 aa, unidentified
MSVKYVTEVGVDVAKHQLCVCFNNKVKSYPNTVIGIKALFAVIAKLEGSVRVTCEATGAYQDLLVRSCLEKGIPISQCDASQIKHYIKSFGQRAKTDPIDARFIADFASERSPKILGKEWIIQLDMREQKRRLDFLIKQCAQCKTSLETYQNSSIKAEIRREIKAKEKVIAKYDLKLNELVDSDTLFQRKRKVMETVTGIGERTSLALVLLLPELGTINRKKIASLAGLAPMHKKSGNLDGARTVKGGGRPAVRTSLYMASVSAIRYNPHIKAFATGLKERGKKGRSRVMAVARKLLIYLNGLIKKELENHSHNDTESHPEFKSPNNNEIKLASV

SEQ ID NO: 422723 - protein, 403 aa, unidentified
MVFLGIDWAEAHHDVCLLDEQGKVLGKRRVVDGLEGVRRLHELVAEHAEKPEQVVVGIEIDRGLLVHALVAAGYQLYAINPLAVSRYRERHGTSGAKSDPADAKLLADLVRTDRHNHRPLAGDSELAEAIKVLARTHQNLVWSRQRQVNQLRSLLREFYPAALEAFGTDLAAADAIAILERAPTPYQGRSISQAKITSALRKAGRERNLESKAAEIQTGLRAPQLEAPALLAQAYGRSVASTIRLLRQMNQELAALEQELAASFELHPDTEIYLSLPGLGKVLGARVMAEFGDDRTRFKNPKARKNFAGTAPITKSSGRRKTVLRRLACNHRLVDACYLWVFASLRRSPGARHYYEQLRNRGQTHPQALRALANRFVGILHGCLDHRQLYREELAWPPLQAAA

SEQ ID NO: 422724 - protein, 419 aa, unidentified
MEAESIDYAAWIGLDWGSQEHAICLKPADSETVEHYTLEQKPQALHGWFMNLIARFGGRKVAIAIEQTRGAVIHFLLCLACVHIFTIHPKSLKNYRDAIHPSGAKDDPTDAELLLQFLTLHQHRLKPWLPDKSEVRLLVRLVEFRRKMVGKRVRLTNELTQVLKEYFPAALDCAGDLDKVMACDFLANWPTLEKLQESQPEIIRKFYQEHGSRRRNVIEGRLKQIRSALPLTTDAPVIEPSVFLVQSIAPQLRSVINAIARFDGRINEVFEKHPDAQIFSSFPGAGSALAPRLLAAMGSDRSRFSSSLEVAEYSGIAPVTERSGKSKWVHRRFACAHFVKQSFHEFAAQSILFCDWARCYYDKKKRDGKTHHSAIRALAYRWIRIIYRCWKDQIPYDEGKYVKALQQRRPDWLQSAPLK

SEQ ID NO: 422725 - protein, 400 aa, unidentified
MLSIGIDVSKGKSTVCGMKPGGEIVYAPFEVQHTREGMSELVSLLRSSGEEVRAVLESTGSYHCPVVAALLENGIFVSVVNSLRMKRFCSQSIRKVKTDRIDAMQIALYGLAYWQELQPARLPEDTYRELQLLARQYYQMTSMLIKAKVDFNALCDQVLPGMQELMSDHAGRHKLSDFVLQYCHTTHILEMGETRFRKDYCKWAEKKGYRNCERMAALIFATAQNGIPVLPNAPSTQIVITEAIRVLHTVEASRDAILTQMQALAKTLPEYSLVREMPCIGDTLAPRLIAEIGDVRRFHSKRALIAYAGIDAPPYQSGKFCANNRHISKRGNRYLRKTGYEVMQSYVMHKPANDPIFTFIEKKRGEGKSGKLAMVAGLNKFLRVYYGKVTELYRSLPAIE

SEQ ID NO: 422726 - protein, 355 aa, unidentified
MNKIKSNFEGQTIHVGMDIHKVSWNLGIHLNDMFVKNVHQKPNPHIMASYLKQHYPGAHYRAVYEAGKFGFWIQRQLTALGIECLVVNPADIPKSQKDTLQKTDPRDARNLGMRLQSGVLKSIHIPDEQQEADRVFFRHRKRIWKDLTRCKNRIKGMLAFSGIDIPEQYDNASWSHNFINWLKALDCKQQSRRRALDYMITQMEFLRKELLSISNAIRKMMREQRYKTNYYLLRTIPGIGPLTAASILVEIGDVNRFETFYHLNSFVGLLPMEHSSGQSENKLSLTVRKHRQLRSDLVESAWTARRTDPAMALYFQEQIKRKDPKIVIIKIARKLLNRIRFVLINQQPYEYGLIK

SEQ ID NO: 422727 - protein, 320 aa, unidentified
MLEVKVERCAGIDVHKKFVMVCVMIGLAEQKPASEVRRFGTSVPELNRLKAWLLERGCREAVMESTGSYWKPVFNILEGSLGVILANPEQVKALRGKKTDPKDCRWLAGLLRHGLVQPSFIPPRDIRELRDLTRRRRTLMREGASERNRVQKILEDANVKIGNVLTNVFGMSGQAMLEALLENQLNAEQMADLAQGRLRPKIPQIIEALEGHSMKDHHRMLLRQILKHMAFIEDMVSELDKEIWEKLGPYEKQVELACSIPGIGRDAAASILAETGPDMSEDGPFGSCHHLASWSGICPGNNESGGKRKSGHTRKGNRWL

SEQ ID NO: 422728 - protein, 355 aa, unidentified
MEKMAILAELVDHVIGVDPDRDRVTAAVVCAKTQGELASKTFPATRRGYGQTLRWAQTQTVDDRRAWAIESTGSYGAGLAIVLAEKGEFVIEFDHPGTLASKDGAKSDSLDAVRAARETLGRKTWATPRARGLREGLRTLVVARDSAKLARVAAINVLKAFVVTAPVELREELRGLTRGQLVDRCMRLRPDTAVDPEHAATKLSLRSTASRVKQLTIECRELEDAMVPIVREMCPALLTEPGVGTLVAAQILISWSHPGRCRDESAFARLAGVAPLEATSGQTQTRHRLSRGGDRQLNRALHTVILARDKGHAPTQAYLVRRVSEGKTKREAMRCLKRYYARHLFRLLESTTMPT

SEQ ID NO: 422729 - protein, 405 aa, unidentified
MGDIVEVAWVGIDAGKVSHHATLVDADGTIVWSRQVRNDQAAVEQLIAKAAATATTVRWAVDLTSAGAALLLALLIAAGQRVVYVPGTVVNRMSDTFAGEAKTDARDSYVIAETARLRRDLTELITPNELVAELALLAAHRADLMADWVRGVNRLRELLTRVFPALERSFDYTTRSALILVSRYSTPDAIRDADADQLAAYLRSKEAHRPSIPGMVAKAHAAAAAQTVRLPGEAATAALITRQARKLLDLDREIKDLDKQITERFRAHPQARIIESMPGMGPILGAEFIAITAGDLAAFGTAARLATYAGLAPVPDDSGKRKGVRHRPRRYHRRLRHVFYMAAFSSLKTDGPSREFYARKRSERQRHTRAMIALARRLVDVLWALLRDNRTWQPQPPTPLPATAA

SEQ ID NO: 422730 - protein, 371 aa, unidentified
MRQDSKVYVGLDTSKLKISVAVAEEGRDGEVRFIGDIDSAPEVVERLVTKLAKRHGELAFCYEAGPTGYGLHRQITRLGHECIVVAPSLIPKRPGERVKTNRRDALTLAKLYRAGELTAVWVPDPGHEAVRELVRVREAAMEDLRRTRQHLQSFLLRHGRVFTGRDVWTRAHTRWLCEQSFEHPAQYLVLAEYRQAIENAEIRLKRLTEQVTEVAASWSMAPVIAAYQALRGVAFLTAVTFVAEIGDVRRFDNPRQLMAYLGLVPSENSTGERTRRGSITKAGNSRARRVLIEGAWTYRFPARMSRLLQERQTGLTKTVTDIAWKAQVRLCSRYRKLMAHGKRQSVVTVAIAREMAAFLWAIGREVEPHAT

SEQ ID NO: 422731 - protein, 402 aa, unidentified
MNAVGIDVSKGKSMIAIMRPFGEIVSTPFEIKHTASDIRSLVELINSVEGESRIVMEHTGRYYEVLAHQLSEANLFVSAINPKLIKDFDNDSLRKVKSDKADSVKIARYALDKWQNLKQYNVMDELRNQLKTMNRQFGFYMKHKTAMKNNLIGILDQTYPGVNTYFDSPARSDGSQKWVDFASTYWHVDCVRKMSLNAFIDHYQNWCKRKKYNFSQSKAEEIYGKAKELVPVLPKDAITKLIIKQAVDQLNSASTTVESLRTLMNETASKLPEYPVVMAMKGVGTSLGPQLMAEIGDVSRFTHKSAITAFAGVDPGVNESGTYEQKSVPTSKRGSSDLRKTLFQVMDVLIKTHPQDDPVYQFLDKKRAQGKPYYVYMTAGANKFLRIYYGRVKEYLSSLPES

SEQ ID NO: 422732 - protein, 456 aa, unidentified
MSRKRRSSKKTGTPVLHSLNPNAAGVDIGATKIYIAVPADRDAQPVRHFSTFTEDLHAAADWLKSCNIETVAMESTGVYWIPFFQILEARGLQVFLVNAHHVKNVPGRKSDVSDCQWLQYLHSVGLLRGSFRPEQEVCTVRSILRHRDGLVQMASSHVQHIQKALDQMNLQLHHVISDITGMTGLAIIEAILAGERNPQTLAKLRDGRIKATESTIAKSLVGDYRREHLFTLGQSLAAYRHYQKLIGACDKEIEQYLETFESKADPPEDPKWKSQDGQNTRGGKPGFDLQSHLYRIFGVDLTQIPGVHTLTTQTLLAEIGPDLSRFANAAAFTSWLGLCPDNRISGGKILSVKTRKVKNRAATALRMAAQSLYRSQSYLGHYFRRMRAKLGAPKAITAAAHKLARVIYHMLTTRQAYDETICVQNELQNRQRLEARLRKQARDLGLEIIPAKTGAV

SEQ ID NO: 422733 - protein, 377 aa, unidentified
MERLKFVGLDVHAETIAVAVAEEGGEVRALGIIPNREESIRKLVRKLGPVEQLRFCYEAGPTGYALYWQLTRMGAKCEVVAPTLVPVKAGDRVKTDRRDALKLARNYRAGELTPVWVPDAAHEALRDLVRAREAAKKDELRARHRLNKFLLRHGRRPPMGVKAWTMKYLEWIKREVHFEQMAQEATLLDYLHEVEHAGARIMRLDGAIEEAVKCVPPKMRAVIEALQALRGIARVASVTIVAELGELSRFARAKQLMGYGGIVASEHSSGECTRRGGITKTGNAHLRRVVVEAAWTYRHRPAVGTSLRKRQEKVSEEVKEIAWKAQERLHQRYRKLLAKGKNKGIVVTAVGRELLGFIWAIGIKVEAAQKESRQQAA

SEQ ID NO: 422734 - protein, 345 aa, unidentified
MPSIVGGLDVHRKQITFDCLDTVTGEVSRGRVVPADREHLRIWLARRFPRPQEVALAVEGCTGWRYVAGELRRAGIEVHLAEPADTAAARGRKKHARTDRSDARLARELLVQGRLPECWIPPGHVLECRALLELYHDLRAEHTAWVQRVHAVLFHQGAPAFGDLSRADGPAQLAELARARLSPAGQAQILTYLRMLDGLEAELAAVRRRLGAAARHLRGARTLTESLYGVGPVTALALTCWLGGAGRFSSARKAVRFCGLDITVRSSDSKGPPGRLSRQGPPVLRWCAYEAGKAHARGAAPGHGYYAAVKDRAGGTRAALAEARKIVRQACHILAELGDDALTTV

SEQ ID NO: 422735 - protein, 319 aa, unidentified
MSNHTIVCAGIDTGKRKLDAAIGHGAGELQVDNTLEGHAALSAWLQRHQVERVGIEATGGCEHDVVTRLRRDGFTVIVFQPSQVRAYARFHLKRAKTDRIDAALIADCAAARKAEDIHAPPDPRIAPFAEQLTMIEQIGEDIARIKTRRATVRGQDIRQAWNDEIKRLTQNKRIRLKQLVAAIRRHPDLAQKLELIASVDSIALPSAVEILVRCPEIGTISREKAAALAGLAPYADDSSDQHGPRHIQGGRERLRKALYNAAFAGAFRWNKQLAAIYKRLTAKGKHHKAALIACARKLLSFVNAVLARQTPWVSQNQSA

SEQ ID NO: 422736 - protein, 379 aa, unidentified
MKRIIRIGMDVHSKSYNLCALESIWGQKDRLLAEAKVAATADEVARFIKALAKRYGLDEKTDILCGYEAGCFGYSLYHQLRERKIHCVILAPTTMPAPRGPRIKTDIRDAFEIARCLINGNYNHVYVLDDDDNDVKEYVRMRDDHKIAFKRIKQQIGAFCLRLGFQYSEGTKWTRQHLAWLRQLPLRAMQKETLDDYLLTYMHLEERLAQFDRRIEELASRERYQEKLKSLGCFLGMSTYNSLSLLVEVGDFERFAKAPQFSAFLGLVPGEHSSGDNINRLSISKAGNTHLRSLLIEAAQCYCRGIIGYKSKALKARQAGNAQEVIAYADRANVRLRKKYYRMLRHGKKRNVIVAAIARELACFIWGMMTKSYEREEVA

SEQ ID NO: 422737 - protein, 416 aa, unidentified
MKEWKEITHYAGFDWARDHHVVVIVNQQGQIVADFEFEHSVEGWKSFGEKTAGFANLAVAIETSQGAAVDQMLQRDYTVYPVNPAAAASYRQRKAPSGTKTDHIDGWSLADALRVDGQGWRALQPADELSTQLRLLCRDEVALIAQRTLLVNQLQQALVEYYPAALEAFEDWVSPATWDFVLEFPTPEALTKAGKRRWEKFLHTHRLWRPETVEKRLTIFSQADQFKASAPVTKAKSQLALSLCKLLRTLQQQLDQYREQIEALFKNHPDHDLFGSLPGAKKMLAPRLLAAIGSDPGRYGTFQVLQSFAGTAPISFESGKIHKARIRWNCDKFMRHTMHLWADCFHRVSPWGQAYYRKKRQEGMTHACALRCLGQRLLKILFRMISDKKPYDAELHARNQKKHGSWVLALIEKPAA

SEQ ID NO: 422738 - protein, 404 aa, unidentified
MDTILERCAGIDVGKKIAVGCLITDQGRKAPTVQIRTYGTAVTQLDQLRDWLKQAGCTHVVMESTGSYWKPIFNVLEATMTVVLANPAHLKNVPGRKTDVKDCQWLAELLRHGLIRGSFIPPRPIRELRDLTRRRRRLIATGTSERNRIQKVLEDANVKLGCVLSDLFGVSGQDMLEALLEGNPTAEQVAQFARGTLKRKIPEIIASLEGHRFGDHHRFLLRQSLAHMDFLESQICDLDAEILRKLQPYQQQFELLQTIPGIKADAAASILAEIGSDMSQFPTAAHLASWAGVCPGNNESAGKQRNGKARKGNAWLRGTLSQSAWAAANTKNSSYKSRYRRLAARRGKKRAVVALVHALLRTSYYVLRRATPYQELGANYLDERRREALIRYHTKRLHELSVSA

SEQ ID NO: 422739 - protein, 344 aa, unidentified
MTHYVALDVSLRSVAICIVDNNGDIKLEKSVKAEVEDIVHLLRSFDGEITSVGLEAGVLTQYLTYGLQAAGYDVVCMESRQVKAALSAMRNKTDKNDARGIAQILRTGWYSRVHVKSLRSHHVRALLSSRKAVLNKCIDLENEVRGLLRIFGIKLPGQLGHVVFDSAVRESIEADAALAHALIPMLDARGVLYQTFCELDRRVKAMARADTLCQLLMTTPGVGPITALTYKAAVDDPQRFKSSRTVAAHFGLTPRRFQSGEVDRLGHISKAGDADVRRALYAAANSLMIRTIGFSTLKAWGMRLMKTKGRRVAIIAVARKLAVILHRMWIDGTEFQWGTEGANT

SEQ ID NO: 422740 - protein, 330 aa, unidentified
MYLGIDTHTRYSQVAVVDDDGNLQDEIRLPNDRLDELAEQYAGGEAAIEASGHYRPVYEMLDEHLDVTLVNPSKNRVIADATVKTDRIDAKRLAHMLRADMLAESYIPSDEIRTLRDLVRTRKALVEERTAEKNRVRAVLKRTDNAYDSELFGPTGREFLAELSLSDADRTIVEAHLSVIDEYDAQIEKLEAKIEQKTLESPAAQRLLSIPGVGQSTAALIVAEIGEIDRFDRQEELVSYAGLDPMVHQSGDMEVHGSISKEGSAPLRWALVQCAHVSVRYDDYLGNFYTRLKQRKNKQIAIVATARKMLVSIFYMLKRQEPYDPPEVSA

SEQ ID NO: 422741 - protein, 379 aa, unidentified
MHSMTQDKPLIVGGVDAHADSHHVAALDQRGALLGTSSFPTTTPGYAQALDWLTGFGELYAIAVESTGSYAAALVRYLREHGIHVVEVNQPHAHTRRRVGKSDPIDAEMAARLLLSGKATVIPKQTDGIVESIRMLRLARNSAVKARTAAMIQVRDLIITAPQPLRDQLAARKTLRGKAAICGRFRLSDRDLSRPSQAAKFALRSLAQRLQSLDREIEDLERELKQLVATAAPRTIQLLGISTGHAGQLLLTAGENIDRLKGQASFAALCGASPVPASSGKTTRHRLNPGGDRQANRALHLIAVCRLRYCERTRAYVLRRTREGKSQREIMRCLKRYIAREAYNALRQDLAEIHAEPARHSSTTILCGNPGFGITRTRT

SEQ ID NO: 422742 - protein, 422 aa, unidentified
MLEETQETEEIIQRVAALDVGKAELTCCVRVPGQGSSGRRAQEVRTYKTMTRSLLVMVDRLAELGVTRVVMEATSDYWRGAFYLLEAHGFETWLVNARDVKHLPGRPKTDTLDAVWLCKLAERQMLRPSFVPPRPTRQLRQVTRYRADLVAARTAEKQRVEKLLEDAQIKLSVVASDIFGVSGRAMLTALIAGERDPKRLAQLARARLRAKLSLLEEAFSGFFTDQHAFLLAKMLARVDQLDADLAELDAKLAELIAPFVAAVERLDEIPGVGQLAAHLLIAEIGTDMTRFPTAGHLVSWAKFAPGVKESAGKRKGSGSTGHGNPYLARVLGEAAVAASKTDTFLGERYRRIARRRGAKKAIVAVGRSILVIVWHLLSDPEARFHDLGAGFYDTRIGPERAKRNHIRQLEALGYKVTLQPAA

SEQ ID NO: 422743 - protein, 345 aa, unidentified
MDHFAGLDVSVKETSVCIVDDTGKIIREVKVASEPEALLAVLKNPAYHFKRIGLEAGPLSQWLFSALAEAGLPVVCVETRHMQAVLKAQINKTDRNDARGIAQMMRVGIYRPVHVKTLRSQKLRMLLTHRKLLQSKAIAIENDLRGTLRNFGLKVGIVGRVRFEARIKELVENLPDLAVLVEPLLLVRRTLREQTIILHRRLLAVVRDDEVCRRLMTIPGVGPVVALTYRATVDVPARFRKSRAVGAVFGLTCSKYQSGEIDRSGRISRCGDEMMRVMLYEAAQSMLRSKKWSWLKAWAMQIAKRRGMKKAIVALARRLAVIMHRIWVDGSEFRWTREQAAAAAA

SEQ ID NO: 422744 - protein, 342 aa, unidentified
MSIVYVGLDLGSSNFQQVALNHHGVSRANRDFSTSEANLVKAFSDLQGEIHVHLEAGELAPWAAAVIAPLVTRVVCSHPQSNAWIAKDADKCDRIDAYKLAELLRLNRFKEVHYAPDQPRRNFKQLVQHYDELTGQQARMKTKIKARLRMQGLLVTGERPFSNKGRKEVLARVESRDLRPAVTQIYAVLDQLVTAQEQARLLMLRAAQTFPEIKLLRTVPGIGPIGACRFSAYIHTPSRFSSKRKLWKYCRLSVSHRSSNGKPLRRPRLDRSGCGRLKDVSRKAFDVAIRSRQDNGFKRTYQRALETTHDKTHARLTVQRKIVSTLRAMWLRRTPYCDELNR

SEQ ID NO: 422745 - protein, 402 aa, unidentified
MAYDFVIGVDVGKYFHHACVLDPQGRQVLSRRINQHEGSLRKLFGQFLADDASVLVIVDQPNNIGRLTVAVAQDMGVDVRYLPGLAMRQLSRIHVGNCKTDVRDAYVIAHAGLNLPDSLRSVDRVEDVFIQLKVLNGIDEDLARAYTRLINQMRSALVGTYPAFEHVLRGQMIHRKWILHLLAKYGGPTKIRRIGRTRLKAFARKHRARNPEPVIDAMLAAIHEQTVSIAGAEYAELGVTMSATDALAKLEHRKEIEAQVLKLIQDIPQTEILLSMPGIGPRSAAQILMTVGDMSDFPDAAHLASYAGLSPRTNQSGTSIMSNSPNRAGNKKLKNALWQSSFASIRFHERSRQFYERKRKEGKRHNAAVVALARRRLNVLFAMMRNGELYRDISTAQEAAAA

SEQ ID NO: 422746 - protein, 337 aa, unidentified
MKYSGIDLHSNNSVVVVTDEQDHVLEEKRVPNDLAVIVKLLEPHREELAGVVVESTFNWYWLVYGLMESGYAVKLANPAAIKKYAGLKHSGDETDARHLAQLLRLGILPTGTILAKELRATRDLARKRMQLVRHRTMHILSVENITARQFGARINSNQVKRLGLPEIEAMPLPEDVKLALQAHVAVIATLSRQIEVIERRIQEQLVPRAEYRLLESVPGIGRILAPVILLETGPIGRFAGVGNYASYARCVESRHTSNGRKKGEGNTKNGNKYLAWAFIEAANFARRYHVPAQRFYERKKARTNNLVATKALAHKLARACYHILKEGKPFDVARCFV

SEQ ID NO: 422747 - protein, 415 aa, unidentified
MVVCRANNTSCRTEKDVAQPTLWAGIDAGKAAHHCVAINTGGQRVLSERVINDEGALLDLIRAVKELADGGSVQWAIDLNSGGAALLITLLLDDDQDLLYIPGRTVHHASGAYRGDGKSDAKDAAIIADQARMRSDLLPFRHRDKTAVDLWILCARRTDLASDRNRAINRLRAQLLEYFPALERAFDYAHRKAALILLTGYQTPDGLRRMGAPRLERWLRDRQAYNAGDLAARAIEAANLQRTTVIGQHVAAAVVARLAQTILDLNTELADVDTMIEETFQQHRLAAIIVSMPGFGSLLGAELLAATNGDLASFNTADRLAGISGLAPVPRDSGRISGNLKRPRRYDRRLLRVFYLAANNSIKTSPESRDYYDRKRSQGKRHSQAILCLARRRLNVLWAMQRDQTSYQPGMPRAA

SEQ ID NO: 422748 - protein, 402 aa, unidentified
MNCVGIDVSKGKSMIAVMRPFGEVVLSPFEVLHTDSELSKLAGLLKSLDGETRVVMESTGNYHAPVAWLLHDAGLYVSVINAMLVHDYGNNSLRRAKTDKKDAVKLANYGLDHWLTLPRYVPDEDTRLMLKTCYRQYQQYSKVQTMLKNNLISLLDIAFPDANRLFTSPPRADGSEKWVDFVAAFWHCECVCGLSEKAFTAKYHKWCRKHGYNFSEDKALDIYASACGHFGVMPKTDTAKLLVEQAIFQLRATSATLAALKQEMQSLAASLPEYPVVMGMFGVGPVLGPQLMAEIGDVRRFHSKKALVAFAGIDAPPYQSGQMAIRSRSISKRGSASLRRTLFLVMSVILQRAPMNEPVYQFMNKKRSEGKPYRVYMMASANKFLRIYYASVKAYLASLDHD

SEQ ID NO: 422749 - protein, 411 aa, unidentified
MEAMIERCAGLDVHQETVVACVLFGPLDKKPKTSIETFSTTTTGLLALSDWLATLQVSDVVMESTGVYWKPIWNILEGSFHLVLANARHVKNVPGRKTDVKDAEWLAKLLRCGLIESNFLPPEDIRDLRDLTRYRKKLIHHRTSEQNRIHKILQDANIKLTSVLSDIFGVSGRRILEAILNGEKIETDGLRKMVDWRTKASITDIANAINGRIRRHHRDMLRYHWEHMGYLEQTIGELEKQIDQLLSPYRKEVELLDGIPGVNKAAAATFIAEMGVNMSVFKSAKHLASWAGVSPGNYESAGKKKTSKTTQGNKALKTMAVECVLATSRQNNRIASHRKRITKRQGKMKGRIASAHLLLTIAYNILKTGEPYHELGSNYLEEKQMNKELKMIEYLKKKGYTTIPPSEQQTA

SEQ ID NO: 422750 - protein, 376 aa, unidentified
MREKLRFLGLDVHAETIAVAIAEPDGEVRSLGTIANREDSIRKLIRKLGPAENLRACYEAGPTGFVLYWQLSQLGVACAVIAPTLVPKKPGDRVKTDRRDALKLARSHRSGDLTAVWVPDEDSEALRDLVRQREAAKQDQLRARHRLTKFLLRTGQRPPLGLKAWTERWMRWLAQVRYTQPAQEVTRLDCMNEVEHMAARVKRLEEAILEVVKLAPEPMQELIRGLQALRGVAHISAVTIASELGNISSRFESARKLMGYCGVFPSEDSSGKRIRRGGITKCGNAHLRRIVVESAWCYRHLPRVGEKLRKRHQGVPAEITEIAWKAQNRLHKRYMKLTMAGKDQRKVMTAVARELLGFIWAIGIKTEAACKQPMAA

SEQ ID NO: 422751 - protein, 363 aa, unidentified
MLILAIDLGKAKSLACWYQTDDATHEFRTVPTRPGDFHTLLADRPVDRVVVEICDAAGWIVDLCRTQGVPIQVANTNQEAWRWKNVKHKCDRGDGLKLARLSAMDQLSPVHVPEKAVREWRSLILYRHKLVDRRTSVRNAIHSILVAQGMAIPGRRSVWGDDTMSKLAALAKPLGECTTMEELWRGHLKMELEHLDELCRRVVELDRKLDALGEADARVRRLRTVPGVGPRLSELVVAMIDDPNRFANARQVSAYAGLVPRRYQSGEMDRSGRISKAGCGKLRKLLTEIAWGMLRHNPHGREVFVRISKGQKTRRKQAAVALGRKVLCWCWAMLRDGTEWRVPTPRERATHNAAPLLPACTTG

SEQ ID NO: 422752 - protein, 423 aa, unidentified
MADKIRVTEYDVFCGMDVDKRSIAGAFLEWDGRMRQVTLPNNAEAVVKYVSKHYEGKRILFVYEAGPTGYGLYDGLEARGRKCLIAAPSMISRAPGQRVKTNRLDARRLAINLRGGEIQGIHVPSGLYRDLRHLVQWRDVCVREVGRRQRRIKSLLLLEGMDFPAERWSQEAIERLRQQQREARSVVGYKLRALLKSLHVARREARDASMRLRGFSRKKEELNRCMGYLMSVPAIGWITASHFLARVGDWRELEAVKKTCGFLGLGPSEHSTGKRVVRGQITGVGDRRLRAKLIQCAWRGIRVDESLATVFVRIWRTNPPQFARQKAIVAVTRLLVCRLHAVLRDQRYYCESPDHRATRGSFPGTDPAAPQSEGSSGRTHPEARFCRKGSRESAPELGADQTQCDGPRAVQRIPGSLSCAIAE

SEQ ID NO: 422753 - protein, 422 aa, unidentified
MKLLTEQPFTALVGVDWSDKKHDFCLQGAGSQQRELGVVAHRPEAIEHWARALYRRFGGPIAVCLEIAKGPLVHALQRYEFIVLFPVNPAMLAKYREAFVPSRAKDDPTDAEIALELLVRHREKLQALKPQSAAMRTLTTLVELRRNLVGDKTRITNRLCSTLKEYFPQALDWFEHRDTVLFCDFLQRWPSLKHVKRARQATLRSFFCAHNMRRTELLEERIRGIRSASALTNDGAVIGPHQLLVQALVSQLRVTLQAIDGFDAEITQVAQRLPDYALFAALPGAGAILAPRLLVAFGEQRERYGSAAELQQYAGVAPVLERSGNKCWVHWRMACPTFLRQTFVEWAGSTIPRSFWASAYYQRQRDKGSAHQAALRALAYKWIRIVYRCWQTRTPYDESVYLNALKRRGSPLIANLATAQNS

SEQ ID NO: 422754 - protein, 351 aa, unidentified
MYYAGLDLHRKYFTLCVLTSEGQVVCDHRRLPADLEPLTSILREVGGPVTVTVEATLQWAWLHDRLTAAGFPVQVAHPQQVKLISHARCKTDPIDARKLAELTRVNLLPSIWVPSPEVRSWRQLIRGRAALVRWRTRAKNRIHGCLAAENLRVATTDLFGRAGREWLTHAPVSPTARREIAVQLAVITALDTQITGYDTDVKRITQHPDAQRLQTIPGIGVFGAALLLAEIGTIQRFHSAHALAAYAGLVPSTRSSGEKTRHGSVSGASNHWLKWILIEAVQTLKQVPGPVRFHYERLLRAKGKPKATVAAARKLCTYIYWMWTQELSYAAWLETETKRVGCPMQTLASSA

SEQ ID NO: 422755 - protein, 346 aa, unidentified
MEHYAGIDVSLECSSVCAVDASGKIVREGKVASEPAALIGWFGALGVEMARIGLEAGPLSQWLYAGMKQAGLTVELLETRHVSDAFKAMTVKSDRNDARNIAQLMRLGWFRPVHCKSVAAQEVRALLTARKLVQSKLLDVENSLRGILRGFGLKVGKTTATGFAGRINELVKGHRNLEVIAGALLKVRAVLLSEFRAFEKRAGKMSRLDVKARLLMSTPAVGPIISLTYASAIDDPARFRSSKQAGAHFGLTPKKYQSGETDRSGRISKIGDASVREALYQAAHVMLTRPVKGCSQLKSWAMRIAKRAGMNKAKVALARRLAVIMHRMLKDGVPFNPAARAEAAMA

SEQ ID NO: 422756 - protein, 416 aa, unidentified
MKIVRPICCGMDVHKNIIVATIGITNKKTRITEYIQETFSTLNPDLLNLKQWLINHKCFDACMESTGKYWIPIFNILEDEINIYLTHPKYVKAIKGKKTDKKDSKWICDLFKHDLIKFSFIPPKEIRALREISRYRYKLVGMRSSERNRYQNCMTVSNIGIGSVFSDPFGKSAQAIMKEVLESDIIEDEKILKCIHRSCKNKDKILDSIKHCNIETDQRFKMNESMTHMEELQVHIDNCEIEMMKRAAPMFDQFMHITQLPGISTLSAILIISEIGVDMKQFESDKQLTCWAGLAPANNESANKKKSVRISKAGQYLKPLLVQCALGAIKDKEGYFGIKYSRIKKRRGHKKAIIAIARMMLVSIYHMILTGETFNPSDYESFRNPKPPIKQQVLTEESAIEFLKKSGFDVSKLAKP

SEQ ID NO: 422757 - protein, 338 aa, unidentified
MTVVTVGIDLAKNVFAVHGVNAAGKAVLVKPLVRRAKLLELIATLPACLIGIEACTGAHYWAREFQKMGHTVRIMAPQLVSPYRMGGRHGKNDAADAAAICEAVTRPNMRFVPIKSVEQQGQLFVHRAHQGYVSERTALINRIRGLLSELGIVLPQAFKAFLSGGAQVLEDLPGYCNQVIGDLLNELYHIEEKIKNSEKLIQQLARDNSAAQLLMQFRGIGPMTATAIVASIGNGHDFKNGRQFSAWLGLTPRQQSSGGKARLGRITKAGDSYLRTLLVLGARSVLLGAAKNDDPVSRWALQLKERRGYGRALVAIAAKNARMCWAMLHLRDEFRFPA

SEQ ID NO: 422758 - protein, 449 aa, unidentified
MREPQEIQDQEHEQAVLRVAAIDVAKASGVVCTRLAPEGGAGRFVTKVWPVDATTNAILELADHLAGMAVEKVVLESTSDYWRPFFYLLESAGLDVALVNARDVKNAPGRPKTDRLDAVWLAKLAGWGMLRPSFVPPPEIRALRDYTRLRTDLTRERTRHWQRLEKLLEDALIKVTTVASRIDTMSVRDMLEALIAGQRDPQVLADLARGRMKARRAALVEALTGRFDDHHAELAAILLAQIDRLTAQITTLTTRIEALIAAIPAAQGVDADGSTGPQAGLGPDAPVLTAISRLQEIPGISRHAAQVIIAEAGLDMTRFPTPAHLVSRARLCPRTLQSGARERPGRTGKGNPYLKGVLGDAAAAAGKTDTFPGERYRRLVRRRGKLKALVAIARTILVIIWHLLADRATRYHDLGADYYTTRTDTSRRTRSHVRQLEALGYTVTLTPAA

SEQ ID NO: 422759 - protein, 353 aa, unidentified
MTTFCKTNTILSSIGIDIGKDVFHLVGFDDSGTIVIRRKIKRLALIKEFKKFPSCIVGMEACLSAHFVSRTLRGLGFDPRIIPAKYTRPFNKGQKNDYNDAEAIAEAVLRPNLKCVTEKTQEQLDLQALHRVRARLVSRRTATINQIRAFLIEQGISVRRGAGALRNSLFAILENRGNEISARMSDIIVGLYEDWLWLDERIESTSNEIEEISRQELNCQRVMSIPGIGPMISTAMVAAIGKGEAFDRGRDFGAWLGLVPRQYSTGGRPILGRISKRGSKYLRALFVQAAHVILMRPHNWEKFSFGPWLEQAAKRMHKNKLAVALANKLSRIAWSVLRHGKEFDINRNVEEAV

SEQ ID NO: 422760 - protein, 313 aa, unidentified
MIITSRCVGIDVSKHHLDIFDEGIGVSERIANAPHAITELVARWRCDALVVFEATGVYDLELRAALRAADIRFARINPARARDFARASGQLAKTDPIDARMLAAFARAMRPATEQVSTPARNALARLAKRRDQLVLMRAQEKNRRSEAGDRAMVERICRLIEVLDHEIAEIEADISALIKAEPEISDDAQLMRSLPGVGPVACMQLIAQMPELGHVGPKQAAALAGLAPFNVDSGAYRGKRKIGGGRKRVRNALYMAALNAVRRADRFKAFYAKLRQAGKPAKLALIAVARKLLIILNAIMRDRKAYIPAQQT

SEQ ID NO: 422761 - protein, 339 aa, unidentified
MNDIKLMAVDLAKNVFQVCALNKNDKVLFNKKLRRRELAEFMAQQKPSPVYTEACYSSHYWARRFKQMGHSPFLIPAQHVTPFVRGNKNDHNDALAIAECSKRPDLRFVPIKTERQQEIIALHRIRQRQVRARLQITNQARGLLTDFGIIFPQGHKAFKDAINDIQTQEKLALEFRHFIVSLKEEYNFVSAKIKQLDDYLARHCEAEPNCQIVRSIPGVGCLTATALIAMLDKGQGFTNASAPGVWIGLTPKQFASGDKSHMGRITKRGDRYLRSLLVQGANTAIQWAKYRDDSYSLWIKQLVARVGRSKAIIAIAHKMIRLAWILLQKQEMFRLKSSH

SEQ ID NO: 422762 - protein, 350 aa, unidentified
MMIGVDYHPSFQEIAFFVEETGEYGEQRLNHDGREAEQFYRDLKQRGIRVRVGMEATGYARWFERLLAELGIELWIGDPAEIEAQRVKKRKTDREDARLLLRLMRENRFPKIWVPSPENRDLRQLLWHRHRMVQMRTRIMNQLQALAMNEGKRWKSKLFSQQGRAEFERLALAPWASRRRSELLELLDRLNPSIAELTAAVEQEVHKRPEALRLMTHPGVGPITALAYVLIIGTPQRFARGRQIGTYVGMIPSEDSSGDKQRLGHISKQGSSLLRYLLVEAAQAATRFNPHWRRRYLHLAIRRHKSIAKVAMGRRMAIRLYWMWRNGCEYSPSFEFGSYAGQLGTRHGVQ

SEQ ID NO: 422763 - protein, 352 aa, unidentified
MKHFIGCDVHTRNQVVAWIEEETGEIKKRRLEHEGAEVKEFYAQFPRGTVVGIEATFPAHWFERLMGELGHELWVGDAARIRASEVRYQKTDSRDAEHILDLLRTDRFPRIWVPSLGERDLRQLLVHRMKQVRARTQVKNQLHALAISQGVCRKSKLWSAKGRKELESLALLPWAARRRKELLETLDRLDEQVRELDRVVEEAGRERQEVALLRTHPGVGMVVGLAFALTVGPVERFSNSRKLVSYWGLNPRENSSGGRQRLGSISKQGNPMMRWLLVEAAQTAARLDPQLGRIYQRLKKKKTSGVAKVAVARRLAVRLFWMLRTRNNYAQLVQMSGSPSSAVAPPTAEPKV

SEQ ID NO: 422764 - protein, 405 aa, unidentified
MEILIEKGCGLDVHKGTVVACIMGTGIKKEIRTYTAMTKALLRLKEWLQNNGITHVAMESTGVYWKPVFNILEDSFKVILVNARHVKHVPGRKTDVQDSEWLCKLLMSGLVKGSFIPPRDIRELRDLTRYKRKLIQTITAEKQRVEKVLEDANIKLSSIASDTFGASGKKIIEELIKGKLQPEEMAELSKGRLRQKRGDLKEALVGEVREHHKFMIKASLKHIRAMEKILSDIERKIRQKIESRYKEEYELLQTIPGVKENASTIIAEIGVDMDRFPSERHLSSWAGMSPGNNESAGKTKPGSTSHGNKCLKAMLTEFAWAASKTKDTYLRSKYHSLVGRRGKKRALVALGHKILIMCYHILKYRCAYKELGGDYLDKRRKDKMTRSYIKRLNRLGYDVILQEAS

SEQ ID NO: 422765 - protein, 345 aa, unidentified
MNSTTIAVDVAQTVFEVAVSEHAGQVRERHRFSRERFRRYLGEQPPAAVLMEACGSAHYWGRQAQRHGHRVVLLPPHVVRPYVVGNKTDRTDAKGLLEAARNDAARPVPVKTETQQAVAALHRLRSTWLGTRTARLNTVRGLLREFGIVIPTGARHVWPTVSGLLEDADAGVPGVLRAVLGETTQEIRELERRIGLVERQLETVAEELAAVAHLRSIPGIGLLTATALVAAVGDVQRFPSGRHFASYLGLTPRERSSGQRHQLGGISKRGDSYLRMLLIHGARAMLWRAKRKTAPVPDRLSAWALQLEHTRGHNKAAVALANKMARIAWAVWKTGQPYQPRAAAV

SEQ ID NO: 422766 - protein, 287 aa, unidentified
MDAMVVGIDVSKDWLDVAVRPTGESFAFKRTAAGIEDLVERLKDLSPALVAIEATGGFEAVVAAALAGAGLPVVVVNPAQVRAFAVALGKRAKTDPIDAAVIAHFAEATKPQLRQLPDEKTRFLADLIARRRQIVEMLAAESQRARRISDHRLTRSITRLRKALEEELAELERLIADHMRRSTVWVEKEKLLASVPGVGKTIARTLIAELPELGSLDRRQIAALVGLAPWTRQSGQWRGKSFIGGGRKTVRSALFVGAMVAARYNPLRPLSRLLEPLMGAQRLDAYY

SEQ ID NO: 422767 - protein, 347 aa, unidentified
MSFIGVDLHQNSFTVCRREGDGGEAFETFTLSAADLARFCLTLSADDELAIEATGNSAWFRDTVLPCVGRVVVVNPAQFKVIRKSVKKTDRNDAAALALFLAKDMLPETRAKTQDENELASLAHTRDLLVKQRSRLLHKIHALHVRKGIKLKKESLGSKRGLAAIDMDLFSAAEVVEIEVLREQALSLTASLARLDREIETIASGFAGYEGLTSIKGVGPRSAAVLLSAIGNVRDFESADKLAAYFGMVLRVSQSNETDHRGRITKRGNKLARTTLVQCSLIAMRYSPYLKRFHERIRQRRGTGKAIVATARKLLTIIYDTLKNGWVFSDFTTFSRSAPALAAGQSS

SEQ ID NO: 422768 - protein, 426 aa, unidentified
MDIVHPRVAGIDVHKKVIWVAVRLPGGAPGERTLTVRRFLTFWRSLQKMAAWLSGLGVTDAAMESTGVYWWPVYHALAQAGIEVCVCNAAHMRNVPGRKTDLRDCQWITELHEYGLLRPSFIPAAEVAALRQRTRYRKKLIESRTSELQRLAKVLEDGGVKIDSVASSLTTASAQDMIEALIAGERDPAVLARLARGVMRKKIPELEMACDGRFTASHAQMCRLHLDAYDHLTSQITALDQLVAEAAAPFRALIARLVTIPGIGQRTAEVIVAETGGDMSRFATPARLAAWAGLAPGDNESAGKRKKAATRKGDRHLRTAMVESAWSVSRTATRPGARFRRLARRFGRGNEKKAAVAVAHTLLCIAWTAMKHDQDYAEAGADYYDRRDARNHEHLVRHHQQALARLGYQVTLIPPGDGSPPPAQAA

SEQ ID NO: 422769 - protein, 340 aa, unidentified
MEQIIGIDLATRVFQVNIVSAQSRKKANKMINREKLMAFIAQQPPSRIVMEACGSANYWSRQFRQYGHDVRQISPQYVAPFRMGSKNDKNDAAAIVEADSRPSMRYVPEKSLEQQDIQCLHRVRQRLMKNKTALINQIRGLGLEYGIAIPEGAHKIMACLPDYLEDAGNELTTLSRQLFHEMLQELQGSQQRIKEPDLRLARISQQNEDTLRLESIPGIGPLGASALTVALGDSTDFQNGRHFASYLGLVPKEYSSGGKVRLPGITKRGDGYLRGLLIHGARSVVYRIINLPEERCGGFQRWLKGVIARSGVNKAVVALANKNARIAWALINQKTAYMIK

SEQ ID NO: 422770 - protein, 414 aa, unidentified
MSTQVFCGIDWAEDHHDVALVDRDGQLLARRRISDDAAGLATLLDLLAEHGDSVDEPVPVAIETPRGLLTACLRATGRQVYPINPMAVARYRDRHSVSGGKSDHGDSVVLANVLRTDLTFHRPLPADTELAQAIAVLARAQQDAVWDRTTAHNRLRSCLREYYPGFLAAFQAARGGIMRPEARVILAAAPTPADAARLTLAQLRGLLKKAGRRRGIDAEAARLRGAFRAEQMRQLPLVEQAMGRQTLALLRQLDAACASADDLEQAAIESFNQHPDAGIITSFPGLGPLTGARVLAEIGDDRSRFCDAKGLKAYAGAAPITRASGKTKSVTHRRVKNNRLNATGYTWAFSALTASPGARAHYDRRRETGDRHAAAQRNLFGRLLGCLHRCLATGQHYDETIAFPDTTQKLPTAA

SEQ ID NO: 422771 - protein, 354 aa, unidentified
MIIIGVDFHPEFQQIASVDTDTGEFQEKRLTHCEEAEKFYGAVAASGQKVRVGMEASGHARWFERLLAELQIELWIGDAAEIRGKRVRKQKTDRQDAQLILRLLLEDRFPQIWVPSGKNRDLRQLLWHRHRMVQARTRIMNQLQAVALNEGLRCKKRLWRERGRQQLESFRLAPWASRRRHDLLELLDRLNPTIAELSLTIEQEVEKCPEAQRLMTHPGVGPLTALTFVLIIGEANRFQCGKQVASYLGLVPLEDSSGNRRRLGHITKQGSSMLRFLLVEAAQVTARSLPQWRSKYLHLMMRRGRKTAKVGMARRLAVRLYWMMRQGWDYQQWSKFGSHAGQPGNRDGVPSNTE

SEQ ID NO: 422772 - protein, 412 aa, unidentified
MKDLLEISCGLDVHKEKIVACILTGPLGKPTRSEIREFSTLIPDMIALRHWIVSKNCHHVAMESTGIYWMPIYEILEDAFSGDITLLVVNARHMKNISGKKTDMRDSEWISTLLRAGLLNGSFIPEKRIREFRDLNRYRKSVIRDITSQKNRIEKFLQSSDFRLSSFISDIFGASGRNIILYLIEHGQINKTALDSCLKTKTRNRIDEILMSVNGTLSEHQKAFLRILMTHYDSLKKHLAEIETSLEEDMAPFALQVEQLNSIYGISITASCAIIAEIGIDMKPFKTAEHICSWAGLCPDNNESAGKRKSTSVTKGNPYIKSMLCEIAWVIAGKLNTYLSAWYWRIKQKKGAKKAIVALARKLLVIIYKMLKQGTLFDESCFETRRKHCDQKQLSHYIRELEKHGYHVETQS

SEQ ID NO: 422773 - protein, 359 aa, unidentified
MTSISPPGPLSKIIIGVDTHKHVHVAVVLDDDGQRLGDLRVPVDSIGYQELDSWAQSFGRIIAYGIEGTGSYGANLTSYLRRQGRKVVEVNRGDRRARRANGKSDTLDAELAARSVIAGTSTAVPKSADGTVEMIRKIKVARDIACKNRTSAIISLKTVIVNTPQELKEQLDSLGDKALIQRCSGFRPGTVDDPISAAKHTLRALARRWEFLNAEVKDHDAVITKLTTSLSPTLCDGFGIGPDTAAEILIVFGDNPDRVRSEAAFAKLCGVAPIPASSGMTTRHRLAWNGHRQANAALYRTAIVRMQHHQPTKDYVAKRTAEGLSKRDIIRCLKRFIAREVYGRVMTDFRARTALSAAA

SEQ ID NO: 422774 - protein, 358 aa, unidentified
MLTQHKELIFSGQDVFVALDVHKRNWQVAIMVNDMFHRTFRQDPRPSLLVNYLHRNFPGARYSCVYEAGYCGFWIHDQLRTLGVDCIVTNPADVPTTDKEKRTKTNKVDARKLVRNLHTGELTAVYVPNRAACEDRSLVRARRSVVSKQTRCKNQIKALLSFYGISTPEDVDERYWSARYIAYLGQLQLQGESGTMVLQMLLRELAYHRAELLSVTRAIRQLATKPAYALHVYHLVGIDGISTVTAMILLTELIDLARFHSLDRLASYVGLVPGEHSSGDERTITGLTERKNPYLRWILIECAWCAARKDPALMQAFAELTKRMTKNRAIIRIARKLLNRVRFVLKNGQPCVSLAIVA

SEQ ID NO: 422775 - protein, 330 aa, unidentified
MEKKNYTIGIDVSRNTLDVHCSEINQHIQISNDQSGFKEFIKWSGKQGIDLSESIVILEYTGGYEYSFILFCETRKILYTRIPGLAIKRSMGITRGKSDRVDAARIAQYGEEKFKSICPAKPLNKTTLRMKELLSFRKRIVRHMAGLKSTLSERKKMYPNLKNDIICKTIQNQIDLDIQSIDELEKEIETIVESNQAIQTNYQLITTIRGIGKINAWMTIAYTENFDSFPNARNYAVYVGVIPFEHTSGTSIKGRKKISNIANKELKQELNQAARSAIVWDPELSQYAARKMQDKSYNLVLNNVKFKLILRMFSVVKRQTKFVDNYKKVA

SEQ ID NO: 422776 - protein, 406 aa, unidentified
MQKRENYLYVGMDLHKETHTAVMVNCWNEKLDVIVIENKPSEFNKLAKRVNKAAVKMGLSPIYGLENAYGYGRSLAVWLIEKGYTVKDVNPSLAYDQRKSAPMMKKNDEHDAYCVATVLINQLHTLPDAKPEDNHWTLSQLVNRRDTLVKDGIRLKNALHEQISATYPSCKKFFCEIDRKTALYFWKTYPSPGHLKNKSAEDLAAELKAISQNILKSKAELILECVHNDGNTIRDYQASRDFITQSLVRDLEHQAVELAQIEAEIEKMLACFDYKLTTMPGVGNAIASKLIAEIGDIRRFPNADKLACFAGIAPKSFSSAGKGRDESNKQGNRELHGLFYFLAVTMVSVSTKGKPYNPIFRTYFLRKVSEGKTKSQALVCIMRRLVNIVYGMMKNKTEYRPYVVEK

SEQ ID NO: 422777 - protein, 362 aa, unidentified
MRIIGCDLHARQQTLAMLDTTTGEVVEVTLKHEGDNVREFYSSLPRPVRVGIEATGSMQWFLNLMEELGIECQVGHPAQIRASAPRKQKNDRRDAELILKMLVEGRFPAIWLPSKELQDLRSLLRHRHQWVRMRTRIQNALQSIALANGLRRGTALWSHEGQSRIAALPLAPHTAYRRSELQAMYEKFEAEIEKLNRRVEEQACQRPGARLLMTHPGVGPITALATEVFLGDPARFADSKAVASYVGMIPREYSSGGRQRLGGLSKQGNPLLRFLWGEAGAHAARKDPELQRFYRRKLVQKGLGKASVAVARKLGIRLWIMLRDQIAYNEFCRRGQKQQKSSDACAGMPETRYGANSHRPID

SEQ ID NO: 422778 - protein, 372 aa, unidentified
MEQNIIHIGLDVDDTQYHGAAFNKATGEIIDFKCRPTLKGLLQQLDRMAQHFSGCTIKLCYEASYIGYCLQRDLMSNDIHCDIISPGSIPSPRGKAIKTDRIDAGYMAQFYANDLLTIVQPPDEEQEQDRDLLRSRQKVMQQRTQLRKHLQAVLRRSGLHYKAETGHKSHWTKIHYFWLARTIDGSSGSLKINLELLLRQLKALNEVLTEYGQQIEVLAISPRYQPAVQSLACYKGIKNIFALTMITEIGDIKRFSHPRKLVSWIGMDIREYSSGGKYNRMGITKQGNRYLRTAFIEANQRGYRTAKIGQDLKSRRKHIAPELVNIADRCLRRLNKKGNRLLLAGKHPNKVKVACAREMVGFVWESLNKVAA

SEQ ID NO: 422779 - protein, 343 aa, unidentified
MQAITTIGLDIAKSVFQVHGVDAAGQVVVRRQLKRRYVLAFFEKLSPCLVGIEACASSHHWSRELQALGHPVRLMPPAYVKPYVKRQKNDMADAEAICEAVTRANMRFVPTKTPEQQSGLMLHRARQLFIRQQTAVINAIRAHLGEFGIVAPVGRNGVEELLEVVADPSDKRVPEIVRACLAALGAQLRRLKEQILEFDRMIRAWHRSSEMSLRLDDCPGIGPVLATALAATIADPKAFRSGRNFSAWIGIVPKQHSSGGKNRLGGISKQGDRYLRGLFVAGALAVIRYAKIHGTKHRPWLRALLARRPTKVAAIALANKIARMAWAMMVKGERYKEPVALAA

SEQ ID NO: 422780 - protein, 343 aa, unidentified
MIEFKCRPNTKGICNQLRNLKEKFPDSEFKICYEATYIGFTLQRDLSANGFTCDVIAPSSIPRVHGNQIKTDRLDAAKLAQFYASGLLTVVTPPEIETEKDRDLMRSRQFMMLQLTEVRTHIQSLLRRNNLHYKSETGNLSHWTRHHICWIERKISESSGSFKKNLELLCQQMKWLNHTISEYDKATDELAVSEKYKKQVEALVCYKGIKNIFAMVMITEIGNIKRFNHPRQLVSWMGMDIREYSSGGKHHRFGMTKHGNRYLRTAFVESNQRVFRAKSIGGDLKRRRKNIDPELIQIADRCMDRLTKKGSRLLMAGKHTNKVKVACAREMVGFVWESLHKVA

SEQ ID NO: 422781 - protein, 399 aa, unidentified
MDKVYDKCCGIDLHKKLIVACFKQGNRQEIRDFGATTRELLEMADWLKEGGCEMVAMESTASYWKPLYNILETCELKAMVVNAQHMKAVPGRKTDVKDAEWIADLLQHGLLTASYIPDKDQRELRELVRYRKSLVGERARELNRLQKMLEGANIKISGTIRDINGKSARNILEHLLSGKQIDSAEYDILYEKKVIAHNLKATKEQIIDDLNGVMSALQKKMMRIILNHLDELNAHIRELDDDIDNFMKPEEKEAAKVIQDIPGIGNTGAQAIISVIGADMSRFPTDAHIASWAGLCPGNNKSANKRKSGKTRKGNGLLRDTLIVCAHSAVKNKSSYFHAQFARISAHRGSKRAYVAVAHSMLVAIYHILKEGVVFKWLGSACSCRISLSAEPDKTPEKI

SEQ ID NO: 422782 - protein, 351 aa, unidentified
MSQNLSRAIAVIGIDIGKNSFHVVGLDERGAIALRQKWSRGQVEARLANMPPCLIGMEACVGAHHLSRKLRTLGHDARLMPAKYVRPYSKGQKNDFRDAEAIAEAVQRPTMKFVATKTSEQLDLQALHRVRERLVSQRTGIINQIRAFLLERGIAVRQGLRFLRAELPRLLATPPDVLSPRMVGVIEGLAEDWRRLDERIENLSGEITALARQDAGCERLVSVPGIGPIISSAMVAAIGTGEAFSKGRDFAAWLGLVPKQMSTGDRTILGKISKRGNRYLRVLFVQAAWVVLIKPQSWERHGLRQWIEAAKKRLHRNVLAIALANKLARIAWSVLARGRSFEARLAMASAA

SEQ ID NO: 422783 - protein, 426 aa, unidentified
MPTPTSNPEVVAWVGLDWADRAHEIRLQAVGSNEVESFTVEQKPEALHAWVAQLRARFPQGKVALALEQSRGAVIYALMNYDFLLLYPVPPKMLARYREAFVCSGAKSDPRDADLLLELVRAHSDRLRAWQPDDAVTRQLRLLVEHRRKTVDNRTALTNQLTDLLKTYFPQALEWAGDLRKEAACEFLEAWPSLQALGGASHSKLRHFYRRHRRLSAAELEELLQAIAQARPLTEDSALIEASVLMTQTLVLQLRAVISAVARFDEETQKLFQKHPDQGIFDSLPGAGDALGPRLAAAFGTDRKRYQNAEEIHKFSGIAPVTESSGKMHWVHWRIACPKFLRQTFHEFADQSRKKSLWAQAYYEQRRQGGASHHAAIRALAFKWIRILYHCWKTRTPYDESTYVQALHKRHSPLWLRTIALREASS

SEQ ID NO: 422784 - protein, 343 aa, unidentified
MLEVSTIGLDIAKNVFHAHGVDERGRALFSRKISRTKLLDFFAGQPRCVVALEACGGAHHWARELRDMGHDVRLIPPAYVKPFVKRHKNDAIDAEAICEAAQRPNMRFVAIKGEEQQASGMIFRTRDLLVRQRTQLINAIRGHLTEYGWVAPKGPSHVAMLGDLLEDEMAASVPESARAMFRLMLSLLEEQDGKIQDLDKEIARRAREDAVARRLMTIPGVGPITATAIAALAPPAETFAKGRDFAAWLGLAPLQRSTGGKQKLGAISKMGERTLRRLLIIGSSAVVLQASKRGAPKGSWLEQMLGRKPRMLVTVALANKTARIVWALLTRQEDYKAPVAAMA

SEQ ID NO: 422785 - protein, 370 aa, unidentified
MSQSRTLYVGMDVHQESIAVAYVAQEYGAEVVSLGTVGTRQCAIDQLIRRLQSKSKQRVFVYEAGPCGYWLYRDLTKKGHGCWVVAPSLIPKKAGDRVKTDRRDAIPLARLMRSGDLTPVDVPAVQDEAIRDLSRAREDTLHDLKTAKFRLKAFLLRHDIRYTGRATWGPAHLRWLSEVVCPTPAQPIVFQAYVRAVTEHTERLRRLEQELHEQVTAWRLCPVVDALQARRGVQLTVAVTTVAALGDLTRVDHPRPLMTYLGLTPSEYSSGERRRQGGITKTGNTHARRALVEGAWADRYPAKVSRHLQLRLEKLPKPIQEVSWKAQVRRCNRDRQLSARGKNPNQVVVAIARELSACMWAIAKQIPVSA

SEQ ID NO: 422786 - protein, 368 aa, unidentified
MNTVKFIGMDVHKNSITIAIAEEGSRDSARLFGAINNDLGALDKFCRKMVSTASELHFVYEAGPCGYGIHRHLTGKGFDCIVTAPSMIPKKSGDRIKTDSRDAKMLARLHRAGELTAVYVPDTQDEAMRDLSRAREDAVIAGRKAKQRLNAFLLRHGITYSGKTKWSKAYFNWLSDIAMPHPAQQIALQEYIDAVHENLNRVERLTEQIRQMVPNWRLAPIVDAFQAARGVSLIVAVTMLSEIGDLNRFEHPGQLMAYLGLVPSEHSTGDNIKRGGITKTGNGHARKVLIEAAWAYRVQPRVSRALLKRQENLSDPVRKIAWKAQLRLCARYRRLMAKGKPKQVVVTAIARELSAFLWAIAKQLQPVA

SEQ ID NO: 422787 - protein, 373 aa, unidentified
MPKYSTAFGMDVHLRSTTVCALDADTGEAVTRRFPGNPWGEIAGWMDGFPGPSLAAYESGYLGFAPQRELAGLGVECVVAAVSKIPRSAADSASKNDRNDAARMAKAILAHDISPVWIPSPEVEGIRDLAGAHDGATARLATAKQRLLAFLAKRGFVYGGTTPAGNPRKYWTYDFLRWLDKVRPEDDGGVRTLAALRNEVEAAAEARADLLSEYRAAVDASPIAAEVAALQSIKGCAFALAAAFSAEVGDFTRFRSGRQVTAYFGLAPSQRSSGDSVRLGGISGAGNALVRKLAVEGSWCYAAARHQPKLMPRDTGVPLEIRMHGRKGSERLLRRREEMLARGVPAAKANAATAAELVRWLWALGMMCREGAE

SEQ ID NO: 422788 - protein, 386 aa, unidentified
MRDKAFIADDYDVFAGLDVSKKSIAATFTGRQGFIRSLQMPYNVEYLLNHVRKHFADQKIAFVYEAGPTGFGLYDGLAAQGYRCLVAAAAMIPKAPGKRVKTNRLDSRGLSEGLRSGQIKSIHVPSAIYRELRHLTQLRDTTVRQAAAHKQRIKALLLLEGIDFPPAPAGRQWTLRVKAQLRRLQCSHSVRFKLDQLLDNLEFCEKQVVSSTKEIRRFCKEDAELLQSIEYLMSIPGIGWIVASQLLARIGDWRQIDNVRQLGSFLGLVPTENSTGDTVDRGSITHAGDGRLRSKLIQAAWSAIRQDPELREFYRSVCHRNGPSKGPRIAIVAVARKLSMRVYAVLKNQRPYVVREQVHSAPLTQEETSPQGTTRRCAEPGETNDS

SEQ ID NO: 422789 - protein, 416 aa, unidentified
MNKGQNTRGYERYMALDIHREYLLVGAQNEEQEWVLQPRRVSIEKFAEWAKKNIQAGDIVVLETTTNVWVVYDIVAPLASRVLVANAGEVKEIANARVKTDKEDIKKLLKLLIGGIVPEVWVPPMHVRELRAFISYRSRLVTTSTMIRNRLQSLLHKHNLMLSDAGLLDQSWWKAQKNISPLEQMQIRQELVLLQEVEKLKAAVDEELERQSMSATWGKPALQIMQLPGVGYIVAMTVLSAIGDISRFESAKQLVGYAGLGAGVHDSGKTHKDKKITKKGRRELRWAMVEAAWRAVRLSPFWKAEYEKHLKRMRKPNQAIVVIARKLLVAVWHVLSKAETDEHASEEDLAYKMLLLSWSLKEDTRRGLTYKQFAKYALMKLGVESDITRFVRRNVPRRLAPRDEVLAQMTELGLTL

SEQ ID NO: 422790 - protein, 423 aa, unidentified
MDILYERVAGLDVHKDTVVACVRIVAEGKTKRECRTFSSTTEQLIELRAWLEECRCTHVAMEATGVYWMPVFRILGEGPFELMVANAAHIKNVPGRKTDVNDATWIADLLACGLIKASFVPGEDIQELRSLTRTRKQLVREQTRHVQRIEKTLAEANIKLNSVISDIMGASGRRMIEAMIKGVRQPRQLAELAGKQIKATPKELYDALHGRLTDHHCFLLDLHLKQWDGLDGTIREIDREIDQRIGRLHTKRASGEVPFRTLIELLSTVPGISTLSASAIVSEIGCDMNRFPTAGHLVSWSGLCPGKNESAGKRKPSRLRKGAPWLKTMLVQCAWAAKRKKDSYYRAQFFRLQSKRGPQKAICAVAASILTAVYHILKNGTEHHDLGASYFDRRPLELKANQLVARLKKLGFNVQLQPAAEAA

SEQ ID NO: 422791 - protein, 372 aa, unidentified
MTTNTTSVTTTVIGGVDTHKHTHYAASIDDHGRVLGHEEFPANDRGYQELLTWLRRQGDIQAIGVESTGSFGATLTRALTKAGEQVVEVNRPNRLARRMDGKSDRLDAEQIARAVLGKTSTAVPKAKSGVVEVIRTLRVVRTSAVKARTRAFNTLWGVMIGSPSPLRDELVVLTKRTLVNRCLGLRPETDDLISISEDPTRLLMAGTKTALRNLARRWKSLDEEIKSLNRQIEALVRAAAPALVELHGVGIELAGQFLVTVGDNPERIRSDAAFAKLCGVAPQPASSGRTSGRHRLSRSGDRAANSALYIVTIVRMRHHQPTRDYVERRTAEGLSKREIIRCLKRYIAREIYANLPREAPVAAVGTGLPAAA

SEQ ID NO: 422792 - protein, 328 aa, unidentified
MNIIGIDVSKSKLDCALIDNSTHRKLKFKVVSNSDEGFVTLIDWIAKHTKSSISAYHFIMEATGVYHEKCAYWLFDSGARVSVVNPARVKYYGQSLGVRSKNDKKDSVVLAHYGLTQTPMVWQPEALEIRILKALASRLDAIEKDILREKNRHEKSSINPSSQTILNSIETILFTLNKEKLHLEKLIHNHINQYEYLKNNNALLQTIPGVGPVLSRYMLIVLGGRTFQSASQCAAYLGLVPIQNESGSSLCGRSRISKAGSPVIRAKLYMATISALQHNPDIKIQNQRLLKNGKSKMSALCAAMRKLVQICFGVIKHQQPYHVQAKFL

SEQ ID NO: 422793 - protein, 403 aa, unidentified
MVFVGIDWAEAHDDICVVDEQGHVLAKRRVPDGLEGVGKLHALVAEHAEDPAQVVVGIETDRGLLVGSLVAAGYQVYAINPLASSRYRDRHATSGAKSDSGDARVLADLVRTDRHKHRPLAGDSNLAEAVQILARAHQGLVWTRQRQANQLRNALREFYPGALAAFDDLDAAGAVAILERAPTPSRGRALSKAKIISALRQGGRERNLEAKAAQIQAQLRLPQLEVPALLSQAYGHSVAASVAVIKQLNLQIAALEQELAASFEMHPDAEIYLSLPGLGVVLGARAMAEFGDDRTRFLNPKARKSYAGTAPITKASGTRKVVLARIARNRRLADACYQWAFSALTRSKGARHRYDVLRARGQTHHQALRALGNRLVGILHGCLTNRQIYSEHLAWSPHLEVAA

SEQ ID NO: 422794 - protein, 366 aa, unidentified
MKKISTVQRVRNEIFKEQKLTIGVDLGDRWSFYCVLDEAGKIILEQKVPTTREAMKQAFGKIPRSLIALETGTHSPWVSRLLTELGHEVIVAHAQKVQLITKSNRKDDRHDARTLARLARIDPELLGPVRHRSAKAQIHLTVIRARAELVSARTALVNAARGLVKSYGERLPKCGTYQVSEKLAEGLSAELREVLEPLLKEVESLSERIKEYDERMEKIAKEVYPEVSLLQQVKGVGTQIALTYVLTIEDPYRFLKSREVGCFLGLKPGRRDSGESAPQKRISKEGDRYLRTMMVQGAHYILGPFGEDSDLRRWGLKLAERGGQNAKKRAVVAVARKLAVLLHRLWVSGEVYEPLRNSQKAMRAVA

SEQ ID NO: 422795 - protein, 400 aa, unidentified
MNITHSIGLDVHKSSARYHIFDSAAHRVARGPLKAAKAAVQQLLEKLHADDPATVLVVAEATGMLHLGFCEAFEKAGCRVVAINPLYGRNRSISNSIRDNKKDKLDAESLAELGLRDREELLKRFAFHCPVERFELQRYLSSSKILRKSLTNIIKHTATTVHTLFPELDELGLSVNQVRVCRLLRDHPSPARIAALEVAELSRYVGNKAAALKQAAAQSFAIQAIGATCEEGLLGTLLDTIEHLQEQLKQMDRKIDQLLISCVGTETIRLARSIPGFGAKTTPAILAFIPPERLQHSSKKKITRKLQALFGTDPRVKESGKWKGTTKISKRGVEIARTALFQAAFCGMTHDPQLRQYYVSLKARGKNHKQATIDLMRKQLGRLVSVLVNRNTFTPIPSQL

SEQ ID NO: 422796 - protein, 350 aa, unidentified
MSTHITIGMDLGDRDHFVIVLDAAGNEINCTRLINTKVALKRFFQPYSGATVAIEAGTHSPWISRLLEELSCQVYVGNPYKLRVIWDSTDKSDERDARMLAMIARLEPRLLWPIRHRDENTHNDLEVIKAREMLVQSRTKLTNHVRSAVKGIGERLPSCSTASFATRAADLIPLALQPALMPLLKTIAQMTDTIRALDKQIKTLSLERYPQTRCLQQVQGVGPLTALAFVLTIETPERFVKSRMVGPYLGLTPRRDQSGAIDKQLRITKAGNVYLRKLLVNCAQYIIGPFGADSDLRRHGLAIAARGGKNARKRAAVAVARKLAVLLHRLWISEQEYIPLHTRRKVKMVA

SEQ ID NO: 422797 - protein, 407 aa, unidentified
MQKFNAATHRIETASAQVALSAACAGGEAKQHAAYVGLDVHKETIAVAVAEPGRGEPIYRGEIANTPTKVAKLIAKLSEVYEGGLLLFCYEAGPCGYGLYRQLIASGHDCEVVAPSQIPKKAGERIKTDRRDALKLARLLRGGDLTAVWVPDQEQERMRDLSRARDDLKAQERKARQQLNAFLLRHGYHWPKGKSRWTPAHEHWLAGLKLDDPWQQVVLQTYIDAERAAGERVAQLSDQLMRALPAWSLAPVVDSLVALRGIDKLAAIVLLAELGDISRFDSPRQLMAFLGLVPSEHSSGGRRRQGAITLTGNRHARRMLVESAWSYRFPARQTRHLKAKASNASAQAKQIAWKAQVRLCGRYRTLTRAGKNTKLVCVAIARELAGFLWDIVRQEMPRLAQTPAASA

SEQ ID NO: 422798 - protein, 378 aa, unidentified
MSEITRGLMARVGVDLAKQVIQVHGVDAAGQRVVSRAIKREQFLAWCAQLPPGCVVAMEACTSAHHWARRLRAMGLEARLIAAHFVSPYRMEGRSGKNDATDAAAICEAASRPSMRYVPIKSCEAQGVMSLHRLREGYKEERTACINRIRGVQAEFGLVFGKSPKALRAKLADVLEDASNELSGTARLVLQRAFEHWRELDEHMRWCDRQVGQHVRGSAEARRMAKITGIGELGASAMAAGVGEFRQFKNAAQFGAWLGIVPSQNSSGGKTSLGRITRRGDDYLRTLLIQGAKSAVMSAGKRDDPTSRWLVQLTARVGWQKACVAMANKNARILWAVMTREQGFDPRHVSIKPQAKVSSKLRATQNTITPAELAGATA

SEQ ID NO: 422799 - protein, 343 aa, unidentified
MEHFAGLDVSVKQTSVCIVDGTGRLVREVRVASEPEALLPVLTNPLYRFKRIGLEAGPSSQWLFSALAEAGLPVICVETRHMRAVLQAQINKTDRNDARGIAQMMRAGLYRPVHVKTLRSQKLRMLLTHRKLLQSKAIAIENDLRATLRNFGLKVGVVGTVKFEARIRELVETLPDLAELVEPLLIVRRTLREQIGILHGRLLAIVRHDDVCRRLMTVPGVGPVVALTYRATVDVPARFRNSKAVGAVFGLTPSRYQSGEVNRTGAISRCGDEMMRVMLYEAAHTMLLRLAKWSWLKAWAMKIARQRGIKKAVVALARRLAVILHRIWVDGTEFRWTRETAAA

SEQ ID NO: 422800 - protein, 424 aa, unidentified
MKRTQNEKILQIKFETLVVGIDIGKDTHYARAFDCRGIELSKLLRFSNTNQGYEALEDWMQEIMKDKGKTEAIVGFEPTGHYWFTLGDHLQRKGHRLAIVNPFHVKCTRELDDNSQTKNDKKDPKTIAMLVKDGRFRDVYIPEDVYQELREAVSERERLVEQMISLSNQVIRWLDIRFPEFNQVFKNWRGEAAWLTLRHFPTPAKVAATGASSIVSTWRKKMKKPSLKKAEKLVNLAIRSIGRTAGNEAAEAALQNLLTQYEMVMRQKQDIEQLMQELLIKVPSASKLVDIKGMGMVAAAVIVSEIGDISRFNDPRQIQKMAGLSLRENSSGKHKGKTRISKRGRRRLREGLFRAMITMLATNSEFRQLHQRNLSREQNPLNKMESIVALCGKLIRVIFAILTKGNDYDADRMLNDMKRSMKAA

SEQ ID NO: 422801 - protein, 338 aa, unidentified
MNNSHIIGIDLGKNSFHLVGHDHAGNQLFKKKLTRQKLLEFLSCHEPVIIAMESCGGSHWLARKCTEFGHTAKLIPPQYVKPYVKTNKNDFIDADAIAEAASRPTMRFSSAKTESAQVISTIRKIRSGYIRERTACMNRIGSILLEFGISLPKGHASMKGLFQWLVDKNQNLPPLIIFELSELHEHYQNLNERIDSQADKVERILADNEQMKQLQSVPGIGPVIASACLSSVSNPNDFKNGRNFAAWIGLVPIQYSTGGKSTLLGISKRGNKELRTLFIHAARSILWRDKSVKKYLGSWLVELKRRKPFNVAVVALANKIARIAWAVLVSKKSFEIRT

SEQ ID NO: 422802 - protein, 316 aa, unidentified
MEVSHMFIGIDVSKARLDIAMRPSGESESVANDKAGIEALVKRLGEIQPALIVLEATGGMERQLSGALGGAGLPVVVVNPRQVRDFAKATGQLAKTDSIDALVLAHFAEAVRPVVRPLPDEVTLELRALTSRRRQITEMIVAERNRIANASKAVKKRIDAHIRWLEAELARADKDLDQSIRQSPIWRENEDLLRSVPSIGPVVSRTLLAELPELGKLNRKQIAALVGIAPLNRDSGTFRGHRGIWGGRATVRAALYMAALVASRRNSVICAFYKRLRDAGKAPKVALVACMRKLLTILNAMIKHKTRWSEITLQTS

SEQ ID NO: 422803 - protein, 405 aa, unidentified
MKTRIAQTKDGNKAIRLMRDEQVEVGIDVHKRTFSVTLWSEQRQSVVSCWTQPADAAALIRSLTPCRQNVGRVVYEAGPTGYGLVRALREAQFRADVIAPSRTPKGTGQEAKSDRLDSRKLALWSAKNLLRPVRVPTVEEEGDRQVFRTRDDAVAKRRRIKQQIKSFLLQHGIPEPEGLAAWSRRGIAALRKIPLSAQLRFSLDFLLDDLDHYNAQVKKADAALKSLAATDRHQQAAEALQTVEGVGPVTAMAVRTELIAPERFNDGREVAAMAGLAPLVSRTGETTRQGPLMKCGNARLRKTLIEAAWRWVAKDAWAGALYRQLVRNTGDKKKAITGVARRLLIILWRMSVTGQPYQPRSVEEAPSHPRSAKKGGQPGLPDKKTGRKRAPSTSRKRPVSVQPPR

SEQ ID NO: 422804 - protein, 460 aa, unidentified
MQNNGSREMKGGVPVGAPRVRVQVGIDAAVTANHHVCVRSLDLDGREHTDRFLAAPTLSGLALLTSRLAPYPGAVAVAEPTSMTWLSLSVAVSEAGGRLALLGSRHSARLRGAIVGKNKSDVIDADVLARAGDVFTLRPMPVVTPGQLALRRAVTRRGAAVIDGNRYWRRLMSLARWAFPDVWNAFGGSLPTAVALLGRWPHLAQLGAARRASLTAVVAEHTRAVADVPARVEQIRAAATAWARFWDCRLDLDALAWDVSEHLTDYHAALERVARATTQANTYWEQLFGDDELLHSLPGIGPATGPTMRAFFGDGTGFDTGKQAACYAGIVPSNWSSGTVTQPSRAITKEGPAVLRLACYQAANTARAIDPQLAALYHRLMTERGHCHTQANVAVARKLVERVWTVISRGQRYQLRDPDGQPITSRAAKALIAQRFTVPAEVRQRARAHSAATHRAKLTR

SEQ ID NO: 422805 - protein, 350 aa, unidentified
MIIIGADFHPAYQEIASVNTDTGEYQERRLAHPQEAEEFYRSLASVGQVVRVGMEASGQAQWFERLLEGLQLELWRGDAEVIRAKRGRKQKTDREDARHILKLLLKDDFPHIWVPSWANRDLRQLLWHRHRMVQARTRVMNQLQAVALNQGLRCKKRLWRASGRQQLESLQLAPWSSRRRGELLELLDRLNPTIAELNQAVEREAEKCAEAQRLMTHPGVGALTALAFVLIIGNVERFGCGKQVASYLGLVPLENSSGNRRRLGHITKQGSSLVRFLLVEAAQVTVRSLPEWRSKYHHLMMRRGRKTAKVAMARKLAVRLYWMWRKGWDYEQWKKFGSYVGQPGNRYGVQ

SEQ ID NO: 422806 - protein, 455 aa, unidentified
MKVKQVSALRSKRGLHRVNGAEPQVVGLTPQTTDIRKTDTMKTYILRQPKPVESQKPARVPRRKTQPVTTINAVLGRPPAPANGPVLFIGFDVHTDSIAVSLAPSDSVEVRRYGIIGGTHDDVLKLLTKLQAAHPGTELRCGYEAGPHGFSLARCLHRHGYHCVLFAPSKIPRQPGDRIKTNRRDADQLARLYRAGELTAIYIPDPADEAIRDLIRARDQVGDQQHRSRQQLKMFVLRHNLRYTGQTAWSPAHLRYLAKLKLPFPVQQIAFQEMLDGLTEAADRLERYDTEIARAVPGWRWEPVVRALMALRGFALLHAATIVAELGDLHRFSHPMQLMNYLGLVPSEHSTGDKRCQGGITKTGNAIARRALVEAAWQYRSPARLSPHLKKRQEGLPKAVTDIAWEAQRRLHHRYIHLTRVGKKKSQVAVTAVARELAGFVWAIACQVQPRAAQT

SEQ ID NO: 422807 - protein, 350 aa, unidentified
MELHAIGIDLGKTVFHLVGLSQTGEITVRKKFSRTQLLRFTANVQVHLIGMEACPGSHFLGKALREQGHQVRLMPAQYVKPFVKTNKNDYIDAEAIAEAVSRPTMRFVPIKTDDQLDMQSLHRVRERWIMRRTAVVNQIRGLLLQRGITVRTGRCHLDAALPNILEDGSTSLSGALRFLLIELRQELEQLAGHIEQAETLIQRAAQQSEACQRLDAIPGIGPLTATALIAAIGNGEAFRKGREFSAWLGLVPREHSTGGKQKLLGISKRGNCYLRKLFIQGARAVLQFRDKQCSGLRYWLAELSSRSHYNVVGVALANKLARMAWAVLARGEAYRPPLLADMNGLQMAPG

SEQ ID NO: 422808 - protein, 458 aa, unidentified
MGRSKSTGKVRRAMAMVHPNAAAIDVGATMHVAAVKADRTPEPVRSFGTFTSDLHRLVDWFAECGVDTVVMESTSVYWIPIFELLDARGFAVFLVNARDAKHVPGRKTDVSDAEWLQRLHSYGLLRASFRPKGQIVELRAYLRQRERLLEYGASHIQHMQKALTEMNVQLHHVVADITGATGLRIIRAILAGERDPAVLARLRDSRCHATVETVEKALTGTYRAEHLFALEQALALYDTYQEKASACDTRIEAVLKELSIRRGREAGPLPSPRHRKRRQPNGMDFDVRAALYALLGKDLTQINGLGPYLALRLIAECGDDLSAWPSAKHFTSWLCLAPSNKISGGKVLSSRTRRSGSRAAALLRLAAATVGRTDTALGAFYRRLSARIGKAKAVTATARKIAVLFYNAVRHGMEYVDPGTSFYETRYRARVIDNPHRRAKVFGFALQPIEPTPAIPVS

SEQ ID NO: 422809 - protein, 388 aa, unidentified
MPQTPNDLSRSLTALEQTTTLVAVVEMSQASWLVAGMIPGLERQPLKKIAPNEAALLSLLQRWQEEAIKICQTIRRITVAYEAGRDGFWLARWLCSRGIEAHVIHPTSVAVSREHKRAKTDRLDTAMLIRVFLGWLRGERGHCGMVAVPTLEEEDAKRPSRERENLVGERTRIINRMKSALVRLGIRGFKPELRRAPQHLEKLRTPEDVPIPLRTLEELRRDMARLAMVRAQIEAIEQIRLQRLEQAPQDGAHAMVRMLANIIGVGVETADMLVREILAKELRDRRALARYAGLTGSPNESGSKRREKGLAKSGNARVRRGLIQLAWRFLRFQKDSALAQWYRTRTEGAKGARKTSLIVALARKLLIALWRLVTIGEVPQGIVLRQAA

SEQ ID NO: 422810 - protein, 424 aa, unidentified
MNYTQNKKIAKVTDKTLVVGVDVGSDKHFARAILSRGYEVSKKPLEFTNTRDGFEKFVNWSNHLATENQLTKIFVALEPTGHYWFNLADYLKAYDVKIVLVAPQHVKHSKEMDDNTQMKNDRKDPLVIAKLVTEGRYMFPYIPEDVYAELRAAFNRRCDLVEALNRNANRMIRWFDIFFPEYREVYGKANAISGLMILMRAPLPSDILTLGVDGICQIWREAKVRAAGINRAQKLVAAAEKSIGRKGGEAVRRELWQLMEEHDLLSKQLNDIMQIIADLLGQIPGADRLLKVPGAGVVTVAGFLSEVGDISRFTDPKQVQKLAGLAVVENSSGKRKGLPGISRRGRKLLRWVLFQLARCMVKSNKEMKAYHQYFTTRKENPLKKMQSLMAIAGKIIRIFFGMLKNGTEYDPAIVMKDLNKAVAA

SEQ ID NO: 422811 - protein, 419 aa, unidentified
MTKFNTARQFVQVQPGSLHAGVDLALEKNVVVVINEKAQRLDHFIFPQDRGGYDYFLQRMEGLRQKHQAAGIIVAMEPSNYFWKLLAKELEEKKIPYHLVNAYTVKKHREGNQLDRSKDDRRDAGQIAELSRNGHYTETRLQKGAYEELRQYATLYDQLIQGLRREKNVLWGLVGQVFPELPRVFKDLTGETCQAFLGSFAAAASLRQLNIDDFITQVRKAFSGKKLCVSKLRQVYQLATSSIGVTEGLQAIQLAIQVHLAELHTLQEQLKRVVSAMTASLAPMPETPYLLSMKSLSTVSAAIFLAEVGDPNRYHTAAQWVKLAGIQPTPNSSGKKQRSQTPMSRQGRSRLRTMLYFTCLRLIHQDDHFAQIYSHLQRRSDNPLTKMQALGVLMNKLLHILWALIHNQTFYNPSLGQSI

SEQ ID NO: 422812 - protein, 320 aa, unidentified
MMAQNDPIVVGIDVAKDKVDACIRSLSQRHAFLNTAQGRRKMIALLHKHKVSKAVMEASGGYERNWAKVLRLAGIEVRIVDPKRVRSFALSAGRLAKSDTIDAEMIAWFAEIFDEAPSQIRDAAHEELVGLVKARKGMIDLKTRLQSQDEHAPPGPVQKAHARVLKSLAVEITRLEAAISAKVKATPEFVECAEIIESVPGLAETTSALLIAGMPELGTVSKQIAAALLGTAPYDDDSGKRRGERHIKGGRRWVRNAIYMPCLGAATQNNPVLKAFYQRLIAKGKEPKVALVACMRKLIIILNTMIARRQKWDSSRYALN

SEQ ID NO: 422813 - protein, 419 aa, unidentified
MTGISAMKKHIYRTKKINAIDWIQMKEQLQGSPVVFAIDVAKEKQYALLANADSSVSELLSWNHPEQTREVLTHLENLACPLTAVMESTGTYGDALRYQFRCSDFEVNQISAKRVSDARELYDGVPSLHDAKSATVIMRLHRDGLSIPWRESDDAERELDALRREYDLHQSQYQRNKNRLEAYLSRHWPEVLPLLPLDSVTLESLLIEYGSPEQIAKNTEEAAKNMLLWSKNQLKNEKIAVVIQSAVNTLGQPCIDAERRYLQALTAEMRHSRQQQKEVKDILEATVKADTGLSKLTSVIGLITTAVLLSCRLDPRNFRNARSFQKALGLNLKEKSSGRDVGRLKITKRGCSMVRRYLYFAALRLINNDPVVKAWYQKKVDARAKNKTVIAFMRKLAKALWHVARGERFDATKLLSVTA

SEQ ID NO: 422814 - protein, 338 aa, unidentified
MTIDVLGIDLAKNVFQLHGVDRKGHPVFKRRVMREQLLSVVAGIEPCTIAIEACTGAFCWARKFEELGHKVKIVGPQYVKPFVRGQKNDGNDAEAICTAVRQPHIPLVPKKSIEQQDIQALHRARQRMVNHRTAVVSQIRGLLLDRGIAFAKSIGRARRMIPEILASQANELTAMARDAIGELWDLLCDLDRRIESFDKKIAAVFKASEVCQRIAKIKGVGPKTATAIVAAVGDGAEFKNGRHMAAWLGLVPRQHSSGDRKVLMGISKRGDQHLRSQLVHGARSVVRVAANKNDPINQWVNQLQERRGFNRATVAVANKNARIIWAVLRTGEPYRPAA

SEQ ID NO: 422815 - protein, 520 aa, unidentified
MATTRTRRRSSPRRPAVSVGKPRGVLHPRVQQVGPEHFGIVCVDCAKARSKFLLADFYGRILIPPTTVSHNRPDLDAAVAQIRQAFATHQLRDGLVAIERTCRYHRIVQRTFAAAGFETRILHPFVTKQYRQPVDPGNKTDDTDLAAIHRATVTGCALLEATRDEAWTTLQLVIRHRRDLVRKGAALNCQIRDHLEAALPGYAACFDKFWESQIPWHLLRHFPTAEQLRAAGVTTLAQSLRQAGIRFQQRTVQAVCDWAQQAAPGDVAAGQHRRIALALYDDRQRKTQEIQALERDIAGRLAQTPYVLLLSFPGINVVSAADFGGEAGPLEHYANAKSITGRAGLRPSRYQSDQVDKAHGPLVRNCNRSLRAAILGIADNLIACNHHFQHLATRWRSQGKDPRDIHVRVAHRFCRIAFQMVAGRQVFRHPCIQGRHSILDKLNAFHGEHDTGMAEVLRDLQAAVGQVPQREHAAEARPLQEELQRIQEGRRRGPQPLGDILPIVLARLGVGVVQSAESGE

SEQ ID NO: 422816 - protein, 458 aa, unidentified
MPRKSSNKAKSQRRRERALLQKVHLNAAGIDIGANAHWVAVPEDRDASPVRSFGVFTRDLVALCDWLKSCQVETIAMESTGVYWIPLYQMLERKGFEVRLVNAHHVKNVPGRKTDVKDCQWLQQLHTFGMLAGSFRPAAQMCVVRSYLRLRDTLSKDCNSLVQRMQKALTEMNVQIHRVISDITGVTGMSILRAILAGERDCLKLAQLKHPQIKSSAQDIAKALDGDYCQEHLFALGTALEFYDSYQLKIMACDRHVQDALSAFELKGKAPAPDVSRMRCAEKRLEALRRHHLEEMTGADLTKLPGLDLLAVERILSEIGLDMSRWPSEKHFCAWLNVAPNNRVSGGKILSSKPRKNANRAAAALRLAAQSAMQSKSAIGAFIWRIKSRLGAPTAINAGAHKLARLVYRMLKFGKAYVEIGQEAYEKFFKERILRNLQRKAHLLGFQVTPITVTVPVS

SEQ ID NO: 422817 - protein, 340 aa, unidentified
MKGTIIGIDLAKNVFEVYVEDSANQSGKRTRLSRKKMLPWFANRAAALIGMEACGGAHYWARELTKLGHEVRLIAPQSVKPWVQTNKSDQADARAICRAVQEPGMRFVGLASETQQAMQAIHRVRSRYMSNRTDLINQTRGILLEYGVAIPKGVASVRKRLVLLLAEDRWSAQVRQFLTDQQAELRYWDDKLDAVMAQITRENAQQPICQRLEQARGIGPLGASALWGKTAGQFYQHGRHFAAALGLVPKHTGTGGKVRLGGISKRGDRYLRKLLIHGARAVVSHIGEKQDRLSCWIRRLVARRGMNKAVVALANKNARMAFALIHKDEPYDVTKMCGAE

SEQ ID NO: 422818 - protein, 339 aa, unidentified
MELYAGMDLHSRNTLVGVIDSSFKRVFEKRVPNDLSLIVDKLEPFGDRLAGIVVESTYNWYWLVDGLMDRGYRVHLANPSAIKQYEGLKHTDDRHDAFWLAHLLALGILPEGYIYPKEDRPVRDLLRKRSFLVKHRTAHILSLQSMLEREKAYKLKGNEIKSLRAEDIGRIFSEEHLVLSAQANRASIEFFGHHIKRIEKAVRKRVKLRKSFEYLLTVPGIGDILALTIMLEVGDIARFPRVGNFSSYARCVSSQRLSDGKKKGQGNRKNGNRYLAWAFVEASHHARRYNERLRSYYQRKCAKRNQAVATKAVCNKLARACYYIIRDQVAFREEALFCS

SEQ ID NO: 422819 - protein, 345 aa, unidentified
MTEAYDGRQVVGMDLHRRRSVLVRMTEDGRKLETVRIENSPQALRAVLARAGKNPRVVIEATYGWYWAVDVLQEAGAEVHLAHPLGVKAFSYRRVKNDERDCADLADLLRLGRLPEAWIAPPPVRALREITRFRHKLVGQRTSCKDQVHAVLAKAGIPVTRSDIFGRGGGIWLDGLPLPQPYAGKVASLRALIAVLDGEIARLEEQAAAMLAGERGYAAIRRLPGIGPVLGAVICAEIGDITRFRNPGQLASWAGLTPRHYESDTRVIRGRVSKQGSRMLRWALVEAIQRAPAGTKPRQVKDAIIARRGADARGIAKTAAARIMLTQVFYGLRDGHIRRAISQAV

SEQ ID NO: 422820 - protein, 388 aa, unidentified
MRQTDDLSKSLTPFVQGNTLVAIIELSLSSWLVAGVVPGIARQPLKKLEPDEAELLRLLQRWRDEAVKSGCAIERVVVAYEAGRDGFWLARWLRAHEIEVHVIHSTSVAVSREHRRAKTDRLDTAMLLRVFMGWLRGERGHCGMVAVPTIEEEDAKRPHRERENLVGEKTRIVNRMKAALIRLGIRGFKPELRRAPLKLDGLRTPEGLPIPPNTLDEIRRDLARLAMVREQIDLIEQARLERITQGPKTGPNAMVRLVASIVGVGVETADMLVREVLSRDLRDRRAVARYAGLTGSPDESGSKRREKGLARAGNARVRRGLIQLAWRFLGFQKDSALTQWYRARTDGVKGASKTKMIVALARKLLIALWRMVTTGEVPEGVRLRPVEA

SEQ ID NO: 422821 - protein, 349 aa, unidentified
MTLFVGLDVSVRETAVCIVDDAGKVVREQKVPTEPDDIVSLLASIGEDYGRVGIEAGPLSQWLVNGLTAAGLPVVCVETRHMMALLKAQQINKSDRNDARGIAQMMRVGLFKPVHVKTQMAQEQRMLLTSRKLLQRKLLDVESDLRGTLRNFGLKVGVVSVGKFEARIRELVASYPRLALVVEPILAVRRVMRQQFAVLHKMLLDTVRHDPVCRRLMTAPGVGVVVALTYRATVDQPQRFIHSRAVGAHVGLTPRRHQSGEIDYDGGVSKSGDTMLRTMLYEAAQSLLTQSGKWSWLKAWGMRVAQRRGMQRAIVAVARRLAVVLHRMWVDGTEFRWSNSTTAVPSQAA

SEQ ID NO: 422822 - protein, 428 aa, unidentified
MSAREAVEQEPEFVAFVGIDWADQKHVWCLQAAGSTQRETGELEHKPEVVEAWVSELCQRFGQGAIAVAVEQVKGALVFMLCKYECLHLYPVPSTMSSSMREALYPSGAKDDPRDADLLLDLLLQHRDKLRRLTPDNEATRRVQNLVEERRKLVEEKTAQLNRLSGYLKVYFPQMLEWFAKLDTKLACEFLEHWPSLEELQSSSPAEVRKFFRRRRGRHGELTEWRVQGIGQAMPAIRDRAVIEAKRLVVQVIARLLRTLLEGIATLDSKIAEAAEAHPDFFIFRSFPGAGAALAPRLLAALGSQRDRYASAEEVQKYSGIAPVTERSGKKKWVHFRWACPKFLRQSFHEWAGHSIAQSVWARAYYQQQRQRGKDHHAAVRALAFKWIRIVFRCWQERAAYDENRYLAALAKRGSPLTSVVAAAAISM

SEQ ID NO: 422823 - protein, 377 aa, unidentified
MSNVRFIGLDVHAETIAVAAAEPTGEVRSLGIIPNRIESIRKLVKKLGPVKQLRVCYEAGPTGYVVYWQLTALGVTCEVVAPTLVPVKAGDRVKTDRRDALKLARSYRAGDLTPVWVPDAAHEALRDLVRAREAAKKDQLRARHRLGKFLLRRGRRPPTAMKAWTHAHLAWVKSAVRFDQAAQEATLLDYIHEVDHVAARIGRLEAAIEAAVQAAPARLRAVIDALQALRGIALVTAVTIAAEVGELSRFATSRQLMGYSGAVASEHSSGERTRRGGITKTGNAHLRRVIVEAAWAYRHRPTVGGALRKRQATASVEVKEIAWKAQHRLHARYRALIGRGKCKQQVITAIGRELLGFIWAIGVYVESRTANGKPVAA

SEQ ID NO: 422824 - protein, 365 aa, unidentified
MSNSVASATALAAWSGLDVAKDTFEAALYLPQEPNSAPRPIASLRTKNFERSPQGVAAWLDWCDRQLAVYARQAGSPAAPPLRACMEATGRYSLELAAWITRQREAVEPAIVDPLGAHHYAKSLRMRNKTDRVDAAVLSRLGYERRFGPTTPLPPAWATLRQMTRQRDFLMGQLQAAQLRLPEMAACPEMQAIQRTLIAEFQKAIRKVDRAINKHVAAHLELKEAVRRLRTIPGVGRVTAVVILAELGDLRRFATSRQVTSFSGLNPKLFESGDSVHYVSHLSKQGSARARKALYMSAMSVLRTQGPLRQYYEHLLKQGKCKMSALGAVMRKQLVLMRALLIGDCDFNPQFVKTPPPSCREAACA

SEQ ID NO: 422825 - protein, 328 aa, unidentified
MCTLGIDVSKNKIDLCLLTAGPGGKKKHKVLTNEPAVARKVVDWLNAQKCVPESVTVVLEATGIYHENLAYGLHEAGVSVCMANPCRVREFAHGMDILNKNDAVDAFVLACYGELKSPAVWVPPSPEVRKLRALLRQRDALREDVQRTVNRLEKANSTSTPQEVIRSLERTKSWLNEELARIEKLITDHTDNDPGLKADLDLLKSIKGVKDQVGREMLTLLKDGTFKSASQVAAYLGLTPVEKTSGSSVRGRPHMSKTGPSGVRAKLYVAALTASRWNKQAKAIYERLVAKGKAKKAALGAVMRKLVHLCFGVLKTRLPWDENYVATA

SEQ ID NO: 422826 - protein, 392 aa, unidentified
MYFVGIDVAKRKHSLAAISKGGEKVITHFEFANSTQGFESMVEKLLSVGITFGNARVCFESTGHYGRSLHTHLAAYGFDVCQANPLQTSRFRKARSIRKVKNDAVDSLALAQWLLVENPVATPLSLAEMCELKEIARFRTFHSHIIGDCKRKITAILDQVFPEYVGFFSDSFGKTSLAVLARYPCASSVSRARLDGLSGVLRTHSRGRMGQDRAQALKELAQTSFGIDSAKEAHAFKLRQLIALLQFTQSQIAALDEEIEGLLDKAESPITTIPGIGSVCGAIIAGEIGDIGRFEKPSNLVAYAGLDPSVFQSGEFTGSRNRLSKRGSKYLRWALWIAADRARIFDPHLKAYYEKKRSEGKPHKVAISAVARKLCNIIFAMLKNNSSYVCPS

SEQ ID NO: 422827 - protein, 343 aa, unidentified
MSLNWQGGATPELPAVAKEQERVGDDFRYVGIDVGKRYVDVAYGAKGRVERFTNDDEGIAQINKRLQGQPVERVVMEASGGYQRQLLAALLAEKLPALAINPRQARDFAKATGRLEKSDGVDARVLALFAERVRPEVRAAIDPALEELQEWLTRRAQLMAMLVAEKNRVQQARGGGVRRNINEHIDWLKKRLRKSEKDLSGMMTKCPAWDAQVQLIDAEPGLGRLSSISLLAQVPELGTLSRRKIAKLVGVAPLARDSGDHKGARVTWGGRAAVRACLYMATLTAVRVNPTIRAFYKRLVARGKIKKVAFVAAMRKLLTILNAILRDGGNVATARIEAGLTIS

SEQ ID NO: 422828 - protein, 347 aa, unidentified
MRFYTQQHGYYCGIHLHARTMYVCIISQDGTVLVEKNIRARPGPFLDLIAPYRDDLVVAVECIFTWYWLADLCDEEGISFVLGHALYMKAIHGGKAKNDRIDAGKIAALLRGGMIPQAYVYPSPMRSTRDLLRRRLHLVRHRGRLLAHIQNTNHQCNHDDFRKKLTYKANREGVAERFEDPSMRKSVEVDLALIAHYDGIIRDLELFILRMAKQHDADMFHRLRTITGVGKILALTILYEVHDVARFETVQHFASYSRLVKCSKESAGKRIGTGGAKIGNVHLKWAFSEAAVLYLRKNPAGQKYLARLTRKHGKGKALSILAHKLGRATYFVMTRSRNFDEKKFLAA

SEQ ID NO: 422829 - protein, 355 aa, unidentified
MESVKYLGFDVHQSTISVAVVNADGKLVMQSVIATHAATILDFIHGLRGTLHLTFEEGTHSAWLYDLLARRVARVVVCNPRQNALLKAGNKSDTSDARKLAELLRAGLLAPVYHGEGSTRTLQELVRSYAALTEDTTRVMGRVKALYRSQAIACAGKKPYGRRHRPEWLSKLSQAGLHRRAERLYEELDALQGLRRAAKRELVMESRKHAAAKLLRTVPLLGAIRAALLIGRVQTPHRFRSKRQFWAYCGLALETRSSADYRFEDGQLVRAKKPVFIRGLNRNHNHDLKNLFKGAATTDSALHGPFREFYEGLLAKGMQPAMARLTLARKIAAITLSVWKKGESFDAEQLKPQAA

SEQ ID NO: 422830 - protein, 341 aa, unidentified
MQITTIGLDIAKNVFQVHGIDGDEKVVVRKQLRRSQVIRFFQALAPCLVGLEACATAHYWARELMKLGHKVRLMPAKDVKAYVKRNKNDAADAAAICEAVSRPTMRFVPAKSAEQQAELMQHRARDLLMRQRTQLINAIRAHMAELGISAPQGREGIKQLLAIIAADEDTRLPADARASLIVLAAQLQAIQTTIGSLERRIVARHRSNQDSKRLQTIPGIGVIGATAIAATVTDPTVFRSGRDFAAWVGLVPRGDSTGGKHKLGPISKQGDRYLRRILVGGAVSILRRAKLNPQRYPWVTRLLARRPFKVVAIALANKMARVAWALVAKGGIYRIPRLAAV

SEQ ID NO: 422831 - protein, 389 aa, unidentified
MLKEEKEYREGERTAVGIDPCKEFLQLAILSPDGKQEFKKLPLLPSITEEIVRSTVPERTQIGIESYGSYGKLFVFELLKKGYDVREVNPSISKKLTDLITEDHSDCLDAVSIAKALLLIPDLPKVSFTEKKLMLAKLSRLRKRLVKDLNGYLNRLHIALTEGYGAVYRKLFRTIFTGKALGYFERYPTINDAFSQRRKAITIIGEEKWDLLEQAGQWEKSFYLGLLKIEIRCLIRIIKALCASKKELEEKIKEAGAEDEDVRLLKTFPGIDYITASTLLSEIGNIERFEKEGCLSSSCGVSPVMWQSGTAKARTKRRKRYSRRLKGILYFISLSQIKINPESKDYYWRKRKEGKTHWQAMNALSRQLIKIIYYMLKNREGYQRERVVH

SEQ ID NO: 422832 - protein, 413 aa, unidentified
MQNNVITAVGIDVSKGKSMAAIRRPGGEIVQMPFEVKHTVLGLKDLVKLLHKTGGEIRIVMEHTGIYWRPIARALQEAGFFVSIVNAILIHDFSDNSLRKVKTDRADALKIANYALSFWDSLCELSSEEETRVLLKTQSRLYERTIDASVVLRNGLISLLDQTFPGVNKLFSSSSRNRSGHYKWIDFAKRFWHCDCVAGLSFQSFSETYGKWCKREGYVYYLSAAERIYDAAKQAVAVFPKNDSTKAIIVQSVNTLNAIYESLQTMREEMGRLASLLPEYDVVMEMHGVGKITGSQLMAEIGDVRRFTNKSALVAFAGVDAPPFQSGTFDAKSRRISKRGSPHLRRTAFMVCSSIIQIGNTDDPIYAFMDKKRAEGKHFYVYMVAGAAKLLRIYYARVSERMSSLNHDLKQSA

SEQ ID NO: 422833 - protein, 380 aa, unidentified
MASMHDSVRFKTTVYAAIELSKKSWVVAIARPDRDRPSIHRIAGGNLADLIGRLRKAAGEKQRIVVCYEAGYDGFWLARSLAKAGIDCRVLDPASIQVNRRARRVKTDRIDSLALLRALIAIDRGERHVCAVVRVPTVEEEDARRSHRERQRLVRERTGHINRIKGLLFAQGIRGIEPKRRRTRIDFGKLTTAEGRPLAERLRRELEREYQRLELVQSQLRIVEKERDTADAQDPAVERKRELLCALQGVGGASAAILAREVFARPFASRRQLGSYLGLTPSAYDSGSTTRCQGISKAGNSWARRVLIEVAWLWRKYQPGSPLSHWYARKTADQSPRIRRIMLIALARKLAISLWRYVETGLVPDGAVMAKTTPHMAAAT

SEQ ID NO: 422834 - protein, 448 aa, unidentified
MSNEIAVTAAAPEPEWAAFVALDWADQKHHWRLAVAGAQKQKQEQGELENTPEAVAAWAADLNVRFAGRPIAVCLEQKRGALVYMLLKFPQLVLFPVNPQTAACFREAFYPSGSKGDPGDTALLLDILLHHRHRLRQLKPDTVQTRLLQRLVEQRRRMVNEKTRQSNRLTACLKQYFPQILNWFDDVTSPLVGALLERWPDLEQLQRAHDGTLRDFFHKQNCRSKERNQERIEAIRQAVPATTDAAVLEGEAMVAHCLLKLIATLRDNIAELDERIAKAFAAHPEKVLFDGLPGAAAVLAPRLLVAFGTDRQRYASAQEMECYSGIAPVTEASGQSQWVHFRWACPKFLRQTFHEFAGHSIAKSAWARAFYDLQIGKGKEHHAAVRALAFKWIRVLFACWKNRTPYDEQIYLQSLRKRNSPLKALLPGGGALGWKDVAGFQKLSEDPS

SEQ ID NO: 422835 - protein, 412 aa, unidentified
MTHAQLTQFAGFDWAGDHHDVIIVDTGGQLVADFRFEHNAAGWQHWREKIAAWPHLGVAIETSFGAVVEQLIDSGVTVYPVTPSSAKGYRQRKYPSGTKTDRHDAWALADALRTDGHAWRTLCAKDPIIEELRMLCRDEVALIEERTALVNQARQAAREYYPTVLEAFEDWTLPGTWAFIERFPDTQAMLKAGKRAWEKFFHTHKLYRPETTARRIAVLEAAGQWHIAAHMINAKRLYLLTKIRQLRALQMQLEEYRRRIEAVFASHPDSGMFGSLPGAGAKLAPRLLGEIGSDRALYADAQSLQCMSGTAPVSYQSGKLHKVQMRRACNRHLRHTMHLFSDLSRARCAWAKVYYDGLKSRGKTHAQALRSLGQRWLNIIFRMWQTHTAYDAELHTRNQLQHGSWVLQHSPS

SEQ ID NO: 422836 - protein, 282 aa, unidentified
MNYYAALDVSLRSVHLCVIDDEGQLIAETKLSSEVTDIIAYLDALHLEISIVGLEAGTLAQYLTYGLLSADYQVVCMEARQVKAALSAMRNKTDKNDARGIAQLLRTGWYSKVHVKSMASHRVRALLSSRKAVLSKCIDLENEIRGLFKVFGIKLPPKLGHGSFDVAVRDIIETDATLSHALLPLLDARLVLYHCFRELDNRTRHMAHTDPVCQRLMSAPGVGFITALTYKAGVDDPYRFKHSRTVAAHFGLTPRRFQSGEIDIEGHISRCGDRDVRCKVMK

SEQ ID NO: 422837 - protein, 432 aa, unidentified
MEEVEDEPLFCERVAGIDIGKKMIMVTIRVPSDTRKGGRAQETREFGTTRKELLALADWLRCWQVEKAGMESTSDYWKPVYFLLEREGFDCTLYRASQVKALPGRPKTDKLDSAWLARITERGSLAGSFVPPEEIRRLRTHTRYRRKLVQMRTAQKERCEKLLEDGHLKLSSVISDIHGVSGRDMLGAIAAGEHNPKVLADKARGVMRGKIARLEEALDCSFFTPEHAFVLQMMLDSIDQLTAQIQVLDGKIADMCQPYEQQIEQLDGIPGFGITTAQDLIAEIGVDMSAFPTAGHLASWARTAPRVSESAGKRKGKNATGRGNPYIGGTLGEASISTGRTQTFLGAQYRRMCKRMPKMKAQGAIMRKQLVIAHALLSDPEARYEDLGPDYHERRKDTHRRARSHLRELERLGYKVTIQAIDPATGELLPAS

SEQ ID NO: 422838 - protein, 317 aa, unidentified
MNKEIFVGIDVSKSQLDIGVRPSEDSEHIGFENSVDGITFLVEHMKTIRPALIIIEATGGLETAAVCALAEAEQPVVVINQRQARDFARATGKLAKSDNIDANSLAHFGEALRPEIRPLKDTETLELTALMSRRRQIVEMLTAEKNRMLSAPKWTKKNIKTHITWLEKNLDQVNKDLQRLLRKSSVWREKDDIVQSVPGVGPVTSLTLITELPELGTLNRKQVAALAGVAPLNRDSGISRGRRTVWGGRAALRAVLYMATLTAIRFNPVICAFYQRLMTAGKKHKVALTACMRKLLTILNVMIRDRKQWQTPVEKIA

SEQ ID NO: 422839 - protein, 343 aa, unidentified
MTYYVALDVGLRTVSLCIVDEAGRVKLEKSLPSEIEDIVACLRGFGEEIACVGLEAGTLTQWLTYGLRAAGFKPVVLEARHVQAALAAMRNKTDRNDARGIAQILRTGWYRPVHVKSIESHYVRTLLAARKALLRKCIDLENEVRGLLKVFGIKLMPGLRHGAFDRAVREPIEANGALRHALVPLLDVRLHIYRTFLEMDRRVKALAHADQICRLFMTAPGVGYIAALTFKSAVDDPSRFKRSKTVAAHFGLTPRRYQSGERDNPGRISKAGDTEVRSALYAAANIIMTRSTKPSTLKAWGSRLARSKGRKRALVAVARKLAVILHTMWIDGTEFCMQAQEAA

SEQ ID NO: 422840 - protein, 388 aa, unidentified
MSIIDRPDALAATAVENGIIAVSLELSRSKWLVTSLVPGSEKMSKHMVAAGNVAALLALLVRRRRQAEERVGGPVRVVTIEEAGLDGFWLHRLLEANGIESHVVDAASVAVPRRRRRGKSDGIDGETLLRTLLAWRRGEPRVCSMVRPPSPREEDRRRVVRERAVLIGERIAITNRIRGLLMSQGVSDYQPLRRDRRQRLETLVTGDGRALPPQMKRELLRALDRLDLLVQQIKAVEAERDAAQEATASEAATDDATRLLLGLRAIGPQTAAVLMLEAFYRHFDNRRQVAAFAGLSPSPWQSGAVVHDQGISKAGQPQLRKTMVELAWLWRRHQPGSALSRWYAQRARGQDARRRRTLIVALARKLLVALWRYVSAGVVPEGAAFKPA

SEQ ID NO: 422841 - protein, 353 aa, unidentified
MLAELVDHVIGVDPDRDWITAGIVEAKTTRLVETARFSADRNGYAQALSWAEQHTTAGERVWAIEGAASYGRGLTAALSRADEWVVEFDWARQKASKDGAKSDELDAIRAAREVLGRAKLSAPRSHDGHREALRVHHVARAGAVRARTAAINELKALVVTAPDELRCDLRNLTTRQLVAACAGFRSSRSRTVSRQCTQLTMRALAQRITHLNDEIAEHDHALVELLNEVAPQLLDEVGIGPVSAATFLAWSHHGRCRNEAAFARLAGAAPLPATSGLNQNRHRLNYGGDRRINRALYIVAVTRLRQDPATRAYMERRLAEGKTKREVIRCLKRYISRRVWRLLEHAPPRELAA

SEQ ID NO: 422842 - protein, 340 aa, unidentified
MENYIGIDIAKSTLQIYIPLNKIDIELENSPDGLKQLYSKLKKLYGKAKKDINEIVFVYESTGSYSTMLESYCQKQEIKCFKVGAYQSSSFSKTIKNRNKTDKVDARMLSRMYILAEPNDIKVPYRDTKAHQIRSLMKYYQSLVKEETRLSNYLEAATYNLEDDYVLHKVQLKIKNLKKEQTTLISKILTIIKDNKEYSQAYDNITSIKGVGEKSGIILLYLFIRYPNASRQHITALSGLDPIKKESGTSVNKRARISKQGMSIVRSILFMPVMTTVIYNAEMKHFYDKLLKRGKCKSLAQIAVMRKIILLAHSLYKNNEEYNPEKYLEYIEKEEVEIMA

SEQ ID NO: 422843 - protein, 342 aa, unidentified
MDIAVLGIDLGKTICSVAGLDGDGTVVLRKRIQRHRLLNFLAELTPCIVAMEACGGAHHVGHFCAEHGHEPRLMSPLYVRPYVKVHKTDDRDAEAIAEAATRPTMSFVTLKSLEQLDLQALHRARERLVQNRTSLVNQARGFLMERGIRIGTGRHVFQRELKLMLDDDDQCLMPGMVHMLSEMAVELAAVNDRITGLDAQIRAHAREDADMRRLMEIPGVGPTIATALVAAIGDGSSFNKARDLSAWLGLVPRQITTGGKARLIGISKHGNSYLRKLFIHGARTVLHLVRDRSTPLAKWVDALKERTHANVAGVAMANKLARIAWAVLTKGERYRPSALEAA

SEQ ID NO: 422844 - protein, 403 aa, unidentified
MVTQIENYDQVDVFVGLDVGKGEHHAVALDRTGTKLHDRALPNDERRLRAVLADLQKHGVVLLVVDQPATIGALPVAVAQAAGALVGYLPGLAMRRIADLHPGEAKTDARDAAIIAETARTMPHTLRSIQVTDEQVAELAMLCGFDDDLGAQITQVGNRVRGLLTQIHPALERAIGPRLDHPATLDLLQRWPSPAQLRTAGEKRIAARMLKLAPRKGRDWAHEITAALDQQSVVVTGTNAAALVIPRLAAQLATLRKQRDDVAAEVERLVDAHPLQPVLTSMPGVGVRTAARLLTEVAGKHFPTAGHLAAYAGLAPVTRRSGSSIRDEYSSRRGNKVLKNTMFLSAFAALRDPDSRAYYDRKISQGKRHNQALLALARRRSDVLYAMLRDGTLYVGETRRQAA

SEQ ID NO: 422845 - protein, 323 aa, unidentified
MTYIGIDIGKSSFVAAYPTVSGYRTRTYPNTVKGIRSFIGSLCVSEHHCVMEATGNYGFLLLYLLDRQGIAASMVNPKQIKHFSRMMMTVTKTDTKDACLIAMYGVKMNPPAYKMPSESLMLLKQKKTIIRQLKKQLTASRNLKCSLVVLPFQDRNGMKALDKTISFLAAQIKALESELADLASSEFDRQLRLLTSIKGIGITLATALIVATGAFACFDNAKQVSRFIGICPTYQQSGTSVYVKGGINRNGDANLRSLLYVASWSALRGYSACKECYERLKANGKPSKVALIAVANKLVRQAFAVIKSDTPYVDGFISSHQLK

SEQ ID NO: 422846 - protein, 344 aa, unidentified
MPTTIAVDLAKNVFEIAVSRHPGRIAERKRLTRSRLPTFFLQQPVATVLMEACGSSHYWARLIEAQGHQVRLLPPHHVSRYRTGNKTDRADARALLEAHRNEEIQPVPVKSIEQQALTALHRLRSRYVATRTSRINTLRGVLREFGLIIPKGGPRAVERLEAVIHDSESPVPAMLRPVLAEACLEIRALAERVESLGRQLEVLGRRMPVVAHLNSIPGIGHLTATALVAFVGDVRRFRSGRHFASYLGLVPKEFSSGETQHRGRITKRGDTYLRMLLIHGARSVLVSAARCQKQDSLRNWALELVRRRGHNTATVALANHLARIAWRVWREDRDFMERPVAASA

SEQ ID NO: 422847 - protein, 430 aa, unidentified
MKSNTQNAKIEAITEKTLVLGIDVGSEMHYARAFDYRVIEYSKKPFKFSNTEAGFATFKEWVLDLKERHEKDKVVPGMEPTGHYWFNLGKFLQDNEMKPVLVNPHHVKKSKELDDNNPTKNDRKDPKVIAGLVREGRYMIPYLPEGVYADLRTASNIRFQLQAELTRIQNRISRWFNIYFPEYKTVYGKPDAKSGMLILKAAPLPEDILTLGIDGVNQIWRDAKLRAVGKARAKTLIEAAEHSVGSKEGAVSARMEIRMLLEDYESRNIRLQEVMTLIEGLVKQIPMAEKLLEIKGVGIRTVSGFLAEVGDISRFNNPKELQKLAGLALVENSSGKHKGETTISRRGRKRLRYLLFEVAMSLVSKNQEFRELHNYYTTRRLNPLKKMQSLMAIAAKLIRVFYAMLTKGVDYDPKKMVSDIKRPAVYLQAA

SEQ ID NO: 422848 - protein, 351 aa, unidentified
MKKIFIGIDFSKEKFDATLIKAEGLKECAPSVHEVFDNKTTGFRRLVTWVKAQAESASIDSWLFCGENTGGYSIGLSNFLYASAYDMWLECAYKIKHSVGIQRVKNDRADSKAIAEYAMRNYDKMILYKPQSTSLTCLREVFLYRHSLVRQKVSLQVRRDEKRLTQERTDVRAFMSFTSKHLITEVNKAIAKCDQKIKDIIAADDELKEIFDIITSMPGIGIQNATCLMVYTDNFQKFDMNARKIGCYYGIAPFGRQSGSSVNSRPQVSPFANRMIKSLLSQAALAAIKFDMNVYNYYQRLRERGKHPLLIHNNIKNKMLHVLVAMVRDRVKYNPDHVYQTNKEIAYSAKC

SEQ ID NO: 422849 - protein, 356 aa, unidentified
MDSVYYVGLDVHKKSISFCVKQADGTVVSEGQVAARRVELTAWVRQLPGAWVGALEATLFSGWIYDFLRPFALSLEVAHPAMLKAIAASKKKNDRVDARKITDLLRCNLLPRCYMAPSDLRELRRVLRYRNLMVAEAVRMKNKTAGLLMEVGAEYNKEKLHHKGYFRELLDSVTNVPGSVLDLLKLTRGATEMFETAQQRLVAGLCRHPQLRERVERLQSISGVGEILSLTWALEIGEPERFHSVKDAVSYCGLTSAQNSSAGQEHRGPISKQRNKYIQTILIEAAKVAPRWNPTLAAVHARERERGNANRATLSVARKLVAYLLAVDRSGQPFVAESPATEPRQAAESAQTVAAA

SEQ ID NO: 422850 - protein, 353 aa, unidentified
MKRYYVGMDVHRASIMIVVLNGAGKVVMQSVIETGAERVRGYLKQLRGKVSVTFEEGTQASWLHEVVRPLVTEVVVCDPRHNKLVQSGNKSDRVDAQKLAELLRVGSLKAVYHGDHGVRALKELVRSYDCLVSDTTRVMNRLKAIYRGRAIGCAGHDIYRQDRRAQWLEKLTERGAKQRASFLYQQLAALKPLRHEAKRMMVKEARRQPAYPWLMSVPQFGSVSVAQLLAIVNTPHRFRSKRQFWTYIGLAVVTRTTADHEVVNGVLRRSQRPVSTRGLNRNHNHLLKRVFKNAAKGACHGGPFKAAYELRLAQGMVPSLARLTVARQLAAITLAMWKRGEQFNPERMKQQAA

SEQ ID NO: 422851 - protein, 370 aa, unidentified
MNRLSVGMDVHKEKVVMVGLPERGDTPVMRETFRGDNISGIVKRLKTLSRACAVESCYEAGPSGYGLARVLTEAGISCRVVAPSLMPRRPGNMVKTDIRDAKELAAALRAQTLEFVRIPSCEEEEVRGLVRCREDIARQLRSFKQIVSHWLLSHGYRLPAKVNRWSPTFWRWVRSLPLPPLEQMVLDHYLDVLLMLEDRRKQVESQICELADREEYRERVCRLGPLRGFSKLAAMRLIAEVMDFNRFPKASAFMKFTGLVPSEHSSSDRIRRGRITKGGNSHIRHVLVEAVQRAHVSARPGRSLLKRQEGAAGEFRQIALKCLLRLYRKFWAYTKRGVPVGKVRVAMARELAGFVWALMVHPAPVLTAAA

SEQ ID NO: 422852 - protein, 403 aa, unidentified
MAEKIIEVTGGVDTHKDVHVAAAANEVGRTLGTRSFPATRPGYRNLLSWLRTFGTLSCVGVEGTGAYGAGLSRFLIDEGIEVVEVNRPDRQRRRLRGKSDTVDAESAALAVLSGEATAVPKAREGLVEGLRALRLARRSAIKSRTQATLQMRDLILTAPDDLRSRLEPMPATERASVCSRMRPGDFSDPTQIVKAALRTLGQRFEALTDEILFLDPQISSLCAQINPALLGAHGVGPEVAATLLVVAGGNPERLHTESAFAALCGVSPIEASSGRVTRHRLNRGGNRQANNALWRIVLVRLSTDPRTKAYVAKRTAEGKTKKEIIRCLQRHVAREIHRLLVDDHISIAGETLRAQRQDANISLATAATELATWPIAISRLERELTHDTKLATRYQTWLHDQAA

SEQ ID NO: 422853 - protein, 323 aa, unidentified
MNTLDFLGIDIAKKTFNVALLRNDKLRHKKFENSPEGFKQLDSWLVKQGVIEIHACLEATGSYSEGLALHLHQAGHKVSLVNPARIKAFGQSELRRNKTDRADATLIARFCSMHRPAAWVPPPAEIRELQALVRHLDDLIGTRTQLGNRFTDGPKIKSVLESLKTLIEAVDVEIKLTRKKIREHIDQHPGLKEDCELLETIPGIGEKTATTLLAEIEHLRHYKHARQAAAYAGLSPRLRESGTSGKRSRLSKTGNSKVRKALFMPAISAKQHNPVLRQFSERLARRGKPKMAIIGAVMRKLLHLAFGVLKTRKPFDPNHPVTA

SEQ ID NO: 422854 - protein, 379 aa, unidentified
MPRGSTRAAAHNHILEEPAMAKARTLVGLDVHAAKIVASVLDADTGEVKSFAMKGETAAAAGFCAGLPRPVRVAYEAGPTGYVLARELAKRRVECVVAAPSKIPRASGDRVKTDARDAEHLVRLLLAGKLHPVRVPGPEEEALRDLVRARETLRLDLMRARHRLSKMLMRHGVQFDDGRAWTDRHRAWLKTVCLEWPAAQTTLLDLEGVIDVLVHRREHLEREIVAILPGSPWETQVGRLRCLRGVDTLTAVGLCAEVGDFERFAQAGQLMSYLGLVPSESTTGNTRRLGSITKTGSAHARRLLVEAAWHYRKAPAVRKTLTDRQAGQPAEAVAIAWSAQRRLHRTWARLEARHKRRTIIAVAAARELVGFCWAIAQIE

SEQ ID NO: 422855 - protein, 325 aa, unidentified
MSNAILGIDVGKAEIAVALLIDNNSAKKEIFNNNDKGFKSLNKWLKQKKVSTLKACMEATGNYSNNIAEFLYNNGHEVHVVNPVCIKAFAKSKLIRTKTDAVDALVIAQYANITELIPYKPQTSAVKKLKALHRCLDDLKRQCVQISNHLEHKEHVPKSVTSTWKRLLKNFKNEMKSIEKSLDELFENNIALKQRRDNLQTIPGIGKTTATSILAESPDLTSFKSPRQYAAYAGLVPKHRTSGSSVRGKARLSKLGSSKLRKALYLPAVVAKNHNPILKAFSDKLKSKGKHNMVIIAAIMRKLLHICFAVIKNNSAFDPNFIPSK

SEQ ID NO: 422856 - protein, 389 aa, unidentified
MKIFVGIDIAKLNHFVAAISSDGEILIEPFKFTNDADGFQLLVSKLESFDKNSIIIGLESTAHYGDNLVRYLVAEFYQVCVLNPIKTCQMRKNNVRKTKTDKVDTFVIAKTLMMQDDLRFITFFDLDMMDLKALGRFRQKTIKQRTRLKIQLTTYVDQVFPEIQYFFKSGLHQNAVYALLKEAPSPKEIASMHMTHLANLLKVNSHGHFTKEQAKELRVLAQKSVGANDSAISIQITQTIQQIELLDSQLEKIEAEMTDIMKFNDSVIMTIPGIGYINGGMILGEIGDIHRFSNPNKLLAFAGLDPSVYQSGNFQAKTTRMSKRGSRVLRYALVNAAWNVVRNNATFKAYYDAKRAEGRSHYNALGHCAGKLVRVIWKMLTDEVEFNLE

SEQ ID NO: 422857 - protein, 359 aa, unidentified
MTTTATTTAADTILALDLGKYKTVACAYDPDTTQPRFDTLATSREQLRKLFARLRPQAVVIEACLLAGWVHDLCHELGVPCHVANTASEAWKFKHTKRKTDKDDALRLAQLFALGQLPTVTVPPPATRQWRALIASRQALVGRRVAVQNRLRAILVGQGLPAPRGAKAWTELGLQGIGQFAKPLSECGPDELWRGLLHLALTELRQVRELADQAEARLDQLARQNADVQLLETTPGVGPRTAEAIVAHLHEPGRFQSGKQVSAYVGLVPRQYQSGELDRRGRITRRGPALLRKLLVECAWVMLRYNRWARAVYQRLSRGKARKKQAIVALARKLLVRCWAMLRDQAPWRDAAPAEATPA

SEQ ID NO: 422858 - protein, 377 aa, unidentified
METLHKRCAGLDVHSETIVACVILGESETDLIKETETFPTLTKDLFHLLKWLEEKEVTHIAMESTGVYWKPVYNILEDFFDITLANAQRIKNVPGRKTDVSDAEWIAKLLRHGLIEKSFVPSEDFRNLRDLTRLRKKWIGHMTSEKNRIQKVLESSNIKLSTVISDVFGVSGRKLLEQLMNEGYIDQEDVEQKIHGRMAHKKQLIIDSLFGTLNDHQLFLIKQSWMHIVNLEELISDIEKRIDVILSNYQEEVQLLITMPGIKKDTAAVIIAEIGVDMGQFPTSKHLASWAGLSPGNHESAGRKKNTKTVKGNPHIKSALCEAAWAVSRSRKQRLGIKYWSLAARRGKKKALVAIGHRMLTIVYHMLQNKEPYHEST

SEQ ID NO: 422859 - protein, 344 aa, unidentified
MAIAVLGIDLGKNSCSVAGLDGTGRVVLRRRLTRESVVRLAGTLPACVVAMEACCGAHHLGRVLREQGHEVRLMPPEYVQPYVKAQKNDERDAEAIAEAATRPTMRFVELKSEAQLDAQILHRARSRLVGQRTALINQLRAVLLERGIVVAKGRRRLEEYLIGLLDGDRPATLSPRTCLLIEDMRLEWSELDRRIAALTAEFVARAREDQAARRLATIPGFGALNATALVAAIGTGETFRRGRDLAAWLGLVPRQATTGGKPRLLGITKRGNTYLRTLLIHGARAALPSLSASQSPMGEWLRGLIGRAHKNKVIVALAGKLARVAWAVLRSGESYVKEGRPVAA

SEQ ID NO: 422860 - protein, 372 aa, unidentified
MNYNTVYVGMDVHKESFTFCAYTIDAEKGSHFQRTEADYKNVLRYLEFLRTVYGNDANFICGYEAGCLGYTLYHQLTEHHVNCVILAPTTMLEQRSKKRIKTDKRDAEIIAKCLAQHNYSPVHIPTAADEETKEFLRMRDDHKLALKKVKQQILAFCLRHNYRYDGNSHWTAAHIKWLKSLKPEALYKEILDEYLLTYTALSDKLERLDKRIEELASKDEYKESVKKLCCFIGVKTHTALSVLVEVGDFHRFASAQNFASYLGLVPGEDSSGNGQTRLGITKAGNRHVRMLLTEASQCYARGQIGFKSKELKSRQAGNSPQVIAYADKANERLRRRYYKMVLGKSKKPNVAKTAIARELACFMWGMMTDHVA

SEQ ID NO: 422861 - protein, 355 aa, unidentified
MDSVRYIGLDVHRDTVPQLCWIKEGKLVMQSVLATRAPAILDFLGGIQGTLQVTFEEGTHSAWLYDLLVRRVARLVVCDPRKNALLKSGNKGDLIDARKLAELLRNHSLSPVYHGENSALEMQHRTRSYTTLTEDTTRVMSRLKALFRSQAIHCPGKKLFRPDYRESYLTQLGSEGLRQRAECLYLELDALHRVRLRAKREMVAECRKHPATKCLQSVPFLGKVRTAVLIGWVQTPHRFRTKRQFWAYCGLALETRDSAEYRVVHGQVQRRSKPVLIRGLNWNHNHDLKNLFKSTATMASVRAGIFREFYLGLLSKGMKPEMARLTLARKIAAITLKIWKEGETFNAEHVKPQAA

SEQ ID NO: 422862 - protein, 408 aa, unidentified
MNTLYVGIDVSSKSNVIYLMLPNGDKHSNFSVANSHEGSTQLVKRIHSALTSHSLDTVLIGLEATSVYGDNLVYFLREDATLAPFNRKIHVLNPKQVKKFHDTYNDLPKNDYVDSFVIADCLRFGRINKEVYMGDYRYKALQNLTRARFFSVQNLVKEKQRFMNVLFKKYSTMTQEKVFSDTFSTTALAIYDEFESAEALANMDLHELTDFIMKKGKNRFPDPDAVAKAIQKAARSSYRLPKTVNDSVNQVLSISITSMKALESQIKEFDKAIKAQMELLPNVLISIPGIGPVYSAGIMAEIGDINRFNSQAALAKYAGLAWKQHQSGGFEAEVTRLIPSGNRFLKYYLCEAAFSLVRCDKEYSDFYYLKYKEVNRCQHKRALALTARKFVRLVFRLLKDNRLYCPAK

SEQ ID NO: 422863 - protein, 450 aa, unidentified
MSKRKMNLEIVNPNAAGIDIGSRSHYTAIGQGSDQVKEFGVYAEDHLALIDWLAENEITTVAMEATGNYWQNLFTALQNAGFEVLLANGKFTKNIKGKKTDVLDCQWIQKLHSLGLLSGSFLPDHTTEQLRTYCRHRTNLLDTAASTSKKMSKYLRLMNLRLDVVVNDICGLTGLSIIALICKGEKDPQKLAALRNGNCRKSEQEIAKALQSNGRKDFLFALKQEFQTYNEIQKKIEQCDKMIARFMNDFFRGRPELKKLKAPTKSYKRITKNTPKNIDLNQVAYKYFGGVDLMQIEGVSHSTVLSIMSEIGPEGFKKFQTGKQFASWLRLAPNNKISGGKILSNKIPKGSNRLKIALRQAANVIGNLKNANLHNFFIRISIRKGRSAAITATARKLAIIIWNMIINRQEYKPINPYEFLDEKRKRIVREMQKKIAKFDIQTNEFNFTSV

SEQ ID NO: 422864 - protein, 390 aa, unidentified
MLIIGCDYHPSWQQICWMDTLTGETGERKLEHAQGEAEKYYRTLPSAALIGMESTGNCQWFTELMASLGHQLWIGDAARIRAAEVRQQKTDRRDAALLLKLLLEGRFPRIWTPSVEERDQRQLLLHRHKLVEMRVRVKNELQHLAMNRGITKGRRLWSKAGERVLCELPLAPWASQRREDLFRLRKMLDEQIAALDAAVKEVAERNDRARLLMTHPGVGPITSLAFVLTMGDVNRFPRGKQVGSYLGLIPREHSSGGKQRTRSISKQGYRCMRTLLVEAAQSVVRYEPEFRKEYLHRCHQSEKGVAKVAAARKLAIRLYWMLRSNTAYPEIVRVESSSRVWTASLPEQAGRPVRNLDWALSHPGWERGVRTKNHGRSYGRIDGWRSDPQK

SEQ ID NO: 422865 - protein, 339 aa, unidentified
MTYQYFCGWDISKLTLNYCLQDQQSRVVKEGQIKNSSRAISALVKQLHTHFSIAKGAILHGAENTGQYAHPLCRASVELHFPLWLEDAFQLNRSMGRQREKSDLVDARGIAEYTRRFADKARLYELPTKFQLKMKHLAKVRQHILRNAQRSKTMFQEMQQFSLVQIDPRTVEIFQEHLRQMKHQLELIEQRIEACIAKADQAIRRKIAVARSVPGIGPKNSIAILVITGLFERIPSARKCASYAGISPHERQSGTTLRQRFRASRSASRSLKTAFHQGAMSLIQGDNLFNQLYRRLRANGRSHKQAINAVRNKIIKVLYACLEKDTMYCKKYHENLHRL

SEQ ID NO: 422866 - protein, 346 aa, unidentified
MAHFVGLDVSVKETSVCVVDDAGRVILEQKVPTEPADIIALLTSLGVSYGRIGIEAGPLSQWLVNALTAADLPVICVETRHMKALLTAQQINKTDRNDARGIAQMMRVGLFKPVHVKTLVAQQQRMLLTSRKLLQRKLLDVEAELRGTLRNFGLKVGVVSGSRYEARVRELVAGFPGLAAIAEPLLNVRRVMRQQFAVLHKMLLDTVRGDPVCRRLMTAPGVGAVVALTYRATVDQPQRFVHSRAVGAHVGLTPKRYQSGEVDYDGRVSKCGDALLRTMLYEAAQVLLVHSGKWSWLKAWGMRVAQRRGIRRAIVAVARRLAVVLHRMWVDGSEFRWSKDSAAVAT

SEQ ID NO: 422867 - protein, 403 aa, unidentified
MNSVGIDISKGRSTVAVMRPFGEVVISPFEVRHTDSELSELARQLKSLDGETRVVMEATGNYHAPVAKLLHDAGLYVSVINAKLVHGYGNNDLRRVKTDKKDAVKLANYGLDRWLTLPRYVPEEDTRLLLKNSYRQYRQYSKVQTVLKNNLISLLDTVFPNVNRLFSSPIRVDGSEKWVDFVAEFWHCRCVSEKSQKAFTNKYQRWCRKHGYNFSEAKAHTIHAEACGHIDVIPKSETTKLLVEQAVAQLRATSAALAALKHEMQALASMLPEYPVVMDMFGVGPTLGPQLIAEIGDVRRFYSKKALVAYAGLDAPPNDSGDVTGRHKSMSKVGASSLRRTLFLVMSVYLQTAPLDEPVYQFMDRKRAEGKPYRIYMMASANKFLRIYYATVKAYLESLEHTA

SEQ ID NO: 422868 - protein, 399 aa, unidentified
MLAVGIDISKSKSVAAILNQDGSMHTSPFEFHHTQPELDAFIKYILNSNQSATILMENTGHYHYPVLKAFREAGLPVCMVNAYQIKKFGDMDLRKAKTDKKDAVRIARYALEKSYSLVPYTSMEQKYEDLKFLARQYNQRMLTLKTNKVFLLNLLDETMPGITNILPLTTRTPETSLSVLFINRFKSYDRIKKMGKSRFLDAFEKITRKSRNRQTKTYGLAIYEAALRNITTRGENEYTLAAQDQCLELVCESQKAADSIILKMQTLAETLPEYAVLRSMAGVGDRLGPLILAEIGDIRRFHSGKALNAYAGNDAPPYQSGTFESHNRHISKRGNAALRKYCFEVMQALKLTRPQDDPVYLFLLKKEQEGNPYNVAKMAGVDKFLRIYYARAMETLKQQ

SEQ ID NO: 422869 - protein, 336 aa, unidentified
MPVLGIDLHKHESQVAVLPEESSEEEPLEEVRVRNANLDEVAARYEGSKAVIEATSRYYTIHDRLSEYLDVVVANPLELSWIADSSHKTDEIDAQKLAELHRADIVPESYVPPEEIRSLRALTRGREHLVDERTKWKNEVHALLDQHGVEYTGELFSTAGREFLAELTLADPGEILLETYLETIDELSEKIESLSDEVETRAAEIPEVQLLESIPGVGALTALQIYAEIGEINRFDRAAELVSYAGLDPSVRESADSRTEGSISKEGNKYLRTAVVQGAWRAVHNGQDPYLREFYYRLREQKNKPEKVARVAAGRKLLVSIFHMLSRKEVYDPPER

SEQ ID NO: 422870 - protein, 424 aa, unidentified
MKVIYQTCCGVDVHKSFLVATIIKTTSGVEPTYQKKRFSTFNNSILEFKQWLIENECRDICMESTGKYWVPVFNLLEEDINVTIANPKWVKAVKGNKDDSKDSKWIGNLFRLGLVPGSYIPCKSIRILREYTRYRYKLVSCRSSEKNRYQNALTVCNVALDSVVSDIFGKSSTSIIDSLLEQSGNSINHEEIASKLLRKLKEKESAVIESIEGYQMTDAQKYRMRLIRAHMDYITAEIQDIDTQIESLISSNTAFENAIQFLCTIPGVKHDSAITIISEIGIDMSQFSSSKRLCCWAGLTPSSNESAGKKKSVRITRAGVYLKPALVQCAHAAVKSDKSPYYKKKYESLVKRRGKKRAIIAIARMILTAIYQMLSTGETWNPSDLYKIDMPEALVEKQKAKAIKHAKKLLQREGLLPPDEPLAS

SEQ ID NO: 422871 - protein, 347 aa, unidentified
MSISMIGLDTAKSVFQVHAVDKNGKAQMRRKVQRDELIPFFEKQETCTVVMEACGAAHHWARMLTALGHDVKLIAPEEVRPFVKKGKKNDAADAAAICEAASRPDMTFVPVKKLEQQGILALHSARTLLVKQQTMLANAMRGLATEFGLIVPKGISKLDDLAALVEMDKAFPEKARQVFIGLLDQCRATAETIKVFEAEIIEHARHDETARRLATIPGVGPITASLIAATVVDISLFRTARHFAAWLGLVPRQYSTGGKARLGRITKSGNREIRRLLVLGATSMTSRAAQWNSVVGAWTRAIQERRPFRLVTVALANKMARIAWALMTRKDVYHAKGRDAATTGAAA

SEQ ID NO: 422872 - protein, 429 aa, unidentified
MTVQQSTPESDVLVAIDISKFRHDVLIEAPGWRSRKRMVVPNDAGEFRRFAEYLHSLNRPVHIAFEATGDYHRGLAHFLLADGFQLHLVSSLALARTREALHNSWDKNDPKDAQVILHMLRDGVVQHYHDPLAYGMNDFQELSKTYHQVSLDKTRTLHRLLTHYVPLYFPEIEPHFHSTRSEWLLRLLSVFPTPASISALPMDEFVQQAWSLVGRKVSKQRLLEDIYRTAQSSVALPVATGSEAVAMFQLVLQQMRTLCQLRDQIEERADQYLQNNSDYHRLRQIPGIGPIGALTILAEAGDLRRFAHYRQFLKFCGLDLATYQSGRFRGASKISKHGNARLRCVFWMAAQVAVRMKENSFRYKYERYLRDKSADADTKRKACVAVSAKIARVAHSLIKTGADYRPFFEAAAPSGRIRSARAVEATSTS

SEQ ID NO: 422873 - protein, 410 aa, unidentified
MQIVHERCCGLDVGKDEVVACLRVPDGAGGRRQEIRTYSTFTSFLEQMADWLKGEDVTDVVMEATGQYWKPIWYVLEERGFELMLVNARHVKILPGRKTDVGDAAWLCELLEHGLLRGSFVPPEPIRELRDLTRYRKRLIQLHTSEGQRINKTLEDAGIRLGSVASDVLGVSGRAMLRALCEGERDPKVLAELAKAKLRAKRAELAEALHGRFREHHALLIKLSLDHVEQLEASIAALDAEVDKVIAPFSQARDHLDTITGVGKRAAECIIAEIGLDMDRFPTAGHLASWAGVCPGNNVTGGKRRSGTTTKGNVWLGQILVECAWATSHTKDTYLRAQYWRLARRIGKKKAAVAVGHSILVIAWHLLKNDCDYVDLGGNFFVQRDTDRTRQRAVAQLRALGYRVSLEQAA

SEQ ID NO: 422874 - protein, 374 aa, unidentified
MGVIIGMDPHKRPATIEVIDERAVVLAAGRYGTDKAGYTQMLAAARTFAGRVWAVEGCNGIGRHLAHRLVHDGEVVVDVPPELSAQVRVFAAGNGRKTDEVDAHAVTLVALRTPGLVQVQVEEDLVVTGMLADRRDEQGRTRTQVVNRLHRLLPELLPGGAEKFLSARQARALIASVRPRDLAGKTRRRLAVELEMIDKKTRALDKELTGLAAARVSALMDLHGIGASGAARLLADAGDIHRFASRDRFASWNGTAPLDASSGSQARHRLSRAGNRRINRVLHIMAAGWLRNQTKGRAYYDARRAGGMPSMMAMRALKRRLPNVAFSCMLADQKRREAGPGGQSGTPADSSVTGPDPGHRPFGQATSRTRHSTA

SEQ ID NO: 422875 - protein, 469 aa, unidentified
MPPGSPPLECWIGWRTNELNNEPEIVLDDEHELVIERVAAIDVAKASGKVCMRMPHPSRPDRRMSKVRDVDATTRAVTELANDLLGEGIERVTVESTSDYWRIWFYLLEAAGLRVQLVNARDVKNVPGRPKTDKLDAVWLAKLTEKGLLRPSFVPPAPIRQLRDYTRFRVDLTRERARYWQRMEKLLEDALIKVSAVVSRMDSMSVRDMLEALIAGERDPRRLAGLARGKMRPKYNALVEALSGRFDEHHAELARMLLDQIDALGAQISTLTTRIDELLAALIDTPGPAADGSVRDRDGEVELMVTGLDAAERLAEITGIGPVSAQVIIAEIGLDMARFPTAAHLVSWAKLSPRTIQSGAIQRSGKAGKGNPYLKGALGEAAAVAARTDTFLGERYRRIVKRRGKLKALVAVARSILVIVWNLLSDPTARFHDLGPDYYTRRIDTERRARNHLAQLAALGYRVTVEPAA

SEQ ID NO: 422876 - protein, 433 aa, unidentified
MVKQGPETRGCWVLGVDCGEQKHRFVMLDEVKERQGAMWVANRMDKIRDALMKMLIGLPQGYELEIVTEGLRSIGGMLMQTATELGLRIYQVNPKALDDYRSLEGQPRKDDDRDAELLAKMRLNRVEGCRLALDTRPEERVLCRLTRLHTQLVGQRRQAKNRLRSRLLELSPEVVDKKWEGPWYSSAGMLAILERWPGFEGMEKTRGSTIERVLRPVTRRGESCTKMAKAVLEMAGRITLCAEERRVVAMELGMAMRQLRMAEVSLAEVDQEIKDAVQAHSIGRKLLKMPGVGHFTAGVLIGEILPLARNQSEGKAATYGGITPLSRRSGKMKGRSKLARGVNKHAVRALYLSAFSAKQYSALDCAYFQKQLNRHQGHPKAHVVAFLSLARQRFKVMYKILTTDTHYDKETLIRSHLKRQKPERTPKKDSVAA

SEQ ID NO: 422877 - protein, 400 aa, unidentified
MLSIGIDVSKGKSTVCGMKPGGEIVYAPFEVQHTREGMSELVSLLRSSGEEVRAVLESTGSYHCPVVAALLENGIFVSVVNSLRMKRFCSQSIRKVKTDRIDAMQIALYGLAYWQELQPTRLPEDTYRELQLLARQYYQMTSLLIKAKVDFNAICDQVLPGMQELMSDHAGRHKLSDFVLRYHHTTHILEMGETRFRKDYCKWAEKKGYRNCERMAALIFATAQNGIPVLPNAPSTQIVITEAIRVLHTVEASRDAILTQMQALAKTLPEYSLVREMPCIGDTLAPRLIAEIGDVRRFHSKRALIAYAGIDAPPYQSGKFCANNRHISKRGNRYLRKTGYEVMQSYVMHKPANDPIFTFIEKKRGEGKSGKLAMVAGLNKFLRVYYGKVTELYRSLPAIE

SEQ ID NO: 422878 - protein, 319 aa, unidentified
MAQNDLVVAGIDVAKDKVDVCIRALSLRRTFASTAEGRGELASWLRRQKVGKAVMEASGGYERDWAKALRDARIEVRIVDPKRVRSFAQSAGRHAKNDTIDAEMIAWFAETFDQARGQAYDATREQIHQMVNARQALKDIQVKLESQGEHAMPAAVRRMHARILKTISVELVKLEAAISAMIQATPHFTELAEIIESVPGIGRTTSAALIAAMPELGQANNKIVAALLGVAPYDDDSGRRRGERHIKGGRRRTRNVFYMACLGAATQHNPVLKAFYDRLVAKGKEKKVALIACMRKLISILNIMIERRQKWDASRHALS

SEQ ID NO: 422879 - protein, 351 aa, unidentified
MVIIGVDYHPSDQYIAFVDTETGEYGERQLDHSDREAEKFYREMATRGVSVRVGMEATGYSRWFERLLAELGIEVWIGDAAEIKTKRVRKQKTDREDARLMLRLMRENNFPRIWVPSPENRDLRQLLWHRHRLVQMRTRIMNQLQAIAMNEGQRRKKKLWNEQGRALLEKLPLATWASRRRKDLLELLDRMNPTIEELTAAIEREAKKWPEVLRLMTHPGVGPLTALAFVLIIGTPERFKCGKQIGSYVGLIPCEDSSAGHQRLGHITKQGSSLLRFLLGEAAQSAARWDSDWRRRYVHLAMRRQRNIAKVAMARRLAVRMYWMWRNGWEYSEWIKFGSHAGQLGLRHGVN

SEQ ID NO: 422880 - protein, 357 aa, unidentified
MTSNKKYIGMDVHKESISIAVMNSTGKFVMECVIETKASMLLQFIDGLRGDVGVTFEEGTWAAWLYDLLKPHVSEVVVCNPRKNALLKNGSKSDRIDARKLAELLRGNQLKPVYHGEQGLRTLKELARSYLTISKDVTRVMNRLKELYRSWGIACAGTHVYAPRHRSEWLGRIREAGVRRRAEHCYQQLDVLRLLRQQIRRDLLLESKKHQAWKLLGLIPGIGPIRAALLIALIQTPHRFRTKRQLWTYSGLGLETHDSAQYRVVEGQLQRSKKPVTLRGLNQDHNHDLKDIFKGAATRVSSSSHGPLHDFYEHLLAQGRKPTMARLTLARKIAAITLIIWKKEVHFDASYLTSQAA

SEQ ID NO: 422881 - protein, 385 aa, unidentified
MTKQLQYRTFIARDYDIFGGLDVDKKSIAVTFRDHGIMRKSFRLAYSASQLLNYTEKHFPGQRVAFVYEAGPTGFGLHDELTAASHACLVVSPSMVPTVQRKRVKTNRLDSLKLAEGLRGGQLRGIHVPALGYRDLRHLVQLRDTQVGQLRASKCRIKSLLLYEGIPFPAANGKWSAQALRELEALPCNATVRFKLDQLIDALQFHFLAAAKVQKQIRYFCQNEPELRRCISFLVSLPGVGTITATHALARLGDWRQIKDVRQIAGFLGLVSSEHSTGDKENRGEITRIGDSRLRNKLIQCAWTAIRKDPELRAFYRRIYERQPKKVAARKAIVAVARKLTTRMYAVLKEQRPFVIRADSSIAPLTAEETGGPRERLDAAQNEQP

SEQ ID NO: 422882 - protein, 346 aa, unidentified
MNEIIRIGMDTSKSVFQLHGVNAAEQPVLRKRLRRRDVVLFFAKQAPTVIGLEACGGAHHWARELAALGHEVKLLPPQYVKPYVKRGKNDAADAEAICEAMSRPSMRFVAVKTADAQAAQMLAGVRAGLVRRQTQLTNTIRGHAAEFGLVAARGLDKIEPLLERIAVDETLPALARELFAALGKEHARLAAELREIEARMLAWHRENETSRRLARIPGIGPIGATLLVLKAPDPKAFPTGRHFAAWMGLTPKDHSTAGKTRLGVITRAGDEALRSTLVVGATAVIQQARRGRGAPSPWLLALVKRKTPKEAAVALANKMARIAWKLMVSGEAYDPHRAQSARADAA

SEQ ID NO: 422883 - protein, 427 aa, unidentified
MSYRIAGIDVHKRMIVVVVADVDVAGDYEFERRQYGSTPAQLRLLAAWLVEQGVEEVVMESTAQYWKPVWASLERYWKPICEKREGAGPMSGSLHLAQAQSNRGARGRKNDFADAERLVRRLVAEELTLSFVPDAEQRLWRTVMRTRYQLRCNQVQLQNRLEALLEEAHLKLSSLVSDLLGLSGRRMLQAMAEGETDPAVVAARADCRLRATQEQLCDALGACRELHPVYRRLLKAALEEWERIEAQIAQLGQEMASLIGPQQEQVQRLAEVPGLGVDSGQQILAEVGASAATFPSGRALASWVGACPGEEETAGVNRNRRSPKGNRHLRRILNQAAHAAVKLKGSIFALLYRRYVVRLGHNQTIAVIAHRLCRLIWKILHEGVRYDERGPAVSQRAQQRRTARMIRQLRSLGYSVELLHAAAGVPA

SEQ ID NO: 422884 - protein, 354 aa, unidentified
MGTKKSDFSNAQLYVGIDVHKKQWTITILTKDVHHRTFSQPPKPEALKIYLDRWFPGAKVSCAYEASKFGFWICRELLSYGYQCIVINPADIPTSSEERTNKTDSRDSRKIARLLKSGLLRAIHLPNQQTETDRQLFRFRKKLWGDLVRVKNRIKDKFIFSGIPIPAKFDNSYWAKAFLHWLKTVELPNTQLRITLNSLLEQYHFLYRHFLKTSIEVRKLQKVERYKTNAKLLRTIPGIGPLTTVQLLTELQDINRFKNFKKLNSFIGFKPMIHASGEHDWRGRMTYRRHNALRSALVECAWTSIVKDPVMQQRYEELKKRHIPKRAIIIIARKLLSRIYFVLKNQQPYKLGTG

SEQ ID NO: 422885 - protein, 351 aa, unidentified
MDRYIGIDVHSKSCTVAVMNATGQRLKEQVIETSATVLIDAMRSIAGKRHVCFEEGVLSSWIYELLEPNVDELVVVQPHTRQQGSKSDSIDAWALAENLRTGSIKRRVFKNPRRFDQLRQAVRAYQIAVQDMTRAKNRLNALYRSRAIQVDAAIYDPKQRTEWLRKLPTAHRMLGEMLSQQLDALIEAHRRAEQWLHKEALQLAEVKRLMTVDGLGPIRAAQIVAVVLVPERFRTKRQFWSYCGLAIVTRSSSDYVRNPSTGQWWRQPVIQTRGLNRNRSPILKNAFKAAARTVIAMPTHPLHAHYERMLEDGTKPNLATLTIARRIAAAVLAIWKHKEDYTREKHRQTAA

SEQ ID NO: 422886 - protein, 408 aa, unidentified
MNTLYVGIDVSSKSNVVYLMLPNGDKHSNFSVANSHEGSTQLVKRILSALTSHSLDTVLIGLEATSVYGDNLVYFLREDATLAPFNRKIHVLNPKQVKKFHDTYNDLPKNDYVDSFVIADCLRFGRINKEVYMGDYRYKALQNLTRARFFAVQNLVKEKQRFMNVLFKKYSTMTQEKVFSDAFSTTALAVYDEFESAEALANMDLHELTDFIIEKGKNRFPDPDAVAKAIQKAARSSYRLPKTVNDSVNQVLSISITSMKALESQIKEFDKAIKAQMELLPNVLISIPGIGPVYSAGIMAEIGDINRFDNQAALAKYAGLAWKQHQSGSFEAEVTRLIPSGNRFLKYYLYEAAFSLVRCDKEYSDFYHLKYKEVNRCQHKRALALTARKFVRLVFRLLKDNRLYVPAK

SEQ ID NO: 422887 - protein, 359 aa, unidentified
MGELSKVGMKTVGLDLGDRWSHFVVLDGEGQLVEEGRVATGEPALRKRFSGCERMRIALETGTHSPWVSRLLKDCGHEVIVANSRKLRLIYENRRKNDRVDAMYLARLARLDPQLLWPIEHRGPEAQKDLALLRSRDALVEARTQLINHARGLVKSVGQRLPRCSSEAFPRKVLGAIPGSLQPGLLPVLEMITSLTAQIKALDRRMDALADEVYPETKLLRQITGVGPITSLGYVLILEDHRRFPKSRAVGSFLGLTPGSKKSGDSDPQMRITKEGDALLRRLLVGAAQYILGPFGPDTDLRRFGSRIAQRGGKNAKKRAVVAVARKLAVLLHHLWRCGEVYEPLYQETRKTVRRGKAA

SEQ ID NO: 422888 - protein, 351 aa, unidentified
MKGDSLGNFVLVTIIKTKVMKKVQFFVGIDVSKATLDVFIHGLNLYFVVENSLQGFVSLLEKVMTGTKCKKEELFFCFENTGKYSRMLSVFLQSENILFTMESALQIKKSLGITRGKNDRIDAKRIAHYAYEKRESLVPTILPGAKIDQIRSLISLREKLLKHRTAYKNGISDLHDCYEDGESELIKEVQQRLISNLNDEITRVEQKIESIIESDESIYRNYKLILSIRGVGRILGFYLIGYTANFTSFANARTFACFAGIAPFSYSSGTVKGTPRVHPFANKMLKALLNLAAMSAIKYQGEYLQYFNKRVNELGKNKMSTLNIIRNKIVYRVFAVVQRQTPYVDLLKFAA

SEQ ID NO: 422889 - protein, 360 aa, unidentified
MTDGMTSVALDAACIELQGAIVAGFDVHRRQITFDALDTRTGEVLRGKIDSTPAAVEQWVARFPGREVHVAVEACTGWLFVARALERCGAVTHLAEPIETSALRGRKRRAKTDRADARWLRQLLLEGRLPESWMPPEHVRQWRSRARLRNTLASERTSWVQRIRATLYHHGIAGAPDDLRTLAGREFLAGLELPVDARERIRVALEMIDLLELQIAEIERELRALARRQPGCRALMDKIYGIGELTSLVTLCELGDVSRLHASRQAVRLAGIDIGVHRSDRTARLGKLTRQGSPDLRWALYEAAQSACRKTSPDHADYRALKDRGLSHARASLTIARKLARRSYHVLRELGPDALQPITD

SEQ ID NO: 422890 - protein, 415 aa, unidentified
MEITAVGIDVSKSKSTVAIRRPGGVIVARPFDISHSNHDLEKLVSILKTTGGDIRVVMEHTSNYWKPIALTLKEAGFYVSVVNAMLIHDFSDNSIRKLKTDRADSLKIANYALTFWNELPPFNDEDETRLVLREQSRMYERLASTATSLRNGLIALADQTFPSIDQAFGHAIKNADGHEKWVDFFSIYWHRDCVLRLSIEKFTESYRKWCLRRNYKFRTNTAHKLYALAQDAVPTLPKNNGTKALVLQACKSLNAVCEAKQSTQEEMNRLASLLPEYEVVMQMEGTGPITGPALMAEIGDVRRFKNKKALVAFAGIDAPPFQSGNFESKSRHVSKRGSPHLRRAVFLVANIILTLSHKDNSVFCFMDKKRAEGKHYYVYTIAGSAKFLRIYYARVTEYLRTQEIPVTASCLNGNN

SEQ ID NO: 422891 - protein, 425 aa, unidentified
MEVFCGIDWAEKHHDVAIVDDRGQLVAKRRIGDNAAGLRSLLEMLAEHGDAAENLIPVAIETSRGLLVACLRATGRHVYAINPLAVSRYRERHTVARAKSDHADAVVLANILRTDAGHHRPLPSDTELVRAIAVLARSGQDAAWRRQQLTNQLRSVLREYFPAASEAFKDTKSGLASAEARVILAAAPTPALAAKLTKTRLRRLLIAAGRQRNIDVWVDRLHDLFAAEQLRQPPRIEAAFGEQARALIMQLDAACRAVEHLAQATEAAFTEHPDAEILTSFPGVGILTGARMLAEIGDDRSRFSDARGLRAYAGSAPVTRASGKSIVVMQRRVKNPRLAAVGYVWTFAALTASPPVRALSDRRRAIGDGHCATCSIASSASCITARRLARSSILSGHSQRTMIASQPKRGGFEPATLARLAPSGV

SEQ ID NO: 422892 - protein, 378 aa, unidentified
MSQSTILYVGLDVHKDSIDIALAEPSRDAEVRHLSTVAGGNEAVTKALRRLVSAGHRLHIVYEAGPCGFALQRHLGALGWRCDVVAPSSIPRPSGERVKTDRRDAMKLARLARVGELVAVRVPDSADEAMRDLVRGREDAVREQRNARHRLKALLLRNGIAYSGRAAWSGAHLRWLAGVKLGHPAQQIAFQEYLHAVTEAGARIVRHEQALRDALSGWTLAPVVLALQALRGVQLIAAITLVAEIQDFWRFASPRQLMAYLGLVPCEDSSGPRRRQGVITKAGNAPARRMLVEIAHQYRLAARVSPSIARRQSDLELPKAVTDIAWNAQTRLCSRLRRLSARRLPHNKIVVAVARELCGFVWAIARQVTPEPSLPQAT

SEQ ID NO: 422893 - protein, 376 aa, unidentified
MNKSQVTERQVNTEGRKLYMAFELADKEWKLFFTDGSKERSRSIGAGDLVRLEVEIQKAKDRFGLKEQTQVISCYEAGRDGFWLHRYLKEKGIKNFIVDPSSIEVDRRKRRAKTDRIDGKKLLRLLLRYSWGEKKAWRVVRVPGVEEEDGRHLHRELGTLKGERTMHSNRIRSFLKLHGISEVQPLRGDFEQCVEGIRLWDGREVPGEVKERLKREHRRLMMVQEQIRELERKRKEILEEGGERHIEQMMRLRGIGIESSWKFEKEFFGWRKFQNRREVGALAGLTPTPYDSGESRREQGINKAGNRRVRSMAIEIAWIWIRYQPGSKLSQWFKERYAQGGKRMRRIGIVAVARRLLIDVWRFLEHGVIPEGAIVE

SEQ ID NO: 422894 - protein, 412 aa, unidentified
MIFRWFVGIDWAAEKYDVCVLDASGKVIAKRVIKHSGSAIAELLDWLQEIAGGNPEAVAIAIETPRGAVVEGLVERGFAVFAINPKQLDRFRDRYTVAGAKDDSRDAFVLGDSLRTDQGCFHRVQLDSAQMLRLRELSRIQEELQVQENRLSNQLWEQLHRYYPQTLTLSPAANEAWLWDLIEMAPLPLQAGQLKLVAVKRLLGSHRIRRVSAEEVLEVLRAPALRLAPGAAEAASEHVLLLLPLLRAVHQQDDQVGKRKKRMLEELSASSGDGTAQEHSDAAILLSLPGVGQSVGATMLAEASQPLAERDYHALRCYAGSAPVTRQSGKRKLVLMRRGCSERMRNALYYWSLGSLKEDWARQYYDRQRASGNTHGGALRSLGDRWLAVLIAMLKTGTLYDAARRGQQAKAS

SEQ ID NO: 422895 - protein, 428 aa, unidentified
MSYRIAGIDVHKKVLAVVVSDVEIESEYQFERRMFNSNPEQLRSLAAWLVEQEAEEVVMESTAQYWKPVWGALERYWKPEQEKREGARRRSGTLHLAQALSNRGRRGRKRDFVDAERLVKRLVARELTLSFVPNAEQRLWRTVTRKKYQLRRDRVRLHNQLEALLEEAHIKLSSLVSDLLGVSARRMLKALADGETNPAALAALAHERLRATPEQLCDALGACTDLKPVYRQLLKMALEQLQLLEQQIGQLDQELATLLHPHQDAVQRLAEVPGLGVDSAQQIIAEVGPTAATFPSGEQLSSWVGACPGDEESAGVNYSHRSPKGNRHMRRLLNQAANAAVKVKGSIFEIIYRRCVPRLGHNQAIGLIAHRQCRLIWLILHKGTLYEERGPAVTKRSKYQRTWRMIRQLQQLGYRIESPNPQASQAQA

SEQ ID NO: 422896 - protein, 344 aa, unidentified
MNRTTIAVDVAKTVFEVAVSEHPGQVRERHRLSRAGFRQFLAERPPATVIMEACSSAHHWARQAQSRGHEVVLVPPHAARPYVLRNKTDRTDAKGLLEAFRNDDLRPVPVKSETQQALAALHRLRSAWVAARTARLNTLRGILREFGVLIPTGAHHVGPHVRALLEDVEAGVPGLLRVALGEAIREIGELEERIRAVERQLATAAEPALVVRQLRTIPGIGVLTATALVAAVGDVQRFPSARHFASYLGLTPREHSSGQRRHLGAISKQGDTYLRMLFIHGARSVLHHAKSKTAPTTDRLRTWALPVERLRGHNKAAVALANKLARIAWAVWRNGNDFAAVPAV

SEQ ID NO: 422897 - protein, 462 aa, unidentified
MTVPTTKGRRTKATPLPTSLPAIRPLVAGLDVGSSEHWVCGPARADGTPNVRGFGTTTDQLQALADWLADHGVESVAMESTSVYWIPIYELLESRGIEVVLVNARQLHNVPGRKTDVSDCQWLQLLHSCGLLRGSFRPGEAITRLRALQRQLANLVAERTRCVQWMQKALDQMNVQVHRAVTDLTGATGLAIVRAIVGGERDPARLARHRDRRCGKSATEIARYLTGTWRDEHLFNLASALRLFDALETEIAAYDAQLLQEIQALPPPERQTEPVPPHPNPAKEKAIKARGEQAARTTLWRFAGVDLTRVDGISAGAAQVVLTEVGPQLAAFPSEDHFVSWLRLCPRTPISGGKPLKKRRNGLGAHRIAGVLRMAATSLQRSKTALGAAFRRIARHKGGAVAVFATARHLARLIYRMLRYGHDYVDIGEQAYDHRFQVRRLAALTETARALGYTLVPKVAAE

SEQ ID NO: 422898 - protein, 422 aa, unidentified
MKLTYPICCGVDVHKTFLVATIIKTDGLVLKYHKKRFSTFSRDLLAFRQWLLDNDCKDVCMESTGKYWIPVWNILEDVVHVVVANPKWVSAVKGNKDDTKDSRWIGDLFRMGLVPGSFVPNKKIRVLREFTRYRYKLISMRSSERNRFQNAFTVCNSTLDAVLSDMFGKSATAIQNYLLDTDVVNPAYCASLLQRTAKKKSADVMAAVEGFKMSAEQKERVRIIQEHFSDINARVARLDAEINKMVSEYESQISLLCTIPGVDRNLAITIISEIGTDMSEFGSSKRLCRWAGLTPGNNESAGKKKSVRITRAGVYLKPALVQAAHAAVKSTKSVYFKSKYERISKRRGKKRAIIAIARMILTAVFAMLKTGEVFNPCDLQKYDMPEQLKRKQIVSSAKDAVKFLVSLGVLQEDTVSLAALTG

SEQ ID NO: 422899 - protein, 412 aa, unidentified
MDAMYECVCGMDVHSGSIQACVRRVRTDRRISQDVRSFGTMTRDILALADWLAAEGVTHVTMESTGVYWKPIYNLLEGHFEILLVNAQHVKHVPGRKTDVRDCQWLAQLLQCGLLRGSFVPARPQRELRDLTRHRAQLVHHVAAVANRIHKTLEDGNVKLGLVASDILGASGRDMLRALIVGTQTPDQMAELARGRLRGKRPALQLALQGHVTAHHRFVLAELLDQLDDLERRIERFTRRIEEISGPFAAAIQSVTALPGFEERSAQNVVAEIGTDMTRFPTAAHLASWAGLCPGSHESAGKRKSGKTTKGSRWLRATLVQAAWAASHTKHSYFGAQYRRLVGRRGKKRALVALAHSLLVVIYHVLLTGRPYHDLGVGYFDKLDASRIVQSHVRRLERLGYTVTLAPIAEAA

SEQ ID NO: 422900 - protein, 420 aa, unidentified
MKPWPEITHYAGFDWAKDHHEVVIVDSKGEIVADFVFDHSLEGWQRMVKETSAFANLAVAIETSQGAAVDQLLQRQYTVYPIHAVAAQSYRQRKAPSGTKTDHLDAWGLADALRVDGHGWKVLQPMDPLTQQLRLLCRDEVALIQQRTTLVNQLQQALAEYYPAALEAFDDWTDAFTWEFVLAFPTPQALVKAGKRRWEKFLHTHKLWRPETAQRRLKLFSQADQFQASDPIVRAKSQLAVSLARLLRTLREQLELYRKEIEVLFKNHPDHDLFGSLPGAKKVLAPRLLAAIGTNPERYGSHEVLQCIAGTAPVSYQSGKINKVRVRWACDKFLRHTVHLWADCFRKASAWGQAYYEKKRAEGMSHACSLRCLGQRLLKIVFRMLKDKKPYDAEFHACNQQKHGSWVLKLVNPPAPKTSE

SEQ ID NO: 422901 - protein, 279 aa, unidentified
MESTKYVGLDVHKEATTIAVMNSAGKLIMESIIETKAITIRQFIQGLHGDLHVTFEEGTWAAWLYDLLKPYVTKVVVCDPRKNTLLKVGNKSDRIDPKKLAELLRNGSLSEVYHGENGVRTLKELARSYLTISKDLGRVMNRVKALYRSWAIPCAGTQVYALCHRSEWLSKITEAGVRRRAEHYYQQLDALQTLRREVRKDLLLEGRKHNATKLLRQVPCIGPIRAAQLVALMQTPHRFRTKRQLWTYSGLGLETRDSAQYRYAKDSCNAPRNRSNFAD

SEQ ID NO: 422902 - protein, 395 aa, unidentified
MYIVGIDIAKRKHEAAVIDGEGTVIIKPFSFTNNCSGYNRLLAMLAKATLDEVSFAMEATGHYWLALFTRLQKEGFRVQVINPVQTNSIRSFYIRQAKTDPRDALLIAEVIRFGHFSESTLHPENIYELRELCRGRHAIVSMQADVKRKVVALLDQVFPEYETAFTNLFGDTSMAILQTCPTPKELSEMPFEELCHLIEVSSHKRFRMAKARELQELARNSFGFAMAGDVFSTMIRLYAKHLDFLKQQVREMDRKIAEIMDTLDTPITTITGIGPTLGAYILSEIGDISRFSSAAKLAAYAGIDPTMRQSGEYNGVRNRMSKRGSPYLRHAIWLAASSAVLHDPALKLYFQKKRDEGKPYMASVGHACRKMVSIIYAVMRDNKAYVPCIPSEISA

SEQ ID NO: 422903 - protein, 354 aa, unidentified
MQNDRQSSETVILGVDTHLDIHVGAVISQAGKLLGTHIIQTNQAGYLELLDWARSFGILERAGIEGTGTYGAALTRYLIKNGIYVVEINRPDRSKRRLEGKSDPLDAENAARTVLSGSSKAIPKMQSGACEAIRIINVARRSAIKARTQAINQLRALLVSAPQDVRDKLWKSKPHECVTACINSEVSEHSPLRIALCSTLRSLAKRWMALTEELNELDESLDKLTRKYASNLRSQFGVGPQTAATLLAVAGDNPERLKNEAALASLCGVNPLPASSGKTVRHRLNRGGSREANNALWTIALVRMRSDPCTRIYVDRRTGEGLSTKEILRCLKRYIVRELYPLILSDLAYANRRS

SEQ ID NO: 422904 - protein, 391 aa, unidentified
MIYVGIDVAKDKHDCFITNSNGEVLFKAFTISNNQDGFNVLYQRIESVMEDVTKVKVGLEATGHYNYNLLGYLIDKGLTTYVINPLHSNLYRKSLSLRLTKTDKVDARTIAYMLMSDVNLKSYSDTSYHNEELKSLTRYRFDKVKERAKLKTSVSRLVCILFPELEKLVPTLHMASVYALLSEFPGAKHIAGAHLTRLTNLLSDASKGRYGKDTAITFREAARASIGSNMPAKSLELKHTIQLILELGSEIEEIENEIKIIMDEINSPILSIPGINYRMGAMIIAEIGDFSRFDSPDKILAYAGFSPSTYQSGQLDSAYSHMEKRGSKYLRYALYNAAKYVCHWDSTFAGYLAKKRAEGKHYNVAISHSVKKLVRVIYHIVKSNQQYIKVA

SEQ ID NO: 422905 - protein, 395 aa, unidentified
MKHILSFDVAKGKSVYCFLDEKRNVIRDATLIEHKKDEFDELFNFISKYKNIVVIMESTSVYHLPVENYFRSKTIETIVMNPKLVKQYRDTLNKSKTDKLDCFKIARCYLGTIDNLYQKQDEYFMFNPLARQYWSLIEGQTRLKNRYRQLIEIVFPEFNLIFDDLYSDLALNFIHDFPHPILFVDRRIDYLMNYLKEKNGTTQAFRFKNKVLKMKELAKNSLCYVSVDSLQIQNLVQTIEMIQYHKQEIEKIKNQLVNNLKDTKLFKIIYSIPGFGDFSTALFLAEVGDITRFEEKKQFISFIGIDSITSQSGIASYHGPISKSGSKFARTILFNVVTTLIQICAHTDKENPIYLFFRKKQSEGKHHYKCIIACENKLCKTIYKMCTSDCTFMNK

SEQ ID NO: 422906 - protein, 348 aa, unidentified
MTRQLMAGIDLHSNNLVIGIVDQDGQRIKDRKLACDLKLVDAFLAPYKAQFKSLAVESTYNWYWLVDGLRALGYPVVLANPAEIEQYSGIKHADDKNDAYFLADLLRLNILPTGYIYDAKLRPVRDLLRRRLGLVHQRTALMLSFKSLYTRTTGQDMSLSRLKGLEVAEAKTLYEHPANRLIATIQKEHIDKLDQSVETIEKTVLASARELPCYEPLQTLPGIGRILGMTITMEIGELGRFQGAGNFASYCRTVASKRLSNGKKKGENNPKCGNKYLAWAFVEAANFAKRYDEQCRKWFDRKAAKTGPVTATKALACKLAKAAWHVINENSAYDPRRMFPELAPKQNE

SEQ ID NO: 422907 - protein, 343 aa, unidentified
MDHFAGLDVSVKDTNVCIVDDTGRLVREVKVASEPAALLPVLTNPAYHFKRIGLEAGPLSQWLFSALAEAGLPVICVETRHMRAVLKAQINKTDRNDARGIAQMMRAGLYRPVHVKTLRSQKLRMLLTHRKLLQSKAIAVENDLRATLRNFGLKVGMVGTVKFEARIRELVENLSDLAVLVEPLLVVRRVLHEQIGVLHRRLLAVVRDDEVCRRLMTVPGVGPAVALTYRATVDVPARFKNSKAVGAVFGLTPSRYQSGESDRTGGISRCGDEMMRMMLYEAAHSMLVRSTKWSWLKAWAMKIARQRGLKKAIVALARRLAVIMHRIWIDGSEFRWTREVVAA

SEQ ID NO: 422908 - protein, 367 aa, unidentified
MSSIAHRGFVHLGMDVSKDSIAVAVLAPDRDTAEFDKIFHDTDSVRRLVKRLGKPKEIWACYEAGPTGYDLQRLLTSMGVRCDVVAPSLIPKGSGDRVKTDRRDARRLAGLHRAGELTPVAIPTPAQEGVRDLCRTRGDMVQDLTRARNRLSGFLLRHSVVWRGGSKWTERHRRWLATLSFDDPAIATTFSHYLATVKLRDTALEAVEADLVPWCTKDPFGDQVPRLAAYRGVTRIGGLCLAAEVFDWRRFPKARPFMSFTGLVPGENSTGLTQRRGSITRAGNAHLRGQLCEAAWAYQHSPNVGAGIRERQVGVPPETVARSWAAQIRLSRRFRQLAAHKNVRSVVAAAIARELAGFLWAEMVAEV

SEQ ID NO: 422909 - protein, 366 aa, unidentified
MGMLAEHTDHVIGVDTHRDAHAAAAIATRTGVVVSRTTIAADAFGYKRLLRFARRHASGRRVWAIESSGSFGAGLTTFLLAHGEWVVEIDRPKRAARRNGAKSDELDAIRAGREALERDHLAQPRARGDREAVRVLLITRRGAIRARTKAINHLKALVVTAREELRHQLRNTPTYELVYRCARLRTLPSHSAEHRATVIALRHTARRILALEAEANDLETEIERLVKQTVPELLDEIGVGPISAAQLYCSWSHRGRLRNDGAFAMLGGAAPIPASSGQTIRYRLNRAGDRDLNCALHTIVLTRRQHDPATRAYAARRLAEGKTPREIKRCLKRYVARNLFRLLETTGPHPVAVQRPPRSRTIGHCS

SEQ ID NO: 422910 - protein, 402 aa, unidentified
MRYYLGVDWADQEHAVWTLDEGGRKISARTVAHTATGLSEWGRELDEWRAQGIELWAAIERPEGRVVDFLLDHGVVVYPLNPKALDRARDRFRQSGAKSDPFDARVAAEFLRTDHGHLTALQPSSAAAQELKYLTEDCQRLIRQQTRLLKAYYPRALEVAELSTALARAFLTAYPTPDALSRLTERQWQRWARAQHLSASRTAELWSTLLAPQLPVPAHVVRAKARLMQTLLAALDPVLAGVAGYRQTIDDFFAGMPAAPTARTLPVGERGLLVPTLWARLGDAPDRWRSFRHLQAQAGTVPVTERSGKQRSIHFRYACDKTLRYVVDHLAFRSLQRSDWARAYYDQQRARGHGHRQALRALGAKWLKIIFVMWRDGVAYREEHHLANIARQQLRCSARKTA

SEQ ID NO: 422911 - protein, 391 aa, unidentified
MTILVGIDVAKDKHDCFIMNSEGEVLAKSFTILNNKEGFDFLYKKIQSVSSSDKIKVGLEATGHYSYNIIGFLLNKDLATFILNPLHTNLYRKSLSLRKTKTDKIDSKTIAMMLLSDVSLKSYSDISYHNEDLKSLTRYRFSKVEERAKLKTSLSRLAQILFPELEKLVPTLHMTSIYQLLEEFPSASAIASAHLTRLTKLLSKASKGHYNRETAIKIREAAKNSIGSNMPAKSLELKHTIKLIRALTIDIGEIEAEISKMMDKIASPITTIPGIGNNMGAMIISEIGDFSRFSSPDKILAYAGYSPSTYQSGKLDNCYAHMEKRGSHYLRYALFQATQRVCHLDSTFSAYLAKKRAEGKHYYVAISHAVKKLVRVIFHLEKTKQAFLKAF

SEQ ID NO: 422912 - protein, 417 aa, unidentified
MKGTTPKEKYRRCCGMDVHKETVVVCVLAPDGEEGKPLKKVYGTFRNDLGRMRGWLKQLKVTEIAMESTGVYWRPLWNVLEGHGFHLILANPKQVKALHGRKSDKRDSQRIAEFLQDRRIDPSFVPPPELRRLRDLLRYRVSLLEQQNETHNKIRDLFETANIKLSSVASDLLGVTGQKIVEALIAGETSPDRLSWKVKGSLRKKEKEVRQSLAGCFDEFHRQMLELLWKQYKFLSGQIEQVETKTRREMEPHGELIELLDGVPGIDEMVAWTLIAEMGTDMSVFPTTGHVASWAGMCPGTNESAGKQMSTKTRKGNRYLRRALLQAAWAATRKQDSYLRAFFYRLMYRKGWGKAIVALGHKLLEIAYGILKTRTPYYELGADYYDQLNPEKTIQRLVRRLGKLGVEIVITPKEANA

SEQ ID NO: 422913 - protein, 387 aa, unidentified
MRRSKSRIVGLDVHPDSFAGAILQGMDPWKARVVSTSTRVALPLLEKWVLRHTREEDILVMEASGNAFCVAERLRALKHKVVILESHRAGKVGKTYCATDRVDAIKIARIYLSALSPVVWQPDTKTRERREVFSAYQAVVKEGMRLKQQIKSMLNEHCVRLEKGFRLSHPSAIGRLLQRRKWTPAQKMLLQQLHAGLVGARARRQQLRHYMAQEVLAQKELLRLTRLCGINLITLYGLIAAIGEIQRFATARKLSAYFGLNPSVEQSGNYEGSGALKRHGRGAIRALLVQSAKKLLQVDNPLQKWGLAIAMRRGRNKAAVAVARKLCVAVWHVMQGHVIGAIERMDTLHTKLHKLATDLGLSAIKQLGYDTKEAFVQKKLFLLRSYA

SEQ ID NO: 422914 - protein, 330 aa, unidentified
MAKDKFDACFTTIDEQQNISHKSTKMFTNTTKGFEEFYQWCKKYLQKDILMHFTMEATGVYYESLAYFLVEKGENVSVMLPNTVKKFGESLNVKSKTDRIDAKILGQMGVERKLPIWSVTTKIFRDLKTLTRERQSLVEMRTAVKNQLHAENHTAYPLKTMITRIKNHIKYLNMQIAGIEKEIANKVEKDNVVAEKIKKIVTIPGIGFKTIVTVVAETQGFANFTSTRQLSSFAGYDIQMRDSGKFKGKTRISKKGNSHIRRAMYMPSISTKKHSETYKNFYERLNKRKQNGLVTGTAVQRKLLGLIYTLWKNDTVYIENYQAERVNVAS

SEQ ID NO: 422915 - protein, 415 aa, unidentified
MERIIERPGALDVHKESVMACVRVWDGRELEEHMAEFRTTVQGLLALRDWLEALGVKQVAMEATGVYWRPVWAILEDRFELMLVNARHVKAVPGRKTDIKDAQWLCQLLEAGLLKASFVPPKPIRTLRNLTRYRKAQINDRSREAARLHKILEDAGIKLDCVASDILGASGRAMLDALVSGTTDPEVLADLAKGKLRRKIPELREALIGRFDPEHALIASQILAHIDFLDEAITRLSAEIEERIRPFERQRDLLMTIPGVKQRAAEVLIAEIGVDMSVFPTPKHLASWAKVCPGNDESAGKRRSGKTGKGNKWLRATLTEAANAATRTKGSYLAAQYQRLRGRRGHSKAVTAVGHSILTAAWHMLQNGELYNDLGGDYFIRQNPDRITKRLIRQLEALGHQVTLTPKDKPEEIAA

SEQ ID NO: 422916 - protein, 335 aa, unidentified
MKNYLFYVGIDISKSKLDVVILKKEAPNVTNHFIVENNLKGIKEILKNLIKQKIDLTTVLFCCENTGIYTFPLSSHLSEINLDFWVVPAIEIKRSKGISRGKNDKADAKDIALYSIRNIDKLKLSTLPETVIQQLKLLYTEREKVMKSFKIFEATKENVDFMPKQVYKTIVGINNKTVKFLKATLKAIEKEMKSIISNQLELKNQFELIKSVPGIGDKTAIYMLTATRGFTAFDNARKFACYAGTAPFEYSSGSSIKGRTKVNHMADKKMKSILQMCALVAVKHDPQLKEYYERKKGEGKNAMLVLNNVKCKIIGRVFSVINRQTPYINTYKFAC

SEQ ID NO: 422917 - protein, 354 aa, unidentified
MSQKLNSEIAVIGIDIGKNSFHLVGQDRRGSIVLRQKWSRGQVEARLVNLQPCLIGMEACVGAHHLSRKLQALGHDARLMPAKYVRPYSKGEKNDYRDAEAIAEAVQRPTMKFVATKTADQLDLQALHRVRERLVSQRTGIINQIRAFLLERGIAVRQGLHFLRAELPGILAKRTDVLSPRILRIIEDLAGDWRRLDERIESLSAEITRVVEQDPACQRLTTVPGIGPIISSAMVAAISTGDAFAKGRDFGAWLGLVPKQMSTGDRTILGSISRRGNRYLRRLFVQAAWVVLVKVGPEQWERYGLKSWIEAAKKRLHHNVLAIALANKLARIAWAVLHKGRAFECVKTNASRPV

SEQ ID NO: 422918 - protein, 505 aa, unidentified
MGPLAYVRGVEASVSLRSELRGRLWSNHFGWQSLFDVGHAPSWEHWTKSRPADQSLTGHPMSFDRLKRPQSRKRLPGHKLKPSRATLLVQNSKPHLSMKQTYILAIDVAKHKVRAALSGADERLLFEKDLPVSAGGLRELLVRLREHVAEPEGLLVLIEATGMLHLNWSVALIRAGYAVVVINPLIARRLYTLGNSIRDNKSDPIDARQLCGIGRLHGEKLLSLYRFALKPEQLCLQRLQSVRKAVRKSLSNLKKSYGSLLDVSFPELGRLLEIDGVGIRQLLSQAPTPCAIARMRRSSLEKNWMLRPKAAQLKKLAAESMADPELAQASRPALLAMLQSIEAMETRLRELDRQIEALTSQSVDPQTKALVESIPGFGALNAAKLLAFLPGEILHAGSNRQAAARLQAYMGNDPRVRQSGQWQGQTKMSKRGVEMLRTALFQCAFSASQHDPELRSFYQRKRAQGKHHEVALSHLMRILTRRLVAVLRSGQPYQPNDNSELKNAA

SEQ ID NO: 422919 - protein, 412 aa, unidentified
MDSIYRCCCGLDVHKDTVAACLRKIGDDGKVHIEKRTYSTMTKGLLALSDWMTSEGVTHVAMESTGVYWKPIWNILEGGFTVLLVNARHIKQVPGRKTDMKDCEWIAQLLQHGLLNSSFVPPTPIRELRDLTRHRAKVTGEQAAVANRIQKMLEDANIKLASVATDVMGVSGRAMLKAIISGQEDPKVLADLAKRRLRGKIPQLKLALEGRVTEHHRFMLGTLLDQWEYLESLVKRLDGRIEDVMRPFEESVELLKSIPGVEQCTAENLIAEIGNNMDQFPSAEHLASWAGMCPGNNESAGKRKSGTTPKGNRWLRRTLNQSAWAASHTKNTYLSAQYRRLASRRGKKRAIVAVGHTILKIVYHMLKHKVSYHDLGNDYFDRLHSEGLKRYLVKRLEKLGHKVVLEPLKEVA

SEQ ID NO: 422920 - protein, 362 aa, unidentified
MEKMTYVGLDVHKDSIAIAKLRPGSDTPLVWQIPNEAKVIRRTFGKLLAEAYELRCCYEAGACGFELHRQLESMGVECAVVAPSLIPRKPGERIKTDRRDAVKLARLDRARELSMIYVPTSDDEAVRDLVRAREDVRKDLTAARNRLAKFLLRHGRIYRQGRNWTVRHRQWLNVQTFEHPAEKLTFDHYLAAVDHQDACRSDLEKEITAIAGQPGYAQSVEKLVSLRGIAILSAMVLLTEIQDFRRFKRARELMAYLGLVPSEHSSGASRRQGGITKTGNSHARRILVEAAWHYRHPPAARTRVHQALRKQPAARIDFARRAQIRLHKRYVTLLARGKSRQAAAVAVARELCGFVWAAALQN

SEQ ID NO: 422921 - protein, 338 aa, unidentified
MYYTGIDLHKKTSFITTIDQNGKVIFRRNFPNEEELILDYFRNLDGPTKIVIESMCSWYWLYDLLSANNFTTLISNPLKTKAIASAKIKNDKVDSHMLAQLLRADMIATVHVCNIKTRKLKELIRHRRRLVQDSARMKNRIHMLLMKNNINIPVSDLFGKRGMKLLKEVSLPGYHQQQFNSYLALLRYLTEQIEPLTEQIRDLAKKDPMARLLMSIPGIGFLTAMTIIAEIEDIGRFPSYRNLASYAGLVPSLDASADKCRTGRITKQGSPYLRAALVEAAQAIPRTKQSRLNIFFRKRIVRAGYRKAIVATAHKILQYVYYVLKNQVFYSEEYLARA

SEQ ID NO: 422922 - protein, 419 aa, unidentified
MKIVYPVCCGVDVHKNIIVATIAITDKSNITHYVVESFTTINSDLYRFRTWLLSYQCFNVCMESTGKYWIPVFNILEDANIKVLLTHPKYVRAIKGKKTDKKDSKWIADLFKFDMVRSSFIPPKDIRALRELARYRYKLVCMRSSERNRYQNCMTVSNIGLASVLSDPFGKSASDIMRYVLSSSVFDEEHCKKLIQKSAKKKTELILESIRGSRIESDQRFKMKEAAAHMEYLEQAILRTEAELYTRIQPHYHFVEHISNQMPGISQLSAALIISEIGVDMSVFESAKHLNSWAGLAPANNESAGKKKSVRISKAGQFLKPLLVQCALAATKSNKQPYFATKYQKLKKRRGHKKAIIAIARMMLTCIYHLILTGEVFNPSDYEDFDKPVIRKVALTDQNAIAFLASQGYDVSSLEKITA

SEQ ID NO: 422923 - protein, 408 aa, unidentified
MSQVVIGMDPHKRTATIEVMAGDEAVAGRGRYATDAAGYAAMLAEARRWPQRMWAIEGCQGIGRHIANRLLADGEHVVDVPPKLSARTRLFATGQGRKTDATDAHSVALAATRMQGLRPAVDDQQLAVLRILADRRRSLGEDHTRMICQLHRLLLELIPGGAKKALSAAQAKALLARVRPRDAAGRARRMVAAELISDLERIHQRKKAANKELNELLKASTTTLTTLHGIGPSGAARLLVEVADVTRFPDKAHFASWNGTAPIDASSGDQVRHRLSRAGNRQINRVLHIMAVVQLRNPTEGRAYYDRKVAAGKTPMEAMRALKRRLSDIVYHQMITDARAAVTGPGGHVGTATGSSAAGLHPAAGTSEKSLPGPATSDPTPPRPARFSGRSAASPPRRTAAAVKRPFA

SEQ ID NO: 422924 - protein, 417 aa, unidentified
MEKSKAKKLNTVNGKTMIVAIDIGKTIHYGYFRGTDGQDIKPVPFYNFRSSYHEFWAKVLQFKQQNDLEEIVVGFESTGPYAEPFLNFLAKKPVRLVQVNPMHTKRLKELTGNSPNKTDSKDPRVIADIISLGHALTVVVPVGPAAELRRLTQARQRASKNRTAIVNQLHHLVYVVFPEFTQAIKRITSKSALYLLKNHPCPEDIVGLGFERLQVLLRKISLGRLKQGQVKALFEAAENSTGIHEGKQSILVEIKHLVSCIDQESQFMDDLEKQMSQYLKQIPYSQSILSIKGIGEVTVAGLIGEVGDFRQFKTISEITKLAGLDLYEISSGRHQGQRHISKRGRAYLRKLLFFVAINTIRTNGVMHEKYHGMINRGMPKVKAVVAISRKLLRTIFALARNHSTYVENYDHHVKLAA

SEQ ID NO: 422925 - protein, 343 aa, unidentified
MNATTKTVVGVDTAKQVFQLHWVDTETGEVFGKQLKRTRLLEHFMNKAPCLIGMEACGGSQHWARRLQAMGHEVKLMPGKTVKAFVSGNKNDVADARAIWLAMQQPGVRAVAVKSEAQQAVLALHRMRQQLVKFRTMQSNGLRGLMGEYGEVMAVGRAALNRGMNDALARLAERLPTVLIDTLREQWDMLAQLDGQIARIEQRLLAWMRQDQASKTIAEIPGVGLLTATAAVATMGDAKSFRSGREFAAWLGLVPAQTGTGGRVRLLGISKRGDTYLRTLLTHGARSVLMHAKEPGKWLQDIGKRRPPNVVVVALANKMARTIWALLAHDRKYDREHVSLRPA

SEQ ID NO: 422926 - protein, 351 aa, unidentified
MMIIGVDYHPSFQTIAFLMEETGECGEQELNHSDGAAEKFYRDLQQRGISVRVGLEATGYSRWFERLLAELGIEVWIGDAAKIKTKRVRKQKTDREDARLLLKLLLENNFPRVWVPSPENRDLRQLLWHRYRLVQMRTRIMNQLQALAMNEGQRRKKKLWSEQGRAQLEKLPLATWASRRRKDLLELLDRMNPTIEALTAAVEQEAKKRPEVLRLMTHPGVGPITGLAFVMIIGTPERFPCGKQIGSYVGLIPKEDSSAGHQRLGHISKQGNTLLRYLLGEAAQAAARCDVDWRRRYAHLAMRRQRNIAKVAMARRLAVRLYWMWRNDWQYSQWLKFSSHAGQLVTGHGVN

SEQ ID NO: 422927 - protein, 418 aa, unidentified
MQMELSQFAAIIGIDWADKKHDICIQVTETGQRQVYQIAHKADKIDEWARSLHRQYGGPIAVALELSKGPLVSALQKYDFFVIFPIDPTTLANHRKTFTLSGAKDDPTDAEYALDLLLKHTEHFKALNPQSVEMRTLMTLVEQRRRLMNDRVRITNRLRNALKQYYPQALEWFDRIDTLLFCNFIKRWPSLAQARRARKTTLEKFFREHNMNRKALLERRMTAIKSALPLTTDEAVIVPYRLQVLTLVAQLEVALESIRIYDEEIAGLAPQHPDYGLFNSLPGAGPTLAPRLLVAFGEQRERFASAADVQKYGGIAPVTERSGQKSWIHWRWQCPTFLRQTFVEWAAQTINKSYWAGLYYYQQRAKGCSHQAAVRALAFKWIRILYRCWKTRTPYDEARYLKALQERGSSLLKIAEAA

SEQ ID NO: 422928 - protein, 418 aa, unidentified
MDHRPPFLYQATVGIDWADQKHDVFVRFTNGDSYRRKIGSRPEAIQEWLLELRSACAEGKIAIAVEQRRGALFYQLCTHLHWIDLYPINPHSLSSFRLTFFSSRAKDDPVDSRLLEELVRTHCDRLRLYQPVTTTERKLDLYCRQRRSLLDLATKTELKLVSTLKQYFPLVVNLFAAVGMKSDIALDFLSRWQTLQELRSAKTHTVRSFFYAHNSRSQSLIKKRLQQIAEAHEVTDDHALTEPMILTTKCLVGQLRQFKQSINEFDRKIKELFKSHPDHFLFETLPGAGEKLAPRLLSLFGSDRSRWTDATDLQKYSGIAPVVERSGKSLWVHRRLSRPIFVCQTFHEFAQQSTRFSSWADQFYRRQREKGKSHHSAIRSLAFKWIRIVFACWKANTPYDESLYINALIKRNSSPSST

SEQ ID NO: 422929 - protein, 426 aa, unidentified
MPYQIAGIDVHKKMLAVVVADVEVDGEYHFERRKVGTSPTQLRALAEWFLDRGVEEVVMESTAQYWRPVWETLEQYWRPQRRARDGASPVSGILHLAQAQSNRGAGGRKKDFPDAERLVKRLVAQELTLSFVPDPEQRLWRTVMRRKYQLTRNRVQLHNRLESLLEEAHIKLSSLVSDLLGVSARRMLQALADGETNPTTLAALADQRLRATPEQLSDALGACTALHRVYRRLLTMMLTELRIIDEQIAELDREMASLLAEHHDAVHRLAEVPGLGVDSAQQIIAEVGAAAATFPSPRHLASWMGACPGNEESAGVNYSHRCPKGNRQMRRVLNQAANAAVKAKGTIFAMVYRRLVPRLGHAQAIGAIAHRLCRLIWKILHQGIRYEERGPAVNESLKQARARKMIRELRSLGYHVERMVQSTGPA

SEQ ID NO: 422930 - protein, 432 aa, unidentified
MEEVADERLYRERVCGIDIGKAGMAATIRVPSDRDPSRRMAETREFATTKRGVLALADWLRCWQVGAVAMEATGDYWKGPFYRLEAEGLECVLADARQVKNLPGRPERDTSDSAWIAECFERGAVRPCFVATPEFRLIRLHTRYRRDLTGDRTRDKNRVEKLLESAAVKISAVLSDVHGVSGRDIMEHLIAGERNPKVLAQLARRQARAKIPRLEEALEGTDFFTPQHAGLLRAMLERIDRTNAEIARLDQVIEDLLAPYEEQLAQAGSMPGWGRRAAQDVIAGTGTDMSRFPTPGHLASWAGRTPLDHQSGARQGKARRKHGNRYIGAVTGETAVAAGRTQTREGARHRRLARKRGKAKACVATGNTQMRVFHVLLSHPGMRYQDLGAGWYDDQRQAARRLSRLVGALDAMGYEVTLCRKPDPEPETAPAP

SEQ ID NO: 422931 - protein, 424 aa, unidentified
MSSDLEIAAFVGLDWADQQHVIRLRVAGSAPVEAQLLDQKPETLRAWIGQLRQRFGGRPVALALEQSRGSLLYALMNVDFLLLYPVNPQNLAQFRKAFYPSGAKDDPQDALLLLEMLEKHRDRLRVWVPDDADTRCLRLLAENRRKLVNRRTALTNQLTNLLKESFPQALDWAGPLDSLRACDFLEHWPSLQLLQKTSTSRLRKFYRDHTRLDSEAIHQRLDQIRQAQPLTTDSAVLAAAELMIPALVRELRCLIESIQQFDQQLKDRFQQHDDYTLFHSFPGAGPALGPRLLSAFGSNRNRFECAAEVQMLSGIAPVTERSGKSHWVHWRLACPKFLRQSFHEFAAQSILLSTWARAFYDQLRSHGTSHHAAVRTLAFKWIRILFRCWKNRTPYDEQIYLASLRRHGSPLCAGLSSPTTGAKL

SEQ ID NO: 422932 - protein, 356 aa, unidentified
MVIVAIESHQGALHMQISTIGLDIAKNVFQVHGIDAAEKVVVRKRLRRRQVLEFFKALPPCLIGMEACATAHYWARELTKLGHEVRLMPAKDVKAYVKRNKNDAADAEAICEAVRRPTMRFVRIKSAEQQGQLMQHRTRDVLIRQRTQIINALRAHLAELGLVAAQGNAGVNELRAIVTDEQDTRLPIDARASVIVLAAQLEALESVIGAIEKRIKMQHRSSEASQRVEAIPGIGVIGATAIVATVADPTIFRSGRDFAAWIGLVPRQDSTGGKQKLGPISKQGDRYLRRILVVGAIAVLRRAKENPGKYPWLTQLLARRPFKVVAVALANKMARMAWALLAHGGTYRAPELAETA

SEQ ID NO: 422933 - protein, 423 aa, unidentified
MGNDVDKGGGLDIHKKSVKAAIASSDGSIMEAEFGMTFIQLGNLKSWLIENGCRRVAVESTASYWYRVVQVLSDEINVIVVNPLDVKDRSGKKTDKIDARRLATKCLHNEAKASRKFSKEELELKRLTRARIQNVQIRSKLRNQIHKVLDAAGIGLSLFVSDIFGKSGMYLLRGLVNRKSLEELIPGIPSNRIRRRARELPELIPVQLDDVQVLLIRRALSTIDNVQKSIDEIEAELYKKAESHKEDLRILMSVPGVKFTAAITVLAEIGNYRDFEDGGQLACYAGLTPFVYDSGEKHILGRITKHGPKYLRWILNQIAKGASKTKKSRLSKVYLRLLHRRGKSKAITALSRKILSIMHHLLIKREMWDEEGFRKKRSDLGLDRTSSSTQLTWLDLLFKNVGGAGEANPVVVGTGKVKPGDGG

SEQ ID NO: 422934 - protein, 370 aa, unidentified
MTKDTLYVGLDTDSKHIDVALAEPLPQGEVRYWGQIANEPTSVDRLMRRLQKNARQLVVCYEAGPCGYGLYRQLNGMAGVTCQVVAPSMTPRRPGDRVKTNRRDCLSLAKLLRAAELTAIWVPDETHEAMRDLVRARSAMRGDLNRCRQRLGGFLLRQGIRYPAGKPWTKRHRRWLGRLEFVAATHRLMFAELLDALDQTQARHDRLIDHIRELVPHWSLAWLVDAIQALRGYQLINAVTVAAEIGDPRRFSSPRPLMAFVGTVPSEHSTGDSIRRGGITKTGNGRARKAIIEAAWTYTRPIRAAAPPTHHAPAVRAIAEKARHRLSGRYRRLRARGKLQTVAVTAIARESLGFIWAIAQAAAPEATRQR

SEQ ID NO: 422935 - protein, 311 aa, unidentified
MNEKIVIGIDVSKASFDVAVHPTGECWSSSSDKADIAALSQRLQELAPGLIVLESTGGLELPLVSELAALSLPVVVVNPRQVRDFAKAVGKLAKTDSIDAHMLAKFGQAVKPEIRPLKDEQAQELTALLVRRRQVVDMLTAEKNRLQCVSSKRVRSDIVAHIKWLEKRLNDVDGGLRKFIEASPVWRVKDKILQSTPGVGPVLSLTLIANLPELGSLNRKQIAALVGVAPLNRDSGFFRGSRSVWGGRAHVRSVLYMSTLAAVRCNPALKSFHQRLIAAGKKPKVALTACMRKLLTILNAMIRDQNIWAHK

SEQ ID NO: 422936 - protein, 320 aa, unidentified
MMAQNDLVVVGIDVAKDKVDACIRALTLRQTCLSTAQGQRKLVAWLRRHQVVKAVLEASGGYERDWARVLRQAGIEVRIVDPKRVRSFALSAGRLAKNDTIDAEMIAWFAETFREAPGQTHDASHEELLALVKARIALVDLKRRLQAQNEHATPGLVQKAHARILKNLASEIAKLEAAITAKIKATPHLAERAEIIESVPGLAETTSANLLAGMPELGQVSDDIAAALIGVAPYDDDSGKRRGERHIKGGRRWVRNAIYMPCLGAVTQNNPVLKTFYQRLIARGKKPKVALVACMRKLIVILNTLIARRQKWDPSRYVLS

SEQ ID NO: 422937 - protein, 448 aa, unidentified
MNAVGIDVSKGRSTVAVVRPFGEVVKPPFDISHTTKGLNELLTFILSLEGETRVVMEYTGKYSEPVAHALCNAGIFVCLVNAKLIHDYGVDTIRRVKTDKVDALKIAGYCLDKWAKLSRYTPEDECRKILKVFNRQLSEYTKIKSMLKNNLISLLDQTFPNVNKLFTSPARETDGHEKWIDFVAHFWHLECVSSLSPFSFSERYAKWCCKHGYNFSVTKAREIHILATGQLGTLPRNDFTKALVLQAVSQLNSLCETIATLKAEMNKIASLLPEYETVLAMHGVGKTLGPQLIAEIGDIRRYPKRSSLARFAGIEPPENQSGMYSQHSRRISKQGSPHLRKTLFQVMRCVLQISNAVEPTFQFLDRKRSEGKPYKVYMIAAANKFLRIYYARVKERFEASEKAASGIDASQNGDNNFACKEDRATLESDPSGYAGTQYRQEKTAARIC

SEQ ID NO: 422938 - protein, 375 aa, unidentified
MKKNVRFLGLDVHAETIAVAIAEPDGEVRSLGTIPNRVESIRKLVKKLGAVEQLKACYEAGPTGYVLYWQLAELGVACDVIAPTLVPMKAGDRVKTDRRDAERLARSYRSGDLTAVWVPDAASEALRDLVRAREAAKQDQLRARHRLSKFLLRSGQRPAVGTKAWTEIYMVWVRQLRFPQVAQESTRLDYLHEVEHMGERIKRLEQAIAEAVKQASPAMQEVICGLQALRGVAQISAVTIVSELGAISRFASARQLMGYSGTVPSEDSSGQRTRRGGITKTGNAHLRRIVVEAAWSYRLRPGVGPALRKRQQGVPEEIKEIAWKAQNRLHKRYCRLAAAGKDQRKIITAVARELLGFVWAIGVKAETTVQHRMVA

SEQ ID NO: 422939 - protein, 330 aa, unidentified
MNVAGIDVAHKTLGVVLSVDEKAGKAQEFANTASGHQALVKALKAARVERVCLEATGSYHLDLALALDAAGLALMVVNPKAAKRFTEALLTRTKTDAVDAAVLAQFAQRMPFEPWQRPDNQALALRACARRLDALNRAKTEAKNQLHALTQTQTTPEVVLADVRLTITQCEAQIKDLYTWAAGQIQAEAHLKEVFDLLISVKGIATASAIQLMGEILVLPADMRAKQWVALAGLDPRQSVSGTSVHKKPRLSKAGNRYLRLALFMPALSAARHDRHVNGYYRHLIEDRGLKKIQAVCAVMRKLLHAIHGMLKSRQPFDGSRFYTLAETPT

SEQ ID NO: 422940 - protein, 408 aa, unidentified
MDVFHERCAGLDVHKEVVVICVLIGQGSGYKKIKLRFGTFHHQLVEMRQKLVELGVTHVLMESTGVYWMPVYDALEGFVEIVVGNAQHIMNVPGRKTDESDAEWLTKLLRFGLVKPSFVPPREFRELRQLTRYRRAVVQTRASEQNRVEKHLQIAGVKLSSVASHVFGVSGTDMLNHIAKGTTDPGELAGLARGRLRKKMPELRDAFAGSISEHTQNLIALQMEQMNRLECTIAEAELKIEKKVEPYAEILGRIDGMPGIDIRTAIDILAETGIDMSIWQTHRQIAAMAGLCPGNYISAGKRLKNRSRQGNPYLKSIMVQAACSAINVDGSYYQAKYKGLKKRRGHKRAVVAIGHAMLVAIYHMIKKGESYQELGAKVVSDHEHGRKKDDLVKQLQNLGYSVSLTQTA

SEQ ID NO: 422941 - protein, 367 aa, unidentified
MDEHITAYVGLDVHKESTAISVADPGRGAPRFVGTVGSELRQILKALRPLGAAGGVMVAYEAGPCGFGLARQLRSEGYHCDVIAVAKTPRRPGDRVKTDRRDSLALARYLRAGELTPVTIPDSRDEAIRDLSRTREDAVRARLKARQQLKAMLLRLGKRYDGKTSWTAAHERHLSTISFSHAAQDIAFSEYRMAVREANDRVERITTALRDQAASWRFAPVVAALSTLRGIDFITAVTLVAELGDLGRFAHPKDLMSYLGLVPSEYTSGESRTQGAITKTGNGHARRVLIESAWNYRFPPRLSRALEVRAEGQSAVVREIAWRAQLRLCSRYRKLTGRGMHKNKICVAIARELSAFVWDVARHSAVH

SEQ ID NO: 422942 - protein, 347 aa, unidentified
MNFYNNMHPYYCGIDLHARLLYVCILDDKGNTCLHKEISASPEKLKALLEPYIGNIVVGVECMHCWYWVSDFCEDLRIDFILGHALYMKAIHGGKAKNDKIDSYKIAKLIRGGNFPLAYVYPKEMRATRDLLRRRTKMVKQGGNLKAHTTNTTSQYNLPSIKVNLKNKEAREQVKSAFPDPIVQKNMDLNMALLECYAKELSKVEWFLEQQAKQHNPVHLHLLKSISGVGRILSLTIIYEIGDINRFPSVQNFASYARLVKCKAESAGKTYGTSGNKIGNAHLKWAFSEAAVLYLRGNDKAQKYLQSLQKRMSKAKALSVLAHKIGRCVYFMMKNNTVFDESRFLKS

SEQ ID NO: 422943 - protein, 358 aa, unidentified
MEIKRSDVRFDGQEFCLGIDVHHRTWKVTIRTMGMEVKTLAMPPDPRVVHGYMTRSFPGGRYRSVYEAGFSGFWAHRQLTELGFANAVVHPADVPTSDKERRQKEDARDSRKLARSLENGELKPIHIPDPGIEQLRSLCRLRGRSTSHIHRLKNRIKGHLKYYGLPMQEDSAYRHWSGPFIDRLQALCSEPGPRSDYLSITLDALREESCRLALITRKLRAHCREGEGARITSLLRTIPGIGPKTAFTLYTELQDIGRFPNLDKLDSFLGLIPSTDSSGEDETTTGITPRTNRGMRALLIEASWVAIRHDPELLRAFSELSRRMKKQAAIVRIARKLAARVAYVWRTGTPYKPAVPTA

SEQ ID NO: 422944 - protein, 406 aa, unidentified
MELVTLYKRVVGLDVHQAKITVCAIIEDETGDVTVELAEFGGFKRDRQALAEWVSTRDPEVVVMESTGIYWKSPYAALEKVGIVATVVNARHVKTVPGRKTDWADAQWLATLARSGLLRASFVPPAKLRELRQVARQRQQLVGILSGEKNRVHKVLSDGGIRLSVVVSDIHGVAGRAMVKALIEGQSPAEVLMLAGNRLKADRGELLDALDGDLTAEHRFVLRELMAHVQELEQRIDRFDRHLLNELEPYRTTLALMQTIPGIDVIGAALLLVEIGNDMDAFGSVDRLASWVGICPGNNESAGKRKSGRIRKGNPWVRRLLCQFAHAASRTQCAFKSKFEALRLRRGHKRAIVAIAHKLLKTVFLLIRRQTHYRDSAVDFEAMSVTRNAPRWLRMLRKHGFIPAAA

SEQ ID NO: 422945 - protein, 418 aa, unidentified
MLTVDGAETGVLFVGDDWAEDHHDIELQDGSGRVLRTARVPEGVAGMARFHELIATFLPDDADPAQVLVCIETDRGPWVRALVAAGYRVFGVNPKQAARHREVVSLSGAKSDKADAHTLADMVRTRRHHLRAVAADSDEAEAVKVVARAHQTLIWERTRHMLRLRAALRDYFPAALEAYKPLGLTGADTLELLAKAPTPAAAAKLTATQIGVALKRARRRDIPAKAAAIRAALRAEHLGQAEVVAGAYAATVRAIVAVLQTLNTEIKTLEGQVEAHFGQHPDAEIYLSQPGLATVLSGRVLAEFGDAPGRYADAKSRKNYAGTSPITRQSGKSKTVHARFIHNDRLVDALHMQASAAILHDPHCRAYYDELRGREIEHNAALRQLANRLVGLLHGCLKTGTLYDPETAWSHRAQPRAA

SEQ ID NO: 422946 - protein, 454 aa, unidentified
MKKDNTKLLKTIESAHLKKINLMAAGIDVGSRSHYVAIPEGINEVSVREFASFTADLYALADWLKQAGITTIAMESTGVYWIPLYEVLESRGFDVKLVDARHVKNVSGRKTDVLDCQWIQQLHTYGLLQGAFRPNETVLELRGYLRQRQQLIQHSATHIQHMQKALIQMNLLLHNVLSDITGETGMKIIRAIVSGIYDPKILANYRHGRCKNSQDTIEKSLQGNYRPEHLFLLKQSLELYDIYQEKINACDQQIENWLLATESKKEITVRTPKKQRAKKHKHDMAFDACTHLHRVTGVDLTQIPGIEANTALKIISEVGLDLTRWKSAKQFACWLGVCPGNKISGGKRLSSKTKRTSNYAASALRMAASSLHGSQTALGAFFRRMKARLGAPKATTAAAHKLAVILFNMLKKGQEYVEKGQTYYETQYKERVIRNLSQRAKELGLQLVPAEGGS

SEQ ID NO: 422947 - protein, 364 aa, unidentified
MNKCHLNTELSSHEETRCQFNGGTGAIKLGIDVHQDFYVVVMQEGGANPKPPQRFGKQAFLHWVAKLARSGTEVHAVYEACGFGFRLQRQLSALSIRCYVVCPQKLDEQNRRVKTDGLDAKALVLKLDRFVEGNRSALALVRVPTQGEEQKRAIHRQREQLVKARKQLEAQGRSLMVNHGMEPVKSWWKQRTFATLPVPHWMKELLGNSQPILLGLHEKIAALSLQLQSAADPKQPRGLGLMTSVIIDREIGDWNRFNNRRQIASYTGLCPGEYSSGNTRLQSCVTKHGNPRLRAALVELAWRLVRFQPNYKPIFKWRRLLAKGAFATGAARKKAIVAVARQLAVDLWRVRTGRCKAQALGLVL

SEQ ID NO: 422948 - protein, 466 aa, unidentified
MTFVNGEVQARFMARIRGVDPQRCLAIPVDVGKATAVALVADHYGEIIVAPFEFALTEAGFAVLSAAITRAQLERDALVVRIGVEAAGHYHRTLVARLRAAGLEVVELNPKAVKDARGQQLLRTLKSDARDCGAMAELLIRGSGRAPQWRDEALAAQAAWVAHRRRKVAAQVMLSNQIHAQLDLIFPGLTGCFANGLDAASLRVLIRDLPDPDRVRRLGVEGVLRFIRRRGVRMSRPKAAQVVQAAQQALRLPGPERPALLVVLAADWALFEALDRQIQDATTQLAALLPDTPAGVLLGIPGVGVLTASSYGAAIGDPNRYRDAAAAYRASGLVPVTYQSAGRTRPRTGISREGSVELRRAIVELGRGVGLHHPDFIAYRRQLLSRGKPPLVAMIAVGHRVHRLAFVMLRSQRPFDADRWARAVAGHRHPTDEQARHGGTTAPGGPPARRDLPAPPTLTPAEAHSN

SEQ ID NO: 422949 - protein, 428 aa, unidentified
MQSETERLQAFRQLRTDIRGSESHLIVGIDIAKEKHYAFCGTATGKTLCKQMIFPNSKEGFELLTARVEAVRVKHQLDQVIFGLEPTANYHKPLAEYLIRQGLQLVQVSGNAVKKNRELLDNRWDKHDRKDAANVADLIAQGKCQFYDYPNESIRDLRELLSLKRNIKQHAHGLKTRIRNNLLALYFPEMDQYMNTCQQDSLAVVSTCCSPMLIAGMEYDTFIAKVSCIRKGKRQEEHLHQIWQCAKNSIGCYTGVAAAYEGHVLVKQLLEATAALQELDKLILQLCLGLEEYPYLLSIPGIGPDTASKILAYVSDPNRFDHEKQVLKLAGFDLSASRSGGSSAKATPVISKRGQADLRYALCQAAMVASTCNTFFSTWFARKLQGREREKGIFAVIRVKLAAKLLVIAWTLMKKKEMFAYEEHLNNS

SEQ ID NO: 422950 - protein, 355 aa, unidentified
MNQEKYIGMDVHDATISAAVKNAEGKLLMECVLETKAATILDFIQGLRGTLALTFEEGILAAWLHDLLKPHVSRLVVCDPRKNALMRDGNQNDRADARNLAELLRTNQLRAVYHGRHGTRALKELGRSYLTLTKDSTRVMNRIKSVYRSWAIPCAGTSVYSRRHRAEWLAKLVEPAVRIRAEHLYQQLDSLQPVRQAARRELLRESRKHAAVELLHQIPSIGPIRSALLVAILQTPHRFRTKRQLWAYSGFAVQTYDSGEYRIVRGKQQRNRERITVRGLNRNHNHDLKNLLKGAAISAIERPGPLQDFYAALVEKGMRPSMARLTLARKMAAITLTMWKKGVSFDPKQLQRQAA

SEQ ID NO: 422951 - protein, 341 aa, unidentified
MSDYSYFCGIDLAKNHFSLHAVDQNGKVILHKSVTRSKLLTTIANMPLMRIGVEACGGAHYWARTLNKLGHDARIMAVKYVVPYRTKGKNDLNDAVAICEAVQRPSTRFVPIKSPEQQAILSVHRIREHWVRERTALMNRMRALLSEFGLIIPVGRSSLMKQVPLMLEDAENELPHLARTVIADAYHHLDELNQRNADTEQVFDSFAKVSANVQRVMKVRGIGPQTATAILASIGNGSQFDKSRDFSAWLGLVPKQYSTGGKPRLGRITKHGDKYLRTLLVHGARTVIANLDDKQDKLSQWCRGVLERRGMNRAIVALAAKNARIIWSLLHNQTEYENYAA

SEQ ID NO: 422952 - protein, 354 aa, unidentified
MSNKSTSVVATMGIDIGKNSFHVIGLDPRGAIVLRQKWSRSQIEARVANLPPCLIGMEACVGAHHLSRKLQSQGHDARLMPAKYVRPYSKGQKNDFRDAEAIAEAVQRPTMKFVATKTAEQLDLQALHRVRERLVGQRTGVVNQIRAFLLERGVAVRQGLRFLRTELPIILGKRADVLSPRMTHIIEELAGDWRRLDERIEGLSAEITAISEQDAACQRLMTVPGIGPIISSATVAAIGNGGAFSKGRDFGAWLGLVPRQISTGDRTILGKISKQGNRYLRVLFVQAAWVVLIRIKDWDRYGLKAWIEAAKKRMHHNVLAIALANKLARIAWAVLNKERNFECVRTAATSSRPA

SEQ ID NO: 422953 - protein, 429 aa, unidentified
MHYTQNQKLEQVTEKTLVIGVDIGSESHHARVFNYRGIEYSPKDFKFGNNAKGFEAFQGWIQGFVRMNGAKKVIVGFEPTGHYWYNFADFLKGLGIMFVMVAPQHVKHSKEMDDNTQRKDDHKDPRVIAKLVTEGRYIIPYVPEGIYAELRTAYGRYCELTETKVRLENRITRWFDIYFPEYREVYKNPGAKTGMMVLRVAPLPADVLKLGADGINQLWRSAKAKAAGMKRAETLVAAAKRSTGREGGEAVRRDLWQMLEEYELVMRHLGQMQVMLEELVVQIDGAERLLRIKGVGFITVAGFFAEVGDLSRFTDPKQIQKLAGLSVVTPDSSGKHNGQSEISRRGRKRLRMILFRAAMSLVKSNREMKMLHEYYTTREQNPLKKMQSLMAIAGKIIRVFYGIMKNGTEYDPVRLLTDIRRPGPEKNAA

SEQ ID NO: 422954 - protein, 369 aa, unidentified
MPLVRGERAARFTFGTPSPRGSIWRAFATVLWKPEQLIDFNSHLQGWETENMPELIHVGIDVSKDALEVACGPQSPTQCFTNDDAGHEALVNVLHVHRVDLIVMEATGGYEAPCACALQAAGLAVAVVNARQARDFAKAMGYLAKTDRIDAQVLAALAAVLANRADRQKLIKALPSDEQQRLHALVLRRRQLVQMLVAERNRLPMSHQAARVSIEALIKAIRKQIVDIEADLSSHIAHHHADLAGLLRSAKGIGPHTSMALIADLPELGKLSNREISALVGLAPFNRDSGKMRGKRMIFGGRTQVRCALYMATIVAMRHNRVIQRFYQRLLAAGKPKKVAIVACMRKLLTILNAMVRTGKQWDETFHFA

SEQ ID NO: 422955 - protein, 339 aa, unidentified
MTQVIRIGLDLAKTVFEVHGVDGQETVVLRRSLRRRKVLAFFAQLPPCLVGMEACATGHYWARELTKLGHDARLIAPHYAKAYVRRHSNDAADAAAICEAVGRPSMRFVDVKTEAQQSAACLHKLREMLVKQQTMWINHLRGLMAEFGIVVAAGPQHVGELLAVLADPEDQRLPAAAREVLIQAAEALRDTQRRVEAIEKRVVAWGRDNETCRHLITAPGYGPILASAMAVFVVNPAAFTSGRHFAASLGLTPRLEGTGGKVWPGPISKRGNGYLRRLLVNGAMSVLCSRRAKEDPWLAQLLATKPRKVAAVALANKMARIGWALMMRQEDFRARPAAA

SEQ ID NO: 422956 - protein, 358 aa, unidentified
MQSNKINFKGQNIFIGIDVHLNSWSVTTITPSGYKRQTSHRADALELYAYLTKNFPGGIYHAVYESGFCGYSCCYELRELGIDCVIVHAADVPSTQKSRLSKTDSNDSMRLAMSLSNGELNTIYIPPKEVLGDRDILRYRSIVQKGMSRTRSRIKHLLHTNGVSYPQEFREPYKHWTRRFIKWLREDVKLLSGKRLELDFLLEDLEHQRSQLLKATGKVRELSRTSRYAEDYGNLISIPGVGLITAMTMLTEVTDIHRFSSQKKFMSYVGLIPVMKDSGETIRQNEMTPRGNQRIRRMLIESAWSAVRYDAQMAAAFGAFCRRMKKNRAIVRIARILASRTYHILKTRTKYDTALCTA

SEQ ID NO: 422957 - protein, 347 aa, unidentified
MSNLNVVGVDLAKNIIQVSVVTPAMKELQNKAFSRKKFSEFLAKQKPSLVAFEACATAHYWSRIAHQHGHTAKIIPAKAVLPFRQGHKTDSNDALAVAEAAIRPNIKEAPMKTIEQQGMQAIQRSRELLVQDRTALSNHIRGLLMEFGIVIPQGFAALHRRIPEVLEDAENELPDLYRPTLNLLYGRLITIKDDIDVLNEQIAVLVKQNVACDRLTQLEGVGPISSVLLYATLGTGEAFANGRQFSAYLGLTPKQYSSGGKTVLIGISRYVANKRLRAVLIQGARAYVHRLKDPRTPKERWLWALIQRAGYGRAAVALANKNARTAWALLTQGAAYDRDHGESLAAA

SEQ ID NO: 422958 - protein, 408 aa, unidentified
MGVLSMNAVGIDVSKGKSMVSVLRPFGEVVAKPFEVRHTAGELRALADYLKSLDGETKVILEYTGRYYEPVAQLLHDAGLFVSAVNPKLIKDYGNNSLRKVKTDKADSRKIARYGLDNWVELRQHTPMDTIRYQLKTMNRQYGLYSKTKVSMKNNLISLLDQTFPCVNTLFSSPAREDGSQKWVDFAASFWHLDCVRGLSLAAFTQRYQKWCKRHGYNFSSGKAAEIHEGAKNQIALLPKDAMTKMLIHQAIEQLNATSKTVELLRTEMNRLAQQLPEYPVVMAMGGVGKSLGPQLMAEIGDVTRFAHKGSLAAYAGVDPGANQSGTREAKSTPSSKSGSPELRRTLFLVMSALLQTSLADDPVFQFLDKKRAEGKPYYVYMTAGANKFLRVYYGRVKEYLLSLEPTD

SEQ ID NO: 422959 - protein, 370 aa, unidentified
MTSIIYVGMDVHTTNYTLRCYSVATDNLFATATMEPDYMNIIKYLDRVNRELGEDIQFECGYEAGCLGYSLYHQLARQGINCTILAPTTMATARKKKGIKNDKRDAADIAKCLAYNTYSPVYVPTGEDNAVKEYIRMRNDAKDMLKRIKQQLLAFCTRNGKRFAEGSAWTQKHIAWLGKLDFGDAILNETLREYLTLYRQAADKVELYDLRITEMSKAERYAEKVKKLECFIGVKDYTALATIVEIGDFARFQTAQNFSSYIGLVPGEDSSGNSVQITGITKAGNSHVRKMLIEAAQCYSRGGIGVKGKALKARQAGNDPKVIAYADRANERLKRKCYRIMCRSKRNIAVTAVARELACFIWGMMTDNIA

SEQ ID NO: 422960 - protein, 460 aa, unidentified
MDMRAGELPCDGHPVGSCASSASTGADETSQPLEQESSVNRLPYKLLVGIDLGQWLHQACVVDAKGELVEQRGFQHSLDGLRDTLDWLCNLAGKEVERIAVAIEKPHGAVVETLLDSGIAVFAINPKQVDRFRDRHSMSGAKDDRRDAFVLADALRTDGHRFQRLQLPPPEIVALREIVRTRDQLVKNHVALSSQIRDLLARCWPHLLALAPKHKALDSFFCELLQLFFDHQPTDLSLQNIQQLVHQHHIRRVHPEPILEVLRKTPLRVAPGTTEATSAHLKLLLHQLLLVRQHRRDSDQHLERWFKQLKRTSRPPYSDAAILASLPGVGAFVLASVLSQAHDPVRLRNLDAFRSLAGVAPVTKKSGKRGKLRPQILMRRARSLPLNNALHHWARIAVLRDAHAKSHYDRLRAKGHSHARALRGVMDRILAVAVAMLRDRTFYDPSRRASSNGTGRKVSS

SEQ ID NO: 422961 - protein, 410 aa, unidentified
MNPLYVGIDVSSKSNVAYLMKPDGSKHSNFSVPNTRDGSRQLVKRILSAITSESLTDVVIGLESTSVYGDNLVCFLREDGSLTPYNKKIHVLNPTQVNKFKLSYNDLPKNDYVDSFVIADCLRFGRINKEVYLDDYRYAALKNLTRARFFAVQNLTREKQRFMNHLFKKYSTMAQEKVFSDTFSTTALAVYESFESAEALANMDLHQLTEFIIEKGKKRFPDPDSVAKAIQKAARSSYRLPKTVNDSVNQVLSISISSMRAMESQIKAFDKAIAEQMALIPNTLTSVKGIGPVYSAGIIAEIGDINRFPTQASLAKYAGLVWSQHQSGDFEAQNTRMIHSGNRYLKYYLCEAALSLVRCDAEYRSFYHRKYKEVNKYQHKRALALTARKLVRLVFRLLKDNCLYRAPESK

SEQ ID NO: 422962 - protein, 394 aa, unidentified
MRSWVGFDVGKAFHWACVLDDEGEVLFSRRVEANERDIEACCEEIAALGSPGERLVATDLLGGPATLLEAVLLERGERVFHLPGMAANRARDGYRGENKSDSRDARVIADQLRTRWRSLHEVLPRGDEAAELRALVAYRRSLVEEQARLITRLRALLLEVFPGLEAALDLSTDRALLATTRVATPSAARRLGASRLARWLRDRGVRRSEGLAGKVIEAAKGQHRELPAAEAKAALVSEMAAEILRARRRIATLDARLEELMAAKPEAEVVRSMPGMGPLFTAEFLSEVGDPSRFASADALAAAAGLVPATRQSGGASFQRRARRGNRTLKNLLYRSAFSCTVHHAPSRAYYLRKRAEGKPHHRAVIALARRRVNVLWAMLRDGELYREPAPEAA

SEQ ID NO: 422963 - protein, 435 aa, unidentified
MRIRLDGVWRWMSNEVASRGVRRRTSAYGYRGEEEALRYIGIDIAKKMHAVAILDERGEVKAGPFTINNTASGFRKLLERFEKTGASSDECLIGMEATGHYWIALFDFLARHGFDVAVINPIQTDAFRKVDTIRKTKTDDIDAVLIANLLRFKAFEPSKLAQESTEALKQLTRFRMCLIKESTQLKNQATAILDRVFPEYHTLFHDTFGEASKELLKRCATPEEILSTDIRTLTRILSESSRGKLGRAKADAVKETAKESIGVSFASNALSFELKQIVGRLSFTRNQIDELDKEIGRILEDTSGKWLTTIPGIGANLAAQIAGEIGDPNRFEDAKKLIAYAGIDASKKESGTSIDSPGHMSKRGSSQLRYALILAADKARLFDSYFGEYYDGLRARGKHHYVALSGVARKLAGCILALMKEERAYQPQPPRMQQA

SEQ ID NO: 422964 - protein, 363 aa, unidentified
MLASPWLSELRTDPVLVFLMPERLVERPRAGSHAQARDTKTMSGSSVMVGIDVASAHVDVVAIGAELPAALGQVSNDADGHSALADGLAQLKPDLVLMEATGGYEAALACALQAAGLRVAVVNPRMARDFARAMQRLAKTDRIDAATLAEFAGVLAHRPDCERFIRPVSVPEQQDLAALVTRRRQLVTMQLSERQRLRLARPVTRPSIEALLEAIARQLDEVEAEMARHVEQHHAHMAQLLQSVAGVGRVAAATLIAELPELGRLNRRQICALVGVAPYANDSGASRGRRRIVGGRFEVRRALYMATLTATRYNAAIRAFYERLLAAGTLKKVALIACMRKLVTHLNAIARDHLNAQHRSAIA

SEQ ID NO: 422965 - protein, 386 aa, unidentified
MVTILRPFGEIVSSPFEIKHTSSDIHSLIKLIHSIEGESRVVMEHTGRYYEALAHQLSAADLFVSAVNPKLVKDFNNDSLRKIKSDKADSVKIARYALDKWQSLEPYSITDELRAQLKVMNRQFHFYVKQKTAMKNNLIGLIDQTYPNANTYFNSPTRSDGSQKWVDFVSTYWHVDCIRKMSLNAFVEHYQNWCKRKKYAFNKSKAEEIYTKTKELVPVFPKNEITKHIIRQAIDQLNSTSVTVETIRTLMNETASKLPEYSIVMQFKGIGPQLMAEIGDITRFTHKGALTAFAGVDPGVNESGSYAQKSVPTSKRGSSNLRKTLFQVMDVLIKTMPQDDPVYQFMDRKRTQGKPYYVYMTAGANKFLRIYYGRVKEYLSVLPDPS

SEQ ID NO: 422966 - protein, 417 aa, unidentified
MLKIVHKVCCGIDVHKKFVVATIGKTNNAGTTDYETREFSTFTETLIGLRDWLGSNGCKEVCMESTGKYWIPVFNILETECNVFVANPKYVKGIRGKKTDKRDSVWLCDLHKHGLVQNSFIPPWQIRQIRDLMRYRYKLTNFKSSEKNRMQNSLTVSNIMLSSVVSDTFGKSSMRIVRHLLDNAEDTSFDVAPLMHKGMKASAEEISKSIQGTLTKPQAEKISVCLAHLDDIDKYKSAIESAVLELVEPYQEQIKLLLTVPGIKDVYTAIDIIGEIGVDMSVFLSARHLCSWAGLVPANNESAGKKKSVRCARAGTYIKPLLVQCAHAAVKSKECPYFRLRFDQISRRRGKKKAIIAIAHMLLNCIYHMLARNEAFNYDLYRIDNAPKPKTLPQITPEQAILLLESLGAQVILPVAT

SEQ ID NO: 422967 - protein, 341 aa, unidentified
MGEYIGLDVSMKDTAISVRRDGKRVWRGKCASDPEAIARMVRKHAQEPERVIFETDPLSVWFYHALQAEGLPAICVDARHAKAALDMAANKTEANDADGLAHLAEVGFYREVRVKGFDSMLTRTLVAARTKLVRIKIEISNQIRGLMKTFGLVVPAGKGSTFDANVCTKLSESSDLAGIILPLLEAWRSVRMRAAELTRRLIGDARQSEACQLLMSIPGVGVVTATAFATAVEEPANFRTSRSVGAWLGLTTRRYQSGQVDYNGHISRRGDHQVRNLLYEAACVILTRSSAESTLREWGLKLRERVGFKRAAVAVARKLSVVMHAMLKSGELFDKTAGAPA

SEQ ID NO: 422968 - protein, 402 aa, unidentified
MNAVGIDVSKGKSMITVMRPGKEVVIEPFEVSHTDSELIDLAKVIQSLDGETRVVMEATGNYHLPIAWMLHDAGIYVSVVNAMLIRNYGNNTIRKGKTDKKDAQKIANYAIDNWTELPQYFPEEDVRMMLKNCYRQYEHFSKIRTMMKNNLISLLDVTFPDANRLFSSPRRADGSEKWLDFIETFWHCQCVCGLTPAAFTKKYQKWCKKHGYNFSEDKALDIYASACGHVCVMPKTDDTEFMMQQAILQLKTVSKTLAALQQQMQTLAEKLPEYPVVMQLFGVGPILGPQLMAEIGDVRRFHSKKVLVAFSGIDAPPCQSGTMEVRSRSISKRGSSSLRRTIFLVMSVILQQKPLDEPVYQFMDKKRAEGKPYKVYMMASANKFLRIYYATVKAYLDALDAE

SEQ ID NO: 422969 - protein, 315 aa, unidentified
MTNLKKSKTRINVGVDVGKAYLDIYIHEKECHWQEDNNEAGIKRLLKRLSYYEVERLVMEATGRYEFNLAEAAHNKKIPVCIVKPLLVRRFAGATNQLAKTDKIDAEVIARFAVMLKPSITPHKSKNLIAIKDLIARRRQLMGLRTQELNRLKIMGKRLEVSCKRIIKCLDTEIECIENRLAKHVKDQADWTEKQMILKSVPGVGDTLVYTLLADLPELGDLNKNQVAALVGVAPINRDSGKLRGKRRVQGGRANVRTVLYMATLSATQCNPVIKSFYKRLVAQGKHKKVAITACMRKFITILNAMVRDQVEWGL

SEQ ID NO: 422970 - protein, 347 aa, unidentified
MRFYNQQHKYYCGIDLHARKMYVCILDQKGKTYVHQNIKTDPEMLFELVFPYIDDIVIGVECVFCWYWVSDLCAEHKIPFVLGHALYMRAIHGGKTKNDKIDSYKIALLLKGGNFPTAYTYPAKWRATRDLLRRRMYLSRRCSELVAHILNTNTQYNLPGFNKKLSRKYNHEGVAERFEDPQVRKSVEVDLEMINSLNQVLKKLEWHIEKTARQHNYHTLYLLRSIPGVGQILALVILYEIYDIKRFPRVQDFSSYARLIRPVKESDGKWAGHSNKKIGNHHLKWAIKEAAILMLRDSAEAKYYVNKLERKYNKGKALGIFTHKLGRAIYFMLKNKEAFDMKRFFAK

SEQ ID NO: 422971 - protein, 314 aa, unidentified
MTKRVAGIDVGKQAVAVSIARGPVRQFPHTDAGLTAGLAWVREQAVTHVVCEATGGYERGLVHRVRGTDLAVTVAHPPKVRAFARAGGQGAKTDPLDAQILAHYGEVVELPVETAQEEASAEVRALLGRRQQLLDQRTQEQNRLEKGLQGRVKKSCQRHLAWLDKELEQLEEEYQQALQAKPELAERAALYQSVRGVGRLTAATLLAYVPELGQGSGKALTALGGLVPWAQDSGTHRGYRAIRGGRGLVRRALYMAALSVIRTDTDLGRFYRGLRRRGKPGKVALVAVMRKLLLRLHAIARRGTPWVAEAVPAS

SEQ ID NO: 422972 - protein, 349 aa, unidentified
MAMTIVEAPPGITGGVDTHLDKHVAAALDPLGRLVGTESFDADAAGYKALLVWLEDFGEVTKVGVEGTGSYGVGLTRFLRRKGIEVVEVNRPNRQSRRNHGKSDPLDAVEAARAAISGRASGVGKTKDGPVEAIRVLVVAKRSARQARVKAIVQMRHLGFTAPDQLHSRMKGLSVTALVAEGAKLRATKSADTVTAATKASLSSLAHRIQGLDQEIAELNEKIESLLLATAPDLMARFGVGPDTAASLLVAAGDNPERLHSEAAWAHLCGVSPVPADSGKNAGHLRRHTGGDRQANSALWRIAMVRIAHDPETTHYFERRVKEGRTKRDVIRILQRYIAREVYRYLPRG

SEQ ID NO: 422973 - protein, 361 aa, unidentified
MDRIYDKCCGIDVHKKLIVACFKKGNRQEVREFGATTRELLILADWLKDSGCEMTAMESTASYWKPLYNILESSGLKAMVVNAHHMKAVPGRKTDVKDAEWIADLLQHGLLRPGYIPDKDQRELRELVRYRKSLVGERTSELNRLQKMLEGANIKLSGTVSDINGKSARSILEYLLTGESVDGAKYDEMYEKKIIAHNLKATKEQIVDDLNGIMSPLQRRMMKELLNHLDELNIHIKNLDDEIDHFMKPEEKKASAAIQDVTGIGNTSAQAIISVIGTDMERFPTDSHISSWAGLCPGDNESAKKRKSGKTGKGNALLRTTLITCAHAAVKNKKSYFYAQFMRISSHRGKNEPTLQLPTLC

SEQ ID NO: 422974 - protein, 344 aa, unidentified
MKKVLIGIDFSKEKFDVAIIVKSTSMQAHAEFDNKVSGYRKMIKWIKSVVEEKTCSSWLFCGETTGGYSRMMSDWLYAQGYDVWIENALTIKRTFPLKRIKNDAVDAFMIAEYALRFEDKAQLYEPLSPALSGLRELFLYRHHLVRHRCSFQVRRIEKRFTQEKSPIKNTISQSARHIITEINKEIAKCDEKIKEYIESDDQLSSIFAIVTSMPGIGTINAVSLMVYTNNFTKFAYNPRKIACYYGIAPFGRDSGTSVHTDPRVGFIANKMLKSILTQAALAAVRTCPQIAKYYQRLIQRGKKPMVALNNVKNKMIAIITAMVRTGCMYQPDNICVATQSVNVK

SEQ ID NO: 422975 - protein, 384 aa, unidentified
MTKHTITFIGLDTHKEFSEVVTINDHRDEGHIALGRIPSTRQAFTKLTRRLQSQHPNSTLHFVYEAGPCGFWIYRLLTSLGHVCYVVAPSLIPKKPGERIKTDKRDAIKLARLMRANELSPIYVPEAEDEAVRDLSRAREAACHDRKRAKHQIKSFLLRNFIMYQGSANWGPKHRRWLAEIMLPHPAQQIVLQEMIHTLNERTQRLNNLDNELVHIGSQWRFYPVVKAIQAMRGVSLIVAMGLICELGDLTRFDHPSKLMAYIGLVPSEHTSSDKRRLGSITKMGNTRARRLLVEGAHSYRYQPKVSIEMEKRQEGLPQEIIDIAWQAQLRLCRRYQRLMYRGKHRNIVVVATAREMVGYLWEIIQLVPLEPVKPAERVTRVPR

SEQ ID NO: 422976 - protein, 419 aa, unidentified
MPFKIIRKNCCGLDVHKTWIYACIGITDPNGRTEYFEKRFSSFSKGLRDLSEWLSKHKCTEVCMESTGKYWIPVFNILEKTCSVELAHPKYTKPQKGNKTDRKDARWICDLFMCGMTKPSFIPPADIRHLRDLVRYRFKLTCMLTGEKNRAQNCLTVSNLKLDEVFSDVFGKSSRSITEYMLAHPGETFDVAPFVDPRCKTPVEEIQAAVDGAISPEQAIKLRQCLNHIDELEKHKEEIEREIFRVSDPYLDALTLIRTVPGLDKNPFTAIQILSEIGGDMSVFPTDKNLVSWAGCCPRNDKSNKTIKSTRISRAGSYLKPVLVQVSNALIKSKKHPEITDRYRRIKSHRGHKKAIIAVCRMLLTAIWHILTDLKPYTPDGYLTPRPVKKEKVLTTSQALNLLKLRGYVIKDDIAAAIP

SEQ ID NO: 422977 - protein, 345 aa, unidentified
MQITTVGLDLAKRIFQLHAVDASGDVVVRKALRRSQVLPFFTKLPPCLIGMEACGTSHHWARTLTELGHEVRLMPPAYVKPYVKRGKNDAVDAEAICEAVTRPTMRFVAMKSAEQQAALSIHRTRNLLVKQRTQLVNMIRGLLAEFGMDIPEGLERALALAREIAAKETTPDVPAVAMQILGLLCGQVLDTHVRLQAIDRSILALQKSDEVARRLSTIPGIGPVGATAFAASVADPRQFRSGREFAAWLGLTPSQNSSGGKDRLGRITKMGDRYLRKLLVVGATSLIRRARYKPETADPRLVALLGRKPVRVASVAMANKMARVVWAVMVRGEIYRSRHAPNLAV

SEQ ID NO: 422978 - protein, 321 aa, unidentified
MKESGEVILEKKVRTEELEKLLEDIENKTIILEPTTTAIKLARKLRKNNEILLSHPYKTKLIAESKKKTDKVDARVLADLARTNFLPTAYLPPDEIMELREIIRERIRLKKLSTSIKNRIHSILAKNGIKYDRNLFTSEGREFLYSLNNEWINRYLRILSSIENEIKEIDREIRQKCLENEETMLLTTIPGIGFFSALLIYAEIGDVKRFPNSKKLCSYAGLVPSVRQSGNKVITGKITKEGNKLLRWVLVQCAFVAIRNDEKFRNFYERIKQRKGPQKAIVATARKLLTVVYAVLRDKKPYISYTPTTYGEEFTPVTNWA

SEQ ID NO: 422979 - protein, 346 aa, unidentified
MSITMIGLDSAKSVFQVHRIDDTGQTQLKCKLGRSELIPFFEKQAACTVVIEACGAGHHWARLLGELGHEVKLIPPEAARPFVKRGKKNDVADAAALCTAASHPDVKFVPDKTREQQDVLTLHTARSLLIKQQTMVANAMRGLATEFEFVVPKGIGKLEELAAAVEADGSLPAEAQQAIGELHRHCNALGARIATFEVQIIGHARTDAVARLLATIPGVGLITASLIAATVGDHIRDFKSARHFAAWLGLVPRQHSTGGKTRLGRITRMGNADIRRLLVLGATSMVYRAEQWNSATGNWIVGVLRRRPARLATVALANKMARIAWAVMTRKEVSCPNGRAAAKATA

SEQ ID NO: 422980 - protein, 400 aa, unidentified
MTDSDGVGVFLGLDVGKSNHHGHGLTPAGKKVFDKALPNGEPQLRAVFDKLTATFGTVLVVVDQPASIGALPLTVARDAGCKVAYLPGLAMRGIADLYPGEAKTDAKDAAVIADAARTMPHTLRTLDLADEVTAELTMLAGFDQDLAGEANRTSNRIRGLLTQFHPSLERVLGPRLDHPAVTWLLERYGSPAALRKAGRRKLVEVVRPKAPRRAQRLIDDIFTALDEQTVVVPGTGTLDVIVPSLAKSLATVHEQRRALEARIEALLEAHPLSQVLTSMPGIGVRTAAVLLTTIGDGSSFPTAAHLASYAGLAPATRQSGTSIHGEHAPRGGNRQLKRAMFLSAFAALHDPASRTYYDRCRARGKTHTQALHRLARHRISVLFAMLRDGTYYEPRSPRTA

SEQ ID NO: 422981 - protein, 358 aa, unidentified
MTQVKKLDFSGTTIYCGVDVHKKSWRVNIQDSEFELEDFTQNPDAVVLYKHLARRYPGAVYKIGYEAGFSGFSMQRTLSQSGCECWVVNAADIPTSDKDKKQKQDKADARKLCNYLQLKKLKGIHIPEAEWEHARTLVRTRERIVHNQTRCKNRIWQLLHFSGLPVPAAQQEGRYWSKRFTDGLQEMDCGGSIHLQQSLQLHLKDYLQTRQLLLEATRSIRALCREEKYAGDIKLLRSIPGIGEINAAVILFELQDVTRFKRFDYLCSYVGLVPDTSDSGDTKRTKGITHRHNYYLRTALVESSWSVVRKDPALLMKYKAYCTRMEKNKAIIRVAKHLLSRINFVLKNKKEYVTGVVA

SEQ ID NO: 422982 - protein, 405 aa, unidentified
MKPPNSEVSILPQIDKACGLDMHKDKIVCFISNKDGTDQLLEEFGTFSEDLFKIRDLLVHHQVSHALMESTGIYWISLYAILREAAIQVIVANPQHIKQIPKRKTDRKDARWLCTLMLHGLARHSFVPGPEQQALREFCRNRLFYKQSQTKIKNRMIKILERANIKIRSVVSNISVKTAMEIIRLLAQGSTDADRLAACCRGRLKAKKNLIIRALQGRLDVAQRQMLGMLLSDMDHYDHQIHQIEKQIVLLTETHYQQVAQCLETISGIGRQSAQIIISEIGDNMAFFPTADHLTSWCGLAPGNHESAGKHRNVSVKKGNKYLRVAMIAVAWGAVRTKDSYWRALFEKLRRRMKSQKAIVAIARRLLKVIFKIIRDRTPYTEKGLVHFIEIQRKARITQAVKLAI

SEQ ID NO: 422983 - protein, 356 aa, unidentified
MSEITRVGVDLAKSVIQVNAVDADGKVVTNRQLSRDKFVPWCAQLPAGCLVAMEACAGSHHWARKLMALGLNVKIIAPHLVAPYRLQGKGGKNDANDAAAICEAASRPTMRFVPVKTTVQQGMLCVHRLREGLKEERTASINRIRGMLAEFGLVASRSPDKLREKLTDMLEDAGNDLCGLARLVVQEDYDHWKDLDGRIKWCDERINAHVKDDAQAKAAKELMGVGPVTASAVVATVGDFNQFKNGAQFGAWLGLTPRQNSSGGKNSLGGITKRGDMYLRMLLIQGAKSVVMTAQKRDDPISKWLYQLREKSGWQKAAVAMANKNARILWAMMTKGSRFDPRHVSVNPAGAATATT

SEQ ID NO: 422984 - protein, 347 aa, unidentified
MANGSKTEVQVFVGIDVSARELSVAVRCGTEDREAVTTFGNNAGGHKALLAYLLRGNGRARVCLEASSNYSLDLALTLHAQRQVEVSVVNPRRARRFAESLGERSKTDPVDAGVLCEYAMRMRWVPWVPPNLVALRLRALTRAIEDLGVMQTQEKNRQHALTISRALPALLIRELQKHQRYLQLRITRLRQEALRLIARDPELDRRFRVMLTTPGIGETSALQILGELAVLPDTLDARQWVAFAGLDPCRFTSGTSVEKKPRISRGGSRHLRRALYMPALVAMRREPYLRAFYQRLLARGKAPLQAVVAVMRKLLHAFFAMFHSDQPYDGSKLCPVKFAPDTVALCA

SEQ ID NO: 422985 - protein, 335 aa, unidentified
MRDIGVDLHKTSFQCCYLKEDGTEFKKYFISELENFKKSLRQRDRIAVESTGNSRWFLNQVKDKVSEVVIVNPGQFKVIVNSSKKTDKADSELLAFYLSKEMLPEVVMKDEYSSQIKSLCNTRDKLVKLRTSLKNKIHNILLSHGIISKREDFSSEKGLQKAQSYALGEVAEVELDVIVAQIRHLNEGIKKLGREIESKGKDLKGYRNITSIKGIGPKSGTILLSVIGDIGRFPSQKRLDAYFGIVPRVRNSNDTIHHGHITKQGSKLGRTTLVQCTLIAIRYSPYLRDFYLRLKAKKGSGKAIIATARKLLGIIYQTLKNDWIFEDFPNFVLQS

SEQ ID NO: 422986 - protein, 354 aa, unidentified
MHYANRVDFSGQTIYIGMDVHKKSWTVSLFMEHLEHKTFTQVPDVAVLAAYLQRHFPGARYSAVHEAGYSGFWIHDKLLESGIACMVTNPADVPTRDKERRRKGDRSDSRKLARCLRSGQLEGIHVPPRATVEDRGLIRTRQAMVRKQTRCKNQIKSLLLFYGLPVPDAASGWSRNFIRFLEETRLERESGDLALKANLTELIHLRQIIAQLNRDILALSRTDEYRERVQLLKSVPGISTLSAMIFLTELGELSRFPSLDKLCGYVGLTPDTHGSGEKQGIGDITRRGNQMLRSLLIECSWVAVRKDPALALAYHSFCKRTLKTKAIVKIARKLLNRIRFVLNNRCRYVSSVAA

SEQ ID NO: 422987 - protein, 343 aa, unidentified
MSNYTNYVGIDVSKKDFYACFKETSPAERFNNTTPGINALLRRLAKENFSPQDTLLGCESTGSYHLRLCLYGNRVGFPVKLLNPLIVKKYNHTKLRRVKTDKKDAALIRYCLTQGAGCLFIETAETIQLKSLVRQRHSLAHTLLRIKRQQEDLQYKEDCFKTKISSPYGELSGIIKEKAKELEQALKTFRPQEQKLLQTIPGVGPLTSAAFVAEVQDIKRFTLPKHLVAYIGLDSRVHQSGTSIHGKGYISKRGNKILRTRLYNACSVAVLHPNLFQRFFQKKRSEGKPYRVALVATMNKMTHVIHSVWTNNKPFVDYTSQPKPRFEEKAGLELSTGDPLTGI

SEQ ID NO: 422988 - protein, 387 aa, unidentified
MNYFLGIDIAKTNHVASLINNNGDIVIRAIKFTNSNEGFNKLLNTIQSKLGDLSNIEVAMEATGHYWLSLYSALTDNNFNVSVYNPYQIKSYRGAYNNRKQKNDIIDSIIIADYLRVFGSKESKFPEEKLLSLKQLTRFRANIVANVSSLKVQVIGLLDKVFPEYKKLFCDTFGNTSKQLLLNCPTPDDIINISTTKLANLLSKNSKGRFNKDTALHIKEVAKSSFGIKFTTDACSFEIKQLINQIVFLESQIDAVSKEIKELYNELDSHLLSVPGIGDNLAPIILAEIGDINKFDKPSKLIAFAGTDPSENQSGNKLSSNDKTSKRGSPYLRHAIYTASLVAISNEPELRAYYDKKISEGKHHFVALAGISRKLLTIIYYLSLIHI

SEQ ID NO: 422989 - protein, 412 aa, unidentified
MKVVHEICCGIDVHARMLVACLILANGEKEIRTFSTMTDDLLRLRDWLVAAQCTHVAIESTGVYWKPVFNILEDALTVILINPEHAHALRGRKTDVKDAEWLGDLLRHGLLKPSFIPPPEIRELRELTRYRESLVREQTAVANRIQKVIESANLKLAQVATDALGASGRAILWALARGETDPVKLASLAHGKLKAKRPQLERALHGRLTPNQRFVLRELLQRWEELEAADRRVTKEIDRYLQDHPKLARARDHLDTIPGLGPRAAEIIVAEIGVEMKVNFGSDAHLASWAGICPGNKSTGGKRLSGRTRKGNTYLRSGLVQAAWGATMKKNCYLSSQYFRLVKRLGRKKALVAVAHSLLVIIYHVLQCDQSYTELGGDYFDRHHVGQQREYFIRRLQMLGLKVSVEELPKAA

SEQ ID NO: 422990 - protein, 390 aa, unidentified
MDVLYQSCAGIDVHQANIVVCILHGPLTSTRPKREMATFDTTTKGLRACHDFLSQFHVEAVGMESTGVYWRPVWHALCDDFELILAQPAHMKAIPGQKTDKKDAHWIAKLTRIGLLPRSFVPDETIQELRELTRQRKHYVESRNRETNRIHKILQSGGIKLTTYIEDIMGLSGRNLLQLLVDGTPITPRIVHQSVYTTLKKKVPQLLEALDGYFSDHHRFMLKQSLEIYDFYQKQIELLEERMNVYLSQYENYVEILDSIPGIDVITASVIISEVGVDMSQFPTAGHLASWAGLCPGNNESAGKKRSTKIRHGNSYLKKCLCQAAFAVKKQKGSPLADRFYQIQSRRGSQKATIALAHQLLKIAYILLKEQITYPEFLARKKTTRDELVA

SEQ ID NO: 422991 - protein, 343 aa, unidentified
MKIIRVGVDLAKNVFQVHGVDRNEKPVWKRKLKRDEWIKVLLEKIEPGCEIGMEACGGAHHWARKLEALGYTVKLIAPQFVKPYVKSNKNDAKDAEAICEAMSRPNMRFVSIKSVEQQDVQAVHRVRAGLMEQRIAKANQIRGLVSEYGLVAPIQVSHLRAAIPEWLEDAENGLTSRFRRLLNGLWSDLQSLDLRLKEMDQEIAEIAAANPVAQRLQQLRGVGPMVATALLATVGDASQFKNGRQMAVSLGLTPKQSSSGGKEKLLGISKRGDPYVRSLLVHGARSVIKLAKGKDDRLSQWVMRIANAHHSNVAVVAMANKTARIAWAMIRKGSDYQPELAAG

SEQ ID NO: 422992 - protein, 340 aa, unidentified
MPEAQHVYRLWCGIDVAAKTFTVSWTTDRITYASPLTFPQTPEGVLALQQQLQPLAIPASDTLIVLEATGSYWISLAVLLHAAGFVVSVVNPKQVHHWAKSLPRRGKSDAVDARMLTQYAHERQPRAWSPPPQVYHELRQRLTAREALVSMRQNARNQLHALRQWPFLVAAALEPLEQVVMELDKQIADLDRAIAQVLREGAWAASAELMQTITGIGPLTSAWVLVLTVNFHRCPSAEAAANYAGLIPLPRDSGTSVRGRAQIGQDGNARLRTTLYRATINATRFNPIIKAFYERLRAAGKPRKVARCAAARKLLHLLYGVVTNQRPFDPNYRSASCVAR

SEQ ID NO: 422993 - protein, 353 aa, unidentified
MKTYYVGMDVHRASIVIVVMNGAGKIVMQSVIETGAERVRGYLKQLRGKVYVTFEEGTQANWLHEVVRPLVTEVVVCDPRHNKLMQSGNKSDRVDAQKLAELLRLGSLKAVYHGDNGVRALKELVRSYDCLVSDTTRVMNRLKAIYRGRAIGCAGHEIYRQDRRQQWLEKLRERGAKQRASCLYQQLAALKPLRHEAKRLMVKEARRQPAYPWLLSVPQFGSVSVAQLLAIVGTPHRFRSKRQFWTYIGLAVVTRTTADHEVVNGVLRRSQRPVSTRGLNRNHNHLLKRVFKNAANGACHGGPFKAAYELRVTQGMVPSLARLTIARQLAAITLAVWKRGEQFNPERMKQQAA

SEQ ID NO: 422994 - protein, 324 aa, unidentified
MYLGLDVSKNTLDCCLNKDGFFYACKISNNQKGFEKLKAWLDGHGCDETLHCCCEATGNYYEAAAEYLAAHYKMSVENPRKIKAYAVSELKRSKNDKQDAKTIAEFCEEKSRKLKTWKPKNQTEKELQSITRYIARLKQQKASETVKRQTASDNIKDLIDDTIEYLGSKIKEAEGRLKTYISQNPELKQKAANLTTIPGIGIQTAAIIMTALSGNNDFKTAKQFTAYLGLDPAEYKSGTSVKGKDRISKVGDCITRAALFSPALVAYRIGTFPRLVANMRQNGKHIMQILTAIMRKLAVVAYTLHKTNTTFEKQRHTRIQQKAA

SEQ ID NO: 422995 - protein, 342 aa, unidentified
MKSIKRLGIDLAKSVFELCGVNERGEVILRKTVKRKDLLIFISNIEKTEICMEACGGSHYWARKFGEIGHKVRIIPASYVKPFVKSQKNDQNDALAITEAASRPTMNFVQPKEIWQQDLQLIHRVRSRLMAQSGQLRNQMRGFLMEYGLVIGEGLSKFQKSIPLILEDSTNDLTLETRAIMHDLFEEYNAIEQRKKKYDLKVQEIAKKNPLCKRLTKIPGVGPLTSTIFVAQMGNAEAYKNGRQAAASLGLVPRQRSTGGRSILQGITKRGDPYVRCLLVHGARSAVKVAAKALPETATPEQQRIKKMLERKHMNVVVIAVANRNARIMLTMLKSGKEYQAA

SEQ ID NO: 422996 - protein, 349 aa, unidentified
MLLIGCDFHTRFQQIAMLDSTTGERRERRLEHPEEARRFYSALPSPARVGMEATGPAQWFERMLRECGHELWIGDAAEMRASVVRKQKTDARDALHILDLLVSDRFPRIWIPSPAERDTRQLLRHRVKLVRFRTSVENQLHALAMGEGVCRRKKLWSKAGRNELEGLALGRWASRRRRELLEMLDRLHAGIEELDQAVRNEAASRPEAVRLMQQPGVGPVTALAFVLTIGPVERFRRSKQVVSYLGLNPRESSSGGQQRLGSISKQGNSMLRWLLTEAAQTASQFDPELRRDYLRLQFRRGRGVAKIAIARKLAVRLYWRLREAAQLAPPARMQGSPARALVEETLSRK

SEQ ID NO: 422997 - protein, 413 aa, unidentified
MLKIVYRVCCGMDVHKSFVVACIASTTEYGVTTYKSKRFSTFTGDLRRCAAWLAENSCKDVCMESTGKYWIPIYNILEPTCNIVLAHPKYVKAIRGKKTDKRDAKWIADIFKHDLVAGSFIPPADIRQLRDLVRYRWKLTNFTTGEKNRAQNCLTVSNIKLDDVFSDVFGKTASAITTRILENPAEKITDVSGFRTKGMKATNEQVLAAVDGEMCAEQVEKLRIIRSHMDSLELCKANLESLILTTAEKYLPQLNLVMTVPGIQSFAAIGIISEIGVDMSVFPTSKHLCSWAGLTPQNNESAGKKKTTRISRAGAYIKPLLVQCALCAIRAKRFPEVRNRYLGLKKRRGHKKAIVAIARMLLTAIYNILKKNEPYNAELYRCCNTPPEHRAVSVEEAIFILQRQGYLVTPSAT

SEQ ID NO: 422998 - protein, 346 aa, unidentified
MKINRVGVDLAKNVFQLHGADCRGKAAWKRRLPRGKWLKVLCETVEPGTEIGMEACAGAHHRARQLMQRGYPVKIIPPQFVKPFIKSNKNDANDAQAICEAMDRPNLHPVRVKTVEQQDLQAIHRIRNEIKSHRIAKANQIRGLVTEYGLVAPQQLPALRRAIPEWLEDADDGLTFLFRQLLQGLWGDLHALDQRMAELDQQIAVIAQEDSTARRLQQLRGVGPLIATALVATVGDGRQYRKGRDMAAALGLTPRQHSSGGKEKLLGISKRGDAYLRCLLVHGARSAMRTAKDKEDRLSRWIVNLQSRRHSNVVAVAMANKMARMAWVIMTRGVDYDPDLAAASVN

SEQ ID NO: 422999 - protein, 393 aa, unidentified
MFYIGIDIAKNSHEVCFLDESGNVLDGNSFKIANTASGVDKLQKMFGKHALSPDNSIVGMEATGHYWLVLYSWLVEKGFDVKVINPIITDAYRNMLIRKTKNDRIDAQVVAKVLMLGEYQESPVSDKDTLALRQFCRFRLWQVQSCADLKKKVIALLDQIFPEYEKLFSDVFGLTSKEILKNYTSPEEIASINTRKLTHLLEKASKGRFGKEKALEIKAVANHSLGIQLAIDAFSFQLRQLIEQIEFVEQQIALLDQQIENYMEKLQSPVTTIPGVGPVYGAIILAELGNIERFPGGKQVVSYAGLDASVHESGDFVGTRSHISKRGSPYLRRALWGAAFVASWADPELSAYYHRLRARGKHHNVAVGAVARKLCYILYAVLSENRPFDKRPI

SEQ ID NO: 423000 - protein, 349 aa, unidentified
MTSTKYIGMDVHKESISIAVMNTSGKIVMESVIETKASMILQFFDGLRGDLQVTFEEGTSAAWLYDLLKPHVTKLVVCDPRKNASMREGHQSDKIDARRLAELLRLNHLSPVYHGEHGLRSLKELVRSYLTITKDLVRVMTRVKAIYRSWAIPCTGKQVYAPRHRAAWLGKITEPGVRRRAEFYYQQLDALRTVRQQVRRELLAEGQKHQAWKRLCQIPSIGPIRAAVLLGILQTPHRFRTKRQLWTYSGFGIETQSSADHRSVNGQLERAKKLNRNCNHDLKNLFKGAAIVASSKPGPFQEFYTALLTKGIRPEMARLTLARKIATIVLMVWKRGACFDAQHLKPQTA

SEQ ID NO: 423001 - protein, 339 aa, unidentified
MKYIGLDVSNKSTAICIVSERGDVVEEFSVNTKESSVAKGLKKYRGSRCVVEASPLAETICSWVEGVGISVDILDTRQAKVVTATKKKTDRLDARKLAQLCRTGWYGRVYRKSGEARNLRSYLTARMQLVKSATGLLSSIRGILRAHGLVVPAGSGEKFEKNVRDLLKKQDSMLQCAIEPLLCMWKELEEQAERMYRELDRQISRKNPAIKRLITVPGVGPVTATAFIATIDDPRRFSSGEQVSSYLGLVPSVYQSGDFEVKGRITRHGDNLLRWLLVEAATTLLTRSRKSCPLKEWGLKLQEKKGFGKARVAVARKLACLLHHLWMTEQEFEFQEVTA

SEQ ID NO: 423002 - protein, 407 aa, unidentified
MDLLKTVFGIDVSSRKSNVCIMVNGQKVNDYAISNDMVGFNRLLGDLKQVTKPQIIFEATGVYSRRLQAFLDMHELRYVMMNPLEAKRKTKDDLHQNKTDKLDALYLAKLQSEHPQRLAYVQNKEYQELMANNRIYEQASHDLISNKNRLHKAVQLTFPEIEHLLANPRGKNYWSIALRFPHPDIVLETKEADIIDFLKGLSGIGKKRANDITQNLIRLAKVACPAVKKNSAHIRGLKMAINNILSAEEECQTALQEMAKLAPKRDLEILTSIPGIGENTALRIISELGDIRRFNNPSQLNAFVGVDPQVYESGNLTAHLSISKRGTAIGRKVLYLAINQIQSAKKAGNPCHIADYYEKRKRSSETASHKKAAIASIHKLLRTIFALIKNDQLYSYDVAKHNQRLLS

SEQ ID NO: 423003 - protein, 373 aa, unidentified
MPKYSTAFGMDVHLRSTTVCALDADTGEAVTRRFPGNPWGEIAGWMDGFPGPSLAAYESGYLGFAPQRELAGLGVECVVAAVSKIPRSAADSASKNDRNDAARMAKAILAHDISPAWVPSPEVEGIRDLAGAYDGATARLATAKQRLLAFLAKRGFVYGGTTPAGNPRKYWTYDFLRWLDKARPEDDGGVRALAALRNEVEAAAEARADLLSEYRAAADASPIAAEVAALQSIKGCAFALAAAFSAEVGDFTRFRSGRQVTAYFGLAPSQRSSGDSVRLGGISGAGNALVRKLAVEGSWCYAAARHQPKLMPRDTGVPLEIRMHGRKGSERLLRRREEMLARGVPAAKANAATAAELVRWLWALGMMCREGAE

SEQ ID NO: 423004 - protein, 353 aa, unidentified
MFHQPGEATEMKITSVGIDLAKNVIQVHGVDERGKAVLKKQLKRDQVASFFANLPPCLIGMEACGSAHHWARKLQSFGHSVKLMAPQFVKPYVKTNKNDVADAEAICEAVARPIMRFVPIKNAEQQAVLALHRARQGFVKARTAQANQIRGLLAEYGIVIPQGIGHIAKRLPEILEDGENELPGAFRQLLDRLGDHLKELDRQVGELEVQIQSWHRENEASKKLAQIPGIGPITASALVASIGDAKSFENGRQLAAWLGLVPRQNSSGGKQVLLGISKRGDTYLRTLLIHGARAVIRVAERKAGYADSWLARLMGRRNKNVAAVALANKNARTVWALLAHGRDYQADYEPAAA

SEQ ID NO: 423005 - protein, 342 aa, unidentified
MSPSYEGRQIVGIDLHRRRSVIVRMTPDGYPLGTVRISNDAATLAAEISRAGEHPDVVLEATYGWYWAADVLAAAGAQVHLAHPLGVKGFAYRRVKNDVRDAADLADLLRMGRLPEAWVAPPPVRELRETVRHRAALVAIRSACKAQIHAVLAKNGVAVPMTDLFGQAGTDLLGQVQLPSPFHARVTSLRRLIDLLDFEIDAAACQLAGRLARDPGYQALLVLPGVGKTLAAVFLAEIGDITRFPTPGHLASWAGLTPRHRESDTTVHRGHITKQGSSLIRWAAIEAVSILPPTTPVLGPTKTRVAARRGTNIGKVAAARKLLTFVFYALRDGEVRALHTAA

SEQ ID NO: 423006 - protein, 384 aa, unidentified
MQKPNDLNQSRIVLKQDSTLIAVIEMSLSSWLVAGIVPGVERQPLKKLAVDESALLKLLNRWREEAEKAGRRIERIAVAFEAGRDGFWLARWLRARGIEAQVIHASSVAVSREHRRAKTDRLDTELLKRAFLGWLRGERDHCKMVAIPTTKDEDAKRPNRERQSLVGEQTRIVNRMKAALIRLGIRGFNPKLKKAAGRLENLRTPEGEPIPPNTLAELHRDMERRRLVSDQIRQIEEARLERMEQAPGDGPHPMVRLIARVIGVGIETADMLVHEVLSRKLRDRRAVARYAGLTGAPDESGSKRREKGLAKAGNARVRGGMIQLAWRFLLFQKDSALAQWYRTRTEGGRNRKTMIVALARKLLIALWRLVTTGEVPAGVVLRAA

SEQ ID NO: 423007 - protein, 354 aa, unidentified
MTDPSMPDPDRLVTLGVDTHLDTHVAAVLDERGVLLDSMTLPTTPAGYQALLDWAAEFGTIDRVGVEGTGCYGAGLARWLRGAGLVVLEVDRPDRRARRQHGKSDPLDAEAAARAVQSGRARGLPKAGTGAVEAIRALRIARNSAMDARSRVTNQLHALRVTAPHALRDELRALSLSGLLRRASGFRLPALIEGPSAATRMALRSLARRHQALSAEIAALDGHLRRLVSAAAPRLVARPGIGVHCAGQFLVTAGDNPARLRSDAAFGMLTGTSPVPASSGKTVRHRLNRAGDRQANCSLHMVVLSRMGHDERTRAYVRRRTSEGKTTKEIMRCLKRYVAREVYGLLLQSPGLTS

SEQ ID NO: 423008 - protein, 411 aa, unidentified
MLVGIDWADAEHTYCLMDDTGATLATGTIDHTAEGLERFMTLVRARAQDPQDILVALETSQGPLVGALLDQQFTVYAINPKAVDRHRDRFRVAGAKSDLRDAWVLANLLRTDRMLYRPLLPDSEVAQELRALTRDRAELVQTRTMLSNQLTSCLKAYFPEFLTLFADPDRPVALALLQAFPTREALQAVSPTRLEAFLRRRHCPHSHDRAVEIHTQMQARGFHIAPPLVRAKVRLAGTLVSQLQTLAEHLEAYDREIQRVLRLHPDGELYHSLPGAGDFLAARMVGELGDNRDRYRDASSAQCEAGTAPVTRKSATVRTVHVRRACSHPLRSTMWQFAFASKRHCEWAQAYYLRARKRGKKHAEAVRMLGNVWLRIIIAMRRNRRPYDEALFLSRSSHPSLALCPSVVHHK

SEQ ID NO: 423009 - protein, 352 aa, unidentified
MRTSQKTPGTITTIGIDLGKNTFHLVGFDKRGAIVLQRKVSRSQLEHRLCNVPRCLIGMEACSGSHHIGRQLTALGHDVRLIPAQYVKPFLKGHKNDYRDAEAIAEAVLRPTMSFVAIKTPEQMDLLALHRVRSRLVGQRTGTINQIRGFLIERGIIVRQGVVPLRKALPDILSSNTNILSPRMVSLIADLMQDWRRLDERIGIVSTEIEALALQDDGCQRLMTVPGVGPIISSAMVAAIGNGAGFKQGRDFSAWLGLVPKQESTGDRTILGKISKRGNKYVRTLFVQAAHVVLVRRPSTAMRGLWPWIEQASKRLHRNMLAIALANKLARIAWAVLARGQAYQPRIAANAA

SEQ ID NO: 423010 - protein, 349 aa, unidentified
MAMTIVEAAPGITGGVDTHLDTHVAAALDPLGRLVGTEAFSADAAGYKELFAWLEGFGEVTKIGIEGTSSYGTGLVRFLRRKGVAVVEVNRQNRQSRRNQGKSDPLDAIEAARAAISGRASGSAKSKDGPVEAIRVLVIAKRSARQARVKAITQMRHLGFTAPEQLHCRLKGMTVTALVAECAALRPGRSADPVIAATKASLASLAHRVLSLDVELAGLDEKIESLLVATVPDLLARFGVGPDTAAALLVAAGDNPERLHSEAAWAHLCGVSPIPADSGKSAGHLRHHQGGDRQANSALWRIVMVRIAHDPETTAYFERRVKEGRTKRDVIRILKRYVAREVYRYLPRG

SEQ ID NO: 423011 - protein, 398 aa, unidentified
MKGQDIMIYVGIDVASQKRDCFLLKDTGEVFSKTSFTIKNDFEGYKKLHNSILQFVESTKDSNVRIGLESTWHYSKNILLYLIKQGYQTTLINPILTNMDRKASTVRKTKTDKIDAEAICKFLDKNRFDFKPYTLLSYHIDALKSLTRQRFSLVKQMTQQKLIFQRLVNVIFPELLSHFSNDYGESVLNILYSYPTPKKLAKAHKESITKLLHSRCKITSSEILELAKNSIGQSEEYLGFELKHTIDMILFYQSQIEIYNKQIEIELNETEYGKIITSIPGVGIITGAMIISEIGDINNFTTSDQLLAYAGLDPSVYESGKFESSHNKPSKRGSKYLRWAIHQASSVIWQHDNTFKDYYLKKIKESKHHYVAIGHIDKKLIRVIFSLLKNKSMFIPQK

SEQ ID NO: 423012 - protein, 443 aa, unidentified
MPRFIGLDIHKTVVAGCVVDPHGTVCTRLRFPLTRTTLAAWARQLTAEDAVAVEATTNTWAVIALLQETPARLVVSNPLRTRAIATAKIKTDRVDAEVLAQLLRCDYLPPVWIPDAATLAARRLTTRRSRLVAERTRLKNRLHSVLHQLLLPCPVADLFSRAGLAWLTTVELPAAERAAVDADGRLLAAVEQELTALEQSQVVDAAADPRGRLLLTLPGIDVAVATALLAAIGEISRFPTPARLAAYLGLVPSVRQSAQHCYTGHITKQGASHVRWLLVQAAQHLDRHPGPLGAFVRKLQRRKNRNIAIVAAARKLVTLAWHVLRSGEPYRYAVPRATQEKLARLRRRATGQRRQSGPPPGTPRAAAYGTGQRTRGIPALATVYQQEGLPAPGPMPSAESRVLATDPAVHQFVTSLQVSHHRPRARQPALHTAKTDTHGAQPG

SEQ ID NO: 423013 - protein, 430 aa, unidentified
MKQYELLHSLFVGIDVSMKENVVHAMPFSPEDHPGHAHLRFSAPNTPAGSVGIVEKVSDFLKFYPDVIQVVIALEATSVYSFHLATFLSVAHFNGHIPAIVYSVNPKEIHAYKKTFTDVGKDDYVDAMVIADYACSNKIRSRPWKGPELLGLRVLTRLRFRIAKLMGIVKNSTGNSIYLECSGLMTGENPFCNVWTTTCQELLTTFQGPDEILSLSDEELLNFITEKGHGRFSHPLDVVEKVKKAARNSYRLDKRVYEPLTSGLSVSFFIIHSLEAAIKKLDKSIETMAKSFSSDSYQILLSIDGVGPVIAGGLLAEIGDIKRFKTDDALAKYIGLTWRGKQSGQSESPVKHLSKAGDVYLRYYVLLATGQIINYSAKYREAYERIRSRKTLFPYRAALNLVARKIVRLIFTLLDKHQLYSDNKVMVTLE

SEQ ID NO: 423014 - protein, 331 aa, unidentified
MYVGVDYHKRYTVATQMDPQGVILSQVRLKNDPDSLRTFASSLPPGSKIALEATEGWYYFYEMLENYCPEIYLAHPLKTRAIAEARIKTDKIDSTILAHLLRANLLPTSYIPPREIRDVREILRYRASLVSLRTAIKNKVHAILSKNGVVMTYSDVFGKKALRSLDELSLRACYRQELQGYLQCIETLKRLITEVSETIKCLAEESPQARLLITIPGISYYSSVLILSEIGDIGRFPSAKKLCSYAGLVPRVHSSGGKTRYGSITKQGSKWLRWILVELSHHFIKGSPRLKCLYARIAKSHGRNTARVAVAREMLKIMYVMLRDNRAFVIR

SEQ ID NO: 423015 - protein, 442 aa, unidentified
MATLTILERRERFYLGVDVGRRTHTVCALPRSTFETGGARWQHAPTLAVPVSRAGFEKIAALLGRLADDPARDVVAGLEPTGGYYARTVHAYLTSLGLQVHWVKNNAVHDARDAVYGKKTKTDPADARLIARLLYLREAVGQEYAFTAGHDQVGVYATLRLLVNNRWKLRQAQARAGNQLTQILDVVFPELAAVFTKSLTAPAALALLTRYPTPAAVAAAGQDEIYRTVVFEGKAPRKAAQVPRLLELAAGSVGIAAGIDDLIAAETYLVGQLRRLAEEAASIEERIVATVALAPEARVICSFPAAREIRAATILGAMGAPVGAFHSGKALRRHLGWSVEEEKSGTSVHRERLAVSGNRHSRREMRLWTLGLISPRTPWTPFRAYYERLLAPPSGKRPNVALGHLASKMISVLYTCMSRDQAYDEERLAKDMKISLPAARQA

SEQ ID NO: 423016 - protein, 375 aa, unidentified
MTNYTTHVAMDTHKKEHKVALHYPGNGQIVEFTVKNTARDIKKMVNKIKKQAPADVRFCYEAGVCGFTLKRRIEALDFKCAVIAPSLTPIKPGDRIKTDRRDAKKLLAMFKAGLLTEVYAPDQKQEAARELTRCRQTAQENLKRIRHQLLKFLTRHGYVYTNGKHWTQRHLRWLCSLEFDEQPLLRDVFDNYFTQMQHCMQRLASLDKEVEKLAESKTYKEVVGLLRCFHGIDTLTAITIITEIFDFGRFSSPGELMSYLGLTCSESSTGEKEHKGSITKAGNKRVRRLLIETAWHYRHPYIARSKALRQRRKDQPQWVIDIADRAGRRLRKRYWYLINRGKMPCKATVAVARELAGFIWSVFKEYQARNQEKAA

SEQ ID NO: 423017 - protein, 420 aa, unidentified
MKAFHPERFAALIGIDWADQKHDICELLPDSDQPCYQVISATPKATHAWANELKRRHPNQLIAVACELKKGPLIYVLEQHEHIVIFPINPSTVAKFRKASTHSGAKDDPSDALLQAQILQRHMDKLKPIEPEDSDIRALSRLVEGRRKLVQDRVDLSNKITTMLKSYYPQVLDWFKEKDTHIFCDFITRWPSLEQAKRARKSTLLQFFNEHNSRYTDVNQRRIEAIRTACPLTQDPGIIEPNKILVEILVQQLKLLIEAIERLDKEIKQRYRSQKDRFIFDSFPGAGPQLAPRILVAFGINRERYQHASELQKYAGVAPVIERSGQKSWTHWRYSCPKFLRQTFVEWAGQSIRYSFWAKAYYQQQMEKGKPHNTAVRALAFKWIRIAFQCWKSRTAYDESKYLEALKLRGSPLLEYALKN

SEQ ID NO: 423018 - protein, 410 aa, unidentified
MIEAILERCAGIDVGKKFVVVCVMTGGAKDEPHTQIKKFGTIVSELQRLAAWLVAEGCSHAVMESTGSYWKPVFNLLEAHVQVILANAADVQNRRGHKTDPNDSRWLAHLLRHGMIRPSFIPPLAIRELRDLTRRRRQLIGENSRERNRVQKVLEDANVKLGDVLSDVFCVSGKLMLAALLDGQMTAEQIADLAKKKAREKIPQITASVADHRLSDHQRFLIRHALRHLEFLDEEVEALNREIRRRMEDPSLAEAFHLLQSIPGIKEESAASILAEVGADMEQFPTAAQLSSWAGLCPANHESAGVKKSVRTNRGNVWLKTTLTQSAWAATNRKGSRLQSRYHALKARCGNKRAIVALGHTLLKTIHAVLSAKMPYREDPPITQDDRNVERAQHHISCLKKLGYNTFAVE

SEQ ID NO: 423019 - protein, 352 aa, unidentified
MRTITTIGIDLAKKVFQVHGVDAEGKVVVARKLRRKEVLAFFAKLAPCLVGMEACGSAHYWAREIAKLGHTVKLMPPKYVKAYVKRGKTDAGDAAAICEAVTRPSMSFVPVKGLEQQGLSMLHSARSQLIGQRTQLVNAVRGHLSELGIIAERGLLGLGELAAIVRDESDQRLPAAARAALMILVRQIEAVSVGIAALDSTLRKENKASELGPRLKTIPSVGPVIASALRARVTNAKLFENGRHLSAWIGLVPENDSTGGKVRQNGLSKKGDRYLRSLLVNGAMAVVQQAQKRPDKHPWVTKLLGRMSAKQAAIAIANKTARIAWAIMVHGGVYEAGHRAPQYRAEACAAAG

SEQ ID NO: 423020 - protein, 359 aa, unidentified
MREQRNEISFRGQKIYVGIDVHLKSWSVTVLSETSVLKKFSQRPSPEALHGFLTRSYPGAEYRSVYEAGFCGFWIHERLTALGIDNIVVNPADVPTKSSEKLRKSDAVDSGKLARGLRANELKGIYTPDSVSLEMRSLIRLKNSITKDTTRQKNRIKSQLRYLGIGIPQEFLEPFSNWSKRFFAWLKEVETLTPSGRQALDIQIRHWEELRRQKLEMTRALRTLAKTDRFREPLRLIMSIPRFGQATGMAFLSEICDITRFRNAEQLAAYIGMIPMCHSSGEKDGTGDITLRKHAVMRCNLIEAAWVAVRQDPAMNLFFTEQCKRMPKSKAIVKVARKLVNRLYFVLKHQTEYVNSVVS

SEQ ID NO: 423021 - protein, 422 aa, unidentified
MLEESLDDQQIIERVAALDIGKAELVCCVRLPGPGGSRRRLQEVITYSTMTPSLQVMAERLLDLGVTRVVMEATSDYWKPPFYLLEAHGLETWLVNAKDVKHLPGRPKTDRLDAVWLCKVAERQMIRPSFVPPPPIRRLRDLTRYRAALVSDCTGEKNRVEKLLEDAQIKLSVVASDIFGVSGRDMMAALIAGQRDPKVLAQLARSRMRVKIPQLEEAFVGRFGEHHRFLLAKMLQRVDAISADIAEVDARIDAEIAPFADTVARLDQIPGVGVTAARVIIAEVGLDMSRFPTSSHLTSWAKFAPGVKESAGRKKGRGSTGHGNRYLASALGEAAVGSARTDTFLGERYRRLARRRGSKKAMVAVGRSILVIVWQLLSDPDAHFHDLGPDFYANRLGADRTKRNHIRQLEALGYKVTLEPAA

SEQ ID NO: 423022 - protein, 351 aa, unidentified
MKRIVRQVLGIDVAKNELVVCLGRMYDDWVPELYAHKTFVNNQRGFEALILWLKKNTDEVIPIRFVMEATGVYHEALAYFLDENGYEISVVLPNKISNYIRTLEVKTITDKTASEAITRFGLERKLDVWKKPRDIFKKLRQLTRERDQIVTERTAVKNQLHAEEVEAVPNKRSIKRLQDRIKLLNKQEKEIKEEVAAIIKEDKEIAVIVLLICSLPGVGLLTAAIVLAETNGFELIRNKRQLASYAGFDVIEKQSGISVKGKTRISKRGNKYLRKAMHLPSLAAMKHDERYKAIFARIVAKHGIKMKAATAVQRKLLEMIFTLFKNQTTYDKDYLSRNNEQINTIPNTAAL

SEQ ID NO: 423023 - protein, 318 aa, unidentified
MSPSVMSAVHVVGCDVGKATIVAFDSVTGRTTELPNNPEALKAFAKALSPDCLIVCEATGGYEAVLLLAAAEAGVPAHRANARRVKAFIRSLGRIAKTDPIDAQGLTRYGQDRHAELPRWEPAGAVRDDLRTLVRLRTQLVKHRAALTNQFKAPGGDVAKPRLRALIDTTSEQIAGIEADIGGLVGRDPAVAQVVAIIQDIPGCGPITAVTVAALMPELGAMTGRQAASLAGLAPHPHQSGQRDGYRRTRGGRPEIKRALFMAAMAARKHNANLKTVYQRLIDNGKKPIVAITALMRKLITIINARVRDAQLHTKQLS

SEQ ID NO: 423024 - protein, 321 aa, unidentified
MSPAKVYVGIDVAKDWLDVAQRPGGEAWRVSSDETGIAALVDRLKGVRPTLVVLEATGGLQIPAVAALAAAGLRTVVVNPRQVRQFAGATGRLAKTDAIDAQVLAQFGEAVRPEVRPLPDVATQELSALVARRRQLIEMLTAEKNRLRLATKKVRPNIEAHIRWLEGELLDLEGGLGDVIRSSPVWREQDNLLRSVPGVGPVLSSVLLADLPELGKLSRKEVAALVGVAPLNRDSGLFRGRRQVWGGRSHVRTALYMAALVATRYNPVIKSFYQRLLSGGKPKKVALTACMRKLLTILNAMTRHQTPWQTMDLTLDLKDSC

SEQ ID NO: 423025 - protein, 339 aa, unidentified
MTAYAGIDLHSNNIFLGVLDHDNKRLFNQRLPNRLSTIKKALQPFKKAIAGIVVESTYNWYWLVDGLQEAGYKMHLANPAATKQYEGIKHADDKSDAFWLAQMLMLGILPEGYIYPKAQRDIRDLFRRRLLYVRQRTDHILSFKSMVSRSLGKSIPANTVKKLMPEDATDIFDQEALALAGSHAIATINFLGSQIKSIEKQVIMQVKLKPEFKPLLTMPGIGNILAMTIMLEVGDIGRFPKAGNYASYCRCVKSERISNKKKKGSGNRKNGNKYLAWAYVEAAYAATRHYPKVQRFYDRKVSRTNKIVARKALANKLARASFYVMRDQVGYQENKMFPI

SEQ ID NO: 423026 - protein, 338 aa, unidentified
MALYGGIDLHSRISWLVILDGALKLVRQVKLANSLAEFLRILEPYRGELAGLAVESTPNWYWLVDGLHDAGYRMHLTNTCAAQQYTGLKYTDDRHDARWLAHLLALGILPEGYIYPAHERPLRDLLRRRGFLVDKRTSMLLSLGGAFACHTGRRVSSDTVKKWTAVEIEELLDNATVARGLTCLLEPIKAMNTQIKMLEKEVLAQAKLRDEFALLRTVWGIGPILALTVMLEVGDIKRFEKVGNFASYCRLVKTEHLSVGKRKGSGNAKNGNPYLSWAFSEAAHFAIRYHDAAQRFYQRKLVKANRIVAVRALAHKLARASYYVMRDKVEFDPDRLFA

SEQ ID NO: 423027 - protein, 382 aa, unidentified
MQASTVDTPTAGHCGTIFVAIELSQKTWLVTLHSPDRDRISRRTLEGGDDAGLLALLEGVRTRVAGKLGTAPKVVTCYEAGYDGFWLHRLLTAAGITNLVFDPASIAVEQRSRRAKTDRIDGELLLRTLMAHLRGEPRVVRIVRVPSVEQEDVRRASRERDRLVKEQTGHTNRIKALLRLMGMAVSNPRRSDWLSWLAQQRDRQSRPVPPHLMSEVAREHARLMLVREQLAALEQAPTAAVAAAPAPMAERRNLLLRLKGLGAVFAATLTNEVFYKDFHNRREVASYCGLTPSPWRSGGIDREQGISKAGNPRARLKAVELAWLWLRHQPDSALSRWFAARTANASKRARRIAIIALARKLIVALWRYLTTGLVPEQAVMKA

SEQ ID NO: 423028 - protein, 312 aa, unidentified
MADMVRLAGLDVSKDKLDVYVTPSGESRTVGYDRRGLAGLRRWLVGLGVALVAVEASGGYEREVSEVLEEAGLIVHRLNPLRVRRFAQLKGRLAKTDRLDARTIAEFARTWPQEHQLRRDPRRERLAEHLLVRRHTQDAILDCINQLEHLRDGRLRRLVMARKASMERTLARLDRCLVELIAEHDDLAELSQRLRSVPAVGPVLATTLIALLPELGSLTRRQVASLVGVAPFDCSSGRQIGAKSIQAGRGLVRNALYMAALVASRHNPAIAAFAERLAGKPGKVRLVACMRKLIVTLNAMVRDGSQWQPRTA

SEQ ID NO: 423029 - protein, 345 aa, unidentified
MFVAGIDAHATYSVTCVVSKEGQLVSGPTRIKNADADQLSELLERYRPLEVVVETSPAWPWLFDRLDGKGVHFVLAHAKRLRIIAGSNYKSDDIDAELLARMRLAGLIPEVHPKSVEQRGHAVLLRHRARLVRQRTQMVNRIHAQLHNAGLHLERGRKLTESGREWVRSEAWPVLGEEQRLFIQMQWALIDHVSPMIRTLDHRVEHVGRLIPAVALLETIPGIGPYRALLIATEVLPIERFRRPAHLVSYAGLAPRYSQSGLRPIRHGSIPAGANRWLRGTFVRAVVSHITHAPDSWLSHANDRIKERLGWQVARVATARRLARAVHAMLRTGEVWQDDLGTREH

SEQ ID NO: 423030 - protein, 451 aa, unidentified
MAKRAEKRERRSMVLQPDAAGIDIGAEEIFVAVPPDRDQESTRRFSSFTRDLHALADWLGRCRIQTVAMESTGVYWIPLFQILEERGFKVYLVNAHYLKSVPGRKSDVSDCQWIQYLHSVGLLRASFRPPDAICAIRTLWRHRGSLLEMAAEHILHMQKALSQMNLQLHHVLSDITGTSGQAILDAILSGKRDPVELAQLCHSRVKSPRDKVAQALVGDYRPEHLFTLKQSLAGYRYYQKLILELDQETARLMQALPSATEHPMPPRTKATAYHRQGNDPQFDLRSELYRIAGVDLTDIPGVSAATAQVILTEIGTDVSRFRHASAFASWLGLCPEKRVSGGKMLSCKTRKVKHRAATALRMGANSLCRAKGYFGEFFRRMRAKLGTAQAITATAHKIARILYHVLLTKEPYAETIFHRYDEQAQRRAEMRLRKQAAHLGFQLLPITTTGK

SEQ ID NO: 423031 - protein, 410 aa, unidentified
MLKIVYPVCCGIDVHKTFIYCCIATTDNKGITTYKSNRFSTFTNQLKRCATWLKEKDCKDVCMESTGKYWIPVYNILELSCNIVLPHPKYVKAIKGKKTDKRDAKWIADLFKHDLINGSFIPPADIHQLRDLTRYRNKLTNFIAGEKNRAQNCLTVSNIKLDYVFTYVFGKASSSIINALLLNPSEKITDVSKFRTRGMKSTDEEILAAIDGNICNEQAEKLKIIRSHMDSIEECKANLESVILNLAEKYLPKLNLILSVLGIKSFSAVSIILEIGVDMSVFPTSKHLCSWAGLTSQNNESAGKKKTTRISRGGAYIKPLLVQCALAAVKSNKHPKIRNRYLALKKRRGHKKAIIAIARTLLTAIYNILKKNEPYNPDLYKKSDLPPQHKTVSFDEAVFILQRQGYIITS

SEQ ID NO: 423032 - protein, 440 aa, unidentified
MALSVLYSCCAGLDVHKETVVSCILLTAPSGKVSKEIRTFGTTTSDLQALNTWLSKRGVTHVAMESTGVYWRPVFNLLESHFEVILVNAQHMKAVPGHKTDIKDSEWIADLLRHGLLKASFIPPKPIRDLRDLLRHRKCLVQQRAQAINRVQKVLETANIKLSSVASDVLGKSGRDMLEAMIAGVSDAENLAELARGRLRAKLPALREALNGRVEPTHRLLLRSLLDQIGFLQGEVDQLSAEIDELLKPYEEHISRLMQIPGVGRIAAATIVAEIGVDMTRFPSAKHLASWAGLAPGNKQSGGKRQRASTTKGNRHLRAVLSEVAWVISHTKDNYLSAQYHRFVRRIGKKRAIVATSHSVLTIIYHLLRTGQPYHDLGSHYFQTLDTTRQRENAVRRLQALGYKVSLEELIEAPSPSSSSVPRASPSSKGLLDGKKEVPA

SEQ ID NO: 423033 - protein, 414 aa, unidentified
MKLTITCGIDWAEDHHDVALVDETGKLVAKQRIKDDAGGFRQLLALLAEAGDCAQAPIPVAVETARGLLFACLRTTGRKAYSINPMAVARYRERHRSARAKSDHADAMTLANLLRTDADVHRPLPADSELVRAIAVLARAQQDTVWNRAQLNNQLRSHLKQYYLAALAAFAVRGVGLDSREARAVLAVAPDPHTAARLTHAQLRAALRRSGRQRNIEVWAERLRTIFTGEYLHQPSLIEQAMGRQTLALVAQLDAACRAADDLAEAAAEAFATHPDAEILGSFPGIGPLTGARVLAEIGDDRTRFADARALKAYAGSAPVTIASGKSHLVRHRRVKNQRLTAAGYVWIFGALPSSQVKAEYDRRRDLGDRHTAAMRNVFNRFLGCLYHCLQTGQKFDPGKAFPAASTAPVTLAA

SEQ ID NO: 423034 - protein, 343 aa, unidentified
MKITTVGMDLAKNVFQVHGVDERGKAVLKKPLKREQVAPFFANLPPCLIGMEACGSSHHWARKLEAFGHTVKLMAPQFVKPYVKTNKNDAADAEAICEAVGRPNMRFVPIKNGEQQAVLAMHRARQGFVKARTAQANQIRGLLAEYGIIIPQGIGHIAKRLPDILEDGENGLPGAFRQLLHRLGDHLKELDRQVGELEVQIQIWHRENEASKKLAQIPGIGPITASALVASIGDAKSFENGRQLAAWLGLVPKQHSSGGKQLLLGISKHGDTYLRTLLIHGARAVIRVAERKASYAQSWLAQLIGRRNKNVAAVALANKNARIVWALLAHERDYQPGYEPSAA

SEQ ID NO: 423035 - protein, 382 aa, unidentified
MKKLLYIGLDVHKDSISNAVAEPGRGGEIRSLGKMSNSLHAVEKLIARLRKQYGKDVRLSFCYEAGPCGFVLVRRLIQLGHDCIVVAPSKLARQSGDRVKTDKRDAEKLARAHRAGDLTAIYIPEATDEAIRDLCRARTDAVDDQRRARQRLKAFLLQHGYHYQGKAHWGQAHMRYLRELVLPHPAMKAILEECLMAVSDAGNRVARCEAAMSDLLSSWRLKPAVDGLMAFKGFKIVAAMITVSELGVLPRFDHPRQLMGYLGLVPSEATSSNKRRQGSITKCGNPHARWLLIECSQHYANPPKVSKELSRRQDRQPDSVLKISWKAQNRLHSRFNKLAARRLHRNKILVAIARELIGFIWEALRDLPCYQAQEAPSHKLAA

SEQ ID NO: 423036 - protein, 369 aa, unidentified
MTDLTLFVGLDVHKKTISVAMAEATTGAEVRFYGTIANTPDTVRGLCKKLTKDGQQLHFCYEAGPCGYGVQRQLTRLGHRCDVVAPALIPRKVGDKVKTDRRDAMMLAQTLRAGQLTAVWVPDEAHEAMRDLVRLRAQAMRDLRKTRQQLLSFLLRHGLISPYGHWTKMHRRWLSELTFAHPAQHLAHEEMLQRIERAEALCDRLKGAILDLVPQWTLAPVVHAIQALRGVSLIVASVIVAEVGCFSRFDSPRQLMAYLGLNPSEHSSGATVRRGTITKTGNALARTCLVEAAWTYRFPARVTQIIRDRLKNLPEPIRNVAWKAQVRLSARYRKLIAAGKPAPKAVVAIARELVGFIWAIARMVEPKFA

SEQ ID NO: 423037 - protein, 314 aa, unidentified
MKQETKPQYLGVDVCKAKLDVFSPHWNQTRVYPNTAAGLKRLGQDLRDHPGRVHLVCEPTGGYERPLLAMAFANGIDISAINALRVRSFAHAKGLLAKTDEIDAEVLSAFGEAFAPSPAPVPCAVQQALSSTLRRRESLMRQLVREKNALEKATDSFVKADVRATIGFLERHIAKCDQRMLELIGADQALSAKRQRLEQVRGVGSVTACMLLAELPELGRLTDNQISTLVGVAPLNNDSGPRRGRRSVKGGRAMVRRGLYMPALAAVRFNPILRAFYRRLIERGKPHHVAITAVIRKLIRLLNRMLARPDFQLS

SEQ ID NO: 423038 - protein, 433 aa, unidentified
MQQVIIGVDPHKLSATIEVVDDHERRLGEGRFTTDRAGYAAMRTYVKAWPQRTWAVEGANGTGRPLAQRLLESGEAVLDVPAKLAARVRLFDTGHNRKTDAHDAHSIAMVAVRTQGLRVLHIDAELEALRMLVDRREALTRRRVQTVDRLQALLAELLPGEAKKDITTCQAKKMLATVRPRDVAGKTRRRIAAEELAELVAVEAKQKKATAELKAMVTARGSHLMDLHGVGPVVAARVLADVGDVARFADRNRFASWNGTAPLDASSGENNRHRLSRAGNRRVNHMIHIAAVTQLRLPTDGRAYYLRKRAEGKKPMEALRCLKRRISDAVYRQLVTDAAVAPVNAGPGGHCGASLISSAAGSHPHTGTSDQPLPGPAPTTLPASSTPENPHPGPAPQTTRRRAGAVKVERPTGRTTLTATSAGAYSKEPIPAP

SEQ ID NO: 423039 - protein, 401 aa, unidentified
MQETTQHDAVDVFVGVDVGKGQHHAVALDRNGKRLYNKALPNDEVKLRALIAELKTHRRLLFVVDQPSTIGALPVAVARAEGVLVAYLPGLAMRRIADLHAGEAKTDARDAAIIAEAARSMPHTLRSLRLADEQLAELTMLRGFDDDLAAQLTQTSNRIRGLLTQIHPALERVLGPRLDHPAVLDLLERYPSPSALAAANEKTLANRLTKLAPRMGKNWAAEIVQALNEQAVIVPGTQAAAIVMPRLAQQLAALRKQRDEIAAEVERLVLAHPLWPVLTSMPGVGVRTAARRLTEATQKAFATAAHLAAYAGLAPVTRRSGSSIRGEHPSRRGNKVLKRALFLSAFAALRDPVSRAYYSCKIQQGKRHNQALIALARRRCDVLFAMLRDGTIYPPKSAPDA

SEQ ID NO: 423040 - protein, 348 aa, unidentified
MVRIGIDPHKQTHSGVAVDALGVQVAQRTVAARREGFGQLLGWGRKLDGERVWVIEDVRHVSGGLERFLIDRGETVVRLPPRLMAEARQGVRERGKSDPIDALAIARAALREGVQTLPTARLAGVELEIRQLALHRERLVDTRTRLINELRWLLHDLWPEWEIPKRVLIQPGWQTKITRRLGRAAATVQVQIARDMIARVRELTRTITELYEQLAGLVKQAAPQLLAEKGLGVLIAAKLIGEIAGVDRFTSDAQLARISGCAPIPVSSGRTDRHRLDPGGNRQLNHAFHMLAICKITSDPRTAVYLAKQRRNGKSNREAIRSLKRHLVRRVYHLLCDANSVPITICLT

SEQ ID NO: 423041 - protein, 390 aa, unidentified
MMRFAGIDIGAERHMVAVLDEQGEVLCRSSPFGEDASGYARLFELLGPAADCLVALEATGHYWRNLFVALIAKDYSVAVLNPLRTARFAEEELRRTKTDAIDALGIARFAQQKRPRAAQLPDSVTEELRELERLRERVAKDFADRLRQLHRAVDLGFPEFTRYVRTLESRLAATILSRYPTAASFRGVSVKKLARIVYDGSHKIGEELARNLIEAAEKSVGAHHSEPYRLRIKYLCEDLDVLRRRLKDLARDVERKLDDHEVGKLLMTIEGLGPLTAACLIAELGDPARFDSPGAIASYVGVIPRIRQSGKKRFTKGPAIPLGNARLRKSLFMVVLQMVRRNPWLRQYYERLRAAGKPGKVAIIAAMRKLLTAVWSVATHRRPFVPIMPA

SEQ ID NO: 423042 - protein, 395 aa, unidentified
MNTDDRVAKVGLDGHRTFSTATARASDGKILWRKRLEHADRRLLRDELRTWPKGTPVVLEGTFGWGWMSDELSGAGLEPHLASSKKVAAWRDARGLAKSNRTDADLLSELWSQQPRWWEVWLAPPEVRSQREWLRYRMTLVRLQTGLKNRIHAVLHRHGIVHGESDLFGTAGRRFLSLWIAPNDATLADSARAMLKGYLQLLDQLRRQIANVTREIRGQIMRTPAGERLRTMPGIDYILSYTILAEVGRMERFRSAKHLAAYSLLAPRAYDSGEDDGEAPKGRHVGHAGRRTLKWAWIEAAHGAVRKGGRFREIFDRRTNGGKRDRNRGYIAVGHELCRIAYILWSKELEYTESPPPRPGRGKRPEGVRRSGKGMPGRSRPGTGQPERSMVAVLT

SEQ ID NO: 423043 - protein, 388 aa, unidentified
MQTVANRPEAPNAIRNDLGAIFISLELSRSTWLITSLSPDGGEKMSKHSLPAGDIYALLARFSEFKQKAFARTGKSFPIIVIQEAGLDGFWIHRVLQNEGIESHVVDPASIATSRRRRRAKTDRIDGEALLRTLLAYKRGEPRVCAMVKAPTPEEEDRRRLCRERKILIAERVKHVNRIKGLLFCQGVSGYKPLGRDRRQRLDELRTGDGGLLPKHLKAQIGRELARLEQLLEQIMAVEAERDALFAAAPAPGPPAMLLNIKGIGPEFAAILWSEGLFRHFDNRRQVASYAGLAPTPWQSGSVDREQGVSKAGNPRLRTTLIQLAWLWLRNQPQSALALWFEERVRRNGGRLKKTTIVALARKLLVALWKYVTAGVVIEGAVMKAARR

SEQ ID NO: 423044 - protein, 344 aa, unidentified
MKIIGCDFHPGYQQIAMLDLVTGEMVEKALSHERKEEVRAFYAGLEGSVRVGIEASGQSQWFERMLAELGQQVWIGDAAKIRASCERKQKTDRRDAELLLRLLAEDRFPRIWVPTAAERDGRQLLLHRHKLVRMRTQVKNQLQALALNQGVQRKWKLWSETGRKQLELLPLLPWASRRRAELLQLLDGLEASITELDRAVAEQAQARPAARRLMTHPGVGPVTALAFTLTMGPAERFSRGKQVASYLGLIPSEHSSGGRQQRLGHISKQGNPFLRGLLVEAAQSAVRHEPEMRRAYQRLAQRKCRGLAKVAMARKLAVRLYWMLRLQVDYAQLIQGSHAGQLGT

SEQ ID NO: 423045 - protein, 409 aa, unidentified
MEVVHEVCCGLDVHKKSVPACVLWASGRRKQIREFGTFTKNLLEMSDWLRSCGVTHVALESTGVYWKPVWNLLEGQVEVLLVNAQHIKAVPGRKTDQKDSEWIADLLQHGLLRASFVPPTPVRELRDLTRYRASLAQEINRIANRIQKVLEDGNIKLASVATDTLGASGRAMLEAIIHGEQDSQRLAEMSRGLLRNKIPELQQALQGRVTAHHRFLLRELLDHLYFVESKMRRIEQEIEERLGPFQSEVARLCTIPGVDRVTAWGLLAEIGLNMSQFSDAQHLASWAGLCPGSHESAGKRKSGKIRKGSLWLRRCLCQAAWAVSTKKNNYLSALYRRLAARRGSKRATIAVAHNLLVIAYYILRDQTCYRDLGPDYFDRLNPEGLRRRLTKRLEGLGFKVTLEPLAQVA

SEQ ID NO: 423046 - protein, 406 aa, unidentified
MFIEDDQRLFAGIDWASKTHAICVVDDHGEIRVRFEIPNTGKTFTGLIKRLTKLGVDGVAIERCDGPLVEALLGAGLRVVVITPRQVKGLRSRYSGSGAKSDAGDAYLLADVLRTDGHRLAPLTPDSDATQVLRALSRTRKQLVESRVGLVNQLHAELERCFPGAIGLFARLDSDVAIAFLRRYPTQHAATKLTQARFAAFLRRIAYCGRTPVGELFARVTQAPEAGLSPAAAEGRAVCVLALIRAIETTRREERELEAEIIERLDAHADAHIFTSLPRAGHGVRAALLLAEIGDVRARFPDEESLAALAGVAPVTKASGKIHSVGFRWAADKKLRNALIDFADDSRHASPWAAKIYQDAIARGKRHPHAVRILARAWVRVIWRCWQNDTAYNPQLHGGAMQLIAA

SEQ ID NO: 423047 - protein, 395 aa, unidentified
MRFVGIDIGKEKHAVAAIDESRTVVLKATTVTEDATGYAKLRELLSDHADTLVAMEATGHYWQNLFAFLVSEGFAIALLNPLRTRRYAEEDLVRAKTDAIDALMIARMAEEKRPAVTQLSDVAVRELRELVRLRDRWVQELGDRVRQLHRLVDLGFPEFTRHVKDLDSALATTILAEYPTAAAFKRVRPGVLANMRYDGRHAVGRALAKDLIVAAKCSVGAHHSEAYQLQVRTLCEDIVTLRKRLRRIEGEIERSLETHEIGKLLTTIDGIGPHSAARIIGELGDPAHFKSAAALASHVGVVPATKQSGKRQPLRAPLSSLGNARLRKALWMPTLVAVRRNPWLRAFYEGLRARGKAPKIALIAAMRKLLTAVYSVAKRRQPFVPKLPDHAAMPA

SEQ ID NO: 423048 - protein, 369 aa, unidentified
MGDRITYVGLDVHKDGIVVALAEDGLRGEVRDYGRIANTAAALQRLARKIGQEGVELRLCYEAGPCGYGIQRQLSASGHGCIVVAPSLIPKRAGDRVKTDRRDAASLARLHRAGELTAVWVADAGHEAMRDLVRARLDAVHALRRARQQLSGFLLRQGCHYRRPAWTKLHRRWLAGLRFEQAVHHIVLEDYIAAVEAAQARRDRLTAQIEAMLPNWTLAPVVKALQTMRGMALVHAATLTAKLGDLSRFANPRQLMVYLGLVPSEHSSGTSIKRGGLTKAGNSVARRLLIEAAWCYRFPARVSRELRLRQEQQPKPIREIAWKAQLRLCARYRRLARTGKPANVVTAAIARELAGFVWAIARQVPPALG

SEQ ID NO: 423049 - protein, 315 aa, unidentified
MEAETWVGIDVSKARLDVALGSAGELFSAVNDARGIAGLTQRLLELGPALVVLEASGGLETALVAELGAAQLPVVVVNPRQVRDFARATGQLAKTDALDARLLALFAERIRPAVRPLPSEQELELKALVARRRELVEMITAERNRLGSAPKLLRKEIAAHIRWLEGRLKERDRDLDRMLRSSPLWREREDLLRAVPGVGPVLCATLLADLPELGALSRREIAKLVGVAPLNRDSGTMRGRRTVCGGRAQVRAALYMATLAAVRFNPVLKAFYLRLRGAGKPAKLALTAAMRKLLTILNAILKHRTPWSPPCPANP

SEQ ID NO: 423050 - protein, 378 aa, unidentified
MPNTIRNDIGAIFVSLELSRSKWLITSLSPGGGERMSKHTVPGGDIYALLARFSELQRKALARTGTLFPVIVVQEAGLDGFWIHRLLEKEGIESHVVDAASIAVARRRRRAKTDGIDGETLLRTLLAYKRNEPRVCAMVKAPTIEEEDRRRLCRERKTLMNERVVHVNRIKGLLFSQGVSAYEPLRRDRRRRLDELKTGDGRPLPPHLKAHVVRELERLELLLEQIKAVEGERDALLAPQEATTPEMAMLLAIKGVGLEFAAVLWSECLFRQFANRRQIAAYAGLAPTPWQSGSVDHEQGVSKAGNPRLRTTLIQLAWLWLRHQPHSALAEWFHERVRRNGGRLKKATIVALARKLLVALWKYVTAGIVIEGAVMKTA

SEQ ID NO: 423051 - protein, 336 aa, unidentified
MMNASEMIFVGIDVSKDSLELALDDKSRTQCFGNDEKGIAALLAAINAALLTGEDGADKAQRKVGAVVLEATGGFERQAAVALCLAGLPVMVVNPRQAHDFAKAMGFLAKTDAIDARVLSHFAQTLYQSEKREQLLMCLPDPKQMALHALIARRRQLIEMRVTEDNRWLMSPKIQRKSIDAVRKVLNKEIGKIDEMVAAQLKEHFADKLKLIENCKGIGAVTQACLMSALPELGSLSHEQIAKLVGVAPLNCDSGRRRGRRVTWGGRAEVRCALYMAVLSAVRYNPVIKAFYERLLVKGKPKKVALVACMHKLLTILNAILKSGKPWDDHFSSKVA

SEQ ID NO: 423052 - protein, 366 aa, unidentified
MDMIIGLDVHSKSTVYFAQNSDGEKVGRGTVTTSVEGLNEMTERLDAPKGTRIGLETGTQATLVARILFSLGMEPVVIDAREVRQKARRKNQKSDRRDAFEICDSLRRGIYVCQVYIPGTKVQKLRRILSRRRHFVNECTRQVNAARHLLRSEGLSTQARSLTTWCAWQKMMADPELSDLRYFLRMHARIWRQAKENVKKLDAKLEKAMKPFEKTEAVLRSAPGVGPICSATFIAALGTPHRFTNSGQVASYCGLVPSGYDSGDSVRRGHITKAGSKELRAMLCEVAHQAARSKHPLNPYWRKAMARGGYQKAVVVVAHRMARILFQMWKKGEDFDVTRLNVICEKVVKQKTYYYSVKDQEAATAQ

SEQ ID NO: 423053 - protein, 459 aa, unidentified
MKKKKIKQTKGMEEARPFEGLSKVNQNAAGVDIGATEIMVCVSGGEAIQLVKAFGNYTVDLQAICEWFRKHEVKTVAMESTGVYWIPLFEELERQGFECLLISSRSLRKVAGQKTDVADAQWIQTLHSYGLLKGSFRPQGDLVALRTLLRHRAQLVEHRAPHIQHMQKALLQMNIQLSQAVTDVMGMTGQMIIRAIVAGLRDPEALASFRDPGCKHSEEEIAKALTGTWREEHLYVLKQSLELYDFYTEKIEACDEEISRQYGMIRPDWGSGELPVVPNKKLHTHSKNAPKDAREIREHLYRINRVDLSLVDGFGISLAQIVTMEVGSNIGEKFPTEKHFSSWLGVAPKHDITGGKVLSNHTLKTKNRAGQAFRMAAQSVKKADCPFGVLYRRLRSRLGPAQATVATAHAIARVVYKMLKYKVEYDPLSVNEYQAKYEEQQVKYMKKRAAKFGYQLIPA

SEQ ID NO: 423054 - protein, 349 aa, unidentified
MAVTIVEDKRAITGGVDTHADVHVAAALDPVGGLLGVREFPATAAGYAGLLGWLGGFGAVALVGIEGTGSYGAGLARHLAAAGVRVVEVDRADRQDRRRKGKSDPLDAVSAARAAQSGRAAGAPKGRDGAVEAIRALMVAKRSARNERTQAINQARALIVTGPDDLRARFAEHTAAALVAVTASLRPRPGDVPGYATRVALRELGRRAQFLGAQIEHLDELIIPLVTARAPSLLALHGVGPDTAALLLIAAGDHPERLRSEAAWAHLCAAAPIPASSGKVRRHRLNPGGNRDANHALWRIVITRMSNHPATRAYVERRTTEGLSKKEIIRCLKRYVAREVYRHLRPGAG

SEQ ID NO: 423055 - protein, 316 aa, unidentified
MTAPTIGIDVSKDRLDVGIWPSRETWQVPNTPAGITELTTRLTALAPTCIVLEASGRYEHAAAAQLATAQLPVAVVNPRQVRDFARATGQLAKTDRLDALLLARFAEAMQPPIRPLPDATTDALRDLLTRRTQVVEMLTAEKNRLPTAGAAVRPHIKAHIAWLEAQRDDLNGELQAALHASPVWQAQDLLLRSVPGIGPVASLTLLAALPELGTCSHKQIAALVGLAPLARDSGTMRGKRTVWGGRAVVRQPLYMAAVTAIRWTPAIADFYTRLCAAGKPPKVALTACMHKLLTICNALLRTNTAWDPERYKPLAA

SEQ ID NO: 423056 - protein, 403 aa, unidentified
MQHVIAFDVSMGKSYMVIYNAQKQCIFESEINHSKPDFEELRKRIDQLMNENKKPPHIVFEATGVYSRQLERFMQDNKFEYFLLNPLEAKLQCDSLRIHKTDRSDAHQLALTHFTASRREKTGTDNLFYQLKSLSRFYSELDDELSLIRSRMHKVIQLTFPELEQIFTTKSDLFLNFVQLFPHPDFVQNLSKTVMKNQIRKNTNKNISISIAEKKAMEVLEAARYSYPAVRQDDVLCEQLKSYAKRYQELLYQKEQCITKMVRLAESRTEYPIILSFLGIGPNTAIRLLAEIGDITRFENNKQLNAFAGIDIRRFQSGKTFFKDKINKRGNKHLRKLLFLIIQNMIKLRRYGQNHLVEYYDKLKTQPYNKCHKVASIACVNKLLKLLFYLITHNIHYDYRLTA

SEQ ID NO: 423057 - protein, 408 aa, unidentified
MEVVYRCCCGIDVHKKIIVACLNQGGEQSLREFGTTTSEIKSLATWLTESGCEIIAMESTGVFWKPLYNLFELMDLDAIVVNAAHMKALPGRKTDVKDAEWIADLLRHGLLKASYIPSREQRELREITRYRKSLTEERCRETNRLQKILEGANIKLDSVVKDINGKSARKLLEKIIENDVPTSEEEISKMIHGRMRSKLGQLVTAIEGITTPLQRKLLAQVIDHIDDLNRRIADLDKLVQDYMDEYEAAITALCDIPGIARRSAEVILAEIGLDMSRFPSAAHLCSWAGVCPGNCQSAGRRKHGKTTKGNKPLKTILTQCAKSARSVKGSYFSAQYQRIAARRGKNRATLAVAHSMLIAIYHMLRNNVPFRDLGSDYYDFFNRDRKIHGYLKRLKALGWEPDALPGSA

SEQ ID NO: 423058 - protein, 411 aa, unidentified
MDKVYDICCGIDVHKKLIVVCFKKGNKQEIREFGATTKELLELADWLKEGGCEMCAMESTGSYWKPLYNILEASDLKAMVVNAQHMKAVPGRKTDVKDAEWIADLVQHGLLNPSYIPNKDQRELRELVSYRKSLVGERTRELNRLQKMLEGANIKLSGTIKDINGMSARNILEYILTGKAFDEKKYDEMYEQRLISHNLKASKEQIIDDLNGVMSPLQRRMMRELLAHLDELNQHIRNLDNEIDNFMKPEDKNAAQAIQSIPGIGNSSAQAIIAVIGTEMDRFPTDAHLASWAGLCPGNNQSAAKRKSGKTRKGNALLRTTLITCAHSAVKNKKSYFYAQYSRISAHRGSKRAYVAVAHSMLIAIYHMLKYGLAFEDLGADYYNQFNKERKIAAYLKKLKGLGWEAPVVAA

SEQ ID NO: 423059 - protein, 327 aa, unidentified
MIQYILGIDVSKDTLDVVLWDGDRGDHQVFPNSRVGYARLSRWLISRRTGLVHACLEATGQYGEGVAEHLYASGHAVSVVNPLRIKRYGDSKLHRNKTDKADAALIAEFCFKENPPLWKPLAAHYKQLRQMVRRLEDLQCNYHQEYNRLKSGLDNEWVIEDLQDHLQQLHQRIQALKATIQQFIVETPELKHQADLLISIPGIGKLTAARLLAEIGDITSFEDAPQLAAYAGLNPKGARSGSSVRKKARISKEGRSFLRYILYMPAIVARKHNPIIQAFCARLAQRKLPEMAIVAAAMRKLLHLVFGVLKNQQVFDPNYLNQPVITS

SEQ ID NO: 423060 - protein, 372 aa, unidentified
MSAEHITWVGMDAHKDSIKVAAFFPGRPEPVEWTETTTVEAVRRLARKLQREAPGEVHCCYEAGPTGYALQRQLRAAGITCTVIAPSLTPVKPGLRIKTDRRDARKLAELFRAGLLTEVHPPSETDEALRDLCRCRDDVRVDLLRARHRLSKFLLRRHCIYRQTKNHWGSRHWAWIVQLRFDDAMSQATFDSYQLAVQQLEERQRQLDTQLAEFGGQDPYREPVAWLRCFRGIDTVTAVCLVAELHDFRRFHSPRQLMAYVGLVPSECSSGERERRGAITKSGNRHVRRLLVEAAWHQRYRPALSAPLRRRREGQPARVLAIADCAQERLYARCRRMELHGKASPKIVVAMARELTGYLWAVLHPAAAATRV

SEQ ID NO: 423061 - protein, 441 aa, unidentified
MRWIGLDVHKKETEVCILDPKGRILERMRIPTTRHALLRFAQSHLGQDASLALEATTNTWGIADILAPHCARLVVSNPMRTRAIAAAKVKTDKVDALVLAQLLRTGFLPEVWVPDQATRHMRALTSHRAVLVADVTRLKNRIHAVLHQRLIQAPVTRLFGPDGRAFLESFDLDPIGRETIDTYLRLLQAAEGELQRVNQKIASIAYRREQIRLLMTIPGVHVTVASALLAALGDISRFPDGDHAASYLGLVPKTRQSAEHCYHGPITKHGNAHARWLLVQAAQHLDRHPGPLGVFFRKIMRKKNRNVAVVATARKLVLVAWHMLTKNEPYRYALPRQTQEKLASLRRAAGHKRPPGGIPKGSKRPSSYGSGIPTRYVPSLAEACAAEDVPPPQPLRPGELRMVEKRGLRNFLDSLASSRREPRLKKHRQPLTDLEKNTKAT

SEQ ID NO: 423062 - protein, 402 aa, unidentified
MNAVGIDVSKSKSVVAIMRPFGEIVSTPFEIKHTASDIHSLIELINSVEGESRIVMEHTGRYYEVLAHQLSEANLFVSAINPKLIKDFDNDSLRKVKSDKADAVKIARYTLDKWQNLKQYNVMDELRNQLKTMNRQFGFYIKHKTAMKNNLIGILDQTYPGVNTYFDSPARSDGSQKWVDFASTYWHVDCVRKMSLNSFIDHYQNWCKRKKYNFSQSKAEEIYGKAKELVPVLSKDAITKLIIKQAVDQLNSASTTVESLRTLMNETASKLPEYPVVMAMKGVGTSLGPQLIAEIGDVSRFTHKSAITAFAGVDPGVNESGSYEQKSVPTSKRGSSDLRKTLFQVMDVLIKTHPQDDPVYQFLDKKRAQGKPYYVYMTAGANKFLRIYYGRVKEYLSSLPES

SEQ ID NO: 423063 - protein, 358 aa, unidentified
MAGKVTETAVVGGVDTHKDLHVAAVVDQNNKVLGTQFFSTTRQDYRQMLAWMTSFGALKRIGVECTGTYGSGLLRYLQNAGLDVLEVTAPDRMERRKRGKSDTIDAECAAHAAFSGIRTVTPKTRNGMIESLRVLKTCRKTAISARRVALQIIHSNIISAPDELREQLRNMTRMQLIRTLGSWRPDASEYRNVTNVYRISLKSLARRYLELHDEIADLDVMIAAIVDELAPELIKRNAIGYESASQLLITAGDNPQRLRSESGFAALCGVSPVPVSSGKTNRYRLNRGGERAANSALHIIAIGRLRTDDKTKEYVARRVAEGHTKMEAIRCLKRYISREVYTLLRNQNRQINSIPITA

SEQ ID NO: 423064 - protein, 338 aa, unidentified
MPTDQTGQTYALFVGVDIAAQTAMVATQRPGAKASRSFTIEQTPEGYTSLLRQLQATGFVPCQVLVVMEATGSYWMSLATRLVHEGFAVSVINPAQAHHFAKALLKRAKTDAIDAQTLAQLAMILQPEPWTPPPQIYYALQQRLAQRDDLLNLRQQVRNQLHALVQHPEVIAEVRARMESLLATFASQLTEVESEITAALSQDSAWAAAATRLQSIKGVGWVTAAWTLVTTLNLTSCDTVDALTAYAGLAPMPRQSGSSVWHRPSIGHTGNGRLRTAFYMATLSAAQHNPVIKAFYTRLREVGKPEKVARCAAARKLLHIAWAVVKKDQPFDPHYALG

SEQ ID NO: 423065 - protein, 344 aa, unidentified
MSEVIIIGLDIAKHVFHAHGADERGRAIFSKRISRGKLLDFFAAQPSCTVALEACGGAHHWARQLTQLGHEVRLIPPAYVKPFVKRQKNDAIDAEAICEAAQRPSMRFVAVKSEQQQAAGLVFRTRDLLVRQRTQLINAIRGHLTEYGWVAPKGPSHVAMLADLIEEEEMVSSLPEAAHTMFRVMLDLLAGLNGKIADLDKEIARRAREDEVSRRLMTIPGIGPISATAITALAPPAETFAKGRDFAAWLGLTPLQRSTGGKQKLGATSKMGERTLRRLLIIGSSAVVQQASKRGAPKGSWLEQMLARKPRMLVTVALANKMARIVWALLVKQENYRAPVAAKA

SEQ ID NO: 423066 - protein, 432 aa, unidentified
MSLITSKTNNNLQVVNQICAGIDIHRDTANVTLLYQTDSGGCTEEYACFQTDKASLVQMKKWLLGSGCFVVGIESTGKYWIPVLNVLEDAMKVILYNARNVKNIPGKKTDKSDSQWLATITRFNLARGSFIPGKQIRDARMLARNRTAMVQARTMMRQIVHGILQSAGIKISSNVSDIFGKSGTNLLNLIIRDQPYNEARIEKLIYGSLKNKRKQLVSALEGDIRPMHRYSLDHVMSIMNTLTKQKENIESELERLLIDSEDHRQTWERVQEIPGFSKLSALLILAEVGFDLETFPNAAAFCSWAGVCPGNHESAGKKLRGKIQQKKNNVKTLLIEIAWVSVKMRETYYAAKFMSMRAKKGPQVAIFVIAHKLAKAVFHVIKNKEQYEEMGFDHVVEDHVSRSKRYVYKAIQQLGSQAVMEMIAEQEPSPTN

SEQ ID NO: 423067 - protein, 349 aa, unidentified
MLADQVDYVVGVDTHRDEHVLAVLVAPTGAIVAQRSVGASARGYAQALRFAQEHAAGARVWAVEGAGHYGAGLARYLSGRGETVCEIGRGPREGRRLRGKDDSLDAVRAGHAALASETLALPRAGQRREALRLLLLARRSAVDVRRGGLVQLRSVVVTAPDGLREQLRGSPVGSLIKRCSRLRRSSSRTPDELATILVLRSLARRIEAATTEAAELEAEILGHVRALAPQLLDEAGIGPIVAAQLLVAWSHQGRIRSEAAFARLAGVAPIPASSGKTIRHRLSRGGDRQLNRALHTVILHRRQHDAATKDYIARRVAEGKTQREAVRLLKRYLARHLYRVLDHQAALMT

SEQ ID NO: 423068 - protein, 320 aa, unidentified
MMAQNDLVVVGIDVAKDKVDACIRSLSLRQSCPSTAQGQRKLVAWLGKHQVDKTVMEASGDYERDWARLLRQAGIEVRIVDPKRVRSFALSAGRLAKNDAIDAEMIAWFAETFSEAPSQTHDPAHEELLALVKARKNLLDLQTRLQTQNEHAAPKPVQKAHARVLKSLATEIATLEAAISAKVKATPDFAERAEIIESVPGFAETTSANLIAGMPELGQVSNKIAAALLGAAPYDDDSGRRRGERHIKGGRRWVRNAIYMPCLGAATLNNPVLKAFYRRLVAKGKEPKVALVACMRKLIVILNTLIARRQKWDPSRYALS

SEQ ID NO: 423069 - protein, 340 aa, unidentified
MQITTIGLDLAKNIFQVHGVKEDASVAFNKPLRRAQILPFFAKLEPCLVGMEACSSAHYWARELTQLGHSVKLMPPAYVKPYVKRGKSDAADAEAICEAVTRPTMRFVEMKSADQQAILCQHRAREMMVGQRTQLSNTIRGLVGEFGIAIRKSLEAIRDFARDMDADQGLDIPDIAREVIASLCEQLLFIHARVIKMDQAIARTAKSDHRIKLLQTIPGIGPINASAIVATIGSGHQFRSGRDFAAWIGLTPLNKSSGGKERLGKISRMGDRYLRQLLVVGMSSRLRAARSHPERVDPWTASILERKPARLATVAMANKTARIIWAVLTRNEPYTPRTAA

SEQ ID NO: 423070 - protein, 404 aa, unidentified
MIFVGDDWSEDHHDVCLMDQAGKRLASRRLPEGLTGIRQLHELIAEHAEEPDQVVIGIETDRGLWAGALAAAGYQVCAVNPLAVARYRDRHHVSGAKSDASDAKLLADLVRTDRHNHRPIAGDSLDAEAIKVLARAHQSLIWARTRHTNAMRSALREYYPAALLAFEDLAHGDALGVLGRAPTPEQGAHLDLPAIQSALKRGGRKRNIAARARQIRAALRSEQLAAPAPVAAAFGATTRAAVGIIVELNRQIAELEAELATHFEAHPDADIYRSLPGLGVILGARVLGEFGDDPNRYTSAKSRRNYAGTSPLTVASGKKRAVLARHVRNRRLYDAIDHWALCALTSSPGARAYYDHHRAAGDVHHQALRALGNRLVGILHGCLRHHTTYSEHTAWAHRQITQAA

SEQ ID NO: 423071 - protein, 369 aa, unidentified
MEWENRQLSVGIDLHKTQFTVCALAPSGEIVHECVYPTTNEGYDEFAQWAHEVEKQRNLYTVLAVEATGNARYFKNFMEAEGFGVKVINTAKFKVIVKSAVKNDRRDAYTIAFFLLKDFIPESHLCSQYEEDLRRLLKTRSLLVQQTVAIKNNIHGMMLSYGYTTTAAQFQSKKSQKQLLKELEAHTQFNKEATGILNTMIEVLEKTSQMIKEVEEQLEKYVQEDEEVQLLQTIPGVGKIMSATIAAWIGDINNFESYKQFASYCGLVPYLKESNESTYLGHITKRGPRELRTALVQVVMGLLRLQSKYPTWRIYSKYSSLKSDKGSGRAIVACARKMSRVIYCMLKDQKPFDYSLMDRNFARMKSICA

SEQ ID NO: 423072 - protein, 339 aa, unidentified
MELYAGLDLHSRNTYIGIMDKAFNRVFKKRVPNHLEHILQTLDPFRDQIKGFVVESTYNWYWLVDGLMDAGYSSAHLANPSAIKQYEGLKHSDDQHDAFFLAQLLILGILPQGYIYPKKDRPVRDLARKRMFLVQHKTAHILSLQSLIQRHCAMKVRANDLRHWTVKELEAWLKEEYLVLSAQASLDSINFLKQNIQRLEKAIRKKVKLKKAFHYLKTVPGIGDILALTIMLEVGDINRFTKVGDFTSYCRCVPSHRLSDGKSKGHGNRKNGNRYLSWAFTEAAQLGRRHNERFRAYYNRKVAQANTSLATKALGNKLARICYYIMRDQVPFREETFSQ

SEQ ID NO: 423073 - protein, 416 aa, unidentified
MKIVRPICCGMDVHKNIIVATIGITNKKTRITEYIQETFSTLNSDLLNLKQWLINHKCFDACMESTGKYWIPIFNILEDEINIYLTHPKYVKAIKGKKTDKKDSKWICDLFKHDLIKFSFIPPKEIRALREISRYRYKLVGMRSSERNRYQNCMTVSNIGIGSVFSDPFGKSAQAIMKEVLESDIIEDEKILKCIHRSCKNKDKILDSIKHCNIETDQRFKMNESMTHMEELQVHIDNCEIEMMKRAAPMFDQFMHITQLPGISTLSAILIISEIGVDMKQFESDKQLTCWAGLAPANNESANKKKSVRISKAGQYLKPLLVQCALGAIKDKEGYFGIKYSRIKKRRGHKKAIIAIARMMLVSIYHMILTGETFNPSDYESFRNPKPPIKQQVLTEESAIEFLKKSGFDVSKLTKP

SEQ ID NO: 423074 - protein, 477 aa, unidentified
MIFVGDDWAEDHHDIHVMDADGTRLASRRLPEGLPGISRFHELVAAHVAEPSQVVIGIETDRGLWVQALGAAGYQVYGINPLAVARYRDRHQVSGAKSDAGDAKLLADLVRTDRHNHRLMAGDSSEAEAIKVLARGHQNLIWARTRHTNALRSALREYYPGALEAFDDLADRDALAVLGRAPTPTEAAHLSLAKIRSALKRAGRQRNLDARAQEIAAALRTEQLAAPAAITAAFAATTRAAVAIIIELNRQISDLEISLAAHFETHPDADIYLSLPGLGDVLGARVLGEFGDDPNRYTDATSRKNYAGTSPLTIASGKKRAVLARHVRNRRLYDAIDQWAFCALSNSPGARAFYDHRRDAKQSHHQALRALGNRLVGILHGCLRHHTPYDEHTAWAHRAAAGMTTYEPGMSTAAVGSKTAWRAAIGPPAALQNSHQNGAPTLLMFVADPRTVWLCRISFQGLCLSARRSGTSKAGVC

SEQ ID NO: 423075 - protein, 315 aa, unidentified
MMNEQTYCGIDVAKRHFVIGLSTQKRTKTETNNPKGIAHTIEYLRRFSVDLIVLESTGGLELPLAKALHRVGFRVVIANLRQTNQFAMSQSLAKTDNKDAKMLAFYAQMLAMRDNVAQQLYIPPTPEQEQLEALVSRRNQLVEMRFAEKNRLEQVHSTQVFSVEQHIDYLSLRIDELDREIEQHLKHFDDTIKKFKDIKGLGTQTIAVLMSMLPELGQYTHKQIASLVGVAPHPKESGNTKWKSRCSGGRKAVRNALYMATFVCVRFEPKLKQFYERLRANGKAFKVAINACMRKLLTILNAIVRDDSQWDAHAL

SEQ ID NO: 423076 - protein, 355 aa, unidentified
MESTKYIGMDVHKDAISIAVLNSSGKLVMECIIETKANTILEFVHGLRGSLHLTFEEGTWAAWLYDLLKPHVAKLVVCDPRQNGYLKQGSKSDRIDARKLAELLRSDLLRPVYHGEHGVRPLKELARSYLTITKDQARVMTRVKAVYRSWAIPCAGKQVYGQRHRLEWLDKIQEPGVRRRAEIYYAELDALRSLRLVVRSELLLESKKHTVSTLLSQIPSIGPIRAALLIALLQTPDRFRTKRQLWAYSGLAIETHDSAENMYVNGQLQRSKKKSSIRGLNSNHNHDLKNLFKSASAVAAAKAGPFQKFYAAQISKGIRPEMARLSLARKIAAITLIVWKKGVSFDASYLNPQTA

SEQ ID NO: 423077 - protein, 343 aa, unidentified
MNFYHSTHRHYCGIDLHARSLYVCILDQQGEVLLHKEIKARPEPLLALLEPFRDDLVVGVECMHCWYWISDLCEEHGIHFILGHALYMKAIHGGKSKNDRIDSFKIAMLMRGGNFPLAYVYPKKMRATRDLLRRRTRIVRHGAMLKAHVVNTVSQYNLPPSKANLNNPGGRSQLTSAFSDPDVQRNVDLDLAIVDSYQHELKKLEWHLEQQAKQHDPASLTVLETIPGVGRTLALTILYEVGDIQRFESVQKFASYARLVKCKAESAGKVYGTQGNKIGNAHLKWAFSEAAVLFIRNSDKAKRYVEKLQKRMNKPTALSALAHKLGRPTSCSQTRGCSMNNDS

SEQ ID NO: 423078 - protein, 384 aa, unidentified
MLFYTKQHQYYCGIDLHEKTMYICIVDQSGKIRFHRNLETSREEFLAAIAPYRGDICVGIESTYAWYWLADLCSDEGIIFILGHALYLKAIHGGKTKNDKIDSKKIAFILRGGNFPVAYVYPRKMRSTRDFLRRRMYLMRTRAAILVHIQNTNSQYNLGPFPKKLSYRSNRSGVADRFKDQSVQKTVEVDLHLLDFYDEVLRGVELYITKAARVDDPTSLHLLQTVPGVGDILSLVLLYEIEDIRRFKRVQEFLSYCRLVKCARESGGKRYPSKNNKIGNVHLKWAFSEAAVLFLKGNERGQKRHNRRVSKYGKAKALSILASDLGRAVYFMLRRKEPFDLNKFLGAGDVSQTPNRDEKGKTLNRAAKIKCIEECETAAVKQSP

SEQ ID NO: 423079 - protein, 405 aa, unidentified
MQTVYERCCGIDVHKKLIVSCFRNGNKAELRKFDTLTSSIKELGNWLLDNNCQMVAMESTGAYWKPIYNILELLGLDVIVVNAHHMKTVPGRKTDVKDAEWIADLLQHGLLKASYIPDKKQRELREIVRYRKNLVEERSRELNRLEKTLEGANIKLSSFVSNLNGVSSRKIIEQAIIGELNQENIEDLMHPAMKASKSELLQAMDGVFSPIQKQLVRAILDHIDDMTKRIQHLDNIIDDQMKEYEDAIKKIDELSGIGKRSAEVILAEIGIDMSRFPSAAHLASWAGLCPGNNESAGKRKSGKTNKGNKYLKTTLIQCAKAAIKDKDSFFHAQYQRLVVRRGANRATVAVAHSMLIAIYHMLKNGVPFKDLGSNYYTKFNNEAKVKYYMKKLQELGVSVPVSLAS

SEQ ID NO: 423080 - protein, 329 aa, unidentified
MSNLLKKVIGVDVGSKFLTLSFLDDEKGEQVLNLPNNERSILSFLSKISPSDYCFVIEATGNYSSRLLHFSIGKGFESSLINCMSVKHFARMKNIITKTDAEDAKLIRNYGEMFRPEFYIPKTQDIEYLDQELKLLNDLEEEKRRYAVKLKALRFHPVVNPSTEKHYEKRLKQLEKEIKEVEARLPQLQDEEFTETKNLLQSVSGIGEKTSLQLMTATSGFKNFHSSKSLVKYFGLAPRIYQSGKKSYSPGKCRTSKTYIRSILYVCSWTAIKHNQKCKELYLRLLEKGKAKKLALIAVCNKLLRICFSVVKNKTAFQQDFQNKLKILT

SEQ ID NO: 423081 - protein, 346 aa, unidentified
MRMRISVLGVDLGKNVCSLVGFDASGAVVLRRRAKRETLIALAAKLPPCVVAMEACCGAHHLGRVFAAHGHDVRLMSPEYVRPYVKAQKNDDRDAEGVAEAATRPTMRFVELKSQEQLDMQTLHRSRDRLVGERTALINQLRAILLERGIVAPQGKRKLEQFLVNLMDEQGGAGLSPRMIMLVTDTRVQWAELDRRIAAFDAEFVRWTKENEDARRLATIPGVGATIASALIAAVGKAETFERGRDLAAWLGLVPRQFTTGGKTKLLGISKRGNKYLRKLLIHGARAALPYVAERDTPHGRWAKALLSRAHPNVVVVAFANKLARIAWAVLRRGEPFAAKGTPLAA

SEQ ID NO: 423082 - protein, 430 aa, unidentified
MTKLISTPADAVLVAIDISKHRQEVLIERPEGGRRRRMTVMATKADYDRLATDLADIGRPIVVGFEATGNYHRTLAYRLLSAGFELRLISSVALARTREALHNGWDKNDSKDAQVILHMLRIGATQRYVDPLAAGINDVQEMSKTHEAISKAKTQIWHRILTHYLPLYFPEIERFAGNSRSDWFLALLERFPTPGSMIAIGREAFTSEAWTLVGRKVSKARLINDIYETACASVALPVDEDSVAITMFRMVIAQARSLIHQRDEIERTAHAMLSENRDYQLLRMIPGIGPINALTILAEAGDLRRFRHHRQFLKFCGLDLATCQSGTFRGRTKLSKYGNARLRRTFWMAAQVAAHQRDNSFRDKRGRYMDGHGVDPDRRRKAMTALTAKMARVAHAVIKTGTEYRPFLERADTRWKDPSLLCREGATATL

SEQ ID NO: 423083 - protein, 311 aa, unidentified
MNSEAYIGVDVSKDLLDVKVLPSEQTQQFSNDDPGVKKLITFVKKINPQLIVFESTGGLEMPAVSSLIENHLPVVVVNPRQVRDFAKAIGRLAKTDSIDADTIARFARDIRPEVRPIKDEHTQLLSALNARRRQIVDMLVAEKNRLYTAPKPNMKSIQKHIQWLERSLEDINQDIDKTIKKSPTWRENDRILQSFKGVGPVVSASLLCDLPELGTLNRKKIATLVGVAPLNCDSGRFRGRRRIKGGRANLRRKLYMAAVASLRHNPAIKDFYDRLIDAGKPPKLALTACMRKILTILNAMMKNRTYWITTY

SEQ ID NO: 423084 - protein, 408 aa, unidentified
MGRAAEVVAPSSSIRTDGGCPVVQVNDLSRSLAAFDPISTLVVVVEMSKASWLVSSVVPGVERQPLKKLEPDATALLRLIERWRNEAVRVGRPISRIALAYEAGRDGFWLARWLIARGIEAHVIHSASVAVSRERKRAKTDRLDAAMLMRVFLGWLRGERGHCGMVAIPTMEEEDARRPTRERESLVNERSRIINRMKSALARLGIRGFKPHLRKAPERLAGLRTAEGTGLPANIIEEFRRDMARLALVREQISSIEKTRAERLERAPDTGPHAMVRLLARVIGIGIETADMLVREILSRKLRDRRALARYAGLTGSPDESGLKSREKGLAKAGNARVRRGLIQLAWRFLMFQKDSALARWYRTRTEGPSGARKTTMIVALARKLLIALWRLVTTGEVPDGVELRTAT

SEQ ID NO: 423085 - protein, 391 aa, unidentified
MYSDGSKHSSFSVPNNRNGAKIIVDRVTSVLLLQDIPQVVIGMEATSVYGDNLMRFLRESGSLGRFERSLHMLNPKQVKKFRDAYSDLPKNDHVDSYVIADHLRFGRINKEVYMDDYKYQALKMYTRARHQLVQELTREKQRFLNTVFISFSGLTQEKIFSDKFGATSMALIEEFSSLDELAYMSTNELVDYIRKKGKNHFDDPEEIAEAVQRAAKNSYRPPQVIADAAKQMLAISMNTIRLLQKQIKEYDKAIEKMLEAFPQTLTSVKGIGNIYAAGIIAEIGDINRFPSQASLAKYAGLVWTQHQSSNFEAEDKRMIQGGNHHLKYYLCEAANALRRCDPEFKRFYALKYKEANKHNHKRALALTARKLVRLVYTLLKTNRLYIPPEEY

SEQ ID NO: 423086 - protein, 491 aa, unidentified
MNSIFQRSNPAIEKLFAAAGSPKKVMCIPIDYAKRQHTALVCNGNGAQLRGPFHIHNNPAGVAFMEEVVAGLCRKHAIRRKHVFFGGEDCSAIAFNFIHALLQEGYLGIGLNARDAAAERENQVASTDKLDLLGIASLLVNKKRGRTLSAEYGDARVLRELTHHRAALVKARTASAYRLHHLVDQLLPGFLDEKQSGLTPFSKPSLWVMSQSFSPKQILARKSDVLAEKLRLFMVQNAEEKVARLKSLARSVLPPPAALCATLQINMGHEVSVYEHMEECIHDVEIAIAHTLAPTPGAMLTTVPGIGITLAAELYAELGDPNRERCLKRLSSYAGLVARLKQTGGPDKEAQTRGRSRRACVPLKRCVMDIALKVGQYGHDELKADYQRRQAQGQDVRLTMGRRMLRICSHLIRKRDFFVPPSLLRDSEYDVRRDYYARAWDKILIKWRDRSAIKQALAEGMPLEQWRLTLNEMYNLNLSRLSPQYDRLRAR

SEQ ID NO: 423087 - protein, 321 aa, unidentified
MEPVILGIDIAKEKFDVALLSGEKVITDTFSNTTAGFGMLKRWLAKNRVERIHACLEATGTYGEALSEYLHRAGHTVSVVNPARIKGFGQGELSRTKTDKADAQLIARFCRAMRPEPWQPPAPEVKELQSLVRRLEALNSMLEQEKNRLGTADDVIKESIKRVITCLQQERKATRKLIRNHVDRYPDMRGKRDLLESIPGIGPGTSAMILAEFGDVSRFPDAGSMASFCGLTPRHRQSGSSVRGRSMISKTGSSRIRKALFMPALASVRCNPVIAALRARLRASGKHPMAIVCAIMRKLIHIAFGVLKSGRLFEASIAAAA

SEQ ID NO: 423088 - protein, 343 aa, unidentified
MEAYAGKQFVGIDLHRRRTVIVRTTEAGEVLESVRIVNDVQRLASVMARAGDCPEVVLEATYGWYWAVDALQAGGANVHLAHPLGVKAFEYRRVKNDFRDAQDLADLLRMGRLPEAWIAPPPTRELRELVRHRAKLVGLRSHCKAEVHAVLAKCGVQVLMSDLFGLAGTELLDRLDLPAPYAARIASLRRLLDDVDFEITVFAGIIRGRMAQEPGYTAVQKIPGIGPTLGAVLVAEIGDITRFASASKLTCWAGLTPKHHESDTHVRRGRITKQGSRLVRWAAIESVKTISKASEVGVLRERVADRRGRNIGSVAAARRQLELVFYALRDGHVRALEHLPRVA

SEQ ID NO: 423089 - protein, 317 aa, unidentified
MRSESKYIGLDVHKETISIAVLDGSGKLVMESIIETEAATILQFIQGLRGQLHVTFEEGTWAAWLYDLLKPHVPRLVVCNPRRNALLKEGSKSDKIDARKLAELLRGELLRPVYHGENGLRMLRELARSYWTLSKDMTRVMNRIKALYRSWAIPCGGVGVYDPRYREQWLEKISEAGVRRRAEIFYEQLDGLRPLRQKARCELLCESRKHKASKRLMQIPSIGPLRAALLVALIQTPHRFRSKRQLWAYSGLAVKTHDSAQYRYVDGQLQRSKKPQQLRGLNKNHNHPMKEIFKSAATHAARCAGPFQDFYACWAKA

SEQ ID NO: 423090 - protein, 460 aa, unidentified
MRTIGIDLAVKAVHKAVVVNATGKFVTPVLSFHTQWDEIAQVVARAREGVASDYPLRAVMEPTGMAWLSVAIALRRLNVIPYLVNGQRSHDLRRFYKRHSSSDRIAARVLAKMPIVDEESLYPLEIPSAMQFACHRGCKELDRLRGQSTAIKNRMRDSDRFAWPGLENVFTDIFSPAARLFRQTWYDPARVVDAGVDELRRTFRPLADQEEDLAWVEHLVHLATEVLMLYGTDALDYDLLQREVYRDQRLLVSLEKEADLVWRETVRPLYHQLHPSRNLETLYGVGEQSAAVYACFIGRAARFPTNRKFRGWHGLIPDSRQSGDAESKGLHISQAGPDLVKKYAFLGGGVARRFDPQIAAVYHSQMTRKGQHHNQAVCACATHLLDRVRVILLEDRPYELRDVDGTPVSPEQAKAIVAERYTVPEEVRIRNNRRARRERAERRAERKHQRRQQRRSRSRM

SEQ ID NO: 423091 - protein, 387 aa, unidentified
MIFVGIDIAKNTHWASAMNSDGEILLEPFSFQNNNEGFQKFISKLSNFDKQKMLIGLESTAHYGENIISYLFNLDYKIGIINPIQTSNLRKSNIRKTKNDKVDTFIIIKSLTLNNYNLVTTRDINNIKLKGLSRSRHNLIVMRSRSKIQLASFIDQLFPELNKFFKGNLHLNVSYQLLKDYSSPKDISSLHLTKLYNILHDNSHGRYNKEDAIRLRELAKNSVGIDNPTLSLQIKQAILQIELYSEQIEEVEKLSKQILDEMKSKLLTIPGISYNQATAIHGFIGDIRRFNKSCQLLAYAGLDPSIYQSGNFEARSTRMSKRGNSLLRYHLVYAAHNLVLHNITFKKYYDLKRSQGKTHYCALGHCAHKLVRIIFKMLKSNVDFNLD

SEQ ID NO: 423092 - protein, 389 aa, unidentified
MSQPFEASRSLTALEQHKTIIAVIEMSQSKWLVAAVVPGVKRQPLKKLDADQESLMKLLHRWRKEAEQAGHPIKRVVVAYEAGRDGFWLARWLRTRGVEAYVIHPNSIAVSREHRRAKTDRLDTELLLRALLGWLRGEKRHCSMVAIPTIEEEDAKRPNRERDSLVTEQTSIGNQIKAILTRFGIRRFRLKLRKAEQQLKELRTAEGSLLPGNTRAELFRHLARLHIVREQIRAIEKARLQRLEADRNSNKSPHAMVRLMARVVGIGVETADMLVTEVFSRQFRDRKAVARYAGLTGSPDESGKRRREKGLARAGNARVRTGMIRLAWRFLRFQDGSALAQWFQTRTADGRGGTRKTMIVALARKLLILLWRLVTTGEMSDGIVLRPAS

SEQ ID NO: 423093 - protein, 465 aa, unidentified
MKRQTRRRTPKPRQSPAALEHLHPNAAGIDCGAAEHFVAVPPDRAHTPVQSFPTFTADLHRLADWLTASRVTHVAMEATGVYWIPIFEILDARGFQVILVNARHVKNLPGRKSDVSDCEWLRDLHILGLLRGSFRPADGIVALRGYLRHRTTLIESAGALVQRMQKALVQMNVQLPLVVSDIAGVTGLRILRDIVAGQRDPHQLAQHRDYRCHASEAEIVAALTGNYRPEHLFALQQNLELFDIYQQQLTACDVAVEAHLAQLAATTPPPPVPLPAARRRQKPRDNEPRFDVRTPLHQLTGVDVSQIDGIGPYNALRLLSEIGTDMTRWPTEKHFTAWLALAPQNKISGGRLLSSRTQPSANRAAAIFRLGAMNLGRTQTALGAFYRRIAFRIGKAKAITATARKLAVLVYRTLKYHLVYADPGAAAYDAHHRTRLVRRLRHRAEHLGFGLVNLSTGEVVDGAVS

SEQ ID NO: 423094 - protein, 402 aa, unidentified
MNAVGIDVSKGKSMVAIMRPFGEIVSTPFEIKHTSSDINSLVKLIKSIEGESRIVMEHTGRYYEVLAHQLSEANLFVSAINPKLIKDFDNDSLRKVKTDKADSVKIARYALDKWQNLKQYSVMDELRNQLKTMNRQFGFYMKHKTAMKNNLIGILDQTYPGVNTYFDSPARSDGSQKWVDFASTYWHVDCVRKMSLNAFIDHYQNWCKRKKYNFSKSKAEEIYGKAKELVPVLPKDDITKLIIKQAVDQLNSASITVESLRTLMNETASKLPEYPVVMAMKGVGTSLGPQLMAEIGDVSRFTHKGAITAFAGVDPGVNESGSYEQKSVPTSKRGSSDLRKTLFQVMDVLIKTHPQDDPVYQFLDKKRAQKKPYYVYMTAGANKFLRIYYGRVKEYLASLPKS

SEQ ID NO: 423095 - protein, 354 aa, unidentified
MKLYVGLDVALEETSLCIVDSEGVTVREVKVSTEPEAIRSALEGSADRLDRVGVEASSLGIWLYRELQPAGVPIIVVEARHMRVSLSTMRNKTDRNDARGIAQMMRLGWYRAVHVKNIDMQKMRSLLANRKLLKRKLIDVENHIRGTLRAYGLLMGGVGRGGYEARVRELLEHSDPVFSVVIEAMLDVRRAIFEGYKRLHRVLLQVVQHDAVCRRLMTVPGVGPVAALSFKVGVDDPRRFARSRTVGAHFGLTPRRHQSGTSIDYEGRISKQGDVAVREALCEAAASLLLRVRKWSALRAWGLRIAKRSSMLCAIVAVARKLAGILHRMWVSETDFHVGFGAKVTQRLRLKPAQ

SEQ ID NO: 423096 - protein, 405 aa, unidentified
MKKIAGIDVHKQVLMVVIADAANPELVLQKGKFGTGQAELERLRMVLQQAEVTEVVMESTAQYWRPVWSEWEPHFTLHLAHAQSNRAPKGRKSDWADAKRLVKRFAAEELFLSFVPEPEQRDWRMLTRARYALIRDHVHLQNQIEALLEQASIKLSSVVSDLFGVSGLRILWALSQGQTDPAKLADLADGHLRCGREVDALRGHFGEVHRHLLEQALQRLRMLSEQVAALNKLAAKRMQPHASTVQRLIEVPGVGAEAAQAIVAEIGPTAAAFPSSAQLASWMGVCPGTQESAGQNYSGRCAKGNRYIRSVLCQVAHAAVRTKGSHLQTVFRRFLAKLGCDNKAIWAVAHKICKIIWHILHNGARYLESGGALNPKAAQKAIQHHLKALSRLGYVLPSPTPDPQV

SEQ ID NO: 423097 - protein, 429 aa, unidentified
MIMGFTKPIEHSNLITKEGDFMNPLYVGIDVSSKSNVVYFMLPNGDKHSNFSVANSHDGSTQLVKRICSVLSSESLDTVSIGLEATSVYGDNLVYFLREDASLASFNRKIHVLNPKQVNKFKESYNDLPKNDWVDSFVIADCLRFGRINKEVYIGDYHYKALQNLTRARYFAVCNLTKEKQRFMNVLFKKYSTMTQEKVFSDTFSTTALAVYDEFESAEALAYMDLQELTAFIIEKGKNRFPDPDAVAKAIQKAARSSYRLPKTVNDSVNQVLSISITSMKALESQIKEFDKAIAAQMELLPNVLISIPGIGPVYSAGIMAEIGDINRFDNQASLAKYAGLAWTQHQSGNFEAQNTRLIHSGNRFLKYYLCEAAFSLVRCDKEYKAFYHQKYKEVNRYQHKRALALTARKFVRLVFTLLKDNRLYRPAE

SEQ ID NO: 423098 - protein, 416 aa, unidentified
MKKGQDTRGYERYLALDIHREYILVGGWNEEKEWVLTPRRVNIEKFPEWAKKNIRLGDIVVLETTTNVWAIYDIVAPLASWVLVANAAEVWELAGARVKTDKEDIKRLLKLLVGGIVPEVWVPPIVVRELRAFVSYRSRLVTMATMVRNRLQSLLHKHNLMLSEAGLLDQTWWDRQENISALERLQIRQELVLLQEVEKLKLAVEEELERQSTGPTWGKQALQLMQLPGIGFVVAMTVLAAIGDISRFETAKQLVGYAGIGAGVHDSGKTHKEKKITKKGRRELRWAMVEAAWRAVRMSPFWKAEYEKHLKRMRKPNQAIVVIARKLLIAIWHVLSKEETDIHASEEDLAYKMLLLSWSLSEDVRQGLNYKQFAKYALMQLGVETDITRFVRRNVPRRLAAKDEVLARMRELGLSV

SEQ ID NO: 423099 - protein, 419 aa, unidentified
MTSDFEWYAGIDWASEQHRVCLLDGGGGPAGEREFAHSGDGLAELCAWLIAMSGCEPQKIAVAIETPHGPVVEMLIDHGFAVHSINPKQLDRFRDRFTVAGAKDDSRDAQVLGHSLKTDAHAFRRLVVDDPMIIELREWSRLGDDLKQERNRLANRLRQQLWRYYPQMLELGGDDIAADWLLALWDEAPTPAKAAEISTQVIAPLLKAHRIRRFEAADVLRILRQKPLTVTPGTIAAASAHIRILAERLRLVNRQVKEANRKLDRLCRKLGQAPESEAGNRPEQRDVAILRSLPGVGRINLAALLTEASEPLKRRDYHALRLMSGVAPVTRRSGKACLVIRRLACNARLARAVYHWTRVASQCDPISQKRYAALRQRGHSHGRALRTLGDRLLGLACTLLRRQVLFDPDYHCKEVAAAA

SEQ ID NO: 423100 - protein, 413 aa, unidentified
MKLFVGIDGSSEKLDVCFLDSSDTTLKEVTLPNNINGASSIKEDVLQFHQSFNYEKIVIGMESTSIYSFHPATFLSEDLELKSLGLVEVVIQNPKSIHRYKGLFEEDKNDRIDAFRIADFLRIERFNKTVLKEERYVALQRLTRSRYQMVHQLTECKQHFLENLYYKCNTLSKELDTSVFGATMLDLLSDALTLDEMAEMELEDLANLLQEKGRGRFSDPQKLAKTIKKAIRDSYRLGKVVQESVDMVLATYARLIQTLKKQIKDLEKSIVALFEIVTEAQCLKSIPGIGIVYAAGIVAEIGQIERFENEAQLAKYCGLYWKKNQSGNFESERTPLTRTGNQYLRYYMVEAANSIRRHEDTYRLYYQKKYDEVPKFKHKRALVLTARKLVRLVDTLLRNHQLYTPERSVSLKS

SEQ ID NO: 423101 - protein, 401 aa, unidentified
MKVSGLDVHKDTIFCGIYDGKKQSNVLEFPTFTEDIRNMGIMLQNEGIKKVSMESTSIYWIPIWNILEEMGFELMLVNPYLIKQMPGRKSDVKDAQWIATLLHKGLLRGSLVPDQQIRELRSYSRRYVKLKEIITRSFQDMERILEMCNIRITSLVSKNNSVSIHKVIQGIIQGNDSPEELACFIHGRIINSKKEKVRKALEGFISEHHRFNLELVWQQYQLYQQQLISIEEKMKYLCQEHYSQEMELLQTIPGIKAQSAMQIIAETGGNMNAFENSGKLTGWAGLRPKNDESAGKYKSTSITKGNKYLRRILVQCAWAASRTKGSYYKNKFEQLCIRKSRKKALIAIARKLLTVIWSVLKEKQPYNPNMQPVLNPEKIKGKMKYHAKELEKLEALGYSLS

SEQ ID NO: 423102 - protein, 443 aa, unidentified
MINPDAAGIDIGHREHWCAVPIARSTKPVQRFGTFTEDLEKLADWLNECGIKTVAMESTGVYWIPAFQILERRGFEVRLVNARQAKNVSGRKTDVLDCQWLQRLHSYGLLNASFRPADEMCVLRSYLRYRDELVCARSVQCLHMQKALQQMNVQLHQVLSDITGLSGLRIIEALLAGERDAEKLANLADRRVHASKATIQRALKGDYRTEHMFLLKVAFELHGIYEKKIHECDEKIVAEMAKLPTRIDPKQEPLPPRKPGRAPVLDMVCGKDMRAELYRWTGVDLTAIEGIGVLSAQVILSEIGTDMSRWRTEKHFTSWLGLCPDNRISGGKILSSHTRHVINPVADALRMAATTLERSKTALGAFYRRMKARLGPASAVTATAHKLARLIYRLLKHGEAYVRQGIEVYEQKYRERLIYNLRKTAASFGFQLTDAKELTKCVS

SEQ ID NO: 423103 - protein, 405 aa, unidentified
MKYYVGIDIGKSHHQAILCDMEAKPLAESLKFSATSEGFEQFFSYLRKHVSDGDLSLVQAGFEATGPYWLTLYEQLIKQKVKVSVLNPMQVKAYRNEGIRGTKTDRIDALLIVKVLRFGDYKESSIPTEDLFALRQLTRLRSDLVQTGTRTKLKIIGILDQVFPEYQKLFSDIFGTSSQALLAKAVIPEAIEAIPTKQLTALLKKASRGRLGEKQAKAIKNKAQTSIGITMGIDAFSLSLEILLAQVRHLEQQVTKLDKEIAKRTTKREETLTSIPGIGATQEAIILAEIGNFERFKNDKNGAEKLVAIAGLDPKIKESGKYIGKAKMSKRGSSYLRKAIRQAAFMAAVGNGKSKDPMFSKIYEKKISEGKPFEIALSHVGNKMLHVIYSLMKSKKEYKPNIRRW

SEQ ID NO: 423104 - protein, 348 aa, unidentified
MLADQLDYVVGVDPHRDSHALAVVHVVSGVIVFESTVVASSDGYAHALKLADQYATGRRAFAVEGTCSFGAGLTRFLTLRGEQVLEVGRLRRERRSGGKTDALDAVRAARSVLTSKRPTTPRAGGERQALQALVAAREGAVNAKRAGLCQLRDLLITAPEPLRSQLRPLTRARLLQRLAATRPSGGRDPELRGSMLALRSIARRVLQLTAEERELAREIESITRRLAPQLLEQPGIGPHAAAQLILSWSHRGRIGSEAAFARLAGAAPIPASSGQTVRYRLDRSGDRKLNRALHMILVTRKRSHPATIAYIERRLQEGKTRREANRCLKRYLARSLYRLLEQGAPTAT

SEQ ID NO: 423105 - protein, 310 aa, unidentified
MDAIYVGIDVSKDRLDVHVLPSGQAFAVARDGKGLNELVEQLIGVRPRLIALEATGGFETIVAAAIAGAHLPLAVINPAQVRHFAQAVGKRAKTDPIDAAVIARFAEAVKPEPRELPDEAARLLSELVGRRVQVIEMLVAERQRERRASAVRVRKSLARHIVALEKELLEIDRDIDTMVRGSPVWREKEDLLVTFPGVAHRTACSVLADLPELGRLTRRQIASLVGYAPFTRQSGRWRGKSMIAGGRPHVRAAIFMAAFSAIRCNPVMRVFYQGLLARGKPKMVALIAVARKVLVTLNAMLRDKKQWQPA

SEQ ID NO: 423106 - protein, 342 aa, unidentified
MADTIAVDLAKSVFEIGVSDEPGKVVARERLPRRKFLDFFVNRPPATVVMEACGSAHYWARKIQALGHTVVLLPPTQVRPYVVRNKTDRTDTRGILEAHRNDDIRPVPVKTIEQQALGSLHRVRSAWVADRTARINLLRGLLRELGLVIPLGARKVIPDAWAFIEDAESGIPDAVRPSLAELCLDIRTLEEHIAETELRIAALAKHSPAVARLRTIPGIGLLIATAILAFVGDIHRFPSGRHFASYLGLTPREHSSGSRRWLGAISKRGDSYLRTLLIHGARSAIAHAHSKPDPDRLRAWALKLEKTSGAKVAAVALANKMARIAWAVLKHDRDFKSVPQAA

SEQ ID NO: 423107 - protein, 412 aa, unidentified
MEVLYTSCCGLDVHQATVVACVRRAGKGRRRASTVRTFGATTAELLRLADWLTEQEVTHVAMESTGVLWKPVFNILEGTCEVILVNPQHFKAVPGRKTDVRDCEWLAQLLEHGLRRGSFIPPQPIRELRDLTRYRKVLIQQRVTEANRVRKLLESANIKLGVVATDVLGASGRAMLRALQSGERDGAVLAELAKGTLRQKRAALADALTGRFTGHHAALLGDLMEHIEFLEATIARVSQRIATAVMPMAEQVAHWQSIPGVDRVAAETILAEIGPDMSRFPSAAHLASWAGICPGNNESAGKRKTGKTRKGNRWLKPLLVECGWGAGRGRRTYLGAQYARLAHRRGKKKAALATGHSILVAAYHILRTGVAYRDLGPDHFDRLASDRLTRHYVHRLEQLGHRVTLNTVPGVA

SEQ ID NO: 423108 - protein, 400 aa, unidentified
MLSIGIDVSKGKSTVCGMKPGGEIVYTPFEVQHTREGMSELVSLLRGSGEEVRVVLESTGSYHCPVVAALLENGIFVSVVNSLRMKRFCSQSIRKVKTDRIDAMQIALYGLAYWQELQPTRLPEDTYRELQLLARQYYQMTSMLIKAKVDFNAICDQVLPGMQELMNDHAGRHKLSDFVLRYRHTTHILEMGETRFRKDYCKWAEKKGYRNCERMAALIFATAQNGIPVLPNAPSTQIVITEAIRVLHTVEASRDAILTQMQALAKTLPEYSLVREMPCIGDTLAPRLIAEIGDVRRFHSKRALIAYAGIDAPPYQSGKFCANNRHISKRGNRYLRKTGYEVMQSYVMHKPANDPIFTFIEKKRGEGKSGKLAMVAGLNKFLRIYYGKVTELYRSLPAIE

SEQ ID NO: 423109 - protein, 349 aa, unidentified
MSTVVTRPDAGQAVWIGVDVSRSKWVVNVRWGGREQRRLSTPPDVRHLDALVADYRGASVHLAYEACGFGYEIAWTLQARGVAVTVVPPSTVPRVPGARVKTDRLDARARATQLEHGQLKRVTVPTRPDHEWRQLSRTYEQALKDKKRAQARIRSLLQAHGRLGPRRAQGWPTYERWLATQGLPAPVQQCLAELLGLRAAAHASARRLKRELHAVARQPPYAAVVPALAAQGGIGWFTAVRLRLELGHLTAFRTADAFVNYLGLTPSEASSGDRVQRGHIAKRGPGHIRGWFVQCAWASLRGHAPDAGLQDCYQRVCARAGKKRAIVAVARRLALRARARWIAAQQETA

SEQ ID NO: 423110 - protein, 339 aa, unidentified
MRENLLCAGIDVSKSKLDIAFTLNGEKIIKHRVVSNNFIGFDTIKEITKNLLSIKSIDTVHYVIESTGIYSEDIFEYLLEQNNSLVSLINPRQSKSFAVSNNIRTKTDKVDAMLLAKYCYEKRPKISKKTPKTLKKLRSLSRHLDFFIKQRALLSGHMESVKDNFIADSMNKMISNFDKEIKKIEQQIDKVVKNDKELTHKSNLLLSIPGVGKKLSITFLTEMMQTDEEKISTKVQSAHAGLSPRHKQSGKQNGYSSICRTGNSRLRKALFMPTLCSIKFNPLIKNFYLRLLDAGKRKMVALTACMRKLLCLMVGVLNSNEKFNPDWVINQQQLAVISS

SEQ ID NO: 423111 - protein, 412 aa, unidentified
MQVMYERCAGLDVHKETVVACVVKGPDGTSTTKEVRTFGTATQELLRLRDWLDQEGVTHVAMESTGVYWKPVFNLLEGGPELWVINAHHVKNLPGRKTDVKDCEWLADLLRHGLVKPSFVPDTPTRDLRELTRYRTQVVRERASEVNRLQKILEGANIKLSSVASDVAGVSGKAILKAMAAGETDPQKLAELAVGRLAQKREDLILALEGRVRDHHRFMLKAVLRHLDDLDRLIEELDAEVEKRLRPFEEKLRRLDAIPGIGQRTAEILLAELGTEMSRFQTSGHLASWAGICPGNNQSGGKRLSGKTRKGSPWLRGALVEAAWSAIRVKASYFKAQYARLKGRRGPKKAIIAVAHSILVTVYHLLSRPAPYTDLGKDHFERLDRERIVRRLTRRIEELGFDVSLKKKEPAA

SEQ ID NO: 423112 - protein, 352 aa, unidentified
MTEINTIGIDIAKRIFQVHGVDKNGKTVLKKKLMRDQVLMVMANLPKCLVGMEACGGASYWARELTKLGHEVKLMAPQFVKPYVKTNKNDQADAEAICEAVSRPNMRFVPIKSSEQQDILSIHRVRQRLVKNRTALANEIRGLLHEFGIIIPQGINKITAKLTEVLDSEHLSQMSYQTFSDLKDEFIENNKKIKELENRLKIIANGLGKYQQVTAVPGIGLITATALIASIGNANCFKNGRQLSAWLGLVPRQASSGGKEKLLGISKRGDVYLRTLLIQGARAVLNTKLRFTTELQKTKKDYSRFTQWMFDLLERAGHNRTTVAVANKLARAAFAVLSSGSDYIESKICSCS

SEQ ID NO: 423113 - protein, 372 aa, unidentified
MDEYSELFIGLDTSKAKISVAVAEKERNGEVRFFGDISAEPTSVASMVGKLAKRGAKLHFCYEAGPTGYDLYRQIIALGHECQVVAPSLIPKRPGDRVKTNRRDAVSLARLHRAGELTAVWVPDEAHEAVRDLVRARECAHDALKKARQQLQSFLLRHGRIFPGRTSWTRAHFRWLAAQSFTHPAHHIVLVEYIQAIEDAGVREDRLTKQVAEIAASWSMAPVVEAYQAMRGIAFINAVTFVVEIGDIRRFETAPQLMAYLGLVPSESSTGERVKRGGITKAGNKRARRVLIEGAWTYRFPARVSQTIQARLEGLPRSVREIAWKGQIRLCARYRKLIQAGKLKTVAVTAIAREMAAFLWAIGQEVAPTAEA

SEQ ID NO: 423114 - protein, 323 aa, unidentified
MSIILSLIVVGVDIAKAHFDVARLAEGKYRHKKFDNTPEGFALFAEWLAGFGDEAPHVCMEATGAYSVPLAEYLVGRGFLVSVVNPAKVAAFAKSELSKAKTDKADAKRIARYALAMRPVPWAPPPREIRELQALLRRVEHLLEMERMEKNRLDTADSVVAGSIQAVLATLEQELKATRDKIRQHIDNHPNLRDRQDLLESIPGVAAATSAWLLVVLSEHYGFTDAKQAVAQVGLAPVIRQSGKWAGKTRLSKTGDPMVRKALYMPILSALQFNPAIRAFCQRLKAKGKHGMAVNCAAMRKLIHIAFAILKSGRPFDPNFALA

SEQ ID NO: 423115 - protein, 384 aa, unidentified
MTTFSDNCRLWLMVWTAPYGIECARMRLLRSQTREPSVNQIIRIGMDTSKHFFQLHGVDAAEHPVLRRKLRRKEMLAFFAKLPPTVIGMEACGASHYWARELGQLGHTVKLIAPQHVKPYIKRNKNDGRDAEGLCEAMSRPTMQFVPAKTAEQQAALMLAGMRERLVGQRTQLSNAIRGYAAEFGLIAAKGLDKIEPLLADIAADEALPVLARELFAMHGREYAQLQAELKTIEARLMAWHRANADSRRLAQIPGIGPISATALVMKAPDPRAFPSGRHFAAWIGLTPKDHSTAGKTRLGKITRAGDERLRSVLVAGATAVIQQARRGRGRSSPPWLLALLARKPPKLAAVALANKNARIAWKLMTTGESYDGARMPDVSALAA

SEQ ID NO: 423116 - protein, 345 aa, unidentified
MPIVGGLDIHRKQLTFDFLDTVTGEVKRGQVAPADRAHLRAWLARFAGRDDVAFALEGCTGWRYVAEERAGAGVAAHVAEPADTAFARGRKRHAKTDKTDSRHLRELLAEGRLPECWVPPSHILECRALLETYHDLRAEHTAWVQRIHAVFFHQGAPALGEAALRTGRDLQTLRAAAACHLSPAGQLQVATALDMLAGLEARLDVLRHRLLAAARSLTGARVLAERLYGVGPVTGLAMTCWLGGAGRFSSSRKAVRFAGLDVTVWSSDRKGPPGRLSRQGPPVLRWAVYEAGKTHARASAPDHACYAAVKDRQGGKRAALSEARKILRQACRILAGLGGDALTAA

SEQ ID NO: 423117 - protein, 338 aa, unidentified
MDWTVAIGVDTHKEVHVAVALDALGAQLDAQEFATTSAGYRSLLSWAQELGVPAFAVEGTGSYGAGLVRFLEQADVSVYECERPRRQERRRGKSDLIDASLAARRLPAGERLSLPRGGGRREDMRLLLLERRGAVQARTAALNQLSAVLVTAPEPVRERLEALSRERLARAAARLRPHPDVVIGVLRRLGRRAQQLATELAEIDRRLAALVAEVAPDLLEECGVGPVCAAQLLVSSGDPNRMRTEAAFAALAGTSPVDASSGKQRRHRLNRGGDRQLNWALHVVALQRIHRHPQTAAYYQRLLAAGKTAREARRCVKRALARHFYRRLLEIARPPLTT

SEQ ID NO: 423118 - protein, 353 aa, unidentified
MERYIGLDVHAQSCTLAVVSAAGKRLALNVVETNGAALKQAIAAVPGKRHICLEEGTQSAWLYELLKEQAEVVVAIPEHHSGPKDDARDAWALAESLRVGSIKRRVYKERGPFSELRAAVRSYTMLRDDVRRTKNRLKAVYRSRGLLPPAGTPFHSERHREWVRKLPPDQARSAELLLEQLQLEEALWAKAEERLAAASRSHSAVKLLATAPAIGPIRSAQIVAHVVTPHRFRTKRQFWAYCGLAIVMRSSADWQRDSNGHWVRAMTQQSLGLNRNRNGALKEVFKSAAHQVATQMTGHPLHRDYQRLIDGGMKPNLAMVTIARRIAAAALAMWKHEEVYQAKKHESKISAQA

SEQ ID NO: 423119 - protein, 310 aa, unidentified
MDAIYVGIDVSQARLDVHVLPGGEAFAVARDGKGLEELIERLRAFSPQLIAVEATGGFETIVAAAVAGASLPLVVVNPAQIRHFAHALGKRAKTDPIDAAVIAHFVEAVKPQLRALPDEAQRLLAELVGRRRQIIEMMVAERQREKRAANVRVRKSILRHIRVLEKELSEIDEDIGTLVRGSPVWREKEDLLVSFPGIGNTLARTILAEVPELGELTRREIASLVGVAPFTRQSGHWRGKSMIGGGRGSARSALYIAALVASRHNPVLITFYRRLLAAGKPKMVALIAVARKILTTLNAMLRDKRKWQPA

SEQ ID NO: 423120 - protein, 330 aa, unidentified
MQGKVMTEISASTESAVGIDVCKAWLDVHILPANTVLRVANTSKGFKELMAAFKGLRIRIVAIEFTGKLHRAVHRVLHEAGWPVAVVNPLRARLFAESLGELAKTDQVDARLLAMFGEMAKLAVTPPRPELLENLQEIVRAREAAVAARVALQNQLGTTALPFVRRQITRQIKAAELAITALQAEALTLVKADAALARRFEVLDSMPGIGAVTAIGMLANMPELGSLEAKQAAMLAGLAPVAQDSGKRRGPRHIRGGRQQVRNGLYMAAQSAARFNHDLKAFYDRLVDAGKLKKVAITAVMRKMVVLANTLLKDDRLWSPNRFIAEPLDA

SEQ ID NO: 423121 - protein, 370 aa, unidentified
MGNRSMFVGLDVHKETIDVSIAEGERHGEVRHYGVIASDLEPLDKVVHALRAPDRRLHFVYEAGPCGFGIHRHLTACGEDCVVVSPSMIPKRSGDRVKTDRRDSQMLARLHRAGELRAIYIPDATDEAMRDLVRAREDAVIVGTQAKYRLKAFLLRQGRRYPGREGWTLSYRRWLTDLSFPSAAQHIALQEYRDTIDETERRLDRLTEQLRQLAPTWRWVPVVDALQALRGISFITAVGLVAELGDLTRFRHPRELMAYVGLVPSEHSSGPTVRRGAITKAGNPHVRRLLAEAAWAYQGIPRIGRQHAYRQEALSKVVCDIAWKAQLRLTTRFRRLVARGKAKPKVATAIARELSGFIWAIAREVAPAPR

SEQ ID NO: 423122 - protein, 312 aa, unidentified
MFVGIDVSKSRLDVHLRPSGEEWSVSNDEQGHAELVSRLVGDGPELVVVEATGGYQATIVAELTVRDVRVAVVNPRQVRDFAKATGRLAKTDSIDAAALAHFAEAIRPEPRPLLDGHTQELQALVTRRRQLIDMRTGEMNRLETCRVERVRKDIQKTIAWLTRRIGQVDDDTDKMIRNTPLWREREDLLSTVGGVGKTTARTLLTQLPELGQLNRREIAALVGLAPFNNDSGKRTGQRSIRGGRPEIRSMIYMATVSAVRCNPQIRPFYQRLLAAGKRPKVALIACARKLLTVLNAMVKTNTVWSFDAAKAA

SEQ ID NO: 423123 - protein, 440 aa, unidentified
MAMRKREDLVFPNAGAIDVGASSHWAAVPPHSTDAPVREVGAMTDDLNGLADWLLACGVDVVALESTGVYWIPVYEVLEQRGLKVWLVDARQVKYVPGRKSDVQDCQWLQKLMSYGLLRAAFRPAAEVCVIRAVARQREVLLTEQASWVQRMQKALVQMNIQLTEVISDVMGQTGQAIIRDIVAGQREPKLLARHRHRRIKASEQDIVRALTGNWREEHLFVLKQALAMYDDIARHLRECETKLQTLLAERSAASVDLGKAPRAGSKARAEFDVRQQLANWAGADLTRINGLGLDSVMKILSEIGTDLSRFANVKHFCSWLGLCPATKISGGKVLSARTKRSANRVRQALKMAAMSLSHSGSALAAFYRRLCSRMDKPRANTATAHKLARMVYFMLTRGEAFVDQGQQRYEEQQRERSVAALKRRAAALGFQINPMGAPA

SEQ ID NO: 423124 - protein, 410 aa, unidentified
MLFIGDDWAEAHHDIEIEDEAGRVLARRRLPEGLAGITMLHELVAEHLDPAAEPDQVLVGIETERGPWVQALLAAGYVVFAINPLQVARYRERHSPSGAKSDAADAHLLAEIVRLDRAHHRRIAGDSEIAEYVKIAARAHQSMIWSRVRQVNTLRSLLREYYPAALAAFGTDLAGRDALAVLTVAPSPDLGRRLSQSRIETLLRRAGRQRNISTTAAKIRAALTSEQLAARPGVIGAYTASASALLAVLSAMVVQTEVLAGQVEQGFGQHPDAEIYRSQPGLGVILGARVLAEFGDDPARYADAKARKNYSGMSPITKASGTKRVVLARFARNRRLGDALLLQGFAALNNSPGARAFYDHQRTRGATHYQALRALANRLVGILHGCLRTHTLYDEHLAWHTEPDKLSPAA

SEQ ID NO: 423125 - protein, 322 aa, unidentified
MQNVTLIGIDLGKNSFHIHCQEKHGNPLLRKKFSRTQLTQFLATCQPCIVAMESCAGAHFMARHISQLGHQVKLISPQFVRPFVKSNKNDFIDAEAICEAASRPSMRFVTPRTEDQQAMSALHRVRDSLVRERVKTTNQMHAFLLEFGVSMPRGIAVIRRLAVVLEEHELPPYLARLLTRLHQHYGYLCEQIEEVEKELKNHIADDETAQRLLSIPGVGPVTASLLATKLGDGKNYASSRDFAASTGLVPRQYSTGGKSTLMGISKRGDKNLRRLLVQCARVYMQRLEYQSGRLAEWVQRQLTRHHSNVVACALANKLARIA

SEQ ID NO: 423126 - protein, 345 aa, unidentified
MGSKLEQLLERPSRPFTPRAGPAWPARIIEAGVIYHVKEHLVYLGVDIAKSYLDGAIENEKRRFSNDAIGHRQLIEWIKQMPAKVQVICEPSGGYERRLVQALARAQIKVSLVQANRVRQFARAAGILAKTDRIDAEVLCEFGKVMQPQTVTAATLEQEHLRELESQRRHLTRLLVMEQNRGARVSDASVVKLNRSLINQIKKQIEKLDLLIKEHIEQSPRLSAKAEKLTSIKGVGLRTAALLLAQMPELGQLNRREVAALVGVAPFNRDSGKMRGKRAIYGGRRFVRHGLYMAALVAARHNPILRNFYLRLRAAGKPAKLALTATMRKLLIVLNSALKPDLPYA

SEQ ID NO: 423127 - protein, 343 aa, unidentified
MAIIGGLDLHRRQLTYDYLDVVTGQVERGRVVPADRDHLRSFLARFEGQGEVAFAVEGCTGWRYVVEELERAGIGAHLAEPAETAAKRGRKRRAKTDRSDARHLRELLVKGDLPESWIPPAQVLEARARVRLYKDLEEERTAWLQRVQATLYHQGVPVIAALTSVAGQARLAAAELSPAGRQAVEVGLRQLDRLTGELDPLRAELARFSRRQPGCRALRTTHFGIGPITSVAIWAEMGDTRRFSSSDDAVRHSGLDITVYASDTKRARGHLARQGPATLRWALYEAAVCATRPNSPDHASFLAVKRRADGHLGVISVARKLARRVHHTLRALGDQAWEPVAAV

SEQ ID NO: 423128 - protein, 408 aa, unidentified
MKTLHKRCAGLDVHKAEVVACLRVITNRKVGREVRRFPTTTQGLLALAEWLENAGCTHVAMEATGVYWKPVWHILEGHFVLILANAAHVKNVPGRKSDVNDATWLGDLLAHGLIRSSFVPPPEIQELRDLTRTRRQLTREIVQHVQRIQAVLEEANIKLCSVITDIMGASGRRMLKAMIAGETDAEKLAALGHERLGCTRAELVEVLTGCVREHHRFLLDQHLRTIEQLEDSIAAFDARIEGALSPFHDIVERLKEVPGLAATATETVIAEIGTNMSPFPTAGHLLSWAGFVPRLDESAGKRRSTRIRKGAPWLKPVLVQAAWGAARKKNSYFQAQFLRLKARHGAKKAAIAVAASILTTVYHMLRDGTCYQDLGPEYFTRRNPAKAAARLANRIRNLGYHVEIRAAA

SEQ ID NO: 423129 - protein, 342 aa, unidentified
MEKIATVGLDIAKSVFQVHGVDAAGEVVVRKRLSRARVVPFFAKLPRCLVGIEACSTSHHWARELIALGHDVRLMPAQYVKPYVKRGKNDASDAEAICEAVTRPTMRFVAVKTPEQQSVMMLHRVRLMLNRQRTQLSNATRAHMSEFGIVAPVGRIGLDRLLAIVADKDDESIPPDARLCLEMLGAQLAIVKEQILENDRRIRASARDTEVGRRLMEIPGVGPLLASAFVASVADPQVFKTGRDLAAWIGLVPRQNSSGGKERLGGISRAGNQYLRQMLVVGAMAVIRHAERHGTKRVWLIELMKRRATKVAAVALANKTARMVWALMTSGEHYREPQVAHA

SEQ ID NO: 423130 - protein, 343 aa, unidentified
MDHFAGLDVSVKDTSVCIVDGTGKIVREVKVASEPDALLAVLRNPAYRFKRIGLEAGPLSQWLFSALAEVDLPAICVETRHMRAVLKAQINKTDRNDARGIAQMMRVGLYRPVHVKTLRSQKLRMLLTHRKLLQSKAIAIENDLRATLRNFGLKVGMVGTVKFEVRIKELVENLPDLILLVEPLLVVRRVLREQLDLLHRRLLAVVRDDAICRRLMTVPGVGPVVALTYRATVDVPARFRKSKSVGAVFGLTCSRDQSGERDRPGAISRCGDEMMRAMLYEAAQAMLLRSTRWSWLKAWAVQIARRRGMKRAIVALARRLAVILHRIWVDGSEFRWTREAAAA

SEQ ID NO: 423131 - protein, 481 aa, unidentified
MKSRPPERGKITDHARRGHWNEMNRKQRREMMRKMQSEDLSLEVVHPDAAGIDIGNESHYVAVPPSRDRQAVRRFGCTTAELKAMADWLQQCRIQTIAMQSTGVYWIAVYDILEAAGLEVYLVNARDTKNLPGRKSDVQESQWLMKLHTYGLLRNSFRPPQEIRTMRTYWRQRNDLVRAAGAHIQRMQKVLTQMNIQLANVLSDVSGMTGQAIIKAILAGQHDPHKLAELRDPRVQASHAEIAKHLEGNWQEDLLFVLKQEQEGYEFCLQQMAECDRQLEQYLQQREDRSQGACLPKETRKGRLKKNKKGKPAFDLRAELFRMTGTDLTQIDGIDVMTATTVMSEAGWDMSKWETENHFVSWLRLCPDNRISGEKIIGRGRLRTNNRANIALKMAATTLRLSNTYLGAQFRRLRTKLGAPIAIKAMAAKLARLVYRMLRYGMKYADRGAAFYEVEHQRLQIKHLKWKAAKLGYQIVQAPSA

SEQ ID NO: 423132 - protein, 420 aa, unidentified
MTRRKSTPPEVALVAIDVAKHRNEVLIEAVRGGRRRRMTILNTRADHDKLITSLQAMHKPIVVGLEPTGNYHRALAHRLIGAGFGVRLISSMALARTREALHNGWDKNDPKDAQVILHMLQIGATMVYQDPLAAGINDLQELSKTHEVVSKAKTEIWHRLLTHYLPLYFPEIERFVGNSRSDWFLAFLERFPTPASVTAMAKEDFAEAAWDVVGRKVSKARLLGDIYETACSSAALPVLLDSPAIAMFRLVLAEARSLIQQRNVIEAHAHELLRERPDYLRLRQVPGIGPIHALTILAEAGDLRRFRHHRQFLKFCGLDLATHQSGQFRGQTRLSKYGNARLRRTFWLAAQVAIRQRDNSLRDCFGRHVARDRENKDLRRKATVAVATKMARVVHALIKTGTDYRPFPEGPVPSGRTLSL

SEQ ID NO: 423133 - protein, 347 aa, unidentified
MKRIAVDLAKSVYQVAESVQVGRVDRRKRLDSGAFAQYVQEQLEPVEWVMEACGTAHHWGRLMQEKGHSVVLLHPRYVRPYRRRNKTDRNDCDAILEAARCQEIRPVPVKSMQQQQVQQLHKLREGLKKSRVQHINLLRGILREAGVDAPSGIKPFLRQACELVERAEVRALRGALQVVLAEINLYEQSMRECEEQLARWHVDDEIVHKLDEVSGIGLLTASALKTAVGKPERFASGRHLSAWLGMTLNEYSSGERRRLGRISCKGNVYVRTLLIHGARAALLAAKRCKARTPERLTQLQRWVLDTAERIGHNKAAVALANKLVRICWAVWCHERRFSGNWQSTKPA

SEQ ID NO: 423134 - protein, 446 aa, unidentified
MPLDCCERARGSVSWQRSLRTDAVRRWSPHGRKGGLMEVMFDRVAGLDVGKETLTVCVRTPGPRGGRRSQTRTFKTTTGSLRVMRDWLVEAGVSIAAMESTSTYWKPPFYCLEEVMEVWLLNAAHMKAVPGRKSDVRDAEWIAQLLEHGLLRPSFVPPPQVRRLRMLTRYRMQLMGDRRREIVRLELMLEDASIKLSSVASSLKTVSARAILTAMIEGETNPLTLANLAKGKMRRKIPDLAQALTGTFDAHHAQLARSMLRRLELVESALAELDAVIAAACQPWQHQIDLLQTIPGVGPKVAQVIVAETGADMTRFPSAAHLAAWAGLAPAMHESAGKQTPAGKRHGNKWLTAMLVEAAGSVGRMHGKNYLAAQHARLLKRRGMGRTQVAVAHSMLVSAYWMLKRDEPYHDLGADWHRRRNDEAHTRRLVAQLEHLGHTVTINPAA

SEQ ID NO: 423135 - protein, 394 aa, unidentified
MFFVGIDVAKRKHEAVVIDDKGRIVQKSFSFPNSLSGYNSLISCVKRITSTRKDIVFGMESTSHYWLALYSHLIKDGYTAHVINPIQSDAFRGLFIRQTKTDPIDAVIIAEVIRFGKYSSTHFPQHKILALREMCRNRLYMVDAISDLKRKTIALIDQVFPEYDQLFSDTFLVSSIEVLYRYPTPKKLLHIRRDTLTNLLIKTSGGHFGSAKADEIIHAAKNTFGIDDPYDVYADLIKTFIKQIKFIQKNVSEIDQKITAIMDEIASPITSIPGIGVNLGAVILSEIGDISRFKSADKLAAFAGIDPSLKQSGDYSSIRNHMSKRGSPYLRRALWMACIPATQVDPMFRAYYLKKRSEGKSHMKTMGHIAKKMICVIYAVLRDNKEYQPVLTAA

SEQ ID NO: 423136 - protein, 344 aa, unidentified
MNFIGFDLGKLHSQVCIITSDGELIEERIKTDREQLSKLLGALPQSRILIEAGTESEWVARHLEALGHEVIVADPNFAPMYATRSRRIKTDKRDARTLAEACRLGAYHRAHRTSDEQRHVRAKLAVREALVRTRSKYISLIRALLRRDGLRIPAGSARSFLVRLAAMQTSAELQDEVAPLLVLLEGLNEQIERADDELAKLVKADPVVKRLTSVPGVGPVTATCFVATLDDVSRFPDAKQARAYLGLVPTEYSSGERQQRGRINKAGPNRARYLLVEAALSILRRRSTQTAALHDWATKIKERRGMKIATVALARKLAGILYAMWRDGTDFVTSSASNNEAFAR

SEQ ID NO: 423137 - protein, 309 aa, unidentified
MIRTKPCGATVYGIDLGKNIFHVVGADDAGNIVQRARFRRDTLLAFFERAEKAIVGMEACPGSQWLARKLQAMGHTVRIIPAQFVKPYVKSNKNDTIDAAAIAEAVTRPTMRFVELKRPDQVDLQALHRIRDQMVGNRTRLICQMRAFCLEYGIAIRQGAGLFKLALPRIIAEDSNDLTPTMRRLLQELFDDLKTLESRIAAITREIESLAARDEKARRLMTIPGIGPLGATALLAAAGDGQQFRKARDMAAWLGLVPQQYSTGGKSQMLGISKRGNRYVRRLLLRHSSATLTSPRRPSRTMRILSSAE

SEQ ID NO: 423138 - protein, 363 aa, unidentified
MNFIGVDLHKKSITICVLNENLKVLARKTVFCDQTDQIVEFFRQLRPFKVVVEATASYLWFVELVEPLAEEVVLANPKKLRVIAESTKKTDRLDAQVLAEFLARDQIPRAYMPTPRQRQHRRLVRHRQYLRQRMTSVRCKIRHILSDYNADRKDLFSTQCGPAYFKEIALSDADRFVIKQLWSEWQDHQSRILALTKKIKAFIVKAPNREKETRAILKTAPGVGFVTAEVIVSEVGDVSRFRNAKAICAYAGLVPTVRQTGGKKSKDLRITKEGSGLLRWALVESAWRLVKTSPKWSAFFSQLRKRSGSKRAIVAVARKLLCVLYAMLKTSTPYKIVATETKAPKPTRRRLVRKSSPKETVTT

SEQ ID NO: 423139 - protein, 344 aa, unidentified
MGEISMIGLDLAKNVFQVHGVDASGSVVLRRQLRRGAVEKFFAQLAPCTVGIEACGSAHHWARVIGHYGHQVRLMPPAYVKPYVKRNKNDGRDAEAIYEAVGRPTMRFVPVKSVEQQATLAVHTTRALLVRQRTMIANSLRAALSEIGIVAAQGIAGLRELMAKLEAPNEEVPEIMRGALLLLAKHWQALDADERALERQIAKAARADREARRLMEVPCVGPIIASTVLAKVPDATVFHSGRDFAAWIGLTGRDHGTGGKHRPGRISKQGDRMLRALLISGASAYLRHQRTRGVSDPWLRDLLARRPYKVVMVALAAKTARILWAMLVKGEPYREPANAPAAAC

SEQ ID NO: 423140 - protein, 389 aa, unidentified
MYLVGIDISKYKHDCFIATETGEVIKNSFSFANNHQGFNELLTVLKSLDQTQEIRIGLEATGHYGNNLKIFLYDNNFSFMEFNPVLSERFRQVTSLRKTKTDKLDAHLISKMLLTYDYKTYSLKSYHILALKSLTRLRFSMIKERTKYKVRLKNIMDLIFPEFFSFFSDSYGPTPMYLLTKYKSPNNIANVEIKALYEDIFKVSSGRYSYVKLVKLQDCAKKSIGKSNDILEFQLQSILNMIVFYNNEINKVDSKINSIMKLHEFYTPTIKGIGVISAASIISEYGNFSLFDSPDKMLSFAGLEPAVYQSGNSKTFGKMVKRGSPYLRYTIMNCAETLLVHNPRLYDYYNKKRNEGKPHRVALTHVAKKLIRIIYKIEKDKIPFNQNLI

SEQ ID NO: 423141 - protein, 350 aa, unidentified
MEIMYERVGGLDVHKTMIVACVRLTSGGKVERECRTFETTTSGLLALLNWLTQSGCTHVAMEATGVYWKPVWNILCDGAFELILANAAHIKNVPGRKTDVNDATWIADLVACGLIKASFVPEEEIQDLRSLLRARKQLTREQTRHIQRLQKTLEEANIKLDAVISDILGVSGRKMIEAMIAGVRNPTRLAELADRRIKASPKQLYDALHGRLTDHHRFMLRLYLEQYDALDKAIVEIDQAVDAAVAHMDEEVEAGHATFRSLIGLLSTIPGVSTLSATTILAEIGTDMSRFPTAGHLLAWAGLCPGQNESAGKRKSSRLRKGAPWLKTTLVQCAWSAVKKKDSYYKAQFN

SEQ ID NO: 423142 - protein, 313 aa, unidentified
MIITLRCIGIDVSKRHLDIFDEGIGVSERVANAPHAITKLVARWRCDVLVVFEATGVYDLGLREALRAAGIRFARINPARARDFARASGQLAKTDPIDARMLAAFARAMRPAPEQVSTPARNALARLAKRRDQLVHMRAQEKNRRSEAGDRAMVERIGRLIEVLDREIAEIEADISALIKAEPEISHDAQLIRSLPGVGPVACMQLIAQMPEIGHVGPKQAAALAGLAPFNVDSGAYRGKRKIGGGRKRVRNALYMAALNAVRRADRFNAFYARLRQAGKPAKLALIAVARKLLTILNAMMRDRKAYIPDQQT

SEQ ID NO: 423143 - protein, 338 aa, unidentified
MTTKISMLAIDLAKGSFQVCAVGPDGAVLYDRALSRTRLAALLAEQPTCIVAMEACATSHHWGRVAQRHGHEVRLVPAAYVKPFVKRQKNDRADAEAIAEAALRPSMRFVAVKSAETQGRAVAFRTRQCLVRQRTQLINALRGHLAEFGVVAPKGPASLKLLENALADEASDLPDPVREMGAVYVEQIARLTEVIERLAGELEAATKTDACLRRLSTIPGIGPVTAGAVAAFAPGLDTFDSGRNFAAWLGLVPRQRSTGGKAKLGSVSKMGQTDIRRLLIVGAMSVIRWVVRKGGSENRWLAAPVARKPKMVAAVALANKMARMIWAVTTRQEDYRMA

SEQ ID NO: 423144 - protein, 316 aa, unidentified
MVPSPLFVGIDVAKATLDIAVRPTAETWSASNDATGIDALVMRLGAWAPTLIVLEATGGSQGPLVAALVAAALPVVVVNPRHIRAFAQAVGILAKTDRIDARVIAHFAEAVKPAPRPLPDAETQELRALLVRRRQLVEMVSAERARLDTVPPSIQDAIQAHIAWLTTQVAGLDDALTRASQTHPVWQAKDDVLQSIPGVGPVLARTMLGQVPELGTLGPKPLAALIGVAPFNRDSGTLRGRRTVYGGRAEVRAVLYMGALVATRHNPVIKTFYERLLAAGKAKKVALTACMHKLLTIMNAMVRDLKPWQPQEVPSA

SEQ ID NO: 423145 - protein, 374 aa, unidentified
MSSNVCHQIIYLAIELSSSSWVIAYRVPRNDKAKLHRLEAGDGAGLLAFIAGLRHRLDPPDDATTLVVSCFEAGRDGFWLHRLLTAHGVINHVVEPTSILVTRGARRAKTDRLDAVGLLRVLAAKFAGDPGACRTVVVPSVEEEDAKRPHREREFLVQERVRIENRIAALLATQGVRERPSLRSWDADMRALRTGDGRPLPTHLVAELNRLRRRLSLTLEMIRELDAVREQALEAQHDSASRTVKALCTIHGIGVNFASVLTREVFYRTFDNRRQIASYLGLAPTPFQSGGMDRDRRINRAGNSRARKTLVQLAWLWLRYQPESSHAAWFRDRVGSLQGRIRRITIVALARKLLIAIWRFVTLGLAPEGAIIAA

SEQ ID NO: 423146 - protein, 341 aa, unidentified
MSEVRVIGLDIAKSVFQLHGVDGAGATVLQKRLTRARLLPFFEKLSPCLIGIEACATSHFWARELTRLGHEVRLMPAQYVKPYVKRQKNDMADAEAIAEAVTRPTMRFVGAKSPDEQSAMMLHKVRLMLNRQLVMLSNATRAHMAEFGIIAPIGRGGIDRLRAIIEDEADERIPAQARRCLQMLIAQLKLVKLQILDNDRQVLALARSTELGRRLMEIPGIGPLVASALIACVPDPSMFRCGRNMSAWLGLVPRQNSSGGKERLGSITKAGNRYLRQMLFAGAMAVIRRAMQSTRRTWLSQLLARRRPKIAAVALANKNARIAWGMMTNGQHYREPMAIAA

SEQ ID NO: 423147 - protein, 368 aa, unidentified
MPFSVTRKSDDRVVIAVDPHKASWTAAAVDGSLQPVATVRVPVSRHGYRALRRFAHRWPHARWAIEGAAGLGAPLTTRLHTNGIEAIDVPAKLAARVRVLSSGHGRKNDDADALSVGIAALTSPALRSAEIDAATTALRAIVEHRDDLVKTRTQTVNRLHVVLTRLVPAGAKRRLSADHAAALLRGVRPRDAAAKTLRALAMDLISEVRQLDRRIAKAANDIQMAISASGTTLTQLDGLGVLTAGKILGRVGDARRFRSAAAFASYTGTAPIEASSGDVVRHRLSRAGDRQLNFCLHVMAITQVRQDTPGRAYYLRKRSEGKSHNEAMRCLKRRLSDLVYRRLIHDADTQKAGPGGHSGAALSSRAAG

SEQ ID NO: 423148 - protein, 368 aa, unidentified
MTEGSAMTFIGMDVSKNTIAIALLRQDEHVPLEHTIANTPEAVRTQVRRWGDPARLRVCYEAGPTGYELERQLRSLGVDCAVIAPALIPKRPGQRVKTDRRDARMLCRLFRSGELTAVRVPPPEEEIVRDLVRAREDHTEDILRGRHRTTKLLLRHGRAYRDGQGWTQRHLTWIRAQRFESLLLGSLVDHHLAVIDARLAQRASLDREISTIAQSRPYAAAVRRLSALRGIKELSALTLLVEVGDFARFASAREFMGFTGLTASERSSGERRRQGAITKTGNAHLRRILVEAAWCARSRPSFGPTFRRRVLDQDPVVVRYVMQAQERLHRRYWRMVQRGKPNQVATVAVARELAGFVWGLMTGRTAST

SEQ ID NO: 423149 - protein, 338 aa, unidentified
MKLYGAIDLHSNNNVTVVIDEQDKVVYEKRLPNDLAIIAHQLSAYQSSLEGIVVESTYNWYWLVDGLMDKGHRLHLANTAAIQQYEGLKYTDDHSDARWLAHILRLGVLPQGYIYPKEERAVRDLLRKRGQLVRQRTANLLSIQNLITRNTGSSMNSNRIKTLEPQQVDELLADRDLALAVKATVAMVQCAKGQIEILERTVRDRVKLRPEFCFLKTVPGIGQTLALTIMLETGDIGRFADVGNYASYCRCVGSQKISNGKKKGKGNTKNGNKYLSWAFVEAANFAIRFSSRINSFYQRKKAKSHGVVAIKAVAHKLCRACYYIMKNRVAFDVTKAFA

SEQ ID NO: 423150 - protein, 344 aa, unidentified
MKKFNVIGIDLAKNVLQVCKVTKHGELTANKALSPAKLKELLAKSTPSIVAMEGSGSCHYWGRLAESFGHEVRVINPKKVKAFLQGQKTDANDALAIAMAATQFGVRFSQLKNEEQQTLQTLETSRKFLDKELTALNNHIRAYLYEYGITMRRGRTSLRETMALVLDAVDSRLPQCLKPMLQLLWERYQYTLAQLKVSNKAKEALVRQVEPCRRLLALETVGPVGAAMLYANIGDGKDFKNGRGASACIGVTPMQHSSGGKTNMTGINKKGGNKELRAVLYQGALSVISRLPEEPQTVKQAWLIDLVKRAGVKRACIALANKTVRTAWAMLATGESYQPVMLRQ

SEQ ID NO: 423151 - protein, 408 aa, unidentified
MNPLFVGIDVSSKNNVAYLMKPDGSKHSSFSVQNNLGGAKLLSEKIVSALHSMQLNDVVIGLEATSIYGDSLVYALREDGSLGRFQRKIHVLNPKQVRKFKEAYSDLPKNDWVDAFVIADHLRFGRIAKEVYMDDYRYQALRTLTRARFDIIQNLTREKQRFANYLFLKCSGIAQDKDIQNTSATTIALMEHFETVDDLANADLDELTAFISEAGRGRFVDPDATAKAVQAAARGSYRLPKTVNDTVNQAMSVSIASMRALKEQVKVLDKAIEQHLEIIPNTLTSIPGIGKVYSAGIIAEIGDIHRFNAQASVAKFAGLVWHRNQSGDFEAEHSKMIKSGNRYLRYYLLEAANSVRRCDSEFRRYYDLKLKEVNKYQHKRALALTARKLVRLVFRLLKDNRLYIPPEG

SEQ ID NO: 423152 - protein, 355 aa, unidentified
MLADQVDHIIGVDTHKDSHTIAVVSPAGAVIAHRTVPADTIGHLDGYRFAVEQAPGRRVWAIEGTGSYGAGLTAYLLKQGEWVAEIDRPARPARRNGAKTDDLDAVRAAREALGRNHLAQPRRRGDREAIRVLLTTRHSAMGARTRAINHLKALVVNAPQRLREQLRALATDQLLARCARLRSHPTQPIEHRATIIGLRRTAQRALALQAEADDLQAELDSLVDRLAPGLLAEPGVGVICAAQLLTAWSHPGRLRSEAAFAMLGGAGPIEASSGKVVRHRLNRSGDRQLNHALHTIVLSRMTHHAQTRAYVARRTAEGKTPREIKRCLKRYLARRLFKLLETSPAPVPNAQIATA

SEQ ID NO: 423153 - protein, 312 aa, unidentified
MEVKFVGIDVSKAALDFDCLPQSAPQQFGNHEEDIAVLVKMLKGSGVERIVLEATGGYETNLAAALAAAGLPVVVINPKRVRDFAKASGVLAKTDRIDARVLARFGEMIAPPVRALPDQTQRELAELLDRRMQLVVMRAQEKARLSTVLPVARDDIKEHITWLDKRIARFERDLNQRLRTTDVWKEKVALLDSVPGVGKVTIFTLLARLPELGQLNRGQVAALVGVAPFNDDSGKRRGQRYIQGGRCDVRCVLYMATLTAKQWNPAIKQFFDRLIAAGKPFKVAMTACMRKLLTVLNVLMKTQKPWKNLLAA

SEQ ID NO: 423154 - protein, 462 aa, unidentified
MSERKKSTKKLKKDPFAGLPPLNLNAAGIDIGNADHYVAVPADRDSKPVRKFDCFTADLRRLADWLERCGIETVAMESTGVYWIPLFQILEERGFDVKLVNARHVKNLPGRKTDMLDCQWLQKLHTFGLLNNSFRPTDQICILRSYWRQRENLIAAASTCVQHMQKALTEMNIQLANVISDLSGYTGLAIVRAILKGERDPQKLAELRHERIQATKEEIAKSLEGNWREELLFNLRQSLEIYDLYQQKIDDCDRQINRHMQTFQSKVDQTVIGTASKKRKKASGNVPHFDLPSELHRITGVDLTRINGINAVTAQTIISEIGLDMTKWKTEKNFASWLGLCPDNTISGGKVLKRGTRKVINRAAVALRMAAHALLRSKSALGSNYRRLRTRLGAPKAITAMAHKLARLVYRMLKYGSDYVDKGIAHYEAKYQQTKLAWLKKKAAELNMTLIATTTRPRLSSI

SEQ ID NO: 423155 - protein, 342 aa, unidentified
MQAVTTIGFDIAKSVFQVHGVDSVGQVIIRRQLKRRQVLAFFAKLPPCLIGIEACASSHHWARELKALGHTVRLIPPAYVKPYVKRQKNDAADAEAICEAVTRPNMRFVPIKTIEQQGCLVLHRTRHLLIRQQTATINSIRAYLAEFGIVAPVGRRGVEQLLTLIEGNDTRVPEVARACISALGVQLQALKAQILEFDRRIMAWHRSSEVSRRLDEVPGIGPALATALVASIADPKAFRSGRDFSAWIGLVPKQKSSGGKDKLGNISKQGDRYLRSLFTAGALAVIRYAKIHGTKHRPWLAALLARRPTKVAAIALANKIARMAWAMMTRGEPYREPVALAA

SEQ ID NO: 423156 - protein, 356 aa, unidentified
MLYLGIDQHARQLTISLRDAAGDVVQAQQVSTQPEKINAFFQQLTRERLRKGECFVAVLEVCGFNDWLMRMLHDYRCHKVILIQPDDRKRCKTDRRDAASLSELLWVNRDRLLEGKPVRGVRQVDIASSCDQENRRLTTLRKEAGGARTRLVNKIKHLLRRHNLQWEMPTKTFPTGAAIAWLKGLVLSEIDRLEMNHLLTDLEQVEKRLKELERVIAQRAVASKEVAILASMPGVGSGFTAISLACRIGRIERFPRARSLANYWGLTPGCRNSGENNQRLGSITKAGSSTARWLLAQLVYKVLRRDARLREWFKRIKRRRGSTIARVAVMRKLATIIWYMLSKKMTYAECRACVAA

SEQ ID NO: 423157 - protein, 371 aa, unidentified
MNYTTKYVGLDVSKETIAVAVAESGRDAARYVGAIKHEAGAIRKLLKQLGKKGDLEICYEAGPTGYGLHRLLTSLGVRCMVVAPSLIPVRRGDQVKTDRRDALRLSELLRAGELSGVYVPSAEDEALRDLVRAREDAREDLHRAKQRLLKFLLRYSITPPAGIKRRWTKRYRLWLEGLKLEQEAQAITFREYLHAVKEGEERLKRIETGLLEQAAQGANGALVKALQGLRGVAFVTAVSLVAEIGSFRRFRSPMQLMAYLGLVPREYSSGQSVRRGKLTKTGNRHARRLLVEAAWSYRHKPAVRGEIAKRQEELNPQIQLISWKAQERLHTKYRKLVQRGKAKNLAVAAVARELCGFVWAVACEVESAAAH

SEQ ID NO: 423158 - protein, 360 aa, unidentified
MEIMIGIDMHVKTLVTEIGYGKGDPKRITFPNDLGGHLELMNQIEGLKRLHKVSDALLAYEASGLGYVLYDKMKAKGYHCSILAPTKIPKGAKAFKHKNDKRDAHDIYEVVRGHVLAGNRLPEIWVPDTELRGDRDVVRTLFDLGVKITLVKNQVHTLLKKYGVKRPEEMECWTLSFWEWLEQVKDSISYEFRICLKSLINQLSFLIKEKKDIEKEVKRIALKKRYWMLYEKLREIKGVGLMTAMTFLTEIGDVTRFKNRREIGSYLGLAPSSFESGDASDRKGRITRDGPYRVRSILNQSVWAHLRYNGTERALYDRIVEKNPKRKKKAVVACMRRLGVKLWHVACDCIRENRKEKLSA

SEQ ID NO: 423159 - protein, 425 aa, unidentified
MKNKFLTTLFVGIDVGSQVNAFHAMSFYGENLLIDEVTNNKPGTDSIIKSLIDCLNANDLKRIVIAFESTSIYSTHVASSFSSDTRLLPYDPHVYCLNPKTTASYRKTFVDMDVTDGLDAYLIADFARCGKITSKPWRGAQFLALQRLTRHRLHLIRSVTREKTYMTTNIYLKFSELATMEKDEHPFSNIYGATSTAVLTEFFSLDEIAYSSMEDLIAFVSEKSRNRFSDPHQTAKLLKKAARDSYRLDKVLYEPLNVALASSFNIMRTFEQEIKVIDKAIKKCIKGLNNTEYQSLISIPGIGPVLTSGILAEIGTITAFDSHNALAKFAGLTWRTNQSGKFKSDETRMTKTGNKYLRYYLIEAANSVKNHTSEYKQYYYKKYNEATTHKHKRALALTSRKLVRLIFSLLTKNQIYSSNKVGEIK

SEQ ID NO: 423160 - protein, 342 aa, unidentified
MYPFYLGIDLHLKRTYVVLMDERGEVIDERRLSNDSVGDYLTHKVPRETYAVLEATRNWPFMYDLLTEHVERVELAHPKELKAIASAAVKTDQIDAKVLAHLARMNYLPIAYAAPAKIRDLRLWTRHREWLISQRTQSKNRIQAVLAAYNLVSPVTDLFGVKGRQFLKEVMEKRLRCAASRVVADNLSVIDQLDGKIQALEEDLSLDQEQEKIVKLLRTIPGIGRVHAITILAEIGDIQRFNNPKALCNWSGLTPRVRKSDRIARYGRISKQGSPYLRSAMVRAAMVAARVSPRWLKVYERLSPRCGKRAARVAVGRRLLTVVYHMLKNGQPYNENYEQIKH

SEQ ID NO: 423161 - protein, 345 aa, unidentified
MEIHTIGIDLGKTVFHLVGLDARGEVVVRKKCSRDQILRFTVNLQVSLIGMEACGGAHFLARALREQGHDARLIPAKYVKPYVKTNKNDYIDAEAIAEAVGRARMRFVPIKTDDQLDLQSLHRVRERWVSARTAVINQIRGLLLERGITVRKGRSHIEESLPGILEDADNKLTGALRALLSQLRLEMQYLQRQIDECNKSILRISDELEDCRRILAVPGIGPMTATATIAAIGNGSAFKKGRGFAAWLGVVPGEHSTGGKQTLTGTGRRGNRYLRKLFIQGAHAVLQQRMKQSNSLNTWLAQLTSRKRIQVAAVAMANKMARMVWAVLSKGEAYRPPLLAGTVEA

SEQ ID NO: 423162 - protein, 373 aa, unidentified
MSDYSAFVGPDVHKDTIAVAVADAGRTGEVRFWGEIANTPDAVAGMLRKLGGRHPLMHFVYEAGPCGYGLHRQIIATQHHCEVVSPAQTPRKPGDRIKTDRRDAIILARLSRAGELTSVWVPDTIHEAVRDLIRLRQAMVKDLRAARQRTKSFLLRHGRVFKGTSWKRSHGIWLGNQSFAHPAQQIAFQSYLNAVDQAQARRDEVDVQIRLFAADWSMAPVVEALQALRGAAFITAVTVVCEVGDIRRFAKPRQLMAFLGLVPGERSSGETRRQGGITKAGNVLARAVRIEAAWSCRTPARIGAQMMLRQEGIPQAAKDIGWKAQVRLCGRYRRLMARGRKSALAVTAVARELVGFIWAIAHITDPAGAKGAA

SEQ ID NO: 423163 - protein, 325 aa, unidentified
MILGIDMAQEKFDLALYQGKELVASGQFANNAAGFKKLSQWLNNKAAGQVKACLEATGRYGDALALYLYQAGHQVSLVNPARIKKYGESQLQRNKTDKLDARVMADFCRTQEPGLWRPPAPEKRELQEMVRRLSALIKEQTREQNRLTAGLQSQVVKESITANLEFLEAHIAKLEQQIQQHIEHHPGLKRDKELLTSIKGIGAKTAAIILAELPEVDNFDHAGQAVAYGGLNPEQHDSGSSVHKRSKLTQTGNQNLKTALYFPALSAIRHNPIVKALARRLEEKGKEKMVIIGAAMPKLLQLAYGVLKSGQPFDPDYATKIQAAI

SEQ ID NO: 423164 - protein, 351 aa, unidentified
MLYTGLDLHKSFSYITTMDEKGRIVGQKKLPSNGEVVEFLKEFGESMEVAIEATPSWYWLYDHLEDEGFEVKLSHPLRTKAIASAKVKTDKVDSATLAHLLRSDLLPLSYVPEKPVRLNRELLRYRASLVKIQTRIKNKIHTILAKNNISHDYTDLFGKAGMTFLHSLSMPENYKIALEGYLSVLETVRHEIRSASKRVQQLAEDDKDSILLMTIPGVGYYSALLIKSEIGDVKRFRSAKQLCFYAGLVPSTYASGNLCYHGHITKQGSRWLRWILIEAAIHAAKRTGPLRRFYYKLERKKGGKVAKVAAARKLLEWIYHMLRDEKTFQQVEKAVELLGRGEPARSPGLIH

SEQ ID NO: 423165 - protein, 416 aa, unidentified
MSESNSSYAAFVGIDWADQKHDVCLIEGERHELCELRHTPEAIDAWARDLEDRFGGRPVAVCLEQSRGPLMHALMKYSCLALFPVNPKQLSRFREALGPSGAKDDPRDAWLLAELLRHHHPRLRPWKPDDGPTRRIRLLAESRRQLVDDRTRTGNRLKALLKEYFPLALTLCGSRVYTESFLRLLARWPSLNALRRARPQTVEHVLFAGRKRPENAAEQVAAIRQAVPLVKDPMLIEARGLAAKALVAQLRALNGAIAEHDQRLEKAMREHPRADVFRSLPGAGEAIAPRLLAAMGSQTDRYESAAAVQQYSGIAPVTRQSGNSRTVRRRRACPRFLRQTFHEFAQHSIGSSRWARALYRLQRQRGKKHHTAIRSLAYKWIRIIYRCWQTNTRYNEPQHLDNLRRKNAPLLAYLDP

SEQ ID NO: 423166 - protein, 457 aa, unidentified
MDKKSNVVFEEIRRNVAGIDLAWRAEHYVCGPRRENGEHEIVSFGTTTPQLYQMLHWLKERKVESVAMESTSVYWIPTADLLESNGIEVVLVDAREVRMVPGRKSDVQDCQWIQKLHSCGLLRGAFRPPEAVAAVRSILREKENVTAMRTQTIQQMQKSLDQMNIRVHHAVSDIDGKTGTSIVKAIVEGERNPIKLAALRDKHCKKSEQEIADHLTGTWRDEHLFNLGQAFKTLQFLDDRIAEYDLKVSELFSSLAASVDTPDDHGQNPTPPVCKKLTAKEREDTANKANVSQFMGFDMTIIPGIGYNIATIIASELGTNFDCFPDERHFASYVGLAPSLGKSAGKNVPQKKRCKNTSRVGRILRMAASTLYRSQTELGSYMQSVARRTDKKTAIRATARRMAHMIYRGVKYGQEYIDRGAQAFEVRMRQKTVKTVNRLIKSFNISSSEIIAALATE

SEQ ID NO: 423167 - protein, 351 aa, unidentified
MSRKTDTVVARTIGIDTGKNTLHLIGLDDKGAIVLREKLTRGRIAARLANVLQCLIGIEAGMATHCVARELIALGHEVKQVPPVYARPFRQGHKNDFRDAHAIAEAVQRPSTRCVPVKTDDQLDLQALHRVRSRLISERTAVINQIRGFLLEHGIPVRQGLRFLRQQLPDILAKRIDVLSSRIIRIIEDLSGDWRRLDERIENVTEEIEELAHGTEGCRQLMTVPGIGPIIASAMVAAIGSGTAFARGRDFAAWLGLVPKQMSTGDRTILGRISKRGNRYLRTLFMQGARVILLRPANWAKHSFGPWLAAAAKRLHHNVLATAVANKLARIAWTVLVQARSYETRVTSEMA

SEQ ID NO: 423168 - protein, 304 aa, unidentified
MSGIGIDVSKRQLDVGTTDGEILQVSNSASGFAELDLWLRKHPASQIVLEATGGYERPVLDFLHAAGHSVVRANALRARRLAQGMGQMAKTDRLDAYALAQMAALVKLPAYQPLEPWQQKMREFVRARRQAMHALTIARQQLEMVGDRELRRLLQANITRLQTLVERLGKQIAEQVTQQPQLAVLKSMKGVGPGLQAVLASYLPELGKISGKAIASLVGVAPMSHDSGTMRGKRSIHGGRAEIRQVLYMASMSAMRHEPRLRDFYQSLRARGKEGKVAIVAVMRKMLVILNARVRDAESGLVPA

SEQ ID NO: 423169 - protein, 485 aa, unidentified
MPSGQQSGQQVEVDDHEQIVERVAASDVAKASGMVCTRAPHPAAVGKRITTVWQVGSTTNQILELAEQLVGQGIERVVVESTSDYWRPFVYLLEARGLVVWLVNARDVKHLPGRPKTDKLDAVWLAKLNERGMLRPSFVPPAPIRRLRDYTRLRADLTHERSRHKQRLEKLLEDALIKLSTVATDIFGVSGRAMLEALVAGQRDPRVLAELARGRLRVKHAALVEALTGQFSDHHGFIVRMLLDQIDQLSGQIDQLTARIEQTIAAIPAAQPPVGGLGGGLGGGLGGGLGGGAAATGQAGIGGPGHTEPVDPATGEILAALLPLPAVDRLDEVAGIGRHAAQVLIAEVGLDMGQFPTPGHLVSWARLSPRTIQSGATRRAGATGKGNPYLKSALGEAATAAAKTDTFLGERYRRLVKRIGKLKALVAIARSILVIVWHLLADPTARFHDLGAAYHASRIDTGRKTRNLVRQLEALGHKVTLQPAA

SEQ ID NO: 423170 - protein, 361 aa, unidentified
MTIALGRSDVVVGVDTHKDEHVAVAIDGLGGRLGELSLAANPAGYAQLLVWADQLGAVAVFGVEGTGSYGSGLARFLRRHGRKVVEVCRPPRKGERRLSGKSDTIDAEHAAREVLAGKAKSTPKLADGSVEAIRLVKIARDSAVTAHSQAMITLKATLVTASDELRAGIEPLADFRLIQACAVMDESGDIADPAVAMRHLLATLARRWLELHEEIKVHSRHLKKLTKTAAPELVAAFGIGPDIAAEMLVTAGDNTDRLPSDAALAKMCGACPIPASSGKTNGRHRLNRGGNRQANAALYRAIIVRMRWHPPTIAYVERRTAEGLSKREIIRCLKRYLAREIYRLLPPPGTCAPLASAAEAA

SEQ ID NO: 423171 - protein, 362 aa, unidentified
MKKSIRERESEWKQRPDRTVGVDLGDRFSHYCVLNGDGEVLEEGRVRTSEEAFRRHWEAEPRQRIVMETGTHSPWISRLLRGFGHQVIVANARKVRAISENESKNDRQDAEMLARLGYCNPRLLKPIQHRSAERQRDLNLIRARDTLVRARTMLINSMRGLVKSAGGRLPPASSESFAVRVSAAVPAELGTATQPLLHQIAGLTVEIRGLDQAIEKLAERYPEIRILRTAPGVGPVIAAAYVLTLDGVDAVEHSGSVGAFLGLRPKQSQSGDSDPEHNISKTGNIYLRRLLVQAAQYILGRYGPDSALRRWGLKLAQGGKRTKKRAVVAVARKLAVLLHHLWRTGQHYQPFPEVAAAAGSAA

SEQ ID NO: 423172 - protein, 415 aa, unidentified
MTDGIATYVGVDWASVTHYAFALDPEGGKLGYKGFVHSGDGLAELVEWIRRTAAVEPGRVAIGIEVPHGPVVESLMEAGFQVYALNPKQLDRFRDRFTVAGAKDDRRDALVLADALRTDRQAYRLLEPMHPTIIELREWSRMTEDLSAERNRLANRFRHQLWRYFPQVIDLAEDWASLWILDLWDLIPTPARARTVRPETVAKLLKRTKVRRWTADTLLEQLRSTPLIVAPGVADACVAHCRVILQRLRLVIDQLRTALKHLDRLSAAVAAIPSTDPTPPRHHDPEILQSIPGVGPIVLAALLSEAHDAVVRRDAQALRGLSGVAPVTRRSGKQTLVIMRQSCPRRLRTAVYHWARVAVMRDFNCRNRYAALRKRGHSHARALRSIGSRLIGVACAMLSTGELFDAARQPQQASA

SEQ ID NO: 423173 - protein, 383 aa, unidentified
MTKSSNLYVGMDVHKESIDVALADEDGRQEVRHYGSIGGDLAALDQAVRRLQATGKTLHFVYEAGPCGYVIYRHLAGKGLDCVVVAPSMIPKRSGDRVKTDRRDAEMLARLYRAGELSAVYVPHPEDEAVRDLTRAREDAKQAQTRARHQLKAFLLRSGIRYTGKTAWTPAHVRWIAGIKLDQPVQQIVFQEYVEAVTAASDRLERVEGNLRDAVAEWRLQPLVEALQALRGVQLVVAATLAAEIGRIDRFDNPRQLMAYLGLVPSEYSSGSSTRRGSITKCGNTHARRVLTEAAWAYRLPARITPIIARRQDKLARSIRAIAWKAQVRLCKRYRSLRAKGKEQNKVITAIARELSGFVWAIAREVSAGATKNGLSTGAALRA

SEQ ID NO: 423174 - protein, 428 aa, unidentified
MNCNTQNAKIASITEKTLIVGIDVGSETHYARAFDWRNYEYTKKPLEFSNTEAGFQTFKAWMEDMAEKHGKTAVIPGMEPTGHYWFALGKFLQDNGMKPVHVNPHHVKKSKELDDNNPNKNDRKDPKTIAALVNEGRFSYPYMPVGIYAEIRSLSNLRFQTQEELTRIKNRLARWFAIYFPEYKDVYGDLKAVSGRMVLKEAPLPEDIRKLGVEGVNRIWRDAKLRGAGMKRAKTLVTAAEHSVGSKEAPEAARMELKNLLDDMDVYTARQEGLLRNIEEKLKEIPYIDNLLAIKGIGMVTVSGFIAEVGDIGRFDNPKQLQKLAGYAIVANDSGKHNGESRISYRGRKRLRYVLYEAAISLVGKNAEFREIHEYYRTRKENPLKKMQSVVAVACKILRIFYAILTKGVEYDPKKLLGDIKRPQVQAA

SEQ ID NO: 423175 - protein, 423 aa, unidentified
MEVIHERVAGLDVHKDSVVACVRIMSGGKAKRECRTFGTTTAELEALRDWITSWECTLVAMEATGVYWLPIWKILLGGAFEMNIANARHIKAVPGRKTDMNDAMWIADLAAYGLIRASFVPDEEFHELRTLTRTRKQLVRDQTSHVQRIQKTLTEANIRLDSVISDIMGVNGRRMIEAMIEGVRDPGKLAALGDRRLKATRKELHDALHGRLTEHHCFLLKLHLDQHDALEKTIRVIDAEVERRIARLDKQAKPAETPLSRLIELLVSIPGVSYLSAITIISEIGSNMSRFPTAGHLIAWAGLCPGQNESAGKRKRSRLRKGAPWLKTMLVQCAWAAKRQKNSYYRAQFYRLQARRGPQKAICAVAASILTAIYHILKDGVPHQDLGIDYFDKRKPEAKVKRLVAQIAKLGFEATLHPIAKAA

SEQ ID NO: 423176 - protein, 417 aa, unidentified
MAAKNSKKVEYVRRMYEQPTFVIGVDVSKAYLTTCAVQLSGLEMERKRFYNSGNGFKAFYAWLQRLKHKYGYQFAVVGLEPTGTYSKPLIYFLAARGVCVVQVNPVHVKRSKDMEDNSPDKSDKKDPKVIANLVREGKFLTVLVLTGPYARLRQLVRARDRAVAARTQCINQMEAAVAEIFPEFLQIIGDLTRKTALELLSRCPTPRAILSMGLEGLQELVHKSSRGRIRRDRVEALWIAAQESVGVEEAVEETVEELRFLVKLVRDHTAFIEAQEKQICSLVQTIPYGEQLLSIQGIGPLTVAVVLGELGDLRRFRTRRDVLKHAGLNLYRLSSGTYQGLPRISKRGSGLVRKYLFLVAMAMVRPGGIYHDFYQRYTSRHEVRIKGIVAVMRKLLALMFALVRKQEYFDATVLAAA

SEQ ID NO: 423177 - protein, 343 aa, unidentified
MHIKRIGLDLAKYVFEVHAVDAQDEVVLRKTLRRDSVAQFFAELEPCIVGMEACCGSHYWARVLTDLGHEVRLISPQFVKPYVKYNKNDRNDAEAICEAIGRPSMRFVPPKSAEQLEIQAVHRIRQRVVANRTRLVNQVRGLLGEHGVVVARDITRIRRALGEIADSHESAFGDIFIDMLRDMRDELAELDIRLASYNRRIKNLFRSNEMCQRIGQIEGVGPITATALVAAIGDKSCFKNGRQFAAWLGLVPKQHSSGGKARLLGISKRGDRYLRTLLIHGARAVLGKAAGKTDARSQWIGRMRERRHPNVVAVAIANKNARIIWSLLSRDQEYRPDHKMSFT

SEQ ID NO: 423178 - protein, 378 aa, unidentified
MKDTRHVGFDVDSEKIVVAVAEPQGEVRSLGAILNRDEAVRRLVKKLGPASRLRICYEAGPHGYGLYWLLSGLGVHCDVVAPTLVPVKAGDRVKTNRRDALKLARSYRSGDLTPVWVPDAEHEALRDLVRAREVAKKDQLRARHRLGKFLLRRGLRAAAGMKSWTSKHLLWVKTLRFERAAQEATYLDYLHEVEHAAERVTRLEQAIDQSIEALPAEMRALIAGVQALRGIKQVSAATIVAEVGPLSRFPRPKQLMGYSGMVSSENSTGDSVRRGAITKTGNAHLRRIVGEAAWAYQYRPAMSAELKKRQDGLSEEVKEIAWKAQHRLSTRFRRLMAKGKLRQKVTVAIGRELLGFIWAVGIQVEKEQRLRQARVRAA

SEQ ID NO: 423179 - protein, 356 aa, unidentified
MSVVKQSIGVDVSKDDFYVRILFQFQGSTEVRKHRGVKKFSNTNSGFIKLHEWLKKYTVQDAPMVIAMEATGVYHEALAYFLFEHGYFVSVQLSTKVNAFAKSHNLHNKTDVSDAEIIARLVSERKLVAWRPPTKSIRRLRALTRQYQAITESKTVTQNQLHAMEHSALVDDQVCMRYREIIALFKRQLKQIELEIRQLARQDELLDNVLRLLMTIPGVALKTAAVIAAETGCFQLFDSRAQLVKFSGMDVVERQSGSSVRGRSSISKRGNSRIRRALFMPSLSYVKDDGVFGQLYQRVYQRTMIKKKGLIAVQRKLLVVMYAIVKNGTAYDPRLHQRRCQKEVGKPKLAYRDSIN

SEQ ID NO: 423180 - protein, 339 aa, unidentified
MELYGAIDLHSTNCHLAMVDAQRNRVFYRKFPNRKETVLNALSPFEAQIRGIAVESTYNWYWLVDALMEQGYQVHLVNTTQVIQYSGMKYGDDRHDAFWLATLLSLGILPEGYIYPRKERPLRDLFRKRAHLVRVRTALLLSQQNMILRNRGLKVSAYELKRFSHDGVASLFQGDPELTLAAEANKAVIDLLTIQIDRLEKAIRVRMVPREGFTKVMSLPGVGDILAMAILLETGPIDRFQQVGDYASYSRKVPGVWLSNGKIKGRGNTRNGNRYLAWAFSEAADHARRHHALSRAFYQRKLAQSNAAVAHHALAHKLARAAYYIMRDNVVFDEGKMFR

SEQ ID NO: 423181 - protein, 341 aa, unidentified
MTEYVGFDVSKEETAFCVKDAAGKILAAGKVATDPDALLAAVREHCRCPGRIVLETGTLSGWLARELGERGLAVEVIDARHAHALMRLQRNKSDAGDAAQLAEIARLDAGQAVAVRSETLQRDRAVVEARAHLQGQRLATRNVIRGLLGAFGLRFPKGAGTLAARVREALAERPELMAVVAPLLDSIEALSASFARLDDAVMRGAKESDACRLLMTVPGIGPVNALTFVATIGDAGRFADSRDVGAYLGLTTRRTQSGQIDYSGRISKRGDSLLRSLLYEAANCLLTRVRRAHPLKDWARRIARRSGHKKACVALARKLAVILHRMLITGEPFRWPQPAAA

SEQ ID NO: 423182 - protein, 341 aa, unidentified
MKQFIRIGVDLAKNYFQVHALANEGGPAVTRKLKRSKMHEFFAQIEPCLIGMEACGSAHYWARELETMGHEVLLMPPAYTKPYVKRGKNDAVDAEAICEAASRPGMRFVPIKSAEQQATLMLHKTRELLVKQQTMSVNALRSHLSEFGIVVAKGIGRVDELLELAESDTTLPEVAKAAVKILAQHLEGLDKSIDDLEKQIGRAHAQSEMSRLLDQVPGVGKIIASVISASVPDPSVFKSGRDFAAWLGLTPRQNSSGGKQTLGGITKQGNRYIRKSLVLGATSLLHGVGKRKGALRDWIVALLAKKPAQLVTVALANKLARIVWAMMKTGECFRAEMFAKA

SEQ ID NO: 423183 - protein, 367 aa, unidentified
MSQTIVVGLDVHAESITAAILEGDSKEAEVITLSSDLMKVRRLFRRLAEKGPVRSCYEASGAGFVLQRVLTKDGFHCDVIAPSLIPRRPGDRRKTDRLDAINLARLYRSGHLTPVHIPTEGHEALRRLLRLRSTYHAYCTATKHRLSGMLRNHGHVFREGRSTWTKKHRQWLSDLRQTLEGPLQTALAIELEHLEYLVSQTRALDTELELFGRSEPYRLRCEALCCLRGVKTLTALTMLLEIDDIRRFPSPRGLMAYFGLVPSEHSSGEKERRGSITKAGNIHARRLLIEAAWNNRHRAAADLILNRRRQGQPPHIVAIALKAQHRLYKKFYRLDQRKHRHIAITAVARELCGFIWAILNAVPQPLN

SEQ ID NO: 423184 - protein, 400 aa, unidentified
MEIVYPRVAGIDVGKKIVAVAVRTPGDRPGQRHQQLRKFKTFYPVLREMVGWLVAQGVTQVAMEATGVYWKPVFHALCEAEQLEVLLVNARHVKNVPGRKTDAKDAEWLAELCEVGLLRGSFIPPAEIAAVRELTRYRKKLEDGGVKLDSVASSITTVSARAMVEALIAGERDARVLAELARGVMRKKIPDLAMALQGRFGAHHALLARMHLEHVDQLNGMIQRLDGEIDQVVAPFAEQVGLLRTIPGIGERTAQVLIGEIGVDMSRFPTADHLASWAGLCPGNNESAGKHHRARTRKGNREVREALVEAAWAAGRTGTYLGARFRRLHRRFGKQGGSKAAVAIAHNLLVIVWFVLHDRAGYRDLGADYFTRHDNPDAKKRRLIRELQTLGYTVDLTPAA

SEQ ID NO: 423185 - protein, 311 aa, unidentified
MTKSVVGVDVSKGKLDVGVSDEKRVRTWSNDATGCAELGEWVVEQGVSLVVVEASGGYEAALVSELVSRGQAVAMVNPTRVRAFARAEGILAKTDKIDAQVIARFGATMKPQATARRDEAQVVLIEQVTRRRQLVLILTGEKNRLQTASPTIQAHIGRHITWLQTEIETLEQQISQAIAVNPEWAETAQRLDSVPGIGFITAATLVADLPELGQLNRQKIAALVGVAPFNHDSGKQRGKRRIFGGRTSVRSVLYMATLSAIRHNAVIKAFYQRLLDKGKLKKVALIACMRKLLVILNTMVKTGQDWNPAIS

SEQ ID NO: 423186 - protein, 382 aa, unidentified
MSQTASRGDFTAMGSELFVSFELGWNRWRLAFASAMGQRAWQITIPARNILALTDAIRKARQRLGLFQDCPVFSCYEAGREGFWLHRLLQQMSVANLVVDSSSIEVNRRARRAKTDRLDAEKLLSMLLRYHAGEKKLWSVVHGPTPEQEDRRHLQREIRTLKKEQTRQINRIRGLLANQGVAIKANRRGLLEPFDSIRIWDGSPLPSGLQRRLETAVARHAFVHRQLLDLESERDALIRQSQDGAAQIARRLMTLRGIAEVGAETYARELSWRAFKNRRQVGSLIGLTSTPHQSGDSSRERGISRAGNRHMRGIAIDLAWIWLRQQPHSELTLWYNRRFANASPSLRKIGIVALARKLTIALWRYADFAEIPKGALLKSNTA

SEQ ID NO: 423187 - protein, 354 aa, unidentified
MIIIGVDYHPEFQQVAWVDTETGELKEVRLQHPEEAERFYRELAEQPVQVRIGMEASGHARWLERLLAELQFELWIGDAAEIRTKRVRKQKTDRQDAQLILKLMLEDRFPRIWVPSSENRDLRQLLWHRHRMVQARTGIMNQLQAVALNEGLRCKKKLWREPGRQQLESFQLGPWASRRRRDLLQLLDRLNPTIAELTQAIEREAEKCPEAERLRTHPGVGALTALGFVLILGNAERFRCGKQVASYLGLVPLEESSGNRRRLGHITKQGSSMLRFLLVEAAQVTVRSVPEWRSQYFHLMLRRGRKTAKVAMARRLAVRLYWMWRQERDYEQLQKFGSHAGQPGNRDGVQAHIE

SEQ ID NO: 423188 - protein, 375 aa, unidentified
MTRIVYIGMDVHKDTYSLCSFDSHENYMFSEITVKSETASVLSYIKNIEKRFNDDVLFVCGYEAGPTGFSLCRDLQKKNISCVVMAPSSLPKSPDAKKRKTDKIDAKDLALHLAHHTYKAVAVLTPEMETIKELTRTRATALKAQKRSKQNLLSFLLRKGMVYPYGGRAKYWTQKFFAWLKTLEFTNAVERYSFEEYLAEVNHQMSRVSRLDEKIAEIADDPLIKDDVKKLCCFSGISTLTAVSFIAEIGDFNRFEKATYFASYLGLCPGVHSSGQSNQTLGITKAGNKNLRRLLIEAAQSMSHSQKCGKKSLRLLSRQKDMNPLIIAYADKATERIKRKRTSMIFRGVHTNKATTAAAREMACFIWGMMTNHIA

SEQ ID NO: 423189 - protein, 368 aa, unidentified
MAKSSTVFVGMDVHKDSIEVGLAEVGGEVRLYGGIGGEAVALDRLVRKLRSVHRELVFVYEAGPCGFWIYRRLAAQGLGCWVVSPAMIPRRAGERVKTDRRDCLALARLARAGELTPIYVPDAQDEAMRDLVRTREDAVCMQRQARQRLQALLLRNEIRYVGKSAWTQAHRRWIAHLKLPSAPQQIAFEEYVQAVEEAGQRLLRLTRAIEAELEPWRWRPVVEALQALRGVSAIHAVRIVAELGDLSRFASPRSLMGYLGLIPSENSSGPRRRQGSITKAGNTSARRALVEAAWAYQHPARVSWVIARRQSALDPRLCDLAWKAQLRLCTRYRRLAARGLHKNKIVVAIARELSGFVWAIAREVKPIA

SEQ ID NO: 423190 - protein, 339 aa, unidentified
MTMIGIDPHKATHTAVAVDRDEQVIAEFTLEASNNQAERLCDWAGGLGKREWAVESANGLGYLIARQLVACGETVFDVPPVLAARVRVFGSGKSQKNDPNDARSIAIAALRSDRLATVRPDDHVTVLRLLVKRHRDMARLRNKHCSRLHALLLEVEAGGIGVKISVTNASGLLDRIDVAGEATRYRVLVAREVVDDIARLDERLRASKNRIAVAVDASGTSLTDIVGVGPIGAATIIGYTKDITRFPTRGHYATYNATAPIEASSGGHTRHRLNPRGNRILNHAIHIAAVTQLRHDTNGRIYYDKKIAEGKTPKEAIRALKRRISDAVYRRLTADTDRQ

SEQ ID NO: 423191 - protein, 391 aa, unidentified
MTILVGIDVAKDKHDCFIMNSEGEVLAKPFTIFNNKEGFDFLYEKIQSVSSSDNIKVGLEATGHYSYNIIGFLLNKGLPTFILNPLHTNLYRKSLSLRKTKTDKIDSKTIAMMLLSDVSLKSYSDISYHNEDLKSLTRYRFSKVEERAKLKTSLSRLAQILFPELEKLVPTLHMTSIYQLLEEFPSASAIASVHLTRLTNLLSKASKGHYDRETAIKIRDAAKNSIGSNMPAKSLELKHTIKLIRALTIDIDEIEAEISKMMDKIASPITTIPGIGRNMGAMIISEIGDFSRFSSPDKILAYAGFSPSTYQSGKLDNCYAHMEKRGSRYLRYALFHAAKLVCHWDKTFADYLAKKRAEGKHYYVAISHAVKKLVRVIFHLEKTKQAFLKAY

SEQ ID NO: 423192 - protein, 326 aa, unidentified
MERAYIGIDLHKAFFQACAISPAGERLWAQRWPTTDAGIAALLATCGPTSQVAVEASSPTWAFVDRVGPHVAAVHVVDTRKTRIKAGYAAKTDRLDAQRLADALRRDSIVGIYYPPPAIRDLRELARSRCHLARLQASLKQRIHALLVRQGVPTPRALFTHRGARWLDALTLAGWAGAELRGLRQVLVDVRTQLAPLLSAMRTIAAQDPVVRRLDQQPGFGVVFSVTLRAEIGTITRFPDGPHLASYAGLVPRVERSGTRAWTGRITKRGSPWLRWVLIEAAIHQFRRDDAFGRWARRLAGRTGALKARVAVARALCTEIVAVWPR

SEQ ID NO: 423193 - protein, 346 aa, unidentified
MEHYVGLDVSLKLTAICIVDQTGKIEREGMVASNPEAIAEFIKSHAPHVARVGLETGATSTWLWTELNKMGLPIICIDSRHAKAALKMQINKSDRNDAVGIARIMQCGWYKEVRVKDLDSHAIKALLVSRALLVKIKRDLENQIRGLLKNLGLVIGRAKMNVFALRAAELTEDRPELAGAVEPLLKAREAIERQIADLDRKVLRLARNDAQVRRFMTAPGVGAITALCFLATIDDPTRFKRSRSVGAYVGLTTRRYASGEVDWTGRISKCGDKLLRSYLYEAANVLLTRVAKWSALKAWGIRLAKRSGLRKAKVAVARKLAVILHRMWIEGTEFKWSSKEATNQSA

SEQ ID NO: 423194 - protein, 354 aa, unidentified
MKPSVVKKKVSPTLHTNTVGIDLGDKFSHYCLLGSEGELLEEGRFRTTREGLGSHFEGLPKMRVALETGTHSAWVSQLLTGLGHEVIVANAGQIPAITGSDKKTDANDAENLARFARFDPKLLHPITHRDKAKQVDLTVVRLRAKLVEVRTTLINTVRGTVKGFGFRLPRCIADAFANKCQPAVPDELRTMLQPFLDHIKNLTKAIKSYDNVVEEIATAKYPEAAILRTVPGVGPIASLTFVLTIGDKDRFGTSRDVGAYLGLRPKRSQSGACDPQLRITKAGDHYLRKTLVQCAHYILGPLGPDTALRQWGLRLASRGGTNGKKRAITAVTRKLSVLLHRLWTTGQHYSSFSS

SEQ ID NO: 423195 - protein, 427 aa, unidentified
MSEEKPLELRVSVDVGYRRHSVAMGLSSGEVLEEFEIDHRIEGFEEFFSRIEKHRKEKNCAVAVAMEGYNGYARPLDSLVRERGYRLYNLNNLKFARFKEIFPGSAKSDRIDARKGLELFQLSDHLPLAKEVLQEVRGTAPENEVLKRLTRRRRRLVNERVRVVNNLQADLQAVCPGLLEITGEASNQWFLNFLLSADSLPQLARLRRSTLLKIPSVGVKSAATIEGWQKRAHFSQEVKWVGEMIQEDAKRCVELDEKIKRLEAKIAEVARGSKIAKIFRSIPGFGAVCTSELAGEIGTIERFASEGSLSLYLGMSTLDNSSGKYQGTKAPKHVNTRAKAAMMIGVDRHRKYVTESQRYYEKKRSEGKKHNQAIRALGRHLSRIIYKMLKEERDYEIRPEKRNTKTKVSPRSCVKTKIRRSKILTKS

SEQ ID NO: 423196 - protein, 416 aa, unidentified
MIDQHDESQKASVPVPIAPTAGIDWASTEHAVAVVDPGGIVLERFRVAHTTPGLRHLVARLHRAGVLEVAIERPDGPVVDALLGAGLGVVVIAPNQLKNLRGRYGSAGNKDDAFDAYVLADVLRTDRRRLQLLTRDSEATVTLRMTVRARQDLVHARVAMANQLRAHLQTTLPGAIGLFRDIDSAITLRFLTRFPSQDKADWLSQARLGNWLRSVGYNHQANLDKLWDHLDQAPRGTTGPEAAARAEITLALVTALTSLRTQIKALEDQIADQLAHHPDAAIFTSLPKSGTVRAARLLAEIGDARGRFPTPEALICLAGAAPSTKQSGNVKVVTFRWAVDKQLRGAVIDFAGDSHHANPWAADLYQRARARHLDHPHATRVLARAWLHVIWRCWQDHVPYDPTKHRALQRVLTQAA

SEQ ID NO: 423197 - protein, 348 aa, unidentified
MTTLARSVSGGVDTHLEFHVVAALNERGGLLGVERFETTTRGYKKLLGWLESFGPVVLVGVEGTSSYGAGLTRHLHTEGIVVVEVDRPNRLRRRRKGKSDPEDAISAARAAFSGDANGAAKTQDGNVEAIRVLRVARTSARSARSQALNQMRSLVSTAPEPIRGDLRGLSVHRLLARASTYRPGANRDVVSLTKFTLRALARRAIELEEEIKTFDAILEPLVSETAPELLSTLGVGPDSAGALLVAAGDNPDRLRSEAAFAHLCGAAPLDASSGKQQRHRLNRGGDRQANSALWHIVITRMAYDARTNAYIERRMNDGQLTKKEAVRCLRRYVAREVFSLLPMDRLTA

SEQ ID NO: 423198 - protein, 445 aa, unidentified
MSEPMPLAKSEPEWAAFAAIDWADQKHFWRLVPAGSSQQEQGELENTPEAVEAWAAALQQRFGGRPIAVCLEQVRGALVYMLSKYAHLVLFPVHPTMAARYRETFCTSGAKDDPGDTASLLDLLMRHRERLRPLQPDTVETRLMQFLVEERRRTVNEKTRQSNRLTDCLKLYFPQVLRWFDGVDTALVGDLLERWPSLEELRRAHPGTLRKFFHEHNCRSEERNQERIDAIYQAVPASHDAAVLEAGALTARGLVALLRTLRDHIDQLDRRIAELVATHPEGALFASLPGAGSVLVPRLIVAFGTRRERYESAYEMQCYSGIAPVKEASGKTSWVHFRRACPKFLRQTFHEFALHSIGQSEWAKAYYQHLREDKNKSHQAAVRSLAYKWIRIIFRCWKDGKPYDEEVYLNSLRRRGSQLGAALAPATGLGWQTVAGFQKLSENKA

SEQ ID NO: 423199 - protein, 312 aa, unidentified
MSSCVTPNRFLGCDVGKASITVFDSHTQRTYAVPNKPAALRAFAKSLDAFCLLICEATGGYEAALLAALVTAGIAAHRADARKVKAFIRSFGTLGKSDTIDAKGLSRYGAERHAQLARWQPRDEDRLNLQSLVLTRHDLVKSHTAYQNRLAAPHSAAVRRHLRRVIATLASEIEKIEAEIRKLLDSSSSLGLATKVLESIAGIGEATAPALLALLPELGTLKRRQITSLAGLAPHPNQSAEREGYRRTRGGLRAVKDALFMVAQSAARHHPELSALYERLVARGKKKIVAIAAVRRKLLVIANAKLRDALTA

SEQ ID NO: 423200 - protein, 314 aa, unidentified
MYYYIGIDVSKKVLNVFDGKKDLTFDNKENLCSLKKYLKKKYPDLSSLVILFEATGIYSHHLKVFCADYHIKASIINPQASHNFAKSLGTRSKTDTRDARTIWAYHKLIDEKDIRIPKVDPVLITLSSYLASYRLTLKQRLSLSNHLEGVKDKILHRLLKKEEERLGKLEHELLVRMDTYIKGYPELNEDYQRLLSISGIGQKTAVSLLTLFHTYPDTNRNQITALMGLDPVQRQSGTSVHGRSRISKHGNQMMRKCLYMPTLVSIQYNQKIKVFYDRLVSKHKPKKVAVIACMRKLLLIAHAIHKNKTIYVPG

SEQ ID NO: 423201 - protein, 348 aa, unidentified
MTKVSMIGLDLAKNVFQVHGIDASGKVVVRRQLRRGSMEKFFAELPRCVVGMEACGGAHHWARVLTRLGHEVRMMPPAYVKPYVKRNKNDGRDAEGICEAMTRPTMRFVPVKTLESQAVVVLHRTRRLLVRQRTMSANAFRSALTEFGIVAAQGLKGLRSLMQVLEDPASTIPDKARMPLRVLARQWEALNTDICKLEAEIVRAAKSDDVARRLMAIPGLGPIGATAILAAVPDARVFKTARDFAAWLGLTPRQFGTGGKQRLGGISKQGDRTLRMLLTVGATAHLRYERTRDTKDPWLQALLGRRPFKVAAVAYAAKMARIIWAMLVTGEPYRAPNRRHSGSVQAAA

SEQ ID NO: 423202 - protein, 314 aa, unidentified
MRYVGVDVSKRKCRAAFIDEDGEIVEEFSFRNDFVGISMFLSRLSLGDRVVMESTGNLWVNLYDALEERGFSVVLANPLKMKAIASAKIKNDKVDARILAYLLRGDLVAESYVPSREVRDLRVLVRYRASLVRARTAIKNRVHSLLDRYGLKHGFSDLFGKAGLEWLRSLELSPLDRLILDGYIEHIECLNRLIRNVEGEIDRRASMDEDVRLLLSLTGVGVYTALLIKSEIGDIRRFPNYKKLVSWAGLAPSLHQSGSIERHGRITKQGSRLLRWVMVEAARTAVRYDCRLREFYERVRRRRGGSEGDCCCCC

SEQ ID NO: 423203 - protein, 412 aa, unidentified
MNIVYERCAGIDVHKKNVVVCAITPEKQGQRQKEHCTFSTMMPDLLRMRHWFQSLGVTHVAMESTGSFWKPIFNVLEGHMEVLVVNAQHLKTVPGRKTDLKDAEWIADLLQHGLLRPSFVPPAWQREVRELTRYRTSLVQERSRIVNRLQKTLEDTNIKLASVASDLMGKSARDMLTALLAGEVDPSVLTELARGRMRSKRDLLSQALQGQLKPHHRFLLSEQLADIDALDEAIERMSQEVAERLRPYEQQIQRLTTIPGIKRRLAEVILAEVGPDMQRFPSARHLASWAGMCPGNRESAGKRLSGKTRKGSHWLRTALVEAAHAATHCKESYLSAQYHRLVLRRGEKKAILAVGHTLLVIVYHVLADEKEYQELGGNFFDEHDRQVVKTRLVQRLEKLGYEVTLAPTSPAA

SEQ ID NO: 423204 - protein, 465 aa, unidentified
MTTGKKLWRNRKERKEWARRLQSEDPGLEVVHPHAAGIDVGNSAHYVAVRPDRDPEPVRRFECFTADLHHLADWLKSCGVKTVVMQSTGVYWIPLYEVLEDRGFEVYLVNARHTKNLPERKSDVQESQWLLKLHTYGLLSNSFQPPAEIRVLRTYWRQRGEHVAGAAICILRMQKVLTQMNVQLANVISDISGLTGQTIIRAILNGERDPLKLAALSDWRVHASQEEIAKSLEGNWRPELLFVLQQEVDMYDTYQRRVTECDQQLQKHLSTFAGTLAVQAPPKGKAKTKKAAAKNAPRFDLSSELQRITGVDLTRIDGIDVMVSQTILSEVGLDMSRWKTEAHFSSWLGLCPDNRISGDKVLGRGTRRVVNRAATALRQAANTLLRSRSYLGAQFRRLRTKLGAPKAITAMAHRLARLVYRMLKYGQAYVDKGTEYYEHRFREQQIQLLTRKAAKFGLQITPIQA

SEQ ID NO: 423205 - protein, 328 aa, unidentified
MKKEFIGIDVSKNTLDVSLHFSKAHKVFSNTAEGINKLLAWADEQVKGFERAFCFEHTGIYSLLLCEFMEQRQLIYYVIPGLELKRSLGIQRGKNDKVDAQAIARYACLFEQELTRHELPSATLLKLKNLLSYRSKLIRQRTAHLNHITELKKVLLQTQDNPIVASSQKIVEMLTQEIRQIEKLMGVQIKRDEKISQTFNNITSIKGIGLILAATLITSTEDFKAFRTWRQFACYAGIAPFEHRSGTSIKGKTRISPLGNRTLKTLLSQAAATALQHDPEIKLYYHRRLKAGKSKMSTINVIRNKIVSRAFAVAKRNTPYVNLVKYAA

SEQ ID NO: 423206 - protein, 344 aa, unidentified
MQHFAIDLGSMESQICVRHPDGQISLERKVPTASLKSYLKRQPKSRVVLETCAEAFRVADLAMGLGHEVRVVPATLVRSLGVGARRIKTDRRDAQVLSEVSCRIDLPSVHVPTHLARQRRSMCGMREELLASRTALINCVRGWARTQLLKIRSGDTATFPKRARDAALSSPDGLPEYAERLLKMIEALNEQIAAADHELEEITAQDPLCQRLMTVPGIGPVSSLRFAAALDDCSRFASAHAVQGFLGLTPGENSSSQRQQRTGITKAGPAPVRRALVQAAWNFRRIRPNDPISLWASAIEKRRGKFVATVAVARKLAGVLYALWRDGSIYEPNHDSKARGVTPS

SEQ ID NO: 423207 - protein, 341 aa, unidentified
MKFVGADLHKKSITFCVVEEADRQVSVVKRQRILCCEPEKIERFLKSLGEFQVAVEATIGYDWFAALAEKYALRVVIAHAGKLRVIAESTRKTDKIDAFILAEFLAHDMIPEAWRPTPRVRSHRTLVRRRHKIQSRITSTKNTMHAILTRYNADRSDLFTVVGWEAAKKLDLLQEERWVLKDLWDELENATERLQRVDARLLDFATRAPAKEREARAVLDTIPGVGLVTIDIVLAELGDWERFRCGDAVVSFAGLDPGVRSSDGVRKDLKLTKAGSPHLRWIMIQLAQRMKRTSPRWKSTFERLSKRIGKKKATCAIARRLLLVIYAMLRDGKAYQLPAAA

SEQ ID NO: 423208 - protein, 335 aa, unidentified
MKSWSVTVLSENSVLKRFVQPPDPDALHKFLTRSYPDAEYYSVYEAGFCGFWIHERLTALGINNIVINPSDVPTTAGERIQKTDAVDSAKLARSLRSKELTGIYVPDSTSLEIRSLIRLRSTITKDVTRQKNRIKSHLRFLGYEIPEEMCSKYWPKRFIVWLRGLEMKTQSGKQSLDFMLDLLENLRKEKLDMTRALRALSRTEQYEKTLELVMSVPGVGQQVGMALLAEIVDIKRFKDAEHLAKFVGLVPMCHSSGESEGVGDITIRKHAFLRTLIVEAGWQAIRQDPAMTLSFETYCKRMKPSKAIIKIARKLVNRIYFVMKWQTPYVTNVVS

SEQ ID NO: 423209 - protein, 456 aa, unidentified
MEAKQNQGVLSMDIINPHAAGVDIGSRSHWVSIGQSEKEIREFGVFNDDLYDIAKWLKENNIKSIAMESTGTYWQSLYAVLIAEGFEVVLCNGKFTKNIKGRKTDVQDCAWIQKLHSIGLLSGSFLPDEQTEQLRTYCRHRANLLDMAASTQKKMQKYLRLLNLRLDIVVNDICGLTGLAIIKAICRGEQNPETLSELRHGNCRKSKEEIAKALHSNGRKDYLFALQQELEIYEQLQIKISTCDKEIEKMFTHIIENDDEKRQHQIGPKSHKRINKNTPKNIDLNLLGYQYFEGVDLMEIEGFSHSTLLTLISEVGLEGIKKFPTAKHFASWLRLSPNNKISGGKVLSNRIPKGSNRLKIALRNAANAIGNLKESTPLRDFFQRISFRKGRVSAISATARKLGVIIWNMVTHGTNYINPAGYLFLDQKRKLGIVKRIQKQIDKFGLTNEDVVFATV

SEQ ID NO: 423210 - protein, 340 aa, unidentified
MRRVIGMDIHRTFAEVVFWEDGRLRHFGRVDMTRSGLEAFGRGLEKTDEIVVEATGNAMSVVRILEPCVARAIVANPMQVKAIAHARIKTDKIDAGVLAQFQASGFLPEVWVPDAATERLRRLVARRNQIVRHRTRVKNEVHAILQVHLVPQCPHADLFNQRGRKWLTRQVLPEDERLAITRHIREIDRLGDDLAELDADIAKDTIDSADVARLLTITGVNVTVASGIVAAIGDISRFSEPQKLVSYVGLNPRVRQSCLGLAQYGRISKSTGASSGVLSADSRQTRSSDRSCRSCPQAGGSGLAYADEKTGLSLASASTRRCQEKADRVEIWRTERTRRR

SEQ ID NO: 423211 - protein, 403 aa, unidentified
MTAFFAGLDWASQSHAVCIIDDHGNVRERVDIAPSAAGLTQLQRSLVRDERPPIAIERPSGIVVDTLLDAGFTVIPIHPNAVKATRPRYRSHGAKSDASDAYLLADLLRTDGHRFAPLPAQSDDIRALRALVRGRDDVVAARTQLANQLRSLLASFWPGAAEVFADVDSPIALAFVERYPTPESAHRLGPKRMAAFCAQHAYSGRRSAQDLLARLQQAPAGVCAEMEMEAKGELARSLARALSQLVEQIRLLSSRIEHHVESLDDGRIVMRFPRAGRICAAQILAELGSVRERFANEARLAAEAGIGPVTYPSGKSRTVTFRCACNHRLRAALTCLADNSRHASAWAAHVYNRARARGCDHPHAVRVLARAWVRVIWRAWTDRKPYDPTRHGAAQLLAKSAGG

SEQ ID NO: 423212 - protein, 302 aa, unidentified
MYNKNNQNEINIGVDTGKTQLDIYIRPLDIFFSVPNDEAGIKKAISEFKKYKPTRIIIEATGRLEHAFIVACSKSNLPFVVANPTHIKKFAGAIGRLAKTDKLDAQLIAHYGEAIKPVLSTLKPENLQLMSDLLSRRRQLMTMQTIEKNRLQIMPKEIPSSIKPMLTALKNQLEKIDTKLSKLIKECDEYKAKNDIIQSMPGVGNVVAFNLLSDMPELGYLTNKQASALIGVAPINRESGIYEGKRMITGGRHSHLLKALVPVFIWILSFVPFSNFFCFRVFKILKLAMSQKPYISVFTCKL

SEQ ID NO: 423213 - protein, 466 aa, unidentified
MKPFYMGIDVSKGYADFMIINAQKKPVIQGFQLDDTFEGHQALYNIVGRFLAKHPNSMLFAGMESTGGYENNWYNALVAFQSSLDIQTARLNPLGVKRNSQADLKKNTTDKISAQNIAEYLVAHPEKVVYQQQDQLAGLRKQWGFVQMLTKQRTQFLNQFKGLLYTSNPELLGYCQSETPAWVLKLAIKYPSAARLKRANVKSVAKIPFVSKEKAQKLVADAKRSVASATDTETEQLIIATARQITHLNQTIDAQSQRMTNTCKLPEVELLKTFDGISDKSAIGLIIEIQTVERFATAKKLVSFFGVHPVYKISGDGVGGIKMSKQGRKQPRHILYMITLAAIKCNPLIKQIYEKYQKNSKHNMAAMGICMHKILRIIYGMLKHNKPFDPQIDIANRQRSAQSKKAAPRKNASRRFQAYDTKAPVSRRQKKKRLERDRSHSVPNTKSGITAPVPVGNIIANILPEL

SEQ ID NO: 423214 - protein, 381 aa, unidentified
MTTAVTHKTNVHTTEATLFVAFELSEKIWKLGFTMGHGQKPRERNVTARHQERVLDEISLAKHRLGLPETAPVVSCYEAGREGFWLHRFFLAHGITNHVVDSSAIEVSRRQRRAKSDGLDVRKLLSMLIRYEQGEHQVWQVVKVPSVEAEDQRHLHRDLETLKRERASTTTRIQGLLSSQGIQVSTLAKLPEQLDTLRLWDGTPIPPGLRRRVLRVYAHHTFLNEQIAAIEAERRAQLQTSSDASIDQIRQLMMLKGIGINGSWLLVMEFFGWRAFKNRREVGGLAGLTPTPYQSGESAREQGITKSGNPHVRWMITELAWSWLRFQPESALSVWFRARFGDGGKRLRRIGIVAVSRKLLIALWRFLETGVLPEGAVLKEG

SEQ ID NO: 423215 - protein, 352 aa, unidentified
MTEAITYRVGFDVAKGVFQVHGVKNEPGEPVAFKKRLKRSQVERFFATLPRSLIGMEACASAHYWARLAQRHGHEVRLMPPAYVKAYVKRNKTDALDAEAICEAVGRPTMRFVPVKSEDDQALVALHRIRASFVAKRTAAANQLRGELSEFGIVAPAGKRGLSDLLSLVESEAERFMGLPAALRLVLAELARQWRRCDEVVRGMDRAIAASVKRSARARRLSWVPGIGPVGASAIAAMLPNPQVFKSGRHFAAFLGLTPREDSSGKTVRRGPITKKGDSYLRRILVQGATSYLAKVRSGRVTGASAWVLRMAAHPKRKLAAVALANKMARIAWAMLAKDEDYRAPAAVLEAA

SEQ ID NO: 423216 - protein, 347 aa, unidentified
MRIVPHSCAVYGVDLGKTTFHIAGADQVGRLTLRIKLRRDALLQFFATASPARVGMEACPGAHWLARKLIAFGHDVKLIPAQFVKPYLKSNKNDTLDAEAIAEAVTRPTMRFVPVKRHEQLDMQALHRVRAQFVHQRTAIVSQFRCFLLEYGIAIHTGIGMFRRDATRILADDSNDLTPTMRQLLTDLWSDFLRIDERVTTLSGQIEASAKHDDVVQRLTTIPGIGPLGASALCAAIGNGKQFRSGRDLAAWIGLVPRQHTTGGKPTLLGISKRGNTYLRRLLVLGAQSCLMHLDRSRDRLGRWLDTLESRRHHNKVVIALANKLARVAWVVLTRPGALYEKMDPRF

SEQ ID NO: 423217 - protein, 387 aa, unidentified
MDPILECCCGLDVHKDMIEACIIQGFENPKKLQQQFLTTQAELQRFNEWLTAADCRYVAMESTGVYWRPVYESIESYFGGDCFLLVANAHQMRNLPGRKSDVKDAEWIATLFQHGLLDPSFVPERTIRDLREFSRTYKNAVSERSRCINRLEKFLQTHGFKLSSVLSDITNDSGIRILTTLSEKGSLSVDDVEKARSRNTKHSATEIQSAVCGTLTANERFLLADFLEQYQVISRHIEKILNKMKSMVEPYQKLIEQMDSIVGIDITASILILAEISDKPQAYFANSAKLCSWAGLSPRNDQSAGKIKSKKIMPGNPYLKSVLCQCARIAVRARKNNFSVWYWSHRAKVGDKKCIIAVSRKMLSTIYYLFANNVFYNTDVALSHLRI

SEQ ID NO: 423218 - protein, 347 aa, unidentified
MTLYCGVDFHSRRQTVCYCNTADGEVKVKDLHHYDDDVRSFYEQFKGEQVIVGYETSGYARWFEQMLFELGTEVWVGDAAEISRLAKRRQKNDRRDAEHILELMLKGEFPKLYRMEVKSQEILRLLRHRNKLVKHSTMVKNSLRRILIETGLIFKEGLASRKAKQKFRDLKLPPLLANERDKWLELLIQLEEQIAGLEKQLKQEAESDERVQRLLTHPGVGLLTALCIVHTLGEVSRFATTRKVAAYAGLEPMEHSSGEKRRYGVISKAGSRLLRFLLGEAAHMAARSDEELKQFFRRLKTKCGMAKAIVATARKLLIRCFIMLRDGIDYAEFRQRGIEARSARIYT

SEQ ID NO: 423219 - protein, 387 aa, unidentified
MTYYVGIDIAKLTHFACIVDPYGQLFTQSFPFENNAAGFDLLLSHLSNFSIDNLVIGFESTAHYHENLAHFLTRHSYHFHLINPLLSKRFRGLSIRDVKNDKVDALTIANFLFVNRNHSSSNSFFINELAFLSKERDNLIKLRSKELIRLTSYLDRVFPELKPFIGNSFKSKGFLNLFKKFSTAFEIKETRIDALSNTLNFKRRSFSIDFVKQIKSLAKCSVGYHSDALSLIIKNIVYQIEFLSSQLDIIESLIKSHPLVLDSALFQIPGMGYIQIAYILSAIQNISRFDTPSKILAFAGLDPKIRQSGQFSASYTRMSKRGNKLLRYALTWSANNVRNNSSVMNAYYLKKRSQGKSHYNALGHCAKKLVNYIFFILSNPDKDFFLS

SEQ ID NO: 423220 - protein, 422 aa, unidentified
MDKERRWFVGIDWASQEHVVSLCDGEGKKIGERKFPHSGSGLAEMIAWLLKASGGEPDQIHVAIETPHGPIVEVLLERGFNVYSINPKQLDRFRDRFTVAGAKDDSRDADVLADSLRTDTRAFRKLSIAEPVIVELREWSRIDEELKVEHVRLTNRLKHQLWRYYPQMLELADDVGANWFLDLFEAVPTPEKAANVRGKTIARILKKHRIRRFDATHVLGELRKPALIVAPGTIEAATASIRGLIERIRLINGQLADAQRQLERLCKKLSEPVADGNGETAPGQKNEQRDAAILDSLPGVAWTVLATLLAEASDTLQRRDYHALRALCGSAPVTRRSGKSSVVVRRHACNQRLRNATYHWALNAIKHDATSRAKYDALRAKGHGHARALRSVIDRLLNVACAMLNSGTLFDPEFASKRATTA

SEQ ID NO: 423221 - protein, 329 aa, unidentified
MQTILHNCCGMDVHKDSVVACILKTREPVSAPRKREAVDKEIRVFGTFPNDLAQLRAWLEAESCTHVAMESTGVYWQPIYEALETAHNGEMELLVVNAQHMKNVPGKKTDMKDAEWIASLLRSGLLSGSFIPSQDVRELRQLTRYRKNVTQDISTQKNRIEKTLQQAGFKLSTFLSDVFGVSGRNLIRTLIKNGRLSPLDVETQTKRISKEKKAEIKRAITGQLTEKQRRFLQLQTTLLDGLLEHLQSIEASIEELSAKWNDDIDRLSTIPGIGITSATAIIGEIGSDVSKFPTAEHFCSWAGLAPGDNMSAGKKKVQESLSATHISKE

SEQ ID NO: 423222 - protein, 429 aa, unidentified
MDVMHERVAGLDVHKATIVACVRAQIGREVRRECRTFPTTTDGLVALLEWLTAGRCTHVAMEATGVYWMPVWKILSDGDFALIVANAAHIKNVPGRKTDLNDAMWIADLMACGLINASFVPEEDLQELRSLMRSRKQLTREQTRHVQRIQKTLTEANIRLDSVICDIIGASGRRIIEAMIAGVRDPHRLAALASKRVKATPQELHDALHGRLTDHHRFLLKLHLRQCDALDAAIRDIDGQVDAQISRMDQQLKAATERGAKAVPFRELIKLLCTIPGVSVLAATMILAEIGRDMSRFPTAGHLVAWAGMCPGQNESAGKRKSAGLRKGDPWLKTTMVQCAWAAKRKKDSYYKAQFFRIQSRRGPQKAICAVAASILTAIYHMLKDGTEHRDLGIEYFNRRSTEAQTKRLVAKLTKLGFEVQLQPTAKAA

SEQ ID NO: 423223 - protein, 402 aa, unidentified
MKASKQYLRFCGIDMAKQKHVACIIDQDGQYLLRPKSIRNDADGFGQILNCLKQTGRAKSILVGMEATGHYWYSLHDFLTRQGYTVAVLNPIQTAQQAKQAIRKCKTDKYDAFHIANLLRTGQYKAAVVPNELAMTCRQITRLRYRIVKQAAMIKQLVNSRLHPVWPEYEGLFSNKFGTTSMKLLQTASTPKELMELDLDDLGELIRKASRGRFGPAQTQKILHCAKNSVGMQRGHYGISTGIKFLLEQIEALEPVRKKMDAEVVKLTAKVPEYLFTLPGATELTVVSLYGEISPIEAFKKPSQLVAFAGLDPKVFQSGQYDAPRRRISKRGSPYLRRSLWQMAYRALCTEGDLRDFWRRKHRQNKHHLVAVTAVANKLCHIVWRIMTDRRDYIRKGYNPKS

SEQ ID NO: 423224 - protein, 381 aa, unidentified
MTRATRSAEYTGPAAPCLYVAFELGMAEWKLGFTTEPGATPRVRTVPARDLARLAREIADAKKWYGLKAATPVRSCYEAGPDGFWLHRYLTSSGIENAVVDSSSIEVKRRLRRAKSDRLDARKLLGMLLRYHAGERGVWSVVRVPTVGEEDRRQLHRELRTLKKEHTRVKNRVQGLLATQGIRLPKGTNVGAALATVRLWDGAPVPPALHARLGRDWEHARFLHAKIRERERERQRAIADGRGPAIDQVRQLLRLRAIGPSGAWVYVNEFFGWRRFRNRKELGAAAGLTPTPYQSGDGSREQGISKAGNRHIRAVAVEMAWAWLRYQPRSHLSRWFQARFSRGGPRARQVGIVALARKLLIELWRFLELGVVPAGARLKPA

SEQ ID NO: 423225 - protein, 350 aa, unidentified
MSQTPKTVGIDIGKNSFHVVGHDERGAIVLRQKWSRGQLEARFANMSPCLVGTEACVGAHHLSRKLKALGHDARLMPAKYVRPYSKGQKNDFRDAEAIAEAVQRPTMKFVATKTADQLDLQALHRVRERLVSQRTGITNQIRAFLLERGIAVRQGQRFLRAELPRILATPPEVLSPRMVRMIEGLTGDWRRLDERIDGLSGEIEAIARRDDGCERLMSVPGIGPIISSAMVAAIGTGDAFSKGRDFAAWLGLVPKQMSTGDRTILGKISKRGNRYLRVLFVQAAWVVLIKPKIWERHGLKPWIEAAKKRLHPNVLAIALANKLARIAWSVLARGRGFETSVITNATAQTA

SEQ ID NO: 423226 - protein, 433 aa, unidentified
MLKLNYMSTLFVGIDVSSKTNAVYAMDFEENKYISSSFGNNQPGADKLVNMIAECMHKHKNLDTVLIVLESTSVYSVHISNFLSTSEVLMPYKPYVFCVNPKATSNYRKSYIGMEKTDPTDAYLIADFGRVGRTKKLEPWRGGQFIALKRLTRHRMHLSECITREKTYMVSNLYLKFSELQLLEGDDKPFGSLYGATSSAVLTEFLSPQEIIDMPEEELLTFLAGKSRNRISDLSKTSELLRKAARDSYRLDKCMYEPLNVSLASSFNCIHAYQKEIKLIEQAIEKCINGMNPNALLILQSIPGIGPIWASGILSEIGDITVFHSSDALAKYAGLYWPKGDSGDFTSEDNKMSKAGSPYLRYYLGEAANSVRKHIPEYADFYARKYAEVTKHQHKRALALTSRKLVRLVFGLLVKNQLYTGEKLDAEYNIKSN

SEQ ID NO: 423227 - protein, 358 aa, unidentified
MTETPAAVSLTVYAGIDTHKHTHHVALVDALGRRVTDREFPTTGTGHRQLLAWMAGVGAVARIGVEGTGSYGASVTTALRAAGLDVVEVDRPDRHARRTHGKSDPLDAYAAATAALTGRATTVPKTHDGDVEAIRFLRNARRSAVKARAEAIAQLKAMLVTAPEPVRGGLRELSDTALISTCAGLRPGPVVPGDPTAAVKTALRSLARRILDLTEEERTLHTHLETLVAHTAPELLDRMGIGVETAAQLLITVGDNRHRIRNEAAFAHLCGVAPIPASSGRTHRHRLHRGGDRQANRALYIIVITRLAHDRRTRDYMARRTAEGKSTREIIRCLKRAVAREVFRLLTTTGTPNPLDGT

SEQ ID NO: 423228 - protein, 471 aa, unidentified
MVCFNPSTKLTRVRPAELIVARWKQLSTRRKFVSYFAPLVDLSEDEERLLREVGTGMQVVHERCCGLDVHKKTVVACILITLANGEVQRHIRTFSTMTAGLLALSDWLESLTVTVIAMESTGIYWRPVFNLLEDGRTVILVNAQHRKAIPGRKTDIKDSEWLADLLRHGLLKASFIPPAPIRELRDLTRYRKSLVQERAREVNRVQKVLETANIKLSSVATDVLGKSGRDMLSALIEGTTDVEILAELARGKLRKQLPQLQQALDGRVQAHHRLLLKHLLAHIIFLEETLEQLQQEIEQHLCPFEETMTLLMSIPGIAALAAAAILAEIGDDMTRFPSAKHLASWAGVCPGNKQSGGKRLSGKTTQGNATLRAMLAEVVWVLSHMKDNYLSAQYHRLARRLGKKKAVVAVSHSLLVIIYHVLSTKQPYSDLGADYFEQRDSARLTQRSVRQLEALGYTVTLVPKEAAQRIG

SEQ ID NO: 423229 - protein, 369 aa, unidentified
MKERITSFVGLDTHIGSSAIGVAPIGRQEPHFVGTVPPQLGALSRALARLGKPEALRIVYEAGPCGYTLARQLRAHGYACEVIAPAKVPRRPGDRIKTDRRDALLLARAARAGELVSVTIPDERDETIRDLCRAREDAVRARLKARQQLKAMLLRHGRHYIGRSSWTAAHELYLASISFKHPAQDIAYAEYRSAVRERNERVENLTKAMGAQLEHWRMRAVVEALMTLRGIDLVVAMTLVAEIGDFTRFARPRELMGFLGLVPSEYTSGDKRQQGEITKTGNSHARRVLIEAVWNYRFPARMSTNLQRRQEGQPKAVRQIAWRAQLRLAKRYRHLSARKLPANKIFVAIARELSGFIWDIGRQVKPLAS

SEQ ID NO: 423230 - protein, 404 aa, unidentified
MATPSQVSVWIGLDVGKGEHFADVLDDDGERLFARAVANDQADLESLLDRAARHGIPGLVIDQPGSIAQLALAVAARRGTPVAYVPGLVMRRAADLYPGEAKTDRRDAYVLADTGRTRRRQVHWLDAGSDELLASLRVLNGYDIDLAADVTRLASRLRDSLTAIAPALERAVGERLHQAGVRDLLMDYPTLTALRAAGQPRIEKAIRTRSPRIAAKVTAAVTRAVAAQDLTVPAEAAAGRVIADLARELDRVSARRDALAAEIEEAFLAHPFGELLATMPGIGPRTGARILAEIGDGSAFATGSKLAAYAGLAPVARQSGTSLNAATRSQRGNHRLKNAMFLAAFASLRDPASKAFYDRKRTEGKRHNAALICLARRRCDVILAMLRTSQPYQPARRPSLAIAA

SEQ ID NO: 423231 - protein, 351 aa, unidentified
MCLAIGIDVHSKKLTSFAVPQNDEDIEETEFCMEFNKEFRSTPADRATLSRAAYWLKDREHLILIENSTKTHEVFWILTDLGCTVVVANASDLFRITMSVKKTDYHDCRELAHYARRYLDGEKEFSTCLMVTAEQLNRRQLCRTYAHASSDLSDLRRRIRSYILARGIAVSVPGRDIVSEATLRELDKVADSSMRLLIDEARHQRDRMRRIKNEILKEFKDDETFQLIYSIPGFGIVTASYLSAMIIDIDRFTSPGAYAAYHGVVPKQRESADHSVRCGITRRGDDIAREMLVTGTFIHISQDKDRVSDVSRFYDRLRNRGFPHKKALLACSNKMAHKIYTILKTKTPYRS

SEQ ID NO: 423232 - protein, 363 aa, unidentified
MNSVITNTELSSLEGTRCQFNGSRAVIKLGIDVHQAYYVVVKQEGGTNPKPAQRLRKEAFLLWVAKLKSQGSEVHAVYEACGFGFGLQRQLSALGITCQVVCPQKLDERNKRVKTDGLDAKALCLKLDRFVQGNRDALALVRVPTEEEEQKRAIHRQREQLVKARKQLEAQGRSLMVNHGFEPTTSWWKPRTFALLQVPAWMKELLSNSQPILVALHEKIRTLTQRLQAAAEAGQARGIGALSSVVIDREVGNWNRFTNRRQVGSYTGLCPGEYSSGNTRLQSCVTKHGNPRLRAALVETAWRLVRFQPHYKPVAKWRQILAKGALATKAARKKAIVAVARELAVDLWRIRTGRVQVEALGLF

SEQ ID NO: 423233 - protein, 448 aa, unidentified
MAAHSVSQTPAMVVPSQLERHWQQAFRQRWQAVAPAQWRCIGIDVGKYEHVAVAYDGLGQLLAPPLRFGIRASDYQTLFAWVATVTPDPAVPPLFGLEPTGHYYEQLVYELAQQYGPKQVYIVQTTDVARRRADWNQGTFKNDEVDAAIISELLRQGYGRPYHPDEGAYLSLYQLERYRWAREQASTRLKNQIVGHVDRLYPGLVISDKLLAERYRPLLRNLWADETPRRLLTLYPDPRALRSADVDTLCQRFRTAGYWMTRPYAAKILAAVQALSLPDAELGARRSTFLQRDLASLAYVEQQLAEVAGEMVDQLDLTWGYWLRPSGVEPLRLACLVATVGDMRQYHSARQLFGRSGLHSGCRDSGTRQQHGQGERMVKPGDRHLRRQLLRFTLSMLAHYPTLQTYRHRLLQRGKGKITANIAVARKLCGVLYTLASQERPFDPTRLT

SEQ ID NO: 423234 - protein, 343 aa, unidentified
MDQFAGLDVSVNETSVCIVDETGKIVREVKVASEPDALLTVLKNRTYHFKRIGLEAGPLSQWLYSALAEAELPVVCVETRHMQAVLKAQINKTDRNDARGIAQMMRVGLYRPVHVKTLRSQKLRMLLTHRKLMLSKAIAIENDLRGTLRNFGLKVGMVGTVKFEARIKELIENLPDLAVLVEPLLVVRRVLREQIGILHRRLLVIVRDDAVCRRLMTVPGVGPVVALTYRATVDVPARFRNSKAVGAVFGLTPSKYQSGEINRTGAISKCGDEMMRVMLYEAAQVMLTRTNKWSWLKAWAMKIARHRGMRKAIVALARRLAVILHRIWVDGTDFRWTREVAAA

SEQ ID NO: 423235 - protein, 354 aa, unidentified
MSRKRTDAALVFIKPERLQAPIASAHAQAGDAKTMSESLVVVGIDVAKAHVDCAVLGADFGARQFANDIDGHSVLAAALQPLAVALVVMEATGGYESALACALQAAGLAVAVVNPKRARDFAKGIGRLAKTDRIDAEALAELAATLARRRDLARFIRPLPDAQQQELAALVTRRRQLLTMLGAERLRLQLATAKIRPSITALIEAIRAQLEDIDAQMQAHVQEYFASLDELLRSARGIGPVASATLIATVPELGRLSRREISALVGVAPMANDSGTSHGRRRITGGRFQVRRVLYMATLTATMHNPTIKAHYQRLLAAGKLPKVALVACMRKLLTMLNAMVRTQRPWSDEFHRA

SEQ ID NO: 423236 - protein, 312 aa, unidentified
MKLYGGIDLHSNNSVIAIINEHGETLTAKRLNNDMSVILSFLSPYKDNLKGLVVESTFNWYWLVDALMDEGFKLHLANPAAIQQYSGLKHADDHSDARWLAEMLRLNILPEGYIYPRELRAVRDLMRKRMDIVQQSTKNLLSVQSCYMRHLGYKLSSNKIKQMAAIRKGVNVEQVHADFSSMNTALSVISNLSLIRCAQQQINVIEGAILKQTSPSSEFINLTSIDGIGNTLALTIMLETGTIKRFDSPGNFSSYCRCVKGARYSNGKKKGATNQKNGNRYLAWAFTEAANFAIRYNPTIKKYYQRKLAKTN

SEQ ID NO: 423237 - protein, 339 aa, unidentified
MKLKRIGLDLAKNVFQIHGVDSHEQVKLRKQVKRGGLLDFFRQIEPCIVAMEACGSAHYFAQQLGKMGHEVRLIAPQFVKPYVKSGKNDANDAQAICEAASRPSMRYVTVKTPAQQTGQALHRVRSRQVGARTAVVNEIRGLLAEFGLIGSVKGVSACRHLLVDVLEDAENGLPGAMREVLAQLLEELGQKDAHIAKLDEQIKRQAQDDERIRRLMAIEGIGLIGASAMVAAVDDARQFKSGRDLSAWLGLVPKQHSSGGKERLGGISKRGDVYLRTVLIHGARSVVNVCRKKNDRKSQWIKGLVMRRNKNIAAVALANKNARTIWVLLTRNEDYQAAA

SEQ ID NO: 423238 - protein, 414 aa, unidentified
MKTCLFVGVDTHKYSHTAAVLDSYFEVVATISFDNSTEGFNHLFDKLKKLISGRDLVFGLEDSQGLGSFLACYLTGKGHLALEINPVSTDRGRKHTVSRDKSDKKDAIVIAKTLIRERANLHPVRINRNSVALREMVGYRHTLVSESTRIKNRLHVALFNQYKGILGQFGSLFGKCALAFFARYPDPFLLNKVDPDTLSVFLKANSKGRYGIKKARAILANLDSSIPDSLTGTRAHIIESHTERLIQIGKELKKIQEVLEELVKASSYGCLTSIPGIDTVTASKIISGVMDIARFSSSSKLARFCGIAPAEKSSGKKIRYQKSKYGNKSLYSTIYFMALAHISRTRDGRDKNPISRAYYLKKISEGKTKKEALTCLTRRLVDLIYAVMRDRSIYNFSKSRFTKQYDSVINTAVA

SEQ ID NO: 423239 - protein, 328 aa, unidentified
MLNYIGIDISMQSLKLFDGKKEYEVPNERGLKNLEESLKVIYGKDWNNVLFIYEPTGPYSNFLKEFSLKHRIEVYEINPKKSSNFAKAIGNRSKTDSIDAKMLYSYHLLIREDKFKVPLIDPITEKLASFLRNYKLIQKMKIMLSNHIHSQKFVDKDNSVTNLSKFIEKELERFSETEAKLEKKIENWVRNTDEIKEDFNNLLSIKGIGVISAIVLLYMFRKYPDTNRAQITALCGLDPVKKESGNSVKGEKRISKAGNPLLRKILYFACMNAIKHNDRINLYYNRLINNRKPGKVALIACMRKLVLIAHQIYVKKEKYRPLVINENI

SEQ ID NO: 423240 - protein, 371 aa, unidentified
MSAMSKTPSRVVIAIDPHKASWTAAAVDASSQALATVRVPVSRDGYRALRRFARRWPDSAWAIEGASGLGAPLTARLRTDGVDVLDVPAKLAARVRVLSTGHGRKNDEADAISAGIAALSARRLTSVAVEGTVSALRAIVEHRDDLVKTRTQTVNRLHVVLTSLVLAGAQRDLTADRAAELLRGIRPRDAAGKTLRSLAVDLVAEIRHLDRRITKATADIQTAVSASGTTLTELCGIGELTAGKILGRVGTISRFRSAAAFASYTGTAPIDVSSGDVVRHRLSRAGDRQLNCCLHVMALTQIRQDTPGRAYYLRKRTEGKGNKEAMRCLKRRLSDVVYRQLLRDATRLGAGPGGHSGAALQSSAASSNPAH

SEQ ID NO: 423241 - protein, 326 aa, unidentified
MNIIGIDVSKKKLDCLWLKDQVTGKIKTKVFANTAKDHQALIAWAQKQSKQPIESIHFVMEATGVYHEALAYALYQAGAQVSVVNPAKIHNYAKSFGKRSKTDKRDSQILAHYGMTRSPRLWCPEPDNVRQLKALLARLNAVEKDIQREKNRLEKAEITQVSNEIVRSIHTVLTHLTDEKKRLADLINDHMDQHPGLKQDRQLLESIPGVGPVVSRMMTAVIRSRSFDSAGQCAAYLGLIPVLQESGTSVRGRPRLSKAGDSRVRATLYMAAVVSIQHNPDIKRQYQRLLKNGKSKMSALCAAMRKLVQICFGVLKHQQPYRAQCL

SEQ ID NO: 423242 - protein, 342 aa, unidentified
MDHYAGIDVSLESSSVCVVDASGKIVREDKVASEPEALTGWLGGLGVELARIGLEAGPLSQWLYAEMKDAGLAVELLETRHVRDAFKAMPVKSDRNDARHIAQLMRLGWFRAVHCKSMGAQETRALLTARKLVQSKLRDVENSLRGILRGFGLKVGKTTARTFAGRIGELVAGHANLETVAQALLAVHAVLLREFKTFEKRVRTAARSNAQARLLMSTPSVGAIVALTYAAAIDEPARFKSSKRVGAHFGLTPKRYQSGKTDFTGGISKIGDASVRTALYEAAHIMLTKPVKGCSQLKSWAMKLARRAGMRKAKVALARKLAVIMHRMLVDGTPFNAAATAA

SEQ ID NO: 423243 - protein, 349 aa, unidentified
MEHYAGIDVSLDSASVCIVDAQGKILKEAKVACEPEALIAWLATHGAPMARIGLEAGPLSQGLFAGLKAAGLAVELLETRHVRAAFKAMPVKTDRKDARGIAQLMRLGWFRPVHCKSLPAQEVRALLTTRKLLQAKRQDVEMSLRGVLRGFGLKVGPTTPKTFAGRVRDLVAQHDTLRTIADALLKVRAGLEQEFRAIEKRLSALARTNAPTRQLMTTPGVGAIVALTFAAAVDDPARFRSSRRVGAHFGLTPRKHQSGETDVTGRISRIGDHGVRVALYEAANVILTRAVRGSDLKSWALRVAQRAGMKKAKVALARKLAVVLHRMLADGTPFMASQGAGTRAVAGAA

SEQ ID NO: 423244 - protein, 345 aa, unidentified
MPQWGWPEQLLGLEDRILLDRASLLYKEGGHMAEENVYIGVDVSKAWLDIAVEPGGESWRIENSDSSMAELVKRFIAVDPRYIVVEATGGYEAMLVTRLCEAKLPVARVNPGRVRRFAQGLNWLAKTDKIDAKLLAWFGQKANPRLTQLPNEHEKRLGTLVKRRKQVLEMLVAEQNRIETADPEVLQYIQDSVSMLQRQLDELDQAIQSLIDQTPSLKSRQDLLLSVPGIGKVTAATLTSQLPELGSCNRKEIAALVGIAPFSHDSGRKRGKRFIKGGRPSVRSVLYMATLTATRCNPVIKVFYHRLLQAGKEFKVALVACMRRLLTILNAMIRDVRPWQPVSTS

SEQ ID NO: 423245 - protein, 471 aa, unidentified
MSCFRGAIQNRLRKEDFMKKQDSYDYYVGIDCAQNKHDFAIKNNQDKFLIKKGHFSNTLLGYEKFLKTVLSKCLNKDKILFGMEVTGIYGTNLYERLSSDGYHVVMISPDSVKKYRDYKRLNKTDKIDSACIAELLLNGDAQIVHVQKNGYTDLKAYIRRRNALKVTCTQETNRFLAKVCLYFPDLLKVFPSGRATLKAVFSIYPTPHSIIETDFDELVSVLQKASKNKFSVDKANELIHAARNSIVVRKSISDGELYNIHSLIDSIDSLESEIRNLDKIIDSKAEEFPAYRVLLTLTGCGKITAATILAEIGDISRFHKASQIVSLAGLYGDNSKSGSSVNKRGKISKKGSRYLRHAIYMVAEFARRNNPIFKAYFTKKKNGERIKHTLAVNAVANKLCKVIYSLLKNQSTYIIQYRDLAKLSESTQDEFFQNAETDFSAKTRRKKYLYEDEYGKLHEFVFKSNKCALIE

SEQ ID NO: 423246 - protein, 340 aa, unidentified
MRLVGVDLHTREQSIAMVDTETGETCELRLRHEGDEVEQFYRSLAPPVTVGIESTGYALWFHHVMHQLGHTLVVGDAAKIRATVVRRTKTDRRDARQVLTLLREERFPVIWVPDPSTRDLRSLVAHRIRLVRIRTMIKNGVHAIALNYRLTLGRSLFTRRGLAQLRALPLPPHTARRRDESLELLAQLDGQIDQLEQRLVDVAQGDPEACRLMTHPGVGALTALATLVTLGPVSRFPTSKHVVSYVGLAPAVASSAGKHHVGRITKQGNATLRYILGQAAQSAVRGDADLKRLYYRVLQRRGKARAKVAAARALLVRIYIMRRDSIDYEEFRRRGIARAA

SEQ ID NO: 423247 - protein, 341 aa, unidentified
MSEVRIIGLDIAKSVFQLHGVDDAGATVLQKRLTRARLLPFFEKLPPCLVGIEACATSHYWARELGKLGHEVKLMPAQYVKPYVKRQKNDMADAEAIAEAVTRPTMRFVGQKSPSEQSAMMLHKVRLMLTRQLVMITNATRAHMAEFGIIAPVGRSGVDRLLAIVDDETNEQIPAEARRCLQMLVAQLKLVKLQILDNDRQVLALARSTEIGRRLMEVPGIGPLVASALVACVPDPSMFRCGRNMAAWLGLVPKQNSSGGKERLGSITKAGNRYLRQMLFAGAMAVIRRAMQGTRRTWLIRLLERRRPKVAAMALANKNARIAWAMMTSGEHYREPIALAA

SEQ ID NO: 423248 - protein, 365 aa, unidentified
MASISRVAPIHLGLDVHKDTISVGILPADQQIPDVERITHDEASIRRLVGRLGNPRMLRACYEAGPTGFELARLLHSMEISCQVIAPSLIPKAPGDKVKTDRRDCRRLARLHRAGELVGVRIPTVQEEAVRDLCRTRSDMVQDLTRARNRLGKFLLRHRRVWRGGASWTLKHQAWLGSQRFDQPAMAQTFGHYLAVVEIRNAQLDAVEADLAGWCDRPPFDWQVARLAAYRGVTRLGALTLAAEVADWRRFATASQFMGFCGLVPSEYSSGASVHRGRLTKAGNAHLRAQLVESAWAYQHRPAVGVQIARRQQGLPPEVAARAWAAQQRLCARFRVLAARKNVKSIVAAAIARELAGFLWAEMTA

SEQ ID NO: 423249 - protein, 370 aa, unidentified
MLDTTTFVGLDVHARSIKAVSLDVMTGEVRAATFGYDAGAVAEWVRSVDPEARCVYESGVTGFDLQKRLSGLGVGCAVGAVSKMIKPSADRRRKNDRNDAEFLARMLSVGNVVEVWVPDDECEAARDLTRALEDARDDLSRAKQRLSKFLLRHGLVFDERTPTGRRKGNWTRAHWSWIESIGFAEGADNDVLAYYVDAVRRAAEEKARLEGLVEAEARKPRWRRRVDSLRCLKGVDTATAADLVFEAGEFSRFGNARSFASWVGLTPSEHSSGESDRRGAITKAGNKHLRKTLVEAAWHYLTCSARPKDLARGQDPDRDARRHAAKGVRRLVERRGALLARGVHGNKANVATARELACWVWAVGLMAEEA

SEQ ID NO: 423250 - protein, 582 aa, unidentified
MSAERVERRLAAILAADVAGYSRLMERDEAGTLARLRTLRRDLIDPKIAEHKGRIVKTTGDGILIEFPSVVEAVACAVALQREMAARNDATAEDERIQFRVGINSGDVIVEDGDIHGDGVNIAARLEGIAEPGGICVSGIVHEQVQGRLDCAFEDIGEQRLKNIARPVRVYRVGPKSPLPDPLVPGLDGVDGPLTASVCQSWVVDNTNRREPSMKEVTTIGLDLAKAVFQVHGVDAVGAVTLRRTVRRRQVLAFFAKLPPCLVGMEACATAHYWAREIGKLGHDVRLIPPAYAKAYVRRNKNDPADAEAICEAVSRPSMRFVAIKTEGQQAAAGIHKVREMLIKQRTMLINTLRGLMAEFGVVVAEGPQHVGELVAILADPANRRIPTPLHEGLLAIVETLRGLERRIEIVDKQIVGWGRGNATCRHLITIPGYGPILSSAMTAFAVDPAAFASGRHFSASLGLVPRQDGTGGKVKLGPISKRGNGYLRRLLVNGAMAVLCSKQAKADPWLVKLLETKERKVAACALANKMARIGWAVMVRQEDFRSRRHDQPCADLNQLGAVLTAVKTASRAPSAVAFGQS

SEQ ID NO: 423251 - protein, 433 aa, unidentified
MSLDPHEEPAAIQTHIGAIFISLELSRSKWLITSLVPGGGQRMSKHWVEAGDLAGLLARFWAIRDKVLARTGKSYPIVVIQEAGLDGFWIHRSLVKEGIESHVVDAASIAVSRRRRRAKTDKIDGEGLLRALLAFKRGEPRVCSMVRVPTPQDEDRRRICRERKTLTAERIRHVNRIKGLLFSQGIGDYEPLRRDRRRALEAARTGDGRALGANMKAQIGRELDRLELLLGQIAAIEAERDAMLARQAEAEAVQGAQGAPARVQKPMDLNGPGAETVPEAEAAPGVQSAQSAQSAPAHVQKLMDLNGLGAETVAMLSTEAFYRSFDNRRQLAAFGGLAGTPWKSGSIDHEQGVSMGNHRLRQTMIQLAWLWPIHQPNSALTRWYRERTKGATKLQKKKMVVALARKLLVALWRYVDAGVVIEGAVLKRAARAR

SEQ ID NO: 423252 - protein, 458 aa, unidentified
MVTSRPKGNSVSKGMPIVHRHAAAMDIGSTFHVVAVPADADGEPVRKFSSFTGDLHRLADWLKHVGITTVAMESTGIYWVPVYEILEERGLEVVLVNARDAKNVPGRKTDVNDAQWLQRLHECGLLRASFRPQETIVALRTYLRHRERMIEFTASHIQHMQKALMQMNLQLHHVVSDITGLTGMQIIRAIVQGTRDPATLSKLRDVRCKASAATLCQALTGNYRAEHLFSLRQAVELYDTYQEKIQDCDKEIERCLSQLNANREVPAAELPKRRQRRLCRSEPAIDLQSGLFTLVGGIDLTQIHGLGPYSALRIVAECGTDMTRWPTVKHFTSWLTLAPGSKISGGKVLSSKTRRSSNRATSLFRIAAIGVGKTSTAMGAFFRRLAARVGKARAVTATARKIAVLFYNTLRYGWAYKDPGVDYYEERYRQRSLDNLRRRADLLGFKLVESTASQIGVS

SEQ ID NO: 423253 - protein, 364 aa, unidentified
MKVLIGVDPHKASLAVAALEEAKGELLEHASFPQNRAGLSALERWARRFPERRWALENACGLGRHLAGRLAGSGESVVDVPPKLSARVLVLSSFAGNARKNDELDALAIALAASRNERLAQVDPEAASEVLRLLSERREDLVAERTRALNRLHGLLRDLLPGGVAGTLSAERAARILRGIRPQESASSRLRRRLASEMLRDIRMLDRKVADLNGRIEAEVEASGTTLTEIFGVGPILAARIIGTVGDGARFPTKACFASYSGTAPVEASSGEVVRHRLSLAGNRHLNNALHMVAVCQARSAARGGAYYRKKIAEGKSRKEALRCLKRRICDAVFKSLVADSQASSRSAAWQRGAENAISTHSGE

SEQ ID NO: 423254 - protein, 390 aa, unidentified
MTYYVGIDIAKYKHDCFIADDSGCVIRDSFSFTNDKDGFNVLLSILKVLKPKGQIKIGFESTGHYHFNLKLCLEANGYDYVEFNPLLVHKFSSTQTLRRTKTDKKDAQLIAKYLMTVDYKPYVNPFYHINNLKSLTRLRETLITDRTRFLNQITSYLDQIFPEFKPLFENGLNESAFYLLTHYMTPAKLSKLDSNKYSKMKSELKRPISYQKICQIKDAAINSIGHTSKALEYALRLSLNVYLYLDNQIDDLESKIIEIYDSLNCHIHTIKGIGKLTAAGILAEIGNFSKFLTPAQIQAYAGLEPSKNDSGTHDGLGIMVKHGSSYLRKYLMNSAETFYVYNPSISDFYWKKRNEGKHHRVALSHVARRLINTIFYLEKHNQDFDSKLVK

SEQ ID NO: 423255 - protein, 337 aa, unidentified
MNVTTVGLDLAKNNFHMVGLDDKGREAQKKRFTRAQVLRYFANLPPCVVAMEACASAHHFGRELTKLGHTPKLIPPQYVKAYVRGQKNDYNDARAIAEAARVPSMRFIAVKGVAQQDLQALARMREGVLRTRTALVNRTRGLLAEYGIVRGKGVATLRRALPELLEDAANGLSPLFRRLLVQARTELTELDAHLEVLTQELKAAAREDDAVKRLQSIPGFGPIVSCVFAASLGDGRQYKNGRDASAALGLVPRQHSTGGKPLLLGISKRGDRYLRSLVVHGARSVVRAAKDKDDRLSRWVKHLCDTRGMNKATVALANKLARIGWSILSKGGVYQAA

SEQ ID NO: 423256 - protein, 342 aa, unidentified
MQVTSIGIDLGKTNFHLVILGEQSKVLVRKKFSRKQLLAFTANLPSALIGMEACSGAHFIAAAIRGQGHEVRLIPAQFVKPFLKSNKNDFLDAEAIAEAVARKNMRFVPIKSDEQLDLQALHRVRDRLVQRRTAVINQIRGFLIERGITFPKRPSNLRKNMAALLEDAEANLSPGMRRLLEGVWQEWKQLETHIAEADDEIERFAIADAGCQRLRQIPGVGPLASTATVAAIGNGAAFRKGRDFAAWLGLVPKQRSTGGKARLLGISKRGNEYLRRMFIHGARAVLYRVKYDTAGFGRWVHQLEARAPRNKIIVAIANKLARIAWAVLFRGEAYRHQPVAAA

SEQ ID NO: 423257 - protein, 358 aa, unidentified
MRIIGCDLHTRQQTMAMFDTETKEVIETTLTHEGDTVREFYSALPRPALVGIEATGAMFWFLQLLKELSIPCLVGHPAAIRKAETRKQKHDRRAAALLLRLLLENRFPAIWMPSAEQRDLRHLLLHRHQLVSMRSRVQHALQSLALSHGLRRGARLWSRSGEQELSTLTLAPHTTRRRNTLQRLQQYLDRQVRQLDQRVMQQASQRAASQLLMTHPGVGPVTALATEVFLGEPRRFSSGKALASYVGMIPSEHSSGGRRQRLGALSKQGNPFLRFLWVEAALHAVRKDAALRRFYRRKLLQKGLGKARVAAARKLGIRLWIMLREQIDYPEFCRRGQQRQSGGAYAEMPAKEFGPATP

SEQ ID NO: 423258 - protein, 318 aa, unidentified
MESAKTYVGVDVAKETLDIAVHPCQQAKRFRNNDAGISGAITFVKSMAPALGVMEATGGLEMSLAAALGASGIPVAVVNPRQVRDYAKSMGKLAKTDTIDAQVMADFAAAVHPEPRPLADSQTQELKDILTRRSQLIEMITAEKNRLYRARRPVSDHIKAHIAWLEQELGVMDSNLRRFIQESPIWREKDNLLQSVPGVGPVLSSTLLAELPELGILNRKQIAALVGVAPLNRDSGKFRGKRTVWGGRAKVRAVLYMATLVATRRNAVIQCFYKRLIAAGKAKKAAITACMRKLLTIMNAMMKHHTPWYHISNQAVIS

SEQ ID NO: 423259 - protein, 313 aa, unidentified
MVIIGCDYHPGFQQIAFVDTETGELQERALQHREEAEKFYRERAAQGLKVCVGMEASGHARWFERLLAELTFELWIGDASEIRTKRVRKQKTDRQDAQLILKLMLKDDFPQIWVPSWENRDLRQLLWHRHRMVQARTRLMNQLQAVALNEGLRCKKRLWREAGRQQLEAFRLAPWASRRRQDLLELLDRLNPTIAELTQAIEREVEKCPEARRLQTHPGVGPLTALAFVLIIGKADRFRCGKQIASYLGLVPLEDSSGSRRRLGHITKQGNSLLRFLLVEAAQVTVRSDPGWRSKYHHLMMRRGRKSAVGYSL

SEQ ID NO: 423260 - protein, 339 aa, unidentified
MEGYWAGIDLHSNNSVLCVLDRDGRIRYRRKLPNDLFAIVHALDSYREHLNGVAVESTYNWYWLADGLSDAGFRVLLANPAAMQQYDGLKFTNDESDAAWIANMLRLGCLPQGYIYPREQRQVRDLLRKRSQLVRQRTANILSIQNLSARNKGSSMRGDVVKHLTDERIAELFPDRLHAMAATANLHLVRALEEEIAKLECQIAGMLQPSREYTLLRDVAGIGKILAMTILLESGDIGRFASVGNYASYCRCVESKHTSNAKTKGHGNQKCGNKYLAWAFTEAANFAVRYHEPVQRFYHRKQAKRNKVVAIKAVAHKLARACYWVLKTGLPFDMKRAFG

SEQ ID NO: 423261 - protein, 555 aa, unidentified
MATDEVGRQLGEKTVKATTAGHATAIMWAREQFGLELIWGIEDCRNMSARLERDLLAAGQQVVRVPTKLMAQTRKSARSRGKSDPIDALAVARAVLRETDLPLATHDETSRELKLLTDRRDVLVAQRTSAINRLRWLVHELDPERAPAARSLDAAKHQQALRTWLDTQPGLVAELARAELTDIIRLTGEINTLAQRISARVHQVAPALLEIPGCAELTAAKIVGEAAGVTRFKSEAAFACHAAVAPIPVWSGNTAGQMRLSRSGNRQLNAALHRIALTQIRMTDSRGQAYYQRLQDAGKTKRAALRCLKRRLARTVFQALRTVHQPSSEHTQPAAACHRSYCSSHLGEPPRLTDMTQKTRIQPLPPKRAGLLIRALYRIAKRRFGEVPEPFTVTAHHRRLLIANVVHEALLQRASRKLPPSVRELAVFWTARSIGCSWCVDFGAMLQRLDGLDVDRLTDIDNYATSSKFSDDERAAIAYAEAMTADPHSVTDEQVADLRARFGEAGVIELTYQIGVENMRARMNSALGITEQGFNSGDACRVPWAAPDVPSAESR

SEQ ID NO: 423262 - protein, 342 aa, unidentified
MSIVVLGIDLGKNSCSIVGLDANGAVIVRRRMRRDGVIAFAEKLKPCTMAMEACCGAHHMGRSLAGLGHEVRLMSPEYVRPYVKAQKNDDRDAEAIAEAATRPTMRFVGLKSEEQLDVQTLHRVRDRLVGDRTSLTNQIRSLLLERGHVVAQGHARLRLLLGELLDSDGSPLSPRMAFLLQDMRMRWEELDRRIAAFDAEFAAMARADDRARRLTSIPGIGALNATALVAAVGDGATFDKGRDLAAWLGLVPRQATTGGRPKLLGITKRGSRYLRKMLIQGARSAMPSLAKSDTAVGAWLRGLLARAHSNIAVVALAAKMARTVWALLRRGQTYNPSPSAMN

SEQ ID NO: 423263 - protein, 392 aa, unidentified
MYIIGIDIGKNHHEASIVSPEGKQIGHSLRFATTHKGADSLMSFIFNNIGNSSCIFGMEATGHYWYPIYSFLKARGYTIYVINPIQSDSLRKMYIRQTKNDSIDSFLIAEVIRFGQFTTTSMADENILAMRQLCRYRDSVISSRTEIKLRISTIMEQIFPEYEKQFSSLWLSTSMGILEKYLTPENIENAPIDELFEIIKDKSHNKLTMKKAISIREAAADTFGIKIAQDAFSFQLKQLIDRMNFLDKQIEALDIEIMKYYEQFDCYLHTIPGIGIIGAATILAEIGDISRFKNSSALVAFAGIDPTVRQSGEFNSTHNHMSKRGSPYLRHAIFLAATTCSFHNSPLNAYYKKKRDQGKHHLTATGAVARKLTTIIYAVLRDSKPYEPKKFC

SEQ ID NO: 423264 - protein, 312 aa, unidentified
METKFVGIDVSKLTLDFDCLPVSVAQQFANDAVGIAALVALLQDSGVERIVIEATGGHETAVASALAIASLPVVVVNPKQVRDFAKAMGHFAKTDRLDARVLALFGERIKPMLRAIPDEAQRALADVLGRRTQLVVMRAQEKARLATVAAVARKNVEQHIAWLDKCIAKLDADLGNRLRKSPVWCNKATLLDSVPGVGEVTTFSLLAKLPELGTLNRQKISALVGLAPFSDDSGKRRGARYIRGGRAEVRCVLYMATLTAIQHNPPIKAMYERLTKAGKPFKLAMTACMRKLLTILNAMLKKNQTWKIQPSS

SEQ ID NO: 423265 - protein, 489 aa, unidentified
MKSRAAKKAQKDKKPSNKASGKATPGKWDEMNRKQRREMMRQMQSEDLSLEVVHPHAAGIDIGNESHYVAVPPRRDPQPVRCFGCTTAELKKMAEWLTQCGIRTVAMQSTGVYWIAVYDILEEAGMEVYLVNARETKNLPGRKTDVQESQWLMKLHTYGLLRNSFRPSQQIRILRTYWRQRQDLVRSTGRHIQRMQKALTQMNIQLANVISDISGVTGQAILKAILDGQRDPRELAAYRDCRVEASEEEIAQALEGNWQEDQLFVLRQELSGCEFCQKQITECDQQLAQYLARLEDRTQGATLPEETRKGRRKKKKGNPQFNLREELFRMTGTDLTQIDGIDVMTVMTVVSEVGWDMSKWKTENHFVSWLKLSPDNKISGGKVIGKGRMPTNNRATPVLRMAATTLRESDSYLGAQFRRFRTRLGPPVATKAMAAKLARLLYRMLRYGMKYVTKEPSSMRPKHRKQQVIHLKRKAPQLGLEIIEVAAAA

SEQ ID NO: 423266 - protein, 340 aa, unidentified
MKSTIIGIDLAKNVFEVYVEDEGGQDITRCRLSRKKMLPWFANRAPALVGMEACGGAHYWARELAKLGHTVRLIAPQYVKPWVQTNKSDQADARAICRAVQEPGMRFVGMASEAQQTVQALHRVRSRYMDNRTALVNQTRGILLEYGVAIPKGVASVRNTLPLLLTEDRWSALVRQFLADQRVELEEWDGKIQAVTAQIKRENARQPICQRLEQARGIGPLGASALWAKAAGQSYQNGRHLAAALGLVPKHTGTGGKVRLGGISKRGDRYLRQLLIHGARAVVRQVGEKPDPLSCWIRRLVARRGMNKAIVALANKNARMAFAIIYNDQTYDGTKMCEAV

SEQ ID NO: 423267 - protein, 337 aa, unidentified
MSVAGIDSHKDTLAVAVVDDQGRELDRTEIENSSRGHHSLIGWLGRHQPSRVGIEGAGSNGRVAALRLKDAGYEVMEVPPQLTAQARRRQRTQAKSDPIDALLICRIALREPELPQIRPSGDIEDLRVLVHHRRELQSERTRAASRLHADLEQLQPGYQTRIGRLTAERNLDRARRVLSGDGRVRAEVARERVRRLRQLNRQIARITGEIGVLSTTFGSGLTTITGIAELSAAELLAEIGDIGRYRTKAQFAMANGTAPLTASSGRIDRHRLNRGGNRQLNRIIHFVALTQISRSPEGRAYYERKRAQGRTTKEAIRCLKRRISDRIFVTLRASALT

SEQ ID NO: 423268 - protein, 382 aa, unidentified
MQASRKSTPTADHCGTIFVAIELSQKTWLITVHSPDRDQFSRHRLEGGDHAGLLALIEKVRARATQQLGSTPRVVSCYEAGYDGFWLHRLLEAAGISSLVFDAASIAVEQRSRRAKTDRIDGELLLRTLMAHLRGEPRVVRIVRVPSVEEEDARRASRERDRLITEQTAHTNRIKSLLRLLGMAVGNPRRRDWLAWLKRQRDWQGRPLPPHLLAEAQREHARLMLVREQLAALEQVQAAQASPVPAPMAERRDLLQRLKALGPAFTATLVNELFYKDFRNRREVASYCGLAPSPWQSGGIDREQGISKAGNRRARHKAIELAWLWLRHQPNSALSHWFRTRTANAGRRAKRIAIVALARKLIVALWRYLTAGLVPEGATMKA

SEQ ID NO: 423269 - protein, 341 aa, unidentified
MSKLFKNFVGIDISKTWFDAALIPLSNPSKIIHQQFSQTPEGYKKMQQWLHQNDVSLNDDTLFCMEYTGIYNTGLVQYLVGQQAQLWVEMPLRIKKAGGLQRGSDDKSAACKIAWYALRYHDQAKLWKPADSSIEKIKHLITQRERIITSIKHLTVPAEELKQCGCLQQAKMIEKLQQPVIKALLKAKQGIEALINQTVKMDEQLHHKIQLMQSVNGIGSVTATALLVYTKGFTAFKNAKELACYCGVVPFNKTSGSSVRYKPSVSPFANMKLKKLLHLCAMSAIQNDKEMKQYFERKISEGKNKMSVINAVRNKLVHRVFAVIRDERMFEQDYKIMCITC

SEQ ID NO: 423270 - protein, 427 aa, unidentified
MNCTQNYKIDQVTEQTLVVGIDIAKRTHYACFVDDRGRVLRKSFPIFQSKKGFRQLNEAIQEAMQAFGKSQVIVAVEPTGHYWLNLAYFLEENGIPLVMVNPAHVCRSKELDDNLPTKHDAKDALVIARLAKDGRFLVPRLLHEIEADLRVGSTLKEKLRKEQTAVKNAIIRWTDRYFPEFWTVFRDLGKTALAVLEWTPLPADVAGRTVEELLTVHRQSEGLKCPQKAKIQALIDAAKDSIGVREGTTMARFEIAALVRQYRQFEAEIAALDAELKALVQTTMGYQWLKTVDGLGDATIIDLLAEIGSFSHYRDPRQLVKLAGLTLKENSSGQRKGQKHISKRGRKRLRSVLFRAVIPLIRHNEAFRDLHEYYTTRSVNPLSKKQSIVALCRKLLNVLFAICTKKQAFDAERMMQDILSQVQNRAA

SEQ ID NO: 423271 - protein, 387 aa, unidentified
MPSTMPTPATALDYESTIITAVELSASSWLVGAQVPSVLRQCRQKLAPSAEALLEHLGRLRQRAERAGKRVSRVVVAYEAGRDGFWLARWLIAHGIEVYVIQPSSVPVDRRARRVKTDAVDVEMLLRTTLAWLRGEPRVCSMVPIPSEAEEDGRRPLRERQELIKERLAITNKIDGLMATLGIGGYRPLRRDRREQVATLPSGDPLPVHAQARLTRLLDRLELVLEQIKGLEKARDAVVAQDDVVSGGEADSMIRKLAGLKGIGPELATLLAWEAFVRPFRHRRALAGYAGLTGTPFASGGRQREQGIGKAGNRRLRAALVELAWLWLRYQPDSTLAAWFRERTRAAGSRTRKVMIVALARKLFVALWRFCRDGVIPQGAAFKTATA

SEQ ID NO: 423272 - protein, 416 aa, unidentified
MSRKFMRTNTCGKLSQLLNISERWFSHMYSYFVGIDIAKNTHWASCLSSDGEIILEPFSFSNDNSGFQKFISKLESLDKTKILIGLESTAHYGENIISYLFNLDFNIGLINPIQTANLRRSNIRKTKNDKVDTKIIIKALTLGNYSLITSRDINNLKLKGLCRSRRNLVTMRSKAKIQLVSYLDQIFPELAQFFKGNLHLNVSYQLLKEYSSPKQISSLHLTKLSNILHDNSHGRYNKQDAIRLRELAKNSVGIDNPSLSLQIKHSILQIELYNEQIAEVEALYKQILDEMNTPILSIPGMSYNQAAVIIGCIGDINRFEHSCQLLAYAGLDPSVIQSGNFQARSTRMSKRGSGMLRYSLVYSAHNVVKNNKTFRDYYELKRSQGKSHYCALGHVAHKLVRIIFKMLKDNVAFNLD

SEQ ID NO: 423273 - protein, 353 aa, unidentified
MIVIGADVHKRTHTFVAVDAVGKQLGSTVVPATTAGHRTAMQWAHARFGTEVLWAIEDCRNMSARLERDLLGADQKVVRVAPHLMAEHRRTGRERGKSDPIDALAVARAAAREPDLPVASHDAVSYEMKALVDYRDCLVRERTSKINRVLWRVHQLDPEYHIKKGGLTAKKHQKALQTWLEPQSSVDARLAGKEVAAIYDLTVEINEVEKEITKKVSDAVPTLLAMPGCGALSAAKLLGESADITRFPGEAQFARHAGIAPVQVWSANPGRHRLTRSGNRQINAAIHRIALTQARMPDTLGHAYYEKKKAENKTPREAMRCLKRRLARVVYNHLTTDHHARTRKADNPTPAAA

SEQ ID NO: 423274 - protein, 405 aa, unidentified
MNAVGIDVSKGKSTVTIRKPGDVVLMSPCDIPHSQSAINDLIKQIKSLEGETKVCMEHTGRYYEPVATWLSDAGIFVSAVNPILIRDFGDDSLRTPKTDKADSKKIARYTLDRWAKLKQYGIMDKTRNQLKTMNRQFGFYMAQKTAMKNNLIALIDQTYPEANDFFDSPARNDGSQKWVDFIHTYWHVDCVRSKSLNAFTEHYQNWCKRKNYNFSAEKAAKIYQISSDLIAVFPKDDITKMLIWQAVALLNTASKTVESLRSKMNELASTLPEYPVVMDMNGVGATLGPQLIAEIGDVSRFTHREALTAFAGVDPGKNDSGKHIQNSVRTSKKGSPYLRKALFQIMDSLIKRSPVDDPVYAFMDKKRSEGKPYYVYMTAGANKFLRIYYGRVREYLSNLSNNETI

SEQ ID NO: 423275 - protein, 380 aa, unidentified
MTCKERGRVAKLTRAMQYVNNTELSSPEETRCQFNGSKADIKLGIDVHQHFYTVVMQVGGCNPKPPQRFAKEVFLHWAAKLKQSCGGQVHAVYEACGFGFGLQRALSALGIECEVVCPQKLDEQNRRVKTDGLDAKALCLKLDRFVEGNREALAVVRVPSEAEEQLRAIHRQREQLVKARKQLEAQGRSLMVNHGIEPIQQWWKRRAFAKLTLPAWMKELLSNSQPILLALEEKIRALSAQLQSAAAPQQPRGFGSLTSVVIDREVGNWQRFNNRRRVGSYTGLCPGEYSSGDTRLQSCVTKHGNPRLRAALVEAAWRLVHFQPNYKPVLKWRRVLAKGALATGAARKKAIVALARQLAIDLWRIRTGRVKADQLGLTIN

SEQ ID NO: 423276 - protein, 430 aa, unidentified
MGFIVPTDMHPEQDDQPIPYQWFVGIDWGSQRHQVCVLDGERRRVGERAIDHDGASLAQLADWLWSVSTGQPQRVAVAIEVPRGAIVEGLLEGGFHVFAMNPKQLDRFRDRHSVAGAKDERRDAFVLADAVRTDQPSFRRLQLDAPQLLRLRELSRAEETLLEDFRRRANRFRDQLHRFYPQMLALCSAADEPWLWDLIDLAPTPAHVALLSEEQVQRVLKAHRIRRVTAKEALTCLQALALAVAPGAAEAAQAHCQFLLPCLRVLAEQLQACSQQVSALLHTLAAEPGDGEGPSDVALVLSLPGVGRKITAWLFAEAAQPIAERDYQMLRTHSGIAPVTKQSGKRRLGVIRRGCNPRLRHALYHMARVAMQCDAHFNSVYAALRAKGQRHGQALRNIGGRLLRILMAMLRHRTCYDASRIRREPVVQMG

SEQ ID NO: 423277 - protein, 345 aa, unidentified
MNDTKYIGADVHSSSSFFVVLKNSGDVWDQKRLPTTERDLAVYLESIPGRKVITFEETNLSRWLYQVFKPLADEVVVCNPAKNTFTKNGPKTDGQDAMHLARLLKAGYLKPVYHGDDPRERFRDLVSAYEDVVQDVVRLKNRYRALFRSDGSPLGKGQGVYKVEELQKGLKSREKAFIAKGAYERLGVLERQKESLIEEMKLRSRPFKEIKILRGLPGIDYIHAWFIAAAVVTPYRFANKYKFWAYCGLVKHRQISDGKIYGNKKAHGNNVLKDVFRQAGRATLRGSSGVKKYYEHLISERGYGEGEAYNAVCREIAALARSLWKKGERYDDELYIKSKNLSHPS

SEQ ID NO: 423278 - protein, 319 aa, unidentified
MKKTEVSFEQVIERGCGIDVHKKIIVASIKGIGLKEETRSFDSFTESIESLKEWLLENDVTHVAMESTGVYWKPIFNILEKDFEIILVNARHIKNVPGHKTDKMDSKWIAKLLLSGLLKGSFIPPKPIRELRDLTRYRRKVVVQLASEKNRLQKILEDANIKLSSVMNSTTGVTAMRIIDEMLSGQEDINELVKLRNGNMKASKEELAASLRGYLTEHHKFMLRVIKESMAEKERIIEILNDQIEVHIKANELELDLELLQTIPGVGKDGASIILSEIGSDMSHFPNEKHLSSWAGMNPGNNESAGKKKVQKQQMGINT

SEQ ID NO: 423279 - protein, 315 aa, unidentified
MTNLKKSKTNVNVGIDVGKWFLDVCLYEKDLHWQVENNPEGVRKLIGRLGRYNVQRLVMEATGRYQLLLAEQAFKKGLPVCIVKPLSVRRYAQALGKTAKTDKIDAQVIAEFGARVEPTITLAKSKNLMLIKDLLSRRRQLVNMRTKELNRVKIMGKALEASCKRIIKMLELEVVRTEKLLDKLIENESEWAEKKALLKTAPGIGDTMVYTLLADLPELGSMTNKQAAALVGVAPMNRDSGKMKGKRRIQGGRYGVRTTLYMATLSATLCNPVIKEFYQRLTATGKHSKVALTACMRKFIVMLNAMVRDNSEWQY

SEQ ID NO: 423280 - protein, 313 aa, unidentified
MSDNLPQTIGIDISKASLDCHAYPVGAERQFANTAKGHKALIAWLRQWPIERIAYEATGTYHRALEAALTNWPCVKLNPERARRFAQATGTLAKTDRIDAILLARMAATLQPVVRPARSPQQTQMAELINARDGLVRDRTALKNREKNLTIAFLKRQCRQRLEQIDRHIAALDAEISNLIAADAVLARRHQILTSIAGVGTLTANQLIATMPELGSLENKQAASLAGLAPIARQSGQWKGKSFIRGGRANVRQALYMPALVAARYNPDLKAKYQQLVTAGKPAKSAITAVMRKLVVTANALLKADRCWAQSQT

SEQ ID NO: 423281 - protein, 347 aa, unidentified
MEYVGIDRHKKESQICLLTEAGEVIERRIRTEPQRFAEVLGGRPRARILVEASTESEWVARCLEALGHEVVVVDPNFAPMYATRTRKVKTDRRDARALQEACRLGAYRPAHRLSDAQRHVRGRLAVRVALVRTRTGFIALTRALLRRHGWRVPTGSAETFSRRVVALPLPGRLLSEVAPLLAVMRPVNQQLAYSDGAIEAVTRPDARVQRLRTVPSVGPVTAAAFVATIDDARRFRRAHEVEAYLGLVPRELSSGESPRRGRITQAGNTRMRWLLVQAAVSILRLRDPRTAPLRRWATGIAARRGKQIAVVALARRLAGLLSAMLRDGTTYTPRVLPRPAAEAAAPV

SEQ ID NO: 423282 - protein, 317 aa, unidentified
MATREPLWIGIDTGKDELVIDDGRRTISVSNTSAAIRQWLKQLPGPARIGVEATGTYHLQVLELASEKGHQPYVIDGFRLNRYRDVVGDRAKTDLTDARLVRRYLRNEFDELRPWQAPPVAYTRLKSLLRRRAKIVQARTALRQSLAGVPELRAVSRGLLERINGALSQIDRLLKRWVEKAGLQDAVRRLDQIEGIGPLVAAAFATSYLRGEFRSSDAFVAFLGLDVRVRDSGKRVGQRRLSKKGDGEMRRLAYIAAMAASRSGRWKEQHLANQARGLSRIQSLVIIARKLVRLAFALLKSGEEYRPQLPQGATATT

SEQ ID NO: 423283 - protein, 412 aa, unidentified
MQIIHPCCCGVDVHTKTVVACLIKQGTKQVRTFSTMTDDLLAMSDWLVAEGCTHVAIESTGVYWKPVFNLLEGVLEVILVNARHVKAVPGRKTDVRDCEWLADLLRHGLLKASFIPPLYIREIRELTRYRQTLVKEQTAVANRVQKLIESGNIKLGQVATDVLGVSGRQMLRALADGEHDTEKIADFARGQLKKKKNELQRALEGRLTKAQRFVLGELLKRIDELTAAIVRVNEELRAEVSRSTDPFVAEAVKLLETIPGIGQRIAETIISEIGVDMSRFPTDAHLASWAGMCPGNNESAGKRLSGKTNKGSTYLRDALIQAAWAATHTKQTYLAAQFRRLVRVKGKKRALIAVGHSILVIIYHVLKQRASYQELGGDYFDKQNTEKLRARLIRKLESLGVKVTVEMMAEAA

SEQ ID NO: 423284 - protein, 422 aa, unidentified
MAGTTITIGVDWGVEKLAVCAVDAQGKRLYDKEIDRKGDAIEELVERMLKLADGEAEQLRVALEMPRAAVLDAFLERGVATFSLNPKQLDRFRDRHTVAGAKDDDLDAYVLADALRTDAHLFRRLEPDPEQVVLLRERSRAYEALTEQLLASANQLRAVLTRYYPALLTLGTLHEKPWIWRLLELAPTPQALRDTPVEELAGELQDKALRPARDLAEKLDAARAGKPLPSAPGVVEAYSERALRTLPILRAIYDERQRCIRELKQLTREMAREPKDDADPDPRPSDMKIVLSMAGIGYRIAAVLMSEARHALEARDLQGLRRLGGVAPITRRSGGKHKRGVVSIRRARHIRVSNAIRLWADSARRCDPRARQLYRELRERGHDYERALRGVGDRLLPMLIAALRDGQLYDRRRRQEILPQAA

SEQ ID NO: 423285 - protein, 461 aa, unidentified
MPDGGGENSSPRRTKQIEGLPVIRRNVAGIDLGSERHWVCAPVAGSISREVADFGATTPELIRMTKWLQACGVESVAMESTGVYWIAPHEVLEAAGLEVLLVDTRQLARVPGRDKKTDPSDCEWIQRLHSCGLLRGSFRPREEVCMLRTLVRDKANLVAECSDWLRRMQKSLDQMNVRVHRAVSHMDGITGMAILRAIAEGERDARKLAKLRDTRCHKSEEEIAEQLSGHWREDHLFSLRQSLKMYDAIQQRLADYDREILQRLAAMQREEFRQQPPPPVKNPHKAKNMKKRGEEPMREALFRMSGVDLTGIDAIGVETVQVVLSEYGPDLSRFPTEKQFVSHVTLIPHKPMSGGKPVRKKRRSSASTRVAAALRMAAVSLRNSATALGAYYRKIARRLTGDVAVFATARKLATLIYRLLRWGQPYVDEGAEAFERRYQETRLKNLKAKAKELGYQLVASN

SEQ ID NO: 423286 - protein, 416 aa, unidentified
MTNQLNIVCGADIHQRFLVATILCRDGRTWANRFMMNLNGLIDFKSWLVSHGCQKVAVESTGRFWIPVHMILEGTIDVIVANAYKIKHIPKKKTDLKDSEWLAELCLNDMIEPSRIFPKEDRELRNLTRTREAYVRDLSKEKNRIHNVLESCSIKLASVISDIFGKSGMHILKGLLSGTSIDEVLKGIPDKRIREKKSEELRDALMGKLEATDIFLIRQSLQIISQFEMRIEELDREIRSRIASRPMDIKILRSIPGIGMVSAYTILAEIGNYLDFKKPEQLAMWAGLVPSVYQSADKLITGGITKQGSKHLRWILVQVAHAIAHAKGGKLKKFFLKIRAKKGYLVAVVALARKVLCLIHHLLVNQEMYEEEGCLSKRDAPIPKNKNPAILTIEDMIQCIAQAGYEVKKVKPGVSE

SEQ ID NO: 423287 - protein, 314 aa, unidentified
MNENSELFVGIDISKDTLDMGIQPAGQTIPLPHNEPGITEATRRLLKAQPRLVVLEATGGLKTALAAALISAGVPVAVVKPRQVRDYAKATGQLAKTDRIDALVLADFARAIRPEVRPMKDTLTRELDEQVTRRRQLVEMRVQEYLRLGRASKVQQKSLHSHIAWLDKRIEDIDTDLRKRLRASPIWCAKDDLLRSIPGVDALTSTTLLAKLPELGTLDRKGLAALAGLAPLANDSGKKRGKRIIWGGRAEVRCALYMPTVTAIRCNPVIHTFAERLKAAGKPAKVVIVACMRKLLSIMNAMLKSNAPWNPKIA

SEQ ID NO: 423288 - protein, 411 aa, unidentified
MQRVIGMDIHRTFAEVVFWEAGRLRLGGRIDMTRSGLEGFGRSLSKEDEVVVEATGNAMAVVRVLSPYVARVIVANPLQVKAIAHAHVKTDKIDAGVLASLRAAGFLPEVWLPDADTELRRRLVARRNQVVRHRTRIKNEVHSILQAHLIPPCPHADSFGRLGRSWLGRQELPVDERAAIERHLRELDRLGEDLALLDREIAEGVIEDPSVKRLLTITGVNINVAAGLVAAIGDIRRFSSPQKLVSYVGLNPRVRQSGLGLAQHGRISKRGRSHARAMLVEAAWAASKAPGPLRSFFLRIRARRGHQVAAVAVARKLAVLCWHLLTKDTDYQWARPALVANKIRAMQLQAGQPAKKGNKRGAAYAYNIKELRDREIDVTRHAEHAYERFVSRWQPRGPGKRRTGAANEERR

SEQ ID NO: 423289 - protein, 417 aa, unidentified
MNTQTLKHEVVEFEQIVERGCGMDVHKETVVATVSGTGIKQETRTFSTFTSSLIELKEWLKNLAVTHVAMESTGVYWKPIFNILEEDFEILLVNARHIKNVPGHKTDKKDSKWIAKLLLSGLLKGSFIPPKEIRELRDLFRYKRKLTGQVSSEKNRLQKILEDTNIKLSSVVSDTFGVSATKIIDAMLEGEQDVEKLVTLCHGRLEIKKEQLKEALVGNITAHHKFMLRTIKESIFNIEKVIKKVEKQIDKQTKDYQVEINLLQSIPGVGKDTAQGIVAEIGVNMDIFPNEQHLASWAGMSPGNNESAGKKKSGRTTHGNKNLKNILVEAGWGASKTKNTYLRSKYESLVGRRGKKRALIALGHKILCAAYFIIKNKEEYKELGADFLESKRKKNQVQSYLDKLKKLGVEIEIKKAA

SEQ ID NO: 423290 - protein, 348 aa, unidentified
MSSLADWSCFVGFDYHDCFVQVCVMDTSGVVLGNRRIANSLVDVVDYVDNVRDGRCIMGAAIESCCGASQFAEALQDQYEWTVKLGHAGICSKMKQNPDKTDFSDAELLADLCRVGYLPHVWLPPKEIRDLRRLGRFRQQLVDQRRNLKLRIRAMLREERIEVPQEAGNVWTKGWLKWLKEEARLPEHSRWVMDNHLSDLERLLAKVREVEKRMEEATCDDPVVQRLRACKGVGVVTAVVMRAEIGCFQRFACGKQLARYCAVTPKNASSGKRMADAGLVKAGSLALRTMLIEAAHRLARYHPEWKAMKERLVERGKPASVAVAAVANRWIRKLYWDMQAIEDTQVAA

SEQ ID NO: 423291 - protein, 389 aa, unidentified
MKIFVGIDIAKLNHFAAAISSDGEILIEPFKFTNDYDGFYLLLSKLAPLDQNSIIIGLESTAHYGDNLVRFLISKDFKVCVLNPIQTSFMRKNNVRKTKTDKVDTFVIAKTLMMQDSLRFLTLEDLDYLELKELGRFRQKLVKQRTRLKIQLTSYVDQVFPELQYFFKSGLHQHSVYALLKEAPTPNAIASMHMTHLAHILEVASHGHFGKDKARDLRVLAQKSVGVNDSSLSIQITHTIEQIELLDSQLFHTELEMANLVTCLHSVIMTIPGIGFVNGGLILGEIGDIHRFSEPKKLLAFAGLDPSVHQSGNFQAKKTRMSKRGSRVLRYALMNAAHNVVKNNTTFKDYYDSKKAEGRSHYNALGHCAGKLVRVIWKMLTDNVEFNLE

SEQ ID NO: 423292 - protein, 351 aa, unidentified
MTNQSTEVAPRTIGIDIGKNTFHLVGMDASGAIVLRQKVSRGQLEKRFANMPPCLIGMEACVGAHFLSRLLCKLGHNARLMPALYVKPFLKGHKNDFRDAEAIAEAVQRPTMRFVRTKSVEQLDLQALHRVRARLVRDRTAVINQIRTFLLERGIAVRQGHRFLRAALPDILGQNTDLLSPRMIRVITDLSADWRQLDDRIEDVTGEIEAVAKADIACQQLMTVPGIGPIVASAMVAAIGDGAAFTKGRDFAAWLGLVPKQISTGDRTILGRISKRGNKYLRTLFMQGARSVLIRSTNWPKHSFGPWLDTASRRLHRNVLAVALANKLARIAWSVLHHGADYRVAPAIQAA

SEQ ID NO: 423293 - protein, 473 aa, unidentified
MSKEKAKKAKKKKVKDIISMQVVNPYSAGIDVGDKEMVVAVPEGLSDPRVRTFGTMTCDLEEIVLYLKTCEIDSVGMESTGVYWKPLFRKLINAGIEVYLVNAAHVKNVSGRKDDENDAMWIQKLHSCGLLKSSYLPDEMQEAVRTLVRHRTTLVQDASRFVNRMQKSLELMNVKFHTVISDIVGQTGKAVVEAIIGGERNAANFLPLISKRIKMDLPTIEKSLQGNWLEEHLFTLKQNYEMYKIYWEKIAVCDQEIEKHLQQYEAKCNEGVIEEPMPVKEESAPESEGKKKKAVKKHGDKNRPRFDVQKYLERIYHVDIMAIYGINSTSALNIFAEIGTDLSKWKNEKHFVSWLNLSPNNKISGGKLISSKLMHKHPNPASLAFRAAANGIQNSDNWLGDYFRRKKAKGGQRYAIIATANKIATIFYKMVRYQEEFKPVELEQYQQKYKQVKIAYLERKLMQLKQETGNVAA

SEQ ID NO: 423294 - protein, 358 aa, unidentified
MVDKVTEAAVVGGVDTHKDLHVAAVVDQNNKVLGTQYFSTSRQGYRQMLAWMTSFGTLKRIGVECTGTYGSGLLRYFQNAGLEVLEVTAPDRMERRKRGKSDTIDAECAAHAAFSGIRTVTPKTRDGMIESLRVLKTCRKTAISARRVALQIIHSNIISAPDELREQLRNMTRMQLIRTLGSWRPDASEYRNVTNVYRISLKSLARRYLELHDEIADLDVMIAAIVDELAPELIKRNAIGYESASQLLITAGDNPQRLRSESGFAALCGVSPVPVSSGKTNRYRLNRGGDRAANSALHIIAIGRLRTDAKTKEYVARRVAEGHTKMEAIRCLKRYISREVYTLLRNQNRRINSIPITA

SEQ ID NO: 423295 - protein, 454 aa, unidentified
MTDAKGKRRTLKEFAEINHDAAGIDVGNEQHWVAVPSGRDSEPVRMFGCFTTDLHILANWLEQCEIKTVAMESTGVYWIALYEVLESRGFQVCVVNARQAKNLPGRKTDVKDCQWLQQLHTYGLLTPSFRPQGEIIILRRYLRHRETLVQEAATCIQRIQKALTEMNLQLANVISDISGTTGLRILHAIVEGERNPQRLATLRDWRIKATPEEVAKSLLGNWRNELIFVLEENLALYEIYQQKIERCDQRIEQHLKSIPAQIENNTELLPKPRKGKRPHGNAPAFDLRSELYRITGTDLTQIDGIDVVTAQAILADTGTDMSAWRTEKHFVSWLGLCPDHHISGGKVLQRGTRRVVSRAATALRLAASSLRRSQSALGAKYRRLQSRLGAPKAITAMAHHLARLFYRMVKYGSQYIDHGMAAYEARFKEQQLKWLSRKAAELHLCLAPLPNSAV

SEQ ID NO: 423296 - protein, 350 aa, unidentified
MNILALDIGKYNTMFCYYVCENGEHGFGKVKTTPQAIHDLIVSKQPEKVVMEVCSIAGWIVDIARVLGKETEVANTSHDAWHWKNVKKKTDKEDALKLAKLSAMNQIPTVHMPVKKVREHRSLIKYRQRLVKNKTSIQNSIRAIFSGQGIAGVPKGKSAWKKEGLAWFRSYAKPLGRIKDIEQLWRGRLYIELQTFEAISKALKKVENKLDKLGSADSRIVRLQTIPGVGPRLSETVVAFLDDPKRFRNSKHVGSYAGLTPKQYQSGQMERQGGISGQGNKLLRNLFIEICWTSIRHNPWACDTFNRLLRGSPSRKKIAITALARKLLVKCWAMLRDHKDWKYDIKENAA

SEQ ID NO: 423297 - protein, 386 aa, unidentified
MVVIGVDPHKASHTATALDAITQHTQETVRVEPSLREYRRLLRWGTRFAERQWAVENAHGLGKHLAQWLLARGETVVDVPSTATARVRELSRGGRRKNDALDAAAAASVAALHGDAAPVAVDGPATVLAMLDERRTNLTQQRTRTVNQLHAVLRELLPGGVATDLTAEQAATAVGRIRPASPVERARRGLARELIADIRALDARLHANKQRMQNMVAESDSSLPEITGVGPVVAARLLGRTARAARFPTAAAFAAYCGVAPIEIASGDKARHRLSRHGDRKLNNALHTIALTQVRIRTSRGRSYYDSKITQGKTHSEAMRCLKRRLADHVWRTMITDEQRVAAGPGGHLGASLSSSAAGSTPNTDSSDQSLPGPTRAHHTEPVLTG

SEQ ID NO: 423298 - protein, 424 aa, unidentified
MRFFGLDVHLDFCEVAVAEGGRVSRVGRVASTPEAIREFAAGLNGSDHVVLEASCGAMMIARLLEESDVGQVVVCNAAETRAISHARVKSDRFDAAMLAKLLSAGMLKAVWVPDEATSSLRRRVARRAGLVRARTRVKNEVHAVLARCLLGRPPVSDLFGKKGRVWLSGQELPEEEAETVKSCLRQIDFLGGEITELDQRIAQQALAFPGFQRLLTIPGVDVGTGAAVIAAIGDITRFQSPGQLVAYLGLDPKVRQSGSEPARYGHISKRGDPQARSMLVEAAWISIRSPGPLKAFGERVRARRGAQIAAVAVARKLVVLCWHLLTKDQDYAFARPSLTRQKTRRLELLAGAPPLPRRHGGPPVSPTPSQRAAERELQAQAELAYRRLVDDWRTTAPKGGAGATPGRASNKPSKGKAARQATSP

SEQ ID NO: 423299 - protein, 337 aa, unidentified
MQTYQNFIGIDVSKAHLDVALIQNAKRVSHTQIKNNIEAISAYLEELKGQIDLSETLFGLESTGHYINFLVTTLVSFDCSIWVENALQIKKSMGATREKNDEIDSERIGLYAFRFQDQVRLYSPVNENITVLKTLQTLRKKHVVHRQELETYAKETKAFSKKAINEVIDQHTQTLLEYLTLQIENIEKQMLEIIQNDKELKEIYQLTTSVTGVGKVTAVHLIVMTEGFTKFDTAKQLACYAGVVPFERSSGSFKGKARVSNRANKTLKTALHMCALSASRAKGELNDYFIRKVAEGKNKMSVINAIRNKIIQRVFACVKNKIPYDKNGLKFNNFSKG

SEQ ID NO: 423300 - protein, 366 aa, unidentified
MQKISTLQASGNKIVGGDKLTIGLDLGDRFSSYCVLDAGGNILLEQRLPTTPEAVERTFGRMPRSRMAMETGTHSPWVSRLLTALGHEVIVAHAQKVRLIVKSRRKDDRLDARTLARLARIDPGLLSPVQHRSAQAQLHLTEIRARAALVSTRTALVNAARGLVKSSGERLRKCHTQQVRREMAAGLSTGLREALEPLLQEVESLHQRIQEYDRRIAKMAQEAYAETALLKQVKGVGDLIALTYILTIEDPQRFRKSRDAGCFVGLQPGRRNSGQSEPQMHISKEGDEYLRTLLVQGAHYILGPFGEDSDLRRWGLKLAQRGGKNAKKRAVVAVARKLAVLLHRLGVSGEVYEPLRNSQKAMSTAA

SEQ ID NO: 423301 - protein, 421 aa, unidentified
MEKPISEYAAVVGIDWADRKHDVCLLGQGEERVERSVLEHRPVKIREWANRLRERFGGAPIAVCLELSQGPIVSALLEYDFFVIYPVQPAMLARYRKTFTPSGAKDDPTDAEYALDMLRRHPEQFEPLQLESAAMRSLRKLVEARRDLVDDRVRVTNRLTYALKAYFPQVLSWFRDKDTQVFMAFIERWPSLQAAKRARSATVEEFFRSHNVRRSATISRRVEDIKEALPLTTDPAIIEPAQLVVETLLPQLRALVASIHRLDDEIEKVCARLSDYRLFATLPGAGRVFASRLLAAFGEQRGRFPNAASLQKYAGVAPVTKRSGKSHTVHWRWACPTFLRQTFVEWTAQTIPRSFWAKAFYERHRARGASHNATVRALAYKWIRILWRCWVDQKPYNESRYLDALRKRHSPLLKYAADSSN

SEQ ID NO: 423302 - protein, 439 aa, unidentified
MEVTHTQCAGLDVHKKLVVACSLVQIAPGKLERTIRSFGTTTAELLCLSDWLNNQGVTQIAMESTGEYWKPIYNILEFNFEVMVVNAQHLKNVPGRKTDVKDAEWIADLLRHGLLRGSFIPPLAQRDLRDLTRQRITLVRERARVVNRLQKVLEWANIKLASVVTDITGVSARRMLKAIVDGQTNVEELAQLAKGRLVNKLPQLEEALLGKVRSHHRFLLQQHLKHLEFLDSQVTQFNQQIEKSIEAYAFEDSPSEEKTDSKSSPSLPSSAEPSILSWSQAVSLADTIPGVAQNTAELLVAEIGTDMSRFPSASHLAKWARLCPGNHESAGKRLSGRTGCSNPWLRTSLVQAANAAVRCRNSYLRVVYRRLAARRGRKKALIAVAHRILIALYHMFKKREPYHDLGINYLSNQSPQRSVQRLHSQAHQLGYQLELTPIS

SEQ ID NO: 423303 - protein, 484 aa, unidentified
MNSSMAIKATTEASKDKRLTRKQRKELGRQIWSGSPGLDIVHRDAAGIDIGSREHYVAVGPDRASQPVQVFGCFTTDLHRLAEWLKECRIKTVVMQSTGVYWIPVYDVLEQHGFDVWLVNARETRNLPGRKSDVQESQWLLKLHTYGLLRKSFRPTPEIRALRTCWRERAEYVQQAGSCIQRMQKALTEMNLQLATVLSDLSGVTGMNIVRSIVAGERDGMRLAEFRESGVKASKETIAKSLQGTWLPEQLAILRRQLTDWEHAQEQMAACDLDLKTLMREMPDAKVEPAPEPPDPTVSKQARRRRKKVSKNEPNFDLSAELKRVTGVDLTRIDGIKAMTVQTIVTEAGLDMGKWPTEDHFVSWIGLAPGNDASGGKVLKKKTRKVKSRLATALRVAANTLRESQSYLGAQFRRLRTRLGNPKAITAMGAKLARLVYRMLKYGQEYVDRGTALYEEKYRQQQIKLLAKKATQHGFTLVLAENPA

SEQ ID NO: 423304 - protein, 330 aa, unidentified
MEKVLQFVGADISKKSIDLVIHSTKQHLCIDNSKAGFKQMLLWLKQSINDLSTVTVVMEHTGLYSHCFEKFLFEKTIPFSKVNPVDIKFSIGVTRGKSDKVDAARIAKYGAEKHDRLQIQTQISKALEDLRMLSTSRDNLVRTRASLKTSVEEFRNIGMSDREPALRAQVKVIKSLDKEIKTLDDQIQLTIQQESGLRKTYDLLISIKGVGPVVATNMIVKTGNFKRFKNSRKFACYSGIAPFEHSSGTSIRGKRRVNHMADKSMKTLLDLAAKTAIRCDPEIRAFYEKRTALGKPKMSTINIVRFKLVGRMFAVVKRQTPYQTHLRKAA

SEQ ID NO: 423305 - protein, 333 aa, unidentified
MKVFYLGVDVSKKKLDLCLRSNGKDILYDVIPNDLSSIKSWLTRTFEKFFLSEDSLVVCAEHTGQYTYPLVCATKSIGVYLCLEDAAKIKYCHGIPRGKNDKIDACRIAMYAERYNDCLQPYTASELIIQKLKNLSTERNMLVADRAKYQSQLKDQVDYMEHSIYIAKCNRVEGIINTFTDYIAQIDLEIKELINQAPVIAHQMDLLMSVDGVGERVALKMIMETDAFTSFTDPRKFCCHAGVVPFVYVSGSSQRSKNRVSNRADKSIKHLLHMAALSVSQVKNSPLKKYYDRKVEEGKNKMSVLNAVRAKLVTIMFAVFWDECFFIIGIGKM

SEQ ID NO: 423306 - protein, 341 aa, unidentified
MQAVTTIGLDIAKSVFQVHDATGNVVIRRQLKRRYVLAFFQKLAPCVVGIEACATSHHWSRELKALGHTVRLMPPAYVKPYVKRQKNDAADAEAICEAVTRTNMRFVETKTPEQQSCLMLHRTRHLFIRQQTAVINAIRAHLAEFGIAARVGRHGVEDLLHVVADSSDRRLPEVARACLAALGVQLRMLKAQVLAFDRRIMAWHRSHETSKRLDEIPGVGPALATALVASVADPKAFRSARHFSAWVGLVPKQHSSRGKDRLGSISKQGDRYLRSLFTAGVLAVIRYAKIHGTKHRPWLTALLARRPTKVAAIALANKIARMAWAIMAKGERYKEPAALAA

SEQ ID NO: 423307 - protein, 451 aa, unidentified
MEKKKMELDIINPNCAGIDIGSKSHYVAVGQALEDVKEFGVYADDLTDICLHLKSYGITSVAMESTGNYWQNLYVELERHGMEVTLCNGKFTKHAKGKKTDVKDCRWIQKLHALGLLTSSFLPDQTTEELRTFCRQRNNMIDLAAQASHKMQKYLKLLNFRLDVVVNDICGLTGLTIIADICKGNLDPISLAKHRNGNCKKTEEEIAKALKGNNRTDFLFGLKQEYESYLFYQRQIESCDKQINTFLKHQINTDPQKNKLRTDDKKHKRVNKNALKGIDLNQASFQYFGGVDLMAIEGLSHATVLTIMSEVGPEGFEKFKTAKEFTSWLRLAPNNKISGGKILSSKTPKGSNRLKIALRHAANAIGNLKETHLSDFFRRVAYRKGRATAVSATARKLGVIIWTMITNKVAYKPPTEYLFIDQKRKLKLIQRMKKNIAKFEIKPEDFGFAST

SEQ ID NO: 423308 - protein, 486 aa, unidentified
MAARKNAKAKADSAGDGVQAHGGEAAEVSDEVTQVVEFAAGIDVAKGFGMVCTRVPGSRAGRRRQKVWRVNATFSEVTALMDHLVCEGIQRLVLESTSDYWRIWYYLAEAAGLEVWLVNARDVKHLPGRAKSDRADCVWLCKLNERGMLRRSFVPPRAVRDLRMLTRTRSRLAQDQARHQARVEKILEDALLKVSSVISDLFGVSGRLFLDALVAGERSPAALAALGDYRLKASKAMLEETLTGQFRDIHAEEIAVHLRLIDAINAEITGLDAKIEQLLPQVPRTAPVCTACGLAGGGHAPDCTDLGALVPGLADRLDEITGIGAVNARVLIAELGTDPSQFATPGHAAAWAKLTSRMMQSGESSWNGRAGKGNRYLRGALGQAVMSAAKTDTRLGAMYRRIARKRGKQKAIVAVGRVICEIAWILICDPGARYIELGPDYYQPRNARQRTRSSIRQIEKDNPGKKVILIDDPATAPPAGPAERAV

SEQ ID NO: 423309 - protein, 345 aa, unidentified
MESSNYIGLDVSQEQTSICAVNQDGDVVWRGKCASDPDALAHTIRRHVPRVARVGLETGLLSNFLTRSLRARDVPAVCFDARHAKAALQLQINKTDANDALGLAQVARTGWFREVAIKSMDAQTLRMVLITRAQLVSQRQAVANTLRGLLKTFGHVVRKGAAGPFASRVRTVCEGNSALSVIAEPMLAVWQSLREQIAVLDRQLLKRAKTDPAARRLMTIPAVGVIVALAYVAVIDTPDRFARSSTVGAYLGLTPRRYQSGETDAAGHVSKCGDRLLRSYLFQAANAILTRKVQDSTLRTWERALAARIGLRRATVALARKLAVVMHRLWQDDRDFDCGAAPMRV

SEQ ID NO: 423310 - protein, 348 aa, unidentified
MTYRIAAIDVHKKMLAVVVADVAGEGEYQFERRKFGATPDQLQLLAQWLCQQEVEEVVMESTAQYWKPVWGALEQYWQPARQKREGARKMSGKLHLCQAKSNRGRRGRKNDFADGERLIKRLVAQELVLSFVPDAEQRLWRTVTRRKYQLTRDKVRFQNQLESLLEQAHIKLSSLVSDLLGVSARRMLKAIAEGETDPAALAALADYRLRATPEQLRDALGACGQLHGVYRRLLKMALEELKLMEEQIEQLEQEASKLLQQHQNAVQRVAAVPGFGVDSAIQAIAEVGPEAAAFATYKNLSSWVGACPGEEESAGESKSTHSPKGNRTMRRLLNQAAHAAIKVKRKHI

SEQ ID NO: 423311 - protein, 352 aa, unidentified
MPKRTRVVIGGVDTHGRTHHAAAIDQQGRLLGDREFPADSGGYRQLLGWLRRHGNLDMVGVEGTGSYGAGLTRFLLDHGVNVVEVDRPDRRTRRQRGKSDPIDAEAAARAVLAGTATAPAKRRDGIVESIRALRAARSGAIKARTAAINQLKGLLVTAPASLREALEGRSTAALAAACARLRPEETALADPVDATKAALRVVACRIHQLDEEIGVADQRLATLVGRAAPGLLKLHAIGVDHAGQLLTTTGQRPERLRNEAAFAHLCGAAPIPASSGKTHRHRLHRGGDRDANRALHLAVVVRMRWCPRTRAYAERRTKQGMSKPEIMRCIKRYLAREVFHALVADFEALHAT

SEQ ID NO: 423312 - protein, 451 aa, unidentified
MSKASRLSRGDKRRNDRLSKFRGIVRRDYAVAAIDLASKKQVVAVVDHDSRIVARRTFHCAPPQLATAIEWSRTAATAAGFAGIVIACEPTGHRWKTVRDLTAAVGVQMVCVQPIAVARARETEDFTHDKSDDKDALLIARLTTQLHIYLPEHADEQWTRLRHLGVRRSQQLTRRGAAQQQARDLLEGAWPHALDCAGQPFKSVTWLAAMAVIGCTPETLTAQGSREQAVAWLREQVRAELPCWGGRRVTTRILVAIVDAAFAVQTETTITAEAGALERARYALADFHHARTACEQVEAAMIEVLTGLGLHELAGSIPGVSAVSVAAILAETGDLTRFDSARAVVKHAGLCPRENSSGAYRGATRISGRGRPLLRVAAWRAAFAALTHNEVYAARYRHLTSREANRLNPNQARVAIAAALLRQLYVVITTATPWNPDIAAGRTRPVERTAA

SEQ ID NO: 423313 - protein, 454 aa, unidentified
MGRPIKGRRLSLECIEPNAAGIDVGATEIYVAVPPERAAEPVRCFKTFTSDLREMAAWLERCGITTVAMESTGVYWIPPYEILEDAGIRVCLVNSHYVRHVPGRKSDVSDCQWLQYLHTVGLLKPSFRPDAAICALRSLSRHRAGLVESAAVHIQHMHKALTQMNLQIHHVLSDITGISGMSIVEAIVAGQRDPVQLAGLCHAKVHADRQTVIKSLTGNYRPEHLFTLKQSLAAYQSYQRLLAECDQEIQRLTNSMSGKIDPGAPSSSTQSSPQKRRKNQFHFDMRSELHRLFGVDLTAVPGINALTAHTLLAEVGPDLSRFPSADAFANWLALCPGNKKSGGRVLSSRTRPTNSRLSHALRVAAQTLARSRSYLGNFYRSMRARLGAPQAITAAAHKLARILYHLLTTGDAYDESVFAREQLKQNLRLHKRLTKQAESLGFQLIPLNSAGACS

SEQ ID NO: 423314 - protein, 339 aa, unidentified
MTHTIVGVDIAKNVMQVHWVDPETGEIVNRPIKRAAFLEYFANRHPCLIGMESCSGSQHWARRLIEMGHKVKLMPGKFVKAFNIRNKSDAADARAIWMATQMDSKEVAVKTEAQQAVLALHRMRQQLLKFRTMQINSLRGLLTEYGEVMSVGRAALDRAVAGVLERLSGRLPAILIDTLREQWKGLEDLDRQIGEIERRLQEWMKDDQAAKAIATIPGVGLLTATTAVATMGHAKAFKSGREFAAWLGLVPAQTGSGGKIELQGISKRGDTYLRTLLVHGARSIIYRVKEPGSWVTQMKQRRPLNVVIVAMANKLARIIWAMLAHQRSYRKDYASVKPA

SEQ ID NO: 423315 - protein, 416 aa, unidentified
MNTNWTDQPHFAALDWAKDHHDVIVVDRNGAIVADFRFAHTAQGWAEFDQHMEKIGRCPIAIETSSGPAVDQLLQRDYPIYPINPLAAERYRERKSPAGNKTDRQDAWSMADALRTDGHGWMRLIAQDEATAMLRLLCRDESALIEQRTAFVNQVQAALLEYYPLALESFDDWTKPFAWAFVRAFPTPDALSKAGKRQWQKFLHTHKLWRPDTSETRLAAWAQGQQLKASPAVVNAKSLLALSLVLVLQTLQKQIDEYRQRIRAAFKAHPDHDIFGGLPGAKDKLAPRLLAEIGSRREIFPDADSLSCRAGVSPVSFQSGQIRKARIRWACDHFLRHTVHLWADQSRHTCAWAQAYYRAKRDNGHSHASALRCLGKRWLKVLWRLWHDHLVYDESIHLKSLQTHGSFVPKLLEAAG

SEQ ID NO: 423316 - protein, 334 aa, unidentified
MWHVGIDLHRKTIVLAAVNDTGDAMKPITIPCADTDAIINAMRAWGPFRAVVEATGTYRWLYDLLRPYGTVLLAHPFRLRAMIQRRTKTDKLDAQLLANLLRINQIPLAYIPPESYQRLRDLVRCRTRLGREMAEAKIRLRALLARQNREAPFRVPFGVRGLAWFRRQDFGPIENLVRDELLERMRHFERQMTLLDRHLAEMATSFPQTEALLDIHGIALFSALLIVAELGEVERFRTAKQVGAYSGLTSRVHQSGGHCYQGSITRQGSPWLRWILVQAAMKATREDVALKNFYARVRKRSGAKIARVAVARKLAEICWKRLRYWQCTHVEQVS

SEQ ID NO: 423317 - protein, 337 aa, unidentified
MDYFAGLDVSMDETHVCVLDREGVVIYEDKAASTPAAIANELARAPNCRRIVFETGRMAPMLYHGLSQLGLPIVCVESRQAYQALKSLATHKTDRNDARGLAHLARTGFFKPVHVKSLPAHAIRSLISARKNLVGQRVTLENQIRGLAVVFGVRLPRALSPAFIKQALGASEGVAGLSAALRGLIAARDAVMGAVAAIDADMERIVRASEACRRLMTIPGVGKLTALAFTAAIDDPERFRRSRDLGAYLGLVPRRYQSGEIDYTGGISKCGDRRVRTLLYEAANVMLTRYKGQLKLKDWAFAIARRSTMRKARIALARRLAIIMHAMLRDGTEFEPA

SEQ ID NO: 423318 - protein, 429 aa, unidentified
MQNESTPGARGPVFCGVDTHADSHWLCVLDWRGRKVLSRQFPADAAGYEALAGAIAAAGEPACVAMEGTSSYGAGLTRHLASLGMPVREALSPARMQRRRPGQGKCDEADAERAARAAMSGSKLGTPKSQDGWVDGVRCMLAARSGAVKARTSAINTARSLLTTAPEGLRSRFRGMGGPRLMEELPSVRAEGALGAALGALADLWAAARDAALDMELAIEASLEENCPALLAMYGCGPVSAAKLAVAAGDNPGRLRSEASFAAICGACPIPASSGKTVRHRLNRGGDRQANSALHEIARQRVMRDPETAEYAERARGRGKSDREVMRCLKRYVAREAYRALMHPHEIRRPEDASELVAARRAARVSQVRAASILGTSEKYISMLERGQRELKPIRRAYEAWVEAGLPLDWDRQAFEAERKFDSKKHLAK

SEQ ID NO: 423319 - protein, 408 aa, unidentified
MADKVAGIDVHKKVLMVVVINTRTPEEKPERRRFATMPTELLRLSNWLQAQGVEEAVMESTAQYWRSVWMELEPHMCLHLAQAFSNRAPRGRKHDFKDAERLVRRLIAKELILSFVPDGEQRIWRNLSRMKLQLIRDRVRLRSQIECLLEEMRIKLSVVVTDLLGSSGQRILHALAQGETDAKRLALLGDERLKCSEEQLIEALTGTTHPVHAQMLMLQLERLRLLDEQITKLNSLLAQAMTPHQDAVIRLAAVPGLGIDSAQQVIAEVGVTAATFSSAAEFTSWVGTCPGREESAEKNSSSRSAKGNKYMRRLLNQAAHAAARSKGTHFQAVFRRLLPRLGYQSAVWAIAHRICRIVWKILHQGVSYIEQGTQPEPKILIDRARSLAKQLRKFGYNILITPPNTAPV

SEQ ID NO: 423320 - protein, 345 aa, unidentified
MRPRSRFQVVVSQSRLFFHKSVLMNKYKEIFGVDISKDVFDVYGSKSGHNQFKNDATGFQSFLKSLPKESLIVMEATGYYHYRLAQFLFKQSVLVSVVNPLSVKRFIQMKLAKVKTDKSDAKAICEYGKINEVPLYTALTDVQSECLQLFRLMDSCLKKRTATKNKIHGEDVLGIPSKYVYRSLKRIKKYLDKEILGIEKKLLSLVKQEQQVQLTLLTSIPGIGIKTALFLIVITDGFDKFENAKQLCSYVGITPTIRESGSSVRGRSRISKVGNRKLRNLLFLCSFTACKHNKGCREVYERIVNKGKSKKLALIAVSNKLIKQSFAIAKSGNPYDEKYVSVLPK

SEQ ID NO: 423321 - protein, 348 aa, unidentified
MTVYCGVDFHARKQTISYLTTEDGEVQQAELHHEQDNIRGFYAKLLSQGPVIVGFETSGYAAWFEELLEELGCEIWIGFPAAIRRQARRRQKNDRRDADLILELMLRGDFPRLHRYTPASREVLQQLRYRHRLVKLRTIVVNSLQYLALSRGVSLRTKLLTGRGQERMKQITLPPHLAKQRDEMCQLLQELTAKIETAESWLDLRAKQDTQVERLMSHPGIGPLTGLCLVHTLEQVQRFANPRKVTAYVGFDPVEDSSGERQRIGAISKQGSRLLRFLLVEAGQVAVRSDPDLKAANWRVQLRRNHQKAKVAVARRLLVRAFIMLRDEIDYPEFQRRGVAARSTRRTA

SEQ ID NO: 423322 - protein, 315 aa, unidentified
MEQSPPESAFVGTDVAKDRLDVHLRPSGEAFAVGRDADGLAALVERVARLAPRLVVLEATGGFEAAVAAALAAAGLPLAVVNPRRIRDFARATGRLAKTDRLDAAAIARFAEAVRPEPRPLPDGAAQALGELVARRRQLVEMIGSEAQRRRQPKDPRLLGRLDAHLAWLRQDLAAVEADLDGAVRGSPAWRAAEDLLASVPGIGRTSARVLIADLPELGTLDRRRIASLVGVAPVNRDSGAFRGRRMVQGGRAGVRKALYMPTVTAIRRNPAIRALYERLTGRGKPAKVAITAAMRKLLTILNAVLKSRSPWQHA

SEQ ID NO: 423323 - protein, 416 aa, unidentified
MTSSPKTIPFERYLAIDAHKRYVMVGGLNAQQEPVLLARKIDVDAYPQWAQANLKPGDAVVIEATTNTWNLYDATAPLVGKVVVAHPFAVKQIANARVKTDKLDVYRLARLLAADLVPEVWVPPIEVRELRTLIAHRRRLVKLRTMTKNRLHSLVHRNNLVPPEGGPFAAKNRTWWEGLSLSSVEKLRIRQDLALLDHLEPQITEVDQELARLSTQPAWVDYTPYLLQLPGFGLINVMTILSAIGDITRFPHAKNLIGYAGLGSSVHDSGQTHHSGRITKQGRKELRWALVEAAWIAVDTHPHWKEQFQKLNRRMKSCKAIVAIARKLLVVIWHVMTERVADRKADPDMVAFKLMTWSWKLNDLQRGGLTARQFVRYCLMQLQLGENLTHVRRAGQRPIASVEEVLALRPELRSSV

SEQ ID NO: 423324 - protein, 376 aa, unidentified
MERGSLMLNTTTFVGLDVHARSIKAVALDAMTGEVRSATFGYDAAEVAGWVSSVDPSAKCVYESGVTGFDLQKRLASMGIDCVVGAVSKMIKPPADRKRKNDRNDAEFLARMLSVGNVVEVWVPDDGCEAARDLSRALDDAREDLKRCKQRLSKFLLRHGYVFSETTPTGRRKGSWTAAHWAWIKSISFPEKADDDVLAYYVDAVRQAMEDKARLERLVEAEASKPRWKRRVDSVRCLKGIDVTSAAGLVFEAGEFSRFKSARSFAAWLGLTPSEHSSGESVRQGGITKAGNKHLRRVLVESAWHYLGCSPHSKDLAKGQVPDPAARRHAAKGVRRLVERRRAMLERGVHKNKANVATARELACWCWAVGCMVENG

SEQ ID NO: 423325 - protein, 531 aa, unidentified
MPKRTLGVDLGINAPCVAVGLDEQGEEVLEATRFELSLEELERVERGALRGAKPGTKLHVVMEKTFPSCEYVSGFFVSRGHKVSYAKPDQVKEGRRFLSRKVKTDARDAWVMARLPILDPRQLERGYQAKPALRELKTLVSHRQSLVSQLTYLKNQVIRYANTVWPGLNQVFGSFDWSHARAFVRELEPEQVVELKESGLAQFLLEKGRITVKRAEQLASRLVPLAKRTVGLQSLVETNWLELHRQHTIQLIAQVELLEERIEAKEQDVKLSYVKADPEQYLLSIPGIGANTAPTILAYMGEVERFATNRKAQGFVGLYPETDATGLSDRKGTSLSKAGPAPLRRDLYLVADAFRRCDPQGALLYYDQMANKGKHHISALVVVANRLVIPRIVAVLKAQRSYELRDLDGNAISKEQAKELVAQFQVSEQVRRRLRSRKRLASNQTETDSAEKEMPRRPSPKITSELEAPRNGRAPRPEHPTTGQVTVTKDQLANMLFHVDSLLTSGGSVEEIRLQLIKETTNFFNKGVDNR

SEQ ID NO: 423326 - protein, 430 aa, unidentified
MPYRITGIDVHKKMLAVVVSDVEVEGEYHFERRRFGSNPEQLRSLAAWLLEQEVEEVVMESTAQYWKPVWEALERHWKPLRQKQEGASRRSGTLHLAQAQSNRGRRGRKRDFPDAERLVKRLVARELILSFVPDTEQRLWRTVTRRKYQLTRDRVRLQNQLESLLEEVHIKLSCLVSDLLGVSAQRMLKALADGETNPAALAALADRKLRATPEQLCDALGACTDLKPVYRRLLKMVLEQLQSLDQQIGQLDQEMAMLLNQHQDAVTRLAEVPGLGVDSAQQIIAEVGPTATTFPSAKCLSSWVGACPGDDESAGVNYSHRSPKGNRHMRRVLNQTANAAARTKGSIFEIVYRRCVPRLGHNQAIGAIAHRQCRLIWLILHQGVRYEERGPAVTKQSKQRRTARMIRQLRALGYRIELPNTQHSSPAQVQ

SEQ ID NO: 423327 - protein, 370 aa, unidentified
MLNTTTFVGLDVHARSIKAVALDAMTGEVRSATFAYDAAAVAEWAGSLDPAAKCVYESGVTGFDLQKKLTALGVDCVVGAVSKMIKPSADRKRKNDRNDAEFLARMLSVGNVIEVWVPDDECEAARDLVRALDDARDDLRRCKQRLSKFLLRHGLVFNETTPSGQRKGNWTAAHWAWINAISFEERADNEVLAYYIDAVRQKLEDKKRLEALVKDEASKARWRKRVDSIRCLKGIDVMSAADLVFEAGEFSRFKNARSFAAWLGLTPSEHSSGESVRQGGITKAGNKHLRRVLVESAWHYLNASAHSKDLAKGQIPDPAARRHATKGVRRLVKRREGMLERGVHKNKANVATARELAAWVWAVGCIVESA

SEQ ID NO: 423328 - protein, 345 aa, unidentified
MEQVSRIGMDTSKHFFQLHGVNAAEKVVLRKKLRRKDMVAFFEALAPTVIGIEACGAAHYLARLLGSFGHEVKLIAPQLVKPYVKRGKNDGADAEALCEAMSRPTMRFVPVKTTEQQAALMMVGLRDRLIRNRTQLSNSIRGYAAEFGFTATKGKAHLVTLLERIQADESVPALARELFAAQAAEYARLQAQIDEVDAKLMAWHKANECSRRLAKIPSVGPIGAVLLMMKTPAPELFRSGREFAAWIGLTPKDHSTAGKVRLGGITRAGDEALRSVLVVGATSIIQHVRRGGRGSPWIVDLLKRKPPKLAAVALANKMARIAWKLMITGESYVAKSTLATLASAA

SEQ ID NO: 423329 - protein, 338 aa, unidentified
MKVYVGMDLHATNTYVGMVDEENEVLHKQRFRNELPLILASLDPFRKDIQGVVVESTFNWYWLVDGLMAEGYRVHLANVSAIKQYEGLKQIDDKRSAFWLANLLRLGILPTGYIYPKEERPTRDLLRKRLHLVRHRTSHILSVKNILARNLGLRMKSEDVKKLEDPEVKRFFPDKEMQIAVLASVGLIRHLEVEISGIERMITKKLKIRKEFAKLMTVPGIGKILTLTIMLEVGNIRRFPTVGDYSSYCRCVKSVRTSAGKIIGYGNRKNGNKYLSWAYIEAAQAARRFHETVRSYYEKKMAKTNRIVAIKALSHKLTRASYYVMRDQVDYDPARLFR

SEQ ID NO: 423330 - protein, 406 aa, unidentified
MEGPIITVDVSKGSCHYQPFIDNGHPMRKPKQLSATIDGFQKLGQTIKDLEAKTEREDIPVIFEATGVYHRPLQKYLEDHKIRYYIISPLLSATYRKTDLHSNKTDALDCAHIAKAYYCEKELRQYQAQPQEYKRLYQLSRIYESELVHLRKRKVSLRSMLDIIYPRIDRTFKGNQNLYDPIPMEILKRYPHPSLLLSHREDTIVKTVGHRTGHLKGYTERIVHKIYEKAKECYSGCDIDDIEVVKLPTLIENMQEQKKKCNSLLKEMIEIARTCPYFASVVSIVGIGENLAARIIAELGDVNRFDNRAAIVAYAGLNPKIQQSGDIDGLHLKISKKGNKHLRCLLYLGAQCNYRLRKEDPLYEFTKKKRQQTQCPLSSKAAYTASAHKLLVIIYSLCKNGTLYHS

SEQ ID NO: 423331 - protein, 354 aa, unidentified
MSQSLNSAVAVIGIDIGKNSFHIVGLDSRGAIVLRQKWSRGQVEARLANMPPCLVGMEACVGAHHLSRKLREFGHDARLMPAKYVRPYSKGQKNDFRDAEAIAEAVQRPTMKFVATKTADQLDLQALHRVRERLVSQRTGIINQIRAFLLERGIAVRQGQRFLRAELPRILATPPDVLSPRMVRVIEDLAGDWRRLDERVEGLSSEIEAVARQDAGCERLMSVPGIGPIISSAMVAAIGSGEVFSKGRDFGAWLGLVPKQTSTGDRTILGKISKRGNRYLRVLFVQAAWVVLIKPKSWERHGLKPWIEAAKKRLHRNVLAIALANKLARIAWSVLARGRNFEARTNTNATAQAA

SEQ ID NO: 423332 - protein, 445 aa, unidentified
MKRKKSFKKGSKKLPRHLQHIKVRAAGIDIGSRSHFVTVPEGADEQAVREFSAFTDDLERMAEWLLACGVTTVAMESTGIYWIPVFEILESHGLDVKLVNARHVKNVPGRKSDVLDCQWLQQLHTYGLLQGAFRPTDQVCTLRAYVRQRATLVRSASSYIQRMQKALAQMNLQLHHVVADITGTTGMRIIKAILDGERRPETLAALRNRRCRNDEATIACALHGNYRPEHLFSLRQAVELYEFHQEKIADCDRQILEQLHQFDGGDSPGEPPADDLGKALQRMSGVDLTSIDGVDTNTALKVLSEIGTDMSRWKTAKHFASWLGLAPGTKVSGGKVLSGATKPVANKAATALRMAAFTLFNSKSALGAYLRRQRARLGAPKAITATAHKMARLVYLMLKHGTSYVDVGQDYYEQRHRTRVIQNPKRKAQSLGFELIGTQAGSTQT

SEQ ID NO: 423333 - protein, 317 aa, unidentified
MTESVKVNVGIDVSKDFLDVHVGDVALRRVPNRSSGLSVLKRILSRYTVSLVLLESTGGYENLAVTYLQSLGYDVCVINPRQARDFARSMGRLAKTDKIDAQILCRLADVIDASPERARFVKPLTDERRQRLVSMVRRRRQLCDLMIAERNRRAKTDAYGSESISTVLDFLTDEVARIDRDIAEHVDSSFSNISSLLQTFTGIGPVTASTLLGELPELGKLNRRQITALVGVAPFNRDSGYMRGRRRISGGRSGVRNVLFMAVLSAVRFNPVLKAFFARLVAAGKPKKVALVACMRRMVCILNAMLRDGSRFEVAPG

SEQ ID NO: 423334 - protein, 315 aa, unidentified
MDAIVVGIDVSKDRLDVHVRRPGGGAGDAFAVARDGKGIAALIEQLRPLGCGVIALEATGGFETVVAAGLAGAGLPVVVVNPAQVRAFGRALGQRAKTDPIDAAVIAHFAEATQPAVRALPDAATQLLADLVARRRQIVEMIGAERQREKRAPARVAKSIARLCKALEKELASVDSDIDGAVRGSPAWAAQEELLASVPGIGKTIARTLIAELPELGRLDRRQIAALAGLAPFTRQSGQWRGRSFIGGGRAAVRSALFMGAMVAARHNPTLKAFRDRLVAAGKPKLLALVATARKLLTILNAIAKAQTPWQPINA

SEQ ID NO: 423335 - protein, 360 aa, unidentified
MTKQVMAGIDLHSNNLMIGIVDQSGKRLKHQRVDCDLKQVTAVLEPYKARLKSVAVESTYNWYWLVDGLRALSYPVVLANPAGIEQYSGIKCADDKNDAYFLAELQRLEILPTGYIYDPKLRPVRDLLRRRLSLVHQRSALMVSFKSLYTRTTGQAMKLGKLKSMEPSEAAALYEHPANQLIAKLQKEHIEGLDKSVARIEKAVLQSARELPYYEKLNTLPGVGKILGMTITMEVGEIERFKTPGDFASYCRAVDSKRTSNEKNKGRNNRKCGNKYLAWAFVEAANFSKRYDESCRRWFDRKAARTNTVIATKALACKLAKAAWHLMAEKVDYDQKRIFPQECGRAAVSQGKGLVKNPEN

SEQ ID NO: 423336 - protein, 372 aa, unidentified
MSQNIVHVGIDVDDERYHGCALNQHTGEVLDFCCRPTLKGLSDQLKKLRDYFGAVQMKLCYEASYVGFSLQRGLKDRGYDCAVVAPSSIPRRPGKSIKTDRIDAAELAEFYANNLLTVVSAPDEQLEQDRDLLRSRQQLIQQQGDLRRHIQSLLRRNGLHYKAETQRKTHWQTHHYGWLDRTIEACSGSLKVNLSLLVRQLKSLDEILADYGEAVEALAVAPRYREPVKALTCYKGIKHLFALTMITEIGDVKRFAHPRQLVSWVGMDIREYASGGKSHRFGITRQGNHYLRTAFIEANQRGYRSARLSKHVKARRVNCAPEYVAIADRCLRRLNKKGNRLLLAGKHPNKVKVACAREMVGFVWESLNRVAA

SEQ ID NO: 423337 - protein, 426 aa, unidentified
MNENEHSRLEAFRQLREEIRGSRDYLIVGIDVAKEKHHAFFGTATGQTLFRRLIFDNTLGGFEKLLTQVKAIQVAEGLPKVVFGLEPTADYHKPLGEHLIGCGQPVVLVAGVAVKNNRALLDGRWDKHDTKDAANIADLISQGKCLFYDYPETALRDLRGLLSFKRKLKKQEHSYRVRIRNHLLAQYFPELDRSFGTADSEAVVRWCVAADRIAGLELESFMNLVVPGKKSPAQRRRLETIWQQAIGSVGCAAGEGVAFESKLMIEGLRQIREALRATEAKIKEICLQFPEYPCLLSIPGFGPDVSAKVLGAIGDPFRFQNRKQVLKLAGLDLSADRSGKTSHTATPVISKIGKSDLRYALYQAAMIASTWNRDFTAYYTHQLQGREKEKGIRTKRRVKLSAKLLMIAWTLMKKKEHFDTRYLYPV

SEQ ID NO: 423338 - protein, 396 aa, unidentified
MPRIWAGMDIGKEHHHCVVINERGERLLSRRVLNDETALLELIRDVLDIDRDVLWAIDINHGVAALVIGLLLNHDQPMAYLTGRAVHHASGTYRGEGKTDAKDALVIADQARMRRDLGQLRPGDEIAVDLRILTGRRTDLVADRTRQINRLRAQLLEIFPALERALDMTNKGPVVLLTGYQTPTAIRRSGAKRIETWLRNRKVRGAAALAKTVAEAAEAQHTALPGEKLAAAMVARLAKGVMALDEEISELDALIEGRFREHPQAEVIRSLPGMGNLLGAEFLAATGGDMDAFDSADRLAGYGGVAPAPRDSGRVSGNLHRPRRYHRGLLRVFYLSAMASLKSCPASKTFYDRKRAEGKGHKQALIALARRRVNVLWAMLRDGQCYHGSLPVTAAA

SEQ ID NO: 423339 - protein, 433 aa, unidentified
MVELFVGIDWGWSTHTVCIVDSSDKKVLECEVAHRGEDVLLFVERLQKLAGGDLSHVAASMESPHGVMVEVLLERGVATYSLNPKQLDRFRDRHSGAGAKDDDLDAYVLATSLRTDPKLFREITLPSEQRLQLAAYSRSYEALTEQVLATANQIRQLLVRYYPQMLELGDWHRERWLWELFEAAPTPALTASPTPTHPQGLSAQKVGAILKEHRIRRHDPKAVLSSLRATPLPVAAGVAQACATQIRILLPLLRTAESQRRECTKSMTALLQEFQKQGTQTEGNEPQSPEQTHHDAAILLSLPGIGVHNGAVMLTEASSALQQRDYQALRRLAGVAPVSRRTGGRSKAPHVLQRQACCRRLREATYHWGRVAAQTDPNTRQHYAQLRQRGHSHGRAIRGVVDRLLKVLVAMLRAARVYDPARRPGSQISELAA

SEQ ID NO: 423340 - protein, 429 aa, unidentified
MPYRIAGIDVHKKMLAVVVSDVEIDSEYQFERKRFSSNPEQLRSLAAWLLEQAVEEVVMESTAQYWKPVWEALERYWKPTCEKREGARRKSGTLHLAQALSNRGRRGRKRDFPDAERLVKRLVAQELTLSFVPDTEQRLWRTVTRKKYQLRCDRIRLQNQLESLLEEAHIKLSSFVSDLLGLSAQRMLKAISEGETDPAVLAALADKHLRATPEQLCDALGACTQLNPVYRRLLKLALEELRLIDDQIGRLDREMASLLGEHQDAVQRLAEVPGLGVDSAQQIIAEVGPTAATFPSAKCLSSWVGACPGDDETAGVNYSHRSPKGNRQMRRILNQSANAAARTKGSIFEIVYRRSVPRLGHNQAIGAIAHRHCRLIWLILHQGVRYEERGPAVTKRSKQLRTWRMIRQLRSLGYHIELPNPQASQARAQ

SEQ ID NO: 423341 - protein, 640 aa, unidentified
MRPPLMRNFRDIRPLVIGWQKWPTAARNLIPLSCFPQGQAGAGRVPPTPGARCLPAKSAGTHRCHRLPPQAKRPRGGSIHERNLVQAAVGGRLINAQVVEVDRSLSGAVKTEHKRGPKFRAPFSGYSLRQHPRLIPIRRLLSYARLGLYLAERITDVSQAKKQSPKPGQEKPAAGPGKRGGKRKGMCLDDRPIIEPNAAGIDIGAREIFVAVPPDRAEDPVQVFSTFTEDLEKMAQWLVSCGVTTVAMESTGVYWIPLYDVLEKHGVRPCLVDAHSMKNVPGRRTDWHECQWLQFLHSVGLLRAAFRPDGEVCAVRSLMRHRSDLVQMTNQHIQHIHKALTQMNVQIHHVINDITGVTGLAIVDAIVAGQRDPLELAKLRHPLIKASEETIIKSLQGNWRPEHLFTLTQSRQMYRHYQEQIMACDAEIARMLVAFQPRVDPQKKPLPPDRKKKQRLRQKKAKPSPGFDLRTESYKLFGVDLTQIPGLMLMVLTLFSEVGRDMSRWKTPGHFVSWLALCPDNDITGGRVAWRGMRSGVHNRAGELFRMAAYSLHHDQTPMGDYLRRMKSKLGPAGATTATARKIAVIFYTMVKRQVEYDATLWAERDAQREKRFEAKLKRQAQQLGYKLVPIEEKPSHLNA

SEQ ID NO: 423342 - protein, 350 aa, unidentified
MPRNFDTAVVTIGIDPGKNTLHLVGLDARGEIVLREKVARTKIVSRLANMRPCLIGIEAGMGTHYVTRDLLALDHDVRQVPPVYAKPFRQTHKNDFRDAYAVAEAVQRPTTRCVPPKTDEQLDLQALHRVRYRLVGQRTAIINQIRCFLLEHGITVRQRLHWLRHALPDILAQRTDVLSPRMVRILEDLAQDWRCLDDRIEAVSGEIDALSKNTELCRHLMTIPGIGPIISSAVVAAIGDGAAFTRGRDFAAWLGLVPKQISTGDRTILGRITKRGNRYLRMLFLQAARVVLLRPRNWMQHSFGPWLAAAAQRLHHNVLATALANKLARIAWSVLVQYRDYEARLSVAAT

SEQ ID NO: 423343 - protein, 352 aa, unidentified
MYYVGVDLHKQTSWFYTLDSSGNRVDSINLTNNHDILKNYFKKIPKPFTLAVEATYNWYFFVDLAREYTNSVFLANSFELKAFAKKHKKTDKIDARLIATVLYKGYLPTVAIADKHTRQIRELLRYRMKLVIDRSRNISRLKALLDKLGYMSSGNFTTFKALENIEIENLPDIYKSLIKRYRELIIYLSKKVYEIEKEINKLPNEDIDVYNLLSAPGIGPFSAALIKSEIIDIRRFNSFNRLCAYSGLAPRVSASANKIYHGSLNVNRRKNLQWILLENVKHFVEADPERAKKFCEIKCRKGYNTAKVILARDFLKVIYHILKEQRPYYGQKRSVEHKIKIQSVAAAALIGV

SEQ ID NO: 423344 - protein, 351 aa, unidentified
MTQQTTAETIATIGIDLGNTTFHLIGMDARGRIVLRRKVSRGQLLPCLANVPVCLIGMEACAGAHHVGRQLAALGHDVRLLPAQYVKPFLKGHKNDYRDAEAIAEAAQRPTMRPVPLKSAEQLDLQALHRVRSRLVGQRTAVINQIRGFLLECGIPVRQGLAGLREALPTLLSHRTDVLSPRMIHLIEDLAGDWHRLDERIDAITGDITALARQEGGCQRLMGIPGVGVITASAMVAAIGTGAAFTKGRDFAAWLGLVPKQISTGGRTILGGLSKRGNRYLRTLFVSGAQVLLQHPGHWHGHGFGRWLAAARARLHRNVLAAALANKLARIAWSVLSHANGYDPEFAARTA

SEQ ID NO: 423345 - protein, 318 aa, unidentified
MSKIAEHSHFVGVDVSKDWLDACLLPGRCTFRVPNTTRGVWSLVGRLAECEDALVVMEATGGFEARALELIAAAGLDVAMVNPRQVRAFARALGILAKTDRIDALAIARYAEAVEPTPRAVAHKDLSEIRALMTRRQQLSDMLTQERGRRCRVTSTLVRRRILVSLRGLKKEIEFIDGAIDKLVAETAKWREKEEQLRSVPGVGKIVSRTLIAFVPELGALTRRQIASLIGVAPFSRDSGTLRGRRTIWGGRANVRAVLYMAALVASKRNRVIAAFYGQLLARGKQRKLALVAAMRKLLTILNAMSRAQTTWEEPNRA

SEQ ID NO: 423346 - protein, 334 aa, unidentified
MAAQITGGVDTHLDVHVVAALDELGALVGVESFPTTPVGYRALLGWLESHGEVIVVGVEGTGSYGAGLARHLQREGVAVVEVDRPNRQRRRRQGKTDSHDAVTAARAAQAGDALGAAKLRDGNVEAIRVLRVVRCGAKRDRTRAINQMRSLVSTAPDDLRQQLRGLTIPKLVRRAAAFRPGGRRDVGSATRLALRTLARRVLELDTEVAALDEVLVPLVAATAPELVAQVGVGTDTAGALLVAAGENTSRLRNERSFARLCGAAPLDASSGKQQRHRLSRAGDRQANSALWRIVISRLSHDPNTRRYLQRRLAQGKTKTEAIRCLIGRVSACRS

SEQ ID NO: 423347 - protein, 314 aa, unidentified
MAAGTVQDVGIDVAKRWLDVAVFQTQEQARFDNDKDGWAKLSKWLKGRNVRAIGMEPSGGYERGVAKALRKAGLPARNVNPHKLRHYARALGRLAKNDRIDALLIARYTAELPTRPVQCDPIAEQLADLVVARRQLSDDKVSLANQLEQVREPTVKRIFTQRLRRIEFDIALLAKRMADLVASQPAFAARDRLIQSFHGAGPVFSHTVLALAPEIGQASRREIAALAGLAPYDFDSGTFKGRRIIWGGRHAVRRVVYMAALNASRSNPVLKAFHQRLIAKGKEPKVALVAVARKILTILSAMIQNNEPWNPNRS

SEQ ID NO: 423348 - protein, 437 aa, unidentified
MSQNKNHAKKSVCLQSLPLIHPHAAGIDVGAKEHVVAVPADRDPPPVRSFKAFTPDLYELAEWLQQCAVKTVALESTGIYWITLYEILEERGFEVRVVNARHVKNVPGRTKTDVLDCQWIQKLHSFGLLSGSFRPDQQIRTLRSLMRLRDNLVVQSTQSVHHMQKALFEMNVQLSNVISDIVGESGMRILEAILAGEHDPARLATLCSPRIKAARETVAKSLHGNWREELLFSLRVALDSFRFAQGKIAECDARITEHLAQFADRAVLETPPSSLKSELHRVCGVDLTKIPGIKEQAAQIIISEVGLDMTRWNTEKQFSSFLGLCPNNSISGGKVLRRSTRKVYNRAADALRLCSQSLTHSKTALGANYRRLKGRLGAPKAIVARAHHLARLVYRMLRYGRQYVEKGIAEYEIKFRLQRLKWLKHEAKSLDMQLLPA

SEQ ID NO: 423349 - protein, 350 aa, unidentified
MARKSNATAVALGVDPGKNTFHLIGLDARGAIVLREKVARDRVVARLANVPPCLIGIEAGMGTHYVTRELLAVGHDVRQVPPVYAKPFRQAHKNDFRDAHAIAEAVQRPTTRCVPAKTDEQLDLQALHRVRYRLVGQRTAIINQIRSFLLEHGITVRQRLHWLRHALPDILAQRTDVLSPRMIRILADLAQDWRRLDERIDAVTGEIEALSKNTDACQHLMTIPGIGPIISSAVVAAIGNGTAFTRGRDFAAWLGLVPKQMSTGDRTILGRITKRGNRYLRMLFMQAARVVLVWPSKWMKHSFGPWLAAAAQRLHHNVLATALANKLARIAWSVLAQHRAYEPRVGAGAA

SEQ ID NO: 423350 - protein, 337 aa, unidentified
MENVALIGIDLGKHSFHIHCQDRFGKALLRKKFNRTKLIESLATFPVCTIVMEACAGAHYMARRLAEFGHESKLISPQFVRPFVKSNKNDFTDAEAICEAACRPSMRFVTPKTESQQTLGALHRVRESFVRDRVKASNQIHGFLLEFGISLPVGHAAIKRLPSVMAEHELPARLITMLERLHAHFKYLEQQIAEIDKELASQLGDDDLGQRLMTIPGVGPITASVLAAELGDGKHYRCSRDFAASVGLVPRQYSTGGRANLKGISKRGDKNLRRLLVQCARAYMQRLERQTGRLADWVRSMLTRRHSNVVACALANKLARTAWALAARHTEFRAMPT

SEQ ID NO: 423351 - protein, 319 aa, unidentified
MEGSPRSFDSFVGIDVARDKFDVCVLPTGDAVSLKYDDKGIRALLERLRPRTNGLIVLEGTGGLEQRLVAELQDAGWAVAVANPRQVRDYARGIGYLAKNDRIDAHVLARFAREVLPHAREKKPEKLRELEQLVIRRRQLLDIRVAEGQRAERMTSVKGRKSIDKVLKCLAKELEDIEAAIADLIQSDDTYRQKSEIVQSTPGIGPVTSATLVAELPELGILNRQEIAALVGVAPYDHDSGVHKGRRSIKGGRGSVRAVMYMAAMSARRFNPIIKRFADRLEKAGKAFRVVLTACMRKLLSILNTMVKRKTQWDPRIAG

SEQ ID NO: 423352 - protein, 348 aa, unidentified
MSEISTIGLDTAKQVFQVEGRDAAGHTVLRRQLRRGGVLKFFRGLPRCVVGMEACAAAHYWGREIAALGHDVRLLPPTSVKPYVKRGRKNDQADAAACCEAVSRPSMKFVPLKTVEQQAALMLHRARKLLIEQRTRLANAIRGHLAEFGIIARRGEAGFTALLALVDNAQDPHVPPPIRPILRPLVEQWRAAADQIDALDRQILASHKDNPDSLRLATAPQLGPIIASAFVATVTDPGRFKNGRQCAAWIGLVPSQHSTGGKTCLGPITKAGDHYLRQLLVIAGAGLIRRVKADPTLSPEGRHRRRQQARPHRLGHARARRNLQDAGRRLTGSEDPMNPSLEPLQTTG

SEQ ID NO: 423353 - protein, 400 aa, unidentified
MNIIGIDVSQGESHATLITEEAEKVTFEFKHNKSGFQILNSYISSNTIIIFETTGVYSAQLTAYLKSKKVKFYELNPLEAKLRMASLRRNKTDKNDSFKLALLGATQLTEIKNHCNKQSALPYDSLRILSLRYKQLIKCRTRILNFLRSSLELTFPELNQIFKNAYAVLALQVFRMYCHPDFLVGLTLKEMTTRVYQSVSRRIHKDVIQSYCAQVWLAAKDSYPAVPADSLEIEIISEYCDEIESYNKEIAYIQNKLIKTAVGLDDFKVISSIPGAGQLNSALLLGFTGDIARFDNYKQLNAFLGLDLNRYQSGKYIKGDTINRRGSSQGRAVETDMIRSMLRNQGKIQNHLIDYYYKLKKPPFNKHDKVALIACANHLNRTIINLVHTHQLYNYSKAIH

SEQ ID NO: 423354 - protein, 387 aa, unidentified
MPQVNDLSRSLAAFDPISTLVVVVEMSKASWLVSGLVPGVERQPLKKLEPDPTALLQLIERWRSEAVRAGRPIRRIALAYEAGRDGFWLARWLIASGIEAYVIHSASVAVSRELKRAKTDRLDAAMLMRVFLGWLRGERGHCGRVAIPTMEEEDARRPSRERENLVNERSRIINRMKSALARFGIRGFKPHLRRAPERLACLQTAEGTGLPANIMDELRRDMARLALVREQISSIEKTRAERLERAPDTGPHAMVRLLSRVIGIGIETADMLVREILSRKLRDRRAVARYAGLTGSPDESGLKSREKGLAKAGNARVRRGLIQLAWRFLMFQKDSALAQWYRTRTEGPSGARKTTMIVALARKLLIALWRLVTTGEIPEGVELRPAA

SEQ ID NO: 423355 - protein, 347 aa, unidentified
MRFYTRQHRHYCGIDLHVKTMYLCILDAAGEVLVHRNVAATPEALLTTVAPYRDDLVVAAECMYTWYWLADACAAEGIRFVLGHALAMKAIHGGKAKNDKLDARKIAALVRGGLLPQAYVYPAAMRATRDLLRRRWHLVRKRGQLLAHLQMTRHQYQIPAFARSLAPAASRVGLADRFADPSVRTSVTIDADLLTQYDRLIGDLERTLVHDVQGHAPETFDRLRSIPGIGKILALTILYEIHDVTRFDRVQTFASYARLVKGQHQSAGKTLGTSGAKMGNVHLKWAFSEAVVLFLRHSREGRTLMARLRKQHGKGKALSILAHKLGRAVFFMLSRETDFSMDKFLAA

SEQ ID NO: 423356 - protein, 338 aa, unidentified
MKITTIGLDIAKSVFHFVAVNQAGKLVKKKMLRRKDVMHFVAKIEPCLIVMEACGSADYWAREFQKLGHQVKLIAPQFVIPYRQGNKNDYNDALAIAEAAQRPNMRFVQPKPVEQQDVQMLHRMRERLNKQSTALVNQVRGMLAEYGIVIAKSKAAFRKAFPEILSDESNELTVKGRYIFNQLHGEFIDIEKRLKSCDTQILEERNTNQVCQRLETTPGIGPVTSTAFYAAVGEGKDFSNGRHFSAWCGLVPKQHSSGGKDNLLGISKRGNAYLRTLFIHGARAVLQHCGGKQDRLSRWAYALAERKGFNKACVALANKLARMAWAIAAWKDEYRTFA

SEQ ID NO: 423357 - protein, 355 aa, unidentified
MSQGKYIGMDVHQATISVAVMDAQGKLIMECLLETRAATIVEFIRGLHGTLSLTFEEGTSAAWLHDLLKPHVSRLVVCDPRKNALLKDGNKSDRIDARKLAELLRGDQLHPVYHGEHGVRTLKELGRSYLTITQDVTRVMNRIKALYRSWAIPCAGATVYSSRHRAEWLAEIAEPGVRVRAERLYQQLDLLQPVRLEARRELLAESHKHSAVKLLRQIPSIGPIRSALLVALLQTPHRFRTKRQLWAYSGFAVQTHDSGEYRSVRGKLQRNRERMTVRGLNDNHNRDLKNLFKSAAISASTRPGPLRDFYLARVEKGMRPTMARLTLARKMAAISLTVWKKGVEFDPQLLQRQAA

SEQ ID NO: 423358 - protein, 345 aa, unidentified
MPIVGGLDIHRKQITFDYLDTGTGQVQRGQISPADREHLRGWLARFTGSDDVAFAVEGCTGWRYVVEELAAAGVAAHLAEPADTAFARGRKRHAKTDKTDSRHLRQLLADGRLPECWIPPARILECRALLELYHDLRAEHTAWVQRIHAVLFHHGAPALGAGTLRTGQGVAALQAVTASCLSPAGQLQISTALEVIEALEARMHAVRHQLLAAARHLTGAKVLAARLYGVGPVTALAMTCWLAGEGRFSSSRQAVRFAGLDVTVWSSDRKGPPGRLSRQGPPVLRWAVYEAGKTHARSSAPDHRYYAQVKDRCNGKRAALSEARKILRQAHHILAELGDDALYAA

SEQ ID NO: 423359 - protein, 359 aa, unidentified
MQSKVKTISFQGQNIYVGIDAHLRNWTVTAMTENNLKKTVSQNPDAGTLYSYLQRVFPGGNYYSAYEAGFCGFSVHRKLQEYGIQNIVVNPADIPTTDKERKQKEDRRDSRKIARSLKNEELTGIHVPKLETEELRSLVRHRKTLVKEISRHKNRVKSHLYRFGITIPTAMAQASRYWSGKFTQWLETVQLSTCYGDVVLQSTLQTVKHLRGELLKINRQLRKLEKEDKYCFKIKLLRSVPGVGLIVAVTLLSELETIKRFKNLDKLCSFVGLVPTTNSSGDDEKIGQITRRSNKPLRSIIIEAAWIASRNDPTLAQCYIELCKRMKPNEAIVKIAKKLLNRIRYVMKNEKEYVHSVVQ

SEQ ID NO: 423360 - protein, 413 aa, unidentified
MVKREKIELVKRQRIFVGIDIAGSKHRARFIDNMGEEQIKPLSFFNDREGLEKLERRVNEIPGIGDDIIFGLEPTGDYWKPVAQYLREKGYPVVLINPYHLKRTKEIIDNSQDKTDDKDSYLIADLTKQSKYFFPVIPEGVYAELREVSINWKRTSQQVARLKCHLSNFLAKYFPEYKGIFSDILGKTSLYILKHFPLPEDIERLGINKLYRVMKKVSKGSIKEGKIQLLYEKARTSIGLKGGSQTAKVLLKEVLSDIEILKKRKEKLTKMMDELLYQSGYLKNLLSIPGVGIVAGSLFLGEIGDPDNYERASQIEKMAGLNLVENSSGSMKGEKKISKRGRSTLRYVGHLVTTVAIGKSPEIKALYRYKVEECKKEKMKALTGLSAKMLRIMFAVCKNKTFYKHEEITRYFR

SEQ ID NO: 423361 - protein, 343 aa, unidentified
MDVDVLGIDLGKNSCSVVGLDPTGRVVLRRRMRRESIVALAAKLSGCVVAMEACCGAHHLGRLLAAQGHEVRLMSPEYVRPYVKAQKNDDRDAEAIAEAATRPTMRFVALKTEAQLDVQVLHRVRDRLVGQRTALTNQVRSILLERGIVVPQGRRRLLEALQVLSDQPDGSGVGPRVRLLLDDMLDQWRGLDRRIAALDDEFAEMARNDPAARRLATIPGVGVLNATALVAAIGDGRTFSRGRDLSAWLGLVPRQATTGGRPKLLGITKRGSKYLRKLIIQGARAALPSLSRTTTPLGSWLRGLLGRAHGNTVVVALASKLVRIAWALLRNQTAFVAGGLAVA

SEQ ID NO: 423362 - protein, 355 aa, unidentified
MPKHLTKGDPEMIYVGMDLSSKSFMVYAINERKKVVFENEISPSRPSLKGLIEELPAGPKVVVYEAGNQMKWVSLALKKMRDVVAHPVHPNEVKWITESRGKTDKVDAKKLAELARADMLPRPIHIVEGTVRELREFVSARMQLQSKRVALINTLRGYVKQEGMKLPVKFFQHRDWREKIAKLKVSEPLRLIIQSYMEAIDGLMVSEGKITDKIKAIEDPRCDLLETIPAIGKMTSRVLLGAIDNAKRFDGKRAIANYGALTPTIYQSGNVTHLGKINRDGRHEVRRVLLQCAHTITRTKRHDVKPLKAFFERIEKKRGKKKAVVALARKLLTTAYGVLKTETPYDPAKLWAYAA

SEQ ID NO: 423363 - protein, 415 aa, unidentified
MEPAYNIAGIDVHKKMLAVVIANARDAELHFECRRFGTTASELRHLSAWLKEHLVQEAAMESTAQYWRPVWVALEGQCRLHLAQARSNRGPRGRKTDFRDAKRIVSRLLSGDLILSYVPEPEQRCWRTLTRTRYQLREDRVRLQNQLENLLEEVQIKLSSMISDLLGKSGRRILRALADGETDPVQLANLGNWRLHASKEELRDALTGQVGPLHRKLLSLYLERLDLIESQMASLEKSIAEALQSHQEAVTRLVEIPGIGVDSAQQIIAEIGHAAVAFPSAAQLASWVGVCPGRQESAGESSSNRSAKGNRTMRRLLDQLAHAAVKKDGCRLQIIFRRWLPRLGYKKAIWAVAHRLCRLIWKVLHEGVRYIEKGSELNPKAQKERKRRLVADLQRLGYKVELTALEPAPGPTPAA

SEQ ID NO: 423364 - protein, 386 aa, unidentified
MKTVAGLDVHKDSVYLCILRENGEKIERVYGVLTPQLDSMRDFMAENKVSEVAMESTSVYWIPIWRVLVDSFELKLVNPYFIRQLPGRKSDVKDAQWIAECVMKELIRGSFIPSPLVQRLRLYDRRIFEINAELVRKYSKIDAILQRCNIRLSNYVSNTDCKSYKAVVKQISEGVTSPQELLRHVHKRIINKHGEDTILAALTGVVSDAEIDMLAQYVAESAILEDNKNKCIEKMREICNTEFKEQMKNLQEIPGVSERSALTVLAEIGPDVNAFPSAKHLVSWCGFNPRNDESNKKIKSNKITHGNRFIRIASVQCAWAASRTKDCYFSKFYAFHTQVRKKFKLKVVVAVARKVLVCIWHILKFNVPYKDFEPQKPVAKDCTQLA

SEQ ID NO: 423365 - protein, 339 aa, unidentified
MPAVKLIAIDTSKHVFTIHGVDEQERPILRRDLKRDQFEAFFRKLPGTEVVLEACGGSHHWARVLQGMGHQARLIPPQYVKPFLKRSKNDDKDAEAINEAAARPSMRLVAVKTVDQQAKGMIVKHREMLVGQRTQAINALRGHAMEFGVVAAKGTVKVAPLLAVLAGEMAIPAAARAMFVQMGAHIAALESRIAGLDAELLAMHKAHSVSRLLAEIPGVGPMIATTMALTVEPENFASGRHFAAWLGLTPREHSTGGKQRLGKISKAGNERLRTLLVVGAMSVIRFAKPGSKSASPWLLQLLERKPRKLPAVALANKMARIIWAMMARGEAYRRQPIAP

SEQ ID NO: 423366 - protein, 361 aa, unidentified
MSESMALVGLDVHQAQTVAAVLDPSTGELLVQRLRGEPASVVPVFLEELDRPVAAVYEAGPTGFALARVAEQRGLDVRVVAPGSIPRAPGDRVKTDRRDAKRLVRLFAAGELGFAFVPSETDERFRDLVRCIEDARKDLMRCRQRLSKFLLRRGHRFPSKAWTQPHERWLGKLHFEDAPSQATFVDYLSAVQALVQRRRALIGVLEQTVPQSSHAQTVARLRCFRGIDTLTAAGLCAEVGDFHRFAKPALLSGFLGVVPSEYTSDEKRVQGQITKAGPPHARRLLVEAAHHYRHRPAVGEGIAARQAGQDPRVVQIAWRCQRRLHERWTHLAGTRGKRTGTVAIACARELAAFCWEAATLD

SEQ ID NO: 423367 - protein, 410 aa, unidentified
MEVLHPHCAGLDVHKETVVACVRHMANGSVKRQIRTFKTTTKELLALSQWLGSEGCTHVAMEATGVYWKPVWHILSDGDFELVLANAAHVRNVPGRKSDTNDATWLADLLAHGLIRGSFVPDAQTQEMRNLLRTRKQLVRERTSHVQRLQKTLEDANIKLDSAISDVVGVSGRAMIEALIAGESDPGKLAEFAHRRLKAPPEELREALRGRVTKHHRFLLRLHLKQIDALDAAVAEIDREVNDSLEPFRTSVQLLSTIPGISQLSAAVITAEIGIDMSRFPTDGHLISWAGLCPKNDESAGKRRSTRMRKGAPWLKTMLIQCAWAATRKKGSYLQAQFHRLRSRRGAKKAIGAVAASILTAAYHMLSNGTLYQDLGADHFDRRAKTAQTKRLVNRLQRLGYAVQIIPIPT

SEQ ID NO: 423368 - protein, 341 aa, unidentified
MEEYVGLDVSMKETSVSIRRAGERIWRGKCASDPRIIAELIRKRAPAVKRVVFETGPLSIWFYHSLRTEGLPAICIDARHAKAALDMATNKTDANDADGLAQLAEVGFFREVRVKGFDSMLTRTLVGARTRLVRITTELSNQIRGVMKTFGLLVPAGKGSIFEKNVRSLLTDQDGLAPIVLPMLEAWRGIRIRAAELGRQLVRDARQNQACRILMSIPGIGAITATAFTTAIERPDNFKKSRSVGAWIGLTTRRYQSGEVDYDGHISRRGDAHLRGLLYEAAAVILTRSSTDSTLRTWGLKLRERIGFKRAAVAVARKLAVIMHTMLKTGELFNPNAGAIA

SEQ ID NO: 423369 - protein, 440 aa, unidentified
MSVRDGVGSSAQARLVEFGNRGLTLVLLKEECMEVIWQRCAGLDVHKATVVACLRVQQGGQVRHEVRRFSTVSRELVELGDWLEAERCPVVAMEATGVYWKPVWHLLEGRVELVLANAAHIRNVPGRKSDTNDATWIADLLAHGLIRSSFVPPKPISELRELTRTRKQLTREIVGHTQRIQRVLEEANVKLDSVISNVLGVSGRRMLRAMIEGQTDPQALAALGSPRLECSSEALVEALRGRVTAHHRFLLSQHLGLIEQLERTVAEFDAQIERVIQPFRGIVERLTTIPGISRVSAQGLVGEIGVEMERFPTVGHLVSWAGLCPRLDESAGKHRSTRVRKSSCWLKPMLVQCAWAASRSKGTYLQAQYLRLKARRGPKKAVVAVAASILTAAYHLIRDGQEYRDLGHDYFTRRDSDRVAQRLAKRIRELGYEVQIIKAA

SEQ ID NO: 423370 - protein, 409 aa, unidentified
MELLIARGAGLDVHKATVVATVRVPDDRGGRRSVTETFGTMTADLLALRDWLQAYGVTHVALESTGVYWKPVYYVLEDAFTLLLINMQELKRVPGRKTDVKDSEWLAQLLECGLLKSSFVPPPPIRELRDLTRYRVQQVRDRAQEVNRLCKVLEDAGLKLTSVMTDVMGASGRAMLRALVEGTTDPMVLADLARGALRKKLPELRRALQGRFRPHHAFLIEQIFAKIDFLDETLDRLMSEIDRRLVPFEPMLTALDTIPGVDRIGAIGIVAETGGDMSRFPSAAHLCSWGAMCPGQNESAGKRRSGKTRKGNRYLRRTLIQAALGATHKKHSALQARYHRVKRHRGHKKAVVAVGHQILEIAYYIMRDGVTYDELGADYFERRHAERAVRRHVRQLEALGFHVTIEKAA

SEQ ID NO: 423371 - protein, 386 aa, unidentified
MARPENNLPAAAHDGAARCYLAIELSKRSWVIAASTPLSDKISRYTLTSGSLQELVELIERLCARITRATGQVVEVISCYEAGYDGFWLHRSLAKRGVRNHVIDPASLKVDRRARGAKTDRIDAERLLRSLMAYLRGEPKVWSVVRVPSIAEEDARRLHRERDRLIGERVQHVNRIKGLCAIHGIYDYEPMRLDRLRRLEQLRTAQGEELPERLKGEIGRELQRLALVLEMIRALEAERDAIVTDAAPTQLNADKIRRLNELRALGPEISTVLVGEVFYRSFNNRRQVGSYVGVTPSPFASGTIAREQGISKAGNPKARRTMIELAWLWLRYQPDSALSVWFRERVGTMKGRIRRITIVAMARKLLVALWRYLETGLIPPGALLKA

SEQ ID NO: 423372 - protein, 411 aa, unidentified
MDVLHGCSAGLDVHKATVVACVRRMLEGGRIEKEVRTFGATTRELLELSDWLGQKGVTHVAMEATGVYWKPVWNVMEGRFELVLANARHIQNVPGRKTDVKDCEWIAQLMQYGLLSPSFVPERPQRELRDLVRHRVALVEDRTRMANRIQKVLEDANIKLGTVATDILGVSGKRMLQGLVDGQKSPEMLANLAQGRMRKKVPELTMALEGKVTEHHRFMLRLLLQQVDASDAMVAEVTHRIESLTRPNEEAVTRLTSIPGIDQRSAQNILAEIGTDMSRFKTSAHLASWAGICPGNHESAGKRKTGRTAKGNRWLRRTLCQAAWASTRCRGTYLQAQYRRLAGKRGKKRAILAVAHSILTAIHAMLSRNTDYKDLGGGYFDQRNSVAATRNLVRRLEALGHSVTLQPKASA

SEQ ID NO: 423373 - protein, 422 aa, unidentified
MVAVMIGIDPHKASHTAVAIDPAEVPLGQLQVRACAAQAERLLAWAQAWPQRTWAVEGAGGVGHLLARQLAAAGERVLDVPPELAARVRLLAAGNTSKNDPSDARSVAVAALRSAGVREVCRDDHAAVLKVWSKRYEDLGRARTQVACRLHQVLCELIPGGASKEITAGQAARILASITPADAAAAARCELAAELAGDLRGIDVRLRDTRKKLATAARAARTSLTGLFGIGPVSAAAITGDVRHVSRFPGRNHFAAYDGTAPIEVSSGGRKVRRLSRRGTRRLNHAIHMAAVTQIRHRHSPGRAYYDRKPAGGKTGKEALRCLKRRISDAIFACLQADARRAAPAKSPGGQPGNHSASRAAGSHPDHRLFGQATPGPATHPTTPAADPAPGSLPASLPSRASRRPGPGPGKARPRSGASRRP

SEQ ID NO: 423374 - protein, 459 aa, unidentified
MQDNIETQENRRRQLEGLPVIRRGVAGIDLGSKQHWVCAPTEDGAGREITDFGSTTSELLGMAKWLKDRKVESIAMESTGVYWIAPYEVLEAAGLEILLVDTRQLAQVPGRDKKTDPTDCEWIQRLHSCGLLRGSFRPPEQVCMLRTLVRDKANLVAECGDWLRRMQKSLDQMNVRVHRAVSDIDGVTGLAILRAIANGERDARQLAKLRDKRCRKTEEEIAEQLNGHWRQDHLFSLKQALKMYDDIQQRIGDYEQEIIRQLGAMQRTEFREQAAPKPQNRQKAKTIKQRGQESIREALYRMSGVDLTSIDAIGVETVEVVLSEYGADLSRFPTEKQFVSHVKLAPYTPRSGGKPLKKKRRNTASTRVAAALRMAAVSLRNSATALGAYYRKIARNIARDVAVFATARKLAILIYRLLRWGQPYVDEGEEAFEKRYQERRITALKSKARELGYALVQKA

SEQ ID NO: 423375 - protein, 315 aa, unidentified
MTNTKTRKSVVNVGVDVGKACLDIVIYEKDLHWQENNTVEGIKRILKRLSHYQVKRLVMEATGRYEFELAQAAYEKGLPVCIAKPLSVRRYAGAVEQLAKTDKIDAAIIAEYAAVVQPRVTPQKSKNLIAIKNLVVRRRQLVNLRTQEMNRLKIMGKTFEVSCRRMIRALDAEIERMEKRLASHVEQQAEWTEKYTVLTSAPGVGNTLCYTLLADLPELGTLNNREVSALVGVAPINRDSGKLRGKRRVQGGRAGVRTVLYMATLSALQCNPVIKAFYRKLISQGKHKKVAITACMRKFITILNTMLKNKTAWAY

SEQ ID NO: 423376 - protein, 348 aa, unidentified
MGLYAGIDLHSKSNHLAIIDENRKRVLKKKLANDPDLILGVLAPYQGEIAGIVVESTYNWYWLVDLLQENGYRVHLANPAAIQKYSGQKHVDDTHDAFWLAELLQLHILPEGYIYPKETRALRDLLRKRQQLVRVRTSLILSLQNIVTRNFGIKLSASDLKILTEDRVQPYLQENEDLLLAGSANKSCIDSLTLQIVRIEKAVEKKLKLLPPYIQLLTLPGVGRTLAMTIMLETGPISRFDKVGRYASYCRKVSSKWTSNEKVKGHGNKKNGNRYLAWAFSEAAEHARRHHAGSRHFYQRKLRQKKNMMVAHNALAHKLARAAYWILRDNVPFQEAKMFGQLEATLYN

SEQ ID NO: 423377 - protein, 362 aa, unidentified
MSITMIGLDTSKSVFQIHGVNESGKVELKRKVRRSDLIAFFEKQERCIVVMEACGAAHHWARILTGLGHTVKLIAPEAVKPFVKKGKKNDAADAAAICEAASRPDVKFVPVKTVEQQGILALHTARSLLVKQQTMLANAIRGLATEFGHVVPKGLHNLEPLVEFVDADEAMPAQARQAIAELYKRFGELANGIQSCEAEIVKHARTDPTARRLATIPGIGPITASLIAATVVDISQFKTARQFAAWLGLVPRQHSTAGKTRLGRITKAGNKEIRKLLVLGATSMVGRAEGWHSALGAWLRDILQRRPVRLVTVALANKMARIAWARLAKVPASRLRLVGRPGEGVMTRNEVYRPQGGVAAKA

SEQ ID NO: 423378 - protein, 407 aa, unidentified
MGVFVGVDWGGVSHAVCVIDGKGQVADRFVTGHDREGLKTLILRLMEHGEPANIPVAIERPSGLLVDALVEAGFIVTPIHPNVVKACRPRYRAVCAKSDPGDAYILADVLRTDGHRLSPLEPQSDAIKALRGLVRGRDDLVGARVALANQLTALLDSFWPGAAVVFADVASPIALAFIERYPTPESAARLGRARMAGFLAQHQYCGRKSPEVLLERLRAAAQGRAGEAESEAKGELVRALARTLQSLVAEIARLTSRIEHAVAQLPDGKIVMSFPRAGKICAAQILAELGDVRERFQTCDQLFAEAGLAPVTYASGKSRGVGWRWACNKRLRAAITCFADNSRHQSPWAADIYKRARARGCDHPHAIRILGRAWARVLWRAWTNREPYDPARHAGAKPFMPTASTGG

SEQ ID NO: 423379 - protein, 409 aa, unidentified
MNDSGKRYIGLDVHKHYLIALGVDGDLNVVLPARRVELFRLEAWMKKNLTKQDEVVLEMTTNTWQLYDELVQYAGKVMVVHPPHVALITRSQVMNDKIAASILARLLAKGLLVGIWIPPQEIREARGLVAQRQKMVRLATQAKNRLHAVIQRHHLVPPAGNPFGAKNKAWWMSLSLGKLEKLNLQSDLETLQFAEKQVKDMTEIMEEMAAEQEEIGRLLHLAGFGVVIAVTVWAAIGDIRRFVDPQHLVGYAGLGTRVHDSGMTSRSGKITKAGRRDLRTVLIEAANAAANSHPHWKAELARLEPRLGRNKAVVAIARKLLIAVWFVWQGKTDKYAEPEAVAQKMLKFAYAVGKANRPTEQTAAQFARIRMDTLGLGRELTSISWGSKKPIPLPPSSLKTEGSDVPNTK

SEQ ID NO: 423380 - protein, 331 aa, unidentified
MHYSHYIGVDISKNTLDAVIYATEMRRSDTKHLTNDKAGLKELVTWAKAAGAKPKDMLICAEHTGVYGNELQIFCEKKGIALCLESPLQIKRSMGLVRGKDDQIDAIRIAQYAYDHKDKLKLFHRPSGNIITLSNLLRERRLYVRQKATLASQQGELGSYETAQSRNRRESLINKQDAVIKAVEKQMLEIIKSDEALQKTYDLISTVVGIGPITAIDTIVYTNNFQNFDTPRQYASFIGVAPFDHTSGTSVNGRTRVSQFCRKQQKVSITMAARSAIIHDPWMKNYYHRKMKEKGEQRNQHGVVLNAVKFKLVLRMFAAVKSGTPYKVMKY

SEQ ID NO: 423381 - protein, 331 aa, unidentified
MFPVGIDVSKNTLDLCMLYDGIKGRIKTRNIQNNRHSVENILRWLRLQHCGPEDVHVVMEATGVYHERLATELHDAGFRVSLANPHRSREFARGMGIMTKTDKVDAYMLACYAFLKKPHYWEPPAPEIRYLGALLRRRDVLLGDALREEKRLEKYLSTDTPADIISSCRRMAQLLREEVSNIERQIKAHIKASPALRRDYTLLNSIKSVGPQLGMHMLVVLRSHNFASAEQAAAFLGVVPIEKRSGTSVRSRPRMSKIGPPQLRAKLYMSALCGKIYNKRMRNIYDEMCLRGKPKMVAIGALMRKLVHWCYGVLKTGTVFNDEGLKQVLST

SEQ ID NO: 423382 - protein, 343 aa, unidentified
MEHYAGIDVSLELSSVCVVDATGRIVREAKVPSEPEALVGFLGQLGLPLTRVGLEAGPLSQWLHAGLTGAGLEAVLLETRQVKAALSAMIVKTDRKDARGIAQLLRMGWYRPVHRKSPPAQEVRALLVGRKLLQGKLVDVELSIRGLLRGFVLKLGEVSKGRFAARVRELVAGQPMLERVVEPMLRARDVLRAEYQVLHRAVLAIVREDAVCRRLMTVPGVGALVAVTFASAVDDPARFRRSRAVGAHFGLTPKRYQSGETDVTGGISKAGDGMVRAALYEAAHAMLTRTGRFSTLKRWALEVAKRRGMKRAKVALARKLSALLHRLWVDGSEFRFGREAAKA

SEQ ID NO: 423383 - protein, 430 aa, unidentified
MQLFIPTTNKEETTMRGLRVKRVRTVKEGTLIATVDIGVANNTGYCTTLDGRSTKSFRFDNTKEGFEKFWCMTIASKNRLGCDEVLVGYASTGPYAEPLVHYLANKQVKIVQVNPMHTKKMKEVNDNSPLKTDDKDPRVIADIIRLGRALTIVVPEGNAAYLRRLNNARERHVGERTAFLNQLQQLVFLIFPEFKTVLKDMKGKTAQHILKRYSTPERIGTLSKEALGEEMRKRSMGKFGIKEAEFLIGLARETVGIKEGLAGIFMDIRHILMQLEAEVRFISEIEAEMGATLERIPCSVKLLSIKGLGTVSVAGLIGEVGDFSKFSTQSKIMKLAGLDLYEISSGKRKGQRRISKRGRSLLRKILFYAAIQMIRKNGIMYDYYARLTGRGMERMRALIAQYRGSSYGSSMPSCGITETMWDNTKPPKGG

SEQ ID NO: 423384 - protein, 385 aa, unidentified
MTMNQVKYGCGIDIAKEKFDACLGLFDINQGFTKVGTKQFSNTSKGYTQYMEWVKKQCKHSLPVLHLMEATGIYYENLALYLYNKQESVSVILPNKAKKYKESIGLKTKTDGVDALGLSRMVCEQVLPLWQTANPKFYELRLFTRQLESIVVQTGSVKNQLEAVSLSMYPSKQIEKLLKQQIKFFDKQKAELLQTISKIVEEDELLKRKFANILVIKGLGIQAVATIIAETNGFELFKNISQLVSYAGYDVIENQSGKHIGKTKISKKGNGKIRRCLHFPALVVVRCKVKPFVQLYERVYQTSNIKMKGYTAVQKKLLVMIYTLWKKDELFNENYQQDKISKEDEKEFSFVSASQKQKQKKVAPVKTEATQDKHPSKNRSMPSFV

SEQ ID NO: 423385 - protein, 320 aa, unidentified
MMAQKNLVVVGIDVAKDKVDACIRSLSQRQAFPSTAQGRRGLIAWLRRHKVAKAVMEASGGYERDWAKALREARLAVRIVDPKRVRNFARSAGRLAKNDSIDAEMIAWFAETFGEAICQAYDTEREKLKQIVYARQALLDLRTGLKNRGEHSGPEVVQRMQARLLKKIAAELATLEVAMVAMVKATPRFAELAEIIESVPGVAGITSAALIAAMPELGQISNQAAAALLGTAPYDDDSGKRRGERHIKGGRRKLRNLFYMACLGAGTRHNAVLNVFYRRLIAKGKEKKVALVACMRKLIVVLNVMVARREKWDASRYATA

SEQ ID NO: 423386 - protein, 336 aa, unidentified
MEHCAIDLGGRKSQVCVRASDGTIVHESRPETLALKQFLQGRPKSRVIVETCAEAFGVADAALALGHEVRVVSATLVRTLGVGARRTKTDRRDAQTLSEVSCRIDLPSVHVPGQRSREVKTICGMRDGLVTARAKLINTVRGWLRGQAVRISSGATPGFTARVREIGDLPDHLGAQLRAIDSLSREIKIADERVEGLAGADPVCRRLMTVPGIGAQTALRYTAALDDITRFHDSHRVEAYLGLVPGERSSSEREQRLSITKAGATSVRWLLVQAAWALRRCKTAEARPLQLWTLEIEKRRGKQIATVALARKLTGILYAIWRNGTSYDPTRTTQTH

SEQ ID NO: 423387 - protein, 412 aa, unidentified
MKDLLEISCGLDIHKEKIVACILTGPLGKPTHSEIREFTTLIPDMLALRDWIISENCHHIAMESTGIYWIPIYEILEDAFSGDITLLVVNARHMKNVPGKKTDMRDSEWISTLLRAGLLNASFIPEKRIREFRDLNRYRKSIIRDITSQKNRVEKFLQSSGFRLSSFISDIFGASGRNIILHLMEHGQIDKISLDSYLKTKTRKRIDEILMSVNGTLSEHQKSFLKILMCHYDSMKEHLIEIETHLQEDMLPFALQIEQLNTIYGISTTASCAIIAEIGTDMKPFKTAEHICSWAGLCPGNNESAGKRKSTSITKGNPYIKSMLCEIAWVIAGKRNTYLSAWYWRIKQKKGAKKAIAAPVRRLLVIIYTMLKQGTLFDENCFETRRKNCKQKQLSHYIRELEKRGYHIEASA

SEQ ID NO: 423388 - protein, 404 aa, unidentified
MLNAVGIDVSKGKSTVSILQPGGVIIRKPFNVEHSKKGLRDLSELICSLPGESRAVMECTGRYHEPVLLTLHEAGIFTCAVNPHLIKDFGNNSLRKVKSDPADSKKIAKYALDNWEDLRQYSSMDTIRNQLKTLNTQKTFLTGLMVSAKTNLISMSDMTFPGVNELFSSPKRPDGSEKWVDFLASFWHVDCVRKIGLRAFTTRYQAFCKRHGYNFSEQKAQDIFAFSKELVPTVPKDAVYKELVMSSIDQFRSTSVNAEMIRQKMDELASSLPEYQTVLSMKGVGKTLGPQLIAEIGDITRYTHREALTAFAGVDPGVDDSGKRISKSNKATKIGSAKLRKTLFLIMSCLLQTKPEGDPVYDFLDKKRSEGKPYLVYMTAGANKFLRIYYGKVKECIRNLEKPE

SEQ ID NO: 423389 - protein, 339 aa, unidentified
MILIPVGIDIAKNVMQVHYVDAETGEIVNKPIKRAQFLEYFANHVPCLIGMEACGGAHHWARELVKMGHQVKLLPAEFVKAFNVRNKNDAADARAIWLAVQQPSKPVAVKTEMQQAMLALHRARQQLVAFRTMQINGLRGMLAEFGEVMGKKRAGIVRAIPEVLARVAERLPAVLIDTLREQWKRVMELDEQIGGIERRMREWKKDDLAVKAISEIPGVGLLTATATVAMMGDAKAFKSGREFAAWLGLVPKQTGSGGRVKLHGISKRGDTYLRTLLIHGARSVMTNAREPGAWLEQLKKRRPWNVAIVALANKMARTIWAVLAHDQPYQKGHVSVKPA

SEQ ID NO: 423390 - protein, 339 aa, unidentified
MSEITTIGLDLAKHVFQVHGVDANGATVVRKRLRRVQVLAFFSRLPRCLIGLEACTTAHYWARELRTLGHEVQLMPAQYVKAYVKRNKNDAADAEAICEAVVRPTMRFVPVKTPEQQAAVLLHRGRERLVRQRTGLVNALRAHLAEFGVVAPQGLRNVGKLITIVRDESDARLPDLARQVLAVLAAQIEQIEAAVAALEKQLMAWHKSNAVSQRLATIPGIGPIIATAIAATVVEPSAFRSGREFAAWLGLVPRQNSTGGKTRLGGISKRGNQYLRRLLINGASANLLRSKLTNADPWVIGMRRRRPSLVVAVALANKTARIAWAVMHRQEVYQRMAAA

SEQ ID NO: 423391 - protein, 299 aa, unidentified
MVVDMSQSSWLVAGIVPGIERHPLKKLDPDEEALLQLIQRWRDEGVKVGRPITRIALAFEAGRDGFWLARWLRMRGIESYVIHSTSVAVPREHRRAKTDRLDSELLKRVFIGWLRGEPDHCRMVAIPTLEEEDAKRPNRERENLIGERTRIVNRMKGCLARLGIRNFKSTLRKASELLATLSTPEGRPVPPNTLAELRRDMARLRFIMDQIQEIERTRLQGLKQSPEKGPHAMVRLLARVIGVGIETADMLVHEVLSRNLRDRRAVARYAGLTGSPDESGRKRREKASPRQAIHGCVAA

SEQ ID NO: 423392 - protein, 410 aa, unidentified
MEGAVVGPGPEPTRFVALDVHKQYVMVGAVDARQEVVVPPRRVALVEFPEWARDHLTPADAVVLEATAHAWSLYDCLTSLVAPVTVAHAGVIKLIAHARVKTDRRDTLHLARLLAARMIPAVWVPPVEVRELRGLITHRRRLVAQRVQAGNRLQAVLHRHRIVPPVGKLFSRQNRAWWADLPVSTSERLRVRQDLAVVETLDALVVEVEAELGRLSTTTPWADQVPYLVQLSGLGVLAAMTVLAAIGDITRFPTPKHVVGYAGLGAGVHDSGQTHQGGRITKQGRRELRGAMVEAAWVAVAHHPHWKEQFARLSARLGAQKAIVAIARKLLVVVWHLLTKREADRAGNPEAIARKLYTWVSRCGTTPGRQRPLGALVRRELDRLGIGAELTVTGYGRCPLPPPGVTAHAG

SEQ ID NO: 423393 - protein, 411 aa, unidentified
MRLFAGDDWAEDHHDVEVMSEAGKVLVKRRLPEGVAGMARLHELIGEHLGEDADGAEVVVGIETDHGPWVAALVAAGYTVFAVNPLQASRYRERHGVSGAKSDSGDAHMLTDMVRTDSHQLRAVAGDSAEADGVRVLARTHKTLIWERTRQVQRLRYQLREYFPAALEAFDDLDAADALELLGKAPDPARAARLTRAQVSAALKRARRRDIPGKATAILAALRGAQLGQPAALTAAYAVTVRSLIAVIIVLNEQVKALQGQVEENFGRHPDAEIYRSQPGMGAILGARVLGEFGDDPDRYADGKARRNYGGTSPITRASGKKKVVAARFIHNDRLVDALNAQAFASLNASPGARALYDELRARGIEHNDALRRLANRLVGILHGCLKTRTLYDEATAWGHRENLPQSSVAA

SEQ ID NO: 423394 - protein, 370 aa, unidentified
MHDNHPATLFVALDLSRSSWVAAVHAPHAAGKVSRHKLAPGAEGLLALIERIRAQAERALGAPVRVASCHEAGRDGFWLHRVLQKAGIENRVIDPASLLVDRRARRAKTDRLDAEALLRALMALCRGEPRVCAVVRAPSVEEEDARRTTRERANLLKERVRHVNRIKGLLATQGIDDYQPLRPDRLERLGALVTGDGRPLPERLAAEVRRHLRRLELVLEMLDEVEAERDRATAAAPGKAAALLRLKGRGAESAAVLGAEVFYRPFANRRGVAAYAGLVPSPFASGDSCRDQGVSKAGNPRVRRMMVELAWLWVRFQPESALSQWFVARVGAAKGRVRRIAIVALARKLLVALWRYVETGLVPTGAVLKA

SEQ ID NO: 423395 - protein, 344 aa, unidentified
MEHFAGLDVSVKDTSVCIVDDTGKIVREVKVASEPEALLAVLKNPAYHFKRVGLEAGPLSQWLFSALAEAGLPVICVETRHMRAVLKAQINKTDRNDARGMAQMMRVGIYRPVHVKTLRSQKLRMLLTHRKLLQSKAIAIDNDLRGTLRNFGLKVGMVGTVRFEARIRELVENLPDLAALIEPLLIVRRTLREQFCILHRRLLAIVRDDEVCRRLMTTPGVGPVVSLTYRATIDVPARFRKSKSVGAVVGLTCAKYQSGEVDWDGRISRCGDEMMRTMLYEAAQAMLRSKKWSWLKAWAMQIARRRGMKKAIVALARRLAVIMHRIWVDGTEFRWTREQATTAA

SEQ ID NO: 423396 - protein, 366 aa, unidentified
MEVTTIGIDLAKSVFAVSGADSRGRVVIRRQLRRAQVLGFMRGLPRCVVGMEATGGAQYWARQLTALGHAVRLMSPALVMPYRKGNKTDRNDADAILEAVSRPSMRFVTVKSVAQQDLLALHKVRAQLVKSRTALCNQLRGLLRERGVAVRMGVAALKRGLPAALADESSELSGEMRELLSEMSQWLGTLEQRIASCEARITQKFKHDERCVRLAEVPGVGPLTATALVAAVGNAQRFKNGRELSAYLGLVPRQHSSGGKTVLLGITKRGDRYLRTLLIHGARSALRQCKLKGDARSDWARRISAARGPNVAAVAMANKNARILWALLSRGDRYRSSRVLTRAVLRPGSPPPVERARGAKLRVAKD

SEQ ID NO: 423397 - protein, 452 aa, unidentified
MALIVGIDLGRKSAHDVVILRRETGLEIGRGFRFTSSTEGFHKLFRKIEAVRMDEEPVDFVIDSPGRAWIPVAAVLKARGFRVYRPSAYRVKNVRQAGHRKNKTNRIDALTLARCLKDYPEDTALVFLPQGVQARLDQIVRQRDRVVDSLARRKQRIQDLCEAVNPGLTKLPDGFLLNQAGRAFLRAYIDPRSVLRLGKKRLGLFLQKRYRLELEPETLDKLFLACRDAVELYKPARDADSMPFDERILQHEVNWELDQLEREEQRRGLLELQIKKLNRKIDPTDSLISLPGIRHILAAGIRSCVGDIDRFETLNKHKGFAGFYPSVRKTGDHASSPMPMSKMSCNRYKRCLYLAAENAYKWDLEMAAFYHKRRRAGHTHTQAVCAVANAKLLPRIHHLMKELKQAESTKTTRPHYVFRDLSGNPISKAEAKAIITATWGDVDYSKKGLATA

SEQ ID NO: 423398 - protein, 360 aa, unidentified
MLYLAIDQHRKQLTVNLRNESGDVILKRQVSTEWPRVRKFLADIQKQSRAEGGFVAILEVCGFNDWLIKLLKEHGCGELILIQPEKRSKKKTDRRDANSLGEILWVNRGRLLEGRCVQGVRRVRWPNLGEREDRQLTAVRKRLGQLRTKTINQVKYLLRKHNLEQECPTKGLDTIKGKKWLAELTLGSIDRLQMDQLVAQWKLWDEQIKKTAAEIEKRQAESKPAVVLATIPGCGAYSSLALACRVGPIERFPRPGSLANYWGLTPGCRNSGEATDRLGSITKQGSGMARFILGQMVLHVLRRDPWMKAWYGRIKKRRGSKIARVAVMRRLATIIWHMLKHNEPYAMGGPPRRQRKDQAA

SEQ ID NO: 423399 - protein, 405 aa, unidentified
MKLTCGVDWAEAHYDVALVDGDGVVVARARIDTGATGFNKLLALIAEHEGSAQDTPVSIETDKNLLVVALVEAGFTVYPINPRAVARYRERYGQAGGKSEPGDAAVLAHILRTDRHLHRQMPAVSEQGRAVKALARQHQEAIWALHQTVSRLRSVLLEFYPQALQAFPNLTHKAALTVLAAAPTPASSRQLTRRRVVTLLQRSGRGNHPTLVEQILTDLHTAALRQPPQVEQALGHTVVGLVGIVVAMQRAVDDLELELAREFDQHPQTAILRSAPGLGPILAARILAEIGDDPQRFANPNSLRAFAGTAPVTIASGRSHYVKARKVRNKRLADACHWWAFTALTKSAGAREHYDKRRAAGDHHNAALRNLANKLLGRLWWCLANNQTWDDTAWPHRLKPDSVAA

SEQ ID NO: 423400 - protein, 410 aa, unidentified
MEPILKSCAGMDVHEKKVDVCIAYGPFDKPPKFEIRTFSTMTSDLEELTTWLKKYEVTTIGMESTGIYWKPIFNVMEGEFQIVLANAQRLKAIPRKKTDIIDCKRIANLLRYGLVPNSFIPPKEIRELRDLNRTRRKLVGMMTSEKNRLVKVLEAANIKLSSVVTKIYGVSSLAMIRSLLEKDKLSREEISQMAKGKLKKKVDLLEKALNGKLTDHHRFLLGMHLENIDHLAKQIKKIDEEIQRKMVPFQKESKLIQTIPGISEVNSSAILAEIGIDMSQFPDEAHLSSWAGVCPGNNESAGKKKSGKTQKGNSFLKGTLTEAAWAASKTKDSSYSAIYHNIVRRRGKNRALVALAHRMLIDIYFVLKTGVPYQDIGAKAVHERTIKRREQSMIRSLERAGYSVAKAATA

SEQ ID NO: 423401 - protein, 390 aa, unidentified
MAPLIIVAQTRPFVIGVDCHARTHTYAIIEASTKRQVACEQFPTTSAGISRALSWVGRRTDGDMGCLWAVEGIGSYGARLARAVTDAGYDVTEAPRMNARGRRGLGKSDPLDATAIGAAVLGLEESQLRVPRRDEGTRAGLRILSAARDQLTRERTMNVNALIALLRAHDLGIDTRKPLVPAQINAITRWRERQEQMELAIAREEAVRLARRVLEVTTQLAANQKRMTELIQQSPAAPLLEMVGAGAVSVAAVLTAWSHPGRVRSEAAFASLAGVNPLPASSGNTVRHRLNRGGDRRLNRALHTITMTRMIHHPGTREYVAKRTQEGRGYREIRRSLKRYLARTLYRQLNTLYASMDPARPSVAGAEPSQLVGAYRDSAPRLGLIAAPAS

SEQ ID NO: 423402 - protein, 360 aa, unidentified
MKTYYIGADVHSNSTELAIEHNGKIIRRHSLPTAIPAIKEVLTSLGGTIHMTFEEGPMAGWLYRNLKDTVEEIIVCDPRRNNYIASDGDADDTIDSGKLAALLRGGFLRAVHHSDDEGRAEFKQWVRLYHDRVRDAVRMINKIRARCRMYGIAIPRNVIRDKLQRPQWLAGIQNKTLAAQLEVLWIGYDATALQVRRTKRQLGTLSKNYPIIKIWSELPGIGSVRAVTAFAFLDTPYRFKHRNKLWKYCGVGLQRSASGTDKKGKPKPARLQLAWAVNRLLKNVILGAAHTAINQNKNTFKDYYERMLYDGIMPSNARHAVARKMLTVMWGMWKTNSRFNEKLVKEVSLAAGSSLSATRR

SEQ ID NO: 423403 - protein, 319 aa, unidentified
MAQNGLVVAGIDIAKDKADVSIRALSQRQTFPSTAEGRRQLITWLRKHKVTKAVMEASGGYERGWAKALREKDIEVRIVDPKRVRHFAQSCGRLAKNDVIDADTIAWFAETFGEAPSQAHDAAREKLQQLVNARQGLLDIRTVLSNKGEHDVPEPVQKSHARLLKTIAVELAKLEAAIAAMIKATPHFAERAEIIESVPGLARTTSAGLIAAMPELGQVSNEAISALLGVAPYDDDSGKRRGERQIKGGRRKIRNLFYMACLGAATRHNPALKAFYCRLIAKGKKAKVALVACMRKLIVILNIMIARGEKWDASRYAVD

SEQ ID NO: 423404 - protein, 475 aa, unidentified
MNIKGTKKKNQVVTANIFEQQELLKKSEVIKENLTASTWRELETNGKFDKNKKLSFISDDMLILGCDVGSETHYVRAIDTRGRELSKSAYSFNNDYEGFQSAKEWAVKIAAEHDKSQIVLGLEPTGHYWFCLATWMIANGISVVQVNPYAVKQTKEVEDNSQLKDDRKDPKLIANLVKDGNFGMPYLPEKIYAELRRLSMFRDQLNEDRIRTINRMHREMKIYFPEYKEALGKVDGAFSLELLKEAPFPDELTALGEEGIRQIWHAAKLRGRGYSRAREILQYAKASVGIKDGSIASKAAVKWFVQKIMELDVELAVIENQINQKCQEIPHTGNVLEISGIGENTLSGILAEMGDISRFDDVKEIQKLSGLGLVACSSGKHKGETKISHRGRKRLRYWLFQAAKSAVAHAEEFKELHMYYTTRADNPLKKMQSLIVIACKLLRIIYTILNTGTFYDPKKMLMDIRRPEKKEAIVA

SEQ ID NO: 423405 - protein, 350 aa, unidentified
MLIIGCDLHTRFQQIAYLDTTTGEIVTRRLEHENCEARKFYVGLGEKARVGIEATGCTQWFERLLAELGHELWVGDPAEIRARAVRRQKTDTRDAEHLLDLLLANRFPRIWVPSPEERDLRQLLKHRDKLVRMRTSVKNQLHYLAMSQGVCRKRKLWTERGRAELLALDLGPWASRRRQELLALLDRLDPQIEELDEVVKVEAERRPPVLRLLQQKGVGPVTALAFVLTLGPVERFANSRKVASYLGLNPREDSSGGRQRLGHISKQGNEMLRWLLVEAGQSAAQHDPELRRKYRRTKFRRGANVAKVAMARQLAVRLYWLLRSQSTAAPPVRTPGSPARTLVDVSPPTL

SEQ ID NO: 423406 - protein, 329 aa, unidentified
MTLTIVEETRAITGGVDTHADTHVAAALDPIGGLLGVREFAATPVGYAGLLGWLGGFGTVCLVGIEGTGSYGAGLARHIAAAGVRVVEVDRSDRQDRRRQGKSDPLDAVSAARAAQSGRARGAPKGRDGQVEAIRALMVAKRSAAGERTRTINQARALIVTGPDDLRGRFARHSADHLVTGLASLRPRPGDVVGYATRIALRELGRRAQFLDGQLERLDELIIPLVTARAPGLLSVYGVGPNTAALLLIAAGDHPGRLRSEAAWAHLCAAAPIPASSGKTVRHRLNPGGDRQANHALYAPRGALSYSRCSREKLGGRFLGLMANLASKD

SEQ ID NO: 423407 - protein, 399 aa, unidentified
MDEITEEPAALVERIAALDIGKAALTACVRVPHEDKPGARRQQVRTYAALTPALLELRDWLTCQGVTRVVMEATSAYWKPPFYLLEDGIECWVVNARDVKNVPGRPKTDRLDAVWLAKLAERGMLRPSFIPSRPQRQLRDLTRYRRTLTQERTREKQRAEKLLEDAQVKLSSVISDIFGASGRAMLAALISGQRNPHELACLARGSMRAKTSVLQEALTGHFTDHHAFMLTMMLARVDALTAQIDTLTTRIEEAIAPYAAQVAQLDDIPGIGVIAAQDLIAEIGTDMSRFPTPGHLVSWAKFAPRARQSSGRSKAASTGKGNPWLGGTLGEAAISAARTRTFLASRYKRIVRRRGKKRALEAPRQETRPGRRRQLHPHHHLAPALRPRRPLHRPRPRLA

SEQ ID NO: 423408 - protein, 325 aa, unidentified
MQITTIGLDLAKHWFQVHGVDADGRVVVRRPLRRSGVTAYFRSLEPCLVGMEACATAHYWARELTALGRTVKVMPPADVKAYVKRNKNDAADAEAICEAVTRPSMRFVPVKDAEQQSVLMLHRARSLLVRQRTMLVNALRDHMAEFGIVAPRGLRHVKILNKTIAHQQERLPDLVRSILQTIVDQLNGTMARIREIERRLTRWHRQSRVSRLLATVPGVGIMGASALAATVANSSLFRSGREFAAWLGMTPRQNSSGGRERLGQTSKRGDKYIRSLLTAGALRCCAMPVIDQPAMAREFERCWRANRPNLRRSHWPTRPPASSGR

SEQ ID NO: 423409 - protein, 382 aa, unidentified
MPDVISSAPAAVRMRAALDVHKRTIVCAAQPDDPRAELRLEEIPNTERAVRGLVRRLGGPEGLVVCYEAGPCGYDLFRLLSAMGVACDIVAPALTPVAPGARVKTDRRDAKRLLVLHRAGALKFVAVPTPAQEGLRDLVRCRDDLVCARRAARHRVAKQLLRHGHVFREGKKSWTKTHQAWVRRQRLGDPLAQSALEHMLAHLDSLDAQIAALDHQLDEIAAREPWSDPVRWLCCFRGVTTITALGLLAELGDLRRFATARELMSFLGLTPSEYSSGEQRHRGHITKAGPRHARRLLIEAAWHYQHPPRVSQRIAAVHPHVPPDVAARAFSAQVRLHHRHRHLTSHGKRSTVANVAVARELAGFIWAAMTRQPLPAQEVTAA

SEQ ID NO: 423410 - protein, 343 aa, unidentified
MESMYYIGLDIHKKIIAFCIKTISGRMIKRGTISATRQALNAWLEELPRPWMVAMEATLFTGWIYDFLKPHAHEIKVAHPEMLKAITAAKKKNDQDDAEKITDLLRVNMLPECYMMPAELRELRRILRYRNHILRTAVKEKNKISGLLMEVGATYNKKRLHGEKYFVELLDHIENVPESVLNMLKLSRSNLEIFTDIQKRLVKTIKENILIRERVKRLQTIQGIGEITALTWVLEIGEPDRFSSIAQAISYCGLCSAQKESAGKEYRGPISKKRNKHIQTILIEAAKLAPYWNLQLAETHKKELAKGNRNKATLAVARKLVAYMLAVDKNKKDFQIIETKKAA

SEQ ID NO: 423411 - protein, 382 aa, unidentified
MRTSSHTPPSIVTEAATFIGIDYHKRYSVWHAVDAAGSDLGKGRIEHHSPHDFATLVKRWPNARVVFEASMNWHWLYEELEQHMPAAHLTLANPFKTRIIAEAQVKTDKIDARILALLLRAGLVSSVHIPCKETRQRKEVLRQRCFFVRQRTMLRNRIHRLLGAQHDLKLPQCSDLFGKKGLSFLEKLELPAPAGLLLKPQLEMLKNVQLRIKEDEKALETMMSTTPAQQHVLSIPGMGPILASVVVSEIDDIERFHSAQKLCGYIGLCPSTSSSGGKTYNGKLMKHCNKWLRWAFVEAAWVAMGCDSYFGDLYKKKRALGKKANTAILCVARRMARITWQLLTQGRDYQKMPPAPQPKANAAKAKTKQTFPSRSNCTLVGC

SEQ ID NO: 423412 - protein, 344 aa, unidentified
MEITTIGLDLAKRVFQVHGVDATGQVVIRRSLRRAQMLPFFARLPSCLVGMEACGTSHYWARELIKLGHQVRQMPPAYVKPYVKRGKTDAADAEAICEAVARPTMRFVPVKSPEQQAALSMHRTRDLLVKQRTQLVNMMRGLLAEFGIDIPKGLERALLMARRIVDGEAPDVPMEAARIVSTLSRQALDIHIQLRQIDRDLLVWQRGNDVSRRLMTIPGVGPIGATALAASITDPHQFRSGRQFAAWLGLTPLQKSSGGKERLGRITKMGDKYLRKLLIVGMTSLVRRAKYNPKAVDPRLADLLARKPVRVATVAMANKTARIVWAVMARGETYRAGHQPALAT

SEQ ID NO: 423413 - protein, 338 aa, unidentified
MVLIGIDPHKATHTAVAVDKEETALGELTVQADRHQVERLLKWAIDFPERRWAIESANGLGFLLAQQLVAAGEDVVDVPPTLAARVRVLGSGKTQKNDPNDALSTAIAALRAKRLRSVVAENHGGVLRLLADHHHDLGSLRTQAVCQLHALVRCFIPGGTQLRLSAARAAVVVRSVRPTTAVDAERKRMALGFVADIRRLDAEIAASKARIVTAVAASGTSVTELYGVGPVVAAFLIGHSGDMARFANRDHYASYNATAPIEASSGPRVRHRLNPRGNRRLNHAIHVIAICQIRHPSEGRKYFDRKVAEGKTTKEALRALKRQISNAVYRQLVTDSTR

SEQ ID NO: 423414 - protein, 367 aa, unidentified
MKKVSTVAAKQGRRISQQKLTIGLDLGDRNSWYCVVDDAGQIQLEQRVGTNAKSLQEVFGAMPRSRIALEIGTHSPWISRLLSELGHEVIVANARKVRLIGESRKKDDRLDAQTLARLARIDPELLYPVKHRSAKAQADLMMIRARAGLVRARTGLVNTARGVAKSYGERLRGCNVRNMNAEKAEGLSPELQRALEPLLSAIEELSERICQYNERIEQLAQQSYPQTALLKQVKGVGTLIALTYMLTLEDPHRFGKSRDVGCYLGLQPGRRNSGRSEPQMRISKEGDPYLRTLLVQGAQHILGPFGIDCDLRRWGLRLAERGGKSGKKRAIVATARKLAVLLHHLWVSGEAYEQLHNSGRPTVAAAA

SEQ ID NO: 423415 - protein, 354 aa, unidentified
MRIESRVTMKMFTQQLIVYQKNKSMMGSFNQYCGIDVGKSALDYCLRSAKKPKERIQNRLTNELSSISEVFSDSKFDQTLFVVEYTGNYSAKILYQLSQMKRSVCVVSPLQSKSFMSALGLTNKNDKQAAHSLSLMGQHMSMRLYKAPSEEMQKRKQLFATLKALEKQQRMLENQLHALAQLPIQEPKAKQALELVLESVTTQIVPLKEQLYQPSQDEQFNEKKKLACSVKGIGEQTAEALLLLTSGLADFEDAGKLSKFLGLTPHSHFSGSSIRRTGGITKFGSQRLRALLYMCANSAIRYNKPCKELFERLRAKGKPYKVAKVAVMHKLVKQVFACVTTKTEFDNDFEAKRK

SEQ ID NO: 423416 - protein, 355 aa, unidentified
MSQEKYIGMDVHQATISVAVTDSRGKLIMESILETKAATILEFLQGLHGSLSVTFEEGTSAAWLHDLLKPHVTRLVVCDPRKNALLKDGSKSDRIDARKLAELLRGNQLTSVYHGEHGMRTLKELGRSYVTITKDLARVMSRIKALYRSWAIACSGTSVYAPRHRAEWLDKIPEPGVRLRAERFYQQLDLLQPVRQQARRDLLSESRKHHAVKLLRQIPSIGPIRAALLVAQLQTPHRFRTKRQLWAYSGFALETHDSGEYRYVRGKLQRNRERMTVRGLSNNHNPEVKNLFKGAAISASTHPGPLYDFYVALLEKGMRPTMARLTLARKIASITLTIWKKGVDFDATQLHRQEA

SEQ ID NO: 423417 - protein, 371 aa, unidentified
MVKIAKYVGLDVHKDTIAVATCTGGPLASAKDEGVLPHDLPRLRRKLLSLAPAEHLYVVYEAGPTGFGLCRDLNAHGISCIIVAPNKVPLMPGPRVKTDKRDARYLAWQLRMGTLAGIALPDEELEALRDLVRAREDALHTRRRTRQQLGGLLLRHGARWPGKSTWSVKYLEWISSLRLGSEAQELAKQQYLGEVKHFDERIETLSEQIERLAGMLRDLHGELYRALQALRGVSTIVAATLVCELGDLRRFETASRLMSYVGMVPREHSSGARVWRGAITKAGNPHVRRVLIEAAWSGRLKPAGGARLKRRQVGIDQAIVDIAWKAQKRLYSRHCSMRARGKPQNIAIVAMARELLGFIWSIGQQVGKKSA

SEQ ID NO: 423418 - protein, 453 aa, unidentified
MAKKQRKKSKKMKPLHVIQPNAAGIDIGATEIYVAVPDDRATESVRCFATFTEDLTNAAKWMKACGIEAVAMESTGIYWIPVFQILEAYGLKVALVNARHVKNVPGRKTDVQDCQWLQYLHSVGLLRGSYRPAQDVCAVRSLLRHRDNMVRIAASHVQHIQKALTQMNLQLHHAISDITGVTGLAILDSILKGERNPKKLAALRDKRIKADEKTIIKALKGDYRSEHIFTLKQALQAYRYYRKMISNCDVEIEKHLREFESRIEPDEKPMSASSHRKPKRNEPDFDLRTHMYRILGTDLTKINGISTLTTHVFFAEVGPDISKFPTVKHFCSWLGLSPNNKISGGKILSSKTRPGSNRAAQALRLAAQTLWNSQSYLGHFFRKMRARHGSPKAITATAHKLARIIYYLIKTGKQFDETEFSKQEELHKKRLERNLRKQAKYLGFLLVPVEYNP

SEQ ID NO: 423419 - protein, 334 aa, unidentified
MENIALIGIDLGKNSFHIHCQDRRGKAVYRKKFTRPKLIEFLATCPATTIAMEACGGSHFMARKLEELGHSPKLISPQFVRPFVKSNKNDFVDAEAICEAASRPSMRFVQPRTESQQEMRALHRVRESLVQDKVKTTNQMHAFLLEFGISVPRGAAVISRLSTILEDNSLPLYLSQLLLKLQQHYHYLVEQIKDLESQLKRKLDEDEVGQRLLSIPCVGTLTASTISTEIGDGKQYASSRDFAAATGLVPRQYSTGGRTTLLGISKRGNKKIRTLLVQCARVFIQKLEHQSGKLADWVRDLLCRKSNFVVTCALANKLARIAWALTARQQTYVA

SEQ ID NO: 423420 - protein, 451 aa, unidentified
MAQRKQVRKLDHDVLEQINLDAAGADVGNEEIWVTVPRGRDAEATQEFGTFTADLRRIADWLTACRVTTLAMESTGVYWIPLYELLESRGFDVCLVNARHVKNVAGRKDDISDSQWLQQLHTYGLLHASFRPAEHICALRALVRHRDMLITHRSAHIQHMQKALQQMNIKLTTVLSDITGVTGMKIIRAIVSGVRDPYVLAGHRHGQCHRSVEQIALALEGNYRVEHLFTLQQALELYDFYAQQLQACDEQLEVMYTACEARPTDQPQPKPRTRKRRKNQPYFDLRMQMYRVAGVDLVAVDGLDALTVQKVIAEIGTDMSCWPTHKHFGSWLGVAPQHQITGGKIKSRGTAKNANRAATALRVAAQSLWRNDSSLGAFYRRLKARHGPAKATTATAYKLARIIYHMLKEQQPYRDPGATAYQQQHRERAVRNLRRKAAQLGYHLEEGGAPS

SEQ ID NO: 423421 - protein, 349 aa, unidentified
MNFYTNTHPYYCGIDLHTRLLYVCIIDNENNILVHQKIDDSPDKLLALLKPYLGNIVVGVECMHCWYWVSDFCEEHNIDFILGHALYMKAIHAGKTKNDKIDALKIAKLMRGGNFPLAHAYSKEHRSIRDALRRRTHIMRMSAQLKAHVASTVSQYNLPALETRLDLRNSPDREKMHHFFPDEAVQKSMDLNLNIIETMVSELYKIEHYVKTQAQTHCATDLHVLKSFPGIGKILALTILYEVGDVKRFPSVQKFASYSRLVKCKAESAGKSHGTQGNKIGNAHLKWAFSEAAVLYLKGNDNAKRYLAKLQKRMSKAKALSALAHKIGRCVYFMLKNQQVFDEERFLNG

SEQ ID NO: 423422 - protein, 408 aa, unidentified
MGRAAEVVAPSSSIRTDGDCPVAQVNDLSRSLTAFDPISTLVVVVEMSKASWLVSGAVPGVERQPLKKVEPDATALLRLIERWRNEAVRAGRPISRIALAYEAGRDGFWLARWLIARGIEAHVIHSASVAVSRERKRAKTDRLDAAMLMRVFLGWLRGERGHCGLVAIPTMEEEDARRPSRERESLVNERSRITNRMKSALARLGVRGFKPHLRKAPERLAGLRTAEGTGLPANIIEEFRRDMARLALVREQISSIEKTRAERLERAPDTGPHAMVRLLARVIGIGIETADMLVREILSRKLRDRRAVARYAGLTGSPDESGLKRREKGLAKAGNARVRHGVIQLAWRFLMFQKDSALARWYRTRTEGPSGARKTTMIVALARKLLIALWRLVTTGEVPDGVELRPAA

SEQ ID NO: 423423 - protein, 349 aa, unidentified
MALTIVEEARSVTGGVDTHAGTHVAAALDPVGGLLGVREFPATAAGYSRLLGWLGGFGTVCLVGIEGTGSYGAGLARHITAAGIRVAGVDRADRQDRRRQGKSDPLDAVSAARAAQSGRARGAPKGRDGAVEAIRTLMVARRSAAGERTRTINQARALVLTGPDDLRTRFARHTPAALITGLASLRPRTGDVAGHATRIALRELGRRARFLDGQLQRLDELIVPLVTAHAPGLLALYGVGPHTAALLLITAGDHPGRLRSEAAWAHLCAAAPIPASSGKVTRHRLNPGGDRQANHALWRIVFTRLGSDPRTRAYAERRTAEGKSKAEIIRCLKRYVAREVYPHLRPAGG

SEQ ID NO: 423424 - protein, 427 aa, unidentified
MKSNTQNAKIEAITEKTLVLGIDVGSETHYARAFDYRGIEYSKKPFKFSNTEAGFVTFKEWILDLKEKHEKDKVVPGMEPTGHYWFNLGKFLQDNEMKPVLVNPHHVKKSKELDDNNPTKNDRKDQKVIAGLVREGRYMIPYLPDGVYADLRTASNIRFQLQAELTRIQNRISRWFNIYFPEYKTVYGKPDAKSGMLILKAAPLPEDILTLGIDGVNQIWRDAKLRAVGKARAKTLIEAAEHSIGSKEGTVSARMEIRMLLEDYESRNTRLQEVMVLIEELVKEIPMAEKLLEIKGVGIRTVSGFLAEVGDISRFNNPKELQKLAGLALVENSSGKHKGETTISRRGRKRLRYLLFEVAMSLVAKNPEFRELHNYYTTRRLNPLKKMQSLMAIAAKLIRVFYVMLTKGVNYDPKKMMGDSERPAVYL

SEQ ID NO: 423425 - protein, 431 aa, unidentified
MDTQQFEVIRPKCAGLDVHKKSVVAAVCISDPATLTASYKTKVFNTTNSDIDSLRDWLLAQDCRDVCMESTGKYWIPIFNILEPHMHVVLTHPKYVKAIKGKKTDKRDAKWIANLFRFDIVKASFIPPADIRSLRELSRYRLKLSYMRTAEKNRYQNSMTISRIRIDCVLTDPFGLSATRIMDYLLSDEPFDEEKCRSMIDRRVKASKDEVMDAVHGCHILEEQKFKMAHAKAHMDFINRSIGEIEAELFLRSRQYDVQIKRIATVTGITELSALFILSEIGADMSVFESDRHLCSWAGLTPANNESANKKKSTRCSKAGQYLKPLLIQCALAAVRSKKEPYFAIKYQRLCKRRGKKKAVVAIARMMLTSIYHMLSDNRDFHPDDYEATLNPPKQKPVILTLDNTLQFLREQGADPETLKLIQQQCTVQAE

SEQ ID NO: 423426 - protein, 420 aa, unidentified
MKAHNVDNFAVLIGIDWADKKHDVCEHPNPSDKYHYSIIKSKPEALHEWAMSLKQRYPNQQIAVACELKKGPLIYALAKYDHLTLFTINPSSVANYRKAFAPSGAKDDPSDAFIQVEILTLHMDKLTVIEPESAAIRSLAQLVVYRRSLVQDSVNLSNKITATLKNYYPQALEWFKEKDTIIFCDFISKWPCLASVKRAKKQTLLDFFDRHNSHYAHVNNARILSIKDAMSLTDDPGVIEPNQQLVEVLIAQFKVLLKGIETLDKAIKKAYKAQDDKVIFDSLPGAGPQLAPRLLVAFGNNRDRYNDASELQKYAGIAPVIERSGKKMWTHWRYSCPTFLRQTFVEWAGFSIRYSFWAKAYYEQQKSKGKPHNSIIRALAFKWIRIVFRCWKTKTPYDESKYLDALKRRGSPLLKFAVNS

SEQ ID NO: 423427 - protein, 367 aa, unidentified
MWIIGVDYHPSVQQIAFVNTDTGECGERRMSHSDGESEKFYRELKATGCRVRVWMEATGHARWFEQLLGGLNIELWVGDAAMIRAKRGRKPKTDRQDAQHILNLLLTGDFPQIWVANWENRDVRQLLWHRHRLVQMRTRITNQLQAVAMNEGVRRKKALWSSKSGRAQLESLSLAPWAARRRHDLLELLDRLNPTIEELSAAVEQEAQQRPEVLRLMTHPGVGPITGLAFVLIIDSAERFACGKQIASYVGLIPCEDSSSDRRRLGHITKQGNTLLRFLLVEAAQAVVRRDPAWRRRYTHLAMRRDKRIAKVAMARKLAVRLYWMMRQGWNYQQVMNSVRTWDSPEQAMVCSRTSTDCRVEDWRQAP

SEQ ID NO: 423428 - protein, 347 aa, unidentified
MFYVGVDLHKKTISVCLVDRERNVLERKRLFCAEPERIKEFFVMWRLQHGPFELTVEATASYEWFLELVEPLAERVVLAHPGKLRVIAESTRKSDKLDAQVLAEFLALDMIPEAYRPTPRQREHRVLVRHRQRIQKQITAAKNTIRRILSNSNQDLGSLFTKAGREYLRTVELSRADRFAVDQLCDQLQLLAVQLKQADQELAAFAAEGSDRETEDRQLLQSIPGVGTVTSDVVLAELGDTRRFPCAKKVIAYSGLAPGQRESAGKRRDLHIEKTGPRLLRWSLVEAAWRLVHRDPYWKSVFERIARHTGRKKKAIVAIARRLLGLMYALLKSRQAYRGPWELTEAA

SEQ ID NO: 423429 - protein, 457 aa, unidentified
MSRKGKRTKGIEEAHPFAGMSRVNANAAGVDIGATEIVACVEGDENMQIVKGFGNYTVDLQAIGKWLQEHNVKTVAMESTGVYWIPLFEELERQGFECLLISSRSLRRVPGRKSDIQDSQWIQTLHSYGLLESSFRPQGDLVALRTLLRHRGQLVDHRSPHVQHIQKALLQMNIQLSQAVSDITGQTGQAILRAIAAGERDPQKLAALRDRNCKNSEEEIAKALTGRWQEEYLFILEQSLELFDYYTRQIEGCDAEVERMYALTRPEWEGGELQPRSTRKRNSHSKNAPPNQEELRAHLKRISGVDLSAVDGFGVSLAQMVVMECGTDMSKFPTEKHFCSWLGLAPKHEISGGKVLKNRTLKTKNRAGQAFRMAAQAVKRADCVFGSFYRRLRGRLDKAQATVATAHMIARVVYRMLKYKVEYETINIEEYEAKYKEQQIKYMKKKAAKLGFQLVPA

SEQ ID NO: 423430 - protein, 337 aa, unidentified
MKQIRRIGVDLAKNVFQVHGVDSHEQVVVRRALSRAKLREFFAQLPPCLIGMEACGSAHHWARELERLGHQVRLMAPQFVKPYRKNGKNDRNDAEAICEALGRPSMRFVPVKDPEQQAVLALHRARSLLVAERTALINQIRGLLSEYGLVVGQGAGRLRRALPELLEDADNGLPALAREVFAERNSHLRALDARIEAYDRHLSTLARHMAPARRLMQVPGVGPLTATAVVATVGDARVFRNGRQFAAWLGLVPHQRSTGGKARLGRITKRGDAYLRTLLVHGARSVLCRPGEDRPRRWAQALVHRRGFNKAAVALAAKQARVLWALLAHPDDYQPAP

SEQ ID NO: 423431 - protein, 401 aa, unidentified
MGSLWAGVDVGKTHHHVCVIDDDGTVVVSEKIPNDQQAISGIAGRLGKRRKPIRWAVDLRGGPAALLLAVLFDRNADVRYVSGTVTSRMAEAFHGERKTDAHDAYVIAQTLRMRGDLPTLTLADGVQQQLKLLVSRRLDLVADRVRTTARIQDLLAMISPALEKTLNLRSKGALRLLAQWQTPAGLRRAGEARILDYLGQHGVRAARALTAKVLTAARTQTIAVAGEATVAGIVAQMATDLEAVNDRITAIEESIAVIIAEHELGEIVTSLPGIGNTLAAEFLAHAGTLTTYPSAAALAAHAGLAPISRDSGRRQGHQIRPHRYHRGLRRVFSMSSFTALTHCPQSRAYYDKKRAEGKTHRQATAALSRQRLNVLWACIRDKTPYQPKQARSAKVVLCELA

SEQ ID NO: 423432 - protein, 389 aa, unidentified
MPYHIGIDISKFKHNCFIATDSNVKVKDFIFSNDKAGFNFLLEELKQLGDPTKIKVGIESTGHYGTNLKHFLIQEGYTYMEFNPYLTNQFSKALSLNNAKTDKIDAEVISKYLGLVDYDNLHTRFYHANDLKELVRLRNNYIEERSKELVHLTNILDKMFPEFKPFFNNIFGHTALFILKTYTSKAKISKLNKTHFDKLNSLSRGKFTYAKFNQLKHLAETSVGIDSIQFEFIIRLSIKHLDDLNTLLDKLDHEIESLYSQTDSKLSSIPGLGIISAATIYAEVGNIKNFSSPEKLISHAGLKMRIIQSGTMNRTGKLVKRGSSLLRKTIWNYAFLSLRFLPTINDYYHKKKLEDKHHKVVLTHVCRKLLRMIYHIEFNNVSYDSNSFK

SEQ ID NO: 423433 - protein, 380 aa, unidentified
MEVVYSHCCGLDVHKKIVVACVITPEGKEIRTFSTMPDDLISMVDWIKNKGCTNVAMESTGSFWKPIFNLLELEDIQALVANAKHIKNVPGRKTDVKDAEWIAGLLRHGLLQGSYIPSRDQRELREIIRYRRSLIEERAREINSIQKVLEGANIKLSSVASDVLGKSGRAMIEAIISGEEDPEILSELAQRRLKNKKPELQRALNGLIGRHQKLMLKTQLRHIDFLSDEIKQLDEEIKERMLPFDEDLELLDTIPGVGRRTAEQILAEIGTDMNQFPSAAHLCLWAGLSPGNNESAGKQKSGRTRKGNKKLRSALVEAARAAGRTKNTYLSSQYHRLAARHGKNRAAVAVAHSILTIALSESNLILNLVQLIMKNASVTP

SEQ ID NO: 423434 - protein, 421 aa, unidentified
MTQPAPDAFAAFVGLDWADAKHDICLQAAGAAHREFLQLEHRPEVIDAWVQSLRTRFNGQAVAVCLELNKGPIVSALCKYDFLVLFPVNPLTVAKYREAFTPSRAKDDPTDAELQVELLLTHRDKLTPLVPQSPTMRALAQLVEHRRRLVGDKVRLTNRLTSALKNYFPHVLQWFQEKDTAIFCDFLSRWPTLKAAQLARRATLIAFFHAHHVRAADVIDSRIQALKSATPLTTDEGVIAPSGLLVQALVSQLRVTLQAIKDFDAAIAQRAQAHPDFPLFDALPGAGAVFAPRLLVAFGEQRERYTSAEELQKYAGIAPVTERSGKKSCVHWRLQCPKFLRQSFVEWAAESIRHSFWAQVYYQQQRDKGKSHQAAVRALAFKWIRILFRCWQERTPYDESVYLNALNRRGSSLIHNLAKGS

SEQ ID NO: 423435 - protein, 358 aa, unidentified
MTKSKQTIPVVGGVDTHKDLHVAAVVDDNDQVLGTQSFATTRQGYKLMLTWMRSFGDLQRIGVECTGSYGAGLLRYMQTAGVDVLEVTAPDKLDRRRRGKNDDFDAQSAAHAAFAKRRTVTPRSRDGMVESLRVLKVCRKTAVQARRIALQIIQTTIVCSPDRLRDLLRNMTRMKLIRTLAAWRPDLTGYRDVEEAYKIALKSLARRYLELHDEVADLDNMIEAIVTDLAPELIARNGVGLNSAAQLLLTAGDNPERLRSEASFAALCGVSPVPASSGKTTRHRLNRGGDRAANSALHIIAIGRLRLDPKTQEYVARRIAEGHSKLEAIRCVKRYIAREVFNIIARRHKQINQAQIAA

SEQ ID NO: 423436 - protein, 390 aa, unidentified
MNPVSAKLFNNMHDAQRWPVLCSMDVHDDSTYLAVLDCRTGAVLKDCRIMGSYKKAAKHLDALGPRKQVMVLVESGPHGFAPHRYFTSLRYLTRTIATSSIPKRPKDQKKKTDRDDAWNNLHYHSSGILRYCVPPTFEDECVRDCLRARQRTVHQITRQKQEILSLVKRQGLEFTETKTNWTQAHLKWLRTVELNAATRQLINASLESIDMLKRQEQLFLHQVNQYLDTHLEHKYLRQYYEILPGVGRIVSATLILEAGQLSRFGHPKPVMMYSGLLPGKRQTGRKDPVVSITKEGNKYFRTALICMAKFYRDYRFLKSEKDLAKLPEELASFIRRCQSRLNKRYRWLRGNGKNANKATAAVAREMCGFLWEYVNRTIPNIELDTLRKAA

SEQ ID NO: 423437 - protein, 320 aa, unidentified
MSDHLAVGIDADSKSLVVARHGTKGSTRIPNSASAIGKWLSTLPVGSRIGVEATNRYHELVVQAAQKAGHVVFVLNPRDIKHYAKGVACRGKTDSGDAQVIARYIAKEADNLHEHVARSPAQEQLHVLLQQRDSLVRSKAKLNLSLGAGASESAIFGRIFDGLKEAIALLDQQIQQLCRSGEQRDLYRRIMTIPGVGPTVAAFVTHHITRWPLTSSDAWIACTGLDPRPNESGARIGRRRLSKRGNASLRQILYMAAMGLTRSKNGKALYNAIRERGHSSTASFNILARKLARIAWGVFKSGRDFDPAMLKVGQACFQQA

SEQ ID NO: 423438 - protein, 458 aa, unidentified
MKRNRSKAKIDRMMPMVHPNAAAIDIGATMHMAAVRADRTPEPVRSFGTFTTDLHRLVDWFKECGVETVVMESTSVYWIPIFELLDARGFTVFLVNARDAKHVPGRKTDVSDAQWLQRLHSYGLLRASFRPKGQIAELRAYVRQRERLLEYAASHIQHMQKALTEMNVQLHHVVADITGATGLRIIRAILAGERDPKVLTRLRDYRCHSSAETIEKALTGTYRAEHLFALEQALALYDAYREKASACDARIEAVLKELSIGRGHSSASLPSSGRDRSDQANALAFDARALLFALLGKDITQINGLGPYLSLKLIAECGDDLSAWPSAKHFTSWLGLAPSNKISGGKILSSRTRRCGSRASALLRLAAVSVGRTDTALGAFFRRLSARIGKAKAVTATARKIAVLFYNAVRHGMEYVDPGASYYETRYRTRVVNNLHRRAKAFGFVLQPMEPTPGVVVS

SEQ ID NO: 423439 - protein, 314 aa, unidentified
MTTSSGKFVGVDVAKEKLDIAVLGEIKASQVTNDAKGIASLIKEMTALRPELIVVEATGGYQRAVVLGLYEAGLPVAVVNPARVRQYARACGLLAKTDKLDAFNLAEFGKQVRPRQFEAKSEVGRYLSALLVRRRQVEEMLKAEKSRLRTVHVDMRVSLERMIEILKEEIKRLEKDLDRFMKEHADWQEQEEILCSAKGVGRVTAATLLAELPELGKLDRKKIAALVGLAPMNLDSGKKRGYRKTKGGRIEVRSVLYMATLVATRYNPLIQVQYQELLRRGKVKKVALTACMRKFLTILNAMRDRVPFRQTVAA

SEQ ID NO: 423440 - protein, 412 aa, unidentified
MDVIVERSAGLDVHKAQVTACVRVPSEDGERRSEVREFSTMVGGLLVLRDWLKAHGVTQVAMEATSVYWKPVWAVLEDDFELLLVNARHVKNLPGRKTDVKDAEWLCQLLEAGLLRASFVPPKPIRALRQLTRYRKAQIKERQREANRLHKALEDTGIKLDCVATDILGRSGRDMLDALCSGTTDPEVLADLARGKLRAKIPALKQALEGRFEPLHALLVGSILAHLDFLDEQIERLSDAIEEQLRPFAPAVELLRSVDGIETRTAQNILAEIGLDMSVFPTAGHLASWAGQCPGNDQSAGKRRSGRTRKGSKWLNGALKDAAMGAINTNDSYLQAQYQRLRPRVGHGRALGAVKHSILCACWHMLQTGELYRDLGGDYFRKRDPERQTRRLVAQLERLGHKVSLEALPEAA

SEQ ID NO: 423441 - protein, 343 aa, unidentified
MDHFAGLDVSVKETSICIVDDTGRIVREVKVASEPEALLQELAKPGYHFKRIGLEAGPLSQWLFSALAEAGLPVICVETRHMRAVLKAQINKTDRNDARGMAQMMRVGLYRPVHVKTLRSQKLRMLLIHRKLLQSKAIAIDNDLRGTLRNFGLKVGMVGTVKFEGRIKELVENLPDLAVLVEPMLVVRRVLREQIGILHRRLLAIVRDDEVCRRLMTVPGVGPVVALTYRATVDVPARFRNSKAVGAVFGLTPAQHQSGESDRPGGISRCGDEMMRVMLYEAAQIMLTRTNKWSWLKAWAMKIARHRGMKKAIVALARRLAVIMHRIWVDGTEFRWTREVAAA

SEQ ID NO: 423442 - protein, 373 aa, unidentified
MPKYSTAFGMDVHLRSTTVCALDADTGEAVTRRFPGNPWGEIAGWMDGFPGPSLAAYESGYLGFAPQRELAGLGVECVVAAVSKIPRSAADSASKNDRNDAARMAKAILAHDISPVWVPSPEVEGIRDLAGAYDGATARLATAKQRLLAFLAKRGFVYGGTTPAGNPRKYWTYDFLRWLDKVRPEDDGGVRTLAALRNEVEAAAEARADLLSEYRAAVDASPIAAEVAALQSIKGCAFALAAAFSAEVGDFTRFRSGRQVTAYFGLAPSQRSSGDSVRLGGISGAGNALVRKLAVEGSWCYAAARHQPKLMPRDTGVPLEIRMHGRKGSERLLRRREEMLARGMPQAKANAATAAELVRWLWALGMMCREGAE

SEQ ID NO: 423443 - protein, 349 aa, unidentified
MNSTTVAVDLAKNVFELAVADAGWRIVERHRLSRARFARFFVHRAPCQVVMEACGSAHHWARHILAQGHTVRLLPAHYVKPYVGRSKTDRADAAALIEAARSPRIHEVPIKTVEQQQLQFLHRLRSQWMSTRQRYLSTMRGVLREFGYMIPLGASVAKAQIGLTLAQSGSDIPQALRPALAEMLREIMLLEEKILSVERQLAALTRADERVQQLREIPGVGLLTSTALLSTVGDIQRFPSGRHFACWLGLTPSERSSAERRRLGKISKQGDVYCRTLLVHGARSALLAARRMQRAGKPLDRLRRWALNREQQRGHNKATVALANRLARIVWATWKYERAFDGNWGNQAV

SEQ ID NO: 423444 - protein, 428 aa, unidentified
MSENSTTHPEPEFVAFVGIDWADQKHAWCSQRAGATQREHGEVEHTPEMVEVWVSQLAQRFGPGPIAVAVEQRKGALVYMLSKYECLHLFPVPSTMSASMRKSLYPSGSKDDPRDAELLLDLLLQHRNKLRRLMPDDEVTRRIQNLVEERRNLVDEKTTQLNRLTGYLKVYFPQMLEWFEKLDTKLVCDLLERWPSLEELQKVPPAELRKFFGQHRGRHQELTERRLEGIGQAMPAIRDRAVLEAKRAMVQVSAQLLRILLEGIANLDSKIEEAASAHPDFFIFESLPGAGSALAPRLLAAFGSQRDRYGSAEEVQTHSGIAPVMEKSGKKKWVHFRWACPKFLRQSFHEWAGHSISQSPWARAYYQQQRGRGKDHHAAVRALAFKWIRILFRCWQDRVAYDENKYLAALARRGSPLSSVLTVTAATL

SEQ ID NO: 423445 - protein, 415 aa, unidentified
MTDERRWYAGVDWASESHHVLLTDGDGRKIGEKIFKHSGEGLAEMAAWLMATSGVAEPSQIHIAIEVPHGPVVETLIERGFKVHVINPKQMDRFRDRFTLAGAKDDSRDAEVMASALRTDPRCFRLLAVADPVVIELREWSRIAEDLGVDRNRLTNRLREQLWRYFPAILDLESDLGAEWLLDLWEAVPTPDKAVRIREATIAKVLKRNRIRRLDAAHVLDVLRKPPVRVATGTTEAASAHVTTLIARIRLLNQQLKEAHRQLDALTARLIPSEEAGPGQTKQHDVEILASLPGVGRIVLATLLAEAFDALQRRDYAALRSLTGVAPVTKRSGKSCIVVRRQACHDRLANAMYHWARVAVQHDPSSRSKYAALRSRGHSHGRALRSVADRLLNVACAMLKTGTTFNPSLATEKSP

SEQ ID NO: 423446 - protein, 351 aa, unidentified
MNYIGVDYHKKYSYMVVKNEDGRVEGRGTVNNTKEEVQHFLEPYCPGMAVVEATRNWGLIYDWLDEVLDDVALAHPLKVKAIAEARIKTDKISADILADLLRANLLPRAYAPSKQTREIKNVLRQRMFFVRIQTMMKNRIHEILDRHPELLCQAPEVSDLFGAMGMQWLNRIVLPGKDSELFASEIELFKFLREKVSQSNDVVKGLAKEDARTRLLKSIPGIGSFFSVLILYEIDDISRFRDEKKLCAYAGLVPSTYASGGKMFHGRITKTGSKWLRWAAIEAAQTAVRSDSEFRAYYQRIKVRKGTNAAKVATARRLLTIVYRLLRQGRFYERRTTTQEKIIIPAALVTS

SEQ ID NO: 423447 - protein, 339 aa, unidentified
MYYSGIDQHKQFSYITTVNDDGIIIKQAELKNNDFDILNYFFSLGNQHSATVETTGGWYWMNDLLSSHGINLKLAHAKYVKAIAYAKVKTDKVDSHILAQLLRMNFIPEAYKISDDVRPLRDTLRARLRLSQKRTSCINFMHRMLEKFNINDPSLLSEFYKLQYQQFDNQEQLLKEQMLTLEKSLYPTLIPNDDIQRLLWIPGIGKMNAFTILLEVGDINRFQSEKNFFSYCRLVPSARNSAGKIKQKSSSKDGNKYLKLVFSDAAVHALQYYPVIKKYHDSKLRKKKKQVAHAILAKEIARIVYYVLKDKSDFNNHFKGIEIDHKKSFQWPRITSPDV

SEQ ID NO: 423448 - protein, 339 aa, unidentified
MELYSAIDLHSNNSHVAIIDDQQNRVFYRKLANDPEIIAAAFAPYRERLKGIVIESTFNWYWLADLLREKGYSVHLANPCGIQKYSGLKHADDKHDAFWLAQMLALNILPEGYIYPKEDRPLRDLLRKRAHLVRVRTSLILSLQNIVLRNHGIKIRSSDLKRLTQDPVAEILKDHEELALAGKASKESIDFLTRQIQRIEKVAQNKAILKEPFSKLLTLPGVGEILGMTILLETGPIERFKQVGHYASYCRKVPSRWTSNEKVKGKGNTKNGNRYLSWAFSEASDHARQTHGLSRDFYNRKLNQTNASVAHNALAHKLSRAAYFIMRDHVEFEEAKMFR

SEQ ID NO: 423449 - protein, 378 aa, unidentified
MYRIIKIGMDVHSTNYTLCAMEPVIGAEDRIFANIKVTPDYKNVLMFIENLKLKLGLNDTYDIECGYEAGYLGYSLYNQLTAAGVRCVILAPTTMLTQQGQRIKTDARDAVMIAQCLSYGGYHPVYIPAEEDDSVKEYLRMRDDHKLALKKVKQQINAFCLRHGHRYEKTKWTIAHLKWLKQLELSALYRETLDEYMASYDEQTAKIERFDKRIEELASQERYQEKVKKLGCFLGIKTHTALSLIVETGDFERFAKGNVYAAYLGLAPGERSSSDSINRLGITKAGNQHLRLLLIEASGGICKGAVGHKSKDLRQRQNGNPADVIAYADKANTRLRSRYYKFIRHGKKRNVAVAAIARELACFIWGMMTDHIQMQKAA

SEQ ID NO: 423450 - protein, 317 aa, unidentified
MSNSRFIGIDVSKQNLDVHVRPDDLRYQLSYDAAGLAALVEQFHGLQPELIVLEATGGYEHQLVAELVNDQLPVVVINPRWVRNFARASGQLAKTDAIDATVLSAFAEKMRPPIRPLPDDDLKELRGLLVRRRQIVDMIVSEKNRQYTAPKRIARQIQTHINWLEKRLDEADDDLRCHIEASPLWKAKDDLLQSAPGIGPACSMTLLAALPELGTLNRHQIAALVGVAPINKDSGRFRGRRTTQAGRSHVRSLLFMSALSAIRFNPVIARFYKHLLAAGKPKMVAMVACMRKLLTILNTMLKSSTPWISNYEKNTCA

SEQ ID NO: 423451 - protein, 323 aa, unidentified
MLAGTDVAKAELVVAARPSAERWTVANDERGVRTLVDRFRSDRPDLIVVEATGGYELLCVGALVAAGLPVVVVNPRQVRDFAKATGQLAKTDRIDADVLALFAERVRPVVRPLPDAAVQELEALLARRRQLLEMLQAERNRLGQVFGRGKQPVKKSLKGHIAFLERELRITDSDLGDMIRERPAWRERDDLLQSVPGVGPILSRTLLADLPELGRLSRREIAKLVGVAPLSRDSGTMRGRRFVQGGRATVRGVLYMAALVATKRNAVIREFYQRLLRAGKPKKLALVACMRKLLTILNTVVRTAKPWSATWSAAKADRARIPA

SEQ ID NO: 423452 - protein, 402 aa, unidentified
MNAVGIDVSKGKSTVAVLRPFGEVVASPFDVAHSGSELKALADFVKELRGETRVVMEATGNYYEPIARYLHEQNIFVSVVNPVLISDFGGNTLRKPKTDKKDSLKIASYALSYWVELKEYTPQEDLRKSLKLLNRQYQQAAKLKTMMNNNLVSLLDMTFPGINKLFTSPSRESDGHEKWVDFVLAFPHCDMISKLTIKAFSRKYKKWCVNNSYYFTEASCEKIYDFAKACISSVSSEEATAFAVIQAAKMLNSATENCNAIQHEMNRVAAQLPEYETVMSIYGVGKAVGPQLIAEIGDPRRFHSRKAITAYFGYDSENNDSGQKISKSNAMTKKGAGALRRTLFIIMQVLLKTKPVDNPVYDFLIKKQSEGKHYYSYMNAAANKFLRIYYAKVKEVLTAAEA

SEQ ID NO: 423453 - protein, 356 aa, unidentified
MLYVGVDAHSKTSWITVMDEKGKILKREQINSCRKDVRRSLGRYRQSVKAVVEASRSWGPIYDWLDEVADDVILAHPGKVRAIAEARIKTDKIDSETLAHLLRADLIPQAYAPPKEIRAIKRVLRQRMFFVRIRTMLKNRNKALLAQHSVEIPQVSDLYGKKGLRWLKNLTLPEPDGKLLNEDLNLLLVLNERIAATESLIAELSEGDDAVDWLFSLPGIGKFLSVLIRYEVDNIDRFSSSKKFTGYTGLVPSTYASGERMVHGRLTKRGNKWLRWAFIEAVTPAIRKSSMLRRYYDKIKSRRGCKDARVATARKLAELAWTVWTERRMFAESGKKNLRRTKDYSRTPAALISSWA

SEQ ID NO: 423454 - protein, 320 aa, unidentified
MNARRMHVGIDVSKEKLDCFAPGSKASKTVSNNAQGVRGIIALAQKNGWAVCCESTAVYGTTLIEGCHAAGLAVVVANPLRVRRFAQGKGILEKTDAIDARVIAQYADENQPKPARKPSEGERLLRELSDGIGFYLKQIQMVLGRLEQCPRGNAIRRELVRTLQQHRKALARLKARRAEVAAADGTIARRRDRFALVQGVGETVALDLIAGMPELGTLSGKEAAKLAGVAPIPDESGKTERKRKIAQGRLDARNSLYMAALVASRHNPVLHGFYERLLAKGKPKKLALAAVMRKLVVLLNRIAKDENFVPVAGGVKRKAK

SEQ ID NO: 423455 - protein, 343 aa, unidentified
MNEITAVGLDLAKRVFQVHAADREGRAVSRKRLRRSHVLSFFAKLPACLIGLEACAGSHFWARELQALGHEVRLIPPQYVKPYVKTNKNDATDAEAICEALTRPTMRFTAVKSAEQQSVLMLHRTRELLVRQRTMLINALRGHCAEFGIVAAQGRSRARELIELVEDPADDRLPSIARQALQCLTSQVQSIQMQIASLEKKLLAWHYSCEASRRLAKIPGVGLITATAVVASAGNATQFRSARQFAAWLGLVPQQRSSGGRERLGRISKRGDGYIRRLLVHGARARLAWSRRKKEVRSAWLTGLLARRPTNVVLLAMANKTARVAWAILSRGERFENRNGAAA

SEQ ID NO: 423456 - protein, 360 aa, unidentified
MGVVVGIDVAKEIHWAEIKIAEDGKVVSSHRVDTTPQDLSALISEIKDVEVEHGPTLVGIDILGGIASLLQTMMLEAGLVVVHVPGPAVNRARRGTRGGEHKSDPKDAKVIADQVRMRDDLRQVTATREEDVKLRLLTARRAELVEDASRRANRLRALLNAIHPGLERHVEVTGKTWLHLLTRYVTPAEIRAAGRTRVLAHLRKLRWVKDTVLIKATETAVGSAQRQRVSMPGEKVTAELVKETAAEALAARDRLAALDKRIQETLDRHPDAALVASLPGMGPIMTAEFLAVTGGISRFATGDQLAAAAGLAPVLKQSGKSRHLQRARSGDRALKRVFYQSAFCAIGHDPASTDYTPAAA

SEQ ID NO: 423457 - protein, 417 aa, unidentified
MDSPLEPIPIDRYIGIDIHKYYVMVGGQNRRQEWTLRPRRIQMNRFRDWAEKNFRMSDAVVIETTGSVWDIHDIVSPLTGNTLVANARSIRQIAEAKVKTDKKDIHRMLTQLISGVVPEVWVPPVHVRELRSLISFRWRLNKQITMSKNRLQSVAQRFNLDLPEGGLLTEKNRGWWEEQKFSALTGFEVKQDLEIVKLLEDQKEALDQKLAELSNTEPWDSDMVFLMQIPGMGLILSMVVLSAIGEINRFSHPKKLVGYAGLSPGVHTSGETNRGKPITKEGRKELRWAMVEAAWVAARFNPYWKAQLKRMEKRMHRNQAIVAIARRILVSIWHILTKRETYLHFDEEDIAYKMLIWAWAMDESSRNGMTPQQFAKYGLLRLGTGQHLERIVRGGAPRRIAPTEEILALKPELEPPR

SEQ ID NO: 423458 - protein, 576 aa, unidentified
MGPKFWGEHKHGTSREVAEVLRRYANQYNGALRLAGRCDDGAFYLTQAMGGGKTHSLIAFGLLAADPELRGEVVPRIRAGAEFGVAKVRALIRLLRLAVRGALASEGSDSSAGGESGTDGPANWRFRCEQCFGRLPRSSDLLAIIAARVRLLLSAKQDLLRVAHSFAISKGRFGNFGKRDLGSRGLLRKRGTNPSRRKRRITSTSVGVDGRRRHQGCQNEVVEDLRQRRPSMEQISRIGMDTSKHIFQLHGVNSAEQPVLRKKLRRKEMLAFLEKLAPTVIAIEACGASHHCARLLQSYGHSVKLIAPQLITPYIKRGKNDAADAAALCEAMSRPTMRFVPVKTAEQQAALMLVGVRDRLIRNRTQLSNAIRGYAGEFGLTAAKGKAHLGPLLDRIQAEARLPVLARELFAAQAEEYAQLQGQIDKVDARLIAWHRADESSRRLTKIPGVGPIGAVLLKMKTPEPELFRSGRQFAAWIGLTPKDHSTAGKVRLGGITRAGDEALRSVLVIGATAVIQHAQRGGRPSPWLTQLLKRKPPKLAAVALANKMARTAWKLMVTGENYAAKAAPAAVANAA

SEQ ID NO: 423459 - protein, 412 aa, unidentified
MVTCGIDWAQDHHDIALVDADGRLVAKRRIPESVAGFAELTLMLADAGDDPEDQIPVAIETPRGLLVAVLRASGRPIYPINPTSVARYRERTSMSGKKSDHADAVTLANILRTDADQHRRLPADTELAQSITVLARAHQDATWRRNRAGNELRSLLREYFPGFLHTFADRPGGITAPEARAVLAIAPTPAKAARLSKPQIVAALRRSGRQRGLTTLAATIQEQLRLPQLRQPALVEDAFGIQAVAVLATLDAECASVDRLGEATAAAFTQHPDHRIITSFVGLADLTGARLLAEIGDDRTRFADARGLKAFAGSAPVTKASGRSIRITHRHVKNNRLAAVGFVWAFIAAGCDGPTRAHYLSRRDHGDRHPAALRHLYNRMLGQLYHCLQTDQTYDPIKAYRPPPTHPTRAAA

SEQ ID NO: 423460 - protein, 418 aa, unidentified
MAKKAKKVKTAKGAELRIVNPDAAGIDIADGIMQVCVPTDRTKDNNRAFGAYTSDLHAISEWLRECGIKTVAMESTGVYWIPLFCRLQDDGLDVVLTNARDVKNITERKTDESDAEWLMLLHQYGLLKASFQPHNDAKRMRTLTRHRDTLSREASSIVLRMQKAMQQMNIKLTLVLFDITGKSGIRIIEAILAGERDPKKLAELADIQCKTPKEEITKALEGNWEEDLMFVLRQNYDTFKHFCAQLDRCDTELEKLMENYRTEVAETGRPSYSPTKKRRNYHKRKRKRTVGFDVERKAYDMWGVNVFEIPGISHLTALELMSELGHDFTRKSLSTKQLCSWCNIAPNTKISGGKRISSHVPHRRNKVGLIFRSVASSLANAKNQLGNFYRRIRSRVGGKAAVIATPWWQTRRLIIRKK

SEQ ID NO: 423461 - protein, 378 aa, unidentified
MSDVKFFNVYLKFKRMRTNQMFIKQSVGIDVSKDTLDVSICCLNNHIEICNIAQATFENSKKGVIRLENWIRNHSIKDLDYTVVVEATGIYHETLAYHLYEKNIKVAIVLPSKISAYFKSTNKRSINDKISACLIAEFGLMRKLDTWTPPSPCLRKLKVLVRERLRLIEMRTMVKNNEHVYKYAANTTGTAQERICELKNMLNKQIKEIEEEIRVILSENPELYEKVKRICTIKGVSLITVVTIVAETNGFSLIRNARQLVCYAGYDIVKKESGTSVRKGGNISHRGNKNIRRALYFPAITAQQNNTFFSNFYDRLYNRHSIKMKAYVAVQRKLLILIYTLWKNNEEYNPEKHQTYKFLEQPNQAALIELDHCPLFVD

SEQ ID NO: 423462 - protein, 375 aa, unidentified
MQNKLRFLGMDVHAETISVAIAEADGEIRSLGVIANRADSVRKLVRKLGAVEQLRACYEAGPTGYVLYWQLSELGVECAVIAPTLAPVKAGDRVKTDRRDAERLARSHRAGDLTPVWVPDAASEALRDLVRAREAAKQDQLRARHRLSKFLLRQGQHPAAGVKAWTIAHMGWVRQLRFAQPAQDAARLDYLHEVEHMSERITRLEESIREAVQQAPPQLQAVVQGLQAMRGIALISAVTIASEIGAVSRFPSARQLMSYSGTVPSENSSGKRTQRGGITKSGNAHLRRILGEAAWSYRRKPSIGPALRKRQEGVPEQIRQIAWKAQVRLCKRYARLQAANKDAGKIVTAVGREMLGFIWAIGLRAESSISQATAV

SEQ ID NO: 423463 - protein, 268 aa, unidentified
MNDVTLVGVDLGKYTFHLHGQDRSGHAVFRKKMTRKQLLTFFSNFPRCTIVMEACAGAHYMARRLSAFGHEAKLISPHYVKPFVKGNKNDFIDAEAICEAASRPSMRFVTPKSEVQQALSALHRVREALVKQRTATINQIHGFLLEFGISLPVGRDAIKRLPALIAEYSLPRPFVSVLERLHGHFKYLDQQVLEIEKELQIQLLQDERGQRLLTIPGVGPITASVLAAELGDARQFRCSRDFAASIGLVPRQYSTGGKSNLLGISKSV

SEQ ID NO: 423464 - protein, 374 aa, unidentified
MSSYEDITFVGLDAHARNINVAVILPESGEVDAQWQITHDERSLRRLAKKLLTMAHGEVQVVYEAGPCGYALKRKLEGLGLCCEVVAPSLIPVKPGERVKTDRRDACKLASLLKADLLTLVHPPNEKEEALRDLMRAREDAKKDLLSARHRLGKMVLRYGLQFLETKNWTVKHRAWLKGLRFDEPYAQQVFDNYLLAIEQIEERLKMLEAHIEEAAADDAYAEQVGWLCCLRGIGTVTAMTILAELHDFRRFAHPRDLMAYLGLVPSEYSSGGHTKRGSITKAGNSHVRRVLVEAAWNYRHRPAVSALLRKRRAGQPAAVIAIADRAQHRLYKRYYRLKEGHRKPHNVVTVAIARELVGFIWAVLHHQDAARAA

SEQ ID NO: 423465 - protein, 328 aa, unidentified
MSKERFEVGVDVGQSEVWASVGSGKARKFKHDESGVKQLYRWAKDKSGELLLHFCMEATGVYSQSLAVRLLGCGRCEVSIVNPAQIAAFAKAQMRRSKTDQIDAQVIWAFAQAQQPRCWQPEREAIQELAALVTQADALQKTQRSWKNRQHAHQYRPALPSMVRQTSAVVEETLKQQLEEVQNEIYRLCQADAELKRDVDLLCTIPGIAKLTATRLLAYGKSTLTERSPKELTAHAGLAPRHRQSGTSLKGRSRLCKQGDARIRFMLYMPTVVATTHNPIIQYHYQRHLANHKPKMVALMACMKKLLLMAQAILISKQPFNPKLLPLT

SEQ ID NO: 423466 - protein, 411 aa, unidentified
MEVIYRKCAGLDVHKETVVACARVTIGNRAEREVRTVGTTTVELTELCDWLTSKGITHVAMEATGVYWKPVWHMLEDSFQLVLANAAHIRNVPGRKSDVNDATWIADLLAHGLIQPSFVPPEATQELRSLTRTRKQLGREVVQHTQRIQRVLEDANIKLSNVASNVVGTSGRAVVKALIGGETNPEKLAGLTGNRLKASHPEIVEALRGRMRGYHRTLLKVHLDLIETLEQEIAHLEQEVTRVLGAEVKKIEKLSTMPGISTTVAQVIVAEIGTDMSRFPTPGHLISWAGLCPGMNQSAGKKMSSRLRPGNPWLRTALVQAAWAAARKKDSYLRAQFTRLRARRGPQRAVVAVASSMLKAAYFILHDDVEYKDLGGNYFDVLGKARLKTRLVKRLEELGYKVEVSTKNEVN

SEQ ID NO: 423467 - protein, 342 aa, unidentified
MNQYAGIDVSLECSSVCVVAANGKILREARVASEPEALIVWFRSCGFELERIGLEAGPLSQWLVAAMRKAGLAVELLETRHVRKAFEAMPVKSDRNDARGIAQLMRLGWFRPVHCKSMSAQETRTLLTARKLVQSKLRDVENSLRGILRGFGLKVGKTTEREFAGRIEELVVGHRHLQVIANALLAVRAVLRKEFAAFEKQARKMARSDTRARLLMSTPAVGPIVSLTYASAIDDPGRFKSSKQAAAHFGLTPKKYQSGETDYTGRISKIGDSSVRTALYEAAHVMLTKPLKGCSQLKSWAMRIARRAGMSKAKVALARRLAVIMHRMLADGTPFNAAAAAA

SEQ ID NO: 423468 - protein, 446 aa, unidentified
MAKKKRTNRKMDRSLPVMRPNAGGIDIGATEIFVAVPADRDVESVRSFPTFTQDLHILADWLQQCRVDTVAMESTGVYWIPLFQILEARGIEVHLVNAQHVHNVPGRKSDVLDCQWLQYLHSVGLLRASFRPEQAVCEIRSLMRHRENLVQMACVHVQHMHKSLDQMNLQIHHVISDITGITGLAILDGIIAGNTDPEELAKHRNYRIKASPETVKKSLVGDYRAEHIFTLKQSLTVYRYYQQLIADCDGEIQQRIQSFENSDGGSASPLEPSSPKPKADFDLRTHFERIFGVDLTRIPGFDVLRVQTIFSELGANLSAFPTAESFCSWLNLCPKDGTSAGRRIRVYLKTKNRVTQVFRMAGQSLHNNKSYLGDYYRSQRGRHGGLKAVKNAGHKLARIFYHVVRTRQPYDETVFAKLEARNQKRRFHKLQNMAKQMGYSLVQAHA

SEQ ID NO: 423469 - protein, 341 aa, unidentified
MRGQRNEISFRGQKIYIGIDVHLKSWSVTVLSETSVLKKFSQHPSPEALHGFLARSYPGAEYHSVYEAGFCGFWIHERLTALGIDNIVVNPGDVPTKSSEKLRKSDAVDSSKLARSLRANELKGIYTPDSASLEMRSLIRLKNSITKDTTRQKNRIKSQLRYLGIGIPQEFLEPFSNWSKRFIAWLKEVETLTPSGRQALDIQIRHLEELRRQKLEMTRALRTLAKTDRFREPLRLIMTVPPLRLIMTVPGFGQATGMAFLSEICDIARFRNAEQLAAYIGMIPMCHSSGEKDGTGDITVRRNAVMRCNLIEAAWVAVRQDPAMNLFLLNSASECQRARPS

SEQ ID NO: 423470 - protein, 354 aa, unidentified
MDKDKYVAMDVHKASVVVGIRDAAGKYITEAIVETKASTLVELVKGMSGTIHLTFEEGTQSAWLYDLFKPHVAELIVCNPRRNKLLEEGSKGDRIDVQKLSELFCKGMLKPVYHGDHGTRALKELGHNYESLVSDRTRVKNRLKAIYRGRGISYQGAEIYQTKQQEEWLAKLNERGVKRRAEILYQQLESLDGLVQEARRGLLAESRKQKVSRCLRGISTLGSISVALLIATVDTPHRFRTKRQFWTYCGLAVVTRTSSDYYFDQGQLRRSRRPVVTRGLNQNYNRRLKRIFKQAALTGSRRGPFKPCYERLLARGLSEELARVTVARKIAAVTLAVWKKGARFDPEKILKPTT

SEQ ID NO: 423471 - protein, 394 aa, unidentified
MKLIGIDIGKNKHFFCIMDKDSGEIVSQPASFSNDKEGFDFLLQKIKSYPKDSVIIGMEDTGHYHFALLKYLLDLQYTVALINPKTTDFNRKMQGGITKNDKLDTINICDVLDTPERKKQYRITKVNKFDLYEQKQLTRQHHNLKEELNVYKNRLQKSIDIVFPEFNSLFKSKYGTVYINILKTFGSAENIANTDIRTIRKCFEIDGRGNRISLTPERLKERARSSIGISSLAEVIQIKHLSAQIELIEKQLSEIDKKIEEFSIQNNSPILSIPGISHFSGTSILAELGDISNYSKPSQIIKFAGVAPLHYESSQFNAQHTAITKKGSKYLRKTLYQIILPVIRHNPVFNKYYQLKISQGKGHRCAQGHCVRKLLRIIYHLLKTNQQFDPQLLR

SEQ ID NO: 423472 - protein, 341 aa, unidentified
MDIVVLGIDLGKNSCSLAGLDASGRVILRRRMRRSSVESFVNGLGRCIVAMEACCGAHHLGRVFVAQGHSVRLMSPEYVRPYVKAQKNDELDAEAIAEAATRPTMRFVTVKSQYQSDVQALHRARERLVSERTALINHLRALLLERGIVAPQGRRKLQEELAVFADEDGIEALSPRIRLLIEDLRSEWRALDERIAAFDAEFVRMAREDEAVRRLTTIPGIGTINATALAAAVGNARAFRRGRDMAAWLGLTPRQMTTGGKPRLLGISKRGNRYLRKNLIHGARAVLPYLVERQTPLGRWARGLLARAHKNIVVVALANKLARIAWAVLARGRTYEAAAAV

SEQ ID NO: 423473 - protein, 332 aa, unidentified
MGFTYFIGTDVSKNELDFAVMQGKTLLFHKEIVNTQEDVLIFLKELVKLPGFELTKAVFCMEHMGIYSNHLLACLYKKKANIWLEAAIQIKNSSGKLRGKNDKVDSIRIADYAYTQRDKVRLWTPKREVVQQLAHLSAARSRLIEAKKMLKTPLMELDSFSSKKIAGPGASICSHTLKAIDADLERADNKIDKLIADDPELCRLFSLVTSVSGVGKVTATQILITTNEFKDISNPKQYACYAGVAPFTDDSGKIEKKARVSHMANKKVKTLLHMSALIAIQHNKDITLYYHRKVNEEKKNKMSVINAVRNKLILRIFACVNHNSPYQNNYQK

SEQ ID NO: 423474 - protein, 399 aa, unidentified
MSVNSPLELRVGVDVGCHSHNVAIGLSTGQILDEFDIPHNPEGFRLFFARIVKQENRHKCPVAVAMEGFNGYARPLDTLVRGRNYRLFNVNNLKLARFKEIFPAPAKTDHIDARKCLELFQLRDHLPLAKAALLEVAATPLENDILKRLTRRRRRLVNEKARVLNNMQGDLQAVCPGLLEITADAGNLWFLRFLTSSDSLTKLARLQRSTLLKITGIGVKYAASIQSWQKRSHFSHEAELVGEMIQEDAYRILDLHDKIQALETKLEDIASRSVIAQKMETIPGFGAISKAELAGEIGTIERFQDEGSLALYLGMATLDNSSGKQKGTKTPKHVNTRAKAAMMIAVDRHRKFVPESQRYYEKKRAEGKKHNQAVRALGRHLCRVIFKMLKQEKDYAVRK

SEQ ID NO: 423475 - protein, 456 aa, unidentified
MQSFYLGIDASKGYADFIILNSQKNVVVESFQMDDTFEGHCLLYELLMNFLTEHPESIIYTAVESTGGYENNWYDALLSFQGSLNLQTARLNPLGVYHNSKADMKRNVTDKISAQSVAEYMIAHPEKVPYQSQDHLASLRKQWGFIKMLTKQSTQLLNQLESLLYSANPEILAYCKDGVPAWVLNLLVKYPTAANLAKAKVTSMGRIPHVSSAKAETLVLNAKRSVASATDKVTQQLIVATVKQIMHLKKTIKTQTEIMAKACSVPEIELLKSFIGISDYSAIGLMLNIQCVKRFKTVKKLASFFGLHPQVKVSGDGVTVVKMSKKGRTAPRQILFMVAMTAITKNPLIRQIYQEHVHKGMKKMAAIGLCMHKILRVIYGMLKHSSPFDPEIDRRNRHKSVQKRKPRTENKIRRYQGYDPNAPISRRHKIKRMEQRQSQSDNGAEYGISGPVPFPT

SEQ ID NO: 423476 - protein, 340 aa, unidentified
MEGLYAGSDLHGNSNFLGIIDAQGKRVFKKKMPNELALIRETLQPFQGELLGIAVESTYNWYWLVDGLMEEGYRVHLANPSAIQQYSGMKHSDDRHDAFWLAEMLRLGILPEGYIYPKEERPVRDLLRKRGHLVRLRTSLIISLQNILSRNLGRKVNVNDVKAVKEDRISVLLEMDEDLALAGRVSKEAIDHLTRQIHKIEWVVQKRIVLKEPYRYLLTLPGVGKILSLTIMLETGPISRFETVGDYVSYCRKVPSQWMSNGKWKGAGNRKNGNKYLAWAYSEASEFARQLHPEPRAYYNRKMQKTNVACAHSALAHKLARAAYYIMKDHVPFRPEKLFG

SEQ ID NO: 423477 - protein, 308 aa, unidentified
MDSKKYIGMDLHQATISVAVMDEAGKLIMDAVVETKARSILELVQGLRGSLWVTFEEGTSAAWLYDLLKPYVAHVVVCDPRQNALLKAGHKNDRIDARKLAALLRVGMVSPVYHGESGVRVVRELARRYLAITKDITRVRNRLKGLYRSWAIPCAGQKVYSPRHRMAWLQQLPEAGVQRRAARLYQQLDDLRPLHREARQELLSESRKHPASTLLRKIPWLGPIRVAVLIAFIQTPHRFRTKRQLWAYWGLALQTRVSGEYRCANGQRQHAKHPPALRGLNENHNHELKAVFKGAATRASAASIYLHK

SEQ ID NO: 423478 - protein, 335 aa, unidentified
MKKIHVGIDISKEKCNLCYRGGLEIVREEECSNDVKVLKKAFKAALKALGASFEDVLVCAEYTGRYIYPLTVACQELDIFLWMDDPTRIKNSMGLTRGKNDAIDAARIAEYAYRYSDKAVRYCIPDAALVSMKNLLSDREFLLIDKKRYQSQLTDQKKYMAPGDFKHKNSRWRKVIKSIDEQIAAIDAEIDALIAADPVLTRQKELLVSIDGIGDRIAINMIAITGGFTRFQNARQFCSFAGLTPYKYDSGTSVRSKAKISKRANQTMKALLHLAAVGAATHMKEGEYKDYYERKTKEGKHVMCVLNVIRAKLVHRMFSVIKRDTGYTKEYKPAC

SEQ ID NO: 423479 - protein, 405 aa, unidentified
MFKSPVFVGLDYHLHVIQVCVMDQTRKILLNQSVGNSPDAVHRIVSLFGSGDNVKVAIEASTGVANFAEILISKYQWHVEIAHPNYVKRMKQTPDKSDWTDAKLLADLTRVGYLPRVWLAPQYIRDLRDLVRHRHAFVQQRTQTKLRIRALLRHHRITCPHSPWTIKGKDWLLEPDNISNVSVRLMLRNYYNTIAFLDKTINEVVAEMEDYVADDAVVKQLLQQPGIGIITAITLRALVGHFDRFRTGKQLAHFCAVCPRNDSTAGKTTTSGIIKAGDELLRQVLVESAHRLIRYDPYWRAMADRLRANGKKPCVIVAAVANRWIRKLFHQMCDPTPSGEATEGFSRHDQKSNLESVVESKPSDVGTQSPQAPEVRCDRHFSGTAIPLPVAPQQSRRPFRGTKKV

SEQ ID NO: 423480 - protein, 459 aa, unidentified
MSKRQKKDLKKKSIQALPVINPKVAGIDIGSRSHYVAGPVLDDGGLNVREFGTTTPQLQKMVDWLLDQGVESAAMESTSVYWIPAYELLEHHGIKVLLVNARQISKVPGRKTDVLDCQWIQLLHSCGLLRGSFRPDEAICAVRAIKRQWSNLVRERTKAVQWMQKSLDQMNVKVHHAVSEITGKTGMSIVRAIVSGERDPYKLAENRDKRCKKSPDEIAEHLVGNWRSDHLFNLEMALNLYDHLQEIIVSYESKLLEKLEELQPPERKNESVPTHPNPIKEKAIKGRGDQELREALWRLTGVDLTRIDGINSETAMIVITEIGLDLSAFPSEKDFISWLRLAPRYGITGGKPIKGKKNAMGSTRIANVLRMSSLSLKNSKTALGAYYRRLSRRKDASVAIFATARKLATLIFRMLRYGQDYVDIGEQTYEKQFEQRRLAGLKNSLIAMGYTVIPNNNAV

SEQ ID NO: 423481 - protein, 324 aa, unidentified
MEKLYAGLDIHKEKLAGCIMDKDGTITREHTFPSSKKALERFLNGIPSSDITITIEACGLWRGAHRLLTDMGYQVKLANPKKTHDIACQKKTDKVDARILADLLRTHYLPEVWIPDEQTLHFRDLTRHKATLTRLKTQVQGKIRGYLLRKGAKYGKLSKEETLATLTDDPDINNLIQVYHSVKQEENEVMRRIKKIARNKKETTMLMSMPGIAEFSSLMILAEIGDIRRFSSPKELVSYSGLCRGIYQSASTERSAPNTAVNKWLKWIIYECSGRATMLDPRFQDYYYKIEQRKGFKTARRATARKMLTIIWHMLANEEPYHVA

SEQ ID NO: 423482 - protein, 391 aa, unidentified
MFLLGIDIAKLNHVASCIDSSTNEIIFSNFKFKNDFIGFSALLDKIKTFDTKNLIIGLESTSHYGENLINFLFKQHFKVALINPLQTSHLRKANIRDAKNDNLDSLNIAKSLIFTKLNFISEKNINCFSLKKLTRFRSSLIKQRSKAKIQLTSLLDLLFPELQYLFKSKIHSKAIYSLLKKYPSAEEIAALKDDEISNLLYASSKGHFKKEKSIELKSLAKTTVGIKDTSISLHVIQLIELIELYDKQIKDIVTKIADTVDKLDTKLLSVPGISIIACAIILGETNNFNNFSDSTKLLAFAGLDPKIRQSGNFNASSCRMSKKGSPYLRYALIFTAWNIVRHSEKFNKYYCLKRSQGKSHYNSLGHVAHKLVRVIFTLIKKNIVYQEENLE

SEQ ID NO: 423483 - protein, 353 aa, unidentified
MWIIGCDFHPRYQQIAALNLDTDELVERRLSHEGKEAAAFYEALPRGALIGMEATCTAQWFERLLERCGHTLRVGDAAQIRASVVRKQKTDTRDALHVLDLLLTDRFPSVWIPTPAERDARQLLLHRHTLVRWRTAVQNQLHALARNQGLLPHTSFWTRTGRQQLESLALDPWAHRRRQDLLCQLDHLNSQIDELTQQVQQQARQRTDTAELMQQPGVGPIVSLAFVLTLGTAKRFPRGKQVASYLGLNPAEHSSGGKQHLGHISKQGNRMMRWLLVEAAYVAVRKDPELKRIYQRLAFRRGRKIAAVAVARKLAVKLYWRLREVQEQRTAPPAPMQGCPGSGLVKAVSSPSV

SEQ ID NO: 423484 - protein, 318 aa, unidentified
MKKLHVGVDISKNFFDLHILEGRKDRRYEYTEKGVKDCGAMLKEEEAEAGVQIELVTMEATGGYERLLAAELQAAGMAVAVVNPKRIRDYAKAAGKLAKTDKSDARVIAAFGATMHPRLNEPSDQNALKLRSLVTRRHQMVTMRVTENNRMEHAYDKATTHSIKVIVRSITRQIVKIEKEIAEHIQQQPELQKKAELLKSVPGIGDVTAFMLISELPELGRANKREIAALVGIAPINRDSGLYRGKRMTGGGRRRVRSGLHMSMLAATRYNPVIRKFYQHLLDQGKAKMTAIVASMRKLLIIMNTMLKNNQPWITKIA

SEQ ID NO: 423485 - protein, 400 aa, unidentified
MRTVFGIDVSKASSEVAILVNGEKIHGYTMLNDAIGFNRLLNDLKTVHNPEIIFEATGVYSRRLQAFLEEYGYAYTRLNPLEAKKQLDSLRVRKTDKIDAEKLAKSQLVHNRKPIYAQEEVYQHLRDLSRFYQNLTEDIVRAKNRLHKVLQVTFPELENLLSTPTGEQYWNLVMAFPCNEFVLSLSQSNLCEIIRQSTSKRISEKRIAYLTDKLIKLAKQSFCAVKKTSPMLEEVRYYAQELLRLSEHRQVVLDDMVALAQPLPEYDILRSIPGIAETTATSIIGELGDIRRFQSTNQINAFIGIDLRHYESGNFLAKEHITKRGNPYARKILFKCIHNIASASHTNPCHIANFYEKRKRQSTTASTNPHTIASIHRLIRTMYYLITHNKLYDYSLTQNR

SEQ ID NO: 423486 - protein, 337 aa, unidentified
MNVVGIDVSAKELVVVVSVKGKASKAKCFENTAAGHQAIIRLLAKYKGEARVCLEATGIYHFDLAVALSRAERIEVMVLNPKVAHNFAKVLMKRSKTDAVDANTLAIYAEKMPFVAWQRPADENITLRAIARRIAALTKLKTQTKNQIHALTATTETPDIVIKHINELVDILEKQLKAHRDSALTLIRQHAELTTAFALITGIKGIANASAIHILAELMILPPDMTAKQWVAYAGLDPRQFESGSSVAKKPRLSKAGNKFIRQALYMPALVATRYETHIKAYYQHLIIDNGLKKIQAVCAVMRKLLHAIYGMLKTNKTFEGTRFYSLPLQDNSQAIL

SEQ ID NO: 423487 - protein, 359 aa, unidentified
MAGRVIDSAWVLRPCGSLIPAGIVRFSPNSRLGRCLASPYLQGRDNLMDSIVIGIDVSKDQLDVATPDGARQWPNAPDGHRQLVKQLAKWSLESIILEATGGYERAVVAELAAAGLPVVVVNPRQVRDFARATGQLAKTDAIDAEVLAQFGRAVRPEQRPLASEKQLKLQQQLARRRQLVGMLTAEANRAQQVTDRLVRKTINAVRATIKSQINQLDDQLQQTLEETPAWREKENLLRSVPGVGPQTALALLADLPELGTCSRQQIAALVGVAPLNRDSGRRRGKRMIWGGRASVRSALYMATLVATRHNPVIRAHYLHLQKVGKRKKVALVACMRKLLCMLNAILREKKPWRNQSNTT

SEQ ID NO: 423488 - protein, 409 aa, unidentified
MDTVISHCAGLDVHQATVVATVRRPAPDGGRQVVTETFGTMTPDLLALREWLEAYGVTQVALESTGVYWKPVYYVLEDAFTLLLINMQDLKRVPGRKTDVKDSDWLAQLLECGLLRASFVPPPPIRELRDLTRYRVQQVRDRAQEVNRLSKVLEDAGVKLSTVASDVMGVSGRAMLTALVDGTTDPTVLADLARGKLRHKLPALRRALHGRFRPHHAFLVQQILAKIDFLDETLERLLTEIGQRLVPFDSMLANLDTIPGVNRITAITLVAETGGDMQRFETAAHLCSWGAMCPGQNESAGKRRSGKTRKGNRYLRAALIQAALAASRAKGTELHALYQRVRRNRGHKKAVVAVGHQILEIAYVIMRDSVTYHELGADYFDRRYKDRAIKRHLKQLEALGLRVTVEQAA

SEQ ID NO: 423489 - protein, 485 aa, unidentified
MATHRMSTFARLESGRLNRKQRRELGRKVAAADPGLTVVHANAGGIDVGNESHYVAVPPDRDPNPVQEFGCWTAALNQMAEWLKSCRIDTVAMQATGVYWIALYDVLEQHGIRVVLANAQHTKNVPGRKTDVQECQWLMKLHTYGLLRDSFRLAQEMEGVRTIWRLRDRHVKEAGRAVQHMQKALTKMNIQLANVISDINGLSGQQIIAAILQGERDPWKLADLKHYSVRASREEVARSLEGNWREDVLFELQQAVDSYHFAHRQMLECDRKLEGYLASLPPRMLDIPAQPEDTQAATLKKRTKKTKKPSGNQPHLDLKTELKRICGVDLTSIDGVDVMTALTIVSEIGTDVSRFKDENHFASWLGLTPAKDISGGKTIGRGKRKVKNRVAVALRTASTTLLKSDSYLGARYRSLRRQLPSFTAAVKAMGRYLAVLIYRLLTKGEVWVDRGATQFERRRTEQELASLTFKARVKGFKLIPITEPS

SEQ ID NO: 423490 - protein, 341 aa, unidentified
MSMIVLGIDLGKNVCSLVGLDETGAVVLRRRLRRDGIAEFVGKMEPCLVAMEACCGAHHLGRVLGASGHTIRLLPPEYVRPYVKANKNDDHDAEAIAEAATRPTMRFVPVKSEAQSDIQALHRARSRLVADRTALINHLRALLLERGIVVARGRRKLEDALVVFADENDLRLSPRIRVLIEDLRAEWRSLDERIGAFDTEFVRMAREDEAARRLSTIPGIGVINATALTAAVGDARSFRRGRDLAAWLGLTPRQATTGGKPRLLGISKRGNRYLRANLIHGARAVLPHILAQDTPLGRWARSLSERAHKNVVVVALAAKLARIVWAVLRKQRGFDPALAAA

SEQ ID NO: 423491 - protein, 362 aa, unidentified
MEKHIMVGCDLHDKSMLLKIAVGREKPTVETWNTDGESVVLMVRHLTNWAARLGGARILFAYEACGFGFRLHDELSDAGIECYVLAPSKMHKSPKHRKRKTDERDAQLILDSLKAYVLAGVEMPSVWIPDPQTRDDRELVRRRLAIAEDAAAAMVRIRWLLKGHGIKLAPANAWTDAYWQWLEQLASGTLPSGAGAALGSLMRQVQWLWSERDILDEQVFTLAKADRYAPVVAALCRHKGVGTLTAMVYLTEMGDLSRFANRQQVGSFLGLVPSSYETGETADRKGHITRQGPGRVRKVLCQAVWSRLRCDEHERDAYDAIVSRNPKHKKKAVVARMRTLAVVLWHTGLEAQTALRAEALVG

SEQ ID NO: 423492 - protein, 437 aa, unidentified
MTSGTRGEDSGSVPVLYMAMELSASKWLLGFGAGDGRKCRRRTVDAGSLAALEVEIRAAKEKFGLAPEATVVSCYEAGRDGFWIHRALIAAGVQNHIVESASILVDRRERRAKTDAIDVEALLRMLVRFHRGETEVWRTVRVPSEGDEDRRRLHRERERLKKEMTSLRNRILGLLATQGAKADPDTLDEYLKTARSCDGREFGAAFRNELSRMHARVVVLRGQLAEIDQEQMSQLRSPNRSSTAQKVAQLMCLCGIGLQGAWPLVMEFFEWREFRNRREVGALAGLTGTPFNSGKGDRDQGISKAGNKRIRRLLVELAWLWLRHQPNSALSLWFARKWGAGAKRGRKCGIVALARKLLIALWHFVEHGVIPEGARLMASPGVKKATVDSVSKRHEEVQAARAASVIAVSRVRHDARSSTRIEGVEASVAPTARLALA

SEQ ID NO: 423493 - protein, 397 aa, unidentified
MSVITPESDRLLRCREMTRMGWTGRAPAPDDPQGLFGAFNEHEEHTMPHKTDLTVVRTIVIDTGKSTLHMVGLDERGAIVLREKVSRHRIAARLVNVQPCLVGIEAGMATHYVARALSALGHDVKQVPPAYAKPFRQGHKNDFRDAYAVAEAVQRPSTRCVPIKTDDQLDLQALHRVRSRLIGDRTAVINQLRGFLLEHGITVRQGHRFLRQQLPQILTTRTDVLSPRMVRIAADLVGDWGYLDERIERVTDEIEGLAQTDVGCGQLMTAPGIGPIVASATVAAIGNGAAFAKGRDFAAWLGLVPKQMSTGDRTILGRITKRGNRYLRMLFIQGARAILLHPTSWAKHSFGPWLTAAAKRLHHNVLTVALANKLARIALTVLVEGRNYETRITPAAA

SEQ ID NO: 423494 - protein, 271 aa, unidentified
MTSAKYIGLDVHKESISICVRNSVGKVVMESVIETKASTILQFIDGLRGDLRVTFEEGTWAAWLYDLLKPRVSGVEVCNPRKNALLKDGSKSDRIDANKLSEQLYMNNIKSVYHGEHGLRTLKELARSYLTISKDLTRVMNRLKSLYRSWAIPCAGKEVYAPRHRAEWLGKIGEPGVRRRAEFYYQQLDVLRLLRQEVRRDLLLEVKKHKSWKLLRQIPGIGPIRAAVLMALMQTPHRFRTKRQLWNYSGLGLETHDSGEYRAVEGQLTPC

SEQ ID NO: 423495 - protein, 346 aa, unidentified
MDQQQHYVGLDVSLETTAVCVIDDQGTVVWRGKCASTPDAITGTVRKYAPAAVRVGLETGQLSNWLTLNLRRRGVPVVCLDARHAKAALSLQINKTDANDAFGLAQIARTGWYREVAVKSMDAQTLRMLLVARSQLVSQRQKIANTIRGLLKTFGLVIARGSKGPFSVRVREQIAGNNVLVAIIEPLLVVWHAVREQVAMFDRQILARARTDAAARHLMTIPGVGVVVALAYTAVIDDPARFRRSASAGAYLGLTPRRYQSGEADTGGHISRCGDGLLRAYLFEAATVLLCRYSRTSTLKTWGLALAKRIGMRRAKVAVARKLAVVMHRVWSDRSEYRWGGGSAAA

SEQ ID NO: 423496 - protein, 368 aa, unidentified
MNTVYCTTIGADVSDRTTKICVMSKESGKPKIVRETTIPTTPDGFRAFLEGQDKSAPLVFETGTHCRWIDKVGTGMGFKTIVANPARLRMITESNTKNDKNDARTLARMALADVELLHPVGLRDDEHQKMVNLHEIRDQLVKERTAEVLQIRAIAKSMGFRIPDCSAECFHNIAKNSIPKELGDIVWPLMKELKSKAVTIKTVEKQMRKLAKSDVFKAQVERLMEIPNVGFITATCFVAVTGGDMDKFDRPRDIGPWLGVTPKQDQSGDIDRQCHITKAGSKMLRWKLTECAQRVLQKNSADMDLKVKGLRIRARGGKIAKGKSITAVARGLAVLMVAMLKKPDVPYVPLSEDKAKELAQIRAAMAAA

SEQ ID NO: 423497 - protein, 389 aa, unidentified
MYENGKKVIYVGIDVHDETFTCCFYDPDDKQAKKGLRTVKIFSSAAQVRRCLANFCKDNPFNISEFTFRCAYEACGYGYELARSLHSSGIDCVLLAPSTINEYHNNQRIKTDKRDAFTIAKSYANGEASPVHIPDKHDEEVDNLIRVRDMYKDTAKRYKQQIIAFVKRLGYKYEEHGHYWTQKYMKWLANLPLSTVNRYVLDNLLNSLAQASDSLAELNGQIASIAENDKRYAERVRRLRGLFGIDTYTAMAIVVKSGDFKRFAKAKSYMAYLGLIPGEASSGVTVHKKSLTKTGNPRLRKLLTESAQCYLRKPNLLKSKAFKKRQEGLPEEFITYADRGLMYMIRKGKKMLYNKKNWNVIVSALARTLAGFIWGAMTTHLDRNPKAAA

SEQ ID NO: 423498 - protein, 416 aa, unidentified
MPFALPEALFFTGIDWAAETHAVCVLDAAGKIAAQFTIEHSADGIAALVRRLARYGEAGGMPVAIERPDGRLVDLLLEAGHPVVPVKPNAIKTWRDGEVLSGAKSDAGDAAVIAEYLRLRAHKLRIAAPYSDQTKALRTVVRTRGDLVEMRVAATNQLSALLEAHWPGAVAIFADVESPVSLEFLTRYPTPAAAAHLGEKRMAAFCVKHGYSGRRTAAQLLTRLRHAPAGAAGEALTEALRDAVLAAVAVLTALNASIRNLDRSTAAHLGEHPDGAIFTSLPRSGQVNAAQVLAEWGDCREAYAAPDSVAALAGVTPVTKESGKHRAVHFRWACNKRFRQAITAFADNSRHASPWAAQIYHDAIAAGKDHPHAIRILARAWIRVIYRCWTDGVPYDPARHGAAAVLAKQSIKQIAA

SEQ ID NO: 423499 - protein, 423 aa, unidentified
MHQRDFQIFVGIDLGRWLHQACALDANGELLQHRRFAHSSEGLSKTVDELLNLAQQRPELVAVAIEKPHGAVVETLLQRGIAVFAINPKQVDRYRDRYASSGAKDDPRDAFVLADVLRTDGHRFPRLRLPPPEIVALRELLSARNQLIKHHVALSSQIRDLLVRCWPHLLVLAPRNRALDLFFCELIELFFRADRTGSFQPQTIQVLLKKHHIRRVKLEQAIDILQKPPLRVAPGTLTATSMHIKLLVQQLLLVWRQHRDSDQYLERWFKHIQRTSEPKQTTDAAILASLPGVGSFVLASVLSHAHDAIRLRNLDALRSLGGIAPVTKQSGNRRQVLMRRARSQPLNYALHHWAHMAVLRDPHFELHYRRLRAKGHTHARALRGLMDRILTIAVAMLRDKTRYDESRRGAETKKKILKKKAFT

SEQ ID NO: 423500 - protein, 412 aa, unidentified
MDVIVQRQSALDVHKAQVTACVRVPGSSGERVQHVEQFKTTVRGLLVLRDWLKAHDVTHVVMEATGDYWKPIWHVLEDDFELMLVNARHVKQVPGRKTDVSDAAWLCQLAEAGLLRASFVPPKPIRDLRQLTRYRRAQIDERKREAQRLHKALEDTGIKLDCVATDILGKSGRAMLDALVAGTTDPEVLAELARGKLRAKLPALREALEGRFEPLHALLIGAILAHLDFLEEQIGLLSDAIEEQVRPFWPAVELLRTIPGVQQRTAELLIAEIGTDMSVFPTAGHLASWAGQCPGNDQSAGKRRSGRTRKGSKHLNAALKDAAMAAIRTNGSYLQALYRRKKPQLGHARALGAVKHSMICACWHMLTTGELYTDLGGDYYARRNPERQTKRLVRQLEALGHIVTLQEAQLAA

SEQ ID NO: 423501 - protein, 419 aa, unidentified
MPNRTAKHLASIQPGTLFVGVDLGLDDLVVVVLNATAERFDRFRCDNNAGGYAEFRQRIQRSVERHQTPGVLVGMEPTNYYWKQLGYTLEQHQIPFRLVNALTVKRHREGDQLDRSKDDWRDAYTIADLLRQGKFTETHLLHGVYAELQAGYAAYQRLRRDHGRQATLLVNTVRQLFPEFEQVFKDVSGATAGAVICAGLLPHGIGIHTEDQFLVNVRSHFTGQHLSLRQVRQLYALAKESYGCQEATMALQLMAQQHVEAMRLMDLQSKQLRAALLKLFHTLPEAPYLLSIQGLTAPSALGLVAYTGDLREYHCGGALIKLAGTQPTPNTSGRKTYSATPFSHQGKSGLRTVLYFITLRLITQNDALAYHYQRLTSRTEHALPKMQAIGACMNKLLWYVWHVAKRREMYDLHRWRTLQ

SEQ ID NO: 423502 - protein, 366 aa, unidentified
MKKHTTKTHSSPVDVSVCSTVAVDLAKNVFQVAGEDALGQVIYEARIKSREAFLLFLHKLPNGVTVLMETGPGAQAWARLLQTQGKLARILPAQHVADHRSGAKNDRNDVLAILRAGRDQNIAAVPIKSTAQLAMQALHRARQGYVRRHTAMGNQMRGLLLEHGIAMAQGATILGRNVPRILEDATQPLPQLLRELIAEMLGEWSHLGERIEVLTGRLEAAAREDETAKRLMTVRGIGPIIATALLAKQTEPERFANARMFAAYFGTVPEQNSSGQKVRLGKMCKRGDAYLRSLAIQGAHAVLRQVRPDSEHPDDHRLRRWLSRHGQKGAAVRLANRNLRIVWVLLQNDQTYRRQPAGCQEATMSH

SEQ ID NO: 423503 - protein, 377 aa, unidentified
MHSENIAAYIGLDVHKETLAVAIAAPERLGEVRYYGTINNEAQAVRRLFQKLQGLYGNILSCYEAGPCGFGLYHQLTAMNIKCQVIAPSRIPKSPTDRIKNDHRDAISLARLLRAGELTPVWLPDLTHEAMRDLIRARAAAKRDSRVARQRILSMLLRTDKRYAGKHWTGKHRTWLANQSFSQPSQQIAFQHYCQSLEQIEDRILQLDQEISRLLPEWSLCNLVCQLQALKGVGQLIAITLVAELGDFSRFSNPKQLMAFLGLVPGEYSSGNSIRPRGITKVGNSELRRLLYEAAWSYRTPAKVGAWLIYYRPDSVTQYSKDIAWKAQQRLCSRYRTLTAKGKKSQVAITAVARELTGFMWDIALAAQSSFSQQKQN

SEQ ID NO: 423504 - protein, 407 aa, unidentified
MEVLSPYVCGMDVHKKSITACIMTPDKKMIQTFGTMTDDLWELVDWIISSGCTHVAMESTGVYWKPIYNLLELEPSLTVFVVNAKHMKQVPGRKTDVKDAEWIAQLLKHGLLKPSYIPNREQRELRELVRYRRSMIEERAREANRIQKVLEGANIKLSSVATNVLGVSGRLMMKEIIKGESDPVKLAQLAKHTLKQKHQELIRSLTGLIGRHQKMMIETQLRHIEFLEEEIRLLDKEIASRMSPFEEDLERIDSIPGIGRRTAEQIIAEIGPDLSRYESADHLASWAGLVPGQNESAGKRLSSRIRKGNKYLRSALVESAASCSRKKDSFLAAKSKRLAARRGTKRARVAIAHELIKLVYYLMTRKEDYKELGVQEFEKQKVEKKKQQALKELEKLGFQVTLNPQTV

SEQ ID NO: 423505 - protein, 347 aa, unidentified
MDHYAGLDVSLEETAICVVDGTGRIVKEVRAASEPEALIAALRATGLPLERVGLEACSLTAWLHDELRQAGLPAICIETRQANATMKTMPNKTDRNNARALAQIMRTGWFRPVHVKSRPCRLWRSLLVARRTVLNEMRSIENVVRAILREGGVKLGTPARAAFAGRVRELTSDDALLMPLVEPLLAILATMGDQLARLTKQVLDITRQEEVCRRLMSVPGVGPITALAFRATIDRPDRFRRSRDVGAHLGLTPARYQSGETDISGKVSRCGDELARTALYEAAHTLLVRSRKGSALRAWGMKVAKARGMARARVAVARKLAVILHRMWSDETEFRFGKEPGPGLAAT

SEQ ID NO: 423506 - protein, 414 aa, unidentified
MNTLVSNTSLSGTLIALDIAKKHHDAKIRYPDGRTSYLRIENTLEGFNRLLALTASPHDDIIAAFEPTADYHRNIAWWLHKQGVKCHLVSSVRCARAREMLFKTWDKNDRKDASVIMYLLEQGLSSPFYDPLANGIIDIQEISNTYHQVTLARTRCLNSLVNHYLTLYFPEAEQFLHMSRAEWFCQFLLQFPTPSCITSLNRDLFVKQSWDVVGRKQYKKQFLEHLYDVAADSIALPLSEDSLAVTTFRLQLHRYVGLSAQRLQLEKQAENYLQERSDYRHLRTIPGIGAIIALMIIAESGDLTRFAHYRQYLNFCGFNLSASQSGQKHSGYRLSKRGNARLRYAFWLAATVAVRTRENSFRYKYERYIRENGDKSDQKRKAMTAVATKVARVAHAIVKQDIDYKGYYEISHGT

SEQ ID NO: 423507 - protein, 339 aa, unidentified
MNRIVVGVDIAKRVFQLHWVEPETGEIVALQLKREKFLEHFANRSSCLVGMEACGGSQHWARSLRKLGHEVKLLSGRMVKPFVVGNKSDAADARGIWIAVQQPGIKAVAVKSEEQQAVLALHRMREQLVKFRTAQINGLRGLLTEYGEVMPQGRAGIKRDIPGALGRLADRLPAMVIETLREQYARLGELDEQISQIERRLRRWQREDSAAQRIAAIPGVGLLSATAAVATMGDARAFKSGREFAAWLGLVPGHTGTGGRVRLLGISKRGDKYLRTLLIHGARAVLTHSKSPPEWLTELVKRRPKNVAVVAMANKMARTIWALVAHERAYQSRYVSRPA

SEQ ID NO: 423508 - protein, 342 aa, unidentified
MTTYHIGADVDSRITELAVLGGRAIKYFTVPTTIPPLLEVLKSIPGRKVLVMEEGPMADWLCRSLRPVVDEMVICDPRRNKLIYQGGDKTNRIDAKKLAELAQAGLLQPVYHSDSQERICLKQWVSLYLDRVAQAVREINKLRARCRMWGIHPPRGALRNPRVRDPWLKTLDAALAGQLRLLFLAFDAMSEIVRRCRQELARRGKGYEIAARWQELPGVGLIRAVTFLAYMDTPWRFAGRKKVWRYCGVGLRRFASGTDKWGREKPGSLRLAWAANKRLKDVVMGATMSAINQGDNVIAQGYKERIARGMSPGNARHTAARKQLDRMMAMWKTGSKYSPDLA

SEQ ID NO: 423509 - protein, 340 aa, unidentified
MSKVLKNFVGIDISKLFFDVAVLKADQPGRVAHQQFKQSPKGFADMNEWLKQQNVLLDDGTLFCMEYTGIYNTALVHYLCEEKALLWVEMAVKIKKSEGFQRSNNDKTDAVKIAWYACRYQDRMQLWSPTDESLDKIKHLIAQRDRIVDSITKLSLPVDELKEIGCIAQAIQMEKLQKAAINNLTKTMKNIEAAIIKIVRQDKELLRKVEKVKSIKGIGEVTAIAFLVYTKGFSSFENARQLACYCGVVPFIKKQSGSSIKSKARVSIFANKKLKWLLHLCALSAIKHDKELKAYWDRKLLEGKNKMSVLNAVRNKLVLRIFAVIRDDRDFVENYIRKCA

SEQ ID NO: 423510 - protein, 368 aa, unidentified
MIVIGTDTHKRTHTCGAVDAFTAAARGELTAPARPGSFGMLLRWARALDAERVWAIEDCRHVSGAFERFLIARGERIVRVAPKHMAGARRSSRERGKSDSIDAFSVARAALKEGIENLPGAHLDGAALDIRLLVDHREDLIAARTADQQRLRWHLHDLWPELEIPVGALDTRKWLGKISGRLARAQQTTRVRVARELVRQITARTSRIRELQAELAALVESYAPQLLAERGCGPLTAAKLIGEIAGADRFATDAKLARTGGAAPIPASSGNTSRHRLDRGGNRQLNCALHRLAINKGKWDPDTAAYLARKQTDGKSRKEALRCLKRHLARRVWKLLQTPAPAAAPTAAPATTPPTIAASAPTPMPCLT

SEQ ID NO: 423511 - protein, 355 aa, unidentified
MTSTQYIGMDVHKESISIAVMNATGKIVMECVIETKASMILQFIDGLRGDLHVTFEEGTWAAWLYDLLKPHVTEVVVCNPRKIALLKDGSKSDQIDARKLTEQLYMNKLKPVYHGEHGLRTLQELARSYLTLTKDLTRVMNRLKALYRSWGIPCAGSEVYAPRHRSEWLNKIAEAGVRRRAEHYYQQLDALRALRQEVRRDLLVESKKHKAWKLLRQIPGIGPIRAALLVALIQTPHRFRTKRHLWTYSGLGLETHDSAQYRVVEGQLQRSKKPVTLRGLNENHNHHLKDIFKGAAMRASTAAGPLHDFYEALLAKGRKPAMARLTLARKIAAITLIVWKKEVRFDANYLKPQAA

SEQ ID NO: 423512 - protein, 309 aa, unidentified
MKQEVVYCGIDVAKEQLDVALGPKRWQVPNTKQGVGQLVKQLKAERSKVHAICEASGGYEKAIVIALQKSALAVSLVQANRVRQFARAAGVLAKTDQIDAAILVSFGRAMRPPPSVAQTEQIARLRELDAQRRHLSRLLSAEQNRLAQLSCAELRSLSRSLISKVKKQIATIDARIAILIAQDQNLCTKAQKLTSIVGVGPRTAALLLAQMPELGSLNRAQAAALAGLAPFNRDSGLMRGKRTIFGGRRTVRTGLYMAAVTAARYNHVLAPFYQRLCAAGKPSKVALTAVMRKLLLALNSALAPTLNPA

SEQ ID NO: 423513 - protein, 342 aa, unidentified
MYFIGLDVHKKTISYCVKDAAGQVHREGKIGSTRRELDCWIKTLPQPRTIAMEATIFTGWIYDHLLPHAEKVKVAHPLMLRAIAAAKKKNDKIDAGKIADCLRCDFLPECHMVSTEIRDRRRILRYRHLLVRQMVQMKNRVSGLLMETGVEHNKQRLHKVGYFHELLSTNQEVHPCIRPLLKISRETIERCQKTEYALVSSLQRDPMLAERIKRLRTIPGVGPITALTWALEIGDVSRFQTIKQAISYCGLCGEEKSSADKMMRTPLSKVRNKHIQHVLIEAAKLAPRQSYELALVHEKEMQKGNRNRATLAVARKMVAYLLAVDRQQRDFVPAEERRAGAA

SEQ ID NO: 423514 - protein, 430 aa, unidentified
MKSNTQNAKIEAITEKTLVLGIDVGSEMHYARAFDYRGIEYSKKPFKFSNTEAGFVTFKEWILDLKERHEKDKVIPGMEPIGHYWFNLGKFLQDNEMKPVLVNPHHVKKSKELDDNNPTKNDRKDPKVIAGLVREGRYMIPYLPDGVYADLRTASNIRFQLQAELTRIQNRISRWFNIYFPEYKTVYGKPDAKSGMLILKAAPLPEDILTLGIDGVNQIWRDAKLRAVGKARAKTLIEAAEHSVGSKEGAVSARMEIRMLLEDYESRNTRLQEVMVLIEELVRKIPMTEKLLEIKGVGIRTVSGFLAEVGDISRFNNPKELQKLAGLALVENSLGKHKGETTISRRGRKRLIYLLFEVAMSLVSKNQEFRELHNYYTTRRLNPLKKMQSLMAIAAKLIRVFYAMLTKGVDYDPKKMVSDIKKPAVYLQAA

SEQ ID NO: 423515 - protein, 476 aa, unidentified
MNHRRLVGIDLGVATAHTVRVLDGEGNVVAKRKAWPTVESLTAVEAAALAGCPEETRLEVVIEPTGPAWLPIAVFFSARGHRVFRVSSQKAADLRRFLSRHAKSNGIDADTLARLPLFDPAGLRPLVLPGAERAALDRRVRATDRLTRAAAEHKTRIKDLARQLLPASPLTGDLGAADLAVLERYADPRALLRLGAARLTALIAKASRNHQGAERARQWRHAARASLDLYRGHPAVDFTGLAAEIATEVRLLHAICAELAAHAAERETRYQQVDPAALARSLPGLADVGGPALTACMGDPARFATGKRFRSFTGLTPKASETGDTDRKGQPMSKAGSSLLRTTLVRAADTARKQDPQLAAIYYRQMTERGKDHLGALCAAAASLAERAWTVMRRGTPYVIRDTDGRPVTTAQATAIIAERWTVPPEIRARRRSKKTGKAPQKVLEGQIPTGQPPPPHHPIAPQTLRQAGLLTSDPP

SEQ ID NO: 423516 - protein, 362 aa, unidentified
MTDLTRSVTGGVDTHKDFHVAVALDDVGRLLGTEQFPATMQGYRALLGWLREMGTVAAVGVEGTGSFGAGLTRFLTSKKISVVEVDRPNRQRRHRHGKSDPADAESAARAVLAEDATAVPKAADGPVEAIRLLRVARRTAIKARSQAANQLQSVIDNSPEVLRAQFRGLTEGKRIAKAAGLRHRGVVTPLGAAKLTLSTLAKRWLALTGEIAMLDSHVAELVALVAPSTLGVKGVGKETLSALLVATGDNPERLRSERSFAALCGVCPVDASSGRHQRHRLSRGGNRDANRALHLIVLNRLTWDPRTQEYLERRVADGKSKKEAIRCLKRYVARELYHHICSDLRPLSSNYSGLEQECPRAA

SEQ ID NO: 423517 - protein, 338 aa, unidentified
MPLYGGIDLHANNSVVVLLNEQDQVIYQHRVANHLPEILEPLALYQADIQGIVVESTYNWYWLVDGLMEAGYRVHLANPTAIQQYSGLKYTDDHSDARWLAHLLRLGVLPEGYIYPKAERAVRDVLRKRAHLVRQQTANVLSLQNIIVRNTGVRLSAKRIHALTVEELERLLPVPEHVLAVTSSLVVVHCLAQQIKTLEQTVQKHLKHTAAYAQLQTVAGIGPILAQTIVLETGAIGRFPTVGNYASYCRCVGSTKISNGKRKGQGNVKNGNPYLEWAYMEAAQFAIRFNPMVQRFYQRKQAKSHLMIARKAVAHKLARACYYIMRDLVPFEVHKAFG

SEQ ID NO: 423518 - protein, 320 aa, unidentified
MEEKMDGQGIYVGVDVSKARLDVAVRPSGEGFAEANAKPAVSRLVKRLKALDCTRVVVEATGGYETIIVAALYAAGVAVVVVNPRWVRNFAKGMGWLEKTDRIDAKLLALYAERAELKVQQLPDEATRQLAELCARRIDVLEMMETERNRLEHASSAVRRAINSHIDYLRKQLKRIEHDIDGAVRGSELWRHKDELMDSVPGVGPTLRACMLAWLPELGQLNRGEAGKLVGVAPLPDDSGTVRGVRRIFGGRAPLRKVLYMATMGAMLHNPHLRAHYDRLRTRGKLHKVALVATMRKLLLILNAIIKTDTPWSESCLESA

SEQ ID NO: 423519 - protein, 346 aa, unidentified
MNQIIRIGMDTSKHFFQLHGVDAAERPVLRRKLRRNEVLAFFAKLPPTVIGMEACGAGHYWARELRKLGHEVKLMAPQHVKAYVKRNKNDGRDAEGLCEAMSRPTMQFVPVKTEEQQAALMLAGVRQQLITRRTQLSNAIRGYAAEFGLTAAKGLDKIEPLLANIAADEALPELARELFAMHGREYAHLQAELKKIEARLMAWHRANADSRRLAQIPGVGPIGATALVMKAPDPRLFPSGRHFAAWIGLTPKDHSTAGKTRIGKITRAGDEMLRSVLVAGATAVIQQARKSRGRASPWLLALLARKSPKLAAVALANKIARIAWKLLVTGESYDGARMPDASALAA

SEQ ID NO: 423520 - protein, 372 aa, unidentified
MKTKNKTKLTPSVVSTSTAPAPAGGFTLGLDLGDRSHYVCVLDAQGQIIHEGALLNERIALALLLTRYPAATVAMEAGTHSPWISRYLTGLGATVIVANPRKLHAITRHERKCERRDAVMLARLARADAALLHPLQHGSAQAQHDLLGLKLRDSLVRTRVNLINTVRFTLKSLGHVVSNPSSESFHKNIVTAVPADCLPVVQPVLAVLALITDQIKTLERDLEARSKRDYPVTQRLQQIAGVGPLTALCFVLKIGEPTRFGRSRDVGPYLGLCPGRDQSGGTDKQLRISKCGDGLLRRLLVSAAHYILGPFGPACALRAYGQHLIGTSVREKKRAVVAVARKLAVLLLSLWKHGTDYEPRVPATPALVMIPA

SEQ ID NO: 423521 - protein, 438 aa, unidentified
MLNPDAAGIDIGATEIYVAVPADRDTEPVRVFASFTQDLNKLADWLQQCRVHRVAMESTGVYWIPLMQILEIRGLEVYLVNAKHVKNVPGRRTDVSDCQWLQYLHSVGLLRASFRPAQDVCAVRSLLRHRASLVDMATCHVQHMQKALDQMNLQLHHVISDITGTTGLAIVDAILEGNRDVQKLALLRDPRVRVSHEIIAKSLVGDYRQEHLFTLRQSVGLYREYQRRIDACEEEMQRLMKVLETKADPTTALPTAKDSIKKCKVMPPARALALREEAYRILGVDLTTIPGISVLHVQCILAELGGDVSKFRSAGAFSSWMGLCPDNDISGGKVLWSGTRKVKNRIAVTLRMAAQSLQQSESALGVFYRRMRAKLGAPKAITAAAHKLARIVFHMLSTRQPYDESVFAKAEKKHLQRMENRLRIQAQALGFTLLPAQS

SEQ ID NO: 423522 - protein, 371 aa, unidentified
MNHVTSIGLDVHARSVTAVALDSITGEVRSQKFGYSPAEIAGWILQLDSPKAVYESGVTGFHLVRELREMGVDCIVGAVSKMHKPASDRRKKNDRNDAEFLARQLMAHNIVEVFVPDVETEGARNLSRALEDVRDDLTRAKHRLTHLLIRWGYAWNEFNEDGKRRGSWTHAHWEWIRGIELPDAAARESLDYYISEVRHIESQKKAIEKRVAQCASGPRWRDRVEALRCMKGIETVTAFALTVEAGVFSRFDSARAFASWLGLVPSEHSSGERASRGGITKAGNSHLRKLLVEASWHYTRATKERKRSLYDESVPASISNHAAVGVKRLVERRRHLSCELRKRPVVANVATARELACWIWALGRMSEGALA

SEQ ID NO: 423523 - protein, 368 aa, unidentified
MLFVGIDIAKRNHEASVIAQDGSVVRKAMRFANSQAGYNKFMDMVRSLKEPVVFGMEATGHYWLTLYTHLRNDGFTVHVINPIQSDALRGMYIRKTKTDSVDSVIIADIIRFGRYCETSVEPGDLQAMRELCRQRFYIIDMASDLKRKVIALLDQVFPEYEKLFSDTFGVSSMELLSQYTTPEEMLSVSSQQLAEILEKASRGRLGAEKAVEIQNAAKNSFGIVMASCSFSLIIRQYIEQIRSLESSVDIFDTEIARLLSGFDTQLTTITGVGSTLAAVILSEIGGDIRRFSSPAKLAAYAGVDPTVKQSGDFSGTRMKMSKRGSPYLRRAIWLASTVAAFKDPAIHALYERKRAEGKDHMTVIGHKS

SEQ ID NO: 423524 - protein, 339 aa, unidentified
MKYTPVGVDIAKHLIQVHFIDENTGDVVDKQLRRRDFLEYFSNRESCLIGMEACGGSQHWARELTKLGHKVRLLQARFVKAFVLGNKNDVMDARAIWMAVQQPGKEIAVKTEEQQSVLVLHRSRRQLVKFRTMQINSLHGTLLEFGETIHKGRAAMEREFPEALERMKERLPPYLITVLENQYNRLNELDSLIEDIEKQLTSVAKQNETCKRLLDIPGVGPLIATAAVATMGEASAFKSGREFAAYVGLVPRQTGSGGKIRLLGISKRGDTYLRTLFIHGARAAALLTKEPGLWITELKKRRPVGVATVAMANKLARTVWAIAAHGRKYDKEYVSIRSY

SEQ ID NO: 423525 - protein, 329 aa, unidentified
MTDEFVKPLFVGIDVAKDSLEVALAEDVATVRFGNDEQGIEALLALLASKPVALVVLEATGGLERRCAQALYLAKLDVIVANPRQAHDFARSLGYLAKTDAIDAKALSHYAHTLHTSKQRERLLLKLATPEQQQLDALVSRRSQLVKMRVAESNRLDQAHPLAAKSIRGIIKVLDKQIGALDKDIGGRLKMHFGKQMKLLEGFKGVGEGTKAVLMAALPELGQLSTRQISKLVGVAPLNCDSGKMRGKRITWGGRGDVRSALYMATLSATRFDPTIKAFYERLRAAGKPAKVALVACMHKVLTIINAVLKSGVPWQASYSHAGVTQKIT

SEQ ID NO: 423526 - protein, 348 aa, unidentified
MEEIIRNGLDTSKSVFQLHGVNEAEEPVLRKKLRRSQVLAFFAALLPTKVGMEACGAAHYWARELRALGHDVVLLPPQYVKPYVKRSKSDAADAEAICEAMSRPSMRFVPVKSADQQALQMLAKLRAQFIGRRTQLANSMRGFAAEFGYVAPKGLARLGDLLADIRIDATMPNMAREMFETLVRDDARIDEEIAALDGKLLALHRSNEVSRRLAAIPGIGPIGATLLAIKVTDAHGFGCGRDFAAWLGLTPKNHSTAGKNRLGVITRAGDEMLRAVLVVGATAVIQHTRRTGKRAWPWLEALIARKPAKLAAVALANKLARIAWKLMVGGEVYRPIGTVVPVATSARP

SEQ ID NO: 423527 - protein, 372 aa, unidentified
MQNYYVGLDVHSRESVFVVEDDAGAIVARGSVPTTVAGLKHLRDSCGLPVATGVALETGTSAFFVARELVRLELKPIVIDAHEVRRKAHRPEQKSDTRDALELCEGLRRGFYRSIVHVPTPAISDLRTALSRRRHFIRIQTAEVNAVKRLLRGIGQTSGPRGSLRTDAHWQRLLAGGDAPEHLKEHVRHHYAVWRQAAERVRALDLSLGESARARREAVKRLETVPGVGPIVALTAIAVFAQVSRFENAKHAASYAGLVPSTFQSGERDAHGHITKRGSAELRAMLCEAAHHARRSSHPLNPHFARVCTRRGYKTAVVAVAHRLCRILFAMLRDGTDFSVAGTGVEQGDFKRTTTYKYRLRPNPAGRLPVAG

SEQ ID NO: 423528 - protein, 409 aa, unidentified
MKVTYQTCCGVDVHKSFLVATIVKTTGSIEPSYQKKRFSTFNNSILVFKQWLLDNDCHDVCMKSTGKYWVPVFNLLEDEINVVIANPKWVKAVKGNKDDTKDSKWIGDLFRLGLVKGSYIPCKIVRILREYTRYRYKLVSCRSSEKNRYQNALTVCNVALDSVVSDIFGKSSASIIDYLLEQSGTSINHEEIASKLLRSLKSKEDAVIESVEGYQMTDAPKYRVRLVRAHMDYITAEINDVDKMIENMISSNPDFENAVQFLCTIPSVKRDSAITIISETGTDMSQFSSSKRLCCWAGLTPDSNESAGKKKSVRITRAGVYLKPALVQCAHAAVKSDKSPYYKKKYDFLLNAVARKEPLSLLPVCFSPPSIRCCLLVSSGIRATFTKLICLKLYWKSRSKRQSNKLRNC

SEQ ID NO: 423529 - protein, 391 aa, unidentified
MIFVGIDVAKDKHDCFIVNSEGEVLADVFTVSNSKEGFDTLFQTINTCTGIDGKIKVGLEATGHYSYNILGFLLDNSLPTYVINPLHTNLYRKSLSLRKTKTDRVDARTIATMLMSDASLKPYTNIAYHNSELKSLTRYRFDKVKERAKLKTSIARLINILFPEMEKLFPTLHTASAYALLSELPSAKNISEVHLTHLTKLLYTASKGRYTREKTMQIREAARSSIGTYMPAKALELKHTINLIREFDKEIDEIEAAIKSIMDKINSPITSIPGIGLSMAAMIVAEIGDFNNFDSPDKILAFAGLSPSTYQSGQLNNCYAHMEKRGSRYLRYALFNATKFVCNWNPLFAHYLAKKRSEGKHYNVAISHAAKKLVRLIFAMQKSGQLYNVTA

SEQ ID NO: 423530 - protein, 350 aa, unidentified
MIIIGVDFHPEYQEIASVDTDTGEYQEKRLAHPKEAEEFYRSLSCVGQVVRVGMEASGHGRWFERLLEGLGVELWRGDAEVIRAKRGRKQKTDREDARHILKLLLKDDFPRIWVPNWENRDLRQLLWHRHRMVQARTRVMNQLQAVALNEGLRCKKRLFRANGRQQLESFQLAPWASRRRRELLELLDRLNPAITELSQAVEREAEKCPEAQRLMTHPGVGALTALAFVLIIGETERFHCGKQIAAYLGLVPLEKSSGNRRRLGHITKQGSSIVRFLLVEAAQVTVRSLPEWRSKYVHLMMRRGRKTAKVAMARKLAVRLYWMWRKGWDYEQWKKFGSYVGQPVNRYGVQ

SEQ ID NO: 423531 - protein, 521 aa, unidentified
MPRPRTPRPPKARKAFALQKPNGQLTPRVQAVGPEHFGIVAIDCAKARSRYLLADFYGRTLLEPATLPHTRGDFQTAIDRLRRAVQQHHLRDLVVAIERTGDYHRPVQLAFRRAGFETRLVHPFTSKQYRQPADPEYKTDDADLAAIWRATTHGFGLLEPAWPDDYVTLQLLRRHRRDLVDKAATLQCQIREVLHAAMPGYAECFCHLWDDSPAPLVFARHTTSPQAVLQAGVAGLQRIADQAGLRCRRETFHKVLAWAEQAPPDAGHAPDRRRILAGLDDDRLAKTQQILELERDLAHLVVHTPYVLLLAISGINLVTIADLAGELGPMPFYANANAITGRAGLMPARYQSDQVDSANGPLRRRGNRRLRAVLMQAADNLVQCNHYFGARAERWARAGKDSRWVRVKVAKIFSRLAFALVAGRQLFPHPCCQPRHYILGKLLAFHSDHGTDPLAMRQDLEAAVEQLPASARAAEAEPLQQELGALGRRRGPQPLAGIIPLVLARLAGRVVQSAPSESAGP

SEQ ID NO: 423532 - protein, 442 aa, unidentified
MICAEIERCAGIDVGKERLSVSVMVGPLAGEPRVEYREFGTITAELERLRQWLQAEGVTHVVMESTGSYWKPVFNVLEDSVRVYLANPQDVKNRKGHKTDKKDSWWLAHLLRHAMIRPSFVPSRGLRELRDLTRRRGKMIGVGTSERNRVDKMLQDANVKLSSALSDIFGVSGQLMLEALLEGKAQPAEIAQFAKNRAQRKIPQIVAALEGHRMSDHHRQMIRYSLEHLRFLEQHILDLDEQIVAKIEALGYTPQWKLLQTVPGLRENSAASVLAEIGPDMGQFGSEKKLSSWAGVCPGNNRTAGKNLGSKTTKGNRWLRAALTECAWGVSNRKNCFLKEKFWRLATKKHRKPPATMAIAHTLLVLCYQVLKSGKPYQERGMPPMDQTQRDRLICHHVRRLGKLGIRVRSLTLPEDSKKVKPKKVPADSGKPKTKKARAKKN

SEQ ID NO: 423533 - protein, 413 aa, unidentified
MMTAEPAGVTGGVDTHADVHVAAAVCSTSHRLLGVAEFDTSPAGYVRLLAWLLGFGPIDAVGIEGTGSYGAGLARFLTEQGVELVEVMRPDRAARRAQGKSDPVDAEAAARAVLSGRAAGSPKHRDGLVEAIRLHLVVYDAVVRERTAMRNRLHAVVTSAPAEIREEVDQIAESARIVTLSRWRVSAGDDVVAVACRQVLRTLARHILSLEGQADAARARLDELTCEAAPAVRDMHGVGAITAAQLLTAVGDNPERIHSEAALAKLCGVAPLQASSGKTRRHRLNRGGNRTANHALWRTAMIRRNHDPRTQAYFERRRAEGRSDREILRCVKRFIVRELYQALTRPAAAVPTGDELRELRHLAGLTQQQLADQLEVTPGKISRIENGHLRTPDLRHRIHHHLLTAANTTQLAA

SEQ ID NO: 423534 - protein, 343 aa, unidentified
MEIKALGIDLGKNWFQLHGVDKRGKAVFQKKVNREKLPLLIANLPRCMIGMEACAGAHFWARKFQEMGHEVKLIAPQFVKPYVKGNKHDQADAAAICEAMSRPHMRFVPIKSLAQQEILAIHRVRTRLVQAKTSLVNEIRGLLLEQGITISQGIIKFEQSLTDLLDPEIEELSPHFKEFLGELVKEFKFIKEKIERFEEHLQQLGKENTAVKRLMTIPGIGPIGASALVASIGDIRQFKNGREVSAWLGLVPKQHSTGGKPRLLGISKRGDMYLRTLLIHGARSVISWAMRRRNPVSSLEKWCLGLIERRGLNRATVALANKIGRMIWALLAKEEDYKMYAIA

SEQ ID NO: 423535 - protein, 359 aa, unidentified
MRIIGCDLHARQQTLAMLDTATGEIVNLTLTHEGDHVREFYSNLPRPVRVGIEATGSMQWFLNLMEELGIECQVGHPANIRAAEPRKQKHDRRDADLILKLLVENRFPSIWLPSKELLDLRGLLLHRHQWVRMRTRVQNALQAIALANGLRRGPSLWSHAGQEKLASLSLAPHTAHRRSELQALYAKFEMEIEKLNQRVEKQAWERPTALRLMTHPGVGPITALATDVFLGDPTRFVDGKALASYAGIIPREYSSGGRQRLGGLTKQGNPLLRFLWCEAAIHAVRKDPELQRFYRRKLFQKGLGKARVAAARKLGIRLWILLRDQIDYNEFCRRGQMRQKNGGTCVGMPARVIAQTVAD

SEQ ID NO: 423536 - protein, 426 aa, unidentified
MRKTYQICCGVDVHKTFLVATIVKTTNNIPHYEKKRFSTFAKDLRLLKHWLLNNNCFDLCMESTGKYWIPVWNMLEDKINVTIANPKWVSAVKGNKDDTKDSKWIADLFRMGIVPGSYIPCRAIRILREFTRYRYKLVCMRSSEKNRYQNAFTVSNCNLDAVVSDMFGKSAMDIENYLLEIDMENFDPEYCKSLLRRSLKKKADSVIESVESFNMIVEQKERIKIIQEHFNDLDTRINRIDEQIEKLIVTNKWQSAISLICSIPGIDRHMAITIISEIGTDMTPFSSSKRLCCWAGLTPGNNQSAGKKKSVKITRAGIYLKPALVQAAHAAVKSTTNPYFKNKYERIYKRRGKKRAIIAIARKILTAIYHMFKNGELFNPCDIYKESIPETVQLHQKKKAAKQAIKLLVNLGLIAEDTVPLELLAS

SEQ ID NO: 423537 - protein, 332 aa, unidentified
MENFYFIGVDVSKKKLDFCVMFEGKVVHEEETSNHQGAIMSLLHHLEEDYGIASGQMLVCAEHTGQYTFPLACACKAVECRLWLENAAEIKYSSGIQRGKSDKVDAKRIAIYASRFQDKVRYYERPTEDIERLKQLESERTLYVTDFAKYKGQMKDQKEYMPKSLYERKMKRLQALMDDLEEAIQSITDEMDEVIASCPVLFRQRELLMSIDGVGRVVATNMIIATEAFTRFDDPRKFNCYAGVAPFSYSSGSSQHSKARVSHRADKVMKRLLHLAAVAVTHRIGGELKKYYERKVAEGKNKMSVINALRAKIVARMFAVIKRNERYKPILS

SEQ ID NO: 423538 - protein, 346 aa, unidentified
MDKFDPCGIEVSAQELVVALSRDERAERLRSFPNTAEGHVAVCRFLASGSQRVRVALESTGLYGLDLAYALHREAHIEVMVANPRAVRHFASALMQRSKNDRLDAVVLREFAARMPFQAWVAPSPHCLALCAVTRRLETLTEQSTAEKNRLHAASLSVAIPSVVRRDLQRSVRSIQRAIVRLTKEARRILEGDPLLASSYHLLLTAKGIGPTSALRLLAETALLSEDLDVRQWVAYAGLDPREYQSGSLVHKKVRISKTGNRHLRRALYMPALVAVRHEPHLRAFYQHLLAQGKCKMQALVAAMRKLLHAVYGMLKRRQPHDGAKLYRLVVDSHAPSSEHCSAEAA

SEQ ID NO: 423539 - protein, 399 aa, unidentified
MKNAIKFEQVIERGCGIDVHKKVLVATIRGTEIKEETREFSSFTEDIESLRDWLRSHNITHVAMESTGVYWKPVYNILEEYFEILLVNARNVKNVPGRKTDKSDSKWLTKLLLSGLLEGSFIPPKKTRELRDLTRYRRKIVGQVSSEKNRLQKILEDANIKLSSVVSNMSGATARKIISSMLKGEEDIEELVKLRHGKLKASEADLAKSLRGYLSEHHKFMLTTINNSIVEKQKLIESLDKRITEHLKSSEQTLSRELLQSIPGVGKDAAASILAEIGDKMEQFPSERHLASWAGMSPGNNESAGKKKSSRITHGDKYLKELLVQCAWAATRTKNTYLRALIAVGHKILIAAYFILKDGVCYKDLGVDFLENKRKKNQILHHIRRLKELGINTEKIKVA

SEQ ID NO: 423540 - protein, 392 aa, unidentified
MKATDARVVIGMDPHKRSVTIEVMAADEEVLGGGRFGTDTAGFKSMLEYVTRWPDRVWAIEGCNGIGRHVALRLLAEGHEVVDVPPKLSARARVFATGQGRKTDATDAHSVALVGTRMAGLRPVVHDEQLAVLRLLVDRRSSLGDDHTRMISQLHQLLLELIPGGAKKDLSAAQAKALLARVRPRDVVGKARRRVAAELIADLERVYARKKAADKELKELLAATGTSLMDLHGIGPSGAARLLVGVGDITRCPNREHFASWNGTAPIDASSGDQVRHRLSRAGNRQINRTLHIMATVQLRNDTEGRAYFDRRKSDGKTSMEAMRALKRRLSNIVYKTMLDDAMRAKTTGPGGQRGNDSDSSATGSQPQHRLFGQATPGPVTTQPRTPLPRVS

SEQ ID NO: 423541 - protein, 412 aa, unidentified
MNIVYERCAGIDVHKRNVVVCAITPDQLGQRHKEQCTFSTMMPDLLRMRQWFQNLGVTHVAMESTGSFWKPVFNVLEGYMEVLVVNAQHLKAVPGRKTDLKDAEWIADLLQHGLLRPSFVPPPFQRELRELTRYRTSVIEERSRTINRLQKVLEDTNIKLASVATDLMGQSAREMLAAFLVGETNPTVVAQLARGKMRAKRDLLVQALQGQFKPHHRVLISEQLAHIDALDEEIERLSTEIAQRLRPYEPQIKRLETIPGIKRRLAEVILAEVGPDMQRFPSARHLASWAGMCPGNRESAGKRLSGKTRKGSPWLRTALVEAAHAATHCKESYLAAQYHRLVLRRGGKKATIAVGHTLLVIIYHVLAEEKDYQELGGNYFDDHDRQAVQKRLVHRLEKLGYEVTLVPTSPAA

SEQ ID NO: 423542 - protein, 443 aa, unidentified
MSRKQRTHLRGKRGQAFADRIRGIALDRILCVSLDISKYFHVVMIHNALGEIVTPTFEIDIFQSGLNRLCQAIDEAVAQTQAQVVLVGMEPTSHYFENLARHLRERSRPVTLINSYAVKQNRDQQLMRREKTDEIDVAAIGDLLRRGEGSPFQPASGVYLQLQQLDRVRLSKVKMRTMLKNQILGHLDRIFPGLVLLGAEARQRYTPLFTTDFWACQTLQHLIRVCPNPHRLIAMTPTDLVTAFHAQHFALGRLRAANILAYARKVLLPDAELAAIRCELLQHDLALLEEVERHIADLEDRLRDLLTQTPYAIWAKLKGLSDIQVASLAAAIGDPTHYACASQVFRRTGLVSGRNDSGTRQRKGKGKRVVKTGDSYLRRAVLNGLRSLILHQPVLRQYDRRLQQSKPKGVAFVATARRGMGILWATLRDQRPATLILQRGATM

SEQ ID NO: 423543 - protein, 321 aa, unidentified
MNKNTEIFGIDISKDVFDVYSHQKGHQSFKNDAKGFKSFLKVITKDALVVMEATGYYHYLFAQFLHKKKVQVSVVNPLSVKRFIQMKLAKVKTDKSDAKAICEYGQMNEVPLYTALTEVQAECLQLFRLLDNYLKKRTQTKNKKHGEEVLGIPSKYVYGSLKRDLKHLDKEIKGIESRLLELVKQDQQHQLTLLKSIPGMGIKTALFLIVITDGFKKFETASQLCSYVGITPTIRESGSSVRGRSKISKVGNKKLRNLLFLCAFSACKHNKACREIYERIVNKGKSKKLALIAVANKLLKQAFAIAKSGRPYDENFVSKLA

SEQ ID NO: 423544 - protein, 429 aa, unidentified
MKIIYPRVCGIDVHKKFIVAVICISESVEPVYLKKRFSTFHNDLIRFRNWLIQNDCQNVCMESTGKYYIPVYNILESHISNIVVANPKWVRAVKGEKDDDKDAKWIADLFKLGIVKSSFIPQKDFRILRELTRYKYKLVNMRSSEKNRYQNALTSGNCKLDMVFTDVFGKSASNIIDLILSDNPYTDEDILSKVHKNCKASPDMILNSINGTDLTPVQKSRIELVNNHIKQLSSNIQRLDKLIDLMIEPYEDYISFLCQIPGVSRNSAITILSEIGVDMNQFTSTRRLTSWAGLTPSSNQSAGKKKSVRISRAGVYLKPCLVEVAHAAVKDTNHPYYANKFNKISKRRGKKRAYIAIARKILVAAYHMLLTGEIWNPADLAEVETPVEQRIKYVKNNLKSDIKQLLDIGLTVEELTLMIQQNANIIATQ

SEQ ID NO: 423545 - protein, 350 aa, unidentified
MKRHSENREVKVVGIDLGKNSLQVHGVDADGRKVIGKKFSRQQLKEHLVTLPVCTIAMEACASAHYWARLLKSYGHEVKLIAPQFVKPYVKSNKSDAADAEAICEAAQRPNMCFVPVKAIGQQDIQAIHRMRSLAVGRRTAQINQIRGLLLEYGIEVPAGRFRLLKRLPEILEDAENGLTDLFREELSGLQGELRHLDERIAHYDEKIEQIARADERAKRLQTIPGIGPKIATALLAAAGDIHVFKNGRELAAWLGLVPRQRSTGGKPTLLGISKRGDVYLRQLIIHGARSILRWVDRKTDRNSRWATALQERRHKNIAIVAMANKMARIAFALLKNGETYRAELTPAAA

SEQ ID NO: 423546 - protein, 410 aa, unidentified
MEVLHPICAGLDVHKETVVAGVRHMSGGKVKTEVRTFATTTGALLELSAWLGARHVTHVAMEATGVYWKPVWHILADGDFELLLANAAHVKNVPGRKTDVKDAEWLADLLAHGLIRASFVPDQPTQQMRDLLRTRKQLVRERISHTQRIQKALEDANIKLDTVVTNILGLTGRRILQRLIDGETLPEALATLAHRNIQASRDQLEAALRGRVTPHHRFLLKLHLDQIDALDAAIASIDKEVEGNLEPFRAAIELLSAIPGISQLSARVILSEIGLDMSRFETAGHLLSWAGLCPRNDESAGKRRSTRMRKGAPWLKTILIQCGWAAMRTKGTYFQAQYYRLRSRRGARKAVCAVAASLLTTAYHMLKNGACYQDLGANHFDQRAKTKHVQRLVNRLESLGYDVKILPKAA

SEQ ID NO: 423547 - protein, 359 aa, unidentified
MLVLGDSAPRKGADAMTFVGCDLHTRMQQVAVLDTGTGEVSERQLPHDGMAVEEFYAALPRPVTVGIESTGYAVWFHALMQRLGHTVLVGDAAKIRAMVVRKTKTDRRDALHILDLLRHDRFPTVWVPDPATRDLRALLTHRMRLVRIRTMVKNGLHAIALNYRLARGSKLLRQAGLAQLHALALPPHTAQRRDQSLELLAGLSAQIRELDEAITTAALAHPDAPRLITHPGVGALTALATIVVWGPVARFHDSKHVVSYVGLAPALNASADKHHLGHITKQGSTLLRFALGQAASHAARMDADLKRTYFTLVHRRGRPKAKVAVARKLLVRLFIMLRDQIDYDEFRRRGRLAPASASA

SEQ ID NO: 423548 - protein, 406 aa, unidentified
MELETLHQRVIGLDVHQAQITACAIIEDADGKTRLEQRQFGAFKRDRRALAEWAQALQPDQVVMESTGIYWKSPYAALEAVGIRAWVVNARHVKNVPGRKTDVGDAHWLATLARAGLLRGSFVPPAMLRELRLVARQRQKLVGHLASEKNRLHKVLTDGGIRLGVVVSDLHGQSARAMVKALIAGRPTHEVLDCASRRLKASREELFDALQSELTDSHRFVLHELMGHIEEIEERIARFDTYLLRGLAGEQHALALLQTLPGVDLIGAAMLLVEIGIDMQAFGSADRLASWAGICPGNNESAGKRQSGRARKGNPYVRRLLCEFAHAASRTTSVFKSKFQALVMRRGHKRSIIAIAHKLLRTVFCMLQRGEHYRDSATDYEALAVQRNAPRWIKALTKFGFIPNPA

SEQ ID NO: 423549 - protein, 323 aa, unidentified
MKRTIWIGIDVAKDKLDVAVKKTEAGQHPAPARRAQEAWTSPNTDKGVAQLVKRLHALEPDRIVMEATGGYEQRVFLALRAAGLPAVIVPPGAVRSFAEGIGRKAKTDGIDALVLAYFAEVRQPEVLPLPTENQRRATEVWGPRSGLAATPTAHQNPPGHASRENRARIERLLEAVQTEIDELEKELAKALKATPEDAAKAALVRSVPGIGPVNAAALVGGLPELGKLHRRQLSSLLGVAPMNRDSGKGERKRFVRDGRRALRSLLHMAALSARTHNPAIRAFSQRLEAAGKPFHTVMTACIRKLVVILNAIVASGTPWSPSA

SEQ ID NO: 423550 - protein, 313 aa, unidentified
MDALVVGIDVSKAELAIAEHPSGTRWTSETTPAALDALVARLSARPPQLVVLEATAGYELPVAAACASAGLPVAIVNPRQVRAFAQAIGRTAKTDAIDASVLALFGARVQPMPRPVADAETRALADLVLRRRQLLDMLLAERRRVEHAPASGPVARNLRSHIRWLERCVRDVDHEMGGAIQRSPVWRVQEDLLRTVPGIGPTVARTLLAELPELGHLDRRAIAALVGVAPFNRDSGQWRGRRMIWGGRASVRAALYMAALVATRYNPVMRLFYQRLRAGGKPPKVALVAVMRKLLTTVNAMLKHQTAWNPVSV

SEQ ID NO: 423551 - protein, 433 aa, unidentified
MEEVTDEPLYRDRVCGIDIGKAQMVATIRVPSDKDPARRASETRSFGTTKKEVLALADWLRCWQVPAVVMEATGDYWKGPFYRLEAEGFQCVLADARQVKNLPGRPKRDPSDSRWLAACFERGAVTACFVATPEFRLIRLHTRYRRDLTEERTRDKQRAEKLLESAAIKLSSVVTDLHGVTGRDIMDHLIAGERDPKALAQLARARARRKIAELEEALEGAEFFTPEHAALLAAMLARIDRVNEEIARLTEVIEQLLAPYEEQLAQAESMPGWGRRAAQDAVAETGVDMTRFRTGGHLSSWAGRTPLDHQSGKRKGRATAKKGNRYLAGLLGETACAAGKTQTREGARYRRLARKRGKAKACVAVGNTQLKVYHKLLSNPGMRHQDLGPDYYERQRDIRRQIAHHIGKLGDLGFEVTLCRIPAPEPDGTSQAA

SEQ ID NO: 423552 - protein, 348 aa, unidentified
MLHAGLDLSRRRVDVCLIDGDGEVVGEFACPCDRDGLRGLVQRVGPGVSVRGVIESMSGARFVHDALEQLGWEVLIADAQKVKGLAPLACKTDRIDARVLAVLSHRDLVPAVWLPDPRVRRERELARFRMHLVKHRSMLKNRIHSALINWGKPCPVSDLFGVAGRKLLDELEVPQPWRANIDASLLLIDDLERQIAQTAAQLKATGADHRYVPLLMTAPGIGWVLGFTIAAEIGQIERFASAHKLVGYTGLCPRVIQSGTKDRRGPLTKAGPKYLRWAMLEATMHALRHSAYRDRYQHTKRRLGRQRGAKVAQIDIARRLTTAVWHMLTTNQPFNPTAAGGAAFRLAA

SEQ ID NO: 423553 - protein, 463 aa, unidentified
MAEPARLKSRTSPGVAARPQTSERTSPCEGPYISTTRGQPTMRRKKTHMDTFEQLTHFAGFDWAKDHHDAVILDRQGNTVAAWTFAHSAEGWAQWREKVKAYPALGVALETSHGAAVEQLLASGVTVYPMQPKAAQRYRDRHVPSGSKTDQSDAWCFADALRVDGQGWRALAPADPLVEELRLLCRDEVELITQRTGLVNQLQAALYEYYPAALEAFEDWTQAYAWALVEQFPTPRELVKAGRRRWENFLHVHKLWRGQTLEKRLEIFARADQLCGGEAVTRAKSRLVMSLVKLLRTLQTQLEAYRAEIEKLFAQHPDHDLFGSLPGAGDKLAPRLLSEIGSDRAHYPDAQALQCVGGTAPVSFQSGQIRKAKIRWHCNRHLRHAVHLWSDCSRKFCAWAAAYYLAQRQNGKSHACALRCLGQRWLKILWKMWQSGQCYDEALHALNQQRHGSWVLQLKAEKT

SEQ ID NO: 423554 - protein, 345 aa, unidentified
MALFVGLDVSLKTTSICIVEGNGKLVCEGKSLSEPVPLLKALAPWRKKIKLIGIEACPLSEWLYGALVENKLETVCIETRHTQRFLSSRPNKTDRSDARGIADMMRLGHFKPVHVKSRPSLLVRTTLIARKKFVDHMLSIELTIRGLLKVHGLKIGAVHRCTFAAKVEALLADAPELHAAIAPLLEARNVMRKQKVVLDRRLHQMARSDEVCKRLMTVPGVGPIISLAYKATIDDPSRFKSSKAVAAHIGLTPCVYQSGEIDRSGNISKCGDKLLRHALYEAANSHLRISKKNSVLKAWGVKLAKRIGNKKALVAVARKLAIIMHRMWVNGSTFQHSRADMKAAA

SEQ ID NO: 423555 - protein, 322 aa, unidentified
MNKYKEIFGVDISKDVFDVHGSKSGHDQFENNASGFKSFLKRLPKESLVVMEATGYYHYRLTQFLHKQNIIVSVVNPLSLKRFIQMKLAKIKTDKSDAKAIYEYGQINEVPLYTALTNVQSKCLQLFRLMDSCIKKRTATKNKIHGEEVLDIPSKYVYRSLKRIKKYLDKEILGIEKKLLSLVKQEQQVQLTLLTSIPGIGLKTALFMIVITDGFTKFENSKQLCSYVGITPTIRESGSSVRGRSRISKVGNRKLRNLLFLCSFNACKHSKACRDIYERIVNKGKSKKQALIAVSNKLIKQSFAIAKSGLPYDEKYVSVFSK

SEQ ID NO: 423556 - protein, 357 aa, unidentified
MKKRAQDILRNEKVFVGLEDSKKTWQLCVRSGGVIVHETSMPAKFDVLRNYFNNRFPECRIQVIYEAGFSGFGLHDELEANGWDCIVTPPHTVTEEKCQRKKNDRIDCRRLAKNLENGDYHSCFVPDKELREDRQISRTYEQVQADIRRVCNRIRRTLEYHGLDRGLPPGSWNRAMYTRLKLHLKDLEISHSLRFSFDVMLNELEYLRQMRKELLQELRALAKSDRYKDRVELLQSAPGIGMFTAIRLQLEWGDVRRFQRKEEFASFLGLVPSDYSSGEKERQGHITKQGNSSVRSWLVECSWMAIKHDPVLLDKYRRVLKNCGSKKKAIVAVARKLAIRLRRILLNGEPYVLGVVE

SEQ ID NO: 423557 - protein, 359 aa, unidentified
MDGSKVQPKVTAGFDLGDKYSYLCLIDTQSGEIMQEGRLRTTPEALRRRFSSELQPLRVAIEAGTHSPWVSRVLEECGHEVVVANARKVRLIYTNKRKTDEIDAQKNLARLARVDPKLLYPLKHRGEDSKAHLAIIRSREALVGCRTQLVNHVRGAVKSFGHRLPKCPARSFHKKVVEHIPAALWVALGPILEQIGSLTECIRDYDRKLEVISKEHYPETDLLRQVEGVGTLTALTFVLTLEDPYRFERSRSVGAYLGLVPATDQSGDRDPQKRISKEGDEMLRRLLVGSAHYILGPFGSDSDLRRHGQKIASRGAKNANKRAVVAVGRKLAVLLHSLWLSAELYEPLRNTQSSGGQAA

SEQ ID NO: 423558 - protein, 393 aa, unidentified
MPVLAAQSEAAIAVRTDLCAIFVSLELSRSTWLITSLSPGGGEKMSKYSVSAGDIDGLFRRFGDLQERARVRTGQSFAVVTIQEAGLDGFWIHRLLEREGIESWVVDPASILTSRRRRRAKTDRIDGETLVRTLLAHKRGEPRVCAMVQAPTPEDEDRRRLCRERKVLTAERISHVNRIKGLLFAQGVRDYEPLRRDRRVRLEELRTGDGRCLLTHLKAQISRELDRLEIILVQLKTVDSERDALLAKGNEDQPPTPASLLVQLKGIGPEFAAVLWSEGLYRSFNNRRQVAAYAGLAPTPWQSGSIDHEQGVSKAGNSRLRTTMIQLAWLWLQHQPGSALSIWFRERVQRNGGRGKKTAIVAMARKLLIALWKYAAHGVLIEGAVANTAFEKG

SEQ ID NO: 423559 - protein, 361 aa, unidentified
MSKVAKRHSKEKQGQVNFEGKACWVGVDVHKLTYAVAVLDEEGQRLEFSTPADPKKLLLQLLKMGMAIKALTYESGPCGYGLAWACQEMNIPVLVVAPSRVPRPISKTGKTDRLDSMKLVELLARDMLKGIAIPSREEFALREIERARQRLVKKRREIRQNIRAFLLRNSLEEPSGLSSWGIAPLQALREIPLPIFLRLSLDSYLEEHTTILESLAKLTKQLEKAAIELGYGERIKNLLTIPGVGATIAHTFTCEIFRPERFKRAEDICAYVGLAPVTSHSGTGKERAWLHPVGQRYLRSILVESAWKLIAAEPQYRDFYNRIRNKTGLSQKAITAVARKRLVLIWRIAIEGRPYMPVKSS

SEQ ID NO: 423560 - protein, 315 aa, unidentified
MSENTVEIFVGVDVSKSTLDVQIEPLGQYLQVSNDDRGIASLVERLGELRPTLVVMEATGGLETCVAGELAARGVALAVVNPRQVRDFAKATGQLAKTDRIDAAVLCEFARAIRPAVRPIKDALTGELDAMLMRRRQLVQMRVQETLRLHSASKVQIKSLKGHIAWLDKQIVNIESDLGQRLRDSDLWRAKDNLLRSIPGVGTTTSFTMLGRCPELGTLNRHQAAKIVGIAPLNHDSGKHRGKRHIWGGRADVRSVLYMATISAMRCNPVIKAFAVRLKSAGKAPKVVIVACMRKLLTIMNTMLKNNTPWNPKIA

SEQ ID NO: 423561 - protein, 410 aa, unidentified
MGLFCGIDWATEHHDVAVVDDDGRVVVRGRVSNDAAGFAQLLTLLAGAGDSAAHPIPVGIETDRGLWVATLRETGRVIYPINPLAASRYRARYAVSGAKSDATDAVLLANIVRTDPGAHRPLPADTEAAQAIRVLARAQQDAVWARQQVGNQIRDLLKDFYPAALTAFAGLPEGGLARADARTILAAAPTPTQAAKLTPARLRRLLVKAGRQRHLDRDVERLREVFTDTYLHQPPTVENAMGIQLTALLRQFEAACTAAADLAEAAIAHFDQHLDAEIITSFPGLGKLAGARVLGEIGDDRTRFADPRGLKAFAGSAPITRASGKKTVVLHRHIKNRRLAAVGPIWALSSLRASPGARRHFDARRAAGDWNHQAQRHLFNKFLGQLHHCLQTGQLYDEHLAFPPPLLLAA

SEQ ID NO: 423562 - protein, 454 aa, unidentified
MSRPKVGVEQARAFAGMHPVHPNAAGVDIGSQEIVVCVEGRDENQVVRSFGSYTVDLQAIANWLGEHGVETVAMESTGVYWIPLFEELERQGFHCHLISSRSLRRVPGRKSDVTDSQWIQTLHSYGLLESSFRPEADLVALRTLLRHRAQLIQHRAPHILHMQKALLQMNVQLSQALSDLTGITGMRIIRAIVGGERDPHKLAELRNYRCKKDEEEIAKALTGTWREEHLFVLKQSLEFHDFYTRQIEECDAEIERTYALVRSDWEEGELAELGEKKRHSHSKNAPKEVEEVRRHLKRICGVDLTAVHGISASLAQTIVIEVGTDMSKFPNEKHFSSWLGLAPKNEISGGKVLKSRTIKTRNRAGQAFRLAAGSVMRADCMFGAFYRRQKARLGPAQAAVATAHMIARVVYKMLKYKMEYEPLSMAQYEKRYQQQQLKYLERKAAKFGLQLVPT

SEQ ID NO: 423563 - protein, 321 aa, unidentified
MMDSSSVVGIDVCKASLDVAFGLHSPVQQFPNAPKGHRALARALTKRAPSRIVMEATGGYEHTLLRHLAERRLPAIRVNARQVRDFARATGILAKTDAIDARVLVRFGAAVEPEHRPLPAPEQEKLARLQTRRAQLIAMRTSESNRLGHDLDPVIVRTMRTVIKTYNQQIALIEAESAEVIAEHAKLQRTYEILTSVPGVGPVTAAVLMGHMPELGELSRQAVASLAGLAPFNQDSGPQRGQRHIRGGRPAVRTALYMATLTALRFNPVIAEDFERFTAAGKLHKDAMAACMRKLLIILKALVRDDMLWDEKPARTSPPTP

SEQ ID NO: 423564 - protein, 342 aa, unidentified
MAYFAGLDVSLNLTSICVVDAVGEIIRELKVPSEAEDLVAALRPLAADLERVGLEAGPLSQHIYSALAEAGLPVVCVEARHMAQVLRAQTMNKTDRNDARGLALMMRVGLFKPVHIKSDRSQRLNVLLQARKVLKSKLLDIEADLRGLLKNFGLKVGKVTPKAFDERIRDLAAFDAFLAEVVEPMLIARNAMRRQYDELHGILLRVVKEDPVCRRLMTMPGVGAVVAMNFRVAIDVPSRFSRSRTVGAHLGLTPKRYQSGEVDWTGRISKAGDAMMRASLFEAAQVLMTRVAKPSALRSWAMRLAKRRGRKKAVVALARKMGVILHRMWADGTDFRWAAQEV

SEQ ID NO: 423565 - protein, 322 aa, unidentified
MKKVETISVEHNVIGIDVSKDELAIFVDGPSERHFTCPNKPKDLKRLARDFKRLNPAVIVLEATGGYETAAAIALAEAELPFAIVFPRRVRQFALGLGMNAKTDDIDARVIAYYGRTAGIKSVPLKSKELRELEALTNRRSQLIEMRLSEQNRLDTAYRSAQKSIQQHIRFLERQIKDTDTEIDRRIKESETWKQTDLLLQSVPGVGPTLSSTLITDRPELRILSNRQIAAVVGVAPFARDTGKSSGKRFCKGGRNQIRRVLYMATIAATRFNPVIKEHYQNLCDRGKRKKVALIACARKLLVTLNAMIRNNRAWQEKLELT

SEQ ID NO: 423566 - protein, 472 aa, unidentified
MGKEKTVYVGIDVSKGYADFILLDSEKKIIESNFQLDDNHVGHSLLQKKITALNSTGIKVVCGLESTGGYEQNWIRCIRQLIDKKQSVEQYKLNARGVKHQLESELRRTITDGVSAEGIAIYVINNYATKLQDWKRGIAKEEATTSRQMLCKLIVSQQKYLTAKYNQLEKIIYRQFPELLQYCKNGIPLWITRLLEKYPSLTAVKNAKLSGVDKIKGITETKANILKGLAKNSVGNLGKDLVMDIIVQTLCSEILHASQQIDKLKEQLIEQEADGDVHLLCSIKGVAEWSAIGMLVHIGDIQQFESGQQLASFFGVHPTFKQSGDGKWGSKMSKAGNKTMRSALYNAAVNVVQHNPYFKAIYARHRANGKKHKAVIGIIMHKLLRVVYGMLKNKQVFNEQIDAKNQEKSHQNEQNESTKLGVSKTSRRYQQLGIEAPVSGRNYKKRKIALEGFQASMDANTESPESNLMGQT

SEQ ID NO: 423567 - protein, 320 aa, unidentified
MTKVEKSIGIDISKENFDVAFSASGRMKTQKYSFSASDIKKFISLLDAESHCVMESTGVYHLRLAHALHEAGIPVSVVNPLSVKRFIQSKMHRTKTDKSDAMMLAEYGSMMKPALWKPDEAHYTQAQQLLNIQEQLIKNRTSVSNQMEAIILSVNQSKTAPGLLKKQLLFIENQLIQIEKELEELIGRHDDEDVNNLQTIPGTGHKTAVALMVYTKGMTGFDDHRQVSSYFGICPRIVQSGTSVRGRGKICKMGMGHIRMLLYMCARSAKKYNRACRELYERLLAKGKAKKLALIAVANKLLKQAFAIVKNKSAYVENYV

SEQ ID NO: 423568 - protein, 427 aa, unidentified
MKNEDVLTTLFVGIDVGSQNNAVYATDFCGEKSFRFKAIENNQPGAVFLAQKIETFMKDKNFTGLIIAMESTSIYSTHLATFLSTADGLIPFRPLVYCLNPKITAAYKKTFIAEDKNDPRDALAIADFARVGKIKSEPWRGSQYLAIQRLTRHRLHLIEAVAREKSYMLTNIYLKFSELAVIDDNRQPFSDRYGATSAAVLTEFLSTEDIASTPLADLTAFVNDKGRGRFTDPQATAKLLQQAAQNSYHLDKCLCEPITIALASSFNCLRAYEKEVKAIDKAILETIKGFNTHEYQCFTSIPGIGPVFAAGVLSEIGTIKAFKSEESLAQYAGITWPDNESGKFTADDKKLSKRGNAYLRYYLMEAANSVKNQLPDYKDFYSKKYSEAITHKHKRALALTSRKFIRLIFGLLDKNQLYTPAGGEYLT

SEQ ID NO: 423569 - protein, 341 aa, unidentified
MKNKSFIGIDISKNVIDASIFCEETPIKDFPHAVFNNSHKGFGEMCTWLKKNHVVLSNSLFGMEFTGSYSMELEKFLNARKYQFCMLSPHVVKHYPMGPKDKDDKIDSAKIADFLYRYDGTECVKPYKMPDKTMQRLKALTKERKFLVEQRTCFMNRRQLCTTKEAAQLYDGYIKEFSHDIENIELKMQNLLETDDSLSTTYKNLLTIPGIGFVNAMNVIVITRNFTAFETARQYASYIGVAPHFHTSGTSVKWRPRPSARCDGQAKADLSMAASVAVQCDAELQSFYNRKLGGKQDSDTKRKALNAIKFKLVLRMFAIGKQNREWEPLDSKSSNEKLAIS

SEQ ID NO: 423570 - protein, 445 aa, unidentified
MSESCTSASSEPEWAAFAAIDWADQKNYWRLQPAGSPQCEHGELDNTPEAVEVWAASLQQRFGGRPIALCMEQSRGALTYMLTKYPHLVVFPIHPTTAARYRETFTPSGAKSDPSDTASLLDLLLRHGERLHPLRPDTPETRLLHFLVEERRRTVNEKTRQSNRLTDCLKLYFPQILDWFDDVTTPLVKELLERWPQLEQLQRAHPGTLRNFFHQHNCRSAELVESRIAAIYPATPATHDPAVREACSLMAGGLLALLASLREHITALDQRIEQLVRRHPDAPLFASLPGAGPVLVPRLIVAFGTHRDRYQSAYQMQCYSGIAPVKEASGKTEWTHFRLACPKFLRQTFQEFAAHSIALCPWAKAYYEHLRQDEKKSHHAAVRALAFKWIRIIFRCWKDSQPYDEATYVQSLRRQGSQLARNLGLPRGAGWRAVAGFQKFSASTT

SEQ ID NO: 423571 - protein, 467 aa, unidentified
MAARKQKQKRMSAQVVEDEDYQLRYEVAAGIDVAKESAVVCVRMPPAAGRKHRTSHLQTVPATVPAITELAAELVALGVQMVSMEATSDYWRIWFVVLEEAGLAVQLVSSSQARNLPGRPKTDKEDARWIARLTEMGMLRSSFVPPPQIRALRVYTRHVWDLTADRTRYWQRLEKLLEDALCKLTSVISRLAGHQTARAVIEAMIAGERDPRVLAALGQGRMRNEKLPALAEALSGMRFGPQHAHCAASLLRSIDLLDAELRDLQERVTEHLAAIPGSWGVDADGVTGPGAGRASGAAALPAAERLDEIPGLGRESAMALIAEIGLDMSRFPTPEALVSWAGLTPTARQSGPRSGRGKKGHGNTYAKRIAVLAAYAAANTDTFLGERFRRLSSRPGGGGRKKAGCAVGRSVLVIVWHLLNDPAARYRDLGSDWHARHTDRSRKARNARRQLEALGYDVIITLREDAA

SEQ ID NO: 423572 - protein, 412 aa, unidentified
MEVIHSCCGGLDVHAKTVVVCLIKRGKKETRTFSTMTDDLLALSDWLVEEECTHVAIESTGVYWKPVFNILEGVVEVILVNARHVKAVPGRKTDVKDCEWLADLLRHGLLRASFIPPAHIRELRELVRYRQSLVKEQTAVANRTQKLIESGNIKLGQVVSDVLGVSGRDMLRALAAGEANAVEMAQLARPQLKAKPTELRRSLEGRLTPAQRWVLGELLARHEELEAALARVKEQIRRQIAESSDPFVAEAVQLLDTIPGVAEKAAETIIAEIGVDMSRFPSAGHLASWAGMCPGNNESAGKRRSGKTNKGNPYLRTALTQMAWAASHSKGTYLAAQFHRLIRRMGKKKALIAVGHSILVIIYHILSKRVGYQDLGEDYFDRHNTDVQRRRLIRRLESLGLKVTAEEIPQVA

SEQ ID NO: 423573 - protein, 329 aa, unidentified
MACVGHATLSQQLHFGKETAFVNSASGFAALLSWVAKQHISGSPHWFLVETTGVYYEELAYFLADNQQLLSVLLPNKVKHFARSTELKSKTDQLDARLLCRLGLERALPAWQPPTPALRQLRALARERQVLVRQAAQLKIRAHAYQHSYQPVSRTLGRLAAQQQLLVIQLKALDQDLADLLKAEPELARKLGQLTSIPGIGLTTAIVVVAETNAFVLVENERQLASYAGLDVVQRQSGLSAQATRISRRGNVRLRTALYLPAVSSLRYNPQQIAFYARLRARQPNGKPGVIAVMRKLFVRCYALWKNDCAYDPHYHPAHLAEKEVAPTT

SEQ ID NO: 423574 - protein, 375 aa, unidentified
MDKYIGFDIDSKKVIACKVQKGQKEMYSTIGSDVQSMSKYLKKQKADGSRAHLTFEISGQAGFLYDSLFDCVDTITVSNPSKMTWIYRTAKKNDRIDSRKQAILLSIGEIPAVHMPSVEVRQWRNTILHRRNLVNKVTGVKNKIRAVLKSQGLTRPVHRGSLWNRANRGWLKTLLDSTGSTLLTTGPLTTCEAKVSSTGLWCMNLYNSLEQLELLEGQVKRVTMYLDSYLSRQAGGGLLMSIPGVGPRTTEAVLAYTDDVRRFGNSKEYCSYFGLTPRLDESGTRRRLGHISKLGPSVVRWVLCESSWKVIRKSKGLRAFYERVMCGQAGRKKIAIVAVCRKLLSIMRAMMLTGEMFNEELVRRECGYKNMKAAG

SEQ ID NO: 423575 - protein, 418 aa, unidentified
MNKEQIVQRVVGMDAHPDSFTAAILTGPTPAAAVIEKQFDKVPIDRLCSWATKHTSADDLIVLEASGNSFHIVRRLAGVGRKAIVLESCQVGKLKEAHANNDKLSAVRIGKAYLAGTAKEVWVPDEKTQERRDLWHAHRKAVKRCSQMRSRIKSYLSDNGVRLKRGTRLAEDKMAEEQIRSLKPWSRLQWGLIEGMLQELRQADEQRRRLRSLIAEDVLGNPDALVLTRLCGIRELVAFGIIAIVGDIRRFVEPAKLVSYIGLNPAFESSGNSSWTGGVGKHGRKDLRSLMMEAAQSIMRCGKTPLAQWGRRLLRRKGDKGANLAVAAVARKLVVMVWYSLMGRTSPPEQIDHAMKLKVGKMISALGRDGLERLGKKRAALRKEIIESMAFQRVYVLDPNRKYEPAIQGSKQQSSDGN

SEQ ID NO: 423576 - protein, 425 aa, unidentified
MKGTQNEKISQIKFETLVVGIDIGKETHYARAFDYRGIELARLLKFSNTDQGFQRLEQWMRDICKQQEKTEIIAGFEPTGHYWFTLGDHLKSQGHKLAIVNPFHVKRTKELDDNSPTKNDRKDPKTIAMLVKDGRYREVYIPDDIYQELREAVSERERLQEQLTSIHNRVVRWLDIRFPEFTTVFKDWRRNAALITLRSFPTPEKVVKIGVDAIVETWRKQMKRASLKRAEALVKAASRSVGRTSGKVASEASLQNLLAEYDLYCQQYDKQEQLMQDLLMQVPNADKLLDIKGVGLITAATFVGEVGDISRFQDPRQIQKLAGLNLVENSSGKHKGKTTISRRGRRRLRHSLFFSMIAMLGKNQEFRLLHQRNLTRENNPLNKMQSIIALCGKLIRVFFAILTKGVDYSPEKMLGDMEQSIRVAA

SEQ ID NO: 423577 - protein, 343 aa, unidentified
MNEISIIGLDIAKNVFQVHGIDCSGEPVVRRQLKRGRVLAFFGKLAPSLVGMEACATSHHWAREIEKLGHQVRMMPPRYVKPYVKRNKNDAADAEAICEAVQRPTMRFVPIKTPVQQSVLMLHRTRQLFVHQRTTLINAIRAHMAEFGIVAGVGRNGVEVLLKIVAEDCDERIPPAARECLMALATQLELVKRQILEADRRVLAWHRSSKVSKRLEAIPGVGPLVATALVASIPDPHAFRSGRDMSAWIGLVPKQNSTGGKERLGNISKAGNRYLRKLLVIGALSVIRRAKILGYTKHPWLVRLMERRSTMIAAIALANKIARMAWAMMARNETYRTPLAQPA

SEQ ID NO: 423578 - protein, 401 aa, unidentified
MKEFNAKEVRIETASALETVKPARADRKYPAYIGLDVHKETIAVAVAQAGREAPESRGEIANKPKTVAKLVERLNREFGGEVLLFCYEAGPCGYGLYRQLLELGHDCQVVAPSLIPRKPGERIKTDRRDACKLARTLRNGDLTAVWVPDEEQEAMRDLTRARDDMKGQERKARQQLNAYVLRHGHAWPSNKTRWTQTHYNWLESLKFPHDWQQVVLQEYIDAVKATSQRVADITAQMERVLPQWSLSPVVDSLVALRGIDKLAAMVLLAELGDISRFDSPKQLMAFLGLVPSEHTSGGRRRQGAITKTGNRHARRMLVESAWSYRFPARQTAHLKRKAANASDEAKVIAWRAQKRLCGRYRTLLQAGKNTKQTTVAIARELVGFIWDIACHEMPKVQQAVR

SEQ ID NO: 423579 - protein, 343 aa, unidentified
MEYYVGLDVSLKHTSICVVNPTGSIVQEGVVDSDPEAIALFVRSRAPGTVRIGIETGPTTTWLWTELNRLGLPAICIDARHAKAVLKMQINKSDRNDAAGIARIMQTGWFKEVRVKDLDSHAVKALLASRALLVKIKRDLENQIRGLLKNFGLVIGRGKFNVFAVRAAELIENRPELIAAVRPLLEARKAIEQQVDDLDRKVHKLARHDVQVRRFMTVPGVGPITALCFKATIDDPTRFKRSRSVGAYIGLTTRRHASGEIDWSGRISKCGDAMLRMYLFEAAGVLLTRVPKWSGLKAWGAKLTKRNGLRKAKVAVARKLAVILHRMWIDGTEFNWSTKKAAA

SEQ ID NO: 423580 - protein, 318 aa, unidentified
MNTNTLQNINVGVDTGKTQLDIFIRPLGIYFTVTNDEKGIKEAIKTIKTHAPQRIIIEATGRLEMPFVLACAEANLPIVRSNPIHIKRFAGAIGRKAKNDRLDAELIAHYGEAIQPQFTQIKPKNIRLMSDLVIRRNQLLSMQTMEKNRIQILPKELHSSIKPVLTTMKNQITKIEEKLIKLIGECPEYQSKNVILQSVPGIGNIAATSIISNVPELGYITNKQAASLIGVAPITKESGRYKGKRTIQGGRSQVRTVLYMAMMSAMQCNPVFKAHYQHLLDAGKPKKVAIIACVRKMVVILNSMLRDGVMWDENIAKN

SEQ ID NO: 423581 - protein, 346 aa, unidentified
MLYVGLDLSRKRIDFHALDGDGALVERGALPADSDGLARLVFCLGGHDRDVLAVIESMNGARFVHDQLELAGFEVEIADAQRVKGLAPLACKTDRIDAWVLAELARRDLVPKLWLPDPSVRGERERARFRLHLVRQRTALKNRVHATLIAHGHGCPLSDLFGLSGRRLLARLAIPEPWQGTLQASLRLIDDLEREIEKLERELRQLGAEHRYVPLLTTIPGIAWVLGYTIASELGDIHRFQSPAKLTGYTGLCPRVEQSGERDRRGPLTKHGPRYLRWALIEAAQHAGRHPAYRDLYQRKRAQHPGPRGSKVAAICVGRKLAQAIWHMLTRNQPFAPAGATLDLAA

SEQ ID NO: 423582 - protein, 334 aa, unidentified
MENIALIGIDLGKNSFHIHCQDHRGKAVYRKKFTRPKLIEFLATCPATTIAMEACGGSHFMARKLEELGHSPKLISPQFVRPFVKSNKNDFVDAEAICEAASRPSMRFVQPRTESQQAMRALHRVRESLVQDKVKTTNQMHAFLLEFGISVPRGAAVISRLSTILEDNSLPLYLSQLLLKLQQHYHYLVEQIKDLESQLKRKLDEDEVGQRLLSIPCVGTLTASTISTEIGDGKQYASSRDFAAATGLVPRQYSTGGRTTLLGISKRGNKKIRTLLVQCARVFIQKLEHQSGKLADWVRELLCRKSNFVVTCALANKLARIAWALTARQQTYEA

SEQ ID NO: 423583 - protein, 338 aa, unidentified
MFVIGCDFHTRFQQIAMLNSETGEITERRLEQPEEARMFYAGLVGPARVGMEATGHAQWFERMLRECGHELWVGDAAEIRARVVRKQKTDSRDALHILDLLLTDRFPRIWIPSVAERDARQLLRHRCKLVRFRTSVQNQLHALAMGEGVCRRKKLWSRVGRNELEGLALGPWTSRRREDLLGMLDRLHAGIEELDQAVRKEAQSRPEAVRLMQQPGVGPVTALAFVLTIGPVKRFRKSKQVVSYLGLNPRESSSGGHQRLGSISKQGNSMMRYLLNEAAQTASKFDPELRRDYLRLQFRRGRGVAKIAIARKLAVRLYWRLRDAAQPGAAGSHAGQPG

SEQ ID NO: 423584 - protein, 350 aa, unidentified
MMIIGCDLHTRYQQVAMLDTETGELVERRLEHESGEARAFYAGLTGTVRVGIEATGHTQWFEAMLAELGHELWMGDAAKIRAAVVRKQKTDARDAAHLLDMLCTGRFPKIWRPSLPERDLRQLLWHRQKLVWMRGAVKNQMHALAMGEGVCRKKKLFTAKGRQELGGLALGPWASYRRQELLRMFDELQGSVTKLDQAVELAAKSQPLAVRLMTHPGVGPITSLAFVLIIGPIERFERSKQVVSYLGLNPREHSSGGRQRLGSISKQGNPMMRSLLVEAGHTAARLDPQLKRIYQRLKFRRGAAVAKVAIARKLAVRMYWMLRSTADYAQLVRMRGSSWPTLVEDNPSLG

SEQ ID NO: 423585 - protein, 345 aa, unidentified
MTVYIGVDFHARQQTVSYLTTEDGEIQGRQMDHEQPAAVRAFYEQFAGEQVIVGFESSGYAAWFEELLEELGCEIWVGHATAIRMFARRRQKNDRRDADLILDLMLRGDFPRIHRYARESREVLQQLRYRQRLVKMQTMVINSLRFMSLSRGVTLRGQLQSRRGQERLRQLALPEPLASQRDELCQLLLELKTKRAKVESWLAAKAESEVRVQRLRTHYGIGPLTGLCLVHTLERVERFANPRKVTAYVGFDPVEDSSGERRRIGSISKQGSRLLRFLLVEAGQVAIRKDQELARVYQRVLVRRGHAKAKVAVGRRLLVRAFIMLRDEIDYAEFLRRGVAARSAR

SEQ ID NO: 423586 - protein, 453 aa, unidentified
MAHKAEKERTKDGLKLKIVNPNAAGIDIAYGEMQVCVPEDRDGENNRCFGSFTCDYEEIASWLKACGITTVAMESTGSYWVGLYFFLEEKGFDVLLANAKDVKNVSGKKTDEADAEWIMLMHSYGLLKPSFHPDAAARNIRELARHRDNMLRSAGKEIQHMQKSLVLMNIKVDTVISDILGKSGKAIIEAILAGNHDPKSLAQLADPRCKASKETIEKSLEGTWDAVHLFELKQSYDLYKYIHTQITDCEAEMDRMLNDYTDGNGTDMQAYVPTKKRIAKKNAISFDAEKHAFSVWGVNVMEIPGMSHGALTVLMGELGSGFAEKFTSAKSFCKWCNLVPNNKISGGKLLSSKVPKQKNRVGQVFRLCANSVKSAKTGLGVYFRRQKSKGGHLQAIVATANKIARIFYIMVTTKVHFDESKVGLDEKELLQRKIALAQRTLDRLNLRLSVAEG

SEQ ID NO: 423587 - protein, 370 aa, unidentified
MGNHITIVGLDAHKNSIDIATAETGGNKEVRHYGTIGGDMASLDKAIRKLKSKSAGLHFVYEAGPCGYEIYRHLTAQGFSCVVVAPSMTPKKSGDRIKNDRRDAANLARLERAGELTAVHVPREDDEAMRDLTRGREDAVKALRTARQRLGAFLLRYGYRYPGRTTWGPAHMRWLSDIAMPHPAQQITLQEYIHAVMECKDRVARLTEQIQKILPAWRMAPVVKALQALRGVAQIVAVTTVAEIGDMRRFAKPRQLMTYLGLVPSEHSSGDSIIRGGITKTGNGHVRRALVEAAHAYSFPARVSRVLLKRQDDLPQHIRDIAWKAQIRLCGRFRRLMARGKLKTKVVTAIARELAGFIWAIAREVQPQGI

SEQ ID NO: 423588 - protein, 424 aa, unidentified
MKVTYQICCGVDVHKSFLVATIVKTTGGIEPSYQKKRFSTFNNSILEFKQWLLDNDCHDVCMESTGKYWVPVFNLLEDDINVVIANPKWVKAVKGNKDDTKDSKWIGDLFRLGLVKGSYIPCKKVRILREYTRYRYKLVSCRSSEKNRYQNALTVCNVALDSVVSDIFGKSSTSIIDYLLEQSGTSINHEEIASKLLRSLKSKEDAVIESVEGYQMTDAQKYRMRLVRAHMDYITAEINDVDKTIENMISSNPDFENAVQFLCTIPGVKRDSAITIISEIGTDMSQFSSSKRLCCWAGLTPGSNESAGKKKSVRITRAGVYLKPALVQCAHAAVKSDKSPYYKKKYESLVKRRGKKRAIIAIARMILTAIYQMLSTGEQWNPSDLYKIDMPAPLLEKQKAKAIKQAKKLLQREGLLPPDEPLAS

SEQ ID NO: 423589 - protein, 447 aa, unidentified
MAQRKRPTTQSAITLTHPNAAGIDIGSAAHFVAVPPDRDDQPVHEFASFTADLHRLADWLDACCVDTVAMESTGVYWIPLYELLESRGFTVLLVNARHVKNVSGRKSDVLDCQWLQQLMSFGLLHGAFRPADQVCVLRSLTRQRTMLLRSQGRFVQHMQKALTQMNIQLANVISDVAGETGQRILHAIIAGERDGLALARLRNARIRASEDEIAKSLQGTWRVEHLFALKQALDAFDFCGAQLAECDAQVQAQLQALHVREDEPTKGKKRGRARNAPKFDLRTQLFQMCGVDLTRINGIDVTTALVVVSEVGADMGKFPSDKHFASWLGLCPGTKITGGKVMSGKTKRCANRAAQALRLAAAALRSSQSALGAYYRRMCARMDKPKAVTAAAHKLARLIYAMLTNGQEYTDQGQDYFEERYRQRVLHNLAQKAKAMGMQLVPSDNTA

SEQ ID NO: 423590 - protein, 403 aa, unidentified
MNNVAGIDVSKGKSMVSVLRPFGEVVAKPFSIGHTGSELKELADYLKSLDGETRVVMEHTGRYYEPVARFLHDEGVFVSAVNPKLIKDYGNNTLRKVKTDKADSRKIARYGIDNWAELRQHTPMDTIRMQLKTLNRQQSLYTKTKTMMKNNLIALLDQTYPGVNALFDSPVREDGSQKWVDFATTFWHVDCVRNMSLTAFAERYRKWCKRHGYNFSQSKAVEVHAGAQDLIAMLPRDALTKTMVRQAIDALNAISASMERLKAEMQALAAQLPEYPVVMAMHGVGDSLGPQLVAELGDVTRFTHRNAITAFAGVDPGADQSGTHEAKSTRVSKSGAPELRRALFLVMDCLLKTQPQDDPVYRFMDKKRAEGKPYLVYMTAGANKFLRIYYGRVKEYLASLEGN

SEQ ID NO: 423591 - protein, 412 aa, unidentified
MDVILERCAGLDVHKATVTACIRHPGPAGERVQVLHTFGTTTLDLLALRDWLGAHGVTHVAMESTGVYWKPVYYVLEDAVRVLLVNATHLAKVPGRKTDVTDGAWIAQLLECGLLRGSFVPPPAIRELRDLTRYRKTLIQDRTREVNRLHKVLEDAGLKLASVATDVLGASGRAMLTALVEGTTDPAVLADLARGRLRAKLPALRQALSGRFRGHHAFLLGQLLAHLDYLDEAIGTLSQELEGHLAPFAEAAARLQSIPGVKQRTLETIIAEIGVDMSHFPTAGHLASWAGLCPGDNETAGKRRRGRVRTGDRWLKAALVEASLAAIRVKGSYLGAVYRRICRHAGHNIAIVAVAHAILTIAWHLLAHGTTYHELGADYLHRRNTDQTARRHVRLLENLGYRVTLELAPAAA

SEQ ID NO: 423592 - protein, 391 aa, unidentified
MSKLNHTDTPAAAEYATVHVAFELSKATWHLGLILPGSQKLSRFGIDGGDLVALSRHIATWRAKAAATGKPVQVISCYEAGYDGHWLHRWLTDQGVINHEIDPASIQVDRHARRAKTDRLDLERLMGTLLRHLRGEPQACRVVRVPSPEDEDRRRVSRERDRLLKERAGHSNRITGLLHGQGIRDVKPLQRKFIRSLESMRTGDGRPLPPRLKGEIVREHQRLCLVHQQLLALERESRVELRAPARESVAARINNLVDVRGVGVVSARKLMHEAFYRSFDNRRQVGSFFGLTNSAYDSGNSRRDQGISKAGNRRARSLAVELAWLWLRYQPDSELSRWYRTRVGDLKGRIKRITIVALARKLMIALWRYVTTGIIPTGAVLRQRSRASASA

SEQ ID NO: 423593 - protein, 343 aa, unidentified
MSIVGGLDIHRKQITFDYVDTETGEARRGQVCPADREHLAKWLARFTGQDAHFAMEGCTGWRYVAGEIIAAGLTPHLADPAETAHLRGPKRRAKTDRADARHQRVLLEQGRLPECWIPPSHVLECRALLETYLDLREQRTGWVQRIHAVLFHHGAPHIAGQRLGTAEGAAALQAAAARCSPAGQLQLAIAVQMLSVYDERLHQVRRQLLDQARHLRGAAELTARLYGVGPITGLAITCWLGGAGRFSSARKAVRFAGLDITVYSSDGKRAPGRLSRQGPPVLRWCLYEAGKTHARKDAPDHAYYAQVKERIDGKRAAISEARKIIRQAARILTGLGDDALAAC

SEQ ID NO: 423594 - protein, 420 aa, unidentified
MKGYNVDNFAALIGIDWADKKHDICEHPINSDKYIYSIIKHKPEALNDWAMNLKQRYPNQKIAIVCELKKGPLIYALAKYDHLTLFTINPSTVAKYRKAFTPSGAKDDPSDALIQVEILTLHMDKLTVITPESVKMRSLAQLVEYRRSLVQDSVDLSNKITATLKNYYPQALEWFGEKDTMIFCDFIQKWPSLAKVKKARKQTLLDFFDSHNSHYSEVNNARIISIKNAMPLTEDKGIIEPNQMLVEVLIAQFKVLLKGIEKLDKAIKATYKTQHDKVIFDSLPGAGPQLAPRLLVAFGSDRERYQNACELQQYAGIAPVIERSGKKMWTHWRYSCPTFLRQTFVEWAGFSVRYSFWAKAYYEQQKSKGKPHNSIIRSLAFKWIRIVFKCWKTNTPYDESRYLEALKRRNSPLLKFAIKS

SEQ ID NO: 423595 - protein, 422 aa, unidentified
MVAVDVMVERVAGIDVHKSMVVACVRFPGVDGERASEVAEFSTFTADLLALRDWLAAFGVTRVAMEATGVYWKPVFYVLEDAMECWLLNARHMRNVPGRKTDVADAEWIARLVEVGLVRPSFVPDRPIRQIRDLTRFRRTRMEERTREAQRLDKVLQDAGVKLSSVASDPLGVSGRAMLGALVAGGRDPEALADLAKGTLRKKIPQLKAALEGRFDAHHALLVAEILEQLDGLDASIGRLSEEIDRLIAPFADARDRLTTIPGVDKRAAEAIIGEIGVDMSRFPTAGHLASWAGMCPGQHESAGKSRHGTARKGDSWLARILATSAMSAAQSKDTYLAAQYRRIASHRGKRRARKAVGHTILVGVWHIIGEGVTWGELGADYFDRRRSPQVQGRRKLADLRALGWTITIDSAGVATAVPPAA

SEQ ID NO: 423596 - protein, 326 aa, unidentified
MSKKKLDLCLRSNGKDILYDVIPNDLSSIKSWLTRTFEKFFLSEDSLVVCAEHTGQYTYPLVCATKSIGVYLCLEDAAKIKYCHGIPRGKNDKIDACRIAMYAERYNDCLQPYTASELIIQKLKNLSTERSMLVADRAKYQSQLKDQVDYMEHSIYIAKCNRVEGIINTFTDYIAQIDLEIKELINQAPVIAHQMDLLMSVDGVGERVALKMIMETDAFTSFTDPRKFCCHAGVVPFVYVSGSSQRSKNRVSNRADKSIKHLLHMAALSVSQVKNSPLKKYYDRKVEEGKNKMSVLNAVRAKLVTIMFAVIRADAFFSRNYQNSLA

SEQ ID NO: 423597 - protein, 339 aa, unidentified
MELYGAFDLHSNNNHLGIIDSNDKRIYKKKLPNDPQTILTELEPYKEDLTGIVVESTFNWYWLVDLLMDHDYSVHLANPSAVKKYEGLKYSDDNHDAFWLSHLLRLGILPEGYIYPKNERPIRDLLRKRSHLVKLRTSLILSLQGIISRNCGLKINAKQIKAVKENNISPLMVGDEDLELSGSVSKETIDFLSRKIRIIENSVKKKVKLKKSFKCLQTISGVGDILSLTIMLETGTISRFPKVGDYVSYCRKVPTGWTSNGKSKGKGNKKNGNRYLAWAFSEAAEFARRFDENARAWYNRKSAKKKFMVAHSALSSKLARAAYYIMKNNVPFDPGKLFA

SEQ ID NO: 423598 - protein, 335 aa, unidentified
MQIYGIDLAKEKFDVSFFDLTSKKVSNQPSHKVVTNYFKNIGRFLEALPSNAVLVAEHTGVYGDTLLKCCMDSNVKIAFVGGYVIHRYRATPDRAKTDVLDCALLRDFGERYPDKLKYKTFPEEALYELRQLARHREMLVEQRKQLITADKSEDCRPIRSLAVKRSMDRLKEMLDTEIAETEKEMLKVINGHDSIHHNYEIIKSVNGVGLITAVELLVKTDNFTKITTARQYSAYAGTAPYEKSSGKMDKGAHISKIGNRRSKTLLYICAESARLHNKEIKLYYERRTLIDKKPRHYVLNAIANKLLRIIFTLVEKGEYYDANFIRQDPRVVKHN

SEQ ID NO: 423599 - protein, 464 aa, unidentified
MTEKKLWRNRKERKEWGRRLQSEDPGLEVVHAHAAGIDVGNGMHYVAVRPDRDPQPVRRFECFTADLHCLAAWLQRCGVKTVAMQSTGVYWIPIYEILEERGMQVYLVNARHTKNLPGRKSDVQESQWLLKLHTYGLLNNSFQPPSEIRVLRTYWRQRAEHVHGAATCVQRMQKALTQMNVQLANVISDVSGLTGQAIIRSIIAGEHDPRKLAELSDPRIHASREEVAKSLEGHWRPELLFVLQQEVVMYDTYQQRIAECDQQLQKHLASFADTIPLLPTEGEPKRKKSKPAKNAPRFELRSELQRIAGVDLTRIDGIDVMVAQTLISEVGLEMSRWKTEAHFSSWLGLCPDNRTSGDKVLARGTRRVVNRAATALRMAAVTLMRSRTYLGAQYRRLRTKLGAPKAITAMAHRLARLVYRMLKYGQHYVDKGAEYYEHRYRRQQIDFLRKKATKLGLRITLAQT

SEQ ID NO: 423600 - protein, 386 aa, unidentified
MDQATPSTASANTLHCALELSKKSWLLAIQFPDREQPSLYPIAGGDAEKLMAKLTQARDRWAKTSGALPMITLCYEVGYDAFWLARFLKARGVECLVIDPGSLQVSRRGRRVKTDRVDVKTLLRTLIAWCRGERHVWSLVRIPSIDEEDLRRSHRERSRLVRERTAHINRIKGLLFAQGIRDIKVKSRYKTLAVDELVTGDGHRLPPRLAGEIAREIRRLATVQAQIAEIERERDAAPTTCEATEGKRDLLSQLKSIGPAISAFLSREVYYRQFANQRQVGSFLGLTPSPYDSGEEERCQGISRAGSGHARAVMIETAWLWIKHQPKSALTRWFVERTAGQSKRVRKIMIVAVARKLAIALWRYVELGLVPQGAIINSPMTRKARS

SEQ ID NO: 423601 - protein, 317 aa, unidentified
MKTVPFEQVILRGCGIDVHKDMVVATISGEGLKTETRSYKTFSSSLTELKEWLLSSGITHVAMESTGVYWKPVYKILECPDMKVWIVNARHIKYVPGHKTDKKDSAWICKLLLAGLLKPSYIPEREQRELRDLTRYRNKLIEHVSSEKNRIVRILEDCNIKLSSVVCSLDGVVANKLIDMLIDKGHVTMDDITCIYHKKLEASPELLYQACEGFIEPHHIYMLQTIRKDMEQTKAIIADLTCRIKEVLSPYENVMELLQKIPGLSRKTVEDLIAEIGVDMEAFPTEKHLASWAGVCPGNNESAGKKKVVEPPMATNS

SEQ ID NO: 423602 - protein, 364 aa, unidentified
MTIVAHSHSFVIGVDTHARHHVLAVLAGNGQLIDTGSFPTSRAGLARAIAWAGRRAGGDLAALWVIEGIGSYGAQLAHTVTEAGYQVVEAAPMPPRGAGGKNDELDACRIAQTVLPMDTTTLRHPRLDRGERAALQILLTARDQMSTERTAHINALTALVRTHQLGIDARTALTPAQIQQIRHWRAHHEPIAQATGRAEAVRLATRILDLDTQLATNHRSMTRLIKTTPAAELLNECGIGTVTAAVVITTWSHPGRVRSEAAFAALAGVNPIPASSGNTQRHRLNRGGDRRLNQALHMAIITRMTHHDDTRSYVERRTQEGKTKREIRRCLKRYLARQIHRALTAASRADDIAEDTIAGTPLSD

SEQ ID NO: 423603 - protein, 339 aa, unidentified
MEQNIKTNVGLDISMKTYWASITILDFNHEVKVLMSKEFENTPKGFMAMDLWLKGANIEVKQWHFTMEATGVYYEEIAHHLYEQKYAVHVILPIKAKKFAESLDVKSKTDKLDSKSLGRLGVERKLREWQPASPIYKALKELTRERGRLVKVRSQFKNNLHALNHSYQPNKKSIKRIESIIRTLDKNIKEIELELSAQKKKDESLKEKVDQLTSIPGVGEVTAMTVLAETNGFALIENSRQLCSYVGLDVSERQSGKWKGKSKISKKGNSHIRAALYFPALTTIKYSPQHKEFYERIINNKKKSKIGITAVSRKLLILMYSLWKNNTVYQEKTHCNNAA

SEQ ID NO: 423604 - protein, 348 aa, unidentified
MAHFVGLDVSVKETSVCVVDNAGKVILEQQVPTEPADIIALLTSLVVPFDRIGIEAGPLSQWLVNALTGADLPVICVETRHMKALLTAQQINKTDRNDARGIAQMMRVGLFKPVHVKTLVAQQQRMLLTSRKLLQRKLLDVESDLRGTLRNFGLKVGCVSGSRYEARVRELVADFPRLAAIAEPLLSVRRVMRQQFAVLHKMLLDTVRGDPVCQRLMTAPGVGAVVALTYRATVDQPQRFAHSRAVGAHVGLTPKRYQSGETDYDGGVSKCGDAPLRTMLYEAAQVLLTHSRKWSWLKAWGMRVAQRRGMRRAVVAVARRLAVVLHRMWVDGSEFRWSRDSAAAPTVA

SEQ ID NO: 423605 - protein, 316 aa, unidentified
MNRSEVFIGIDVCKAQLDVSSYPDGQRWTFSHDELGIATLVDQLKSQAPTLVVLEATGGLEIPLTGALCEAGLPVVVINPRQVRDFARSTGRLAKTDVIDAAVLAHFAGVIRPSVRPLPSQEARELSGLMVRRRQTVEMITAEHNRLATACSRVGREIKAHIAWLEKRLKGLDDDLSKLIRSTPIWREKDNLLQSAPGVGDVLSCSLLSSLPELGTLNRKKIAALVGVAPLNRDSGKFRGKRSIWGGRAEVRRVLYMGALVATQHNPVIKAFYQRLLQAGKPKKVALTACMRKLLTILNAMLKNRTAWQSNHAFSA

SEQ ID NO: 423606 - protein, 458 aa, unidentified
MYRELFPLRQALSAELKANLSPAQPGIDSEHLLQSYLDRLTMYVGCDVADQILTFFAVDTAGEELGHLSTANDPPGFEQTWDWLEDLRSRHGLRIMLLAMETTGVYYWACWDFLAQRPNLARVLYNPRTTEHMTEVLSKKVRNELVDAYALAEQVRLGSTPEVVLSEDPDLLTARFCSRAARDLAGQINRKKNQLRALLRAYNPAISQVFPGSKFHHQAVYALLQQYVFPDECVDAGVEAITAILEVHCRTAFDRQHAQRLVARCRDTLSRPIRREEIRQRVHHLIDDITTCQKRKTYFNKAGYRLIENRPETPLLRDATGAGISNTLALVSEVGDVQRFKSGEHLASFLGLTTSKHISGTTVFVSKHITKQGSPNGRYAAVNIAQHMSQRVPKYQRMYERIKNRKPPRKGHYVALVAVARDFVTNVLYDMWRYQRPFFREVEDYRAYRRKNPRSDEE

SEQ ID NO: 423607 - protein, 417 aa, unidentified
MKKHSNSAKQCEPSAKGVQSQVSVLQDSREVMTDLVAKLTKQLDGKNSPGSEIQDEGRSAACPNLNGLTVGVDLGDQWSNYCILGLSGETLAEGQFPTKRQEITEFFQGLAISRVVIEVGTHSAWIQEVIAGVGHEVLVANPRMMEGSKHCRRKNDRIDAGKLARLGRVDPKSLYPIRHRSSQVRADLLVLRARDALVASRTELINTVRALVKTMGARLSSCSSEVFWKKAEMEIPNELRETLQPLLRLIAVLNDEIKSYDQKIAQLASEKYRHTQLLRQVTGVGSITALAYVLTLETPLRFGRSRDVGPYLGLVPKQEDSGDSQPQLSISKAGDQMLRKLLVGSAHYILGPFGPDTDLRRFGMRLCERGGKNAKKRAVVAVARKLAVLLHRLWASGEVYVPLGHVSPASTVKAAAA

SEQ ID NO: 423608 - protein, 301 aa, unidentified
MSQEEQQIVVGIDVSKARLDIAAGDEEWPVTNDLEGIGRLISRLQTLNAGLTVVESTGGLERLVVSEMWAAGLPVALVNPRRVREFGKSIGLLAKTDRIDARLLVRFGEAVKPDPICLPSEEEQKLSALMTRRRQVIEMLTMEKNHLCSSHPAAKESITKIKTVLQQELDELDHQIDDFIDQFPIFKKKNEILRSTPGVGKVTAAILLSDLPELGTLDRKKIAALVGVAPFNNDSGRFRGKRRIKGGRPSVRTVLYMATISATKFNPIIRTFYEHLVLQGKAKKVAIVACMRKMLIFLNAT

SEQ ID NO: 423609 - protein, 399 aa, unidentified
MNAVGIDVSKGKSMVTILRPFGEIVSSPFEIKHTSSDIHSLIKLIHSIEGESRVVMEHTGRYYEALAHQLSAADLFVSAVNPKLVKDFNNDSLRKIKSDKADSVKIARYALDKWQSLEPYSITDELRAQLKVMNRQFHFYVKQKTAMKNNLIGLIDQTYPNANTYFNSPTRSDGSQKWVDFVSTYWHVDCIRKMSLNAFVEHYQNWCKRKKYAFNKSKAEEIYTKTKELVPVFPKNEITKHIIRQAVDQLNSTSVTVETIRTLMNETASKLPEYSIVMQFKGIGPSLGPQLMAEIGDVTRFTHKGALTAFAGVDPGVNESGSYAQKSVPTSKRGSSHLRKTLFQVMDVLIKTMPQDDPVYQFMDRKRTQGKPYYVYMTAGVVLCQEKVQIKYNQFSLFM

SEQ ID NO: 423610 - protein, 348 aa, unidentified
MLADVVDAVVGGDTHRDTHALELVAPSGVSLATVTISNDERGFAAALAWIAEHAPGPRIVVALEGTRSYGVGLARALQAAGLPVVESERPRRRQRRGGKSDPIDARLAALHALRLDADRLPTPRADGDREALRILLGARRELTSDKTRMVNRLRALLLTGHDADRELARGSMSIPTLTKIIRRRGRPDDTREQAIRRAEARRLALGIRETDRVLVENKKQLATLVTELAPNLLTKEGIGPVSAAQALVSWSHPGRCRNDAAFAALAGASPIPASSGRTIRYRLNRGGDRQLNRALHDIVLTRWRICPRTHAYIAKRRAQGKTDNEIRRQLKRYIARELYRSLNTPLTA

SEQ ID NO: 423611 - protein, 336 aa, unidentified
MKKYKIFVGIDISKGWIDVAVKSETVSVCRRFDNCKKGYRSMLSWLKTFASFKEMILCMEHTGVYGMPLWEYLANQEICFVVETGLQIRHSMGIRRGKSDKADAQIIARYIRLHHTETRLYKVPNEVIKRLKIVFGYRERLLKVKHLLTVSSKEISSFMSKSACREMTIDSGKLAAIISERISRIEKVIDKIIEADPETNRIYRLVKSVPGIGPITGAYLIIVTQNFTLINNSRKLSRYAGMSPEKNESGIIKRKAKTSRIGNKKLKALLSNCVGTIIQHDIESREYQQRKIDQGKPEGVIINNLRNKILHRVCAVVNRGTPYVNIKKYRTMENVA

SEQ ID NO: 423612 - protein, 487 aa, unidentified
MCCTDMPAGALFAQVEAFQTVNPVCFLVVNRPAFPPQLNMNTRTTVADPGFRYFPDTQGYRPIIPPALPVINGSALHQQSASPPDTDTVSLPQKMHRLTFQTLIFILQLPQTPQFGHAQTSEFLLPVNGMDYLLPLRLTVRNVLTRRITMNIVFLGIDLAKNVFQLCGLNQAGKPVYTKRTGRKELLQTLANIPACLIGIEASTGAFYWQREFEKLRHKVKVISPQYVKPFVRGQKNDGNDAQAIAVALMQPTMQFVPPKSPEQQDIQALHRARQRIVNRRTATVCQIRGLLLDRGSPIGSAVSRARRAIPLILEDAENGLSSRMRRTIAELYELFNDLGRRIHFFDKEIETVFRQSEACQRIARVKGIGPKTATAIVAAIGKGTEFKNGRHFAAWLGLVPHQHSSGDRQALMNMMKKGDKHLRTLFIHGARAVVRVATNNNDGHMNQWVNQLKERRGFNKTTVAVANKNARIIWSMLRNETEYQVV

SEQ ID NO: 423613 - protein, 426 aa, unidentified
MLPGRDAECGKDEGLLFTGDDWAEGHHDIVVQDDTGKTLARRRLPEGVGGIARFGELVASCWGEDSEPDPAQVVVVIETDRGPWVKALAAAGYRVYPANPKQAARHKETIAVSGKKDDFFDAGALADMGRTRRHQIRELAADSDISDAVKIAARAHQKLVWERTRHLLRMRSALREYFPAALEAYAGLSLTGPDALELLAKAPDPASAAKLTVTQITAALKRAGRRGDLAQRARDIQAALRTPHLAQPAVITEAYAASVQAAAAVITTLNDQVKVMEAKVSGLFRRHPDAGIYLSQPGIGDITGARILGEFGDAPSRYASAKARKNYAGTSPLTIASGKKKTVHARYIRNRHLIDALHAQALSALTVSPGARACYDELKARGIGHDDAMRRVASRLTGILHGCVKTGCEHDEAVAWSHRLDPAQAA

SEQ ID NO: 423614 - protein, 402 aa, unidentified
MNAVGIDVSKGKSMVAIMRPFGEIVSAPFEIKHTASDIHSLVELINSVEGESRIVMEHTGRYYEVLAHQLSKANLFVSAINPKLIKDFDNDSLRKVKSDKADAVKIARYALDKWQNLKQYNVMDELRNQLKTMNRQFGFYIKHKTAMKNNLIGILDQTYPGVNTYFDSPARSDGSQKWVDFASTYWHVDCVRKMSLNAFIDHYQNWCKRKKYNFSQSKAEEIYGKAKELVPVLSKDAITKLIIKQAVDQLNSASTTVESLRTLMNETASKLPEYPVVMAMKGVGTSLGPQLIAEIGDVSRFTHKSAITAFAGVDPGVNESGSYEQKSVPTSKRGSSDLRKTLFQVMDVLIKTHPQDDPVYQFLDKKRAQGKPYYVYMTAGANKFLRIYYGRVKEYLSSLPES

SEQ ID NO: 423615 - protein, 349 aa, unidentified
MFAGVDTHKDTLAVAVIDHAGRVVRQLELPNQDSGYVRLLALLTSHNVVRVGIEGSGNFGWPAAIYLLKRDLNVVEVPPLMTSRERLSRPGQGKTDPVDAVAIARITAREPSLPPVRPMTGHAADLRVLTEYRDQLVNERTATANRVHTDLLWLRPGYQHQLPHLTNTAHLRAALELLSGDDSVRAAVTRSRLDRMLTLTDQLAELRIQIDALVKASGSTLPDVYGVGPVVAATIIGHVFDVRRYPTRHHFATANGTAPIPASSGRTVRHRLNRSGNRQLNRALYTIAITQIRADTEGRAYYLRKRAEGKTSREALRCLKRRLSDLIYRTLRADLANAAQRTPTLSIAA

SEQ ID NO: 423616 - protein, 322 aa, unidentified
MKNVSLGIDVARLTFVAALWFGNGRFAKATFDNQVGGFRKLRRWLQAHNAGHVRCALESTNTYGEALAEWLYKEGHAVHILNPERTACYARSVGQRNKTDPVDAVMIARFISVHECTPWRPPAPEQKTLRSLTRTRHQLVEYSKQLRNQLKTADVTAQRYLQATLEAIRQQLGAIVRAIGQHLEAHPVLGEQVRRMMTMKGVGLVTAAVTLAELPPITPDTDPRAICAWAGLTPRRWQSGKTEWRTCLSRKGNVYLRQALYMPALVAKRHNPLLHAFAQQLAAKGKTSGAILGAISHKMLRILVGLLRTNTDFNPNYSLQKN

SEQ ID NO: 423617 - protein, 420 aa, unidentified
MKSARNTLPEEPAGGVTGGIDWARDDHAVSIVDARGREIGRCTVEHSAAGLRELVDVLARAGAGEVAIERPDGPVIDALLGAGVTVVVISPNQVKNLRGRYGSAGSKDDRFDALVLADTLRTDRARLAPLTPDSPATVSLRRACRARKDLVSHRVAVANQLRAHLHNAFPGAAGLFAELDSLISLAFLARFDTQDRADWLTPARLGKWLASVGYSGRTDPVVLYARLTSAPRGLTGHDAAAQACITHALHAVLTTLSEQIRTLSAQIAGQLAAHADSHVFTSLPRSGTVRAARLLAEIGDCRARFPAPESLACLAGAAPSTRQSGKLRAVTFRWSCDKQLRDAVTDFAGDSRHASPRAADLCNRARARGHDHPHAVRILARAWLFVIWHCWQDHTAYDPARHHAFQRLLAAQPSTAARAA

SEQ ID NO: 423618 - protein, 426 aa, unidentified
MEKVNSVMDNRSEEPQFAAFLGIDWADQEHVWCLQACDSEKREMGRVRNRSEEMEAWIGQLCQRFKNRPIAVAIEKCRGTLILLLSRYEQLHLYPIAPQAAANFRKVLHPSGATDDGRDAAALLEMVRQHRNHWQRWSPDTEQTRLIQNLVEERRRLVDQRTQLLNRLTAKLKIYFPQMLEWFDRLDTKLVAALLQRWPTLPQLQKAGTTRLRNFFRKHHCRQVELLERRLQGIRQAVPALEDQAVLQAQVPTVQLITRVLEILNEGIEDLQRRIEQAVTVHQDFPIFDSFPGAGAVLAPRLLAAFGSQRERYRTAAELQNLSGIAPVREQSGRTACIHFRRGCPKFLRQTFHEWAGHSIAFSSWARAYYELQRARGKDHHAAVRALAFKWIRIVFRCWQDRVLYDEQRYAASLVKRNSPLRPLSL

SEQ ID NO: 423619 - protein, 323 aa, unidentified
MNKDIKYFGIDISHLVFDVTDSDGNYYQFKNSLIGFKKLMKLLDFNSHCVMEATGYYDYQLAYYLQENSVLLSVENPLSVKRFIQMKLSKIKTDKSDSKLICEYAKQVDLKLWQGNSKHQLECLQMTRLLSVYTKQSTMLKNKLHGEAVLGQPSKLVVTSLKRSLRQLKKEIDTIEEKLLLLVNEVHKDVLTRLKSIPGIGKKTSLMLVVLTDGFDRFKSGSELCSYAGLTPIIRQSGSSVNGRARISKIGNQKLRNLLFMCSFNACKYNKACKAIYDRIVAKGKSKKLALIAVCNKLLKQAFAIAKSGLIYDDTYRSTLVKN

SEQ ID NO: 423620 - protein, 364 aa, unidentified
MKRKVYVGMDVHKETIQIAILPSNTKALVKEQQIKHEEGQIKKFIQKLKSEGTEIHCCYEAGVTGYPLYRYLKTLGVNCIIAAPGKIPRQSSDKIKTDKRDAIKLARLLRSGELESIHVPSEEDEAVRDYLRSRDSLRLDLGRNRQRLMKFLLRKGITYSTTKYWTASHYKWLNNLHFENEILQATFNDYYSRVRVQEENLKAMDQKIREIAESEPYREKVGILRCFRGVDYLTAMFLLSEVNDFKRFKTAGSFMSFLGLVPGEYSSGSKRKQTSITKTGSPRLRRILVEAAWQHRFPGTGSKVVVARRVGQSALVVSLAEKASLRLHKKFKSMQLRGKTPQVMITAVSRELSGFLWAAMNLVA

SEQ ID NO: 423621 - protein, 463 aa, unidentified
MINVLSQDEIKKKVQVIEQELKASTWRELETKGKFEKNDKLSFISEEMLIVGCDIGSETHYIRAIDTRGRELSKGAFEFSNSSEGFASAKAWVLKLAAKNDKKQIVLGLEPTGHYWFAIAAWMVSNGISVVQVNPYAVKQSKEIEDNSQLKDDRKDPKIIANLVKDGNYGMPYLPEDIYADMRRLSMFRDQLTEDRIRNINRLHREMKIYFPEYMDAFGKIDGAFTLEILKVAPIPSDIVELDEEGLKSLWHEAKLRGRGYSRARVIVDYAKKSVGLTGGTDAGRESIKWFVEQIIQLDEQLAEIENVLHQKCMEIPHAENILEINGVGENILAGILAEMGDISRFDDVKEIQKLSGMGLVACSSGKHKGQTKISHRGRKRLRYWLFQAAKSAVAHAVEFKQLHAYYTTRSMNPLKKMQSLVVIACKILRVIYTILNTGMKYDPERMLRDIRYPQGNTVQAAA

SEQ ID NO: 423622 - protein, 331 aa, unidentified
MKFQEIIGIDVSKSTLDACLHSLGISLVVENSKSGYRKIISWVKKNSDFPLDQVLFCFEHTGLYSFNLACYLSEKNVNFILVPGLDVKLSLGIQRGKSDKVDAQKIALYAFRRKDEVTPYQMPAKSLTKLRQLLSLREKLVKQRAGYEGTLKDQSVFLKTKDNALLFSIPKKLIKLLDKQIDNIEQEINLILEASPEIKKTYELIISITGIGRQTALNLIVITNNFLLFDNHRKLASYAGVAPFPNSSGTSIKGRTKVSNLANKKLKSLLSSCATSAIQHDPELKLYLKKRTEKGIHKMNTINAVRNKLLARVFSVVRRGTPYVNMHRYVA

SEQ ID NO: 423623 - protein, 441 aa, unidentified
MPNRRTLTRGDRRRNDKLARLRAIVRPDLAVVGIDLASAKQAAVVTDHDSIVLGRRMFDGDPWVIDDILDWAAPIAADAGFAGVVVGCEPTGHRWKPILERCRARGVEVVCVNPMLVHRGREEEDFTRDRSDFKDSTIIARRVADRHCYVPYALEGHWCRLRHLGARRNDQLVEAGSARQQLRDLLECVWPAVLGAAADPLDSITWRAAMAVTCDPGEIAAMGYDAFADAVTVEIARWGGQRRNLRILRNIWAAAHQPGGVEGERPAAVERARDAIRDWRRALDELDDVEARMIGVLDALELTDLVTTIDGLSAVGAAAILAEAGDPARFDCARTWVKHAGLCPRANESGTFAGQTKTSRRGRPGLRTAAWRAVWGALHHNPVYAARYTHLRTRADNPLRDGQARAAIAAALLRQLFVVVTRRVAWNPAIAAGKEVTPIAA

SEQ ID NO: 423624 - protein, 426 aa, unidentified
MNCTQNYKIDQVTEQTLVVGIDIAKRTHYACFVDDRGRVLRKSFPIFQSKEGFRQLYEAIQEAMQAFGKPQVIVAVEPTGHYWLNLAYFLEEKGIPLVMVNPAHVCRSKELDDNLPTKHDAKDALVIARLAKDGRFLVPRLLHEIEADLRVGSTLKEKFRKEQTAVKNAIVRWTDRYFPEFWTVFRDLGKTALSVLEWTPLPADMAGRAVEELLEVYRQSEGLKCPQKAKIQALIDAAKDSIGVTEGTTMARFEIAALVRRYRQLEAEIAALDAELKALVQTTMEYQWLKTVDGLGDATIIDLLAEIGSFAHYRDPRQLVKLAGLTLKENSSGQRKGQKHISKRGRKRLRSVLFRAMIPLIRHNEAFRELHDYYTTRPVNPLTGKQSIVALCRKLLNVLFAICMKKQAFDAERMKQDVLSQVQRAA

SEQ ID NO: 423625 - protein, 414 aa, unidentified
MRRLLDRCAGIDVGQALLVVCVRVFDGTGTLAQQVRSFGATTPDLMMLRDWLISLGVTHVAMESTGVYWKAPYYMLEDHFEMLLVNAAHLKHVPGRKTDVIDAQWIAEVLSYGLLRPSFVPSPPFRELRDLTRYRKSLIRARTGEVNRLHKVLEDAGVKLATVATDVMGVSGRQMMRALIEGVADPQVLADLAKARLRAKLPELRRALTARFREHHAFLLARMLAHVEALEADIDVLSQRIAELTEPWAAQLAILESITGVAPRAAEVILAEIGPDMSRFPTAGHLASWAGRCPGQRESAGRRGSATPRKGSPWLADVLTECAWAAVKTKDTYLSAFYRQVMRRQGKQKAIVAVTHKIVVIAWNLLSTATVYQDPGAAVLRKTTDEQVRRRALRQLEALGLQVTIQPQHQGAAA

SEQ ID NO: 423626 - protein, 328 aa, unidentified
MFPVGIDVSKDTLDLCMLYDGIKGRVKTRNIKNDRSAVENISRWLRLQHCGPEDVHVVMEATGVYHERLATALHDAGFYLSLANPHRSREFARGMGIMTKTDKVDAYMLACYALLKKPHRWEPPAANIRHLSALLRRRDVILADAVREENRLEKYQSTDTPADVISSCIRMAQQLREEVKNIERQIKAHIKASPDLKRDYALLTSIKSVGPQLGMHMLVVLRSHHFESADQAAAFLGVVPVEKRSGTSVRGRPRMSKIGPPQLRAKLYMSALCGKIHNKRMRNIYEEMCLRGKPKMVAIGALMRKLVHWCYGVLKTGTAFVTEARVLR

SEQ ID NO: 423627 - protein, 520 aa, unidentified
MATTHSRKRPSTRRSAPSLGKPRGVLHPRVQQVGGEHFGIVCFDCAKARSKFLLADFYGRVLIPPTTVAHNRPELDAAVAQIRAAFAQQQLRDGLVAIERTGRYHRLVQRTFAAAGLETRILHPFVTKQYRQPVDPGNKTDDTDLAAIHRATVTGCALLEATRNEAWTTLLLLIRHRRDLVRKGAALNCQIRDHLEAALPGFAACFDKLWDSAVAWHLLQHFPTADQLRQAGVTTLCQALRQAGIRFQQRTVQAVLDWAAQAAPGDVAADQHRRLALAYYRDRQQKTQEILALERDLAGRLVQTPYVLLLSFPGINVVSAADFGGEMGPIEHYVNAKAITGRAGLRPSRYQSDLVDKANGPLVRNCNHALRAAILTIADNLIVCNHHFSVLATQWAAQGKDPRHTRVKVALRFCRIAFQMVAGRQVFRHPSIQGRHYILDKLSAFHVAHGTGVVDVMRDLQVAVGQIPAREHAAEATPLAEELRKIQDGHRRGPQPLADILPIVLARLGVGVVQSEGSGE

SEQ ID NO: 423628 - protein, 405 aa, unidentified
MGKVFVGHDWAEAHHDVYVEDEEGKRLARARLPEGVEGVARFHELVGPFAEDPGEVVVATETDRGLFVAALVAAGYQVLAVNPMSTSRYRERHSTSGAKSDPGDAKVLAELARTDAHNHRPIAGDSDLAEAVKVLARAHQSMIWTRQRQANQLRSTLREFYPAAVEAFDELTSGDAVAILAIGPTPALGRGLSRSKIASALRRGGRQRRIEDRADEIQGALRSPQLEAPTLLAEAMGASVKALVAVIGELSEQISCLEAELAERFEQHPDAKVIRSLPGLGTILGARVLGEFGDDPNRYGDAKSRKNYAGTSPITKASGTRRVVLARYARNRRLADACYMWAFAALNTSPGARAFYDQRRAAGDTHHRALRALGNRLVGVLHGCLRHNTPYDEHTAWDHRIANAA

SEQ ID NO: 423629 - protein, 312 aa, unidentified
MLPSVVYVGMDIAKATLDLHALSTPPQSRQFVNSSAGHRALVRWLQGLGPVHIVCEASGGYERPVVLALQQAALAISVVNPRQARDFARAQGRLAKTDRLDAQVLAEFGQRLQPAATPALSAAQRQLAELVSRRQQVQQLRSAEHNRLEHITHPAVRRQVQRHRLGLDRQLEQLDAWITELVQAEPALAHKVARLCAVVGVGRITAVVLLATMPELGVLNRRQAAALAGVAPFNRDSGPRRGHRLIGGGRAVARRALYMAALVAAFANPRFIVFYQRLIAAGKAPKVALVAVMRKLIILLNQLLKNPEFQPT

SEQ ID NO: 423630 - protein, 431 aa, unidentified
MKAWNEIKYYAGFDWAKDHHDVIVLDAGGKTVAEFRFDHTAGGWDEFGKKLAAFPNVAIAIETKHGAVIERLLERECTVFPVHTRSAKGYRQRKVPSGNKTDKIDAWSLADALRLDGAHWKQLAAQDPLIKELRLLCRDEVALIRDRTALITQLRQSLYDYYPAALEAFDDWTMLAAWAFVIAFPTPEVLAKAGKRKWEKFLHVHKLARPATYQRRLEIFARAQQFAGSEAAIRAKSKLALARARQLQLLETEIAEYRREIRRLFARHPDAKLFGSLPGAGDKIAPRLLAEIGDDRALFPDAQALQCLAGTAPVSYQSGQIHRVYLRRQCNKSLRNAVHLWANLSREFCPWAATYYTALRAKGKSHACALRALGQRWLKIVWKMWQTRTVYDADLHARNQLKHGSWVLQLVNQTVVVNPEFSGQASPARNP

SEQ ID NO: 423631 - protein, 416 aa, unidentified
MEQIFMIKENYIYVGIDLHKETHTAVMIDCYNQKLGEITFPNRPAAFPKLVTKVKKCNTDGKEVVYGLENAYGYGRALAVWLIDKGYLVKDVNTAISHRQAKHRGAMYRKSDSDDAKAIALATLNMLDKLPDACPNDAYWSLGQLVHRRDNIMKQRTRLVNQLHEQLCIAYPSYKQFFNDISRPTALYFWEHYPSRKYLKGKSVEDLRAELVPVSHNKCSTKTCEKILDAVASDKVKNNAYQDARDMVTLSIVSDLQHYDSQLTEVDKMLEQMYKMLGCTLTTIPGVNVITAVKILAEIGDIKRFSNANKLAQFAGIAPLHLSSSGKGKDVATKQGNRRLQATIYFLAIQMVQVSSKGTPRNSVVRAYYEKRKAEGKTSQQALICISRRLISIIYGMLKHGTEYRMPVVESAGENR

SEQ ID NO: 423632 - protein, 377 aa, unidentified
MNNVRFVGLDVHAETIAVAVAEMNGEVRALGIIPNRPESGRRLVGKLGKPAGLRVCYEAGPTGYALYWQLAELGVACQVVAPTLVPVKAGDRVKTDRRDAEKLAKCHRAGDLTPVWVPDRAHEALRDLVRARLAAKRDQLRARHRLSKFLLRQGRRAPQEAGAWTLKYLEWVRSRVHFEQPAQTATLLDYLHEVEHAADRIKRLEQAIDAALVSVPAAMKTVIEALQSLRGIAQVSAITLIAELGVLSRFSHPRQLMGYAGIVSREHSSGERIRRGAISKTGNAHVRRIVIEAAWSYRHRPALGTALAARQKHSTPTVHALAWKAQHRLHARYARLIARGKSKQQTVTAVGRELLGFIWAIGVAAEPPTAAALARAA

SEQ ID NO: 423633 - protein, 345 aa, unidentified
MEVHTIGIDLGKTVFHLVGINGRGEVVVRKKCSRDQLLRFTANLQVTLIGMEACGGAHFLARALRDQGHDARLMPAKYVKPYVKTNKNDYIDAEAIAEAVGRARMRFVPIKTDDQLDLQSLHRVRERWVSGRTAVINQIRGLLLERGITIRKGRRHIEESLPGILEDADNKLSGALRVLLTELRQEMQYLQRQVDECDKLILRIAGKLEDCRRMQAVPGIGPMIATATIAAIGNGSAFKKGRGFAAWLGVVPGEHSTGGKQTLTDTKRRGNRYLRKLFVQGAHAVLQQRMKQSNGLNTWLAQLTSRKRIQVAAVALANKMARIVWAVLSNGEAYRPPLLLEPAAV

SEQ ID NO: 423634 - protein, 364 aa, unidentified
MRRKKNKATKKVHFESLSLIHPNAAGIDVGSKEHLVAVPPDRDPQPVRTFQAFTPDLHELAAWLKRCGIETVALESTGIYWISLYEVLEQYGFEVRVVNARHVKNVPGRSKSDVLDCQWIRKLHSFGLLNGSFRPDQQIRKLRTYMRLEDNLVVESTQAVHHMQKALFEMNVQLSNVISDITGESGLRIIEAILAGERDPEQLADLCSTRIKASRQTVAKSLHGNWDEALLFCLKTALETYRFSQKKIQDCDQCIERQLATFEIKAPLPDSKQNLQTQLHQVCGVDLTKIPGIKEQTAKIIISELGLDMTRWNTEKQFSSFLGLCPNNLITGGKIIRRSTRKVYNRAADALRLCAQSLTRMALR

SEQ ID NO: 423635 - protein, 348 aa, unidentified
MDKIIRIGIDTSKSVFVLHGVNAAEQPVLRKQLRRRQVVDFFSKLAPTRIGLEACGAAHHWARDLMALGHEVVLLPPQYVKPYVQRGKNDAADASAICEAMSRPRMRFVPVKTAEQQAALMLMGMREQLIARRTQLSNMIRGYAAEFGVTAAKGLDKIEPLLARIATDPAVPEFAKELFATLAEQYAELKPKLHRIQARLLAWHQHNELSRRLAEIPAIGPIGAALLVMKLPNPRTFRTGRDFAAWLGLTPKDHSTAGKQRRGVITRAGDEALRATLVVGATAVIQQVSKGRGKPSPWLTALIKRKPPKLAAVALANKTARIAWKLMVSGERYNRNHGAAASTARIAA

SEQ ID NO: 423636 - protein, 292 aa, unidentified
MKVTTVGIDLAKNVFQLHGVNEFGKPVIKKQIRRDQMAEFFVNLPACLIGMEACGSAHHWARKLVSFGHTVKLMAPQFVKPYVKTNKNDAADAEAICEAVARPNMRFVPIKNIEQQSVLALHRVRQGFVKARTAQANQIRGLLSEFGLIIPQGITHISTRVPELIEDASNELPGSFRLLVQRLLDHLKELDRQVDELEKQIVKWHRQSDASGKLEKIPGIGPITASALVASLGDAKNFDSGRQVAAWLGLVPKQHSSGGKHNPLCQTSCRLSPFSSGLSAEAINNETNSVFP

SEQ ID NO: 423637 - protein, 343 aa, unidentified
MKITTTGIDLAKNVLQVHGVTACGKVALKKQLKRAQVLAFFANLPPCLIGMEACASAHYWARQLSALGHTVKLMAPQYVKPYVKTNKHDVADAEAICEAVARPNMRFVAIKTAEQQAILAVHRARQGLVKARTAQANQIRGLLGEFGAVVPQGLGYIAKRLPELLEDGDHELPGSLRQLLARLGANLDHLQRQVAELEREIQRWHQDSALSQRVAAIPGIGPLSASALVATVGVARNFRNGRQLAAWLGMVPKQASSGGKTTLLGISKRGDSYLRTLFIHGARAVVQQAERHPERADPWLKQLLGRRPKNVVVVALANKNARTAWALLAHGRDYQPLHAATNA

SEQ ID NO: 423638 - protein, 401 aa, unidentified
MEGHMPELWAGIDAGKAHHHCVLVDDEGNRLLSRKVANDEAALTELLTEVADLAAGREVLWATDLNRGEAALLIGLLEAQNQTLVYIPGRTVYHAARTYRGDGKTDAKDAAIIADQARMRRDLQPVRSGDQISTDLRLLSSRRTDLVCDRTRALNRLCATLLEYFPALEAAFDYAMVKAAVVLLTKYTTPAGIRRAGETRIATWLRNQGCYNAKAIAAKAVAAAQAQRITVQAQDIGAGMVAALARTVLDLHDEVAKIDKQIETRFREHHHAQILLSMPGFGTMLAAEFLAATGGDITAYESAARLAGVAGLAPVPRDSGRISGNHHRPKRYDRRLLNAFYLAAQSAARYSPQSRTYYQRKRTEGKNHKQAVLSLARRRLNVLWAMLRDGTPYQEPNAKAF

SEQ ID NO: 423639 - protein, 346 aa, unidentified
MKYIGMDAHSRENFFVVVDKKGRVLRTQSVKTTDASILEFVRSINGRKALAIEECSLAHWLYLLLKDEVDELVVCQPPSHKGAKTDKIDAEKIAQLLRCGMLKSVFHADSEYTELRTLVSGYSDVVQEIVRAKNRYKSLFRRVAIVGDGQKFYSNKEIISDLKTSVAMFVARNLSAQLEVLEQQKEEYIKQFEANVGKYKDIKRLTTIPGIGPVRANQIVAIVVTPHRFQNKYHFFSYAMLTNHNQISGGKLYGHQRVHGQKALKAVFKSAMFASMRSQTSFKRKYDSMIATGSTQKGARNAIARTLAATVLGVWKSGENYNDKYKEVTQRRHQTNCHSDTKESLS

SEQ ID NO: 423640 - protein, 373 aa, unidentified
MTISTKFIGLDVHRDTISIAIADEGEDREIRFFGTVANDCEVLRKALASIGKNGATLKVCYEAGPCGFVIYRFLKRLGIDCVVISPSSMPRRPNDRVKTDRRDAQTLARLLRAGELTAVWVPDEAHEAIRDVVRARRQAKQDLVSAKNTLKSFLLRHDRRYPGKAIWGRMHWRWLSDQRFAFAHQQFVYEEYKRRIHELEERCARLEQVLEEAVMDWPLASIVTALQALRGIRFIAAITLVAEIGDLHRFDRPKQLMAWLGLVPAEHSSGTRTRRGELTRTGNAAARAMLIESAWQYRYPAREGRALRERNAGLPDHIRAIAWKAQTRLCAKFRRLAGTGKNAAKIVAAVARELAGFIWDIARHTPAPASRLA

SEQ ID NO: 423641 - protein, 383 aa, unidentified
MKAVCGLDVHKDSIYLCILHPDGELFEQVFGVLTFQLHEMCKLLKKHHVSEVSMESTSIYWIPIWRVLSPHFTLRLVNPYFIKQLPGHKSDVKDAQWIAECTMKELVNGSFVPPEIIQQLRQYDRRIFDLNEEIVRKESKVDAVLQRCNIRLSNYVSNIECKSYRTVVRRLSEGVTAPQELIKEIHGRIINKHGRETILASMEGVVSQAEIDVLRQLREEIDIAESHKKECQDKMSEICQKYFPEELRRLQTIPGIKERAATSLIAEIGTDMSKFETANHLAAWSGLRPRNDESNKKVKSRKTTHGNSYLRRTIIQCAWAASRQKDCFFSWFSYHQTVVRRKNKMKVIVAVARKMLVAVWHVLHDNVEYFDFKHDCEESANNG

SEQ ID NO: 423642 - protein, 404 aa, unidentified
MSTRNDYSMVSGGGMDVHYKFSQVTMRDEQGHIVRRERLDHPDRERMRCRLAQWPRGVPFVLEASFGWGWVAELMQEVGLMPVLSNCLKVERMRKARGLPKTNKKDADLLSLLPAEKSDWWKVWLAPPSVRDQREWMRYRSDLVKIGTQTRCRIHAVFHRHGVFHEFSDLFGARGRVFLAELCRQGQSRDVQLPPGALAALRGQVRLLGHVRGQLAEVARTLRGHLADSPVARRLDGIPGFGLILSHTVIAEIGEIGRFRTHRNLASYSLLSPIAADSGEEDPSRSPLGRRLGQRGNRTLKWAFIEAAHGAVRSGGKWRRIFDAYTEGGRKNRNRGYIKVARELVKVVYVVWSKGVEYTDNPPARTKACGRDKKKAFLGRSRSGTGQPCAAMAAAQPHGHQASV

SEQ ID NO: 423643 - protein, 366 aa, unidentified
MKKISTMQVFGNEIFKEQKLTIGMDLGDRWSFYCVLDEAGKIILEQKVATTPEAMKQTFGKIPRSLIALETGTHSPWVSRLLTELGHEVIVAHAQKVELITKSNRKDDRHDARTLARLARIDPELLGPVRHRSAKAQIHLTVIRARAELVSARTALVNAARGLVKSFGERLPKCGTYQVNEKLAEGVNAELRDVLVPLLREVESLNERIKEYDERMEKIAKEVYPEVSLLKQVKGVGTQIALTYILTIEDPYRFPKSRGVGCFLGLRPGRRNSGESEPQKKISKEGDRYLRTMMVQGAHYILGPFGEDSDLRRWGLKLAERGGKNAKKRAVVAVARKLAVLLHRLWVSGEVYEPLRNSQKAMRAVA

SEQ ID NO: 423644 - protein, 341 aa, unidentified
MDKATIIGLDLAKRVFQAHGARADGGVAFREKLSRARVLPFLAEQPRCVVAMEACATAHEWGRAIVELGHEVRLIPPVYIKPFVKRQKNDAADAEAIAEAASRPTMRFVVVKTIEQQARGMIFRTRDLFVRQRTQLINALRGHLAEHGVVAPQGVANVKVLADAINNAECSLHPLVRGLGKLYLEQIATLGEKVRDLERTVRSEARAATTARLTTMPGIGPITAMAIETFAPPMETFKRGRDFAAWLGLVPKQHSTGGKQRLGRTSKMGQRDIRRLLIVGAMGVVRWACRNGASEGTWLARMLARKPRMIVAIALANKMARAVWAMLVRKENYRDPVTATA

SEQ ID NO: 423645 - protein, 411 aa, unidentified
MEVVHARCAGLDVSKKDAKVCVRIAGAGRRKTVETVTTWSSMTNQILALRDHLIAERVTCAVMEATGDYWKPFYYLLEDAGFEVVLVNARHVKNLPGRKTDVSDATWLAQLGAHGLVRGSFVPPEPIRQLRDLTRARTAITRERGREAQRLEKLLEDAGIKLSAVASDVLGVSGRAMLDALIAGDRDPAALADLAKRRLRSKIPALTEALTGRFTEHHAFLARVHLDMIDHHTQAVEELTARIEALMEPFRGFHTLICSIPGIATLTADVIVAETGADMTRFPTAKHLASWAGTTPGNNESAGKVKSSKTRPGNPYLQGALGAAAMSCSQNPRTYLGARYRRIATRRGPQKANVAIQHSMLTAIWHMGTTGTLYDDPGGDYFTRLHPDRAKNRAIHQLEAMGYRVTLDHAS

SEQ ID NO: 423646 - protein, 357 aa, unidentified
MKEYIAFDSHKHYTLMEREDRQTGRAVQLRVTHQRGAIRTCLRQCEAGTEVAVEATGNWYWIVSEIEQAGLKPQLVHPRKAKLMMGLINKTDKLDVHGLNRLQRNGTLPTVWIPPAELRDQRELTRTRSVLVAQRTRLKNRLHATLAKYGLGVRECSDAFGMVARSQWPELLAQLPEQTRWVSQQLLEQLDRLEEQIEQCEKRLTGLLKVTPEMQLLQSLPGVGLILGASIALEIGTVSRFGSAERLASYAGTTPRVHSSGDKLRFGRLRPDVNRYLRWAFVEAANVVALHHLRRPERHVSQLYYRLKQRKGHAKAIGAVARHLAEASFHILSRREEYVDPALGKGRPKAGVSAVPS

SEQ ID NO: 423647 - protein, 346 aa, unidentified
MGKSITDLSLVTTVGLDLAKHVFQVHGIDASGRVVVANAIRRNKLLEFFASLAPCLVGLEASGSAHHWARELITLGHEARMMPPAYVKPYIRRQKNDASDASAICEAVTRPSMRFVGVRSLMNQAALMRHKAREMLVTQRTQLLNGLRGHLTEIGVIAPQGPRHARELATLIEACDETIPFEVCEALAPLVVQLRNLDEAIVRLERTIAKLAQQDETARRLMSIPGFGPITASAMAATVQDTSGFAGPREFAAFLGLTPKQNSSGGKPKLGRISKMGNRNLRKLLVVGAHAVLFHRKPHTDPLRMWAKKLIEKKPFKLVAVALANKMARIAFAILRSKTVYREIPA

SEQ ID NO: 423648 - protein, 411 aa, unidentified
MQVIYERCCGLDVHKRTITACRLRWLGSEWQKEIRQFGTMTKDLLALSDWLVKEGCTQVAMESTGVYWKPVYNILEGQVELLVVNAQHLKAVPGRKTDVRDAEWIAELLAHGLLRGSFVPPPSVRELRELTRYRSSVVRDRARTVNRLQKVLEAANIKLASVVSDIDGVSARLMLEGLVAGQGDTEQLASLAKGRLKEKHGQLVEALSCRLQPHQSFLIAEHLAQIDYLEGAIERLSGQIEEKLRPFEPQIGWLDTIPGINRRTAEVLWAETGGDMGRFASARHLASWAGMCPGNNESAGKRRSGRTRKGSPWLRHCLVEAAHGAAHTKNKYLRSQYHRIAARRGKKKALLAVGHSILVIAYHLLTRKQAYADLGANYFDERDRQAVTKRCVNRLQKLGYEISLEKLQMAA

SEQ ID NO: 423649 - protein, 425 aa, unidentified
MISADELFLAARIGWDWADGHHDLALLPMDADRVERVRIPHTPEALREFLGQLQRRFKGQPVGICIEKCRGGIVHALLEYDFIRLLPVNPLTLSRFREAWTPSRAKDDPTDADFLLDILCKHPERLRCWTPDDAQTRTLARLTEARRKAVDMRTRLTQRLCAELKGYFPQALAWTGKNLTTRLACDLLLKWPTLKALQRARPDTIRRFYYGHNCRRGDVIEQRLQEVRTAVPLTTDPAIIHVSALTVQMLARQILDLAPAIDRYEEEIARLFESHPDAEIFASLPGAGSALAPRLLAAFGTDRNRFQDATEVGEYTGIAPVTERSGKKEWVHWRWSASTFLRQSFHEFAGLSIQYSPWARAHYDLQRERGKRHHAAVRSLAFKWIRILFRCWHDGIGYDEQHYQNALRRRGSPLAQRLQPTPRAA

SEQ ID NO: 423650 - protein, 426 aa, unidentified
MFVESDDDEQIIERVAALDIGKAEIVCCIRLPATDGGKRRVQEVSTHSTMVPSLCELANRLVELGVQRVVMEATSDYWRPPFYLFEAHGLDPWLVNAKDVKHLPGRPKTDRLDAVWLCKVAERQMLRPSFVPPADIRRLRDLTRYRADLVGVGTAEKNRVEKLLEDACIKLSVVASDIFGVSGRAMMAALIAGQRDPQVLAAMARARMRVKIPRLEEAFAGLPLGTFDDHHRFLLSRMLARIDAVSADIAAVEAEIGDHLAPFADAVARLDEIPGVGPDVAAVIIAEIGLDMSRFPTPGHLASWAKFAPGINSSAGKTKGNGSTGHGDRYLARVLGEAAVNAGRTDTFLGARYRRLARRRGKKKAIVAVGRSILVIIWHLLADPDTRFHELGADHYDRHVNTLAKRRNHIRQLEALGYTVTLTPAA

SEQ ID NO: 423651 - protein, 338 aa, unidentified
MTIIAIGIDLAKNVFAVHGVNEGGKAVLVRPTVKRDALLEMVAKLPPCLIGMEACSGAHYWAREFAKFGHDVRIMAAKFVAPYRLSGRRGKNDAADAQAICEAVQRPHMRFVPVKSEDAQARLAIHRVRQGFVEQRTATINRIRGLLSEYGHILPQKAEVVRREAGRCLEDLPGWANTAIGDLLSEVHRLDERIAEYDRHIAVMAQADERCRRLMGMPGIGEKTATALMASIGNGHDFKCGRQLAAWLGLVPGQYSSGGKQRLGRITKAGDSYLRMLLILGARSVVVAAKKKTDRLSRWVTELVNRRGYWKAVVAVAAKNARMAWAMLSKGEAFQPIS

SEQ ID NO: 423652 - protein, 343 aa, unidentified
MNISTVGLDLAKSVFHVVCFNEHSKEVKKRMLRRNQVLQFFTQLPTCQVGMEACAGSHYWGRELRALGHDVKLIPPQYVKPYLRGNKNDYNDARAIAEAVTRPSMPFVAIKTVAEQDMQAIHRMRAQCIRDRTALSNSTRGLLGEYGIVLSTGLATLRNSIHGLLEDADNGLSDRFRNLLARRYEQLVELDKHIAFYTNELELLSQQDDACQRLQTIPGFGPIVSSAFRSAIGDGRAYAHGRDASASLGLVPRQHSSGGKNVLLGISKRGDRYLRSQLVHGARAVVVQAARKDDPLSRWINRIREERGWNKAVVAMANKMARIGWAILRYNTDYQPALTPSTR

SEQ ID NO: 423653 - protein, 430 aa, unidentified
MKSNTQNAKIEAITEKTLVLGIDVGSEMHYARAFDYRGIEYSKKPFKFSNTEAGFVTFKEWILDLKERHEKDKVVPGMEPTGHYWFNLGKFLQDNEMKPVLVNPHHVKKSKELDDNNPTKNDRKDPKVIAGLVREGRYMIPYLPDGVYADLRTASNIRFQLQAELTRIQNRISRWFNIYFPEYKTVYGKSDAKSGMLILKTAPLPEDILTLGIDGVNQIWRDAKLRAVGKARAKTLIEAAEHSVGSKEGAVSGKMEIRMLLEDYESRNTRLQEVMVLIEELVRKIPMTEKLLEIKGVGIRTVSGFLAEVGDISRFNNPKELQKLAGLALVENSLGKHKGETTISRRGRKRLIYLLFEVAMSLVSKNQKFRELHNYYTTRRLNPLKKMQSLMAIAAKLIRVFYAILTKGVDYDPKKMVSDIKRPAVYLQAA

SEQ ID NO: 423654 - protein, 456 aa, unidentified
MAKLYLGCDVSKGYADFIILDENKQIVEPYFQLDDTFEGHNKLFDILSNLLAKHTDSIMYAAVESTGGLEDNWLHLFYRLGDILNIKAARINPLGPVALHKASLERNKNDGISAQYVAEYLIAYPNKVSYNTQDPYVSLRKQWNLIQMYSKQKTQLLNLLSIYLYTSLPFVVRYCKQGVPNWLLQLLGKYPSASRIARAKEQAISKIPYISLKRAQTLITDAKESIGSCDDESTALVIKSSVDQIIALKVSIEKHKAYMANHCDLPEVRLLTTFPGIGIYSAIGLVLNIISIERFPSAKHLASYFGVHPVYKDSGDKTGSYRMSKQGRAVPRSILFMIARSSIIYNPLIKEVYIEYLKSGKSKMSVLGICMHKILRIIFGILKNQTAFNPEIDRKNREKPKWTKTDKKESDLKRRFLKESDEAPISRRQSLKRKKRKQSQSHNQAVCGIIASPSSL

SEQ ID NO: 423655 - protein, 438 aa, unidentified
MLGGSVTAFFSHFCCEEVVDLKVVFPTCCGVDVHKSFLVATIIKTSQNSLQPSYQKKRFSTFNSDLNRFADWLRENDCLDVCMESTGKYWVPVFNILEKQAIRVVIANPKWVKAVKGNKDDTKDSKWIGDLFRIGLVKSSFIPNKDIRILRELTRYRYKLISMKSSEKNRFQNAFTVCNVALDSVVSDMFGKSATAITDYLTSDVEFDAQHCISLLQRSLKKKAPAILEAVEGHEIAPEQKTRIGIVRDHLHYIDKLVERVDDCVEGMVQKHEGSITLLRTIPGVDRSSAITILSEIGIDMAQFGSSKRLCCWAGLTPGNNESAGKKKSVRISRAGVYLKPALVQVAHAAVKDKSSTYYAVKYERISKRRGKKRAIIAIARMILTAVFCMLSTGEVWSPVDLYKVDMPEHLKEKQLAKAVKQAVHFLETQGLTVLDFA

SEQ ID NO: 423656 - protein, 403 aa, unidentified
MPQCQEEIACLAAHSTDTLEFQYVRPVIIEKLRFLGLDVHAETITVAVAEADGEVRSLGTIANREESIRKLIRKLGPVEHLRACYEAGPTGFVLYWQLTQLGVKCDVVAPSLVPKKPGDKVKTDRRDALKLARSHRSGDLTAVWVPDEASEALRDLVRQREAAKQDQLRAKHRLTKFLLRTGQRPPLGVKAWTERYVEWVQQVRYTHPAREATLLDCLNEVQHMEERVKRLEQSIVEVIQLTSVPMQDVVRGLQALRGIAHISAVTIAVELGNITSRFESARDLMGYSGAFPSEDSSGERIRRGGITKSGNAHLRRIVVESAWSYRHRPAIGARLRKRQEGLPAEITEIAWKAQNRLHKRYMTLMARGKEQRKTMTAVARELLGFIWAIGIKAEASCKQQLAA

SEQ ID NO: 423657 - protein, 311 aa, unidentified
MPTATVYVGVDIAKATFAVCLLTKDLTYPNTPAGHAEFWAALQQLAGPPHVVCEATGGYERPLVLALHAQKVAVSVLNPRQVRDYARARGQLSKTDRVDAAILADYGLTLQPKADAVPTASQLELAALVRARQDLVELLGTEHGRAEHLALPLLRRQQAARLQLLEKQLALLDRQIDALIAADAVLDAKSTRVQTVAGVGRVLALTLLALMPELGTVTGGQAAALVGVAPFARDSGEYKGQRHISGGRAAVRRVLYMAALSASQHNRILRDYYTALLARGKPTKLALTAVMRKLIVLLNRLLADSTFILAE

SEQ ID NO: 423658 - protein, 391 aa, unidentified
MIYVGIDVAKDKHDCFITNSDGEVLFKAFTITNNLDGFNELHQKIASVMDDVTKVKVGLEATGHYSYNLLGYLIDKGLPTYVINPLHTNLYRKSLSLRQTKTDKVDARTIASMLMSDVNLKSYSDISYHNEELKSLTRYRFDKVKERAKLKSSVSRLVCILFPELEKLVPTLHMASVYSMLSEFPGAKHVASAHLTRLTNLLSEASKGRYSKDTAITFREAARASIGSNMPAKSLELKHTIKLIQELDSEIDEIENEIKVIMDEINSPILSIPGINYRMGAMIIAEIGDFSRFDSPDKILAYAGFSPSTYQSGQLDGAYAHMEKRGSRYLRYALYNAAKYVCHWDPTFAGYLAKKRAEGKHYNVAISHAVKKLVRVIYHLEKTKQQYIKVA

SEQ ID NO: 423659 - protein, 355 aa, unidentified
MDSKKYIGMDVHKESISIAVRNAAGKIVMECIIETKASMILQCIDGLRGDLHVTFEEGTSAAWLYDLLKPHVTKVVVCDPRKNASMREGNQSDKIDARRLAELLRLNHLNPVYHGEHGLRSLKELVRSYLTITKDLGRVMSRVKAIYRSWAIPCTGKQVYAPRYRAEWLGKIGEPGVRRRAEFYYQQLDALRTVRQQVRRELLAEGKKHQAWKRLCQIPSIGPIRSAVLLGILQTPHRFRTKRQLWTYSGFGIETQSSADHRSVNGQLQRAKKQISIRGLNRNHNHDLKNLFKGAAIVASSKPGPFQEFYTALLTKGIRPEMARLTLARKIATIVLIVWKTGACFDAQYLKPQTA

SEQ ID NO: 423660 - protein, 364 aa, unidentified
MESYYMGIDVSKGYADFVILDAEKNVVEPNFQLDDTFSSHCKLFEILKRFFESHSEAVLFAAVESTGGYENNWLHSLGGFQGALDIRSARLNPLGVRANSKASLRRVITDKISARDVAEYLIAHPEKVTYQQEDSLAGLRRQWGFVRLLVKQKTQILNQFESLLYTANPELIACCQSGVPAWLLKLLKQYPTAAKLAKARATSVARIPYVTTGRAKELIDQAKKSVASATDETTGSLITAMAEQIIRMEETIRIQSQQMAKQCAIPEVALLKTIPGISDASAIGLMLEIQSVKRFASAKKLAAHFGLHPAFKTSGDGTSGVRMSKQGRKEPRKILFMVAMVSLTANPHIRKIYEEHTEWSPWFP

SEQ ID NO: 423661 - protein, 310 aa, unidentified
MDAIVIGIDVSKDKLDVHVLPAAQAFAVARNGAGIEELAARLAALAPAVVAIEATGGFETIVAAGLAGAGLPVVVVNPAQIRAYAKAIKQRAKTDPIDAAVIAKFARATRPEVRPLPDEATRQLADLVARRRQIVEMMAAEGQRGRRVDHKRVARSIARVKKTLEAELAELDQEIGDQVRGSPLWREKEDLLVSVPGVGPVVARTLLAELPELGRLERREIAALAGLAPFTRQSGRWRGRSFIGGGRATVRTVLFLAAMTAARHNPTLKAFRDRLVAAGTPKMVALIETARKLLTILNAIIRDNRPWQNA

SEQ ID NO: 423662 - protein, 346 aa, unidentified
MEDNLLLAIDLAKNSFQVCYMRHNGEVLLNKAISRNSLIKLLTGKKRFSLVAMEACGGSHYWARLAKRNGHEVKIIQPRAVKGLQLKQKTDKNDAYAVGVAALLPHIFSCNLMSEDEQGLQCLDRARALQLAQRTALSNQMRGFLNEYGIVLPKGIAPLVKRIPEILEDAENGLPDSLRQVLASQADILAMQTDQIEYYDCLITEHIKQNKICQKLSKLEGVGPIIALGLMIRLGDGKEFTHSRDASACIGLTPKQHSTGGKERIGHISKSCADKRLRSLLYQGAMSIVYKVTLRAPTTEKERWLKSIVERRGKKIAAIAMANKTVRTAVALIKSDSDYQPLPIQA

SEQ ID NO: 423663 - protein, 356 aa, unidentified
MNTPHYIGFDVHKKTISFCVKTAAGEIVEEGSVPAQRAGLRQWAAARPQPWRGALEATLFSGWIYDTLKPYGEQLEMAHPAKMKAISAGKKKSDTIDARTIADLVRCNLLPACYVAAPRIRELRRLLRYRSLVVSEAVRMKNKMAGLLMETGALYVKEKLHGKKYFASLLEELDEVPESVIDLLRTSRGALEMFESTQRRLVRELLADPELAQRVERLMTIPAVGEITALTWALEIGDPHRFRSGSEAMSYCGLTAALKSSAGKQQRGPISKQRNRWLQSTLIEAAKLAPRWNPQLAALHARELERGHRNRATLAVARKLVTYLLAVDKSGQSFQLRALSPEDGAEKVGAQKIKTA

SEQ ID NO: 423664 - protein, 413 aa, unidentified
MAQEETLSWFAGVDWGSEKHQACVVDAQGRIVGEREFPHGGTGLAELGDWLLAIAGAAGTVAVAIEVPHGPVVDSLVDRGFVVHAINPKQLDRLRDRFSIAGAKDDRRDAYVLGDGVRTDRRLFRQLHVSDPRLIELRAWSRLAEELKEERVRLSNLVGQQLWRYYPQMQKLTDDLAASWFLELWAIAPTPVKAQQLRKPPVESILRQHRVRRVDADTVLQTLREPAIKVADGVAEAASIHLRSLVARLRVVNRELREAEVQLDKLCLIIGESEATLGNCLRRQDVQILRSMPGIGRINLAVLLCEASGPLGSRDYRALRTLCGAAPVTKRSGKSHIVIMRYAAHVRLRNTVYHWARVATQHDPKCRARYAAFRQRGHSHGRALRGVADRLLALACVLLQRQTLFDPHFAQAG

SEQ ID NO: 423665 - protein, 424 aa, unidentified
MKNCNKQNEKIELVDEKTLVIGIDVGSYDEYARAFTCRKQELSKKPLHFHNTAEGFKTFKYWAVNIMKTNGLEKIIVGMEPTSIYWEALATYCKDNGMILVHVNPAAVHKSKELDDNDPSKNDRKDPKVIAGLVTDGRYSFPYMPEEEYAQLRELSNLRIRTQESLTQCKNRLARWYSRYFPEFKEAYKNVVSKTAMIIMDMYPLPEDIVTLGVEGILQIWRNKKIRAAGESRAKKLYEAAKNSIGRKEAATVARLEFQSIKEDLDRYQERLEAIDKEVDEILPKIKNADKLFGIKGVGKVTVLTFLSEVGDISRFENPKEIQKLAGYAIVTNDSCKHQGEKRISYRGRKRLRWALYQTALSVIGKNEEFRQIHQYYTTRKKNPLKGIQSVVAVACKMIRIFYKILTDGVSYDGTKMTQDIVRV

SEQ ID NO: 423666 - protein, 343 aa, unidentified
MQISTIGLDLAKPWFQVHGVDAYGRVVVRRRLWRSGVIAYFRSLEPCLVGMEACATAHYWARELMALGHTVKLMPPAYVKAYVKRNKNDAADAEAICEAVTRPSMRFVPIKEAEQQAVLMLHRARSLLVRQRTMLVNALRAHLAEFGIVAPQGLRYVEILTKTIAHQQARLPELARSILQTIVDQLNGTMARIQEIEGRLARWHRQSRVSRLLATVPGVGIMGASAIAATVTDPSLFRSGREFAAWLGMTPRQNSSGGKERLGRTSKRGDKYIRSLLTAGAVAVLPHARNRPTRDGEWVRALVARKPTKLAAVALANKTARIVWAVMMRADGYQPREVFRQPA

SEQ ID NO: 423667 - protein, 346 aa, unidentified
MKITTIGIDLAKEVFQVHGVDTHGKAVLRKQLRRGEMAKFFANLEPCLIGMEACGSAHHWARKLGGFGHTVKLMAPQFVKPYVKTNKNDMADAEAICEAVGRPNMRFVPMKNVEQQAILSVHRARQGFVKARTAQANQMRGLLSEFGIVIPKGIASIPKRMDDILEDGENGLPGTMRQLLQRLYDHFKELSRQVQELELQIKQWHQENEASKKLAAIPGIGPITASAIVATVGDATEFKNGRQMAAWIGLVPKQHSSGGKQTLLGISKRGDTYLRTLLIHGARAVIRFAENKAEPDSWLRKLMARRNKNIAAVALANKNIRIIWALLTKGEMFRPDHPTAACAAAA

SEQ ID NO: 423668 - protein, 315 aa, unidentified
MHAPRTFMVGIDVSKAHLDVAVEGKRAVVRFDNDAAGRAALAAAVAGAELVVVEATGGYEMATVRALMAADSPVAVVNPRQIRDFARASGRLAKTDQVDARVILHFARAMRPAQIPHIDDGRIALAALVTRRRQLIDMAVAEKNRLEHAPQAVAVLIGETLAALKAQLARVDAAIALAIEAEPDMAARRDLLLTVPGIGEVGAAVLIAELPELGGIDDKKLAALVGVAPMAHDSGAWRGQRHIAGGRATVRCALYMATLSAIRCSPAIKAFYTRLRDAGKPPKVALVAAMRKLIIMINTILKRHTPWSEPQQHGC

SEQ ID NO: 423669 - protein, 422 aa, unidentified
MTQQQNTSILRVMHEVCCGLDVHKELINACLITTDENGQEVSELKVFQTFTDDLYRLRDWLVDHNCPIVAMESTGIYWRPVHNILEGIFEVILVNARHFKNLPGKKTDMSDSQWICGLLRVGLLRGSFIPQKHVRQWRDLTRYRRSKIEDLGDAKRQVHKLFETANIKIDSVASQLFTRTGRNLMELLLKKDQELTLEEVTTCLRGTLQSKGKELYRAIRGFFEDHHRWLLEKMLGNVDHLEHLINDIQVRLRSLLKPYEDAIDRLNEIPGIEFISAYSIISETGPTLSTFPDTASLCSWAGVCPGNNESAGKRHSGRSPVRKGNLKTILIEVAWAAVRAKKSYYRVKFFSLRSRLGPKKAIVAVAHRILKAIYHVLKNGAKFQDLGEDYLGNLYKNSKLNYLIRQAGKFGYILKPCGIPEK

SEQ ID NO: 423670 - protein, 464 aa, unidentified
MKNAGRSSKTRRGVPALQAIRPMVGGIDVGSREHWVCGPARPDGEPNVRVFGTTTAQLEELVDWLAEQGTESVAMESTSVYWIPLFELLESRGIEAVLVNARQLHNVPGRKTDFHDCQWIQLLHSCGLLRGSFRPGNAIVAMRAIHRQWANLVEERTRCVQWMQKALDQMNVQVHRAVSDLTGTTGMAIIRAIVAGERDPVRLSLLRHHGCKKSVDEIARYLTGTWREEHLFNLTSALQLYDAIEKLVVSYEARLLDALAALQSEERKDAKVPAHPNPVKERAIQSQGDQSVRTTLWRFAGFDLSRIDGIGIGTARIILTEVGLDLSPFPSEHHFVSWLRLCPRRPISGGKPLGKKRNALGASRIAGALRMAACSLQRTKTALGAAYRRIARHKGAKVAVFAIARRLAQLVYRMMRYGQDYIDVGEKAYDRQFETRRLAGLKEAARALGYSLAAEPTQGQTPAG

SEQ ID NO: 423671 - protein, 413 aa, unidentified
MKTLIVGVDTHRKTNTFCLMDQNGVEQRPRFTLDNNRPGTQRFIEQVSEVMHSEEFTELRLAAEATGWYWFHFFQTLQQDELLQGWPVELFALNPRLTANFKKSYVDMDKSDPIDAFVIADRLRWGRDIPKPFSYEESYLALRFLTRHRYHVVHNLAREKAYCTAILYLKASEYSRDDRKAFANLFGAASRAVLQEFTSIEEVAALPFDELVEFIDRHGKRRFPDPTENARKLQRLARDSYSLPEALQGPINLILSLSLKHIATLEEQQKRVDIAIAQVMQAIPHTLGTIPGFGPVLSAGIIAEIGHAERFDFDQDKVAKYAGLRWRQSGSADFQAEETPLSRKGNAYLRYYFCEAALSVQRCDREYAAFFQKKYNEARKHRHKRAMVLTARKLIRLVVHLLATNQPFQARKG

SEQ ID NO: 423672 - protein, 313 aa, unidentified
MSEHYVGVDVSKEYLDVASSDGRSLRVSNDEAGHQELVTRFSAAPPVLVLMEATGGLERALAVQLSAAGVALRIVNARHVRHFAKATGLLAKTDRLDARALVHFAQTLKPEPRAIQPEQTLALQALIVRRRQLVEMLTMERNRLRTAHRGVRKDLQSSIRWLEKRLAGVDDDIDGALRECGVWREKVELLESVPGIARVISVSLLASLPELGQLNRNQISALAGVAPFNRDSGRWQGRRSIYGGRPLVRSALYMAALVGARRNPVLRNFYQRLRGAGKPAKVALTACMRKLLVILNTMLKNGQRWGDHVQLQA

SEQ ID NO: 423673 - protein, 448 aa, unidentified
MEPQEIEDEGHEQILERVAAVDVAKASGMVCVRVPREGQPGRRRTRVWQVEATTGAVLELADHLVAERVEKVTLESTSDYWRIWYYLLEAAGLDVQLVRAQDVKQAPGRPKTDKLDCVWQAKCTERGMLRPSFVPPAEIRQLRDYTRLRSDLTGERTRHYSRLEKLLEDALIKVSAVASKLDALSVRDMLEALIAGERDPQVLAGLARGKMRARHDRLVEALTGKFDEHHAELARMLLDQIDALSAQIGALTARIGELTAAIPAAWGIDADGTTGPGAGTGLGAPVLPAVDRLDEVTGIGRDGALVILAEIGLDMTRFRTPGHLVSWAKLSPRTMQSGARSRAGRTGKGNPYLKGILGEAAAAAAKTDTFLGERYRRLVKRRGKLKALVAVARSILVIIWHLLADPTARYHDLGSDYYASRIDKQRKIHNHIRQLQALGCTVTITPAA

SEQ ID NO: 423674 - protein, 342 aa, unidentified
MNEYVGFDVSKEETSFCVMDDTGEILVQGKALSDPQSLFEALREHTLYPDRIVLETGTLSGWLARGLHEHGLPVDVIDARQAHAVMKLQHNKTDANDAILLAEIARTGFCRPVSVNSEAAHKQRILIKARRHLVGQRRDTQNTIRGLLCALGIRFAKGSGKLDKRVHSALEGRPDLKAMIEPLLASAEALKIQIKRLDQEVAHEAKASPASRLLMTVPGVGPITALAFVATIDDARRFARSRTVGAYLGLTSRRHQSGEMDYSGRISKYGDALMRHLLYESANSLLTIVRKSHPIKDWARRIRKRSSHKKACVALARKLAVIMHRMLITGEAFRWPEKEMAA

SEQ ID NO: 423675 - protein, 349 aa, unidentified
MPRRVKKVVPLENGEGKRKNGAIMGIDVHRSILAVCILNEESFLYEQNHTNDKAGLETILKLVKKFKVQGVAMEATSTYHLKICFALIDHSIPVLLACAKQTADTQGRKTDKLDARRIAVAHRDGRLKPSVISPREFTHLRRSTRKLVMLIQDQTKSKQRIQQLFQLYDCHLTSIQSNLLKTNWSLDLLLACLEITEKSNNKNIKELVLEYYPEKKLKNTFVSQINSLQDELEKLLNQLTLVEKINLQTELYQIRIFDKLIEQHRLIYRIFAKEHPQFKKDMELLLTIPGVGPDTAAIVLAEVVDVKLFSKPEKLVKWSGLAPRVLQSGHRKKKTEKFIKEVINISGGL

SEQ ID NO: 423676 - protein, 286 aa, unidentified
MAIVAHTRPFVIGVDTHARNHSFAVLTAATGEQIAAKQFPTTSAGLNRAVAWVSRLIGGNLTALWVIEGAATYGARLARVVTDAGYEVAEAARMDARTHHRVGKSDLLDAHRIGASVLPLEDDRLRHPRSDAGLRPALRVLTSARENMSSERTASVNALTALLRTADLGLDARKPLTNGQLTEVASWRTRVEDLELAAARAEAHRLAKRVRALDIELADNRSQLEELLRQSKAAPLLDVIGVGPVTAAVAYSAWSHRGRLRDEAAFAALAGVSPIPASSGTRLATG

SEQ ID NO: 423677 - protein, 329 aa, unidentified
MPKIPAPVVGMDVAKATLDLACPLDNGKYRTRGKLSNSSKGFDQLLTWLKTHAQDDAWVVLEATNVYHLAVATFLYQHGYRVCVANPAQIAAYAESELSRTKTDKTDAKLIVRFGLSHLARLRAWQPPTAAESKLTALTRRLQDLKALRQMESNRLGTADPSVHDSLHAVLSMLDEQIKAVERAIKQHIDDDPDLRDKRDLLVSIKGIRDTTASLLLAELGDIHRFTDVRAVVAFCGLNPALRQSGTWKGRVRISKVGSSTLRAGLYMPAISAMQHNPLVRALAERMRVRGKAGMTIVVAAMRKLLHIAYGVLKSGRKFDPNIGLTATG

SEQ ID NO: 423678 - protein, 454 aa, unidentified
MSNKVIFNLDELFISVGIDVGADFSWMSIALPNQQFVGKPYKILHNSIDSLTTAVSKIKEAEELYSLESRIFLESTGIYHYPLFCYLRDKGFNCSVINPIITKNSTNINIRKVHNDRFDSKKAALVGLKPDLKVSLMPSDLALNCRNLCREYYDLMDNRSAYVNKLQGELRMAFPQYLGIFSKVTINTSLTLLETYTSPSAFLKADKQEIIDIIKSTARFGLTYAQNKYNAIIQAATDANQFGYIIDSNIKRIRLYISFIRKYDEEINSILESLHELVDANEDSDFVKQIHLIETFKGAGFLSAVSIMGEIGDFSAFSKPKQLFAYFGLDPAVKQSGKFEGTKVQMSKRGSAIARRVIHTLTLQSISISHNGEAKNPVLREYYLKKCDSKPKLVAMGAVSHKVCNMMQQMGYRRCNLAVCDCLGCRMDRTCDWNCNLKATKLRPQPALQLTDTA

SEQ ID NO: 423679 - protein, 373 aa, unidentified
MKKNITFVGLDVHKNSIDVALAEAGRNGEVRFYGTIGGDLDSLHKVVRKLQSTGAELCFAYEAGPCGYDIYRSLTSKGFDCIVVAPSKIPRKSGDRIKNDRRDALNLARLHRSGDLTAVYVPMAEDEAMRDLTRGREDAVKALRVARQELLAFLLRHGYRYSGKAYWSKAHQTWIAGIKMPYRAQQITLQEYVHAVQERLERVQRLTRQIQELVPQWQLAPQVKALQSLRGVSLIVAATTIAELGDLTRFDSAKQLMAYLGLVPSEHSSGGTTKRGGITKTGNGHVRRALTEAAHTYCHPARESRVLLARLDGLPQEVRQISWKAQVRLCGRFKALMARGKNRNTIITATARELAAFMWAIACALLPNPAMQQ

SEQ ID NO: 423680 - protein, 355 aa, unidentified
MSDEKYIGLDVHQATISVAVRDSQGNIIMESILETKASTILDFFAGLRGRLSVTFEEGTSAAWLYDLLKPRVAEVLVCNPRKNAALKQGNKNDKMDARKLSERLRLKDLQSVYHGENGVRMLRELARSYLTIVKDLTRVMSRVKALYRSWAIPCAGRDVYYTRHRKEWLDKIQEPGVRGRAERLYQQLDMLQHLRQQARRELLAESRKHAITAKLREIPSLGPIRCALAVALIQTPHRFRSKRQLWTYSGLGLETRDSGEYHIVQGQPRKRKKQAFVRGLNKDYNHDLKGLFKGAATRASIKPGPFQEFYQRSLAKGIKPTMVRLTLARKIAAITLTLWKKGEDFDIHKLNTQAA

SEQ ID NO: 423681 - protein, 392 aa, unidentified
MMKLFVGIDVSSKKLEVSMLTSDISAKPLFQGTFENDLNGATEVKKLILKLNLSQQFEKIVIGMEATSIYSFHPAYFFENDDDLAQFNTQAVIINPRDTKKYKDIFEIQKNDSIDAYYIADFLRLERYSTSLVRQEKYVALQRLTRSRFELVKSLSRSKQHFLEDLYYKLNKLVVNDDLNTSVFGATMLDLLTEDFTTDDISVMPIEELADYLNSKGKGRFANPSALAKTIQKAIRGSYRLDKTIQTSIDVVLSVYLNEIRLFQKQIKLLEKSIDDLLKTFDEAQILQSIPGIGPVYSAGILAEIGQIKRFENQSQLAKYAGLAWKKYQSGSFNGDNTPMIHSGDTYLRYYLIEAANSVRRYDPVFARYYHQKLMKPNILHTNELSHLPHEN

SEQ ID NO: 423682 - protein, 313 aa, unidentified
MITVGVDISKLKIDIYCEIEGKNINKTFFNNKEGFEALLKLLPQDNKVRIAMEATGNYGYDLANYMYNHKAIVHVINPAQVKYYARSLLLRSKTDKVDAKLIHKFATEREDLQIWKPLSSSYQRLRNLARCRQNFKRDITDFGNRIESEKDKQVVGLYEEVVVTLKDKLGLIEEQIRELVKGDKELSTKVELLESIPGIGEITAWLILAELPDLNQFKNAKQLAAYAGLNPAVKQSGSSVNGRGSISKIGSSNLRLCLYFPAITALKHNNKIKGFCERLKEKGKRPKVVIVAAMHKLLRIVFAILRSGEPFIK

SEQ ID NO: 423683 - protein, 426 aa, unidentified
MARVFLKRGTAMISERRWYVGVDWASESHHVFLTDGAGAKLGERIFKHGGEGLAEMAAWLIAATVAEPEQVHVAIEVPHGPVVETLIERRFNVYAINPKQMDRFRDRFTLAGAKDDSRDAETMASALRTDPRCFRPLAAMDPIVIELREWSRIAEDLGTERIRLTNRMREQLWRHFSAMLELESDLAAPWLLDLWEVVPTPEKARRIRETTIARILKRNRIRRLDAAQVLEVLRKEPVTVADGAVAAASAHITTLIARIRLLKRQIDDAHRRFDRLTTELASSQESEPGQMKQHDVEILASLPGVGRIVLATLLAVAWDALQRRDYASLRSLTGVAPVTKRSGKSLIAIRRQACHRRLSNAMYHWARVAVQHDRTSRAKYTALRGRGHSHGRALRSVADRLLNVACAMLKTGTTFNPPQAAKLARC

SEQ ID NO: 423684 - protein, 456 aa, unidentified
MSLILKGLPGGAHPDRQWRLKWVGAVRVLYSRCAVIDVHKDQVTVAVRTPGEGPRGRQTQVRKFQAFYGVLTDMARWLASLQVTQVAMEATGIYTMPVYHVLIEHGQFEQVLVCNAAHVKNVPGRKTDAVDAAWLAELLECGLLRGSFIPEPKIKAVRDVIRYRKKLVGARTSEFQRLGGVLQDAGIKLDSVASSIATMSGRAMIEALIDGERRGAILAELARGRMRAKISDLTLALQGRFDDHHALMCQLHLEHIDHLEDMIARLDAQVEHMMIPFARHRDLLVTIPGIGPVAAAAILSEIGTSPGEYFASGAHLASWTGLCPGNHESAGKRKHGTPRKGNQHLQSLLVEAAWAAVHTNGRLRARYHRLVLRFGGYRNPAAKKKAAIAIAHTLIVIIWNVLTTDTPYTELGADFYDRRTDPERETRRLIAKLEALGHTVTINPQPLTRLRSRSAG

SEQ ID NO: 423685 - protein, 408 aa, unidentified
MDVIHARCAGLDVHKQTVVACVRVAAAGRARHEVRTFATTAVGLRALQEWLVAAGCTHAVLESTGVYWKPVWHMLEDSLTLVLANATAVRNLPGRKSDVSDAQWLADLLAHGLVRGSFVPPAPIQALRELTRTRKQLGREVTAHSQRIEKVLESADVKLATVLRPLLGVSGRAIVAALAAGETDPDRLVALAHPRLRAKRAALRAALPGHVRLHHRVLLRQHLRVVETLQATIAELDAAIGAALAPYRAAVAHLVTIPGVSTTAAQILVAEIGTDMTRFPSVGHLRSWAGLCPRQDASAGKHRSTRLRKGAPWLKPVLIQGAWAAVRGRDGYLRAQFLRLKRRRGPMKAIVAVAASMLTAAYYMLRDSEAYHELGAAHFQRGDHARLVAGLTRRLHHLGYEVTLRPAA

SEQ ID NO: 423686 - protein, 436 aa, unidentified
MSKSQNPTKEVIPIMKKRIYRRMPVNDFQLDSISHAALGGKLVFAIDVAKVDMVAALAGADGRVLNTICWKAPDENPTVLSILRGFRAAGVTVEAVMEPSGTYGDVLRHQLEQNGFPIFMVSGKRTHDAKEIFDGVPSLHDAKAAAIIARLHADGLSTLQSDEVPERRQLKAALAIMDLHQERYLQLVHRLESWLARHWPELPSLLDLTSSSLMALLARIGGPADVAAAPDQATKLLRGISHRLIADDKVAAVVASANTSVGVPMVGLERDALMAIADEAYDAHRAFTTAKTKVDKLAATTPAAALAPVVGHTTAAAIFAEVGDARSFSCTRAFLKAMGLNLKEKSSGTVHGQIKITKRGPSRVRQLLWLAIFRWIQDDPIANAWYQRKKQRDGGRASRAAVALMRKLAKGLYHVGRGGTFDSNKLFDTRRLQVAA

SEQ ID NO: 423687 - protein, 335 aa, unidentified
MKHYAGLDLSMEETHLCVVGESGQRIFETCVSSTPQAIADALSSVGAIERAVIESGRMTPAICRGLTHLGVNIVCIHAHQAHLSLKAMKANKTDLHDAAGLAQLARTGFYKEVHVKSAAAHGVKSVIAARGRLVQSRVQIDNTIRGLCAAFGIRVGPGQGKDFIARAGQAAALPGLGQAVASLLSVRDHLVAEIKALDGLLNEIARSSTACQILMSIPGVGVQTAAAFAAGIDDADRFKQSRNAGAYFGLVPRRHQSGEIDWVGRITKQGDSTVRKLLYEAANSILTRTRKAFALKSWALKIARRRGLKKARVALARRLAVIMHAMLRDGTLFEM

SEQ ID NO: 423688 - protein, 293 aa, unidentified
MYVCILDQAGTVLVHKNLPTTPEAFLRVIAPYRAARVVAGECMFTWSWLADLLARAGITFVLGHALSMKASHGGKAKNDKLDAHKIAVLLRGGMLPQAYVYPAERRATRALLRRRCPLMRQRAELLAHRQNTNSQYHLPEIGKKVAYKANRAGVEARLQSVPGIGQILALLRLYEIQDISGCPRVPDFVSSCRLLKCAKESAGKRLGPAGKKIGNVHLRWAVAEAAVLFLRHNQPGKAYFTKLEHQQGKAKALTVLAQKLARAVYYLLAREQAFALTRFVPASPLRGGTEPAV

SEQ ID NO: 423689 - protein, 408 aa, unidentified
MTVVGIDVSKGKSMVAAMKPGGELVAAPYEVRHSDIELSHLALDVLCMEPDTRVVMEATGRYHEPVAALLHSEGIFVSILNPLLIKQSGAGSLRKVKSDPKDALKIAKYGLDNWSTLREYTPMEAIRQQLKLCARQCDLYNKNIVMLTNNLISLSDKTFPGVNELFSSPEKADGHLKWVDFYRSFWHCDCINRMSPDAFEERYKKWCKRKGYHFSTDAADALYAASCGSYTTLPRDNNAKLLVTVAADQLIALRENQSKLEAEMLNLCKQLPEYETVMAMYGVGKSTGPHLMAELGDVRRFPHRSSIVAFAGVDPGVVGSGKMQLSSVTTSKRGSPQLRKALFQVVSTYVKCKPENEAVYQFYAKKRDEGKPFFVCTTAAANKFLRIYYARVKECLNAAESATQVEEG

SEQ ID NO: 423690 - protein, 344 aa, unidentified
MSVYVGIDVHRKRSQVAVIGADGGVLANRNVPNGVEPILKVIGGLPRGTPAAFEAAFGWGWLVELLEDYGFAPHLVHPLQCKAIASARLKNDKVDAAILAQLLRADLLPEAWIAPPEVRQLRALLRHRAQLVRLRTLLRNRIHAIVADHGCDRPSGCWSGPGRAWLASLELPAVSRQVIDDDLAVIDALEPIIGRLDWQVHQRARTDPRVKVLTQLPGVGPFTALVILAEIGDIGRFGSARKLAAWAGLTPTVRGSDRTIRHGHISKQGSAWVRWVLCEAAQTAKRSPQFAATYQAIAKRRGRKIATTAIARKLLTRAWHLLTDAERQAGGQPAAASVPAGSRP

SEQ ID NO: 423691 - protein, 440 aa, unidentified
MTTLQVLNERAGGLDVGSEKIHVSVAGDRPRVFGTMTPDLHKLRDWLLEQKVETVALEATGIYWLPVYEVLERTKIKPIVVHGRHVKNLPGRKTDMSDCQWLATLHVHGLLRGGFVPENSIRELQDYMRLRSDHISMASAHIQHVQKALERMNVKVHDVISRITGVSGLAIVRAILAGERDPARLAGLADPSVLARKGARLVDALQGQWRPEHLFALRHAFELWEFYQTKIVECDQAVAALLQKMNENRPPAPPASGPRKPLRGPNVPQIEKLNESLRQLCGGVDVSQLPGIGDYSALLLVSEVGTDLSRWPTAKHFTAWLGLAPSSHQSGKRRGRVSRQRNRAGRTFCTIARSLAKSTDKALGGFYRRLKGRRGGLIANQALARKIAELYWRAFVKGLQHVESGLAAYQEKLHQQEKRVAEKLAAKMGCRLVPITTVHG

SEQ ID NO: 423692 - protein, 355 aa, unidentified
MKRTTKYVGLDVHQATTVTTVREESGRVVARTILPTDATAIVDLFRGMRGSVCVAFEEGTQAQWLHDLLVPLVDHVIVCDRRGQSSQGNKADQTDADLLSDLLRQGALRAVYHGGHERATLKELARTYQNLVEDSTRVMQRLKALFRARGIKTPGTAVYQRPRRAQWLGQLSATGVRFRAEALYSELEVLQQLRPMAKAAMLAEARRDPAWAVLRTVPFLGPVRVALLLATLQTPWRFRTKRHLWAYAGLAVVTRASAEYELDDRRAVRRRRRRPLTRGLNRNHNRVVKDVFKGAATAAAVRAGDLQTWYQGLLTRGMREELARVTLARKLAALTLRLWKRGERYDPTKLTVPAQ

SEQ ID NO: 423693 - protein, 345 aa, unidentified
MTVYIGVDFHPYEQSVAYVDDQDGEIGYRRFLHSDKQSLKAFYRKCGEDAVIGTEATGSLWWFEKLLFDNGMKLSIGDPRMIRRAALSRHKNDFRDAETILDLLMRGQFPAIVPRSERSREVLDLLNYRQSLVRKRTSVVNQLQAFARSKGLARFRLPAVKARTKLLDAAGTETEQLLVSSRLMLCDELTRQIKALEARLEEETDKEEQVKLLLTHPGIGLINALALFHTLGDVRRFRRKEEVVAFVGLDPLEKSSGEKRRIGSISKHGSRLVRHLLGQAAQACRDKRIRQFYSEVSRRRGRPKAKVAAARKLLINCYVMLRDGIGYEEFTRAGAKLVCARGQER

SEQ ID NO: 423694 - protein, 352 aa, unidentified
MKIIGCDFHPGFQQISMLDVETKQRVKKKLHHASGAAEQFYRSLQGQRVRVGIEACGNTRWFERLLQRWGHELVVGDAARIRAAAVRKQKNDERDADHLLELLATGRFPAIWVPSPEERDLRQLLLHRHKLVQMRTRIKNQLQHVALDQGLQKKRQLWTERGRQWLLEVSLPPWTERRRSDLLVLLDGLEPAIAELSQAVEMAAQQDPRVQLLRTHPGVGPITALAFVLVIGDVQRFARSNQLASYLGLIPSEDSSAGRRRLGAISKQGNTLLRTLLVEAGQSAARCDPQLKRAYQRCCHRKSLTGIGKVMVARKLAVRLYWMLKSNQPYTPARMQGSPSHPVSTREGSSIV

SEQ ID NO: 423695 - protein, 399 aa, unidentified
MIGIGIDISKNKSTVSAINDTGEIIMKPQEFKHSENELNKLIQWIKDQEDTVFVVMESTGHYHYPVLKKLYEEGIYVSVVNAYLMKKYGDIEIRKAKTDRKDAIRIAKYAIEKRFSLKKYEGEDEKYNDLKFLSRQYNQIVSIRVKAKIQFNNLLDEIMPGINKILTRTTGNSSKILYDFVEKYEHFDNIKRKGEQKFIKEYSAWSKKKGYRNGAIKALKIYELAQNSITTRSANNSTYIALKNCIKILRETEESSNSILTQMQTIAYTLPEYKIVRELKGVGDKLAPRLIAEIGDVRKFTSAKALNAYAGNDAPPHQSGQFEGTKRHISKRGSSSLRKVGYEIMMALKVTKPTEDNAVYEFMIKKESEGKAKNVAKMAALNKFLRIYYTRVMNLYKTL

SEQ ID NO: 423696 - protein, 417 aa, unidentified
MPTGDYDFFVGVDWGSARHQVCVLDPARQVHGERAVEHSGPGLAALADWLVAVAPGAPARIAVALEMPRGAIVDLLRARGLHVFAINPKQLDRFRDRHSVAGAKDDRRDAFVAADALRTDRWAFRRLEPDHPLILQLREGTRLDQEMRQELTRLANRLRDQVLRFYPPRLRLVPAADEPWLWAVLALAPTPAAGAHVPRARLTRLLQTHRIRRLSTEDVRGALRAPALPVTPGTVEAAASHVALLLPRLQLVHAQRAQGTRRIDALLAAYLAEAPTAGPPRAHHDVAILQSLPGVGRLVVATLLAEAAPLLAARAYPALRAQAGIAPVTRQSGKHRSVLMRYGCNHRLQQAVYHWARVSTQCDAHRRAHYTALRQRGHSHPRAVRGVADRLLALLIAMLKSDTLYDPARPRRREMAA

SEQ ID NO: 423697 - protein, 461 aa, unidentified
MHNHDGETRQSRPLEGLPVIRRGVGGIDLGSERHWVCAPTADGAGREIADFGATTAELIRMAKWLQHRNVESVAMESTGVYWIAPHEVLEAAGLEILLVDTRQLARVPGRDKKTDPTDCEWIQRLHSCGLLRGSFRPREDVCMLRTLVRDKANLVAESGDWVRRMQKSLDQMNVRVHRAVSDIDGVTGMAILRAIADGERDARELAKLRDRRCRKSEEEIAEQLSGHWREDHLFSLRQSLKMYDAIQQRIADYDREILRKLAAMQPEEFREQPAPKVKNPQKAAAIKKRGEEPMREALYGMSGADLTSIDAIGVETVLVVLSEYGPDLSRFPTEKEFVSHVTLAPRRPMSGGKPVRKKRRNTASTRVSGALRMASLSLRNSATALGAYYRKIARRIGGDVAVFATARKLATLIYRMLRWGQRYVDEGAEAYERRYQQIRITTLKAKAKDLGYELVQRQVTG

SEQ ID NO: 423698 - protein, 404 aa, unidentified
MKEFTPGETKIETVSALATVGQGQGLTADDYAAYVGLDVHKDTIAVAVAYEGREEPEFRGEIANRPKAVAKRVRRLSEEFGGGVLLFCYEAGPCGYGLYRQLLELGHGCDVVAPSLIPRKPGERVKTDRRDALKLARSLRAGDLTAVWVPDEEQEAMRDLSRARGDMKGQEQKARQQLNGFVLRHGHAWPANRTRWTQAHFNWLESLTFPHDWQQVVLQEYIDAVRAASQRVADITAQMMRAIPQWSLAPVVDSLVALRGVDKVAAVTLLAELGDISRFDSPTQLMAFLGLVPSEHSSGRRKRKGAITLAGNAHARRMLIESAWSYRFAPRQTMHLKRKAKPASEAAKAIAWKAQKRLCGRYRTLIQAGKNQKVVTTAIARELAGFVWAIACEVMPQVRAGKAA

SEQ ID NO: 423699 - protein, 357 aa, unidentified
MSKSRPPVEDPSPRQATVFCGIDVSAATLSVAVQADPEWKLEQRQLANSAAGHRSLMAWLRKRKGLVRVTLEATGVYGMDVALALEEAEGFAVEVLNPKKARDFARSLGRSKTDRTDAAALAEYSRRMKFVAWKRPSREVLELRALGRHITTLTEEHTRLSNRLHAARASRTAPRCVREDLKRSMAGIQKRLVRLRREARGRIEKQAGLRRKWLHLLAMPGIGETSAVQILAELASLDENMTVRQWVAHSGLDPVHETSGTSVHKPSHISRQGNRYLRKALFMPALTAARFDPHLQGFYMQLLDRHKTKLQALTAVARKILHAIYGIFKTDTPYDGAKLFPALAVSITKKPQPTPTY

SEQ ID NO: 423700 - protein, 304 aa, unidentified
MATLAGVDVSKSFLDVFDGTEIKRYTNDPKGWAGIAKETRGPYAIEATGIYHIPVARYLWREGWTVYVVSPLQVRRYAQALMARNKTDNLDARVIAAYAEAAGERLRPWTPLDADLSAIRVLVGYARGISRQSAANRNRLHAVRFAYPEHAGNIVETVADLKRTAKRFYREALKVAYENPTIAHWIDQMTEVSGVGERVALTVVAYGGNLERFTDARAFAAYTGLTPVRKQSGEKEGKARISRMGPGALRQAFYIAARVAVMKDERYRAYYERKRAEGKAHLLVMTAIVRKLAAVAWKKAVGRP

SEQ ID NO: 423701 - protein, 387 aa, unidentified
MPQPNDLSRSLVTLEQDSTLIAVIEMGQSSWLVAGIVPGIERQPLKKLAADQDGLLQLLHRWRKEAAQAGHPIKRIAVAYEAGRDGFWLARWLRAREIEAYVIHPSSVPVSREHRRAKTDRLDTELLKRAFLGWLRGEPKHCSMAAIPTVEDEDARRPSRERESLVGECTRIVNRVKANLARLGIRGFRPRLAHAPKRLETLRTPEGTAVPANTLAELQRDMAHLRFVKQQIKEIETARAKRLEQASEGGRDAMVRLLARVVGIGIETADMLVQEVFSRKLRDRKAVARYAGLTGAPDESGQKRRERGLAKAGNARVRHAMIELAWGHLLHQKDSALAEWYERRTVDARGGTRKTMIVALARKLLIALWRLVTTGEAPAGLLLRPAA

SEQ ID NO: 423702 - protein, 419 aa, unidentified
MSFKILKNNCCGLDVHKTWIFACIGITDSHRRTEYKQARFSSFTKGLQELCDWLAKYNCTDVCMESTGKYWIPVFNVLEKNNIWVTLSHPKYTKPQKGNKTDRKDAKWICDLYMCGMVKTSFIPPADIRQLRDLVRYRFKLTCMITSEKNRAHNCLTISNFKLDEVFSDIFGKSSRSITEQILQHPGETFDVAQFVDVRCKTPIEEIQAAVDGAISTEQAVKLRQCLNHIDELEKHQAEIEREIFRLSDKYEEVLNLIRTVPGFDKNPMTAIQVLSEIGGDMSVFPTAKNLVSWAGCCPRNDQSNQKIKSTRISRAGSYFKPVLVQVANALIKSKKHPEFTTRYRRIKARRGHKKAIIAICRMILTAIWHILTDLKPYTTEGFLESRPVNDSKILTTSQALNLLKQRGYVIKDDIVSVP

SEQ ID NO: 423703 - protein, 351 aa, unidentified
MKYIGLDCHKQYDHATMIDTETGEIKAKRLAHIKEDFSDFIGDRDGTRMVIESCRDWSRTYELSEDLVEEIILAHPLKVKAIASAKIKTDAIDSRTLARLLMADLIPQAHLRKAENRVKQRVIRHRAFMVVMRTRVKCRIHDSVDSQLLPPDVLKAKPINLFSKKGMKWLTSLEWARDEDKKLVESHLRVMEAINQEISITNDMVKEIYEKDRDAQLLTTIPGIGVTLATLISTEIDGIERFRSPSKLCSYAGLVPSTHSSGGKTYHGKITSEGNRWLRWALVEAALPASYGDAEIKERLETLRAKKRANVAKTATARWLLKVVYHVLKEKRPYITAYNNQKKARAAFYFA

SEQ ID NO: 423704 - protein, 349 aa, unidentified
MERFRVGIDISAKTVVIAHRGVKGRVERHEFANDGAGRRALLQYLKKRAKLIRVVMESTGVYGLDLALALNKNGIELMVANPRATAHFAKAILQRSKTDALDAEMLLLFAESMPFKQWTAPSAGQLELRGISRRVQALLETVRAEKNRMHAAMHVEGTTIVRKSIQSTLKALAKQIESLRGEAMKLIKSDPSLTRRFELLLTVKGIGKISAISIIAELSVLPADMTDRQWVAHAGLDPRLFESGTSVEKVPRISKRGNSYLRAVLYLPARVACRYDPGARRFAARLKANGKKPLQIHVAVMRKLLHGIHAMFENNVPYDTNDLFPVAGAVGTSGIALSAISEVSIALSC

SEQ ID NO: 423705 - protein, 397 aa, unidentified
MIYVGIDVAKNKHDCCILDSEGKIASAFTFENNKSGYEKLIAEIAKFSKSKSYADVKIGFESTGCYSLNLANYLNHKRLSVKVFNPLLVNLRRKAESLRKTKTDKSDCKFLASMLFSEESEPYLQAVLPISELKILTRNRSRLIHMRSKLKQSISRLVDILFPELPSLVYSLHQKSSYALLLEYPTAKSIASAHIVKLTNLLSSNSKGKYGRARALQIRELASNSIGFDSVATGFELRQAIRLIQNLDGEIAVLDDEIKAIMDGLNSPILSIPGIGYTLGAIILSEIGDIRNFSNPAKLLKFAGLEPSVYESGRYRASDTPMVKRGSPYLRWALLQAARLIAMHNPAFRSYQDKKRAEGKHFFVVQSHLAKKLVRVLHKLLSTDTTFDAEALHQVAA

SEQ ID NO: 423706 - protein, 411 aa, unidentified
MQVIFERCCGLDVHKRTITACRLEWLGNEWRKEICQFGTMTKDLLALSDWLVSEGCTHVAMESTGVYWKPVYNILEGQVELLVVNAQHLKAVPGRKTDVRDAEWIAELLAHGLLRGSFVPPPDVRELRELTRYRSSLIRDRARTVNRLQKVLEAANIKLASVVSDINGVSARQMLEGLVAGQRDTEQLARLAKGRLKEKHAQLVEALSGRLQPHQSFLIVEHLAQIDYLEGAIERLSHQIEEKLRPFEQQIGWLDTIPGVNRRTAEVLWAETGGEMSRFASARHLASWAGMCPGNNESAGKRRSGRTRKGSPWLRHCLVEAAHGAAHTKNKYLSSQYHRLAAHRGKKKALLAVGHSILIITYHLLTRQQAYVDLGANYFDERDRQAVTKRCVNRLQKLGYQITLEKLQMAA

SEQ ID NO: 423707 - protein, 343 aa, unidentified
MHKLSGDGFLSCGIDVSAAQLVVALQSEGERNLQRSFPNCARGHQALTLWLRKTGRSVRVCLEATGLYSLDLALALHAASGIEVAVLNPKLVNRFAATLCRSKTDPADAQVLAEYARRMPFQLWQPPPAVALELRTITRHVAALTQQHTRERNRLHAASVSIAGARCVQKDLKRSLRDLELRIDKLRAAALALIQQDRQLAPRLTLLVSMPGIGEVSALNLLGELALLAPSLSVRQWVAHSGLDPAHHQSGISVQKRSRISRAGNRYLRRALYMPALVAARRDPHLRAFYQALVARHKAKMQALVAVARKMLHAIFGMFRSNRNYDGSRLLPNMKLATLSTLA

SEQ ID NO: 423708 - protein, 417 aa, unidentified
MEKGEKASTCRYIGLDIHKYYSVVAGVDREGEEILAASRVEHMDLEAWLVKHLMPTDRVVIESTTNAWHVYDLLEPLVGEVQVANPIKVKQIACARVKTDKKDTFILARLLAANLVPTVWVPPKHVRELRQLISHRRRMAGMHTQVVNRMHSVAHRHHLNHPKGKDFQEKNTRWQKDGSLSRLEKMQLELDMETGEHLEKQVGRMTRELARLSHEEPWASDMLYLMQVPGCGVVTGMTILAAIGDITRFETPKALASYSGLVPGLEQSGVKLRGKGITKEGRKELRWVMVEVAWRAVKADPHWKKYFETLQKRMHKNQAIVAIARLLLTMVWYVMTRHEPYSHYSPERIAYKYLTWAWALDKEQRQGMTRPQFARYYLMRLGIGDELERVALNPKFPYRLASKEEVLALRPELLPPE

SEQ ID NO: 423709 - protein, 424 aa, unidentified
MKSTQNEKILQIKNETLVIGIDIGKDTHYARAFDSRGIELAKLLRFSNSAEGYNALRTWMQSTMQQKGKTDAIVGFEPTGHYWFSLGDYLRNQGYKLGIVNPYHVKCARELDDNRQTKTDLKDPKTIAMLVKDGRYRDVYIPSNCYQELREAVLERERLVEQMTALSNQVIRWLDIRFPEFTKVFKSWKGKTAFATLKQFPTPVKVAQAGPEGLIALWQQHVKRNYALKAQQLFQAAKTSIGRVSGSNAAEVVLQNLLVQYELAASQLEQIEALLSDLVLTVPHSDTLLDVKGIGKLSTAVIISEIGEIQRFSSPRQIVSLAGLSLIENSSGRHKGQTTISKRGRKRLREALFRVMIPLLANNAEFRAMHQRNITRDQNPLTKMQSVIALCGKLIRVIYALLSKGCRYDASKLVQDMNRSMMAA

SEQ ID NO: 423710 - protein, 384 aa, unidentified
MSSVALSAGPIHLGMDTSKDKIAVGILRWEEQVPDVEVIANDEPSVRRLIGRFPDRAGLRACYEAGPTGFGLHRLLTSMGVACRVVAPSLIPKAPGDRVKTDRRDCRRLARLDRAGELVAIRVPTEQEEGVRDLCRARADLVEDRTRTRHRLSKFLLRHDRIWRAQAWTMMHEQWIAGQRFDDPGMQATFGHYRGVLAARDGELAAIEADLAYWYTHGPFVDAVTRLAAYRGVAQLGALTIASEVGDWRRFPSARAFMGFTGLVPSEYSSGASVHRGHITKAGNAHLRTQLIESAWAYQHRASLGVLLRRRQDGVDPATAARSWTAQQRLCSRFRRLSPRKTSRNVVVVAVARELAGFLWAEMTADLTHPDLLLPAAALTTPRR

SEQ ID NO: 423711 - protein, 455 aa, unidentified
MPKKTTSDRPELKTVNVSAAAIDIGSKMHMAAVNPACTEVPVRSFSTFTQDLHELADWFTACGVTSVAMESTGVYWIPVYEILEQRGFEVILVNARYAKNVPGRKTDVSDAAWLRQLHSYGLLRGSFRPDAEIATLRAYLRQRERLVEYAAAHIQHMQKALMEMNLQLHHVVTDITGATGMRIIRAIVAGERNPDVLATYRDVRCHSSTETIHAALVGNDRHEHVFALTQSLELYDVYQAKMLDCNRKLEVLIAALNNKGEKPVGKLSKPRIKTKQVNAPTFDVRTALYGVLGVDLTEIHGLGPSLALKLVGECGTDLRAWPSAKHFTSWLCLAPGNKVTGGKVLSSRTRRSSSRAAALLRLAATTVGRSDTALGAFYRRLSSRAGKSKAVTATARKIAVLFYNTLRHGMSYRDPGAEHYEQQYRSRVLANLQRRAKSLGFVLQAIPGDANPAVS

SEQ ID NO: 423712 - protein, 359 aa, unidentified
MRFYTQSHRFYCGIDLHTRSLHLCILDQAGSIVLDQNIAARPETFLKAIAPFREDVVVGVECMYAWYWLADLCHKEKIRFVLGHALYMKLIYGAKAKNDQIDAGKISRLLRGGNFPLAYVYPKGMRETRDLLRRRTYLVRERSSLFTHLQILNGQYNLPPFPKKLSFAGNRLEMDIAARFADPSVQQSVAVDLAVIDVLDKQIGALELYLTRTAKVDDVQTYHRLQTIAGVGKVLALILLYEIHDIRRFASEGHFLSYARLVRPGHESAGQVVGSGGQKIGNAHLRWAFAEAACLFLRSSERAKKWKAKQLKKRSEGRVLALLAARLARAVYQMWRKGEAFDEARFWQGQEVGVPSERG

SEQ ID NO: 423713 - protein, 336 aa, unidentified
MTIIRIGLDTSKHVFQLHGVDENEQPVLRRKLRRSEVEKFFAKLAPTRIGIEACGASHHWARVLRRLGHEVVLLPPQYVKPYVQRGKNDAIDAEAICEAMSRPTMRFVPVKSAEQQAALTMLGVRDLLVKQRTMLINAIRGHAAEFGVTVAKGPKQVIELLKRLAIEEGVPALARKMVSMLASQLDGLDIKLKAIEARLMAWHRQDQTSQLLATIPGIGPIGGVSFALKVPDPKAFRSSRHFASWIGITPREASTAGRQRLGRISREGDEDLRRLLVIGATAVIRAAKPGRVSPWLMGLLAKKSKKLAAVALANKTARIIWAMMISGETYRLPTEA

SEQ ID NO: 423714 - protein, 403 aa, unidentified
MNMNAVGIDVSKGKSMVAILRPYGEIVSSPFEIKHTSSNIQSLIERIKSIEGNSRIVMEHTGRYYEPLARQLSLAGLFVTAVNPKLIKDFGNNSLRKVKSDKADAVKIARYTLDNWIDLKQYSLMDELRNQLKTMNRQFGFYMKHKTAMKNNLIGILDQTYPGVNTYFDSPAREDGSQKWVDFATTYWHVDCVRKLSLNAFVGHYQKWCKRRMYNFSKDKAEEIYGAAKELVPVLPKDDLTKLIVKQAIEQLNTASKTVEELRTLMNETASKLPEYPVVMEMKGVGPSLGPQLMAEIGDVTRFTHKGAITAFAGVDPGVNESGTYEQKSVPISKRGSSSLRKTLFQVMDCLVKTKPQDDPVYAFIDKKRAQGKPYYVYMTAGANKFLRIYYGRVKEYLMSLPE

SEQ ID NO: 423715 - protein, 316 aa, unidentified
MGREVFVGIDVAKAHLDVAFNDESGCTRYTNDDAGISKLVEHLKSRQVALVVLEATGGYQRQALSELLAAGLPGVAVNPRQVRDFAKALGKLEKTDEIDAKVLALFAASIRPASRPVVDDTTQEFQALLARRRQLMEMLVAEKNRLHQHATKTVRRSIEAHIDWLKKQVRDTDKDLEDRLRDSPAWNPRVEVLESEPGVGRITSMTLLSELPELGTLNRKQIAKLSGLAPLNRDSGTRRGQRSIWGGRATVRTTLYMATLVATRYNPTIKTFYARLLSRGKAKKVALIAAMRKLLTILNAKLRDHARATNRSLLPT

SEQ ID NO: 423716 - protein, 419 aa, unidentified
MGKLKIVYPICCGLDVHRDFVIACIASTNEKGVTEYASKRFSTYSGGLRDLRTWLGERNCRDVCMESTGKYWFPVHNILESTCNVVVSHPKFVKAIKGKKTDKKDAQWIADLFKHDLVRGSFIPPEDIRQLRDLCRYHQKLTWSATGEKNRAQNCLTVSNFKLDSVFSNVFGKSASAIIEQMLEHPGEQFDVAPFVDGRCKTPIPQIQEAVDGAFSLWQAEKLKIILSHMDDLDKCKALLEDLILRLAEPYMPQVGLLLTVPGVADPMTAIRIIAEIGVDMTQFESSKHLCSWAGLTPQNNESAGKKKTTRIGKAGQYIKPLLIQCAMAASNPRSKLHPEILGKYQQLKKRRGTKKARVAIARRLLTAIYHILLNNVAYTPFDAPDKESIPDNRILTPEQALAMLRSKGYIISEPEMNI

SEQ ID NO: 423717 - protein, 335 aa, unidentified
MTRFNYYIGIDVSKLTLDVTILQECENTTKTEYYKIENGEKSIAQFVKKTLGKYDLKQTLFCFENTGVYSLPLSYYFSNNELPYWQVPAMEIKRSKGITRGKSDKTDSKDIAFYAYDHMHKFRPSCTSPKSIQLLRLLFTEREKILKALSSFEKTAENKTFMPKDVYKVVESENKKMIDALNKSLKAIEEKMLAIIASEDKLKQQYELTTSIPGIGKQTAIYILIATKGFESFENWRQLACYAGVAPFPYQSGTSIKGRTKVHPLADKKLKSLLNMCAIVAIRHDKELKTYYERKVKEGKSKMLVINNVRCKLIARVFAVINRKTPFINTFKFAS

SEQ ID NO: 423718 - protein, 366 aa, unidentified
MKKTSTVRVNGNMIFKGHRLTIGLDLGDRWSFYCVLDEAGQSILEQKLPTTPEAMKQTFGKIPRSLIALETGTHSPWVSRLLSELGHEVIVAHAQKVQLITKSNRKDDRHDARTLARLARIDPALLGPVRHRSAQAQLHLTVIRARAELVSARTALVNAARGLVKSYGQRLPKCGTYQVSRELAAALSTELRDVLEPLFKEIESLNERVKEYDERMEKLAKDVYPEVSLLKQVKGVGTQIALTYVLTIEDPHRFAKSREVGCFLGLRPGRRNSGESEPQKGISKEGDRYLRTMMVQGAHYILGPFGEDSDLRRWGQKLAERGGKNAKKRAVVAVARKLAVLLHRLWVGGEVYEPLRNSQKALREVA

SEQ ID NO: 423719 - protein, 351 aa, unidentified
MKYYTTTTEFNCGIDLHSKQMYACIMDPKGNKLVHQNVKGNDFGYFLKIAKPYLHDLTVVCECTFNWYWLADACCAAGIKFVLAHALYLKHIHGGKNKNDRIDSEKLAHLLRANLIPPSYVYPSERRPVRALLRQRMSYVWQRSELLTHLSMNQMAQGLVPAAKCGHNREVWEERILEQYENPLHQFSASRDMEIVKAYDHQIELLDQKLEHLAKEHDERDYRLLLTVPGIGRVLGLTILYEMDTVTRFPTDKDFLSYSRLVKGSVASAGKIKGLTGGKMGNAYLRWAFGEAAIIAKRNHLLLTPYAERLVAKRGKFKGNAILASKLARAVYYMLQTGTVFDAERVVATAI

SEQ ID NO: 423720 - protein, 416 aa, unidentified
MTFSSTRNVRNFNTRGAYTMYIVGIDIAKRKHEAAVIDGEGTVIIKPFSFTNNYSGYNRLLAMLTKAKLPLDEVSFAMEATGHYWLALFTRLQKEGFRVQVINPVQTNSIRSFYIRQAKTDPRDALLIAEVIRFGHFSESTLHPENIYELRELCRGRHAIVSMQADVKRKVVALLDQVFPEYETAFTNMFSDTSMAILQTCPTPKELSEMPLEELCHLIEVSSRKRFRMAKARELQELARNSFGFAMAGDVFSTMIRLYAKHLDFLKQQVREMDRKIAEIMDTLDTPITTITGIGPTLGAYILSEIGDISRFSSAAKLAAYAGIDPTMRQSGEYNGVRNRMSKRGSPYLRHAIWLAASSAVLHDPALKFYFQKKRDEGKPYMASVGHACRKMVSIIYAVMRDNKAYTPCIPNEISA

SEQ ID NO: 423721 - protein, 359 aa, unidentified
MSEHMFIGLDVHARSVAAGLLDAGTGEVKSCSAPARSAELVPWLRAQGESISVAYEAGPTGFGLARACAAAGIPCLVAAPSRIAKAPGERVKTDRRDALRLAKLLRLDELTAVRVPSACEEGARDLVRAREDARSDLMRARHRLSKLLLRQGLVWEAGAWTQAHERWLATQRFAERGLQIAYGEALAAVASVRARRDALDAAIVEEAAEPRWAEVVGRLSCLRGVSTLTAFGLAAEIGDWERFDGRSIGAYLGLVPSENSSGERRRQGAITKTGNGHARRLLVEAAWQQRRPSSHPSRELTRRRAGQPALVRVRAEAAGRRLHQRWRRFDARGKRSTVAAVAVARELAGWCWSLATMDA

SEQ ID NO: 423722 - protein, 344 aa, unidentified
MSKYKVIGIDLAKKKYHIAAFDASNTVVFKKKMSRTDFFNQVVLMFPEQEKFAIEACGGSNYVGQQLSKLGHEVLILKPKDVKPYAKSRQKNDLNDAIGICKTACDPEIKHVNLKTTAQQVTCYLHKSRQNTIQQRIQYSNSLITSLYEFGFVVDCGKSKFAKDSKNYVEEAFANGYIESDVKEEMLKDSSEIDGLLLREKHLDKTIVKRNKNNKSARLLETIPGIGPINASILSNKPMSSYEKARDFAASLGLVPKQNTTGGNIKLGSITKQGDRYARTMLIQAGRTIVMRANKPKCPDSPLYRLVERLKKAGKGYNVICVAVANKLARIAHACVMKQEEYMS

SEQ ID NO: 423723 - protein, 315 aa, unidentified
MDVTHSGSRFVGIDVGKAHIDVHVRPSGEAFRLTRDPAGLAELVARLNPLTPALIVLEATGGFERVVTAALCGVGLPVAVVNPRQIRDFARATGRLAKTDRVDPKVIAHFADAVRPDQRPQPDAAARELADLITRRRQVVAMISSETMRSHQARLPAVRRRLAAHLDWMNQELRQLDADLDTAVRANPAWQERATLLVSVPGVGDATTRTLLAELPELGTLGRRQIAALAGLAPVAHDSGQHRGTRHIRGGRGTVRAALYMAAWIGSRWNPTLKDIYQRLRAAGKPRKVALVACMRRLLTILNAMIRDKAPWRAA

SEQ ID NO: 423724 - protein, 368 aa, unidentified
MQNTIVHDEGATSLEGAVGKLKLSSSLIKLGLDIHAKQYVVVAQYDQLLPKAARRFWPGEFVPWVEWLLRQGHTVHVVYEACGFGSGLYRQLRAAGAHCYVIAPRKLDEQRTGVKTDPRDATILCQRLSRYVEGNTRELAVIRVPSEEEEQARHVTRQREQLVHHRQKLEAQGRSLLISQALPAPAHWWKKQTWNRLGRYLPEWMILRLEFYRPGLLSLQAQIDSLTSQLEAAAPPNIPAGLGKLTTVMLTREICDWQRFNNRRAISSYTGLCPGERSSGSKRVPGSVTKRGNPRIRAALVECAWRMVRFQPQYPPVKKRLAVLVKGAKATGAQRKKAIVAVARRLAVDLWRVHTGRLTAQQLGLIIK

SEQ ID NO: 423725 - protein, 376 aa, unidentified
MTMGEYVVCGVDAHEKWLDCRIGVDREAPERRRYENNREGRGELFEQLEVLAEEHDGAKVMVGYEASLLGFGLYDDCREQGFECAVLAPTKIARSVEDRKRKTDDRDATRIFEALRAHVLAGNALPAIWIPDVETRDDRELLRARLDLSEKLSRVKTQVRMLLKRNGVEKPKEVGARWTIPFRAWVAALKLTPGAQSWLSSLLRQVKFLEEEIKLLDRQVLELSQTARYREPSEALCKIGGVGLFTAMVYLTEMGDLSRFKNRKKIGAFLGLVPSSDESGESGDRKGHITHQGPRRVRKVLCQGVWARIHTDREEAQVYRRMVERNPKHKKIAVVGCMRRLAILMWHVGSEAQRRAGCFVTEVPAELGAGAAVGGN

SEQ ID NO: 423726 - protein, 316 aa, unidentified
MIEAVKKCVAGLDIHKKTVMCTILTEKEGGNLRKTTREFRTFRDDLTCLAKLIYDSKVELAVMESTGIYWKCVYEEIEAMGTPCYVVNARHIKNVPGRKTDVSDSEWLAELARCGLLRPSFVPPKDFREIRMLTRYRKKVISMQASEKNRLHKILESAGIKLGAVVSDIDGVSAREMIAAIIKGSHTLEEIVQMARGRLKMKEDDLAKSLKGRISDRHRFLLKKIKNHMEWLENHINEIDSQVEQAMIPYKKEWQLLQTIPGVDKISAAMLLSEIGVNMKCFGNKDRLSSWAGMCPGNNQSANKKKVVAQGTAINL

SEQ ID NO: 423727 - protein, 399 aa, unidentified
MEKVIIGVDPHKLSATIEVVNSDEKLLGSGRFTTDRAGYKSMRTYVKTWPDRVWAIEGATGTGRALAQRLLEAGEHVVDVPAKLTARARILDTGHNRKTDARDAHSVAVVAARTEGLRVLQIDGELEALRLLVDRRQALTSRRVQSVDRLQALLAELLPGQAKRDLTTGQAKAMLASVRPRDIAGKTRRRIAAEELADLVMIESKMKAATAELKALVLARGSRLMDIHGIGPVVAARILADVGDVSRFADRNRFASWTGTAPIDASSGENNRHRLSRAGNRKMNHVIHIAAVTQMRLDTEGRAYDRRKRAEGKKPLEAMRCLKRRISDLIYRQLVADAERAIGTGPGGHCGASQESSAVDLPPHIDTSDQPLPGPAKPTLQPTAPHRKTTKEKAPQSAS

SEQ ID NO: 423728 - protein, 344 aa, unidentified
MSKTPIAVLGIDLGKNSCSLAGLDASGAVVLRRRMSRDGVLAFTAKLAGCVVAMEACCGAHFLGRILQQQGHTVRLMAPEYVQPYVKAQKTDDRDAEAIAEAATRPTMRFVSLKSEAQLDLQVLHRARQRLVAARTRLTNQLRAVLLERGAIMPKRRAALRQRLAELLAGSPELSPRALRLLKDMQDEWADLDRRIKAYDDELAALTREDEQARRLATIPGVGVINATALLAAVGDASAFSRGRDLAAWLGLTPRQHSTGGKTKLLGISKRGNSYLRVQLIHGARAAMTHFARQPTSTGEWVRRLMARAHPNVVVVALAAKLARIAWAVLRHGRSFVPQPAIPA

SEQ ID NO: 423729 - protein, 412 aa, unidentified
MNPVIGLDVSKGESHVQAFLDKGKPYRKSFSITHNLEGLGRLLDFLQDVEKAALGTQPSVVLESTGHYHTPVIQFLEEQKYVYILVNPLISHRAKSSSLRKVKTDAIDAYHLCELYYKEELQPYKKRGIQLLNLRNLTRQQESIAEISAKTKIQLHSLIDQVFPEYRGVFGSLYSKVSLLTLLEFPTSKAVLSVSEKELTDKIASLCKNRSVSWAEEKTQMLIEAALRNPFQNNLYESHIFNLEILIKIVLQYQEHLSRIADEINALAKEIEEYCILQSIPGIGEKIAATIISEIGEIDRFNDAKKLVAFAGIDPSVYSSGRFTASVNRITKRGSCRLRHALYMAVQSGIRDSRKKKTTDEIIPRNRKLREFYDKKREEGKPFRVAVIACVNKLLHWIFALLKKRTTFQDID

SEQ ID NO: 423730 - protein, 344 aa, unidentified
MDISVLGVDLGKNVCSVVGLDASGAVVMRRKVRRETLIALAEKLPPCIVGMEACCGAHHLGRVFAAHGHDVRLMSPEYVRPYIKAQKNDDRDAEGIAEAATRPTMRFVELKSQDQLDMQTLHRSRDRLVGERTALINQLRAILLERGMVAPQGKRKLEQFLAVLMDEQGGAGLSPRMIVLVADARAQWAELDRRISTFDAEFVRWVKENEEARRLTTIPGVGPIVASALVAAVGSAESFDRGRDLAAWLGLVPRQFTTGGKPKLLGISKRGNKYLRRPLIHGARAALPYVAERDTPLGRWAKGLMSRAHRNLVVVAFANKLARIAWAVLRRGERFAAPGMPVAV

SEQ ID NO: 423731 - protein, 354 aa, unidentified
MNSAKYIGMDVHKESISIAVMNHSGKIVMESVIETKASMILQFIGGLRGDLRMTFEEGTWAAWLYDLLKPHVTEVVVCNPRKTALLKDGSKSDRIDARKLAELLYMNKLNPVYHGEHGIRTLKELARSYLTVSKDLTRVMNRLKALYRSWGIPCAGTEVYSPRHRAEWLRKITEIGVRRRAEHYYQQLDSLRLVRQQVRRDLLVESKKHKPWKLLGQIPGIGPIWAALLIALIQTPHRFRTKRQLWTYSGLGLETHDSAQYRVLGGQLQHSKTVTIRGLNKNHNHDLKAIFKGAALRATIAAGPLHNFYEGLLAKGKKPTMARLTLARKIAAITLIIWKKEVRFDAEHLKPQAA

SEQ ID NO: 423732 - protein, 411 aa, unidentified
MSAHDVARPVEMVAVAVDVGKNTVAVSVTDDQRRRLLGPLDLAMTRPGLAATVARIEAVVPPGVRVRVGVEAAGHYHQPLLVPSSWPAGWELRELNPGHVSEQRRAQGRRRVKTDAVDLEAITELVLSGQGSPVTARAEVLGELGAWVTHRRRRVETRTATKNQLLGQLDRAFPGLTRALPDVLGTQVGRLVAEHFADPARLAGLGESRFIRYAATRGLQVRGQVAAKLIAAARDALPTRDAAVARTMLAEDLVLLGVLDDQVAAAEDHLAQVLPLSPFAVLTTVPGWAVVRAAGYGAAVGDPARWPGHRQVYRASGLSPAQYESAGKRRDGTISREGRVDLRRALIDLGIGLWLNEPSAKTYAAALRDRGKKGGVIGCAMANRANRIAYAMVRDQATYDARYWATKPEEG

SEQ ID NO: 423733 - protein, 388 aa, unidentified
MYMIYVGIDISKYKHDCFICKDTGEIIVESLSFENNKKGFQQFLDLLKSYDNENVHIGLEATGHYGLNLKLFLEKNNYSFMEFNPLLVKEFKKSLTLRRTKTDKVDSIVICQKLMSVPYKPNSKLFYHKYSIKSLSRLRDTLVKQRSKYMVQLTNILDIVFPEFKSFFNNRFSTTSLYFLNKYGTAEKMANMRDFETPNKLSKGHFTYVKFAKLKELAKNTIGESNEVFEIELQTLISLYNEIDFKINSIDKQISTIIKELNPPTLSIPGIGELTTAVIISEYGDFNKFPNADKLLSFAGLEPGIYQSGTILANGKMVKRGSGYLRYSLMNIANIVIKYNPTFYDFYLKKRSEGKNHRVALSHVCKKLLRVIYKLETQNILFDPSLLK

SEQ ID NO: 423734 - protein, 410 aa, unidentified
MNNPYRLFVGIDWAKEEHTICVIDHDQKIVDRRAVPHSGAGMAQLCEVLAKLSGADPASVAIAIETPRGAVVECLVERGYAVHALNPKQMDRFRDRHTVAGAKDDRRDAFVLADALRTDRHLFHRVRLDDPLVIRLRELSRAEEEVQCEQVRVENQLRELLNRYYPQMLALGPAVDEGWFWDLLEWVPRPGAKMPSRSKLQHLLNSHRIRRLDAADIRQALEAPALPLAPGAAAAASEHVLLILPTLRLLQRQRKELERRIEALLEDMSREGQFAEHRDVTILRSLPGVGRVVTATMLAEASQALAERDYHALRCYGGAAPVTRQSAKRKMIVMRQSCNRRLKNALYHWSRVSSQCDPRSKQHYAELRAKGHSHGRALRGVADRLLAMLVAMLESGTTYDPGRRQAGAAR

SEQ ID NO: 423735 - protein, 349 aa, unidentified
MTTQRLSYVGQSVYVGVDVHKDTYAVTCVCNKQIVKTATVKADPAGLTASLSQWFPGARLYTAYEAGFSAFVLHRALTKAGIMNIVVNPASIAVAANDKVKTDRRDSKKLALDLSDGRLQVIYVPTEDEELARLLPRTRAQIVEHRATIARQIKAKLHQFGLIAPASRRLISNRYLREIDAWPLPPDLRVSLTFLAEQWRFATRQLIEMRRLLREQAKAHPAIEQVYRSVPGIGEVVARTLATELGDMTRFANERALFSYTGLTPSEYSSGPSVRRGHISRQGSSRVRHLLIETAWRALPRDAVLKEIFDRIAATRGKKRAIVAIARRLTGRIRACFRQGTTYAVGTYA

SEQ ID NO: 423736 - protein, 355 aa, unidentified
MNDAEYIGMDVHTATISAAVRDSSGNLVMEATLETKAETVLEFVHGLRGSLHVSFEEGTCAAWLHDLLKPQVTKVLVCDSRKNALLRVGNKNDREDARKLSELLFLNKLHPVYHGETGIRTLKELARSYLTLTRDLTRVMNRLKAIYRGWGIACAGQQVYAPRYRAEWLAKISEAGVRRRAEIYYQQFDVLAALRQEVRRELLAESRKHPAMRLLRQIPSIGPIRAALLIALMQTPHRFRTKRQLWAYCGLALRTYDSGEYHFVGGQLKRSKKAVTIRGLNKNHNHDLKNIFKGAATRAAATAGPLQNFYEARIANGMKPPMARLTLARKIAAITLLVWKKGVRFDAEQLKQQAA

SEQ ID NO: 423737 - protein, 337 aa, unidentified
MESKVLKVSVGVDMAKDTFYSAVILLMEDLTIKCKGTRKFSNTGKGFKEFVEWVDRKVKMDHTVNFTMESTGVYYENLACFLYDNNQRVHVVLPNKAKKFSESLDNKSKTDKLDAKTLGRMGAERILKLWDPGSKIYQRLKKLTREREAIQKDRTRLQNMLHAENHSAFSEVVSRERYKERLALLTTQLKEVDKDIKKTIENDPEVLRKVKQVESIPGISLTTIAVVIAETYGFAAFTNMKQLTSFAGYDIVHRESGNYSGKTRISKKGNSHIRRILYMPSLSAIQHNETYRSFYNCLNERKNNGLISGTAVQRKLLCLIFTLWKNDTTFIENYQNN

SEQ ID NO: 423738 - protein, 344 aa, unidentified
MPSNFYLGIDVSKASLSVVLMSSNSKVLWSSKKIANQPSGFKQMVEHASKIASKHADGDDYSIAAGMESTGVYGEQLSYYLADNNMSGRISLYVLNPFAVKSYRKATMQLNKNDAADARLIASYLLSMITTGQITPWQAPSLAERLLRELTRRRAELVTLREAEYNRLEKFRAGGSHPHPVIESVQELIAHLEQQIREIDEAIEKHIDDAGLRDTAELLRSIDGIGKVSSASFIGEAGDISRYRSVKQLVSRLGIAPCENQSGTSVHKKPVMSRMGSAVLRHAMYMAALVATRKNKVISAFYNRLLARGKCKKLAVIASMRKLLHIIWGVLTHRVKFDPEYAPA

SEQ ID NO: 423739 - protein, 403 aa, unidentified
MIVGIDVAKDKHNAFFGTATGKALFKRLVFENTIEGFKRLLIQTDAVKIQHNLTKTAFGLEPTANYHKPLGEFLIKSDHMVVLVSGVAVKRNRELLDGRWDKHDTKDSANVADLISQGKCLFYEYPSMALRELRSLLSLKRRLKKQEHGLKVRIRNQLLATYFPEFDRYYRQSDSQGLAIVRWCLDPSVIAGLKYDEFVRLVAPRTRTIGQRDRLKAIWKKAADSIGCDAGESLEFEAKVMVEGLKHVQEAISEVNDKIEDICCEFPEYSYLLTIPGFGPDVSSKVFGAIGDPFRFKTGKQVLKMAGLDLSANRSGKNSDSAIPVISKKGKADLRYALYQAALIASIRNQSFVMYYTNKLRGREKEKGIKTKMRVKLAAKMLIIAWTLMKKKEVFDCKYLNRA

SEQ ID NO: 423740 - protein, 501 aa, unidentified
MAGEPRTVDSFTPSCDKQDGENVQTLYAYGVGIDCHSRFIQVCVLCNKGTEVIRFEKDFATGWDQLRAAKLWILDMLAANLPAATPSPADRLEYTLESTGCYHLPVVRALGGVPHIVNPLLANPNRRKTDVLDARMLAHHAICGLWPASFLPPDEVQELRVVWAQRNEAKRLSTRCINRSNNLILRWGHTFGATIAPSSTLGIAALEDLAAGKLPGLQGVSDTPLPLGARAVLTTLLATRRSLVAESQRFEQLAVSLAKSLECTIRGGELRKGSEVLTLLQTVPGIGPVTAMLWLVEIVEPTRFPCGKAVAAFAGCDPTLKVSAGKVTSTVRRKGNARLHTALMQAAGSLITRNKESIGRWGYQIWKRKKKGGFKTACGAVARRLAIAMWHVHSKCEPFSYQGYNFWRQPSLPDVSLSEMGLSPYVFRKFQELGLVTSQRVVDAFNSSLASTPGVGQQCLLEVSLWLQTQMERQNQGQSQVLNQASGVETQAAIPGLRFSP

SEQ ID NO: 423741 - protein, 369 aa, unidentified
MKQVTTIGLDLAKKVFQVHGVDAAGVVVLRRSLRRRQVLAFFAKLPSCLVGIEACATAHYWAREITKLEHQVRLIAPAYAKAYVRRNKNDPADAAAICEAVSRPSMRFVTIKTEAQQAAAGVHKVREMLVKQRTMLINTLRGLMAEFGVVVAERPRHVSELMAILADPTDRRIPTPLHEGLSALVKTLGGLERRIEIVDKQIVGWGRDNATCRHLITIPGYGPVLSSAMAAMVVAPAVFAGARHFSASLGLVPRQDGTGGKIKLGPISKRGNGYLRRLLVNGAMAVLCSKRAKEDPWLAQLLESKPRKVAACALANKMARIGWAVMMRQEDFSRRQHDQPRPTPSQPGTVLPAVKTAARAPAAVAVGQS

SEQ ID NO: 423742 - protein, 334 aa, unidentified
MALENKITVGVDVAKDTLAASIFNGQIHEYILLDYTQKAINKELIKRFKNLETSVVFVMEATGIYHSKLAYWLYSAGFDIAIINPLIIKRYAQMKMSRVKTDKSDCSIIAEYGYKEKLQLFKPKSKETVTLGNLLKASEDFLHQKSIALSQRHALMHQADYSKEILYFYNKHIKFITQEILILKKKIELLLEQHFTNEYELLSSIKGIGIMSSAMIISVFDSFRNFDNAKQASSFVGIAPAPYESGTSVKKRGSISKQGNTLARKLLYMASLSGVQSNSLLKQQYERLLQNGKSKKQALIAVAHKLLRIAFGVLKHNEPFSINYIEERKMLKIC

SEQ ID NO: 423743 - protein, 414 aa, unidentified
MRIVYERCAGLDVHKKTVVACRVTPDGKGGWQSEVRTFNTMLDGLLALADWLRVGGVTHVALESTGVFWKPIFNVLEGEFEVILANAKHIKFVPGRKTDVKDAQWIADLLHHGLLSASFIPAAPQRELRALVRYRTHLVEERTREINRVHQVLEDANLKLGSVATDIMGVSGREMLAAIIAGKDDPAALAQLAKARLRTKIAELERALTGRIHDSHRLLLRLHLDHIDELNAKITELEGEIGQRLSPFDQDDLLARLQTIPGVGEQVAHVIVAEVGIDMHRFKTANHLASWAGLAPGKNESAGRNRSAKTSKANRYLKSTLVEAAQAVGHKHDTQLAAQFHRLAARRGKKRAAVAVARSILVIAYHIIRRGTVYEVLGANYYDERKTDAIQQHLVKRLEHLGFKVTLQPQAAAA

SEQ ID NO: 423744 - protein, 325 aa, unidentified
MHTKQMTVGADMSKQSFDVTVLGPDQKQIRRKFANKLSGFSELNQLVQSYGASSVVLAMEATGNYGEGLALFCYSLGWTVLVLNPARVKAYGIAVGQKNKTDRADSLTIAQFAQSTPGLHPWAPRSAANQELSQLVRERLHLQKLLAGEQCRLQTAKLWVKPMIQKRITFFEEQIQQLWKSIKQLLKKDPELCRACELISSIPGIGEWTAAVLLSELPPIDKKTSARPIAALFGLCPRNRESGTSVRGRTLSRGGRRVISHQLYMPALAALKHNALLRQWAAQLRQRGKKSKQIIAAVIHRLLRIVVGVLKNQAPFQVDWKGARS

SEQ ID NO: 423745 - protein, 346 aa, unidentified
MSEIIRIGVDTSKYIFQLHGVDAAEQAVLRKRLGRKQMLDFFAKLPPTQIGMEACGAAHYWARELSRLGHEVKLMAPQHVKPYVKRNKNDGRDAEGLCEAMSRPTMRFVPVKTAEQQAALMLVGLREQMVARRTQLSNMIRGYAAEFGITAAKGLDKIEALLAEIAQDERVPAPARDLFALQGREFAQLQTELKAIEARLRAWHRTNADSRRLAEIPGIGPVGAPELIMKTPDPGAFTSARHFAAWIGLTPKDHSTAGKTRLGKITRAGDERLRSVLVAGATAVIKQAMRGRGHPSPWLVALLKRKPPKLAAVALANKNARIAWKLMVTGESYEGARMQAASAAAA

SEQ ID NO: 423746 - protein, 313 aa, unidentified
MEQGKSSTAVAGVDVGKFRLDAAIEGVREQFETSNDAAGIEEMGGWLKRHGVDRVGMEATGGYERRLRLALEARGIAVVVHQPIEVKLYGRLHRQHAKTDAGDARLIAAATAAMGRPAKRADPALMELSERLTAYEHITDQLMRLRTFRDSVSLPDLIALVDDQIDRLKALKAALARQLREAVKRCTQLKARYDLLTSLPGIGPLVAISLIVRMPELGQMQRGQAASLIGVAPHARDSGQWKGQRFISGGRTRPRRMLYLAALAARRYDKTLNHFANALVARGKPPKLAIVAIMRKLIEAANIVIKRQQPWSA

SEQ ID NO: 423747 - protein, 397 aa, unidentified
MTKLFVGIDISKEYSTVQGVDGSAKKLFYLRFSMDAKGFSELLNAIKQSSVDINEVTVAMESTGCYHINIFSFLCSEGIRCFVINPLLITNFARLSLRKTKTDKKDALTIAQFLLANEHSLNTMAISQSTQDLKDLARERESLTWLISGMKNDIRRLLQTTFPELESLCKPYSETMLHFLRRFPSARLIRGAKTKEIEKALICPNERRKRVLITAQEIINAAKRSVASAGVAKELILSEKVSTVLYLQEKNDKITEALIESCESLKIEDLDIIRSVDGVDDITGSTFLAELGDLSNFGSYKHVIAFAGLDPSINQSGQHEGISRISKRGNRHLRRIIFMMTMCSVRGNNVFRKYFLKRKQEGLPPMKALMATAHKLIRVIFSMLSNKTFFKKEVADV

SEQ ID NO: 423748 - protein, 335 aa, unidentified
MEITTIGLDLAKHVFQVHAIAADGTVVLKKRLRRGQVYSFFAALTPCLVGVEACATAHFWARQLRELGHDVRLMPAQYVKAYLKRGKNDAADAAAICEAVTRPSMRFVPIKGEDQQAALMLHRARDLLVGQRTQLINAIRGHLAEFGVIEAQGPWNVPRLLAGMEEAGLPDLVPGLVRLLASQLEEVELRVDEIDTQIMAWHKASPVSQRLAGVPGIGPLVATAIVATLPDPTVFRSGREFAAWLGLVPRQNSTGGKTRLGRTSRQGNAYIRRLLVIGAQSALFCSKATKANPWIQALLAKRPRLVVAVALANKMARIAWALMARQTTYRVAAAA

SEQ ID NO: 423749 - protein, 347 aa, unidentified
MKRIAIDLAKSVYQVAESVQVGRVDRRKRLDAGAFARYVQEQIEPVEWVMEACGTAHHWGRLMQEKGHRVVLLHPRYVRPYRRRNKTDRNDCDAILEAARCQDIRPVPVKSVQQQQVQQLHKLREGWKKTRVQRINLLRGILRESGVEAPNGIKPFLRQACELIERPEVRALRGALQVVLAEINLYEQSMRECEEQLARWHADDEIVRKLDEVSGIGLLTASAFKTAVGKPERFASGRHLSAWLGMTPSEYSSGERRRLGRISCKGNVYVRTLLIHGARAALLAAKRCKARTPERLTQLQSWALQTAERIGHNKAAVALANKLVRICWAVWCHERRFSGNWHSTKPA

SEQ ID NO: 423750 - protein, 340 aa, unidentified
MEYGAIDLHLKASLIRIVDAEGVVLVDRTVATTRAALTQVFAGRAPLRVLVESGTESEWVAQTVEGCGHGVIVADPNYALMKGQRARRIKTDKRDVAALAEACRLGIYRAAHRVSAAQREARRVVRIREQLVRMRTQTINQLRAQLRQEGIRLGPGSAETVVPRLDALALPAALRAGLAPLRAVLASLAPVIAAATADVGARASADPVVRRLLTVPGIGPITAVTYRAALDSWERFRDASAATAFLGLVPREDSSGTRHRKGAITKAGPGPVRALLVQAAWVVWRQRQGRAALHAWVERLAARRGRRIAVVALARRLARILFAVWRDETEYQAAPIVAAA

SEQ ID NO: 423751 - protein, 351 aa, unidentified
MDITSGGVDLAKDVFSVCALDAAGRIAERRDLKRDAFGAWLRRLPAGCLVGMEACGASHYWAREMRALGLEPRIMAAEFVQPYRKSRAMKNDRNDAQAIAEAVRSPTMRFVGVKSVDQQARLSRHRMREGWKEERTALTNRMRGLLGEFGLVFPRSTAALRKGLVEALHDERVPVAVRELVRWAREDIERLDHRIAACDRAIGLACRTDPTARRLQDMMGVGPITADAVIATAGDAREFRNGRQFAAWTGLVPRQFSSGGKARLGGITRRGDAYLRTLLVQGAKSTLKEALRCDPEKATRIQRWAAQLHGRAGYHKTLVAIANKNARTLWALLAKGESYNPEAWKGFAKGN

SEQ ID NO: 423752 - protein, 421 aa, unidentified
METRRRIAGFDCAEDEHRAILLDSAGRIEKKHRVPNERRQIEDLLAELMLVAGSGAELVVVVESKRSHGRVISDVAVKLGCDLRQVNTVALNHFRDLEGQPRKDDDWDAFLAARMVFLEMGGCRKVMITTDAERTLSRLTRTHSRLVEDRKKHIARLRAVLLELSPEMLHSSWKGPKPSSKAMLYLLERWPGFEGLERAQLRSIEKILRQCRYGKKAHDVAALIRKSARGISIADEERQAITLELGLLVQQIRFCNESIDRLHAEIAHRVERHPVGERLLEMPGNGPINTGALISEHAPVARETTESKSATYAGVSPLARKSGKSLNKDKLAQGTNQRVLNALYTGAVAAIQYSAIDRAYYQKKLRDYAGHPKPHVAAFIALARQRHKLIYKLMTTDARYDKEILVASHLDRIEQSRVAAA

SEQ ID NO: 423753 - protein, 343 aa, unidentified
MKLMRIGVDLAKNVFQIHGVDRHEQPVWRQRLPRDRWLQTVLEKTEPGCEVGMESCGGAHHWARQLQARGFRVRLIAPQFVKPYVKSNKNDANDAEAICEAMSRPSMRFVAVKTIEQQDIQATHRIRAGLIEQRTAKANQIRGLIAEYGLVAPKELLMLRRAIPCWLEDADNGLTARFRRLLNGLRDDLRALDERVSELDGEISAIAASEPSAVRLQQLRGVGPMIATALVAAIGDANQFANGRQLAASLGLTPKQHSSGGKDRLLGISKRGDAYLRTLMIHGARSALRTAKSKDDRLSQWVVRLAERSHPNVAAIALANKTARMAWAMLRNGTDYQPDRAAA

SEQ ID NO: 423754 - protein, 341 aa, unidentified
MKKMKRGDMMKKSYVGLDIHEESITGIALNEKGVTEFYDDFPNTKEAIQGFLSGVPSPQITIAIEACELWRGVYYILSELEYQVVLANPAKTRQIAGVKKTDKVDATTLAELLRIGYLPWVHIPGKGILLIRDVTRHRKRLVEDLTRLKCRAKSYLRREGIKFPKTWNKETYEFFRNASLHTGQLVNVMDTINLQIKEVDKEIRVLAKNTPLSGVLRTAPGIGNFGSLMIIGEVSEVTRFPRPKNLVSYAGLCPGIYQSGSRSHPVRNKACNKYLKWIMYECSGKAITMDTKYKTHYWKLFKRKGEHTARRSTARKDIILRFNPTTTFIREKFHTGVCCTI

SEQ ID NO: 423755 - protein, 342 aa, unidentified
MGEVIIIGVDLAKNVFQVHGAASDGSVLFRKKLSRPQFARFMADQPPCLVAMEACASAHHWAREMARHGHEVRLIAPHYVKPFIKRQKNDAADAEAIVEAALRPTMRFVEPKSADQQARAVAFRTREQLVKQRTEAVNALRSHLYEFGHIAPEGIGYVPRLERVVADPDGGIPDLARDICRMLLEQIAHLTDRIKTLKARIAAMSNEAEMPRQLQTMPGVGPITALAVETFAPPMEQFRRGRDFAAWLGLVPRQHSTGGKQKLGKTSKMGQRDIRRLLVIGATAVIRWASRRGAPKGSWLARMLERKPIPVVAVALANKMARGIWAMLTRGESYRGPVLIGA

SEQ ID NO: 423756 - protein, 323 aa, unidentified
MEKITTLGLDLAKSIFQVHGVAEDGHVVVRRALRRSQMLEFFRSLEPCLVGLEACASAHHWANAISQFGHTVRMIPPAYVKAYVKRNKTDAADAEAICEAVTRPTMRFVPIKTPAEQAAGMVLKTRELFVRQRSQTANAMRAHMAELGIIAATGMTSIAKLIVILRDDDDTRLPSAARAALLEMVAQIEMLSARIEALDAKIVTAVKADNTARRLTSIPGVGPIIAATVRATIQDPAAFPIGRDLAAWIGITPKTHSSSGKERLGRISKRGNKQLRTLLIVGATSILKQARRGVTLPSWIVSLMARRPYKVAAVAKRHPAPRK

SEQ ID NO: 423757 - protein, 349 aa, unidentified
MREIAMTYFAGIDVSLRSVNICVVGDDGELVAETKLSSDVQEIIAYLDELKCSIDVVGLEAGTLAQYLTYGLQAAGFDVICMEARQVKAALSAMRNKTDKHDARGIAQLLRSGWYSQVHIKSMESHHTRMLLTSRKAILDKCIDLENEIRGLFKIFGIKLPPKLGHGSFDRTVRAIIEADDKLSHALLPVLDARLVLYKTFRVLDNRTRHLAQGDPICERLMTAPGVGYITALTFKAGVDDPARFKQSRTVAAHFGLTPRRRQSGEMDIEGRISKCGDVEVRRALYVAANSVLTRSSRWSTLKAWGMKLKKNRGHKKAVVAVARKLAVILHRLWIEETQFRWGMEGVRS

SEQ ID NO: 423758 - protein, 402 aa, unidentified
METSKQYLRFCGIDMAKQKHVACIIDQNGQYLLRPKSIRNDATGFQQILNCLKQSGMAKSILTGMEATGHYWYSLHDFLIRQGYTVAVLNPIQTAQQAKQAIRKCKTDKYDAFHIANLLRSGQYKAAVVPGELAMTCRQLTRLRYRIVKQAAMIKQLVNSRLHPVWPEYEGLFSNKFGTTSMKLLQIASTPKELIELDHDDLSELIRKASKGRFGPAHTQKILHSAKNSVGMQRGHYGICTGIKFLLEQIEALEPVRKKMDVEIEKLAAKLPEYLFTLPGATELTIVSLYGEVSPIEAFKKPSQLVAFAGLDPKVFQSGQYDAPRRRISKRGSPYLRRSLWQMAYRSVCNEGDLRDFWRRKHRQNKHHLVAVTAAANKLCHIVWRIMTDRRDYIPKGCNPKS

SEQ ID NO: 423759 - protein, 320 aa, unidentified
MASRESLFIGIDVSKQTLDVAFGADPHAPRETIPSTDEGVQLLVTRLQRLQPTLIVLEATGGLERMVFAQLLQAGVPTARVQPRRVRALAHAEGRQAKTDRLDARLLARFAERVRPPHHQATDEQRASLRDLLVRREQLIQMRTAEINRLTAAAPNLRPGIQKHIDWLDQEIRALEQERDNEAERTDEVRRKRELLESVPGIGAITALNLLLRLPELGTINRKEAAAVVGVAPYANQSGAQRKPRHISGGRRDVRSVLYMATLAATRRRLVRRAFDQRLCQAGKPRKVAIVAAMRKLLTILGAILRQQKPWDPAVHTSAP

SEQ ID NO: 423760 - protein, 409 aa, unidentified
MQVMNPRCAAVDLGKDVLVVAMRLQDADGVRRECRTYGTTGRQLLELSSWLVSHGVTQVVMEATGSYWKSVWHVMEGQFELMLANPAQIRNMPGHKSDVNDASWMADLLAHGLIRGSFVPPAEIGALRELTRTRKQFVREVNRHTQRIQKILDIGNLKITGMIADVLGVSGRAMLRALIAGQTDPEKLADLAHPRLQAKRERLVEALHGRLTVQQRRLLGMHLNLIETIEASIAQLDQDIEKAVDPFRPIVERAKQVPGLSDINVPAMLGEIGVDMTRFKTHRHLISWARLCPRLDESAGAVHSTRTLKGANWIKTLMIQAAWAAIRNKDSYLHAQYLRLRARRGSKKAIVAVAASILTAVYYIIRDGTPYMDLGFRYFDQRDRSRAARRLVGRLQQLGYNVQITEKVA

SEQ ID NO: 423761 - protein, 350 aa, unidentified
MIIVGCDYHPSFQQIVLVDTETGELREERLEHREPAEKFYRELASRGEKVRVGMESSGHARWFERLLGELQIELWIGDATVIRAKRGRKPKTDRQDAQHILKLMLKDDFPKIWVPSWENRDLRQLLWHRHRMVQARTRLMNQLQAVALNEGLRCKKRLWREQGRKQLEAIRLAPWASRRREDLLKLLDGLNPTIAELTEAIDQEVEKSAEARRLMTHPGVGRLTSLAFVLIIGRAERFQCGKQVAAYLGLVPLEDSSGERRRLGHITKQGSSMLRFLLVEAAQVTARRLPEWRSKYVHLTMRRGRKIAKVAMARKLAVRMYWMLRKGWDYGQLTKFGSHAGKPGPGDGVK

SEQ ID NO: 423762 - protein, 370 aa, unidentified
MAQSSTLFIGMDVHKDSIAVAYVAQEHHAEVISLGAIGTRQCDIDQLIRKMQSKSSHLVFVYEAGPCGYWLYRDLTHKGHVCWVVAPSLIPTKPGDRVKTNRRDAIKLARLMRSGDLTPVHVPRVEDEAIRDLCRAREDAIRDLKAAKFRLKAFLLRHDIRYTGRATWGPAHLRWLSEVVCPTPAQQIVFQEYVRAVTEHTERLTRLEQELHTQVQTWRLAPVVNALQALRGVQCTVAVTTVAELGDLTRFDNPRQLMNYLGFTPSEYSTGERRRQGGITKTGNSHARRALVEGAWASRSPAKVSRHLQLRLEKVSKPIQDISWKAQIRLCKRYRQLSARGKNANQVVVAIARELSAFMWAIAQEVALTP

SEQ ID NO: 423763 - protein, 344 aa, unidentified
MIYVGLDISGKSLVLHGMNEKKKTVFTGEIPPNKRALRKAMLGLGMETRLVVFEASNQLKWIAQCLRKIKGVHIHVVHPNELKWITQSNGKTDKADARKLAELARGNLLPPKVHIAEGVIRELRELISARNTAMRKRVSLTNCLRSYALQEGCSVNAGFLLNPNWHELLPSLKISENLKVIFTTIMPAVDALKDAEEEFLLRIKDIEDDRLDLVRTIPGIGPLGSATIVSALDNVERFANKKCVAKYGALAPTIYQSGNVARLGHINFDGRREIRRVLLQSAHIIIRMKSPAAKPLRDFYDRIKARRGKKIATIALCRKLLTIAYGILKTGTPYDPFVLTPNAV

SEQ ID NO: 423764 - protein, 344 aa, unidentified
MSEVTTVGLDIAKHVFHAHGADERGRVVFSKRISRGKLLDFFAAQPSCTVALEACGGAHHWARQLIHLGHQVRLIPPAYVKPFVKRHKNDAVDAEAICEAAQRPSMRFVAVKGEEQQAAGLVFRTRDLLVKQRTQLINAIRGHLSEYGWVGPKGPSHVAMLANLLEEDEMASTLPEAARTMLRVMLDLLSSLDDRVKELDKEIARRAREDEVSRRLMTIPGIGPIGATAITALAPPAETFAKGRDFAAWLGLTPLQKSTGGKQRLGATSKMGERTLRRLLIIGSSAVVLQASKRGAPEGSWLEQMLARKPRMLVTVALANKTARIVWALLIKQEDYKAPVAALA

SEQ ID NO: 423765 - protein, 341 aa, unidentified
MEDTIYDHYIAIDWSIVNMAIARMTAKSNKITVIDVPASVTELQTYLKNLSGKKIMAIEETTTSQWLYTELKDHVDKLIICDPHRNRLLSEGPATDKIDASKLVQLLRAGLMKEVYHSGERFLELRKLVSGYDDLVKAGVRLKNQRYSLLRACGLTGEEKSGKVQLTIASDKLVLESLERQIAVYEKEKQGYENEFKTLAKKHPEIRHQKSLPGIGNIGAVKLVSRIVCPHRFADTGHYLSFSGLVKLVMISGNVVYGRKFSRYCRDVKSVYKTGVMAAIGGNNEINDYYEYLIREKGYADYNARHKACRRLAILSYGVFKSGKKYQPARRKHVNDKSQEN

SEQ ID NO: 423766 - protein, 373 aa, unidentified
MPKYSTAFGMDVHLRSTTVCALDADTGEAVTRRFPGNPWGEIAGWMDGFPGPSLAAYESGYLGFAPQRELAGLGVECAVAAVSKIPRSAADSASKNDRNDAARMAKAILAHDISPVWVPSPEVEGIRDLAGAYDGATARLATARQRLLAFLAKRGFVYGGTTPAGNPRKYWTYDFLRWLDKVRPGDDGGVRTLAALRNEVEAAAEARADLLSEYRAAVDASPIAAEAAALQSIKGCAFALAAAFSAEVGDFTRFRSGRQVTAYFGLAPSQRSSGDSVRLGGISGAGNALVRKLAVEGSWCYAAARHQPKLMPRDTGAPLEIRMHGRKGSERLLRRREEMLARGVPAAKANAATAAELVRWLWALGMMCREGAE

SEQ ID NO: 423767 - protein, 427 aa, unidentified
MNTIRPVAGIDVAKEFSEFCLLAPDNSVLATLTIRHNSPQDIEKAVKLLQKSEKDFGCSPIVIMESTGHYHKILFHALSQREIDVVIVNPIQSDSIKNVDVRKVKNDKWDAKRLALLYRIKGESLRTASVVTTDWAALKDLIRQYYDILDELTAHRLRLRSLVDRVLLGFEQDFFQIYSVTGLAVLKAYPSAKAILHARKATLVTLIARMSRKGQQKAQLKYEALRKTAQTMLELGDPAEHLALIIRSEITLIEDLQAVQETILKAMEVLVKQNRKSDQPAMARSIDLLDSIEGIGFISAATFTAEFGDIASFKSAQSLTAFSGLDASVKQSGNFKGSRNRISKRGSRLIRRALFHVASANIRTNKNNRPNNPFMQAFYQKKCQSKPKMVALVAVMHKLLFVMYAVIRDQKPFELRDPKEHAARLAA

SEQ ID NO: 423768 - protein, 343 aa, unidentified
MSIVILGIDLGKNLCSVVGLDATGAVVLRRSMRRQTVLGFVSKLPACVVAMEACCGAHHLGRLLASQGHTVKLMSPEYVRPYVKAQKNDDRDAEGIAEAASRPTMRFVELKSQEQLDIQTLHRVRSRLVAARKTLLNQLRAILFERGHAFPAGRRKLELAVDAILVDPDYALAPRIRQLVADTRAEWRALDKQIDALNGEFVALAKADEATRRLVTIPGVGVLNATALIAAIGDGAAFRRGRDLGAWLGLVPKQHTTGGRPKLLGISKRGNTYLRMLFIHGARAAMPSLSKSETPLGAWLRGMLARTHRNVALVALANKLARIAWATLRRERNFELAHIAVAG

SEQ ID NO: 423769 - protein, 341 aa, unidentified
MNHEFTKKKYFIGIDISKDTLDVSTLKEDSYGSYQDLRVENNFSGFDKIQSRLTKQKIDLKDCLFCMEHTGTYGLLLFAWLDQMHIDYCVEPGTQIKKSIGMARGKSDQVDARRIADYAYTNRMKLKPFQLPSAIILQIKQLLTYRRQLIKIRTSLKNSLKSHNQYGRVSGLKSISEQITAQIKEYEIKVDHIEKQIIDVISKDEELKKNYKLAKSVRGIGPIITASMIVTTNNFTAFENGRKYACYAGIAPFDNLSGTSIRGKSQVSNLANKRIKTLLTNGANSACVWDPEIKNYYNKKISEGKEHNLIINSIRCKLVNRVFAVIKRQSPYVNIYQQNFN

SEQ ID NO: 423770 - protein, 448 aa, unidentified
MSQASRLSRGDKRRNDRISRFRGIVRRDYAVVAIDLAANKQVVAVTDHDSRIVARRTFHCAPRQLATAIEWSRTHATAAGFAGIVLACEPTGHRWKTVRDLAAAVGVAVVCVQPIAVARARETEDFTHDKSDDKDALLIARLTTQLHIYLPEPAEEQWTRLRHLGVRRAQQLTRRGAARQQVRDMLDSAWPHALDCARRPLDSATWLATMAVSGCDPTAVTSLGDRDHAATQLRERVRTELPHWGARRINNRILTAIIDTAFDIGNQPIEAGALERAHYALGDYQHAATQCDTAETHMLAVLTDLGLDELAGSIPGVSKVSVAAILAETGNLARFDSARAVVKHAGLCPRENSSGAYRGTTTISGRGRPLLRVAAWRAAFAALTHNEVYATRYRHLTNRETSTLKPNQARVAIAAALLRQLFVVITTATPWNPDIAAGRTRPAERTAA

SEQ ID NO: 423771 - protein, 389 aa, unidentified
MYLVGIDISKYKHDCFIMTNDGEVIKSAFSFKNDQEGFKSFIQTLKALDQSEKIRIGLESTSHYAINLKSYLNKNGFHFAEFNPYLVKKFNQARSIRKTKTDKLDAKVIAQMLDYVDYKTYIYNHSMYVLKTLTRFRDRLVKQRSYQLVQLTNVLDITFPEFKPFFGDEFSKTCLFILKSYKSADKIARINKTHGFEKLRKLSRGSFKYPKFLKLIDLAKKTIGVPDEIFEFQISSHIQAIELIEQQLKAVKQKIEIIILDINPPTLSIKGIGPQSAAVIVSEFGNFQNFERAAQLVSFAGVDSSVTQSGTQEHNGHMVKRGSGYLRQTLMNLVNPMLLHNPVFSQYYYKKRSEGKSHRVASTHVVRKLLRVIYHLETNNIFYDQALSR

SEQ ID NO: 423772 - protein, 412 aa, unidentified
MEVVYPCCCGLDVHKKRITACVLWAEAKGKSRKEKKRFGTFTHDLLQLGDWFEQCGVTHVAMESTGVYWKPVWNILAEQFEVLLVNAQHIKAVPGRKTDQKDSEWIADLLQHGLLRGSFVPPQPIRELRDLTRYRVSLVQEINRIANRIQKMLEDANIKLASVATDALGASGRAILGAMLAGEQDAARLAEMSKGLLRNKIPELRLALEGRMTEHHRFLLRQLFEHLRFTESKRSEIEQEIDRRMRPFEDKVTRLCTIPGVDRVTAWGMLAEMGMNMNQFPSSGHLASWACLCPGNFESAGKRLRGKMRKGNVSLRRCLAQAAWAISMMKNNYLSALYRRIAARRGAKRAVMAVAHALLEIAYHMLKRKEDYRELGADHFDRIDVNRIRRSLVSRLERLGHKVTLEPLAQTA

SEQ ID NO: 423773 - protein, 399 aa, unidentified
MTLSAPVINKRSRPMPKPNDLSRSFTAFEQDSTLIAVIEMSLTSWLIAGILPGIERHPLKKLDVDEEGLLQLLHRWRDEAINAGREISRIVLAFEAGRDGFWLARWLRARNIEAYVIHPNSVAVSREHRRAKTDRLDTELLKRAFLGWLRGESDHCSMAAIPTLEEEDARRPNRERENLLGERTRIVNRMKACLVRFGVRNFKPTLRKAPERLKTLRTPEGGPLPPNSFAELRRDMARLRFVMDQIREIEEARLQRLEHSPNEGLHPMVRLLARVIGVGIETADMLVHEILSRNLRDQRAVARYAGLTGSADESGKRRREKGLARAGNARVRRGMIQLAWRFLMFQKDSALVQWYRSVTNETRGARKIMIVALARKLLIALWRLVKTGEVPQGVAFRSA

SEQ ID NO: 423774 - protein, 393 aa, unidentified
MVCVGIDVAKDKHDCFIISSEGEILADVFTIPNNAEGFDTLLQAIRRSTRPEDKIKVGLEATGHYSYNILGFLLDKGLPTYVINPLHTNLYRKSLSLRKTKTDRVDARTIAAMLMSDVDLKSYTDTVYHNEELKSLTRYRFDKVRERAKLKQSVSRLVTILFPELEKLVSSLHSASVYALLSEFPGAKQISSTHMTHLKAVLKNASQGRYGQEMAETIRNAARSSVGSVMPAKSLELQHTILLIRELDAEIEDIETAIQAIVDEMQSPITTIPGMGVRMGAVILAEIGDFSRFDSPDKILAYAGMSPSTYQSGQLSLSGAYSHMEKRGSRYLRYALYNATKHVCHWDPTFAAYLAKKRAEGKHYNVALSHAAKKLVRLIFAMEKSQRPYCAAA

SEQ ID NO: 423775 - protein, 436 aa, unidentified
MEEVTDEPLYRDRVCGIDIGKAGMAATIRVPSDENPARRASETREFATAKRGVLALADWLRAWQVPAVVMEATSEYWKLVFYRLEAEGFECVLADARQVKNLPGRPERDPSDSRWLAACFERGAVRSCFVPDPEFRIIRLHTRYRRDLTDERTREKNRTEKLLESAAIKLSSVVTDLHGVTGRDIMEHLIAGERNPKVLAQLARARARRKITELEHALDGAEFFTPEHAALLTTMLERIDRLTGDITRLSGVIEQLLAPYEEQLQQAESMPGWGRRSAEDAVAETGVDMSKFPTGGHLSSWAGRTPLDSQSGKRTGRARHKKGNKYLAAVTGETAVAAGKTATRDGARYRKLARSRGKGKAQVALGNTQLKVYHKLLSSPGMRYQDLGPDYYERQAAIRRKIAYHVREIEALGLDVTLTRPAPEPGPDEPANTPAA

SEQ ID NO: 423776 - protein, 418 aa, unidentified
MTATHSIAPTLLVAIDISKHRHEVLIGIPGKTRRRRLTVMNTLEDFKRLSAALASYDLPVRIGFEATGNYHRTLAHHLGRAGFDLKLVSSVALARTREALHNSWDKNDPKDAQVILHMLEIGAVQFFHDPMVVGTADIQELSKTHEIVSRSKTELWHRILTHYLPLYFPEAERFHRSARTDWFLAFLEKYPSPHMISAMGRDAFIADAWDVVGRKVSKEQLLSDVYATAAGSVGLPVHPDSDAIRMFRLVLAEGRSLVRQRDEIEARAVELLSDLPDYHLLTTIPGIGPINAMSILAEAGDLRRFRHHRQFLKFCGMDLATVQSGMFRGQSRISKYGNARLRRTLWMAGQTAVLKRTNSFRDKFERYISKDRHNAHLRRKAYTAIAAKMARTVHAVVNHGEPYRPFFEGVSSGGRTSL

SEQ ID NO: 423777 - protein, 369 aa, unidentified
MKTPIYVGLDVHAETIAVAVADEGRRGEVRFHGTVANTADSMLRLTKRLVAAGKVPSFCYEAGPCGYGLYRHLTKLGFECAVVAPAMIPRKAGDRVKTDRRDAEMLARLWRAGELTPIWTPDEEQEAMRDLIRARKQAMEALKVAKQQLLSFLLRHGLRYDAGSYWTKRHRRWIAELRRFRYLHQQIAFEELKRTIAQTEDRIATLDRTIEAAIGDWRFAPVVDALRALRGVNTTIAATLVAEIGDIARFDNPRQLMAWLGLVPSEHTSANNTRRGRLTRTGNALARTMLVEASWSYRHPAKEGHPYLKRSEHLPGHIRDIGWKAQVRLCRRFRDLARKGKPQPRILAAIARELAGFVWDIARRTPVPA

SEQ ID NO: 423778 - protein, 422 aa, unidentified
MLEEDHQVEEIVARVAACDIGKAELVCCVRIPHPTRPGRRLQEVAGYSTMTRSLLVMADRLAELGVSRVVMEATSDYWKPVFYLLEARGLEPWLVNAGDVKHLPGRPKTDRLDAVWLCKVAERQMIRPSFVPPPEIRRLRDLTRYRSDLVEVRTAEKQRVEKLLEDAQIKLSVVASDIFGVSGRAMLGALIDGQRDPRVLAGLARGRLRGKLSELEEAFTGYFTDHHAALLTKMLARIDGLSADIADLEAMIEELIAPFADTVARLDEIPGLARTAACTVLAEVGRDMSRFPTPAQLASWAKFSPGVQESAGKKLGRGSTGHGNRYLARILGEAAVAAGKTDTFLGERYRRIARRRGRKKAIVAVGRSMLIIIWHLLAQPDARYTDLGVDFFDRRTDPERRKRAHIHQLEALGYKVTLDPVA

SEQ ID NO: 423779 - protein, 344 aa, unidentified
MSKFNLISIDLAKNVFQVGKFFHQKLQSNKAVGRKELLTILTTSPRCKVVMESCGGAHYWARKARSVGHEVVILDPRFVKAFRVGQKTDANDVIAIAAASFSPNVRPCKSLTQAQQSLQSIERMRALAEKQKRQLANQIRGLLLEFGIVIKQSECAFRQAIPEVLEDSDNGLTAGLRQCLAQCYELFKAQSTLKETLNELLTGLVKQDEQCERLLALEGVGPITAVGLLISLSDTTHFTSGRNAAANVGVTPRQHSSGGKVRIGHIAKYRGEITLRSHLFLGARAVISQLKHREPKTKKEQWLKALVERRGVKCAAIALANKTVRTAYAMLKKGTSYEPSLLAN

SEQ ID NO: 423780 - protein, 413 aa, unidentified
MLKIVYPICCGMDVHKSFVYACIASTNSHGVTSYKSKRFSTFTKDLRFCAAWLAENNCKDVCMESTGKYWIPIYNVLESSCNIVLAHPKYVKAIKGKKTDKKDAKWIADIFKHDLISGSFIPPADIRQLRDLVRYRWKLTNFNIGEKNRVQNCLTVSNIKLDDVFSDVFGKASTNIVNRLLENPSEPITDVSGFRTRGMKATDAEVLAAVDGAICTEQAEKLRIIRSHMDNLELCRLNVESVILSVAEKYLPQINLISTVPGIQTFAAIGVLSEIGVDMSVFPTSKHLCSWAGLTPQNNESAGKKKTTRISRAGAYIKPLLVQCALCAIRVKSNPEIRSRYLSIKKRRGHKKAIIAIARMLLTAIYNILKKNEPYNPELYRRANTPPQHRTVSVEEAIFILQRQGYLVTSATP

SEQ ID NO: 423781 - protein, 343 aa, unidentified
MNKLNTIGVDLAKNIIQISLVSAGGKELQNKALTRTKFAEFLGQQKAALVAFEACATAHYWARVAQRHGHEVKIIPAKAVAPFRQGHKTDENDALAVAEGANRPNVKVAPLKSIEQQGLQSIQRSRELLVGDRTALSNHIRGLLMEFGIVIPPGFSALHSRLPEVLEEGDNELPDLYRPTLSLLYGRLCELRDDVKRLTMEIETLVKHNSSCQRLMALEGVGPIGSVLLYATLGTGEAFVNGRQFSAYLGLTPKQFSSGGKVSFVGISKRVANKRLRAVLIQGARAYVHKLKVPKSAKDRWLLALIERGGYGKAAVALANKNVRTAWALLTQGTEYQKYSAAD

SEQ ID NO: 423782 - protein, 302 aa, unidentified
MDRPPTSQDSIKSAALAAARVYEVRLERAAHTNSPSHSHGRRFRIHCIGVDVSKQELVTYDGKTERIFPNDRGLPEFRRFVKRVENVFIVFEPTSTYSRRLETACRMQKILCCQLNPRVVPHLRQVGRGRSKTDSTDAELLYRYGIERGHSEATELSHDSLSESIQARLACYRVAQKARVAYQGLHEALANDPATPRTLLAELKTEISALKTKEKLYLVAAQRIVEEDEQMGRRLVALLSIPGVGPITALTLLAMFRKYPDANRSQVVALVGFDPIQFQSGTSVHGKARISKRGNRELRKRL

SEQ ID NO: 423783 - protein, 370 aa, unidentified
MDSITYVGIDVHKATIAVAVADGGRLGEVRQLGVFANRAEVVRKMVERLERPGRQLRFCYEAGPCGYGLHRFLTGLGHACTVVAPSLVPIKAGDRIKTDRRDAVILARLHRAGELTEVWVPDAAHEAMRDLVRARATAMKVLSKARQHLGGFLLRHGKIYSGVRTWTQAYRRWLTTVRFDHPAQQIVLQDYIDAVTDAERRADRLTLQITEHLPGWSMAPVATAIQAMRGVALINAVTIVAEVGDFSRFGNPRQLMAYLGLVPSEHSSGGAVRRGGITKAGNLHARRALIEGAWTYRMQARVSRKLYDRLEALPQNVRDIAWKAQVRLCNRWRRLAASGKPKVVVTTAIAREMAGFIWAIARQVQPQAVG

SEQ ID NO: 423784 - protein, 326 aa, unidentified
MQGKEAPEQDAKAKCSVGIDVSKEKLDVCVLPSGEYLTVANSREGIRRLKRWLAHFDLALTVVEATGKWHRQLWRSLHSSAIPVAMVDPFKVRMFAKATGILAKTDRLDAAVLARFAAVMTPAIRPPPPQALEELAELVTARDAAIAEQTSLKNQLSVAKVAMLQRQLGKRIDRIAKDIATLEREILARIMANQSLARRYQILTSIPSIGPAVAATLIARLAELGALTDKQVAMLAGLAPIADQSGSHDGRRVVFGGRAGVRRMLYLAAVAAIRWNPQMSVFYRRLRQAGKPAKTAIVAVARKLVILANKLIADNRTWSPNVPTPA

SEQ ID NO: 423785 - protein, 307 aa, unidentified
MTAAGIDVGKASLDLALDGHPGVARFTNDRTGIVRLIKRLRAVATTRIVVEATGGYEEPLLEACCDVGLWIARVNPRQARAFASATGELAKTDDIDARMLALMARLFADRLRPYVAPPPWQRQLRDWLRRRGQVIVALQAHKQQAAMAPPPVRKLAARTVVALARELAAIEKTVKTMINEHGTPALRSSKGLGPVFQATVLALLPELGHLDRRQIAKLTGVAPMNRDSGQGQGKRRIRGGRAAVRVALYMATLSAVRWDPMMKAHYQQLRARGKLGKVALVACMRKLLGIINARRRDELRSEGLALA

SEQ ID NO: 423786 - protein, 340 aa, unidentified
MGWTVAIGIDTHRDSHVAVALDRLGGGRGSLAVSADAKGYLLLWRWAQELGEPAFAIEGTGSYGAGLARFLVSAGAEVYECERPRRAERRHGKSDLIDATLAAGRLLQDSSLPRLRGGGAREDLRLLLLERRGAVRARTAALNQLQAVVVTAPEALRSRLRGLSGQQLARVACRLRTAEEGAVIAGVLRRLGRRVRELGRELDELDSELETIVIRLVPELLEESGVGPVCAAQLVVSSGDPTRMASEASFAALAGTSPVQASSGLKQRHRLNRGGDRQLNRALHVIALNRVRWHAQTAAYNQKLIASGKSPREARRCVKRMLARYFHRRLQMIPALDLTP

SEQ ID NO: 423787 - protein, 467 aa, unidentified
MSEVRLGIDVACRADHRASLADERGEFIWSSWKFRTTTTDLERLWAKIPDGASVTVILEPTRNAWVPLSAWLQARGATVILVPPEQSADLRDYYNKHTKTDRLDSRVLARLPMLHPEGLRGIDNLGPAQSLRRAVRHRFSLVKRRSAASLRLDALVELLGPGWADCLGSATASKTALVILEKYADPRALKRLGRGRLAALLIRSSAGLWREDKADELLAMATETLELWACGGIDFTDLAHDIASEVRVLRQLDDEITAADKRIAALYDEADPKGIVRSAPGLGPVLSAAILGNAGDFNRFANLAGVRSFTGFVPKIDQSGLVNGRKGITKAGDAGLRQALYLATDHARHIDPTLAQRYHRLVMVEGKHHNSALCALSAVLITRIAACWRKGEHYQLRDEYGEAITEAEGKVACADRFKIDPKVRAARRRNTPAKVLKNRAGRGRKESAQKVAPAFDPPDEKASENVA

SEQ ID NO: 423788 - protein, 340 aa, unidentified
MTEIKRIAIDTSKSVFTLHGVDDGGRPVLRRNLRRGELLRYFEKLPPVEVALEACGGSHHWGRALAALGHRVRLIPPQYVKPFVKRGKNDRNDAEAIAVAAAQPSIGSVPIKSVEQQAAAMLLSVRELLVRQRTQLVNAVRGHAAEMGAVAPLGEKGLKELQAEIAAADEAAVPAAAKQAIALLSREAERIEIRLRAIEAELLQQHKANPVSRRLAAIPGIGPIGALNLALRVDQTQFASARHFAAWLGLVPRECSTAGRQRLGGISRAGDERLRQLLVLGATAVIQHAKPGRPATSQWLLNLLSHKPRKLAAVALANKMARIVWAMMTSGKTYRPAPAA

SEQ ID NO: 423789 - protein, 345 aa, unidentified
MLIIGCDFHPGVQQVAIFDNQTGAIEERRLKHPEEAREFYASLKEPALVGIEACGPTLWFERLLAELGHELWIGDAAQIRAAVVRQQKTDRRDAEHLMRLLVEQRFPKLWVPSLEERDLRQLLVHRHQRVRMRTQVKNQLQALALNQGLQLKRTLWTRKGRERLERLALMPFTAQRRQELLEQLDGLDRQIAQLTKTVQAEAEKCSAAKLLMTHPGVGANTALGFVLTIGPVQRFENAKRVSSYLGLIPRERSSGGKQRLGHISKQGSSLLRFLLVEAAQSAVKGDAEFKRVYLRLVLRRGRGQAKVAIARRLATRLYWMLRTNKTYAQLKAGGAGEPESSCGAD

SEQ ID NO: 423790 - protein, 357 aa, unidentified
MLSSNVKYIGLDVHKEAIAIAVVNGAGKLVMESIVETKSSTVLDFLHGLRGELHVTLEEGTWAAWLYDVLKPHVREIVVCNPRRNALLKEGSKSDKIDARKLAELLRAGLLRAVYHGENGLQTLRELARCYLTISKDLKRVKNRLKALYHSWGICCAGKQVYAVRHREQWLSKIAQVGVHRRAELFYQQLDGLLVLRHAVYGELLAESRKHQAVKILRQVPSIGPLRSALLLALMQTPYRFRSKRQLWTYSGLAVVTHDSAQHRYVGGQLQRSKKPQQIRGLNQNHNHAMKEIFKSAALNAGRCAGPLQDFYARLLAKGMKPDMARLTLARKIAAITLALWKKGGSFDAEHLKSQAA

SEQ ID NO: 423791 - protein, 351 aa, unidentified
MKQPPQQEPSTIKIITIGIDLAKSVFQIHGVDAGGAVAVRKKLRRAEVLKFFEGLPPCLVGMEACATAHFWAREIGALGHDVRLMPPSYVKAYVRRQKNDAADAEAICEAVTRPTMRFVPVKSAERQGVLVLHRTRDLLVRQRTMLINAIRGHCAEFGMIAPQGAYRASDLIEQVRDAEGSVLPDLARSALLMLAEQLDALAVQIHALERRLLVWHRQDEASQRLATIPGVGIITATALAASVTDPHLFRSGREFAAFLGLVPRQNASGGKDRLGRISKMGDGYLRKLLVVGATSVIRRAGDNTSATGAWLRTLMERKPARVVTIAMANKTARIAWAVLSRREDYRASAIT

SEQ ID NO: 423792 - protein, 343 aa, unidentified
MQVVTTVGLDIAKSVFQVHGVDGAGQVVIRRQLKRRYVLAFFQKLPPCLVGIEACASSHHWSRELKALGHTVKLMPPAYVKPYVKRQKNDATDAEAICEAVTRANMRFVATKTPEQQSGLTLHRTRHLFIRQQTAVINVIRAHLTEFGIVAPVGRKGVEELLNVVTDSSDKRVPVVARMCLAALGAQLRRLKEQILEFDRMIMAWHRSHEASKRLDAIPGVGPVLATALVASIADPKAFRSGRNFSAWIGLVPKQHSSGGRDRLGNISKQGDRYLRSLFMAGALAVIRYARIHGTKHRPWLTALLARRPTKIAAIALANKIARTVWAMMARGERYKEPVALAA

SEQ ID NO: 423793 - protein, 433 aa, unidentified
MKVKYEDRLKQKLLAITPDTLVVGVDIAKNYQWARFVDFRGIEHDHALKFKNRKGGFEIILSRIREICKKENFAKAVVGMEPTGHYWKAFANWLEKQEGITVVLVNPYATKQAKELDDNSPTKSDKKDALTIAKLVKDGRYFELYLPHDVYAELRGLSATRIGLNKRKSALKNTIMAVLDEFFPEYEEVFKCPLTGKASRRILKTCPFPKFIIELGEEGVTAEIKKAVKKTVVRKKAGQLVDAAKESIGVDYGEEAARLKLRLLLEELELLEKQTKELEEQMEAALQKTDYAEFLLSIKGIGIVTLAACLGELGDPTRFDNPRQMSRMAGYNLVEDSSGKNKSGTKISKRGRKNLRSVLYQMALTMAATNDEMKQLYHYLKTREKSPLRKMQALIVVSKKILTLIYTLAKKKESYDPEKVFGPVRREQLKAAA

SEQ ID NO: 423794 - protein, 446 aa, unidentified
MELEIINPHCAGIDVGSRSHFVAVGQALEDVKEFGVYADNLKAICLHLKQHGITSVAMESTGSYWQNLYVELVKHGFEVTLCNGKFTKNIRGKKTNVKDARWIQKLHAIGLLTGSFLPDETTETLRTYCRQRSNWVDLSAEASNKMQKYLKLLNFRLDVVVRDVCGLTGLSIIADICKGNLDPEKLSELRHGNCKRSREEIAKALKGNNRADYLFGLNQEYESYLFYQKKIEECDKEIEKYLKRQINTDPEKKDLRTDDKPHKRINKNAIKGIDLNQASFQYFGGVDLMKIEGVNHSTIMSIMSEVGPAGFEKFPTAKHFTSWLRLAPNNKISGGKLLSSKTPKGSNRLKIALRNAANAIGNLNGTHLSDFFRRIAFKKGRTVAVSATARKLAVIIWNMVVKKIQYQPPKEYLFLDQRRKLKLVARIKKQITKFKLTNEELGIVPT

SEQ ID NO: 423795 - protein, 352 aa, unidentified
MTQSAAFVIGGVDTHGRSHHAAVVDEAGRILGSAEFVASTAGYRRLLGWMRCYGDPARIGVEGTGTYGAGLCRYLQAEGVQVVEVDRPDRRMRRRQGKSDAIDAEAAARSVLAGTATAVPKNRDGIVESIRALRTARSGAVKARSAAGGARHGMIVAGPAELRSALEGLPRSALVRTCAALRPDRQRLAGPTQATKVALRSLARRIVLLDAEVDELDVALSQLVHRAAPRTIALRAIGVDHAGQLLVTAGEQPERLRSEGAFAHLCGVAPIPASSGRTQRHRLHRGGDRAANRALHLAVVVRMRCCPRTRRYVERRTAEGLSKPEIMRCLKRYLAREVFRTLTADLLELRGA

SEQ ID NO: 423796 - protein, 355 aa, unidentified
MTIMMLGIDLGKNSCSVAGLDAAGKVVLLRRMQPKTIVSFAAKLPPCVIAMEACCGAHHLGRLLANLGHEVRLMSPEYVRPYVKANKNDERDAEAIAEAATRPTMRFVELKSQEQLDVQSLHRVRSRLVSSRTNLTNQLRAILLERGMTIAQGRRKLEHVVDMRLADPNFMANTRIRRLVAEMREEWSDLDRRIEALDREFIELARDNEAAHRLVSIPGIGVLNATALVAAIGDGTTFARARDLGAWLGLVPRQHTTGGKPRLLGISKRGNKYLRTLLIHGARAALPSLAQSQTRLGAWLRSLLARRHRNTVVVALANKLARIAWAALRYGVTFEVSSQQRLKEIGRRRYEGSAA

SEQ ID NO: 423797 - protein, 360 aa, unidentified
MSIERTFVGLDVHAWSVTGHALDGMTGEFWRRKLTPDPADVFSWLQGLPQPVKVAYEAGPTGYGLARFLHGRGVSCLVAAPSKLHRPHGDRVKTDARDAELLARLLKLDEIVEVTVPSVEQEAARDLVRAREDVRGDLMRARHRLSKLLLRQGIVYTGGKPWTGVHDTWLRSQRFDQSGRQLAFDAAYETMILTSGRRDRLDAAITEMAGQSEYTEVVRRLGCLRGISTLTGFGLAVEIGDWHRFTGASIGAFVGLVPTEHSSGGSRSQGSITKTGNGHARRLLVEAAWHHAKPYRVPGKTMRDRWEQAPAAARLRGHDGNRRLHQRWQTFNARKKKPVIANVAVARELAGWAWSLAVLE

SEQ ID NO: 423798 - protein, 416 aa, unidentified
MNAVGIDVSSRKSTVAVLRPLGEVVCLPFDVTHDIAGLASLVEKLKALDGETRVVMEHTGRYYEAVEKALHEAGLFVCAVNPLLIKEYGANSLRRVKTDKADAVKIARYALDNWADLRDFTPMDAIRYDLKTLNRQFQLASKQRTASANNLIALLEQSFPGIRKCFDSPVRSDGTQKWVDFAHSFWHVDCVRKQPFPAFCERYRKWCKRHAYLFKLSNAEEVYALAKRAVVLTPKSKVVKVLVQEAANQLISISRSVEVYRAEMDRLAAMLPEYPVVMAMYGVGKSYGPQLMAEIGDVRRFERKQALVAFAGIDPMPNQSGDKNVRSNKSSKRGSPYLRKTLFNVIRTYLQCAPQDEPVFQFLNRKRAEGKPFYVYMLAAANKFLRRYYAKLRDYFASLDTLQPAAPIPTILKAAL

SEQ ID NO: 423799 - protein, 395 aa, unidentified
MYSFLVGADVSKDFFSASGLSAEGKEWFSGTYEMNSHGFSEFMKVLSSQGEKLDQMLVAMESTGCYHINLFSFLSSQGIRTVVVNPLLIANFAKLSLRKTKTDKKDALTIARFLLDHHEEISQFSISQDHQDLRDLSRERESLSHLISATKVEIKRVLRTTFPELESIGNLFSGVMLGFLQQYPSARLVRGAKRKAIAKALMGPRVGGKLTFTAEDIVKAAQSSVAVVSPAKEIILQGKIATLLHLQERLEELTKLLTDLCKATRVEDLEILRSIKGVGPNTAVPFLAEAGEVKNFTSSKKLIAFAGLDPSIHQSGKFLGTSKLSKRGNRHLRRAVYLMTTSVVSQNGFFKAYFLRRKEEGLPPQKALFAVAHKLIRVIFAMLSNRTYFKPKEAI

SEQ ID NO: 423800 - protein, 348 aa, unidentified
MTLTIVETRAVTGGVDTHADTHVAAALDSIGGMLGVREFPATPVGYAGLLGWLGGFGTVHLVGVEGTGSYGAGLARHLGAAGVRVVEVDRCDRQDRRRQGKSDPLDAVSAARAALSGRALGVPKGRDGAVEAIRALMVAKRSARGERTQTINQARALIVTGPDELRARFARHSPAALVAELAALRPRAGDVPGYATQIALCELARRVEFFDAQLQRLDALIVPLVTTHAPGLLAVYGVGPDTAAMLLVAAGDEPARLRSEAAWAHLCAVAPIPASSGKVTRRRFNPGGDRQANHALWRIVITRMSAHPPTRAYVARRTAEGLSKKEIIRCLKRYIAREVYPHLRPAGG

SEQ ID NO: 423801 - protein, 370 aa, unidentified
MKETITSYVGLDVHKDSIAIALAEAGRSAPRFIGTAPPEPAVLCKALTRCTKRSNTLVVYEAGPCGYGWARYLNSQGWHCEVISPAHITRKASEKLHKTDRLDALLLARESRAGNLVRVVVPDERDEAMRDLARAREDASAARLRARLQLKAMLLRHGRAYQGKTSWNAAHERHLAGIKFDLPAQQIAFDEYRQAAKDAHERLERLTRALGEQCEHWRMKGVVKALMCLRGLDLVAATIFIAEIGDLSRFAHPKALMKYLGLTPSEHSSGNTRRQGPITKAGNKQARRILVEAAWTYRFNPRLSRPIEVRQQGQPKAIRDIAWRAQLRLAYRFRKLNAGRKMTQNKCCVAVARELAGFIWDIARQVQIPA

SEQ ID NO: 423802 - protein, 438 aa, unidentified
MSNKVIFNLDELFISVGIDVGADFSWMSIALPNQQFVGKPYKILHNSIDSLTTAVSKIKEAEELYSLESRIFLESTGIYHYPLFCYLRDKGFNCSVINPIITKNSTNINIRKVHNDRFDSKKAALVGLKPDLKVSLMPSDLALNCRNLCREYYDLMDNRSAYVNKLQGELRMAFPQYLGIFSKVTINTSLTLLETYTSPSAFLKADKQEIIDIIKSTARFGLTYAQNKYNAIIQAATDANQFGYIIDSNIKRIRLYIRFIRKYDEEINSILESLHELVDANEDSDFVKQIHLIETFKGAGFLSAVSIMGEIGDFSAFSKPKQLFAYFGLDPAVKQSGKFEGTKVQMSKRGSAIARRVIHTLTLQSISISRNREAKNPVLREYYLKKCDSKPKLVAMGAVSHKVCNMIFAILRDNKPFKIIAPQEHIKQYNSAKCDIAA

SEQ ID NO: 423803 - protein, 368 aa, unidentified
MQELITGFVGLDAHAESTAIAVAEIGRTASRFVGTVGPRIAELTKALGKLGKPQGLSVVYEAGPCGYALARVLRSLGYRCEVVAPSKIPRRPGERIKTDRRDALNLAGLARAGELVSVAIPDERDEAIRDLSRARVDAVRARLKARQQLKALMLRHGRRYSGKTSWSAAHERYLATVSFAHRAQDIAFTEYRQAVTEGEARVQRLSQSLTQEVEHWRMHSLVSAVMTLRGLDLVAATTVVAELGDLRRFAHPRELMGYLGLVPSEHTTGSKRRLGAITKTGNGHVRRVLVEAAWNYRFPARISRPLQLRQERQPPEIRAIAWRAQLRLNHRYRRLKARGLQHNKICVALARELAAFVWDIGRHVTPSP

SEQ ID NO: 423804 - protein, 354 aa, unidentified
MTRILAIDLGKFKSVSCLLDTTTNATEFWTLSTERHYLQTVLKNYTPDLVVIESCGLAGWVHDVCTAEGYKVLVCNPNQEAWKWKNVKRKTDRDDALKLAKLAALGQLVPVYVPSQQQREYRRLVKYRKVLVGRVNRVQNNIRAIFAQRGIDMVRGQKAWALDRHDQIADHRKPLAECALDELWRGELDLELQQLASLREHQHEVHKKLKSLAAADERVQLLQTIPGVGRKTAEVVVAYIDDPHRFQNARQVSSYAGLVTRRYQSGEMDRQGRINKRGPRQLRSALVEAAWLMLRYNPWAKSVYDRLTSGQKTRKKKAIVAVARKLLVRCWVMLLRKEPWKETLTTNTVAANAA

SEQ ID NO: 423805 - protein, 343 aa, unidentified
MEQLRVIGVDLAKSVIQIHGSDSRGKCLIRKKLRRNQLLPFMAKLPRCLVGMEACGGSHYWAREIKQLGHDVKLIPPQFVKPYVKTNKTDVADAEAICEAVDRPTMRFVPIKGPEQQAVLLLHREREGLIKERTAVINRIRSSFSEFGVAIPAGPKRLRQWLSDSYGDVENDLPSTLNRLMLRMIDRLNYIESEICDLDKEINDQNKSDERCKRLIEVPGVGRLAASAIVASVGDAKEFRSGREFAAWLGLVPRQYSSGGKQNLQGISKRGDAYIRKMLIHGARAVIRHMNRNNAPVDWLEDLMRRRHHNVVVVALANKLARTIWALLSKEQSYKRYEDTVVA

SEQ ID NO: 423806 - protein, 339 aa, unidentified
MELYAGLDLHSRNTYIGIMDKAFNRVFKKRVPNHLEHILQTLAPFRNQIKGFVVESTFNWYWLVDGLMDAGYSSAHLAKPSAIKQYEGLKYSDDQHDAFFLAQLLILGILPQGYIYPKKDRPVRDLARKRMFLVQHKTAHILSLQSLIARCCAMKVRANDMRHLTVKELEMWLEEEYLVLSAQANLDSINFLKQKIQGLEKAIIQKVKLNKEFKYLLTVPGIGNILAMTIMLEVGDINRFSKVGNFTSYCRCAPSQRLSDGKSKGHGNRKNGNRYLSWAFTEAVHLGRRHNERFRRYYNRKVAQANTSLATKALGNKLARICYYIMRDRVPFREELFCH

SEQ ID NO: 423807 - protein, 361 aa, unidentified
MIMSFTKPIEHANLITKEGNLMNPLYVGIDVSIVHFMLPNGDKHSNFSVANSHDGSTQLVKRICSALTSESLDTVSIGLEATSVYGDNLVYFLREDASLASFNRKIHVLNPKQVNKFKESYNDLPKNDWIDSFVIADCLRFGRINKEVYIGDYHSKALQNLTRARYFAVCNLTKEEQRFMNVLFKKYSTMTQEKVFSDTFSTTALAVYDEFESAEALANMDLQELTAFIIKKGKNRFPDPDAVAKAIQKAARSSYRLPKTVNDSVNQVLSISITSMKALESQIKEFDKAIATQMELLPNVLISIPGIGPVYSAGIMAEIGDINRFNNQAALAKYAGLAWTQHQSGGFEAQNTRLIHSGNRF

SEQ ID NO: 423808 - protein, 350 aa, unidentified
MQPWPLGLDIAKRAVDAELLLPSGKRKQKRFPNTPEGHRDLLAWCRKQGAPLVHACMEATGTYGLALAQFLHDQEQRVSVLNPKKLVHAAKSRLSRGKTDRLDAGVAADYCRKEQPPLWNPPAPELVELQALLRRLDSLEQMRQMERNRLSAGEHPKGVQQSLESHLRYLDEALEATREAIQAQLEHTPQLKKQRDLLVSIPGIGALTAAWLLAELGEVGQFKNPRQVAAFAGLSPKPHQSGEMRGRERLCKIGSARLRKALYFPAITALQWNPILRAFGERLLSRGKSKMLVIGAAMRKLLHLAYGVLKSGKKFDPHHATTVTQNPRQREGAGGQTPSVYLAGGALARS

SEQ ID NO: 423809 - protein, 392 aa, unidentified
MLFVGIDIAKRNHEASVIAQDGHVVRKTMRFANSQAGYNKFMDMVRGLSEPVVFGMEATGHYWLTLYAHLRNDGFTVHVINPIQSDALRGMYIRKTKTDSVDSVIIADVIRFGRYCETSVEPGDLHAMRELCRQRFYVIDMASDLKRKVIALLDQVFPEYEKLFSDSFGVSSMELLSQYTTPEEMLSVSSQQLAEVLEKASRGSLGAEKAAEIQDAARNSFGIVLASSSFSLIIRQYIEQIRSLEASVDVFDAEIARLLSGFDTQLTTITGIGPTLAAVILSEIGGDIRRFSSPAKLAAYAGVDPTVKQSGDFSGTRMKMSKRGSPYLRRAIWLASTVAAFKDPAIHALYERKRAEGKDHMTVIGHICRKMISIIFAVLRDNTPYVPAVIPD

SEQ ID NO: 423810 - protein, 316 aa, unidentified
MICGVDVSSKSLDARIGRDGAAACFTNNPKGIAELAEFCQCHKVHLVAMEATGGYEKKPFALLWAAGIQVAVVNPRAVRNFAHGMGLLEKTDRIDAGVIAWYAQTKGCVAISPASAEQQQLKAMVTRLRQLTELRAAQRNQRLLVTDKMVLKSFRKLLDLVQKQIRDLEVAIAGLIDADAVWHKLDQSFRSIKGVADRTVARLMAEMPEIGTLSNKRISKLAGLAPLACDSGQWKGKRTVRGGRRTIREILFVVAAGVSRYNPDFGAFRERLAAAGKAKKVIRIALAHKLLVRLNAKARDVLQQLRETPPAAVLLS

SEQ ID NO: 423811 - protein, 358 aa, unidentified
MSKHSENQEVKVMGIDLAKRQFHVHGVDVGGRKVLGKKFSRQKLKEYLVTLLPCTVAMEACAGAHYWGRLLRSYGHEVRLIAPQFVKPFVKSNKNDAADAEAICEAAQRPTMRFVAVKEVEQQDIQSIHRMRSLAVERRTAQINQIRGLVFEYGIEIPTGRFNLLKRLPEILEDAENGLTEFFRKELFGLYEELRHLDARIKHYDEKLKQIAQADERLQRLQTIPGIGPVIATALLAAIGDIQAFKNGRELAAWLGLVPRQHSTGGKATLLGISKRGDVYLRQLIIHGARAVLRWADRKTDRTSRWAAVLTVRRHKNIAIVAMANKMVRVAFALLKKGENYRVQPLVAHNTPLGPIEA

SEQ ID NO: 423812 - protein, 533 aa, unidentified
MQQRLQQLEQQHPHAHFDVRIDAAGQYAANLERFLRTLDLPMTLSIGEPKRNKDYQKAHFPKRTTDDTESQAMARFAVVEQPAATPPLPPPMVLLREVAGRLQAQVKQTTQAINRLHNLLARVFPELATIADDLAAHWVLQLLEQYPTAERIGQARLSSIEKIPYLPSDKAPVVHQAARQSVGSLRGHVAETLVRDLVAQVRHCVHAQQKMRQLLSAAFADLPASPHLQVVTIPGIGDATAAILVAMIIDIDRFPTPDHLVGYFGVFPEENSSGVDRYGNPLPLGTMRMSQKGNDLVRSYLWNAARAAICHNPAIRALYRRLKAKGERGDVAIGHCMRKLLHLVFAVWKTNRPFDEHHFAWEQTAQTSMPTPTAPAASAATAASANDTAAGHKREIPAKQVVTTATSSVAPTAKPVNPPPPPTRSARPGVDYAFLRQQITLEQVLRHLGLFDQLHGRGQQRRGPCPVHARATDRKRTFSAHLGKNVFQCFHADCAAHGNVLDLWAAIHRLPLYDAALHLAQTFHLQRNREENP

SEQ ID NO: 423813 - protein, 354 aa, unidentified
MPEKLNAAVAVIGVDIGKNSFHVVGLDQRGAIVLRQKWSRGQVEARFANMPACLVGMEACVGAHHLSRRLKALGHDARLMPAKYVRPYSKGQKNDFRDAEAIAEAVQRPTMKFVATKTADQLDLQALHRVRERLVSQRTGIINQIRAFLLERGIAVRQGQRFLRAELPRILATPPDVLSPRMVHVIEDLAGDWRRLDERIEGLSAEIKILACEDSGCERLMSVPGIGPIISSAMVAAIGTGDAFSKGRDFAAWLGLVPRQISTGDRTILGKISKRGNRYLRVLFVQAAWVVLIKPKIWERHGLKPWIEAAKKRLHHNVLAIALANKLARIAWSVLARGRNFEVRKIDEVTAQTA

SEQ ID NO: 423814 - protein, 457 aa, unidentified
MTKHRKTTKSRSFKLTKLPKQLQHINLNAAGIDIGSERHLVAVPEGRDEISVREFGTFTTDLEALAAWLKKCGVTTVAMESTGVYWIPLFELLERRGLEVKLVDARHVKNVSGRKSDVLDCQWIQQLHTYGLLAGAFRPPDEVCVLRSYLRQREMLTQAASMHIQHMQKALQQMNLLLHNVVSDITGATGMKIIKAILAGEREARVLARHRHELCKHSSAMIAKSLVGNYREEHLFALRQAVDLYETYQAKIADCDEAIIKQLESRPDVSDDDPPPADKPLQARHRVRNGVDVRELLFKKSGVDLFTIPGLAADTLLTLASEVGFDLSPWKTEKHFASWLGICPGTKRSGGKVLDAKTKRNPNRAAQAFRMAASSLHHSRTALGAFYRRIKARSSGQQAVTATAHKIARIYYAMLTKGTSYVELGQQAYEQRYKQRRLDHLKMQAKSFGFQLVPCAS

SEQ ID NO: 423815 - protein, 343 aa, unidentified
MMAIAVLGVDLGKNSCSVAALDATGRVVLRRRLNRDGVVRLAAGSPGCLVAMEACCGAHHLGRRLRDAGHEVRLMSPEYVQPYVKAQKNDERDAEAIAEAATRPTMRFVELKSEAQLDMQSLHRARDRLVGERTALINQLRAILLERGIIVPQGRRKLEVYLETLLSEERVSLSPRIRLLVEDQRAEWRELDRRIEAFDEEFAAAARSDEAARLLTTIPGIGPLNATALVAAIGRAATFGRGRDLAAWLGLVPRQMTTGGKPKLLGISKRGNVYLRKMLIHGARAALPTLLKGDTLLGRWLRSLSARAHVNTVVVALAAKLARIICAVLRSGQRFEMKVAAMS

SEQ ID NO: 423816 - protein, 338 aa, unidentified
MKLYGGIDLHSNNCVVVLIDEDAREVLRKRIDNDISKMIALLTSYQGDIAGLVVESTYNWYWLVDGLMEFGFKVHLANTAAIQQYSGVKYTDDNSDARWLADMLRLNILPEGYIYPKDQRTARDLMRKRMQLVQQSTLNLQSIQGLYARHLNKKISSTKVKQLTDEQIKQDFSAPHVALAASTNLAVVNCLQEQISKLEKVLKKELRLERAFEQLTSIDGVGLVLALTIMLETGEISRFDEVGDYASYCRCISGAKYSNGKKKGYTNSKNGNKFLSWAFTEAANFAIRYNETVKRYYQRKMAKTNSIVAIKTVAHKLARACFYVLKDQTEFDVKKAFS

SEQ ID NO: 423817 - protein, 360 aa, unidentified
MAQVRTWVGLDVHAAKVVAAIADAESAELRVQRMGGQTEQVAEFCAGLPAPVRVAYEAGPTGFGLARALAARGIECTVAAPGKIERPAQDRVKTDRRDAERLVRLLMIGGLHAVRVPTPAEEAMRDLVRAREDIRGDLMAARHRVGKLLLRHDLRFEGNNWTQRHLDWLGRIELPEPVAQSVLLDGIGSIDALLVRRESLETQMASLVEGSPWEQSVARLRCLRGIDTLSALGLCAEVGDFERFARPAQLMSYLGLVPSENTSGEKRRQGSITKSGSRHARRLLVEAAWHYRRAPRKGTALRRRQEGQPQAVCAISWKAQQRLHRSWVRLDSERGKRRTLCAVAVARELAGFCWAVTTAD

SEQ ID NO: 423818 - protein, 346 aa, unidentified
MLYTAFDVHKHYTWARVERSDGTVVREKRIPHERGAFQRFLAGCEPGSPVAVETVGNWYWVLDEVEEAGCTPQLVHARKAKLMLGNVNKTDRLDAQGLVRLQRAGTLPVVWIPPQELRDARELPRTRMVLVAQRTRLKNRIHATLAKYGIPLPDVSDLFGKRGRQELQTRVGELPPHTGFVVSRLLAQVDQLHGEIEALEQRMAELFEVDDTIRRLMTLPGVGFILATVIHTEIGDVSRFSRAEKLTAYTGTVPRVHESGGHRHYGPVRSDVNQYLKWAFVEAANAGCRTRGKHPERHTSQLYARVAKRKGHKTAIGAVARHLAEAAYWMLTKEEPYRDPGSSRGA

SEQ ID NO: 423819 - protein, 446 aa, unidentified
MTDRTGLSRGDRNRNARLARLRELLPADHAIVGIDLADKKQAAVVTDHDSRVLARRRVTARAWELGGLLDWALARARAAGFASVTVACEPTGHRWRVLDQLAAGRGLALVCVQPLLVYRARESEDLTFDKSDPKDAVIIARLAASLHCYEPERASAVWARLRHLGTRRLQLSTDATGQVNQVRDLLECAWPAVLGASGAPFRSATWCAAVSVALERSCGDLARVRRLGLDRFTVAVRRELARWDATRPCLRIVRAVYAAAADPSGVAAHRPGALERTGLAMADWHDTRHRIADAEARMVAVLDELGLTELVTTIAGLTAVGAAAILAETGDPHRFATPRSLVKHAGLCPRDNASGGYQGKASISGRGRPGLRVAAWRAVWAALPNNEVMAAKFTHLTTRDDNRLARQQARTACAAALLRWIHVVITRRVTWDPAIAAGTTPLQRAA

SEQ ID NO: 423820 - protein, 385 aa, unidentified
MPGFTGSAQTAIDYNTTIIGALELSSKKWVLAVQLPGVNRHSRYVLDACGDGVVSFVARLKARCAAAGREITRVILTHEAGRDGFWLARFLARRNIEVHVMQPSSLPVDRRARRAKTDIIDVEMLLRTLMAWLRGEPRVCSMVPIPSESDEEARRAHREREDLTRERRSIVNKIDGILATLGVKGYKALRRDRREQLNCAHQPDGDPIPPKAKARIERLLDRLDLVVKLIQQVESERDAVLKNDAPADEAEGMIRSLTELRSIGPDLATLLVREAFVRQFRNRRALGGYVGLGGTPFSSGGSEREQGIGKDGNRRVRAAMVELAWMWLRWQPDSALSVWFRARVGAMGGRIRKIMIVALARKLLVALWRYVKDGVIPEGAKMKPA

SEQ ID NO: 423821 - protein, 339 aa, unidentified
MNATTKAVFGVDVAKLVFQIHTVVQATGEVISKQIKRAAFLEYFANLAPCLIGMEACGGSQHWARRLKEMGHEVKLMAGKQVKAFVSGNKNDVADARAIWLAVQQSAIRPVAIKTEAQQAVLAMHRMRQQLVKFRTAQSNNLRGLMGEYGEVMKVGFKALNEAMPGVLARLGDRLPAPLIDTWREQWAMISTLDAQIQQIERRLQEWMRLDPASKAIEAIPGVGLLTATAAVATMGDPKAFQSGREFAAWLGLVPAQTGTGGRVRLLGISKRGDTYLRTLLIHGARAVLLHSKQKSKWVEELGKRRPPNVVVVALANKMARTIWTMLAHDRAYDRDYAR

SEQ ID NO: 423822 - protein, 372 aa, unidentified
MKQQTKSSNITVGLDLGDRRHRFCALDERGEVVEQDSICNDRVSLRKLAGRYHGALGVTEAGAHSPWISRFLEALGWRVVVSNPRKVRAIYQHERKSDQRDALMLARIGRMDLALLYPVRHGTAEAQQDLLRIKLRDSLVRARVAVINSVRFTLKSLGYTVRNPSSARFHKVVMEEVPESVREMITPSVQALAELTARIKMLELEINTLAQMKYPQSAQQLQQIPGVGPITALYFVLKIEDPNRFAHVRDVGAYAGLCPRRDQGGESDPQLRISKRGDAYLRRLLVSAAHYILGPFGPQSALRAYGLMLAADGTARAKKRATVAVARKLAVLLLSLWKSQQPYQPFPGACLNGEQEDRRSGTIALHRMEATD

SEQ ID NO: 423823 - protein, 421 aa, unidentified
MFKIFRKNCCGLDVHKTWIYACIGITDTNGRTDYKEARFSSFSRGLRELADWLAKYDCKEVCMESSGKYWIPVFNILEKSCWVTLAHPKYTKPQRGNKTDRKDAKFICHLFMCDMVKPSFIPPADIRHLRDLMRYRFKLTNILTGEKNRAQNCLTVSNLKIDDVFSDVFGKSAMSITNYILDHPGEKFDVTPFVDGRCKTPIEEIQAAVDGSISHEQAVKLREILKHIDEVNVHKRNIEAEILQLAAPYQVALDFIRTVPGFSSDPMTAIALLSEIGGDMSVFPTAKNLSSWSGCCPRNDSSGGKRKSSRISRAGVYIKPLLVQIANAVIKSDKYPECKERYRRLKARRGHKKAIIAICRMLLTAIWNVLSKCEPYSAEGYFVSAERPECPQKTITTAQALNILRTRGYIIKDDVPSPAPA

SEQ ID NO: 423824 - protein, 387 aa, unidentified
MIYVGIDIAKLNHFASAVNSDGEVLVEPFKFSNDNDGFCLFISKLNSFSKDELIIGLESTAHYGNNLLSFLVPKGYKVVLINPIQTATMRKNNIRKTKTDKVDTLVICKTLMLQPHKFVTLYDLGIIQLKNLGRFRQKIVKQRTRLKIQLTSYVDQVFPELQYFFKSGIHHKGCYALLKEAPSHQSIASMHLTHLTHLLSSNSHGRFKKETAVELRVLAQKSVGICDNSLSIQITQSIEQIELLDRQLELIESEMTDIVKSLDSVIMTIPGIGFVNGGIILGEIGDISRFKSPSQLVAFAGLDPTVYQSGNFEAKHTRMSKRGSRTLRFALVNAAHNVVKYNKTFKSYYDQKISEGRSHYNALGHCAGKLTRVIFKLLRDDVKFDLD

SEQ ID NO: 423825 - protein, 482 aa, unidentified
MKSKPEEKTKKAANHSTPHHWDEMNRKQRREMMRKIQSADLRLEVVHPNAGGIDIGNESHYVAVPPDRDSQPVQRFGCTTAELKAMADWLKQCGICTVAMQSTGVYWIAVFDILESAGLEVYLVNSRDTKNLPGRKSDVQESQWLMKLHTYGLLRNSFRPSQQIRTMRTYWRQRNDLVQSAGRHIQRMQKALTQMNIQLANVLSDISGVTGQAIITAILAGERNPRKLAELRDPRVQASQDEIARYLEGNWQEDLLFVLKQEQEGYEFCQKQMAACDEQLKQYLRQREDCSQGASLPEETRKGRLSMKKGNRPQFDLRADLFRMTGTDLTQIDSIDVMTAMTILSEAGWDMSKWATEDHFVSWLRLCPDNRISGEKIIGKRRLPTNNRITIALKMAASSLRKSKTYLGAQFRRLRTKLGAPIAIKAMAAKLARLVYRMLRYGMKYVDQGTEFYEAQHRKLQIKQLKWKAAKLGFRVVDAPAA

SEQ ID NO: 423826 - protein, 390 aa, unidentified
MIYIGIDVAKAKHDCCIIDSTGVILNDSLRISNSREGFELLYSSILSVLPNNDISNVKIGLESTGHYSTNLQNFLYAKGFHLSILNPLATNLFRKAQTLRKTKTDKTDALVIAKMLFSDDTKSYSPVSYQIQELKSLTRHRYRLIGYRSRLKVSITRLIDIIFPELPKYVWSIHQVSVYALLSELPSPKKISNCHLTKLTNLLVKSTKGKYGRAKAIELKEAARSSIGTSTGSLSFELQQTIRLIQSVQTEIDALDKQIKDVVIEINSPLMSIPGISYTLASIILAEIGDIDRFTNPAKLLAFSGLDPSTYQSGKYNATHTPMVKRGSTYLRWAILTASRTVSMRNSTFGNYLAKKQSEGKHYYIAMSHVAKKLIRVIFYLLKTNTSFAQ

SEQ ID NO: 423827 - protein, 349 aa, unidentified
MGEVSTIGVDIAKSVFQIHGVDADGAVMIRKRVGRAKVLEFFADLPPCLVGMEACATAHQWARELKKLGHDARLMPPTYVKAYVKRGKNDATDAAAICEAVTRPSMRFVPIKSVEQQSALMLHRTRDLLIRQRTQLINALRAHLAELGLVAAKGHEGLHQLVTAVAESSDERLPSNARFACQSIVAQLSAVQTQINGIDTRITQAHRANADSKRLDAIPGFGVILSTAVVATMTDPKAFKTGREFAAWIGLVPRQNSSGGKERLGSISKQGDRYLRRLLVLGAISIVGTARTRPDKYPWVTELLGRRPAKVVAVALANKMARTAWAVLARGETYRAPTRSSSAAIAAAA

SEQ ID NO: 423828 - protein, 317 aa, unidentified
MDVETKADRFVGIDVSKARVDVHVRPDGIAFGCATDAEGLGALGARLKPLLPCLVVLEASGGYEGAVAAALVEAGLPVAIVNPRQVRKFAGAIGRLAKTDAIDAAVIAHFAQAVRPPARPLPDDLSVRLAELMARRRQLVVMINAEKQRLVKARDPIAQSSFKAVLKRLQAERARIDKAIDRLIAVSPLWCAKQDLLKSVPGIGDVVARTLIAELPELGRVDRHQIAALAGVAPINRDSGRYRGKRKIQGGRVEVRAPLYMACLVAIQHNPVLKSFYRRLREAGKPARLALVAAMRKLLILLNAILRDQRPWAHAQT

SEQ ID NO: 423829 - protein, 319 aa, unidentified
MAQIPTHVGVDVSKDRLDVAFYPDATGFAVPNDPQGWAELARRCKEADAACVGLEASGGFEQDVACHLRDNGLAVRLLNAHRVRHFARALGRLAKNDRADAAVIAHFAAAVAGRPLKKRPPAEATLAQVLALRQTLVSRQVDANNAARHLRDADLKRMAARQARSLAADLRLLDRKLAACVGRDPDLKRRYDLLTSAPGVGPVLACTLLAEMPELGQTSRREAGALAGVVPYDHDSGTMRGKRRIWGGRPAVRSKLYMAALVASKHNPALRAMRARLDARGKPPKVALVALMRHLLTILNAILRTGTPWTDKTATPKAA

SEQ ID NO: 423830 - protein, 363 aa, unidentified
MHSINNTELSSLEETRSQFNGRTGAIKLGIDVHQDFYVVVMQEGGSNPKPPQRFQKEAFLYWAAKLAGSGAQVHAVYEACGFGFGLQRNLTALGIDCYVVCPQKLDEQNRRVKTDGLDAKALCLKLDRFVQGNRDAMALVRVPTEQEEQQRAIHRQREQLVKARKQLEAQGRSLMVNHGLEPVKSWWKRGNFGALQVPEWMKELLLNSQPLLLALQEKIGALTLQLQVAAASKQPRGLGAMTSVIIDREIGDWRRFNNRRQVGSYTGLCPGEYSSGNTRLQSCVTKHGNPRLRAALVELAWRLVRFQPNYKPVVKWRQILAKAALATGAARKQAIVAVARQLAVDLWRVRTGRCKPEVLGLEI

SEQ ID NO: 423831 - protein, 416 aa, unidentified
MIRKVMEAIHRCVGGLDVHKKIVVACRRRLVDEARAELETKRFKTTTVGLRELANWLSEWEVTHVAMESTGIYWVPVWNILQEHFKLILVNAHELKKVPGRKDDVLDAEWIAQCMQCGLLRASFVPSLEIRQWRHLTRQRAKLTDHHTAVVNRLHGVLHQANVKLSDVASNIVGVTCRKILTAMSNGVSDPGTLAALGTGRLKAKPEDLVESLDGQIEDHDRWLLRRLMRQLAMLEREIAIYDERIRVQMKNYEHQIDPLDTITGIGRRLAETLLAEIGPDMSQFPTDDDLVSWAALCPGRNESAGKKRSSRTANGNKWVRRALVEAAWAAVRSKNTYLAALYKRLAPRRGKNRAIIAVARTILQAAWHMLSKDIEYKELGGNYFDMLNRDKTRNYFVKGLHRLGYLVELKEINAG

SEQ ID NO: 423832 - protein, 330 aa, unidentified
MRYIGIDISKDSFTVAFSYVKGSKTQSYKNTPKDIQKFIKTLDKEQDHCVMEATGNYTFKLLYLLIEQGYKASLVNPKQTKYFAKTMLSVTKTDPQDACLLACYGEKMTPPVYKMPSEKIILLKQKRTVIRQLRKQLTALKNLEKSLEVLPRKDKNAFNCLNNTISYTEKQTEKLEKELIDDITEDFDKQLDLLTSIKGIGDKLAASLIIVTGGFSFFENPKQISRFLGICPTYQQSGSSINIKGSINRNGDSHLRGMLFLASLAAIRFNTACKELFSNFKAKGKPVKVALIAVANKLIRQAFAVVKSGISYIDGYISKPPITTVKIISN

SEQ ID NO: 423833 - protein, 386 aa, unidentified
MKRNDLSRSLVAFDQASTMVAVVELSFRSWLVAGLVPGLTRQPLRKLGPDAQALLTLLRRWQGEATKAGSTINRIVVAFEAGRDGFWLARWLRARGIEAYVIHPTSIPVSREHRRAKTDRLDTGLLMRAVLGWLRGEPKHCSMAAIPTIAEEDARRPNREHQTLVQERTRIVNRMKATLIRFGIRTFNVKLRKASDRLAVLRSPEEEPLPPNTGAELRRDMARLQLIRDQIKVIEEARLQQLKHAPRKGTHPMLLMLAEIIGVGVETADMLVHEVLSRKLRDQRAVARYGGLTGAPDESGTKRREKGLARAGNARVRRGMIQLAWRWLTHQKNSELAQWYQTRTTGAKPAARKTMIVALARKLLIALWRYVTTGEMPAGVTLHPAT

SEQ ID NO: 423834 - protein, 323 aa, unidentified
MNETISSTFVGIDVSKARLDVAVGETGAIWNERNDAVGIAQLVKRLKEISPVLVVIESTGGLERPVLVELERAGVPVALVNPRRVREFAKAIGLAAKTDKLDARLLARFARDAKPMPTQLPKEDDQRLSALLARRKQLIDMLTAENNRLETIPLALKGLITEHIGWLELHIQFIEKEIDDSNRKDPDRKLKQDLMRTVKGIGPVTASTLSADLPELGHLNKKQIAALVGVAPFNNDSGKWRGRRRIKGGRASVRQVLYMAAVAAARSNVFIRSFYQSLLKRGKQKKVALVACMRKLIVILNAMIRDLKPWHDPFPASPRPLLP

SEQ ID NO: 423835 - protein, 341 aa, unidentified
MMIIGCDFHPRFQQIAFVDQETGEYGERRLNHPGEAEQFYRSLAGRQVRIGAEATGNFRWFRHLMQELGHEFLLGDASAIRAACPRKQKTDKRDARHILTWLVEDRFPVVWQPPAENDHVRQLLLHRCRLVRMRTRIKNQSDSIAKNEGLLSSRVWSPKRRSEIEALPLPGWYAHRRADLLGLLDELDKRIRPLDEAVHEAAEDNQEARLLMTHPGVGPIVSLAYVLTIGDWRRFPRGKQVGSYLGLIPEEESSGSTRRLGHVSKQGSVLVRWVLVEAAVHAQRHDASWHRQYVRLSMTKHHGVAKVAIAHKLAVRLYWMLRSGEDYSKVMERGSHAGQSV

SEQ ID NO: 423836 - protein, 350 aa, unidentified
MIIIGCDYHPAFQQIAFVDIETGELQERRLQHREEAEKFYRELAAQGIKVRVGMEASGHARWFERLLSELQFELWIGDAAEIRTKRVRKQKTDRQDAQLILQLMLEDRFPEIWVPSWENRDLRQLLWHRHRLVQARTRMMNQLQAVALNEGLRCKKKLFREAGREQLEAFRLAPWASRRRHDLLELLDRLTPTIAELTQAIEQEVEKCPAARRLRTHPGVGPLTALAFVLIIGKAERFQCGKQVASYLGLVPLEKSSGNQRRLGHITKQGSTLLRFLLVEAAQVTARSLPEWRSKYYHLTMRRGRKIAKVAMARKLAVRLYWMMRKQWDYGQLTKFSSHAGKLGTGDGVQ

SEQ ID NO: 423837 - protein, 475 aa, unidentified
MNVKGNRRKKQDAKLSVIDQQALLRKAEEIKSDLKASTWHELETNGKFDKNDKLTFISEDMLILGCDIGSETHYVRAIDTRGRELSKSAFSFSNTEEGFKNVLDWALKLAAENEKHQIVMGLEPTGHYWFCVATWMVNNGVSVVQVNPYAVKQTKEVEDNSQLKDDTKDPKLIANLVKDGNFGMPYLPEKLYADIRRLSMFRDQLTEDRIRNLNRLHRELKIYFPEYKDALGKTDGMFCLELLKKAPFPKDLIQLGYDGIKAVWLDAKLRGRGYAKVESILDYAKKSVGIKDGSDASRQAVKWYANKIQELDVQLEDVQRQLNKRCDEIPHAENIQAISGIGETTLTGILAEIGDISRFDDVKEVQKLSGLGLVACSSGKHKGETKISYRGRKRLRYWLFQAAKSAVVHADEYRQLHSYYTTRADNPLKKMQSLIVIACKLLRVIYIILTKGTKYDPEKMLGDIKRPEKQLTAAA

SEQ ID NO: 423838 - protein, 348 aa, unidentified
MRILALDLGKFKTVACEYEAETGRHRFATVATTPKAVHDLIVDREPQRVVIEICSIAGWVGDLVKSLGIELQVANTSDERWQWRKVKQKNDRRDALKAAQLSAVNQLCPVHVPQLQMRQWRALIAYRSKLVQRRTKVKNHIRDLLLREGQLLPRGRTAWTQAGMATLTAMAQPLATLESEQLWRGELGIELAQLTELQQQIMTVHAKLDELAAADGRVQLLRTIPGVGPRLAEAIVTMFDDVTRFTTAGQVGSYIGMVPKSFDSGETARSGRITRHGNRLVRSLLVEIAWASLRHNPWARQTFQRISGGKKSRRKIAIVAVGRKLLVRCWGMLRHQTPWQSQTSVASV

SEQ ID NO: 423839 - protein, 316 aa, unidentified
MAKRKSYIGIDVSKQLLEVAVYESDFHYRCPNQASAFAALLAELIALRPARIVLEATGGLEKPLLTFLQTAGLPVVVINPRQVRDFAKAIGQLAKTDRLDAGVLAHFAAAIKPPLRPVKSKDDQELKDLMGRRGQLIEMLVAEKNRRHTATSDVVRKAIKEHIDWLEQRLAELDEQLQTRLVSSPQWQSKDTILQSVPGIGPVVSFCLLADLPELGTLNRQCISKLVGVAPLNDDSGQHRGVRHIFGGRARVRCMLYMAALTAVRFNPILKQFYQRLLAKAKPRKVALTACMRKLLSIVNLMVRNQTPWRDDPVSA

SEQ ID NO: 423840 - protein, 339 aa, unidentified
MKLYTGIDLHSNNNYLAIIDGNDNRVFKRKLPNHPETILATLAPFREQVEGVVVESTFNWYWLVDLLREAGYLVHLANPAAIQKYKGLKHSDDNHDAFWLAHMLRLGILPVGYIYPKDDRPVRDLLRKRGHLVQLRTALINSLQGIISRNCGCSLNAKKIKAVKEDFITPFLAGQSDLQLSGTVSKECIDFLTGKIKEIERSIKSSMMEKTSFLALQTIPGVGNILALTILLETGDISRFSKVGSFSSYCRKVPSQWTSNSKNKGKGNTKNGNKYLAWAFSEAAELSKRYSDSAKAFYNRKMAKTNRMVAHAALAHKLARASYYIMRDGVAFEEKKLFA

SEQ ID NO: 423841 - protein, 411 aa, unidentified
MDKVYDKCCGIDVHKKLIVACFRKGSKQELRNFGATTRELLELANWLQNGGCEMVAMESTASYWKPLYNILESSELKAMVVNASHMKAVPGRKTDTKDAEWIAELLQHGLLKASYIPDKQQRELRELVRYRKSLVSERTRELNRLQKMLEGANIKLSGTVSDINCMSARNILEYLLTGEFFDEAKYDEMYKQKIIAHNLKASKEQLIDDLNGVMTPLQRRMMKELLSHLDELNVHINNLEDEIDNFMKPEEKKATQAIQDVTGIGKNSSQAIISVIGTDMSRFPTAGHLAAWAGLCPGNNESAPKRKTGKMRKGNALLRSTLVVCAHSATRNKNSYFYAQFMRISSHRGKKRAYVAVAHSMLIAIYHILKDGVVFKDLGADYYNQFNKERKINAYLKKLKALGWEVPVVAA

SEQ ID NO: 423842 - protein, 399 aa, unidentified
MAYYVGIDWAAAVHAVCVMDDAGRVRWHGTVGHSAAGLAELVRRLKQFAPPAELRIALERPSGLLVDTLVEAGFVVVPIHPNAVKATRPRYSTAGAKSDPGDAFMLADILRTDGHRWRPLRGVSDGTRALRALVRGRDDLVAQRVALGNQLRALLEHVWPGAAAIFADVTSPIALAFLARYPSAPSAVRLGERRLAQFLAQQGYSGRRAPADLLARLHAAPTSRVADSEAEASAEVVRALVAVLTPLGTQIQQLTAAIAAALTEHPDGHVVTSFPRSGQVNAAQVLAELGDDRQRFTSADHLAAEAGVAPVTRESGKARGVGFRWACNKRLRQAFTTLADNSRHASPWAAGVYSRARQRGCDHPHAVRILARAWIRILWRCWQDRVPYDLTRHRGAVAA

SEQ ID NO: 423843 - protein, 402 aa, unidentified
MNAVGIDVSKGKSMVAVMRPFGEVVFSPFEVSHTDKDLTDLAKKLKSLPGETRVVMEHTGYYHAPVAVALHEAGIFVSAVNAMLVHNYGNNSLRRAKTDKKDAIKLANYALDHWLSLPRYLPAGDTRLMLKTCYRQYEQFSKMRTMQKNNLISLLDVTFPDANKLFSSPPRADGSEKWVDFVAQYWHCECVCDMSVKAFTKSYEKWCRKHGYNFSEDKAFDVYVSACGHICIMPKCDSTKLMIQQAVAQLQASSAALAALKKQMQDLASTLPEYPIVMQMYGVGPSLGPQLMAEIGDVRRFHSKSALVAFAGIDAPPYQSGTIDVHSRSISKRGSAKLRRTLFLVMSVILQSSPLDEPIYQYMDKKRAEGKPYKVYMMASANKFLRRYYATVKSHLDELDYT

SEQ ID NO: 423844 - protein, 323 aa, unidentified
MNTLNEKNSTVYAGLDISKASLQLHLQNVHHVLDNHPEGHATLLKKIRAVGGVQIICEATGGYERGVVAALHAATQPVSVLNPARVRHFALAQGQRAKNDPIDSEVLTDYGDALRPEPTPPSEPARAELRALVQWRDQIKEQLARVRQTSEHGLPPYVARQQKKLVAHLEKQMADVEKECQKALARTPQIQEQVRRLEQLDAVGTITALSVLSHLPELGTLNRQEAAALAGLAPWVRQSGPWEGQRHIGGGRAAVRRALYMSAVVLARMKETTLGKYYARLRQAGKPAKVALTAVMRKLLLQMNRVLKEHTLEAQTKTKTQPA

SEQ ID NO: 423845 - protein, 402 aa, unidentified
MNMNAVGIDVSKGKSMIAIIRPYGEIISLPFEIQHTSDEIRCLIDQIKSIEGESRIVMEHTGHYYEPLARELSLAHLFVSAVNPKLIKDFGENSLRKVKSDKADALKIARYALDSWNDLKQYSLMDEIRNQLKTMNRQFGFYMKHKTAMKNNFIGILDQTFPGVNTYFNSPARDNGSQKWVDFAAAYWHVDCVRKMSLHAFTDHYQKWCKRNKYNFSQSKAEEIYGATMKLVPVLPKDALTKLIVKQAVDQLNIASKTVEQLRILMNATASKLPEYSIVMAMKGVGASLGPQLMAEIGDVRRFTHKGAITAFAGVDPGVNQSGTYDQKSVRTSKRGSSTLRKTLFQVMDALIKTKPQDDAVYQFLDKKRAQGKPYYVYMTAGANKFLRIYYGRVKEYLLSLS

SEQ ID NO: 423846 - protein, 355 aa, unidentified
MDRTKYIGMDVHQASISIAVRDASGKLVIESLIETKAATILEFLQGLKGTLWVTFEEGTSAAWLYDLLKPHVVKVIVCDPRKNALLKTGNKNDRVDARKLSHLLHAGLLTPVYHGESGVRTLRELARSYLTLTKDPTRVMNRLKALYRSWAIPCVGEKVYSPRHRSAWLEQLSEAGVRRRAEQLYQQLDILLQIRRDARQELLRESRKHPAHELLRQIPQLGPVRVALLIALVQTPHRFRTKRQLWAYCGLALQTRSSGEYRFTAGQLQHSNRLPALRGLNTNHNHDLKNVFKSAATHVSTSPDALGDFYRSLLAKGMKPAMARLTLARKMAAIVLTVWKKGARFDPGELKRQAA

SEQ ID NO: 423847 - protein, 396 aa, unidentified
MDKDRIVAGLDVHKDTVYLCVLDTAETVIFANVYGTLTPDLQLMCSDMVSHGVTEAAMESTSTYWVPVWNALCDSMSLKLVNPYFIKQLPGRKSDVKDAQWIAECLLKHLIRGSFVPEKSVQDMRKYNRRIFDLNEDLNKLDAALQRCGFRLSNYVSRVNGKSYQKCVRAIITGITAPEELVKLIHGKTLRKYGLNIIKDAVTGDFHQADICLLKQYAELIDVIGRQIEECRQALIAMCQEHFPKQFKRLQSIPGVKERAASAIIAETGADMKPFEKATNLVGWCGLKPRNDISNNKVKSNRTTHGNRFLRQILVEISWGASRTRNCFFSNFSYVQCTQRHKNKMKIQVAIARKILVAVWHMLTKDEDFMDVYLKRLEKEAEWQNKIRELESLLVG

SEQ ID NO: 423848 - protein, 340 aa, unidentified
MKLYTAFDLHANNSYGAIIGEQGQRVKRQRLANDPELIFQFLLPYKAEIVGVVVESTYNWYWLVDALMSEGYKVHLANTAGIQKYKGLKHSDDQDDAFWLAEMLRLNILPEGHIYPKEERPIRDLLRKRGHLVKLRTSLIISLQNIIDRNCGTRIKVNDVKRLKEDMVAPFVAGNEDLALAGLVSKEAIDFLTVKIRTIESSVESRIKLKEPYKNLLTIPGIGKILSLTIMLETGAMDRFEKVGNYASYCRKVSTKWTSNDKKKGKGNKKNGNKYLAWAFSEAAEFARRYDPQARAFYNRKLQKTNFMVAHSALAHKLARATYHVLKEQTPFMPEKLFAS

SEQ ID NO: 423849 - protein, 457 aa, unidentified
MSKGSGMTRGDRKRNARRERLRGLLPREGAVVGIDLAEDKQALAVIDHDVRVLARKTVRVKAFRLGEALDWAAAQARVKGFTQVTVACEPTGPRWMQVQRLCAERGLPLVCIQPLVSHIAREQQDYTPHKSDESDCVMIGRLAAELHCYVPEELDETWAQLRHLGRRRAQLITAASASAHRIRDFLSVAWPVVTETCAKPLLSRTWLAALQVVTGRCGGDPARLAVMGEEAFTAAVRAAVQDWGGKRAWGPISRRVFAALTDTEGVVVSSRRGLLRRCADELGDLQRARAQLRAVEADMVAVLDELGLSRLGRIPALTAVGAAAILAEAGGPHRYDSSSSLVKHAGLSPSGNASGAFAGQAHISRRGRPGLRLTVWRAVWPMLQFNPVMAAKYQAMTSTADDEAGAAAARARRAKARVACAASLLRWLYSMAVHGTSWDPAAASGRQHDPRDQAEAA

SEQ ID NO: 423850 - protein, 348 aa, unidentified
MHLYFVGLDVHKQVIAFCIKTADGEIVREGVVAARRTALDEWVKTLPGPWHGAMEATIFSHWIFRHLQPHAAKLEMGHAARMKAICAGKKKSDKIDARTIADLVRCNLFPACFVISPELGALRQQLRFRRLLVEETVMFKNKTAGLLMSAGVEYERRRLHGKRYFESLVKDNEWIDQQLRPLLEFNRAQMTTFQAMDRRLKGMLARHPALEGRVKALCRIDGVGTVTALSWALEAATPERFPSIKHALSYCGLTSALRESAGRQKRGPLSKQRNAHLQSALIETAKLAPIYNEKLKEVHRKAMEKGGHRNRATLAVARKLVAYLMAADRAFFASQGASAAVDEHTLAA

SEQ ID NO: 423851 - protein, 383 aa, unidentified
MMQTITRGNESSAATGYLLVAFELSQRWWKVGFTTGMGHRVRTRRIAAGALESVAAAIADAKKMFGLTADARVISCYEAGREGFWLHRYLAGRGAANYVVDSASIEVDRRARRTKTDAVDLRGLLALLARYVVGDRRCWRVVRVPSVTEEDARQLHRTWETLQGDRTRVINRLKAVLATHGVRLAITADFLEHVAATRVWDGSEIPSGARARLAHDWAQLQSIEEQLAAVKAARTRLRIDPATPTGRAVQALQGVRAIGAGGAWVLATEIFGWREIRNGQQLGALAGLVPALYQSGATQRDRGITRAGNAHVRRMMVQLAWGWLRWQSDSALAQWYQRRFATGGSRQRRIGIVALARKLLIALWRYVDQAIVPEGARLKVTLA

SEQ ID NO: 423852 - protein, 333 aa, unidentified
MNKSETTFLPCGIEISAAILVVAVSGKAPCEFANTPAGHQSLIRMLQLAGSEVRVCMEATGLYGLDLALALHAAGIAFMIANPRSVRNFARAMMQRSKTDRLDVIVLREYAARMPFEPWRPPSSQALHLMAIAHRLQALTRMITAEKNRLHAASLSRALPALVRRDLLRSIQSMERALKRLTQAALGLVLSDPQLARRNQLLLSVPGIGVTSALNVLAEILRLGPDCGVRQWVAYAGLDPRHYTSGTSVAKKPVISKSGNAHLRRALYMPALVTVQHEPHFRGFYQHLLDRGKTKLQALVAVMRKLLHAIFGMFKHNQPFDGTKVYALETSCA

SEQ ID NO: 423853 - protein, 350 aa, unidentified
MIIGVDYHPSFQTVAYLVEETGECGEQDLNHSDGKAEKFYRDLKQRGISVRVGMEATGYARWFERLLAELGFELWIGDPAQIKAKRVKKQKYDREDARLLLRLLRENNFPQIWVPDPENRDLRQLLWHRHRLVQMRTRIMNQLQALAMNEGYRWKKKLFSQQGRALLEKLALAPWASRRRQELLELLDRMNPTIEELTAAVEREARKRPDAVRLMTHPGVGPITALAYVLIIGTPARFQRGKQIGTYVGVIPCEDSSARKQRLGHVTKQGNSLLRFLLVEAAQAAARVHPDWRRRYIHLAMRRHKSIAKVAMGRRMAVRLYWMWRNGCDYSPSLEFGSYAGQLETGHGVK

SEQ ID NO: 423854 - protein, 342 aa, unidentified
MQVTTIGLDIAKNVFQVHGIDAAEKVVVRKQLRRRQVLEFFKALPACLVGMEACATAHYWARELTKLGHRVRLMPAKDVKAYVKRNKNDAADAEAICEAARRPTVRFVQIKSTEQQGRLMLHRARDLLMRQRTQVINAMRAHLAELGIVAAQGRDGIKELLKIIASEADARLPVDAHTSLVVLAAELQAMQTLIGSIEKRIMVQHRLSEASKRLKSIPGIGLIGATAIAATVPDPKVFGSGRDFAAWIGLVPREDSTGGKQKLGPISKRGDRYLRRILVVGACAVLRYARHKPEKYPWLTKLLERKPFKVVAVALANKMARIAWALLATGDTYRVPALAAAT

SEQ ID NO: 423855 - protein, 422 aa, unidentified
MRVLYDRVAAIDVHKDMIKVAVRVPGKKRGSRTTDVLEFRTFYGVLQAIARELRRRGVTHVVMEASGVYTEPVYYALTELDFTEVLVINPAHAKALRGHKTDARDAVRMLDLYECGALLRGSYIPSPDLKEVRDLVRYRVKTVQARTSEIQRLQKTLESAGIKLDSAVSDITGMSSTAMTGALTGGERRGEVLADLALGRMRTAGKMADLPVALTGRFTGHHALMCRLHRDRISMFDDAVGGLDAKISPLLARYAREAELLKTLPGFGEVAAAGWPGAIGPAPHQHFGTAWVTLCPGNYISARKSRSGRTGDGGNYIKPLLVRAAWAAIRTPGRLQARFHRLVRKFGGPKNKGARKRAIIAIAHTLLKIAYAVLKSGKPYQEPGADFYTRRESAQAREEYLLRQLQKLNPGCVITITPAEAA

SEQ ID NO: 423856 - protein, 401 aa, unidentified
MIDTSDIDIFLGLDVGKGEHHATAVTPAGKKAFDKRLPNTEPKLRELFAKLQAKHGTVLVVVDQPASIGALPLAVARDMGCPVAYLPGLTMRRIADLYPGEAKTDARDAFIIADAARAMPHTLRAIDSEDETIAELEMIVGFDDDLAGEATRVANRLHGLLTQIHPSLERVLGPRLQHPAVLTLLERFGSPAQIRKAGRRRLVTLLRPKAPRMAERLVEDIFDALDEQTVTVPGTEAAALIVPSLAASLTAVLDQRKLLAGRIEELLEAHPLSKVLTSMPGVGVRTGARILIEVGDGSTFPTAGHLAAYAGLAPATRSSGSSIRGEQPSRRGNKQLKRAFFLSAFAALSDPASRAYYDKKIAQGKHHTQALVCLARRRADVLFAMLRDGTFYESQPSAAVT

SEQ ID NO: 423857 - protein, 390 aa, unidentified
MALKIVYKICCGIDVHKTFVVACIASTDKQGVTSYESHRFSTYTKGLKNLLHWLLDRNCKDVCMESTGKYWIPIYNILEKECSIVLAHPKYVKAIRGKKTDKKDAKWIADLFKHDLVAGSFMPPADIRQLRDLMRYRFKLTCFQSSEKNRLQNCLTVSNIQLGNVVSDTFGKSAQAILDKILENPEDTSFDLEPFVYRSLKKKLPELRDAIDGYITPEQAGKLKVIKAHYESLESRKAELEELILALAAPYQQELAILQTAPGISSDFTAIGIISEIGTNMEAFPSAKHLCSWVGLTPTSNESAGKKKSVRVSKAGCYIKPLLVQCANAVVKSSKHPEMRNRYLRLKKRRGHKKAIIAIARMLLTALYHMLKNGENYNAELYLNFSIFNF

SEQ ID NO: 423858 - protein, 408 aa, unidentified
MRLYVGDDWAEDHHDVEVMNEAGKVLAKKRLPEGAAGMSQLHGLIGRHVPEDADDAEVVIGIETDRGPWVAALIAAGYTVYPANPLLASRYRERHAVSGAKSDGGDAHMLADMVRTDSHQLRPAAGDSPEAEGIKVVARTHKTMIWDRTRTVQRLRHQLREYFPAALEAFDDLDAPDALELLAKAPDPARAAKLTRAQVAAALKRARRHHVQDRTGAILAALRGEHLGQPAALTAAYAATVRSLVAVLVTLNEQVRLLEAQVKEHFGRHPDAEIYQSQPGMAAVLGARVLAEFGDDPYRYESAKARKNYAGTSPITRASGKKKVVAARFVRNNRLIDALMAWAFTSMLASPGARAFYDEQRAKGFEHNDALRRLANRLVGILHGCLKTGTPYDEDAAWGHREELKPAA

SEQ ID NO: 423859 - protein, 422 aa, unidentified
MLAKTQDNEEIIERVAACDIGKAELVCCVRVPDEDRPGRRLQEVETYSTMTRPLLGMADRLACLGVTRVVMEATSDYWKPVFYLLEAAGFETWLVNAKDVKHLPGRPKTDKLDAVWLCKVAERQMIRRSFVPPPPIRKLRDLTRYRADLVAARTAEKNRAEKLLEDAQIKLSVVVSDIFGASGRDMLAALVAGERNPKVLAQLARHTMRKKITVLEEAFTGYFTDHHAFLLGRMLTRVDAIAGDIAALDVRIEEEIAPFAAAVSKLDEVPGISLAAAHAIIAEIGLDMARFPTAGHLVSWAKYAPGVNESAGKKKGKNSTGHGNSYLARILGNAAAAAAKTDTFLGERYRRIARRRGAKKANVAIGRSILVIIWHLLSDPEARYTDLGAGFYATRTDPDRRRRDHVRHLEALGYTVILERAA

SEQ ID NO: 423860 - protein, 417 aa, unidentified
MWNKATRVKSSVESASNKHIGGILMVCVGIDVAKDKHDCFIISSEGEILADVFTIRNNAEGFDTLLQAIRRSTRPEDKIKVGLEATGHYSYNILGFLLDKGLPTYVINPLHTNLYRKSLSLRKTKTDRVDARTIAAMLMSDVDLKSYTDTVYHNEELKSLTRYRFDKVRERAKLKQSVSRLVTILFPELEKLVSSLHSASVYALLSEFPGAKQISSTHMTHLKAVLKNASQGRYGQEMAETIRNAARSSVGSVMPAKSLELQHTIRLIRELDAEIEDIETAIQAIVDEMQSPITTIPGMGVRMGAVILAEIGDFSRFDSPDKILAYAGMSPSTYQSGQLSLSGAYSHMEKRGSRYLRYALYNATKHVCHWDPTFAAYLAKKRAEGKHYNVALSHAAKKLVRLIFAMEKSQRPYCAAA

SEQ ID NO: 423861 - protein, 316 aa, unidentified
MAEEWYVGIDVSKAELVVAVRPSGERMTVANDRAGIKRLVGRLGELKPELVVVEATGGLQRQVVAGLWMVGIAVAAVNPSWVRNFAKGSGVRAKTDRKDAELLALFAERERPEARPPANAETQALQELVMRREQLVEMLVAEKQRLTRASGTMRKELRHHIAYLEGSIKEIEEDLDKTVRRSDAWRRKSEIVRSVPGFGKGFCAMVLAKVPELGTLNRKQIGALVGVAPMPDDSGSRHGRRMIAGGRFEVRNKLYMCAMVAARANPVLKQFYERLVARGKPKKLALAAVMRKLIVTLNAMFKTNSVWRPPCPDLSV

SEQ ID NO: 423862 - protein, 356 aa, unidentified
MGETARADIIIGVDTHKDVHAAVAVDALGTRLGTVTVPVGETGYRTLEAWARSLGAVRAFGVEGTGSYGAGLSRFLRGQGHAVLEVNRPDRRLRHEKGKSDPLDAESAARAVLSGQAAALPKSGTGVVEMIRHLKVARDTAVKGRTQAMLTLKAIIVSAPAALREQLDRITGKMTLIRRLAALRPGPITSTAASAKASLRAIARRWLALDEEIRSHDAHLEVLTAARAPELVQAHGMGAGTAAAMLLLVGDNPERIRSEAAFAKLCGACPIPASSGKTVRHRLNRGGSRQANAALHRVVVTRMRGHRPTLDHVRRRTSEGKAKPEIIRCLKRFVAREIFGYLCATPKPENTPPGAA

SEQ ID NO: 423863 - protein, 359 aa, unidentified
MTSKVSIKASETQKLFVGIDVHLNSWKATIMLDQTPFKTFSMDPSAEVLKQYLEKNFPNMEYYSAYEAGFCGFSIHRKLEEKGIKNIVVNPADIPTTDKERKQKEDKRDSKKIANALRLGQLQAIYVPKIEIEELRSLVRFRKTLVKDISRNKARIKQYLHSKGVEIPEELLVASSHWSSNFTKWLREVKFHTESGSLVLNGILDIVNDLRVKLLAITKSIRQIISKDDYYNRTIKNLMSIPGIGFITAATLLTELFDINRFKNVDHLCSFVGLVPSTNSSGEKEKVGGMTHRGNQPIKEMLIESSWIIIKNDPSMAIAYNDLRKRMKPNEAIIRIAKKLLGRIRHVLKTNTTYEINKA

SEQ ID NO: 423864 - protein, 343 aa, unidentified
MYVGLDVHKKYCYYAMVDGRGTVVKKDRFRTTVEELEEFASALPEGDQVAIEASASGCFVYEQLDEQGIAVHLAHPTMVRPFAKKHVKTDKVDAIVLAQLLRMDYLPESYVPDEAMRDLRTLVRHRAGLVRIRTSLKNRVHALLTMEGVQPPAVSDLFGKKGREFLETVKIRESRRLALDNYLKVLDELNERITEVEQFLEEKAESIEEVAWLRTIPGIGLHNALLILSELGEVSRFSRPQGLVCYAGLAPKVAQSGDQVRYGHINRQSNGFLRWAFVQSAWSAVLSSTPNRFQRIYQKVKARRGAKIAIVATARHLAESVYWVLTKQEAYKEPKAQRASSSP

SEQ ID NO: 423865 - protein, 415 aa, unidentified
MSVVTRRFFVGIDWGSQTHVVCVLNAEAQIVEERKVQHTANAIAEFLDWLSALTAAPASSMAIAIEVPHGTLVEELLEHGFSVYSINPKQLDRFRDRYFPAGAKDDGRDAFVLADSLRTDHHCFRAVSVNDPSVVRLRELTRLDEELNHCFQRHCCQLRQQLQRYYPHVLQLSKTADEPWIWALVELAPTPAKAVKLTSKRIEKLLRDWRIRRLDAEQVAAALRGRSFSLAPGTTEAASEHVLLLLPHLRLLHQQRLAIGARIERILDELSAPGDSDQPLPDVKVLLSLPGVGRIVTATMLAEAPQLLADRDYHALRAYAGVAPITRQSGKKSTVLMRYGCNLRLRNAVYHWSRVSMQRDSRSREHYQRLRSKGHTHGRALRGLADRLLALLCAMLRSRTTYDPARRQSVGSPSA

SEQ ID NO: 423866 - protein, 318 aa, unidentified
MSVVPSAPVVGIDVSKHKLDVASSSHSKIRLFDHSPQGLAQLVNHLESLQPRLVCLEATGALERQLVRTLHAHGFTVAVVNPRQIRDFARAAGQLAKTDAIDARQIALFAERMHPRPTPPTPENQQKIQGLTARRRQVQQMRVQEQNRLGTAIDPDVRRFIDEALKLYDQQLEQLNSQIEQLIQQDQALKAKATIVRSMTGIGPAATAALIADLPELGQLNRQQIARLVGVAPTNRDSGTLRGRRTTGGGRVQLRNALYMPTVVAVHHNPQLRRFYQRLLESGKEKMVALIAAMRKLLVILNTMVKNHELWKNPLLQT

SEQ ID NO: 423867 - protein, 319 aa, unidentified
MIRTICGVDVASSSLEARIGPLGPSAGFANNPTGIAALAQFCRDHQVELVAMEATGGYEQQAVAHLSDQELAIAVLNPRSVRQFAQSMGRLEKTDAIDAGMIAWYAEVKQSKPITLAPHTQRHLRALVTRLRQLTELRTAQLNQQRLITDPLVQDSFAQLLGLLAEQIAMLAQSIAALIEQDPLCRELNLAMRSIKGVADRTVARLMADLPELGTLSNKTISKLAGVAPIAADSGKHQGKRAVRGGRSSVREILFIVASVVGRYEPDFIAFQQRLRASGKPPKVVRIALAHKLLVRLNAKAREVRTQIQAASPKRTVTP

SEQ ID NO: 423868 - protein, 310 aa, unidentified
MAATAVGIDVSKDKLDVHVLPQGENFSVPRNAKGIEELAGRLKVLEAAVIAVEATGGFESVVAAGLAAEALPVVVINPAQVRAFARSLGQRAKTDPIDAFVIARFAEATKPAVRPLPDEDTRLLSDLVTRRAQIIQMIVAEKQREKRVTNRHLRKSIARLIKALEKEINAVDEEIDGMMRASPVWLENEELLTSVPGVAKITSRTVLAELPELGTLDRRRIASLVGYAPFTRQSGQWRGKSFIAGGRSYVRSVLFMAAMTAARCNPVLKAFYERLIANGKPKMVALVAVARKLLTILNAILRDKKPWQIA

SEQ ID NO: 423869 - protein, 424 aa, unidentified
MNLTQNDRLKQVTSDTLIVGVDIGSQTHFCRAFDWRGFELSRRAFKFSNTGTGFLTFLRWTEELMNKTEMKKVIVGCEPTGCYWLTFQKFLQDHDIQLVTVNPFTVNRSMELDDNSPEKSDLKDPKTIALLVKDGRYSTSYLPSGVYAEIREASVCRDQIMKQHVRLSNQIQGWLQKFFPEYFECYADWDSTSGLMLLKEAPLPQDILRIGAGGINQIWRDAKVRAAGIKRAQTLVEAAQNSVGLEAGEAARLEIWVLVNDYILKAEQLKRLDEYLEEKVKEVPNVEKLLAIKGVGMSTVIGFIAEVGDIGRFTDPKQIQKLAGLEIVKKSSGKKKGQPRISKRGRRKLRRTMYESARALMTWNPAFQDVFLYYRNRQRNPLGGMQAKIAVACKAIRIFYVVLKTGCDFDEEKLRRDIIRPEAA

SEQ ID NO: 423870 - protein, 411 aa, unidentified
MEQYYLGLDWGSESHAVWVVSETGEKIWAAEVEETAEGLAGFGRRLYEWHGGGIVVWAAIEKPEGRIVDFLLDHSVVVYPINPKAIDRARDRFRASGSKSDPFDAHVLAEFLRTDHRHLRPLVPNSPEAQELKLLTTDYRRVERQQTRLFNQLRATLKECYPRPLEMFPNLNTSTALDFLAQYPTPAALSELTPQAWREFVREHRLHKDRSAELWELAKARQVPIPAHVVRAKARLIRVLAAQLETVRAGVEEYQSEIAHFFASMPAAKTARSLPGGKTGVIVPTIWAEIGDAAGRWESFRHLQAQAGSVPVTKRSGKSKLVQFRYACNKRLRHALDLFAFTTLRRSTWASAYYQQQRARGRHHHEALRALAAKWLKIIFVIWSRQVPYIEEHHLANINRQTTVPVPFLTT

SEQ ID NO: 423871 - protein, 399 aa, unidentified
MVSVGIDVSKGKSMVCIMKPYGEVVAGPMEISHLDTELKMLVKLIKNVNDEVRIIMEATGIYHLPILTFMKEQGLFVSVINPYKMKQFRNQGLRRVKTDKADSVAIAQYGLTNWDSLIDYADSEDRYRELSILSRQYRHYMEIHVSSLLGLTHLLDYVMPGIKQQLNTWNPESGKDKLSDFVEQYWHYDTITRKSEHQFVESYLKWAKKKGYHCNQNKAAKIYSLAKEGIPTLPADQTTKMLVIQAVDVLKRVDETLNTILARMDEVAKSMPEYPVVRAMGGVGDTLAPRLIADIGDVRRFHSGKALIAYAGIDAPPYQSGHFVSTNRSISKRGSPLIRKTGYEVMRSLKAHEMPEDDAVYRFILKKELEGKPKKVAKIAGLNKFLRIYYARVMEVYSI

SEQ ID NO: 423872 - protein, 337 aa, unidentified
MNQVYDHYVAVDWSERNMAIARMTRKAPGVKVIDVPSDVGELKLYLRNLAGSKILVIEETTTAQWLYTELIGEVNRLVVCDPYRNRLLSDGPKNDSIDATKLVKLLRSGMVKEVYHGQGAFVELRRLVSGYEDVIRAGVRLQNQRSAFLRACGRSGAGQERLGESEVFVLEGLERRICDYEADKEAYKRKFAELARKHSEIRHQMGIPGIALIGGVIVVSRVIAAKRFPNRGHYWSYCGLIKHEKMSGGRSYGKRQPRYCRALKSTYKTAAFAAIKGNNEMREHYDYLVQEKGLSDEHARNAVARRIAQISLGVLKSGKEYRPLLRRKIEEKEQPGS

SEQ ID NO: 423873 - protein, 468 aa, unidentified
MARSQSHARSLAQGEIRSTEGLPVINPHAAGADIGAQEIYVCIPGPNQTQMVRSFGTYTADLHALADWLVQNGIQTIAMESTGVYWIPLFEVLEDRRIHCCLISGNLARRLPARHKTDVLDCQWIQTLHSLGLLTESFRPDADLIALRTLLRHRAQLVEHRSPHILHMQKALIHMNVRLDQAVSDPTGDTGLRIIRAIVAGERDPHKLAALRNYRCHKDEDEIAQALTGTWREEHLFVLKQSLEMYDFYTRQIEACDAESERTYTAIRPHWPDPAPDDQEPLPPNKRGSHSKNLPKDSPVQVRRHLRRITGIDLSAVDGLSLDLAQKIVSESGTDMSKFPSEKHFTSWLKLAPNNQITGGKIIRSSTGKSHNRARQAFLQAAASVARSNCAFGAFYRRLKARVGPAQAQVATAHKIARVVDHLLKFKVEYCQMSAQEYEQQFREREIRHLQRKAARLGFTLTPAGAVS

SEQ ID NO: 423874 - protein, 341 aa, unidentified
MKAIVIGVDIAKRVFQLHWVEPETGEMVTLQLKREKFLEHFAKRASCLIGMEACGGSQHWARSLKNLGHEVKLMSARMVKPFVGGNKNDAADARAIWTAVQQPGIKAVAIKSEEQQAVLALHRMREQLVKFRTAQINCLRGLLTEYGEVMPQGRAGVKRAIPGALGRLADRLPAIVIETLREQYARLGDMDEQISQIERRLRQWQSQDLASQRIAAIPGVGLLSATAAVATMGDATAFKSGREFAAWLGLVPRQSGTGGRVRLLGISKRGDKYLRTLLIHGARAVLTHSKSPPEWLTELVKRRPKNVAVVAMANKMARTIWALMAHERTYQAGYVSRPASG

SEQ ID NO: 423875 - protein, 403 aa, unidentified
MNSVGIDISKGRSTVAVMRPFGEVVISPFEVHHTDSELSALARQLKSLNGETRVVMEATGNYHAPVAKLLHDAGLYVSVVNAKLVHGYGNNELRRVKTDKKDAVKLANYGLDRWLTLPRYVPEEGARLLLKNCYRQYRQYSKVQTVLKNNLISLLDTVFPNANRLFSSPIRGDGSEKWVDFVAEFWHCRCVSEKSEKAFANKYQRWCKKHGYNFSVAKAHTIHAEASGHIGVMPKSETTKLLVEQAVAQLRATSVALTALKREMLTLAAQLPEYPVVMGMFGVGPTLGPQLIAEIGDVRRFYSKKALVAYAGLDAPPNDSGDVTGKHKSMSKIGASSLRRTLFLVMSVYLRSAPLDEPVYQFMDRKRAEGKPYHVYMMASANKFLRIYYATVKAYLESLEHTI

SEQ ID NO: 423876 - protein, 317 aa, unidentified
MRNAAGLDISKDTIDVAVIIGDSVQTKKYRNDETGIKQLQSWLQTFEDLPVCMEATGNYYEAAADYLAESFIVYVVNPLKISKYAESRFARTKTDKQDAKLIAEYCQTAKEKDLVHRPKPTDDQYRLSRLIAAYAQINQECTAMKNRCEAAKDSEVRAIFKNIIKNLQKQLKTLKTQIQKQTQKPQYQTRIKRLETIPAIGRLTAAVLLQYLTSADFKTPNKFAAFAGLNPQQKQSGTSVKGKEKITRYGNRKLRTALFMPAMVAYRMKAFPAFIARLEAKNKPKKVIITALMRKLAVIAYHVHKKGEDYDPTRYAA

SEQ ID NO: 423877 - protein, 363 aa, unidentified
MHDSITWIGMDVHKESIVVTGVGNDPERIRARFELPNTDKGVDRLVARLQEFGDVRCVYEAGPCGFELRRVLDSRGIPCDVVAPSLIPKKPGDRVKTDRRDAEKLARLHRMGELTPIHVPSTAQEALRDLVRAREDAKEDVLRRRHRLLKFLLRQGRRHEGKSWTQVHWNWIRSLKFDDANTQTVLAEYVLALDQELERVQRFNLRIEEESRHPDIAPAVARLRTLRGVDTITAMTLISELVDMNRFSNPRELMAFAGLVPSEYSSGGRQCRGRITKTGNAHVRRVLVESAWHYRHPPTGAGPTIRKRREGQPPEVLEIARKAEMRLCKKYRKMTARGKSSRIAVVAVARELAGFVWAIGKNL

SEQ ID NO: 423878 - protein, 409 aa, unidentified
MHPMIERCAGLDVHQGTVMATVRIPDGQGGRQVITETFGTTTAALLTLRDWLQAHGVTHVAMESTGVYWKPVYYVLEDGFTLLLVNVQQLKQVPGRKSDVRDSAWIAQLLEWGLLRASLVLPPALRDLRDLTRYRKHQIRERAREVNRLHRILEDAGIKLSTVATDVMGASGRAMLQALLAGTTDPTVLADLAKGRLRKKLPALREALAGYFRSHHGFLIGQILAKVDFLDETIVSLTEEIDRLVTPFEPILAKLDTIPGVDRKAAVTIVAETGGDMSRFATAGHLCSWAGMCPGQNESAGKRRSGRTRRANRYLRGMLVESALAATRANNTALQARYYRVKRNRGHKKAVVAVGHQILEIAFYIMGNGVTYDELGADYFDRRHAERAVRRHIKQLEALGFHVTIEKAA

SEQ ID NO: 423879 - protein, 390 aa, unidentified
MEHPMQKLNDLSRSLSPLQPDGTLIAVIEMSLSSWLVAGIVPGVERQPLKKLAVDENGLLKLLNRWREEAEKAGHRIERIAVAFEAGRDGFWLARWLRARDIDAHVIHTSSVAVSREHRRAKTDRLDTELLKRSFLGWLRGERDHCKMVAIPTIKDEDAKRPNREHESLVGEQTRIVNRMKAALIRLGIRGFNPKLKKAAERLDGLRTPEGEPIPPNTLAELRRDMVRRRLVSDQIRQIEDVRLERLKQAPSDGPHAMVRLLARVIGVGVETADMLVQEVLSRSMRDRRAVARYAGLTGSPDESGRKRREKGLTRSGNARVRRGMIQLAWRFLMFQKDSALAQWFRARTESARGTRKTMIVALARKLLIALWRLVREGVVPDGVVLRPAS

SEQ ID NO: 423880 - protein, 413 aa, unidentified
MPDHPQLTHFAGFDWARDHHDVVIVDGAGRILDEFRLEHSAAGWRLWQEKIAAYPHLGVAIETSFGAAADLLLESGVSVFPVNPLNAKRYRERKISSGNKSDRHDAWALADALRLDGHGWRRFTAQDPILAELRILCRDEVALIEERTALVNQLQQALAEYYPSALEAFEDWTQPGAWAFVERFPTPAALSKAGQRKWEKFLHSHRLYRPQTAAARLAAFANASEWKTSAPLVAAKSLHAVARVKQLRVLEAQLQEYRRRIEALFASHPDSGTFGSLPGAGAKLAPRILSEIGSERAQYPDAQGLQCVAGTAPVNYQSGKIHKTTMRRACNKNLRHAMHLFADKSRAQCVWAATYYRALRERGQTHAQALRALGQRWLKIIWKMWQTRTAYDGELHLRNQLAHGSWLLQIKPS

SEQ ID NO: 423881 - protein, 344 aa, unidentified
MLYLGLDVHSKWMTVRGFDPETGESISFDKVANDAESLQAVFAALPGPLRGAMESGTNSWAVYRHLEEYFDELLVVDPATVWGKQVRRGAKTDQRDAMSLALKLSKGELVGLYVPDRNTQDMRALARAKINASRQVTRLVSETGSVLRSWGIIVECSLLSKKGEELLENAKKELPDLSLKVLNLWLGMLKEAQSVEKELDAAIKLEAKKNEQCKLLMSIPGVGAFTAFVVCAEIGDISRFESAAHLVSYCGLSPSVSQSADKLHYGKLSKFCNRFLKYALVLRGQDAGRRKDDSPFKRTYWRVAIKNHLNDAKIAVARQLTRVIYAMLKNQQCWDSSRFEHKSA

SEQ ID NO: 423882 - protein, 332 aa, unidentified
MTYIGIDVSKATFVVAYSPEKTSRTRTFKNTANGIHEFIRTISKDEHHCVMEATGNYSALLVYLLSEAGITTSLENPLKVKNFARVMLSTVKTDDVDARLIALYGEKMNPAPYKLRSDAILTLKQKRTVIRQLKKQLIATKNLKGSMEVLPFFDSKCRKSIEQTIAFLAKQVKHLEDDLAVLADSEYKKQMDLLTSIKGIGVTLAAALIMATGGFTYFDNARQLTRYLGLSPTYQQSGTSVNFKGHINRNGDSSLRSQLYVAAFASLRCNTECRACYDRLRSNGKPGKVAVIAVANKLIRQAFAVVTQEKPYVDGYVSTLRSTPASSETGKG

SEQ ID NO: 423883 - protein, 341 aa, unidentified
MDKFIRVGIDLGKGYFQVHGLRVEDGWAVNRKLSRSKMRPFFASIAPCRVGMEACGSAHYWARELVAMGHEVVLMPPGYIKPYVKRGKNDAVDAAAICEAMSRPDMRFVPIKSAAQQAVLMQHKTRELLVKQRTMSVNALRSHLAEFGLVVAKGIGRIDELSELAENDPSLPPEAREMAKLLTLHIEALTRSIDATERKIAKAAAGSKTTRLLDRIPGVGPLTASAIAASVPDPGVFKSGRDFAAWLGLTPKQNSSGGKAKLGAITKQGNPYIRRLLVVGSTSVLRHAGKRKGALAEWIAALRARKPERLVAVALANKLARTCWAIMITGEFFRHEAFAKA

SEQ ID NO: 423884 - protein, 330 aa, unidentified
MDHVAIDWGGRESQICVRSSDGEIVDARRVRTAQLQAYLARRPPSRVLIEACSQAFSIADQARAQGHEVRVVPPTLVRLLGVGERHTKNDRRDAEALSRASCRVELPSVHIPSKESRERKAICTSRDALVRSRTLLVNAVRAALRADGRSVRGTPETLPPRLRAIADELPAHLRSLVTVLECLNGEIGQADRELQRLAKRDELCRRLMTVPGVGPITALRFKAVIDDVSRFDDAHAVQSYLGLVPGQYASSDKQHRLGITKAGSVRLRASLVQAAWCARRCRRQPLMVQWSLEVEKRRGKHVAVVAMARKLVGVLFAMWRDGTEYDPTRA

SEQ ID NO: 423885 - protein, 410 aa, unidentified
MELISLHRRVIALDVHQAQISACGLIEGEDGVVIERRSFETFKRGLRALVDWCLKLRPEVVVMESTGIYWKSPHAWLERAGLNCLVVNAHHVKNVPGRKTDIADPEWLAMLARAGLLRPSFIPPEKLRRLRLVSRQRQKVVGTLAAEKNRLGKVLADAGVRLGVVVSDIHGKSARAMIAALIAGATPAQALKYADRRLKAPREEIAAALEGEISAEHSFVLQQILGHIAFLEASIAKFDAHLLAHLDSPEEKNALALLQTVPGIDLIGAAMLLVEIGTNMALFAGSDHLASWAGMCPGNNRSAGKRKNERQRKANSYVRRLLCEFVQAARKTPCVFQAKHKAVAIRRGFKRAIMACAHKMLRVIWAMLLRKQPYRDSTVDFEALSVRRNAPRWIRALKRFGYLRASAATR

SEQ ID NO: 423886 - protein, 316 aa, unidentified
MPYVGIDVAKNKHDVTALNVQGKTVLKPLTFSNNKAGFELLDLSLRQLNQDCLIALEDTGHYAFNLLNFLHEQGYKVYTYNPLLIKKFAKSLLLRKTKTDKKDAHGIALKLLSDPNREQFQHDNRQVELKILARHIHRLKKKQSDWKVQYTRCLDIIFPELDKIVGKHSEYTYQLLTCYPNPQKRLEAGFDNLIEIKRLTASKIQDILSVAPRSIGTTSPAREFEIIENIKHYKRLIDKAEKCVNDLMAELNSVITTVTGIGNRLGAVILAEIQNIHAFDNPAQLQAFAGLDSSIYQSGQIDLAGRMIKRGSPHLR

SEQ ID NO: 423887 - protein, 310 aa, unidentified
MIVIGIDPHMKTHTAVAVDCATGASLGTRTVSGDGSGHDGLLTWARGLGPERYFAIEDCRHVSGRLERHLLGNGERVVRVPPKMMAGARSSARTYGKSDPIDAACVARAALREPGLPEASLAGPKHDVRLLADHRDDLVDERKRIQKRLRWHCHDLEVDLEMPPRVLDRYVWLDRLQGILEAFPEGTRRRIALAELRQIRELTVAVRDLEREIRGLMRELAPDLLAIPGCSAILAAHLVGQVAGFSRFSGEAAFAMHIGVAPLPVSSGKSCRHRLNRCGNRKLNSAVHMIAVTQARVFDNLIVDHLRVFR

SEQ ID NO: 423888 - protein, 262 aa, unidentified
MTDDTIGIDISKATLDIHRLNDGKTMSFSNCPAGFKALSRFCAKTAVARVVYEATGAYHGGLERALGAHLPLVKVNPLQARRFAQAQGVRAKTDAVDAKMLAEMGNAFALEPDEPASGIQHDLKELRAFRSGLIKDRTSIINRLKTQTLSITSRQSKARLAQVDKQIAEISAELDRLISSCDTLAHSMKILRSIPGIGAVSAATILIEMPEIGRLDRKQVASLTGLAPMARQSGQWRGKSFIQGGRKIVRDALYRECPIFCV

SEQ ID NO: 423889 - protein, 356 aa, unidentified
MTKVTARFENQKVYVGLDVHKRSWNAAIYLNDQFIRNIHQPPQPQALHHYLTHTYPGARYSCAYECGKFGYWIQREFDQLGIECLVVNPADIPSTHKDEVYKTDSRDARGIGEALSKGQLRGVYIPYEEQEADRHLVRQRKKIWRDLVRCKNRIKGFLDYKGIEVPPQYDNANWSRNFITWLSKLEFAHSSNRVTLDYQLTEMELLRKELLSISNAIRKLMRSKKYNRLYYLLRSVTGIGPLTAASLLTEIGDMHRFKNFYHLNSFIGLLPMEHSSGERELKGRITVRKHRQLRSDLVECAWTAKRTDPALALYYSEQIKRGKNGKAAIVKVARKLLSRIRYVWLSGEPYVTAVVK

SEQ ID NO: 423890 - protein, 351 aa, unidentified
MSLVVLGVDPHKQSHTATALAAGSHQQLGSLRVPASTTGYEQLLGWARQFPRRRWAIENARGLGCHLTQWLLARGEIVQDVRTTATARVRELSRGRGRKTDALDAAAAAGIAALQGDTEQLQPDDTTVVLAVLEERRSNLVGQRTRSVNQLHAVLRELIAGGAPRKLSADKAAALLRAVRPLTAADRARKQVAWDLVAEIRGLDRQLAVINKRLQDSVTALGSRLPETVGVGPVIAGRLLGRTGRASRFPTAAHFASYTGAAPLEVASGEHTRHRLSRAGDRQLNHALHLIALVQVRSPSCPGYHYFRRKLAEGKSTREAMRCLKRRIADHVWRVMLADEQARDRHQLQAS

SEQ ID NO: 423891 - protein, 341 aa, unidentified
MNAIYYIGLDIHKKTIAYCIKRIDGTLVQQGTVSAERKALQKWLAELPGPWYGAMEATIFTGWVYDFLKPHAVELKVAHPAMLKAITAAKKKNDRADAEKIADLLRVNLLPECHMMPEELRELRRVLRYRNMIVRTAVKMKNKMSGLLMEVGAIYDKKKLHGKKYFSALLERVEDVPESVIGLLKLSRNGFEMFDDIQKKLVSALRKNKLIRERVERLMSIPGVGELMALTWVLEIGDVTRFSSSRQVISYCGLCSGQHESAGKEQRGPISKQRNKHLQTKLIEAAKLAPHWNEQLALLHEKESARGNKNRATLVVARKLVEFMLAVDRRETDFELLKEAA

SEQ ID NO: 423892 - protein, 410 aa, unidentified
MEVVHARCAGLDVHKKTVVACVRIQDGQGIRHDVRTFDTTTSALMELAQWLHDNGCQHAVVESTGVYWKPVWHVLASDELKLVLANAEHVRNLPGRKSDVKDAEWLSDLLAHGLVASSFVPPEPIVELRDLTRTRRQLVRQRVRHTQRVQKTLEDANIKLDSVISNVLGKSGRRMVEALIAGKTDPVQLAKLADFRLRASDAQLTEALRGRVTEHHRLMLRIHLEQVDATDRTIATLDQEIERMLEPFRAELTLLCTIPGVGALAAQTIVAEIGTNMCQFPTAPQLISWAGLCPQLRESAGKRKNTRLRRGAPWLKPLLVQAAWAAVRNKDCYFRAQFYRLKARRGPKKAIIAVAASILGAAFHILRDAVPYRDLGQAHFDRTDKHKVTSRLLRRLTELGYDVQLTPRAA

SEQ ID NO: 423893 - protein, 336 aa, unidentified
MQITTIGLDLAKHVFQVHGVDADEAVVEKRRLRRGQVLSYFAKLAPCRVGLEACATAHFWARELRRLGHEVRLIPPQYVKAYLKRGKNDAADAAAICEAAMRPSMRFVPIKSEEQQAVLIMHRARDLLVRQRTQVINALRGHLAEFGLIEAQGPWHVRRLLESMRTDLTVPELVRETLDLLATALDAVDAQIDAVETKIAAWHKANPTSQRLATIPGIEPLIASTITATIADAAAFRSGREFAAWLGLTPRQKSTGGKQRLGRITRKGDQYLRRLLIVGAQTVLLRSKAAKANPWIQGLLARCARLKVAVALANKTARIAWAVMMRGECYRPVLAA

SEQ ID NO: 423894 - protein, 351 aa, unidentified
MNTLARSVTGGVDTHLEFHVAAALDERAGLLGIERFDTTTRGYKKLLAWLEAFGPVVLVGVEGTSSYGAGLTRHLHAEGIAVVEVDRPNRQRRRRQGKSDPKDAVSAARAALSGDADGAAKTQDGNVEAIRVLRVARTSARSARSQALNQMRSLVSTAPEPIRGELRGLSVHRLLARASTYRPGTKRDVISLTKLTLRGLARRAIELEEEIRAYDAILEPLVTETAPELVSALGVGPDSAGALLVAAGDNPERLRSEAAFAHLCGAAPLDASSGKQQRHRFDPGGDPQANSALWHIVITRMVYDPRTTAYIERRMKSASSPRRRPCAASSATSPERSSTCSRWTDWSLDSP

SEQ ID NO: 423895 - protein, 385 aa, unidentified
MMLIGIDPHKSTHTATAIAPDTNQEAASIRIDATLREYRRMLTWARQWPQRRWAVENAEGLRRHLTSWLLARGEDVVDVPTTATARVRQLSRGGGRKNDRIDAGAAACVAALQGDARPLEAESYVDAMAVLDERRVNLAQSRVRAVNQLHALLRALIAGGAPRDLSATTAAALLRTVRPNGAVEQARKAVAKDLVTEIRTLDTQLKANAQAIARLVAATGSTLTEVVGVGPIMAGRLISRTGRASRFLTASAFANYAGAAPVEIASAEKSRHRLPRHGDRQLNSALHTIAITQIRIPSSRGHRYYNSKIAEGKTPREAARCLKRRLADHLWRTMINDERRAAGPGGQLGTTLQSSVAGPTPTTNSSDKSLPGPATHDSTTAKPAA

SEQ ID NO: 423896 - protein, 338 aa, unidentified
MKLYGAIDLHSNNNVTVVSDEQDHVVYEKRLPNDLALITQQLSAYRDSLQGIVVESTYNWYWLVDGLMNEGHKIHLANTAAIQQYEGLKYTDDQYDARWLAHLLRLGILPQGYIYPKEPRPVRDLLRKRGQMVRQRTANLLSIQNLFSRNTGGSMSANRVKRLDSEEIDDLIPNADLALAIKANLAMLQCADGQIELLEKAVINRVKLKPEFDLLKTVPGIGLILALTIMLETGDIGRFPTVGDYASYCRCVGSQKISNGKKKSQGNTKNGNKYLAWAYVEAANFAVRYNAKIKSFYQRKKAKTNGISAIKAVAHKLCRACYYIMKEQVAFDVSKAFA

SEQ ID NO: 423897 - protein, 343 aa, unidentified
MGEVSTIGLDIAKSVFQVHGVDGTGAVVMRKRVGRSKMLEFFAGLSPCLIGIEACPSAHYWSRELQALGHTVKLMPPSYVKAYLKRSKNDANDAAAICEAVTRPSMRFIPIKSEQQQSGLMLHRTRQLLIRQRTMLSNAIRGHMAELGIISAKGRNGTAELLQIIANVADERIPPVARFCLELLARQYLSLVAEVSSIDKRIHAWHRSCQESRRLEEIPGIGPIAATALVAEIGDWGTFRSGRSLAAWIGLVPKQHSTGGKERLGSITKQGNRYLRWLLVAGAMAVIRYARQHGTKRAWLTRLMDRRPAKVAAVALANKIARMAWAIMVRSERYREPKLLLAA

SEQ ID NO: 423898 - protein, 339 aa, unidentified
MQIHSVGIDLGKTTFHLVALGAAGKVLVRKKFTQKQLLAYTANMQTSLIGLEACSGAHFLGRALRKQGHDVRLIPAQFVKPFVKSNKNDFIDAEAIAEAVERKNMRFVPIKTDDQLDLQAIHRVRDRLIARRTAVINQLRAFLLERGLVFAKTPAKLKTAMADILENAESDLTSRMRNLIAGLWSEWKLVEQQIEELNDELERISATDAGCTRMRKIPGIGPVVATAIVAAIGNGAAFRKGREFAAWLGIVPRQYSTGGKAKLVGISKRGNAYLRRILIHGARAAVLHIKRDRAPIGAWLDALDARAHKNVVVVAMANKLARIAWAVLSSGNEYRPVAT

SEQ ID NO: 423899 - protein, 332 aa, unidentified
MMAQNDCVVGGIDVAKDKVDACIRSLSQRQTFPSTTEGRRALIRWLRKHKVGKAAMEASGGYERDWAKVLREAGIEVRIVDPKRVRSFARSAGRLAKNDAIDAAMIAWFAETFTDAPGQTCDAARDKLVQIVRARQSLLDLQTSLQNRGEHAAPEVVEKMQARLLKTIAREVAELEAAIAALVKATPHLAELAEIIESVPGLGKITSAGLVAAMPELGQVSNNVAAALLGVAPYDDDSGQRRGDRHIKGGRRKVRNLFYMACLGAATRHNPVLKTFYDRLIAKGKEPKVALTACMRKLICILNTMIARRQKWDANRYKMSDPARLPPSACTA

SEQ ID NO: 423900 - protein, 425 aa, unidentified
MPYRIAGIDVHKKMLAVVVADVEVDGDFHFTRQKVGTTPTDLRALADWLVEQEVEEVVMESTAQYWRPVWEALEQHWRPRRRAREGASRLSGTLHLAQAQSNRGPGGRKKDFPDAERLVKRLVAQELTLSFVPDAEQRLWRTVMRRKYQVTRNRVQLQNRLEALLEEAHIKVSSLVSDLLGISARRMLQALADGETDPAALAALAAPRLRATAEQLCDAFTAAPTLHPVYRRLLKLTLEDLRLIEDHLGQLDQQMAHLLAAHHEAVQRLAEVPGLGVDSAQQIIAEVGATAVTFPSPKHLASWMGACPGNEESAGVNYSHRCPKGNRQMRRVLNQAANAAVKARGSIFAVAYRRLVPRLGHAQTIGAITHRLCRLIWKILHERVRYEERGPAVSAEAKKVPARKMIRELRSLGYRVDLISPAPSV

SEQ ID NO: 423901 - protein, 493 aa, unidentified
MGACELESGDVALAAIPIRKMTIGIAQTLLLIIDWRIAMPKKTTGGRPELKAVNVGAAAIDIGSKMHMAAVNSACADVPVRSFGTFTQDLQDLADWFKACRVTSVTMESTGVYWIPVYEILEQRGFDVILVNARYAKNVPGRKTDVSDAAWLRELHSFGLLRGSFRPDAEIATLRAYLRQRERLVDYAAAHIQHMQKALMEMNLQLHHVVSDITGATGMRIIRAIVAGERNPDVLATYRDVRCHSSIETIRAALVGNDRHEHVFALTQSLELYDVYQAKMLDCDRKLEVLLAGLNDRGAKPVGRLSKPRIKTKQVNAPTFDVRTALYGVLGVDLTEIHGLGPSLALKLVGECGTDLRAWPSAKHFTSWLCLAPGNKISGGKVLSSRTRRSSSRAAALLRLAATTVGRSDTALGAFYRRLSSRAGKSKAVTATARKIAVLFYNTLRHGMSYKDPGADHYEQQYRSRVLANLQRRAKSLGFVLHAIPEDTNPAVS

SEQ ID NO: 423902 - protein, 344 aa, unidentified
MQISILGVDIGKNSFSVVGVDGQGAVILRRKMRRQTLIDFVEKLPRCVIAMEACCGAHHLGRLFAAAGHEVRLMSPEYVRPYVKAQKNDDRDAEGIAEAASRPTMRFVDLKSQEQLDIQTLHRVRSRLVAERTTLINQLRAILLERGVVFPAGRVKFESALDDLIAGGNDVLSPRIRSLILGLRDEWRRLDQKIETLNTEFVALAKQNSAMRRLTSIPGIGVLNATALVAAIGDAGSFQHARDLGAWLGLVPRQFTTGGKARLLGITKRGNTYLRTLLVHGARAAMHTLSQSDTPIGQWLRAMLSRGVARNVVIVALANKLARIAWAVLRKGLPYERSYGVAVN

SEQ ID NO: 423903 - protein, 418 aa, unidentified
MKVVYPTCCGVDVHKAFLVATLITSQGITPHYTKKRFSTFNNSILQFKQWLIDNNCFDVCMESTGKYYVPVYNLLEDTIRITVANPKWVKAVKGNKDDVKDSKWIGDLFRLGLVPGSYIPAKPIRILREYTRYRFKLVSCRSSEKNRFQNAFTVCNVALDAVVSDMFGKSATSITDYLISSDTFDPEYCTSLLQKSLKKKADIVVESIEGYEMTQAQKERMIMVRSHLDYVTKSITELDEKLDMLVKPYEDAINLLCTIPGVNRTSAITIISEIGTDMSQFASSKRLCCWAGLTPGNNESAGKKKSVRITRAGVYLKPALVQVAHAAVKSDEFPYYKIKYERILKRRGKKRAIIAIARMILTAIYHMFVTGEVWNPSDLYKIDMPQEMLEKQKEKAIKQAIKLLISNGLIRATDISAA

SEQ ID NO: 423904 - protein, 344 aa, unidentified
MDNHTQYLGFAGVDLAKKVMQIHFVTADGEITDKSAKRAEFLDFFRNRGKCLIGMEACGSSQDWARKLEAMGHEVHLMSPKAVKPFVSGQKNDHNDAIGIYKAMFNGVRRVPVKSTEIRDLQTLRRIRSQVTKDKVKEINHVRGLLAEYGIVMGKSLNAFNKDISSALEILTERGDVSPLVAEELRTTVEAIKAKIERQKKLDQEIEQLARGCKNYENFLKTPGVGPFTAAMLCVLLCDPSIFANGRQFAAYIGLAPRSRGSGGKNYVTGIPSKFNCDSESRAVLVECAQAIARCKNKSLWVEEILRRKPKKVALIAIANKLARQVWAMANKGESFKQMVVLTA

SEQ ID NO: 423905 - protein, 350 aa, unidentified
MVILGADTHKSTHTVVAIDEVGQQLAERTVPATPAGHRVVMAWAGQFAERRWALEDVRHLSRRLEADLLRAGEHVVRVPTRLMGAARRAGRERGKSDPIDALATARAALREPDLPEAFLEGDERELRLLVDHREDLVAERTRMENRLLWDLHELLPGYVVAPRSLGRRKVLDELAAVLAGIEGLVAEIARERLARIRQLTVRVNELEREIARRTTVIAPALLALAGCGPLSAAKLVGETARAGRFRSRAAFARHNGTAPIPVSSGNRDRQRLNRGGNRQINCALHRIAITQMQHPGPGRSYIERRQLAGDTKTEAIRALRRRISDEVFRRLLIDERSRSTMPRACVQAAA

SEQ ID NO: 423906 - protein, 342 aa, unidentified
MKDRIVIAADIAKNVFECVRFKNDRQVGKVKRYKRHQFSKLLVSREKFTLVMETCSGAQHWARLARQYRHNVILIPPKVVAPYRQGQKTDANDAMAIYEASRRHQLKASVQKTVEQQGLSTLESVRSHYQDRKKSLGNAIRGHLAEFGLVMPKGYKSLRSQMPLILEDAENGLPMSARLAINEYWEDWQRANQQVLRLEKEKLKLLNKFDAAKELLKIEGIGPVSTSGLICVLGDGSAFKRAKEAAAFIGTSPKQHSSGGKEVIIGISKTTGHKKLRAALIQGARSVILRLAAKGKPSSDKERWLAQLIERQGENRAAVALANKNVRTAWALLAHNRQYIAA

SEQ ID NO: 423907 - protein, 414 aa, unidentified
MKKIIHYVGLDVHKNSMAVAIAVEDGGELRSYGTIGGKLADIDKLIKKLEHPEVELRFCYEAGPTGYVLCRHLKKRKYVCEVIAPSLIPQKPSDQVKTNRRDAKMLARLFRAGELTSVHVPDEADEAIRDLERARFSAVKDQRRARQRVKGLLLRQGFAYEGKTSWGPAHLNYLARLKMPHPAQQIAFEEYKAAVTVASQRLQRLSQALEAQLDGWKWKPVVLALMTLRGIQTINAMTLIAELGDLSRFTDPHQLMSYLGLVSSEDSTGDKRHQGGITKAGNEAARRALIEAAQHYRLPARLTPSIQERQHGQTQAVRAIAWKAQQRLHGRYHHLKAKGKTTQVVVTAIARELAGFVWAIACTAMGKAPAARPQPESKTKTPQNSPAPNCQKKTYQLKPTMNYSGSRKSKAAQA

SEQ ID NO: 423908 - protein, 424 aa, unidentified
MSVNNIHPSRPAPLSNPGPGDLAREGVTAGVDWASTEHAVAVVDQQGVELRRATVPHTKAGLSQLVGMLDRAGVREIGIERGDGPMVDALLEAGFVVFVIAPNQVRNLRRRYGAAGNKDDHFDAYVLADTVRTDRHRLTPLAPDTPPTVTLRMSVRARQDLVAARVAMGNQLRAHLAIVLPGAIGLFRDIDSAITLAFLTRFPTQAKVNWLTPRRLENWLRSQRYPNPRRAELLHAHLAGAARGTTDPQADTRAHITAALVAGLQSLRTQIAALEDDIGQQLLVHPDAQIFTSLPKAGTMRAARLLAEIGDCRSRFPTPQALTSLAGATPSTRQSGKVTVVGFRWAVDKQLRGAVMDFAGDSHHANPWAADLYWKARHRGKDHSHATRILARAWLLVIWRCWQDHEAYDPARHRAYQTLQNTVA

SEQ ID NO: 423909 - protein, 393 aa, unidentified
MEKTVKFVIPRTVPEAVLISLELSRSKWLLTVIRPSGDVRLSRYLVAGGDLEDLLAKLSEFRLKASRELGRDVPVITIQEAGYEGFWLHRALEAAGVQSHIVDPASIAQPRRARNAKTDRIDGEMLLRTLMAWLRNDPRVCSMVRPISPEDEDHRRLTRERRELIGERVRLVNRMKGLLLSQGIRDYEPMRPNRRPRLTELRTGDGRALGLNLKHQLERMLDRLELLLAQMKAIEEARLELAETCVAPSTSENNTVSAVNAGSLLMKIKGIGPEFASVMVAEGLFRRFENRRQIASYAGLAPTPWRSGSINREQGISQAGNPRLRTAMIELAWLWLRHQPESRIARWFHARTGPQGGRLKKVMIAALARKLLVALWKYVTQGVLPDGVVLKAA

SEQ ID NO: 423910 - protein, 360 aa, unidentified
MFCERTSVGLDVHARSVVAAAIDGRSGEVFRARLTPSHADVIEWVGKLPGPCAVVYEAGPTGFGLARALSAAGLRCQVAASSKLLRPAGDRVKTDARDALNLARLLRLDEVVPVRIPSAAEEAARDLVRTREAARADLMRARHRLSKLLLRHGIVYYDGKAWTERHDRWLHHQRFDAAPTQSAFEDVYEAVVLATARRARLDEKITALAADSEFSPLTRRLACLRGISTLTGFALAVEIGDWDRFTGASIGAYLGLVPSEYSSGTSRTQGAITKTGNSHVRRLLVEAAWHHRSTYRPGAVLRHRWDQAPAAARARAHAGNQRLHARWVGLNLRRKPAVIANVAVARELAGWCWSLAVLPD

SEQ ID NO: 423911 - protein, 356 aa, unidentified
MKKFLIGIDISKEKFDVTVIKSLGEGFECEQVHYDVYDNKVRGYSAMLKDMTTLGVRCGDSLFCMETTGAYELHLCDYLYGKGYDVWRESALQIKWSTGVAKSKNDKADSERIARYALRHQDAAVLYVPVNETLRTLKALSLYRERLVDERRAKEVSIKEIRATQKMNGDLQWIRTNSEQSVKRLKKDIMECEERIMAVIEGDEELKRTYGHITSIKGIGAVNAVAMIVSTGNFKTIPTARKAASYYGIAPFFAQSGSSVHHRKNVSNLSNRRLKGTLTQAAMCAKRFNEDMKAYYDRLLAAGKPRRVAVNDVRNKLVRIMYALVQNDCDYEPKHEVRRTERVLQTTERHIDKAVG

SEQ ID NO: 423912 - protein, 373 aa, unidentified
MKKVRFLGLDVHAETIAVAVAEPDGEVRSLGIIPNREESVRKLVKKLGPVEQLQACYEAGPTGYVLYWQLTALGVKCEVVAPSLVPVKAGDRVKTDRRDATKLARSYRAGDLTAVWVPNEEHEALRDLVRAREAAKQDQLRARHRLSKFLLRHGRRVPSGIKVWTQRYQDWVKEQVHFEQPAQEFTLLDYVHEVEHMTDRIRRLEQAIGEAVKLAPPGMQEVIQALQALRGIAQISAVTIVAELGEISRFEQARQLMGYSGAVSSEHSSGKRTQHGPITKTGNAHLRRIAMEAAWAYRHRPTIGAALRKRQEGLSEDVKEIAWKAQYRLHKRYRNLVAAGKEKQKVVTAVGRELLGFIWAIGVQVERNSKRVA

SEQ ID NO: 423913 - protein, 337 aa, unidentified
MTRYVGVDLHRRRSVIVVLDSDGTELWTKRIDNDPLTLGLEIEEAGPDPEVVLEATWGWYWAADVIAQAGGSVHLAHPLGIKGFENRRVKNDRIDARLLADLLRMGRLPESWIAPEGIRHQRELVRYRRKLSQLRAGLKAQVHAVLGKEGLRPPITHLWGPGGSVWLDETDMADAYETRVRSLRRLIKIYDTEITKLDARIASVFEGDEGYDTIQQLNGVGPVLAAIFCAELGDVTRFGSAKQVTSWAGLTPRHRESDTTVHRGSITKQGPPLVRWAAIEAISKNHGDDPIKTHYRRVSERRGRNKGRVAAARKLLTLVYYGLRDGEIRSLVPPEAT

SEQ ID NO: 423914 - protein, 323 aa, unidentified
MNKYKEIFGVDISKDVFDVYGSKSGHDQFKNNPSGFKSFLKSLPTESLVIMEATGYYHYRLAQFLFKQNVLVSVVNPLSVKRFIQMKLAKVKTDKSDAKAICEYGQINEVPLYTALTDVQSECLQLFRLLDSYLKKRTMTKNKLHGEAVLDIPSKHVYRSLTRNKKHLDTEIASIETKLLSLVKQDQQAQLTLLKSIPGLGVKTALFLIVITDGFTKFETASQLCSYVGITPTIRQSGSSVRGRSRISKVGNKKLRNLLFLCSFSACKHNKGCREIYERIVNKGKSKKLALIAVSNKLLKQAFAIAKSGHPYDETFVSVLISK

SEQ ID NO: 423915 - protein, 418 aa, unidentified
MKIVFPTCCGVDVHKSFLVATIIKTPQNSLQQSYQKKRFSTFNSDLNRFADWLRENDCLDVCMESTGKYWVPVFNILEKQGIRVVIANPKWVKAVKGNKDDTKDSKWIGDLFRIGLVKSSFIPNKEIRILRELTRYRYKLISMKSSEKNRFQNAFTVCNVALDSVVSDMFGKSATAITDYLTSDVEFDAQHCISLLQRSLKKKAPAVLEAVEGHEIAPEQKTRIGIVRDHLHYIDKLVERVDDCVEGMVQKYEGAITLLRTIPGVDRSSAITILSEIGIDMAQFGSSKRLCCWAGLTPGNNESAGKKKSVRISRAGVYLKPALVQVAHAAVKDKSSTYYAVKYERISKRRGKKRAIIAIARMILTAVFCMLSTGEVWNPVDLYKVDMPEHLKEKQLAKAVKQAVHFLETQGLTVLDSA

SEQ ID NO: 423916 - protein, 324 aa, unidentified
MQSDSNANCWAGIDVSKDWVDVVVLVEENKVEQLRCARSASALAGLAETLLPYRPQGVVLEATGGLEGSVIAALSGAGLPVMRMNPKRVRDFAGAHGLLAKTDALDAYALALFGARMRPALRAWPEAERQQLAAWVAREQQLIVERATERTRLQQASEPALRKSVERVIAFLGKEIERLEKQLAAWVAASETWSGQEALLRTAPGVGPKTALRLLAQLPELGHVNRRQIAALVGVAPFACDSGKWRGRRSIRGGRAGVRAILYLASWSAVRAAGALRTFYFRLVAAGKPKQLALIAVARKLLLALNEMMRTSQPWRSANAAVSA

SEQ ID NO: 423917 - protein, 376 aa, unidentified
MGTPSAQTLDDVGVREIFQKLEEVPLMTMVGGLDVHRAQITFDYVDDDGLVHWGQIRAATRKTLRGWLAEHCPDGDAEFALEGCTGWRYVSEELAGAGVGVHLGDPAEIAVLRGPKKRAKTDRADARLLRTLLLQGRFPESWIAPAHVLEIRTLGRLYCTLMDERRAWQQRIHAQLFHQGCPPVRALLSVTGRAALAGAELSAVGGQYVDTALGRIDELSTEIEPLRAQLVNFARHQTGCQALQRHYGIGWLCAAIIWAEIGDARRFSSPDQLVRFAGLDVTVYSSDGKRSPGHLSRQGSPELRWAAFEAAKCAARRGSPDYGYYRKLAAKRDGHNGKNPTLAVERKILRRCHHTLRELGDAAVALPVAEPQEVAA

SEQ ID NO: 423918 - protein, 353 aa, unidentified
MKFYSKQHKYYCGVDLHARSLYVCIIDQKGKIVKHKNIDATPADFLEIIKKYRKDIVVAVECMFSWYWVADLCREEKISFVLGHALYMKAIHGGKAKNDRIDSHKIAVLLRGGMIPEAYVYPSEMRATRDLLRRRNHLMRKRAELLAHIQNTNHQYNLPRFMKNICYKGNREGIAEQFSNECVRKSVEVNITLIDQYDQLLRHLEYYIDKKAKVHDPEALFRLRSVPGIGHTLALIILYEVHDIKRFPRVQDFVSYSRLVKPSKESAGKHYGHSGGKIGNAHLKWAFSEAAVLMLRESSDIKKYKAKLQRKHGKAKALTILAHKIGRAVYYMLKRKEVFNAERFLNKQLIQTG

SEQ ID NO: 423919 - protein, 454 aa, unidentified
MSKLEKPTREALNLQMVHPDAAGIDIGNATHYVAVPLDRDAEPVRSFGCFTEDLRKMADWLTQCRIVTVALQSTGVYWLPVYEVLAARGIRVFLVNARHTKNLPGRKSDVQECQWLLKLHTYGLLNDSFRPSEEICVLRTYWRQRDDHVKAAGASIQRMQKVLTEMNVQIANVISDISGLTGMAILDAILSGERDRYQLAELAHPRIQASKEEIAKSLEGNWRSELLFVLRQERETYRAYQPRIAECDRALEAHLKTLEDKAEPGTKPQTPKAGKRAGGNAPQFDLRGELYRVSRIDLTRIDGINVMIAQTIFAEVGFDMSRWRTEAHFASWLGLCPDNKITGGKVYGRGSRHVENRAAIAFRMAATSLWCSKTYLGAKFKRLRSRLGAPKAITAMAHNLARLVYRMLKYGYDYVDKGMEFYQQRYQQQQINWIHKKARDLGLLITVAPAPVVN

SEQ ID NO: 423920 - protein, 362 aa, unidentified
MEKYIFAGIDQGDKNSVARIAVDREKGERLGFVNTRGGRARLFKELNRQAEQAGGAKILLAYEASSCGFVLRDEAQARGMICWVLAPTKMEKSVEQKRNKNDDRDADDVLEKLRGHVLAGNRLPTVWVPDMETRDDREVLRTRLALSEKQTQVKAQIQMLLKRYGLEKPADLGSTRSKPYRQWLESLCVCASLGWGTRQSLASLLRQLSGIEEEMGNLDKLVRQLGSQPRHKPIVEALMKEKGVGLLTALVYRTEIGQASRFRRGRQVGKFVGLTPTSHESGQQQDRKGHISRQGPPRLRKVVCQASWVHVRYDPHSREVYQRLVDKNPKKKKIALVAVMRRLSVRLWHRMLEAELELKTQP

SEQ ID NO: 423921 - protein, 355 aa, unidentified
MSQEKYIGMDVHAATISAAVRNAEGKLLMECVLETKAATILEFIQGLRGTLALTFEEGTMATWLHDLLKPHVSRLVVCDPRKNALMRDGNQNDRVDARNLAELLRTHHVHAVYHEKHGARALKELGRSYLTLTKDSTRVRNRIKSVYRSWAIPCAGTSVYSRRHRAEWLAKLVEPGVRIRVEHLYEQLDSLQPVRQAARRELLRESRKHAAVKLLQQIPAIGPIRSALLVAILQTPHRFRTKRQLWAYSGFAVQTYDSGEYRFVRGKLQRNRERITVRGLNHNHNHDLKNLLKGAAITAIERPGPLQDFYAALVDKGIRPSMARLTLARKIAAITLTIWKKGVSFDPKQLQRQAA

SEQ ID NO: 423922 - protein, 344 aa, unidentified
MSQVITIGLDIAKNVFHAHGADERGVAVFSRKLSRSKLLDFFAAQPACLVAMEACSGAHHWARELTRLGHEVRLIPPAYVKPFVKRHKNDAIDAEAICEAAQRPGMRFVAIKTEEQQAAGMVFRTRDVLVRQRTQLINALRGHLAEYGWVAPRGVAQVAMLADLIEEEEMASSLPEAARTMLAVMTDMLAVLDHRIAGLDKEIARRAREDEVARRLMTIPGIGPIAATAIVALAPQAATFDKGRDFAAWLGLAPLQHPTGGKQKLGRISKMGERTIRRLLIIGGSAVVRQATMRGAPAGSWLEGMLARKPRMLVSVALANKMARIAWALMTRQEDYKAPVAVAA

SEQ ID NO: 423923 - protein, 365 aa, unidentified
MQKISTMQASEKNIFEGQLSIGLDLGDRSSAYCVLNEAGEIVLEHKLATTPEAMKQVFVSLPRCRIAMETGTHSPWVSRLLTALGHEVIVGHAQKVRLISKSRRKDDRLDARTLARLARIDPELLSPVKHRSAQAQLHLTEIRARAVLVSARTALVNAARGLVKSYGERLRKCGTQQFSWETTSGLSTGLREALEPLLREVESLNERIQEYDRRIEKMAKQTYPETALLKQVKGVGDLIATTYVLTIEDPHRFRKSRDAGCFVGLQPGRRNSGESEPQMRISKEGDEYLRTLLVQGAHYILGPFGKDSDLRRWGQKLSARGGKNAKKRAVVAVARKLAVLLHRLWVGGEVYEPLRNSQKAMSAAA

SEQ ID NO: 423924 - protein, 312 aa, unidentified
MDTTFIGLDVGKASLDVFISGRNKTETVSNTPSGLATLARRLSSLPNPHVILEATGGYERLAHELLTQAGIAVSIVNPAQVRQMARGMGRKAKTDAIDAAVLAEFGRIRCSDPTPLPCEEQRRLEELLTYRRQLIDERVRLNNQIPHFRDPMVKASAAERFDAILADIVRIEKAMQEIVQQTPHLQALYALITSVPGIGPISAFTLIAQLPELGKLTRKQIAALVGVAPFNRDSGKFKGHRSIRGGRPQVRTVLYMAALVAMTHNKSFKEFRDSLVSRGKPKKLAIIACVRKLVTVLNAIIRDTKPWQAKSA

SEQ ID NO: 423925 - protein, 408 aa, unidentified
MNTLYVGIDVSSKSNVVYLMLPNGDKHSNFSVANSHEGSTQLVKRILSALTSHSLDTVLIGLEATSVYGDNLVYFLREDATLAPFNRKIHVLNPKQVKKFHDAYNDLPKNDYVDSFVIADCLRFGRINKEVYMGDYRYKALQNLTRARFFAVQNLVKEKQRFMNVLFKKYSTMTQEKVFSDTFSTTALAVYDEFESAEALANMDLHELTDFIIEKGKNRFPDPDAVAKAIQKAARSSYRLPKTVNDSVNQVLSISITSMKALESQIKEFDKAIKAQMELLPNVLISIPGIGPVYSAGIMAEIGDINRFNSQAALAKYAGLAWKQHQSGGFESEVIRLIPSGNRFLKYYLCEAAFSLVRCDKKYSDFYHLKYKEVNRCQHKRALALTARKFVRLVFRLLKDNRLYCPAK

SEQ ID NO: 423926 - protein, 330 aa, unidentified
MDLAKNVFAIHGVDDVGKAVWVQPRVPRAQLLAAFSHLPPCLIGMEACSGAHHWARQLLAMGHKVRLIAPKFVTPYRLSGKRGKNDAADAAAICEAVQRPHLRFVPIKSVEQQARLAVHRMRQGFVEQRTALINRLRGLLSEFGIVMAQKAATVRRLASEQVDSLPGWMRVATRDALDELARLDERISDYDAHLRHIARDDPRCQQLQQLPGIGDTTATALVSQIGNGQDFHCGRQLAAWLGLVPGQHSSGGKARLGRITKAGDAYLRSLLVMGARAVLASAKGKNDAISRWILALEARRGYWRAVVAMAAKNARMAWAMLRHGEAFVMP

SEQ ID NO: 423927 - protein, 337 aa, unidentified
MNYIGIDVAKSTLQVFIPKNELDIEIENSHKGFQKLYAKLKKLYKKSIDEIVFIYESTGSYSAILEAYAQEKQIQCFRVGAYQSASFSKVIKNRNKTDKVDARMLSQMHILAKEGEIGVPHRDKEAHRIRSLIKYYQSLVKEERRKTNYLEAASFNLEDGYVLKKVKKHIKRLQKEQQEVIEVILEIIHHNPSYHQAFTNILSIKGIGEKSAIILLYLFLRYPNASRQHITALCGLDPIQRSSGVSVQHKERISKQGLTLVRDILYMPTLVAVRYNDEMQLIYERLVARGKPKMVAQMAVMRKIVLLAHSLYKNNEKYDAKRYLNFTQVENNIETEG

SEQ ID NO: 423928 - protein, 410 aa, unidentified
MVWHEVACGLDVHRSSLVACLVRGGPGGPGEVEERRFGTTGGEVAGFRAWLEAAGCQALGMEATGVFWRPVFREMEGRMRVMVANPAHVKAIRGRKTDRKDAAWLAGKVQEDSLPGSFIPAPEVREGREWARLHTNLVRARTQARNQTLKLLLGAGIPLSAVLSDVFGASGMGLLEALATGRTAWEELEGKLRGRARLKASQIQLALEVCLRDGEREQLSFQLQRLKTLDEQVAEVDRHLREWSDAYRAKRILLTTIPGIGELAAQLILAEVGPDLTAFPSAKHFAAWLGLAPASHETGGKSRPAGTRKGNHRLQSLLVECAQATARTKGCSLRGKYLGLKARMPAQKAIVAIAHKLALIIYRVLMDEVPYQEKETDTPPSPHRARLLRQAIRLIQDLGGTVHMSPSSNT

SEQ ID NO: 423929 - protein, 353 aa, unidentified
MANPMANLTIGVDLGDRYSELYVVDAAGACVETGRIRTTVAGLEQWFGGRPPARVVLEAGTHSPWASRVLPRLGHEVLVANPRKLRGLYENDSKDDRVDAEYLARVGRLDPALLKPITHRGEAAQADLAVLSSRDVLVRARTLLINHTRGVVKALGGRLPRCSAEAFARRVGPHVPPAVRPALAPVLEQLQQLTTTIRGFDRAVEQRCAQSYPETARLRQVTGVGPVTALAYVVVLDDPTRFRRSRAVGAYLGLRPRRSQSGEQDPQLRITKAGNPFLRRLVVQAAHYILGPHGPDCDLRRHGERIAARGGKNAKKRAVIAVARKLAVLLHHLWISGEVYEPLRHRPALAQAS

SEQ ID NO: 423930 - protein, 377 aa, unidentified
MSSMPQNTIDPDPSPLVAMSRVVIGGVDTHKELHVAAVIDTGENVLATHSFSTTRAGYRALVRWVRSFGDIARIGVEGTGSYGAGLTRHLSDAGIEVLEVDRPDRSERRRKGKDDDLDAINAARAALHRRRTSTPKSKDGAVESLRVLRVTRNTAIRARRNALQLLRMSIVSAPEELRDQVRNLTRMQLIRTCAAWRPDTTNAVDPVSATRIALKSLARRILELGDEIAMLDELIEPIVTMLAPQLLDRVGIGIEVAGQLLVTAGDNRQRMRTEAAFAMFCGVAPLPASSGMTQRHRLNRGGDRQANSALHLAVVTRMRIDERTQAYVAKKTAEGHSKLEIIRCLKRYLAREVYYLLNSTAGGTTTAAMNRQCDTAA

SEQ ID NO: 423931 - protein, 405 aa, unidentified
MASIGRGRNTARFDAKGESVAERDVTHDGAALSELCAWLIEVTGAQPAQIAVAIETPRGPIVETLLERGFVVYSINPKQLDRFRDRFTVAGAKDDSRDAHVLASSVRTDRRAFRRLTFDDPLIIELREWLRIEDELKQERIRLSNRVREQLWRYYPQANRLSDDVADDWFLDLWEQVPTPATAAQVNENTVAKILKTRRIRRFNAAEALAILRQQPLQVAPGTAKAATAHIRTMAVRLRLINEQIKQAERRLDELCAGIKASAPGQICEQRDVAILRSFPGLGRINIAALLAEACQPLRERDYQVLRVLSGSAPVSRRSGKSWIVLRRYACNNRLRNAIYHWARVAIQHDAVSKRRYDELRRRGHGRARALRGVGDRLLYVLCKLLQRQTPYDPEYKIQQMQLTA

SEQ ID NO: 423932 - protein, 316 aa, unidentified
MADVEVFVGIDVSKARLDVATVPGEQTWSVGNDEDGLVELVDKLKELTPKLVLLEATGGLERRALARLVGAGLPAMAINPRNVRDFGRSLGKLAKTDRIDAVILGRFAQAVRPELRPLADQQTQELQALLTRRRQIVEMLTAEKNRLLATDPQKCRRQIKAHIEYLQKALAINEYDIDQSIKQTPVWLEKIDLLESAPGVGRVTASTLIALLPELGTLGRKQIASLAGVAPFNRDSGTLRGRRAIWGGRATVRSVLYMAALTSTRWNPAIRVLYRRLKAAGKPSKVALVACMRKLLTILNAMLRARTPWRSPEIPA

SEQ ID NO: 423933 - protein, 437 aa, unidentified
MAEGRGAVGQDESYGWFVGIDWATQAHQVCVLDGEGHRVAERSVTHAGGAIAEFVDWLVDLAGGQPECVAMAIEVPRGALVETLVERGFHVYALNPKQLDRFRDRYTVAGAKDDRRDAFVLAASLRTDRPAFRRVRLDDPVIVELREYSRMDDDLRDELTRLANRLREQLHRFFPQMLELVPAADEPWLWTLLEIVPTPQAVPRLKRQRIEKVLRTHRIRRFDAAAVLAALGTPPLPAGPGTVEAASAHVALLLPRLRLVSDQRLRCGRQIDALLTRLGESDGPSGPNRAPTDVRILRSLVGVGSRVSATMFAEAAQLLADRDYPALRAHSGIAPVTRQSGKRKQVVMRHACNGRLRGAVYHWAFISVQHDERSAATYAEYRGRGHTHGRALRGVADRLLRTLIAMLRSRTLYDPQLAHRSARTGASVGAAHAEITP

SEQ ID NO: 423934 - protein, 417 aa, unidentified
MKSDAESIPIQRFIAIDLHKKYVMIGGQNKRKDWVLRPRKVRMSRFRDWAAKNLRPGDAVVIEATSNTWDIYDLVAPLVTKTVVAHPGKVRQIAEARVKTDKEDIKRLITLLIADVVPEVWVPPMHVRELRSLVSFRWRLSKQITMSKNRLHSVIQSANLNPPQGKILADKNLSWWQQQKFSELTDFQVQLDQQIVEQLEAHKANIDQKLAIMSNSKPWADDIVFLMQIPGFGIIFSMIVLSAIGDISRFERPKKLAGYAGLGAGVHDSGEKHQEKSITKEGRKELRWAMVEVAWGAVRSDPYWKTEYNRLSKSKHPNKAIVAIARRLLVAVWHILSKREPYQHFDEEIIAYKMITWSQRMNEEALKGMTRQQFAKYGLLRLGIGEDITRIHHNGKPRRIAPTEEVLSLKPELRPPK

SEQ ID NO: 423935 - protein, 331 aa, unidentified
MTNAAREAAADARPLDYIGIDMAKARFEWGVHGAQSTQGATNDAPGFETLLAELREHRVGLIVIEATGGLEHALASVLLQHALPVAVVNPRAAREFARSMGHLAKTDAIDALALAHYAHTLAHKANQAGVQLMPLPVHLESLQAMVLRRKQLTDMRTAELNRRGGAMRVLRKSIDAVVKTLNQQIDALNKDIGMHLDEHFKDLNRRFDSIQGVGPNTCAAVIAFMPELGRISNARAAKLVGLAPLNNDSGNSRGKRSIWGGRTLVRGALYMATLSAVRFNPVIKAFYLRLLAAGKCKKAALTACSHKLLRILNAMARTGQAWSPELHRITA

SEQ ID NO: 423936 - protein, 396 aa, unidentified
MLSTNLQNPIDFKGQKFYVGLDVHKKSWAVTIRSLGIQVGHFTQPPGADTLLKYLQRNFPGGQYHSAYEAGFCGTGIHEQLCELGIKNIVVHAADIPATDKQKKNKTDLHDSRSIADYLEKGNLKGIHVFTRDQQELRSLFRLREAKVKEVTRSNNRLKSFLMYFDIQIPETVSKKEQLSLKALAWLNFELVSAAGTIALQQHVEELKYQRKRLSEITKQLRRQIQAFHAKSYECLLSVPGIGAVTAMGLIAEIADFGRFDDPDEYCSLLGLCPWEDSSGNTIKTKGMQPRCNKHLRPLLVEASWTAIRRSPVLFAYYSKHAVKDSKKAIVKVARKLALAARGVVLKQQLYQEDYLQKKRAEQATQKEASKRRFSSGITEQHINKQPGNVLASQPG

SEQ ID NO: 423937 - protein, 339 aa, unidentified
MQQIAFVDTETGELQERRLQHREEAEKFYRDLAAQEMKVRVGMEASGHARWFERLLAELQFELWIGDAAEIRTRRVRKQKTDRQDAQLILKLMLKDDFPRIWVPSWENRDLRQLLWHRHRMVQARTRIMNQLQAVALKEGLHCKKRLWREAGREQLESFRLAPWASRRRRDLLELLDRLNPTIAELSQAIQQEAEKCPEAQRLRTHPGVGSLTALAFVLILGKADRFQCGKQIASYLGLVPLEESSGNRQRLGHITKQGNSLLRFLLVEAAQVTVRSLPEWRSKYFHLAMRRGRKIAKVAMARRLAVRMFWMMRKGWDYEQLNKFGSHAGQPGHRHGVQ

SEQ ID NO: 423938 - protein, 366 aa, unidentified
MKKISTVAMEGIQIFKENQLTIGLDLGDRTSYYCVLNEVGEVIWEDKLPTTPRGIQEVFRRTPRSRIVLETGTHSPWVSRQLSELGHEVIVAHARNVQLIRESSRKDDRLDARTLARLARIDPGLLSPVRHRSAKAQIHLTVIRARATLVSARTALVNAARGLTKSYGARLPKCGSEQMSREIAQGLSEELREALDPLLAEIESLNERIAEYDRRIAKVAKEVYPQVALLQQVKGVGPLIALTYILTLDDPHRFRRSRDAGCFLGLRPGRRNSGMSEPQMHISKEGDGYLRTLLVQGAHYILGPFGQDSDLRRWGLKLAKRGGKNAKKRAVVAVARKLAVLLHKLWVSGEVYEPLRNNHTVVATVA

SEQ ID NO: 423939 - protein, 348 aa, unidentified
MRFYTKQHQFYCGIDLHARTMYLCIVNRDGEILLHRNMPAGPDPFLKAITPYREDLVVCVECIFTWYWLADLCAREAIPFVLGHALYMKAIHGGKAKNDKIDAQKIAVLLRGGMLPQAYVYPAAMRATRDLLRRRIHLMRKRAELLAHVQNTNSQYNLPEIGKKIAYKANRDGVAERFPDPAVQKSIEVDLALIGHYDDLLRDVELSILKAAKQDDANTLYLLRTVPGIGEILSLVLLYEIHDIQRFPRVQDFVSYCRLVKCAKESAGKRYGTSGTKIGNAYLKWAFSEAAVLFLRNNPPGQKYLTRLEKKHGKGKALTVLAHKLARAVYHMLKRHTAFDMQRFLQSA

SEQ ID NO: 423940 - protein, 425 aa, unidentified
MTVYCGIDWAEGHHDIALIDEEGRLVGKRRIEESLDGLAELTAMLAAAGDSADDPIPVAIETPRGLLVAALRATGRPIYAINPLAVARYRERSSVSGKKSDHADALTLANILRTDRHRHRRLPDDSDLARSITVLARGYQDAVWRRTKLVQELRDRLREYYPGFLATFARTSGMSTTRLASAEARAVLAIAPSPAEAATVSRARVQAALRRAGRTRNIASVTADIVAALRIAQPRQAQLVEQAMRTQTLALLDVLNAICGSVEQLSAALIDAFTQHPDYEIITSFPGLADISGAIVLGEIGDDRARFTDDRALQAFAGSAPVTRASGKTRAVIRRRTKNNRLAAAGHCWAFTAAGRPSPAREHYLRRRARGDGHPAALRHLFNRMLGQLHHCLTTSQTYDPIKAFPHATTVVGTGHVESAAAAAA

SEQ ID NO: 423941 - protein, 499 aa, unidentified
MAPCPANRRLVVRGRIEECSSTGHGLCHLSINKSNDITMAKKAKKVKSAKGAELRIVNPDAAGIDIADGIMQVCIPADRSKDNNRAFEAYTSDLHAISAWLRECGIKTVAMESTGVYWIPLFCRLQEDGLDVVLTNARDVKNITERKTDESDAEWLMLLHQYGLLKASFQPHNDAKRMRTLTRHRDTLSREASSMVLRMQKAMQQMNIKLTLVLSDITGKSGIRIIEAILAGERDPKKLAELADIQRKTPKEEIAKALEGNWEEDLMFVLRQNYDTFKHYCTQLGECDAELEKLMENYRAEVAKVEDTSYSPAKKRRDYKKTRHTVSFDVERKAYEMWGVNVFEIPGISHLTALELMSELGHDFTRKFPSSKQFCCWCNISPNTKISGGKRISSHVPHRRNNVGLIFRSIASSLANAKNQLGNFYRRIRSRAGGKAAVIATAHKVAEIFFAMVANQTTYNPERVGIDEKVLLEKRITRYKRELERITGTHIEIGNACVP

SEQ ID NO: 423942 - protein, 432 aa, unidentified
MAKQTGNAPEVAAFVGWDWADKQHEVALQQVGTAKVERQTIAQNPESLREWVKGLRARFGDAKIAVAIEQARGPVIYALMAYDFIVLYPINPKSLARFREALRPSRAKDDPTDAELLLELLTKHRDRFRPWMPDGQTVREMRMLVEYRRVTVNEQGRYTKRLKSLLKCYFPQALELVGDLSEELAWDFITQWPTLDAVKEAGQAAISEFYAKHRCRRKKIDHRLNQISQATPLTTDAAVVAASVIIVQTIISQLRCFGEAIKKVENRIAELYAEHPDRDLFDSFPGAGAALAPRLAVAWGTDRSRYNSADEMLSFSGVAPVTEASGNSKWVHRSYARPKFMHQTFVEFARQSVLQSAWAKAYYAERKRLGHSRNDILRSLAFKWIRIMYRCWSGRVPYDENSYLASLQQRGSYLAKLASEVSLTRVCPDAAS

SEQ ID NO: 423943 - protein, 362 aa, unidentified
MLKSTTIIAFDQHAATTMAAVLLPAHRTPALHPLKSDPPTILRFVARLQRQGAVTCCYEAGPCGFELQRALTAKGIACDVIAPALIPRRPGDRIKTDRRDAGQLAVLYRAGALTAIHIPTEQEEAARDLLRCREDIRADLLRARHRLSKFLLRHGRRFTATKKAWSKRHDAWLRAHTWPLPALDQTHRAYLRAVDEVLARLRDVETDLQALLALEPLRPRVQRLRCFRGIDDLTALTIAAELGDPRRFATAPSTMAFVGLVPSEHSSGSKRAQGGITKTGNAHLRRVLVESAWHYRHHPFVSATLRARQRGAPAQVIARAWTAQQRLHRRYQRLAARGKPKQHVVTAVARELTGFVWAALTQ

SEQ ID NO: 423944 - protein, 431 aa, unidentified
MDTQQFEVIRPKCAGLDVHKKSVVAAVCTSDPVTLMASYKTKVFNTTNSDIAALRDWLLAQDCRDVCMESTGKYWIPIFNILEPHMHVILTHPKYVKAIKGKKTDKRDAKWIANLFRFDIVKASFIPPADIRALRELSRYRLKLSYMRTAEKNRYQNSMTISRIRIDGVLTDPFGLSATRIMDYLLSGEPFDEEKCRSLIDRRVKASKDEVMDAVHGYHILEEQKFKMTHAKAHMDFINKSIDEIEAELFLRSRQYDVQIKRIATVTGITELSALFILSEIGADMSVFESDRHLCSWAGLTPANNESANKKKSTRCSKAGQYLKPLLIQCALAAVKSKKEPYFAIKYQRLSRRRGKKKAIIAIARMMLTSIYHMLSDNENFHPDDYEATIHPPKQKPVVLTLDNTLQFLREQGADPETLKLIQQQCTEQAG

SEQ ID NO: 423945 - protein, 427 aa, unidentified
MNTEGNTRVSRRYVALDIHKHYCVVAGVDREGRVVLQPVRVEHADLEGWLKKNLRSSDHVVIESTTNAWHVYDLLSPLVERVVVANPIKVKQIANARVKTDIRDTLILARLLAANLVPEVWVPPAHVRELRQLLSQRRQLVETHTGTLNRMHSVAHRHHLSHARGQRFNEKTTAWQKDKRLSKIEQFQLELEMENRAYIEKQIGRIGKEVAKMSHQKPWAQSMTYLMQLPGFGVITAMTVLAAIGEIQRFESPRHLASYSGLTPGLEQSGTKNRGKGITKEGRTPALASGAREELRWAMVEVAQRAVKSDPHWKRRFQELQHRMHRNQAIVAIAHYLLELVWFVLTRHQPYRHFSHERIAYKYLTWAWQMDDVARDGLTRQQFTRYYLMRLGVGHDLTRIALDPKHPRRLASESELLILRPELQKTE

SEQ ID NO: 423946 - protein, 341 aa, unidentified
MNVTTVGIDLAKSVFQIHGVNKNGKAVLRKQLRRQQMAEFFVNLPPCLIGMEACGSAHHWARKLQAMGHTVRLMAPQFVKPYVKTNKNDAADAEAICEAVARPNMRFVPIKNVEQQAVLALHRARQGFVTARTAQANQVRGLLAEFGLVIPQGFATLVLRVPEMLEDATNELPGSFRLLVQRLLDHLKELDRQVQEIEAQIVAWHRESTLSRKLAAVPGVGPITASALVATVGDAKSFDSGRQLAAWLGLVPRQNSSGGKNVLLGISKRGDTYLRTLLIHGGRAVIRAAQRKNIQIDGWLGELLQRRHKNVAAVALANKNARVMWALLAHGREFEAQYKEA

SEQ ID NO: 423947 - protein, 403 aa, unidentified
MVVRKLGDQEDLPTLQRGLYCRKNYGTEPQPRRQVMKKSITFIGLDVHKNSIDVAIADEGRNAEVRYYGSIGGGLDDIDRLVKKLAIPSKELRFVYEAGPCGYDIFRSLTEKGFDCSVCSPAHIPKSPGNRIKTDRRDAMMLARLHRSGELTYVFVPRADDEAMRDLTRAREDAIKAQRVARQQLGSMLLRLGIKYPRNNWTIQHFRWLSDQKMPMPAQQVVFQEYIYAIRETTDRVERLTKQIESLVSSWRMAPVVYALHALRGVSLIVSSTMIAELGDLSRFTSPKQLMSFLGLVPSEHSSGDKKVRGSITKTGNSHARRALVEAGQAYSYQARITRRLLKRQEGLSQEVREIAWKCQVRLCARFRRLMMKGKNRNTVVTAIARELVAFMWAIAKQVPIAA

SEQ ID NO: 423948 - protein, 359 aa, unidentified
MLVERTCVGLDVHARSVVATAIDGVTGELSQARLTPSHDHIRSWIEQFDGPVAVVYEAGPTGFGLYRALNPVGVRCVVAAPSKLQRPPGDRVKTDAKDAVHLARLLRLGEITAVTVPTVDQEAARDLVRAREDCRGDLMRARHRLSKLLLRHGFVYSGGQAWTGVHDQWLRRQRFDHRATTMAFESGYEAVTAITARRGRLEKAIAELAAGSEFTPIVHRLGCLRGIATLTAFALAVEIGDWNRFTGSSIASFVGLVPSEHSSGASRVQGSITKTGNTHVRRLLVEAAWQHRPAYRPGKVMRDRWDLADPAARARGDAGNRRLHQRWVQFNLRRKRPVIANIAIARELAGWCWSLAVMG

SEQ ID NO: 423949 - protein, 367 aa, unidentified
MTNEKLNNSKVCVEQVASTKAQTLKLGLDVHADSIVVVRIVDHSAPQPAQKFSPAKFREWVKGQLRLAEAVHSCYEAGPFGYGLHRYLVKWGIHNLVVQPVCLDERHTGVNHDKSDAKELALRLDRYVAGNTHALATVRVPSPAEEQARIASRQREQLKREVLRLAAQGRSLLLTQGYRAKRGWWGAKRWAELEVKLPAWLAERLEVFRRLLTTLTGELEAATAALEATAPAVRPKGLGGLSYEVIEREVGDWGRFANRRQVASYTGLCGGVSASGQSRHLLPITKHGNVRLRTALVELAWRLVIWQRDCKLVKKWWPVLSRPKATKAARKKAIVAIARQLAVDCWRWRTGKITPQALGWVMVGPPA

SEQ ID NO: 423950 - protein, 433 aa, unidentified
MQNPPPFDLVIGLDRSDRKADLHLINTHTLERRNCVIDTGPEALWEWLLQLRQQHPRARVGLCLEQPAGHLVSFLETYDWITLYPINPITLQKYREAFVTSRAKDDTRDAYFLADLLLTHHHKLQPWAPEDSATRAVQQRVFHRRSVVDERTVLTNRLQALLKQYFPQALVLCGEDLWRPLATAFLLKWPSLGAVRKAKTATIQQFYHLQGSRSQKLIEQRLELIEKAVPVTDEAAVIDSFVLRVQLLAGELQLVQKTITEFDRQIALAYAAHPDREIFASFPGAGPVLGPRLLCSLGAQRERFEAARDLQCYTGVAPVTKRSGGSCCIHRRHLCPKFHRQSFHEYARESILWSRAAAAFYLQQRNKGCPHHTAVRALAFKWQRILFRCWQARKPYREETYEAALRKHGSPIVALFDRIEAGKSPWKNPVKKN

SEQ ID NO: 423951 - protein, 398 aa, unidentified
MTKNHILGLDIAQDSVVAQLDLADGTKCWRETITTDQAGWKTLEQALTGRGARWAGTLVVLEATGVYHLPWAERLTKAGAEVHVLNPLLAARLQSVANALREHKTDRVDAHRLCEAGRLYADQLGRFRYRPEPARQGLKQLTSVRATLRASLTNLKKSLLSQIEVVFPAMIRAGLDPSTERAATILATAPTAGNWLALPEEQRRRLAGGKQAALDAACEATLADEALAQACAPAVLTLVNAQKTLAGELEECDRLIAPKLPAERVALITSVPGFGERTSAVLSVYLPADFEGWGNAKQVASRLQALFGTDPRLKQSGKWTGKIKISKRGIGAGRTALFQAAFCSLAHDPENLAYYQKLRRAGKDHKQAMVDLMRKQLRRLVSVLLSKRPFTPRTHVAA

SEQ ID NO: 423952 - protein, 347 aa, unidentified
MATMAQRPAKVTVGVDTHGDVHVAAALDDLGRLVGTISVPSTANGYRRLLQWANAFGEVEAVGIEGTGAYGAGLARYLAERDVRVVEVDRPDRRTRRAKGKSDPVDAEAAARAVLSGAARGTPKSRDGAVEMIRTLRVCRRSASQSRTQTVNQMHSLVTTAPEEIRAVLRDLTPRELVARATSFRPGEACSPVSAMKLALRELALRHRFLTEQLRRLDAELKPVVTAAAPRLVAINGVGTQIAGQLLVTAGDNPERLRSESAFAHLCGVAPVPASSGKTARHRLSRAGDRAANYAMWRVVMVRLTSDDRTKAYMARRRSEGLSKREVIRCLKRYVAREVYRSLVDER

SEQ ID NO: 423953 - protein, 352 aa, unidentified
MLIIGCDYHPSMQQIALVDTETGERGERRLMHRDGEAERFYRELKQRRVEVRVGMEATGYARWFERLLAELSFELWIGDPARIRARRVRKQKTDRQDAQLLLRLLLEEDGFPRIWVPSPENRDLRQLLWHRHRLVQMRTRIMNQLQAVAMNEGLRRKRALWSEAGRKQLESFLLAPWATRRRKDLLELMDRLNPTIRELTGAVEKEAENKPEVQLLMSHPGVGPLTGLAFVLIIGTPQRFHCGKQMGSYLGLIPCEDSSADRQRLGHISKQGSSLLRFLLVEAAQVAARVDAEWRRRFLHLAMRRGRKIAKVAMARRVAVGLYWMWRKEWDYQQVVKFGSHVGQLELRHGVQ

SEQ ID NO: 423954 - protein, 348 aa, unidentified
MRGAVHMQITTIGLDIAKNVFQVHGIDAVENVVVRKRLRRSQVLAFFQALPPCLVGMEACATAHYWAREFTKLGHEVRLMPAKDVKAYVKRNKNDAADAEAICEAVRRPTMRFVRIKSGAEPPHRSPRRRRDLLMRQRTQVINALRAHLAELGIVAAQGDKGVKELLALVADKEDTRLPIDARASVIILAAQLEATQTVIGAIEKRIKMQHRSNAASQRVETIPGIGVIGATAIAATVADPTVFRSGRDFAAWIGLVPRQDSTGGKQKLGPISKQGDRYLRRILVIGAVSVLRRALENPGKYPWLTQLLARRPFKVVAVALANKMARMAWALLAKGGTYQAPTLTAAA

SEQ ID NO: 423955 - protein, 340 aa, unidentified
MGEITTIGLDLAKQVFQVHGIDADGTTVLRKQLRRSQVLSFFSRLAPCLVGMEACATAHYWGRELAALGHEVRLMPAQYVKAYIKRNKNDAADAEAICEAVVRPTMRFVPAKTAEQQAALLLHRGRERLVRQRTGLVNALRGHLAEFGVIAPQGLRNVGKLIAVVRDPSDARLPDLARQVLEVLAAQIEQLEGAVAAVEKQLMAWHKSNPVSQRLATIPGIGPIIASAIAASVAEPGGFRSGREFAAWLGLVPRQNSTGGKHRLGGISKRGNQYLRRLLINGARANLLRSKATKADPWVIGLRRRRPSLVVAVALANKTARIAWAVMQRNENYQRMAAAA

SEQ ID NO: 423956 - protein, 343 aa, unidentified
MTPTQQTYNHVVAFEVSKEALVVHTLPADEQLTIANKPQAVRRLLKSQLKHNRKPNLGPILIVCEATGGYERHVLDAAIDLGLRVHRAHGARVRYFARYCGLIAKTDPIDARVLAHYGVKTDKLRLYVPPSPETAALRALHARRTEIQQMMIAETSRLDQAHHKSVVKSLKAHIAQLKSALEAIEDEIAQLVRDNAALKKKVELMRTVIGIGPVSAMVLLAYLPDIGSLTKGEVARLCGLAPINNDSGKKRGPRHVEAGRTAIRRALYMAAVVAMKANPVIKRFADRLRAKGYPFKYVAVAVMRKLVVILNAVLRDGQPWKGAQVVLDGTLGNPIKQRLNTKS

SEQ ID NO: 423957 - protein, 416 aa, unidentified
MELFVGVDLGNYEHQVCVLGVDRRVLEEFAVQANGLGERVLLERLRRLTEGDLSSCKAGTEATAGPIVEALQEAGVQVYGINPKQVDRFRDRHSVAGAKDDRRDALVLAGALATDLRSFRALSPVSEETIELRGLSREAEELKEDLRRTCNRIRSELLRYYPQVLELSPGADERWIWDLLELAPTPAEARRKTKGKIAGLLKANRIRRYKADEVRAKLKEPQVSAAAGVAKSASKHVRRLIGRARLLDQQLREIGRQTDALLAELTTDDSEAGDGNQSRQRDAKTLLSLPGAGRAVVATLLTEATEAISQRDYQSLRAQAGVAPVTRASGRRRSVSFRRACNPRLREALFHFAGVAIQHDTSARAHYDAQRAAGHGHPRALRGVGDRLLRIVVSMLRSGSSYDPSRCVYKRAASAA

SEQ ID NO: 423958 - protein, 408 aa, unidentified
MKTLHRRCAGLDVHSDTVVACARLTARTKASHEVRRFSTATHNLLELADWLAGQGITHVAMEATGVYWKPIWHMLEGRFELVLANAAHIRNVPGRKSDVNDAVWISDLLAHGLIRASFVPPAPIQELRDLTRTRTQLTRELAQHIQRIQKTLEGANIKLVSAISDIVGMSGRRILKAIIAGETNAMRLTELGSTRLKCSRSELAAALDGRVTTHHRFLIDHHLGLIEELERHISAFDARIGEVLAPFRDTVERLITTPGVGRGAAEVILAEIGPDMSAFPTAGHLLSWAGVVPRLDESAGKRRSTRVRHGAPWLKPVLVQCAWGAARAKGTYLQAQFFRLKARRGPKKAAIAVAASILTAVYHMLKDGTFYQDLGADYLVKRDPARTVAKLARRIKDLGFDVQYRATA

SEQ ID NO: 423959 - protein, 425 aa, unidentified
MSDNNGMMVAYPVNATEIVIEEFECYTRDLRRLSETLKSHKIESIAMESTGVYWIPLFLLLQEDGFEVYLVNAKHVKNVTGRKDDEGDAEWLQKLHRCGLLSASFQPDNRTRALRSVVRHRDSLVKTRSTYLNRMQKALELMNLKIHTVISDIDGKTGPAIINAILAGERNSERPADLRDPRIKASREEIIKSLEGFWSDEHLFELEQCYKLYKFHNEMLTDCDKKIETILQEIIKSKNNGIMPQLGKLKKKQNYKNNISINVTNYLYELNKVDIVGKKGITGISEITALTIYSEIGDNLNRFKDEKHFTSWLGLAPNTKISGGKIISSRVPKKKHYAGQVFRMAAMSLSGNKGPLGDYYRRIRSIAGKQKAIVALARKLAVIYYRTITTKEEYNPQFLIDYHEKWKNRKIKNLEKYLNKLKGVA

SEQ ID NO: 423960 - protein, 344 aa, unidentified
MEHYAGLDVSVKDTSVCVIDGAGKTIREVKVASEPEAILAVLADDALAIERIGLEAGPLSQWLYSGLAEAGLPVICVETRHMKAALSAQLNKSDRNDARGIAHMMRVGLYRPVHVKTLASQKRRMLLTSRQLLQAKALDIENDLRGTLRNFGLKVGMVGVAKFEARIRELVVDHADLAAITEPLLIARRVLREQLGVLHRRLLAVVRRDEVCRRLMTVPGVGPIVALTFRATVDVPARFKNSKAVGAVFGLTPRRHQSGEIDRMGSISKCGDAMVRTALFEAAQVMLTRTIRWSWLKAWGMKIARHRGMKRAIVAVARRMAVIMHRMWADGTEFRWTRPTAEAV

SEQ ID NO: 423961 - protein, 345 aa, unidentified
MELSTVGIDLAKTVFHLVGLNLLGEVVVRKKVSRAQLLRFTANLSVKLIGMEACGGAHFLGRALREQGHEVRLMPAQYVKPYVKTNKNDYIDAEAIAEAVSRPRMRFVPIKTDDQLDMQSLHRVRERWVMRRTAIVNQVRGLLLERGITLQKGRSHVDALLPRILEDADLKLSGALRTLLAQLKLELDQMAMRINEADTILNRTARENTSCRRLVAIPGIGPVTATALIAAIGNGAAFRKGREFAAWMGVVPRECSTGGKQKLLGISKRGNSYLRRLFIQGARAVLQQSTKQTSGLSAWLANLKARTHTNVVAVALANKLARMAWAVLAKDEPYRPPMLANLVAA

SEQ ID NO: 423962 - protein, 404 aa, unidentified
MWYTGIDWADEHHDALTIDEKGHQMGSIRVDHTPQGFAKLDTFLMQIIGSASKEQMACIIETTHGLLIVHLLEAGWPVYPVNPRTVDRRRAASGAKTDTIDAYLLAKTGRADFADLHRLTPDSDKVAELKQLTRDQDSLIRTQTRLVNQLTACLKAYYPVALDLFSKLQQKSTLGFLQAYPTLEIARAASLQEIQQQLKHTRHPHPADTAASIVELLHHPQLQADVVLTRTKSRLMLALVSQLLPLMEQIATYDKEIHTLFLTHEDHAIFESLPRAGQHLAPRLLAEIGDDRQRYQDASSLQALAGTSPVLYQSGMYSKAHRRLGCIKPLRNALYQFAWQSTQSEAWAQDYYQRKRTEGKSHTVAIRGLANVWVRIIFAMWTHRECYQTATFELAQQHHARTAA

SEQ ID NO: 423963 - protein, 388 aa, unidentified
MRVIADRTETPSAIRSDLGAIFVSMELSRSTWLITSLSPGGGEKMSKHGMPAGDIGALRARFSELRRKALARSGKSFPIIVIQEAGLDGFWVHRALENEGIESHVVDPASIATSRRRRRAKTDRIDGEALLRALLAHKRGEPRVCAMVKAPTPEDEDRRRLCRERKVLTNERILHVNRIKGLLFSQGASGYEPLRRDRRRRLDELKTGDGRPLPPHLKAQISRELDRLELLLEQIKAVEAERDTLLAARQAVTPAPATMLLDIKGIGLEFAAVLWSEGLFRHFDNRRQVAAYAGLAPTPWQSGSVDREQGVSKAGNPRLRTTLIQLPWLWLRHQPQSALALWFKERVSRNGGRLKKTTIVALARKLLVALWKYVTAGVVIEGAVMKAA

SEQ ID NO: 423964 - protein, 395 aa, unidentified
MKTNSDTPRALYLGLDVHKEKTSIAILEAERDAEPRLYGEIGTTQHALERAIRRIAKSNDRKLSDLHVCYEASGCGFWIARRLLQMGVRCEVIAPSLIPTKSGDRVKTDKRDAMKLAKNLRSNDLVPVNIPDSVDEAVRDLCRGRTDAVDDLRRARARLLALLRRLGYKYDGKTHWSQAHMNYLRGLKMPDSAHHIVLEDNLTLIDFHEKRVERIETEMLNLLGGWQRKPLVDALMAFKGFKLVAAMVTVSEIGTFSRFEHPKKLMAFLGLVPSENSSGGKQRQGGITKCGNPHARWLLIEQATHYRFPPKISEQLSRRQTGQARWILELSWSTQLRLSTRFMSLAKRRLHHNKIKVSVARELCAFIWELGTRIESKTPIKKTSKTSAMPARRKN

SEQ ID NO: 423965 - protein, 344 aa, unidentified
MTLVGCDLHTRKQQVAVLDTETGETHERQLVHEGSAVEEFYAALPRPVTVGIESTGYAIWFHALMHRLGHTVLVGDAAKIRAMVVRKTKTDQRDARHLLDLLRHDRFPTVWVPDPATRDLRALLTHRRRLVRIQTMLKNGLHAIALNQRLVRGSKLLRRAGLAQLQALPLPPYTAQRRDHSLELLETLHSRIQELDAAIATAALAHPDAPRLLTHPGVGSLTALATVVVLGPVARFADAKHVVSYVGLAPSLNASADKYRLGHITKQGSSLLRWVLGQAAPHAARLDPDLKRTYCTLHHRRGRAKARVAVTRKLLVRLFIMLRDHIDYAEFRRRGRPPAAVPAG

SEQ ID NO: 423966 - protein, 414 aa, unidentified
MKSARNTLPTEPVNGLTSGIDWARDDHALSIVNAEGREITRDTISHDAAGLRDLITTLDQAGVCEVSIERPDGPVVAALLEAGVTVVVISPNQLKNLRGRYGSAGNKDDRFDAFVLADTLRTDRARLHPLLPDSPATVALRQTCRARKDLVAHRVAVANQLRAHLMIVFPGAVGLFAEIDSPINLAFLTRFDCQERADWLSVTRWANWLASVGYSGRTHPRELHRRLTSATRGAPGLSGTTITAAYVATLTTLHDQIKTLDDSIAEQLSTHTDAHIFTSLPRSGTFRAARLLAEIGDCRARFPTPESLACLAGVAPSTRQSGKVKHVGFRWAADKQLRDAVCDFAGDSRRANPWAADLYNRARARGHDHPHAVRILARAWLYIIWHCWQDNTTYDPDQHRALQQLLNRTQPGAA

SEQ ID NO: 423967 - protein, 459 aa, unidentified
MMGRNKSKNKDRQTMSVLNPNAAAIDVGATMHMAAVNADRTPEPVRSFGTFTADLHRLVDWFAECGVDTVVMESTSVYWIPIFELLDSRGFAVFLVNARDAKHVPGRKTDVSDAQWLQRLHSFGLLRASFRPKGQIAELRAYLRQRERLLEYGASHIQHMQKALTEMNVQLHHVVTDITGVTGLRIIRAILAGERNPTVLARMRDRRCHATMETIAKALTGNYRAEHLFALEQALALYDTYQQKAFACDARIEAVLKELSVRRGREGGQLPAARRNRSHQQNAMLFDVRAALFALLGKDLTQIDGLGPYLALKLIAECGDDLSVWPSAKHFTSWLCLAPSNKISGGKVLSSRTRRSGSRAAALLRLAAATVGRTDTALGAFYRRLSARIGKAKAVTATARKIAVLFYNAVQHGMDYVDPGASSYETRYRARVIANLQRRAKAFGFALQPIGPPPSIAVS

SEQ ID NO: 423968 - protein, 367 aa, unidentified
MFQLLTRQEESEMNATTVAVDLAKNVFELALADGNGRVIERHRLTRTQFERWFDNRKVDRVVMEACGSAHHWGRWLEARGIAVKLLPAQYVRAYVKRNKTDAADAAALLEAARAADIKPVAVKSIEQQALQGLHRLRSGWMATRTRRINTLRGFCREFGLEIRVGAVQGLAAIARLIADDRSAIPALLRTPMRLALEEIRLMEARIEHLERELAQLARQSPACEALTSVPGIGLLTSTAMVAAVRDPRSFDSGRRYASFFGLTPREYSSGEHRYLGRISKRGDRYIRMLLTHGARSVLRAATAAQRQGRKLDRLRTWALQVQARTNHNKATCALANKLARIAWAVWVKHEKFQSTPAHPSMAAEVAT

SEQ ID NO: 423969 - protein, 387 aa, unidentified
MTRSNQTSDFVPGNFDIFAGLDVDKKSMSITFTDHGTLQRSLRLPYSATQLLNYTRKHFPGQRVAFVYEAGPTGFGLYDELTRAQRHCLMVTPAMVPSAPRNRVKTNRLDSKKLSEGLRGGQLKGIHVPPQIFRELRHLVQLRDTQVSQLSATKCRIKSLLLFEGLPFPDAKGKWSGRVLRELEKLPCHPGVRFKLDCLIDALQFHFQTAAKVQKEIRRFCDNQAELKQAITWLTSLPGVGTITATHALARLGDWRQIKNVRQIAGFLGLVSSEHSTGEKENRGEITRIGDQRLRNKLIQCAWIAIRKDPELRAFYRRIYQQRPKKTAARIAIVAVARKLTTRMYAVLKEQRPFVIRADSSIAPLTAEETTGLRERLDIAQNDELSF

SEQ ID NO: 423970 - protein, 410 aa, unidentified
MKVAGMDVHKKVLMVVVVDASAPEDKPARRRFVTMPSELHRLLTWLREQGVEEAVMESTAQYWRSVWLELEPHMRLHLAQAFSNRAPRGRKHDFKDAERLVRRLIAKELILSFVPNGEQRIWRSMTRMKLQLTRDRVRLQNQIECLLEEMRIKLSIVVSNLLGASGLRILQALAKGETDPKKLAQLGGERLQCTEEQLVDALTGRAQPVHQQMLGLQLERLQLIDQQMERLNSMIAAAMKPQQDAVIRLAEVPGLGVDSAQQIIAEVGAQASTFPSAGELTSWVGTCPGKDESAEQNHSSRSAKGNKYLRRVLNQAAHAAVAKKGSHFQAVFRRLLPRLGYQSAIWAVAHRLCRLVWKILHEGVRFIEQGTEVGPREKKKRAQMLARALRKLGYEVTITPINQLAPKPAV

SEQ ID NO: 423971 - protein, 360 aa, unidentified
MKKDTKVESGLTVGVDLGDRWSRYCVLDQQGQILEEDTIASTGRAFRSLFGERPAARVVIEVGTHSPWVQRLLQELGHETITANPRYVRLIYSSRNKNDKLDAERLARLARVDTKLLHPIQHRGGTAQADRALLRSRNALVECRTKLVNHARGIVKSVGGRLPTCSTTCFHKRVRQDLPGELKPALTPVLDTLAALTKKIQCLEARIERLAAKRYPETGLLRQVSGVGPLTSFSFVLTLEDPERFKHSRAVGPYLGLRPRQSQSGESDPELRITKAGDTDLRRLLVGSAHYILGPFGPDTDLRRWGLALAARGRKNAKKRAVVAVARKLAVLLHRLWVTAEVYEPLRNNKSLIVPEAVSA

SEQ ID NO: 423972 - protein, 346 aa, unidentified
MEISRVGVDLAKNVFQLHGADSKGKTVWKRQLSRDKWLKVIFASVKPGTVIGMEACTGAHHWSRILISKGYEVTIIPPQFVKPFVKSNKNDANDAQAICEAMARPNMHSVKVKTIEQQDMQAIHRVRNEIKNHRIAKANQIRGLVAEYGLVAPKELSSLRRAIPEWLEDASNGLTLFFRQLLQGLYEDLYSMDKRMAELDKQITVIAQQDPIAKRLQQLRGIGPLIATALVATMGDAKQYRKGRDMAAAIGLTPRQHSSGGKDRLLGISKRGDAYLRCLLVHGARSAMRTAKDKDDRLSRWITNLQDRRHANVAACAMANKMVRMAWAMMTKGVDYDPDFHSITAN

SEQ ID NO: 423973 - protein, 407 aa, unidentified
MSRDYMGVDWADTEHAIWVEDERGAKVTALTIPHTAVGLSEFGRWLYERRAQGIEVWAAIERPEGRIVDFLLDHGVVVYPVNPKALDRARDRFRMSGAKSDPFDARVLATFLRTDHAHLRPLLPDSEAAQELRLLTRDYQRLVRQQTRLVNQLTATLKEYYPRPLEVLDLTTPLAQAFLQAYPTPAALAALTPKTWQRWARARRLSEAHSQEMWATLSQPQLPVPAHVVRAKARLVDALVAQLATTVRLVQEYREAVEGFFASLPAADWARTLPAGKSGTTVPTLWAELGDAPGRWASFRHLQGQAGAVPVTERSGKLEVVKFRFACNTHLRYAIHQVAWLSLQRSEWARAYYTQYRKRGHGHHAALRALGAKWLKIIFVMWSRQVPYDEQYHLATMARQQLRRAAA

SEQ ID NO: 423974 - protein, 397 aa, unidentified
MKNRYGSVAYGGMDVHRKFSSVTLRDAEGRVVVRERLDHEDRRQMRQHLRRWPAGTPLVMEASFGWPWVSDEVEAAGHAPMLSNCYKVEQMRKARGQVKTNTKDADLLSALPAEPTRWWEVWRAPPDVRDLREWMRHRADLVILQTEVKNRVHALLARHGVFHPFSDLFGGQGRAFLQRLCEDGRHAHGPLPPGTLEAIRSDVRVLWTLRAELATITWRLRGRLTRDPLTRRLKTIPGIGLILAHVVASEVGVIERFRSHRALASYACLAPRSDDTGEPDPRRTPLGRHLGDRGNRTLKWAFIQAAHGAVRHGDRWRAMFDRHTAGGTKNRGRGYVKVARELVKVVFVVWSRDVDYTETPSPRPGSRPARRRRRTSRPGTGQPHVAMVKANGLKTSV

SEQ ID NO: 423975 - protein, 326 aa, unidentified
MQSFLGVDVSKAKLDVALWLPNDKFKSKVFANDRQGHQALVQWLKGQLPDGLQDLHICMESTGSYHEALACAVHDQGLKVSVVNPLLVKRFAQSNGQRNKTDGADAKCLAQFCKEKRPERWQAPSAGVRALQALVARLGTLQDMRLAECNRRDVAHPSVTNSIACVIAELEAAIAQVKAQIAQTIDDDPDLKRRAQLLETIPGLGEKSIAQLLAYIGRPERFNNVKAVSAFASLTPMIQQSGTSLDKRRGTHPMGHQELKRALYFPAMVAGRHNPLVAAFWNRLKAQGKPGKVIVVACMHKLLAIAYGVLRSGQPFNANHPKPQAA

SEQ ID NO: 423976 - protein, 459 aa, unidentified
MGNRKEKQEAPKIDWKALDVVHRDAAGIDIGGKEHWVAISPERDKQPVRCFDCFTSDLEQMADWLAARGVRSVAMQSTGVYWMPVFEILQPRGMEVYLVNARHTKNLPGRKSDIAECQWLLKLHTFGLLNNSFQPTDAVRAMRTLWRHRGGLVAQASSAIQRMQKALVEMNIQLRNVLSDLSGASGMAILQAILAGERDPRKLAALADPQVKASKEAITKSLQGNWRPELLFVLGQEMEIYRGCQDKMAACDRQLQKQLRDMESKVDLRKQPISPRPKRKRGGRGNSPKFDLRTELYRLTGVDWSQVDGIDVQVAQSVIAEVGVNMQAFPSEKHFANWLGLCPTNETSGGKVLKRRTPKVVNRAKVAFRQAASTLIRSQSYLGAQYRRLRTRWGAPKAITAMARKLACLFYRLLTKGQQYVDRGAAYYEDRHREQQIRSVLKRAQQLGLQVIQSERQAA

SEQ ID NO: 423977 - protein, 340 aa, unidentified
MTITTIGLDLAKSVFQAHGVDESGATVLVKKLHRKQMLPFFSKLAPCLVGVEACGTAHYWARTLAAMGHEVRLIPPSYVKAYVKRGKSDALDAEAICEAVQRPTMRFVPVKTVEQQAILMIHRARSLLVRQRTMLANALRAHLAELGFVANPGIANLAKLAEQVMADKNALPAYARTALEMLIRQIMTISGEIEVLDRQLTVWHAESEASRRLAAIPGLGVITATALVATVTDPDQFRSGRQFAAWLGLTPRQHSTGGKTRLGGISKQGDRYLRRLLVVGATAVMRHIKDKPTPMADWIRKLLEKKPFRLVSVALANKLARIVWVVLTRKEAYQPYAHLT

SEQ ID NO: 423978 - protein, 490 aa, unidentified
MANRKHQPATAARQTKAHAQRQAKAHAKVEVRRQQDIDRVNALPITHRHAAGIAIGGSSHWVCVGFTQDEHPQLIRALPAHTAGLQQIVALLREHPVSTVAMEATGIYWVPLYELLQSEGFEVLLVDPSYTKQVQGRPTTDKRDAQWIYRLHAVGLLAGAFRPDDKTCPLRSYLRQRAKLIRYGGQHVPHMHKALEQRNLKLMTVRSDLTGVTGQKILGAILRGTRDPSKLAAYRHPKCQATAEALLQALTGSGREEPVFRLRQAYEAWQFYQKPIDKVEEQIQTQLRRMKTDRALPPLKPKPRTRGRKPNEPRFDVRRALYYAIGLDRTEIEGIDEVTALVILSAIGVDLSKLETAKRFCSWLGLCPQFRQTGGKVKSSRRRPGTNRTATALRLAANSLHSSKSALGAFLRRRKSRLGAPAAITATAHKRARLVYYALKNGLPYVKKRQEEYERLLRETQIRAVKRKARQLGLKVTESIAEESVMELPT

SEQ ID NO: 423979 - protein, 348 aa, unidentified
MDACYEGRQVVGIDVHRRRSVLVRMTETGDRLETVRIVNDRERLAAVMARAGEAPEVVLEATYGWYWAADTLAELGANVHLAHPLGVKAFSYRRVKNDERDAEDLADLLRMGRLPEAWIAPPVTRELRELVRHRAKLVALRTSVKCQVHAVIAAAGVPVTMSDLFGLEGSELLKTVDLPSASRARIDSNRRIIAALDWEVELFSNLVAGRLRNDPGYRAVQTIPGVGPTLAAVFVAEIGDITRFQRPAQLASWAGLTPRHHESDTTVHRGRITKQGSRLVRWAAVEAAQHAGKQEQLGQLKERVAARRGRNIATVAAARKLIELVFYGLRDHEIRCLNTSPTSRRRAA

SEQ ID NO: 423980 - protein, 416 aa, unidentified
MKKGQDTRGYKRYMALDIHREYLLVGGQNAEQEWVLTPRRVSIEKFPEWAKKNIRSGDIVVLETTTNVWTIYDIVAPLASRVLVANAAEVGEIANARVKTDKEDVKRLLKLLIGGIVPEVWVPPLHVRELRAFISYRGRLVKTSTMIRNRLQSLLHKHNLLLSEAGLLDQVWWEAQKNISPLEKMQIRQELALLQEVEKLKVAVDEELQRQSTSSTWGKPALQLLQLPGVGFIVAMTVLAAIGDISRFENAKQLVGYAGIGAGVHDSGKTHKEKKITKKGRRELRWAMVEAAWRAVGMSPFWKAEYEKHLRRMRKPNQAIVVIARKLLIAVWHVLSKEEIDVHASEEDLAYKMLLLSWSLSEDVRLGLTYKQFAKYALMKLGVETDITRFVRRNVPRRLAPREEVLARMAELGIAA

SEQ ID NO: 423981 - protein, 337 aa, unidentified
MKYTGIDLHSNNSVISVIDDTDKVVAEKRLPNDLAKILAFLEPHKAEMDGVVVESTYNWYWLVDGLQEAGYTVHLANTTAIKKYEGLKHSSDETDARHLAQMLRLRILPTGSILPTLHRDTRDMARKRLQLVNMRTMQILSVETMLSRTTGKRLASNQIKRLQVNDVPGLGLREDVALALQANIAVIEVLQRQITELEQHLQDRVGSQDDYKRLKSVPGIGTVLATTILLETGSIDRFAGPGNYASYARCVSSEYTSNGKKKGTGNTKNGNKYLSWAFVEAAHFAKRFCPEAKRFYDRKRAKGNTALATKALAHKLARAAYYVLKRQEPFDMNRCFT

SEQ ID NO: 423982 - protein, 355 aa, unidentified
MESVKYLGFDVHQSTISVAVVNADGKLVMQSVIATHAATILDFIHGLRGTLYLTFEEGTHSAWLYDLLARRVARVVVCNPRQNALLKAGNKSDTSDARKLAELLRAGLLAPVYHGEGSTRTLQELVRSYAALTEDTTRVMGRVKALYRSQAIACAGKKPYGRRHRREWLSKLSEAGLHRRAERLYEELDALQGLRRAAKRELVLESRKHAAAKLLRTVPLLGAIRAALLIGRVQTPHRFRSKRQFWAYCGLALETRSSADYRFEDGQLVRAKKPVFIRGLNRNHNHDLKDLFKSAATTASVIHGPFREFYEGLLAKGMQPAMARLTLARKIAAITLSVWKKGESFDAEQLKPQAA

SEQ ID NO: 423983 - protein, 392 aa, unidentified
MYIVGIDIGKNHHEASIVSPEGKQIGRSLRFATTHKGADSLMSFIFKNIGNSPCVFGMEATGHYWYPIYSFLKAKGYTICVINPIQSDSLRKMYIRQTKNDSIDSFLIAEVIRFGQFGTTSMADENILAMRQLCRYRDSVISSRTEIKLRIGTIMEQIFPEYEKQFSSLWVSTSMGILEKYLTPENIENAPIDELFEIIKDKSHNRLTRAKAISIKEAAADTFGIKIAQDAFSFQLKQLIDRMNFLDKQIEALDCQILEYYEKFDCYLHTIPGIGMIATATILAEIGDIHRFKSSSALVAFAGIDPTVRQSGEFNSTHNHMSKRGSPYLRHAIFLAATTCSFHNSPLNAYYKKKRDQGKHHLTATGAVARKLTTVIYAVLRDSKPYEPKKFC

SEQ ID NO: 423984 - protein, 415 aa, unidentified
MEVLHERCAGLDVHKNTVVGCVRLAQGGRVEKEVKTFKTTTGELLALAEWLDGHRVNHVVMEATGVYWKPVWHILDDGERQLVLANAAHVKNVPGRKSDVSDCDWLSDLEAHGLIRPSFVPDGPTQELRGLLRTRKQLVRERTSHTLRLQKTLEDANIKLDSVISNVVGVSGRRMIEALVAGESDPTALANLADRRIKAPPEALCEALRGRVTRHHRFLLSLHLGHIDAIDQAIDKIDQEVEASLQPFCQAVGLVKTIPGVSQLAGQGIIAEIGSDMSRFPTCGHLISWAGLCPRSDESAGKRRSTRTRKGNPWLKTLLVQCAWAATRTKATYLHAQFLSIRSRRGARKAIVAVAASILTAVYHMLKNGTSYRDLGPQHLENRNKEAQARRLLARLRRLGFVADFDTLRPVPVSC

SEQ ID NO: 423985 - protein, 358 aa, unidentified
MNSSEKISFSGSHFFIGIDTHLKNWKVTIRSQGIELKTLSMNPSPIELLNYLRKRYPEGIYHIVYEAGFCGFWVARKFKELGVDSIVVNPADVPTSNKEKVNKNDPIDSRKLSRELENKSLTGIYIPDIFHEELRSLMRLRYRIVQNQTRIKNRIKGLLHTRGFKIPEEFTGNKRWSAAFIKWLKEEIKFNTAAGNFAFHNMIQQLLQLREHNKNVLKQLREEAKKKEIAPIIEALQSSAGIGFITAMTFYTEIIDMKRFSYEDQTNTFVGLVPSTRSSDDNLYGNGISFRQNKYLRPLIIEAAWRAVREDPAMTLKYKELTKRMKPQEAIIRIAKKLVKRIRHVWLKQEEYVYALVA

SEQ ID NO: 423986 - protein, 428 aa, unidentified
MLKINPLSTFYVGIDVSSKSNYVCALDFYKNKYINSSFANNQPGAEELAKKILECLKEHPDLNTIVAALESTSVYSIHIANFLSSCEELMHFKPYVFVLNPKCTANYKKSYIGLGKSDPIDAFVIADYARAGNIETEPWRGSQFLALKRLTRHRLHLVECMTRVKTYLVSNLYLKFSELQMLEGDDQPFCDIYGATSSSVLTEYLSPEEIIDSSEEDLISFLAQKSRNRIKDISKTAELLRKAARDSYRLDKALYEPLNVSIASSFNCIETFKKEIKLIDIAIEREIRGLNPNAFIILQSIDGIGPVFAGGIVAEIGDISAFHSSDALAKYAGLMWKSNQSGDFDGEDTPMSKAGNRYLRYYLGEAANSMRKHNVEYGAYYRKKYNEVPKHQHKRALALTSRKFVRLVYGLLARNQLYSGVSLDTSNE

SEQ ID NO: 423987 - protein, 391 aa, unidentified
MVCVGIDVAKDKHDCCILDSDGTIRADCITIPNNMDGFKQLLQTIRDCTKKSDKIKVGLEATGHYSYNILGFLLDNDLAVYVMNPLHTNLYRKSLSLRKTKTDRVDARTIATMLLSDVDLKSYTDTAYHNEELKSLTRYRFEKVRERAKLKQSVSRLVTILFPELEKLVSSLHGASVYALLSEYPGAKQISEVHLTKLTNLLKTASKGRHGKENAIQIRDAARASIGSVMPAKSLELKHTIKLIQELDSEINEIEDSIQKIMDELNPPILSIPGMGVNSAALILAEIGDFSNFSSPDKILAYAGCSPSTYQSGKLTNCYAHMEKRGSRYLRYALYNATKYVCQWNPVFAEYLAKKRAEGKHYNVALSHATKKLVRLIYALQKSGKVYLAAA

SEQ ID NO: 423988 - protein, 419 aa, unidentified
MELIHARCAGLDVHKDSVVACVRIQQDDRVRHEVRTFGTTTGALMDLAGWLHENGCLHAVLESTGIYWKPVWHVLVGAGLKLVLANAEHVRNVPGRKTDVKDAVWLADLLAHGLVASSFVPPEPIGELRDLTRTRRQLVRQRVRHVQRLQKTLEDANIKLDSVISDVLGKSGRAMVESLIAGQTDPVELVKLANTRLHAPREQIVEALRGRVTPHHRLMLRLHLEQVDATDATIADIDREVERLLEPFRAHVTILKTMPGVGALLASTLLAEIGSDMKQFPTAAQLVSWAGLCPQLRESAGKRKSTRVRKGAPWLKPVLVQAAWSAVRKKDSYLRAQFYRLKSRRGPKKAIVAVAASMLKAAFHMLRDGTLYRDLGADHFDKTAKDKATKRLVRRLAELGYEVALKPTAALTPPGGVSF

SEQ ID NO: 423989 - protein, 423 aa, unidentified
MLGVGIDWAEEFHVVALGRPGEGVTEVVRVEHRPQAVAALVERIAGLEADPAEVRVVIETRHGLLVEALVEAGYMVLPVNPELVSRRRGPARKKDDAEDARICCLLALDRHAGLRRLIPHGELAGELRSIARDDERACRDERRLLNRLRADLLVTFPAALAIAGEDLGATRILRLLERWPTAAALAAASREEIIEFGRAQRTGYLARFADRIAAALAEDHFTAPPHLVRAKVDTIRLTARQLLLIDAQRRAWEKRMGELLLGAHAGQQQAEDQPGQAFPGGEIYLSFPGLGRRLAARIAGEAGEHIGQFTTPNSLQCYAGRAPVTRRSGKRDLVVAHRLACNRYLADAVHKWAFASLRRSAWARDFYDAQRARGKSHHAALRALGNRWLEVLWHCLTHDVPYDEAVHAANRNRALAAVTSSAA

SEQ ID NO: 423990 - protein, 390 aa, unidentified
MDSVAVVPLDIHKKFSVATPMTREGKLLQKARIPHGDKEEMRNFFRQFPKGTAVVMEATFNWPWIADLAGECGLHPHLAHPPRIREMAKGMAKSDKKDAVFDGRLWLAGGDVFPEAYLAPPEVRDIRLLLRTRLLFVKMRTMLKNTIHGQLFRQGILLTGEDAVSDLFSKKGRRILERIKLPEGERYVVEEKLEEIDNLNKHIRRIEEEAWKGLKRDARVEILKSIPGVGEIVAHTMLSEIGEEKRFANGRALAAYAGLLPLSNESAEKDFGSKTSKMCNHFLRLAALEAVTGAIRSSPRMKSLHARVRLRNKKKAGKARVAVAREIMELVHLLLTRNEKYKEERPPRPGREIKRKEEMIKEFMARDVDPNRASPVCLYADSRKGSQADG

SEQ ID NO: 423991 - protein, 347 aa, unidentified
MQVTTIGIDLAKRVFHLCALDDRGEVAWNRRLMRDQLEAFLAQEPPCVVAMEACGGAHDWGRRFMALGHDVRLLPAAAVKPFCLRHKKNDRVDARAIAEASRRPELHAVPVKSLAQQELQTMVRLRAGLVADRTRLANRLRGLLMEFGLVLPQGLAALRRRYAELGTGATSRTAWTALSPATRALFDALYEEILAKDERIKAIERQLIAHARDDRHCRRAMTVPGIGPIIATAFVAATDISGFAGGRGFAAWLGLVPRQHSTGGKPRLLGISKHGNRSLRALLINGARSLLWAARRQQQPSDRLTAWAKGLLARLHWNVATVAVANKLARILWAVLAKHTDYRPQPV

SEQ ID NO: 423992 - protein, 344 aa, unidentified
MYFIGVDHHKQASVMTVLDEDGRELKNGRLPNFRRYVEEFLRPFRPFVAVLEAGRSSYVMADLLRELGGEVKMANPVEVKAIAHARIKTDKRDSRTLAHLLRAGLIPEVYQREAWNRRAQRVMRLRAHWVRKQTELRNKVRALLAQQSEEIRLEVERQERGLFTQRGLEVLKRLPLAGQDKMILDDLVRGHREVTDHIKQSDGLVEALYGQLEEASRIDTVPGFATTLSVLAAVEIADIRRFASPAQLHAYAGVVPSTYASGERMSHGHITKQGSAWLRWAVLEAVYPSIKKDLGLRLLYQRLAKRKGPNVAKVAVARRLLTIIYRILTERRVYLPGFAKQSAA

SEQ ID NO: 423993 - protein, 437 aa, unidentified
MNHPRLQRNRELLAGKIVVGIDPSKDKHQAAVVDCHGSQQGSSFSFPVTSTGYGETLWRTLAKVLKSWKPEEIIFAIETACNLWETLAFFLHSRGYTVVLVSPLSTHHARPIMSMEFSRTDPKDAYLVATIAQRGAFHRYEQYPVESNALHMLAITYDKLRKALAQNRARVRALLDRVFPELPHILKPGTESAVYLLKKYLFPDEFLAMDIRSESRVLQQISRQQCGRSVLEEIQKAACTTIGVIRQSDERVAERITLDAYLAMIETVQVQMDRVLEELITRAKERPEFERLTSLSGVGERLGALFLAEVRDLSRYSHYKHIEKLAGYNLRLFDSGRYSGTRHISSIGNCRLRWILYKMAEETARRVPEVRVKYLRRQLKRRNHVRNVVAVVPQVLQLIMAMEKRQRPYELRETVLKELQELETKYAALKAEKKAAA

SEQ ID NO: 423994 - protein, 387 aa, unidentified
MRSVGLDLGSRKITYCIVEQGRVSARGTVGCLDELADQLGPGSVPASIAFEACREAWHVHATVAQWGQTPLLIDTTRVRRIGVGQHGRKTDRLDAEAIAWAVERGQIPLAHLLSPQRQQLRVELLTRRGLMETRSQMITTVRGIVRGQGLRIAPCDAERFLDKVLAAKLPLSVKELIEPLLAVVRVAHTQLCTLDERIEALCAKEPAIRMLSTVPGVGLLVAAMFVSVIDQAKRFRSARQVASYLGLVPLEKSSGLPGQRLGAITKHGNSYARALLVQAAWSLLMHGPDSDPLVRWGRALAKRRSKCVASVAVARRLACVLWALWKRGVAYDPEHVAELSAHGLQRSAEVIASQAHALRVEATKTRHRATSLQRRRAAVTRWEANMP

SEQ ID NO: 423995 - protein, 342 aa, unidentified
MEINLLGIDLAKRVFQLHGADARGRAVYRNKVSRAALVETVRALCPQTIAMEACGSAHHWARRFQEAGIEVRLISPHYVSPFVKTNKNDRNDAEAIVEAASRPSMNFVAVKSVEQQDMQAAHRVRELLVQQRTAIINQARGLLGERGIAIARSPAAFRKAIPEILVQSEGELTSFCQTLILMLVQHLRVLEEEIAVAEGWIRSFMNRSALCQKIAAVPGIGPITATAIVAAVGRADGFRNGRHLAAWLGLVPRQHSSGGKSQLYGISKRGDKYLRTLLIHGARSVLIRVSGKLDARSRWLQELIARRGYNRACVALANKNARIIQVLLSTDATYKPVALVDA

SEQ ID NO: 423996 - protein, 339 aa, unidentified
MKKVFIGIDFSKLKFDAAIYSVDTKAIVATEVFGNEQSGYVDFLQWVKENTRFQKSGLLFCGEHTGYYSGNLSVFLYESGYDMWLVSGLEMKLTQGIKRTKTDRVDACKIAEHAYRYQDKVVLFQPVCKSLDEIRELLSYRERLVETRKMLTTSAKEMKRVKDNASCDYIYRDSIEYIKTLNASVRDCEKRIEALLKQDISLKTNYKLVSSVVGIGLVNAALILVATDNFTKFDNPRKFGCYCGVVPFEHSSGTSVRGKTRVSKMANKHLKTKLTLAAQNAVRFDPDLKEYYQRKRSEGKNNWLVLNNVKNKLIHRIFAVVRDGQMYEKQYVHPLKQVA

SEQ ID NO: 423997 - protein, 332 aa, unidentified
MAKEKFDVSFLRQSAKSAVAAPVHKVVSNTESSIRTFLKSVPAGSILVAEHTGVYGERLLKMCTDMNVKIAYVGGHVIHTYKAGPDRGKTDELDCSLLREFGERFTDKLRLATFPTEAIYELQQLSRQRTMLVEERKRVATADKAEECRPYRSETVRRSMRNLMDMLDEEIRDIEKAMLDIIGKDEGLSNSYDIITSVNGVGLVTAVELIVKTKNFTTIKTAKQYAAYAGTAPYEKSSGKMNRGAHISKWGNRRSKTLLYICAESARRYNKEIKLYYERRTIVDKKAHHYVLNAIANKLLKLVFTLIAKNEKYDPCYIQHDPRTFNKKQLEK

SEQ ID NO: 423998 - protein, 318 aa, unidentified
MSHGYDKYVGIDVAKESLDVSGLTAGSPSQFENTAAGRAKLLSLLPQAGACLLVAEATGGYERDLVAEVVAAGHHIAVVNPRQVRDFAKAIGLLAKTDRIDAGVIARFGEATRPTPQGFSEQQEQLRELIVRRRQLVDHRTAEKNRCEQAHSTLVRNSVRKSIEGIDKDLKRIDRAIIQLVESNDDWRSRYERLKSVPGVGAQTAATLMAELPELGRLNRQQVAALVGVAPFNRDSGQFRGRRTIWGGRATVRSGLYMAALSAKKHNPVIRAFAARLLAKGKPPKVVLTACMRKLLVILNAMLRSDEMWGPRLATLTP

SEQ ID NO: 423999 - protein, 341 aa, unidentified
MKNLFIGVDFSKEKVDVAIIFADGLTETAPRVFNEFKITVSGYKQLVKWVEKNSYGIDPSLWLFCGENTGDYSKGLCNFLYGKGYDMWLENAKSIKDASGLRRLKSDRTDASMIAQYAMRNHDKAVMYEPLSESLAQLRELFLYRQMVVRHRCSFQVRRGEKKLTMEKSPIKTMISQSGRHIVSELNKEVEKIDKRIAELIKPDEELTEVFTIVTSVPGIGTQNAVCLMVYTDNFRRFNYDSHKIACYYGLAPFGKDSGTSVHSDPHVHYMENRQIKAMLTQAALAAVKFNPVMARYYMRLVERGKKKQVALNNVKNKLVHLVTAMVRNRQTFTPEYKISA

SEQ ID NO: 424000 - protein, 370 aa, unidentified
MAKRSMFVGMDVHKESIDVSLAEEGRDGEVRRYGVIPGDLEAVAKVVRALRAPSRRLRFVYEAGPCGFGIHRYLTTHGEDCVVVNPSSMPKRSGDRIKTDRRDGDALARLHRAGELTAIYIPTADDEALRDLVRAREDAVGLSTQAKHRLKAFLLRQGRRYPGRAGWTRPYRRWLADLSFPLAPQHIALQEYRDTIDETERRVERLTDQLRQLTPAWRWAPVVEALQALRGVSFVTAVGLVTEVGDIRRFTHPRELMAYLGLVPSEYSSGPSVRRGGITKAGNPHARRLLAEAAWAYQGVPRIGRQMLYRQEALPKVVCDIAWKAQLRLTSRFRKLVARGKAKPKVATAIARELTGFIWAIAREVPAPPA

SEQ ID NO: 424001 - protein, 382 aa, unidentified
MIIGCDYHPGFQQIAFVDTESGELQERRLEHREEAEKFYRDLGAQGVKVRVGMEASGHARWFERLLAELQLELWTGDAAAINAKRVRKQKTDRQDAQLILRLMLKDDFPQIWVPSWENRDLRQLLWHRHRMVQARTRIMNQLQAVALNEGLRCKKRLWRDAGREQLESFKLAPWASRRRRDLLALLDRLTPTIAELTAAIEQEVERCPAAQRLQTHPGVGALTALAFVLIIGRAERFQCGKQIACYLRLVPLEDSSGQRRRLGHITKQGNSLLRFLLVEAAQVTVRSDPEWRSKYCHMALRRGRKIAKVAMARKLAVRLYWMMRKEWDYAQLSKFGSYAGKPGHRDGVNKTSQMSGHPAPLHGEFEVVIMIERVTEEMHGSD

SEQ ID NO: 424002 - protein, 418 aa, unidentified
MSAEENARTLRRYVALDIHKYYCVVAGVNRDGQVVLQPVRVEHADLEGWLQKNLQKTDAVVIESTTNAWHVYDLLEPLAERVVVANPIKVKQIATARVKTDIRDTLILARLLAANLVPDVWVPPMHVRQMRQLLSQRRQLVETHTQILNRMHSVAHRHHLKHERGKRFNEQNTGWQKDTRLSPIEQFQLSLEMENREYIEKQIERISVEVKKICHQKPWSDSMGYVMSLPGFGVITAMTVLAALGEIGRFETPKKLASYSGLTPGLEQSGTKHRGKGITKEGRRELRWALVEAALQAVKSDPLLKHRFNELQKRMHRNQAIVSIARHLLELVWYVLTRRQPYRGFTQERIAYKYLTWAWQMKDAERDGLTRQQFARYYLMRLGIGHDLTRVAINPKYPRRLASEAEVLALRPELSQIE

SEQ ID NO: 424003 - protein, 445 aa, unidentified
MHYKRLLTFIDGVSSYLSVGLDVGADFTWMSIALPNGSFVGKPFKIIHSDSRSRDLAVTKIKEAQETYSLKSRCFLESTGIYHIPLLCFLRDKGFDCSVINPIITKNSTNINIRKLHNDKFDSKKAALVGLNVSLKTSILPDDSVVDLRNLVRDYYYFKDLQSAVALKLTAELKVSFPAYAKVFSKVTTQSSLKLLSSYPLPADMLAASKEDIVDIIRSTARFGEAYALRKYDAIIAAAQDAAVFGRALPSNAVRIRLYIDTYQEYQKHLDALLKALHETIEKLQDTLIYDQICLLQSLRGIGFLSAVVLIAEMGNFKLFSSPKKLYAYFGLDPAVKQSGKLNGDKVHMSKRGSSLARRVLHMAALNNVKVDKGSGTPVNPVVYDYYTRKCSGKKRPAAMGAVMHKICNIIFAMLRDNKPFEIITPEEHCRRFATEHPDKIRKAA

SEQ ID NO: 424004 - protein, 388 aa, unidentified
MRQFKGSAQAAVDYNSTIIGALELSEKKWVLAVQLPGVDRHSRHMLDACGDSLASFVERLKARCTSAGRKIARVILTHEAGRDGFWLARFLTRQGIEVHVMQPSSLPVDRRARRAKTDKIDVEMLLRTLMAWLRGEPRVCSMVPIPSEADEEARRANREREDLTKERRSIVNKIDGILATLGIKGYKALRRDRRGQLNCVRQPGGDPIPQMAKARIARLLDRLELVLKLIDHVESARDDVLKKGAPADESERMIRSLTALRSIGPDIATLLVREAFVRQFRNRRALAGYVGLGGTPFSSGGSEREQGIGKDGNRRVRAAMVELAWTWLRWQPDSALSVWFRARVGAMGGGRIRKIMIVALARKLLVALWRYLKDGVIPEGANVKVAVA

SEQ ID NO: 424005 - protein, 319 aa, unidentified
MAKQVEEVTLGFDVSKRQLEVCGSDVAGIRVIDNDPVSIVRFLDSFSGPLVIAVEATNVYHENLVDLALERGVMVYLIDGYKLEKYREAIGVRAKTDLNDASLIHRYLVSERAYLRALRAQSQQQRQLWRLLKRRAKLVKLRGQMDLSLRDLGLQVPEVSEALASIGRLINRLTVQACGLAKAAGWSESLARLRTIPGVGKLNALALMVMYHRGEFSSADRFIAFLGLDVRVRDSGTFKGRRKLTKKGDPEVRRLLFNGARAAAYRYAEWTEQKQQLMARGLSEIQVSVILARKIARIGYALMKTGGIYQSSEITCASS

SEQ ID NO: 424006 - protein, 390 aa, unidentified
MTSSHPIDTPAAGEKDATLYVAFELSKSKWLIGLVVSGESKMSRHEVVGGDTASVWQLISKKRVHAEKQGRRVRVVSCYEAGYDGFWFDRWLAGQGVANRVLDPSSIEMPRRARQAKTDRLDLERLMRVLIRHEGGEPRVCSVVHPPTPEQEDARRVSRERDRLIGERTAHVNRIKGLLHGQGIRDVHPRRKDFLEQLAELRTGDGRAVPANLAAEIRREHARLVQVGEQIAEVESQMKAERAAAAPDSRASQVNQLIGLRSVGPVGGETLVNEVFWRDFRNRRQVGGYFGLAGTPFDSGQSSREQGISKAGNARARTLAIELSWLWLRYQPASTLSQWFTSRVGDQKGRVRRVAIVALARKLMVALWRFLTQGLVPEGARLRAAAPAGR

SEQ ID NO: 424007 - protein, 346 aa, unidentified
MRFYNRQHTYYCGIDLHVKTMYVCILDGTGQVLVHSNVPSTPEAFLEIVAPYRDGLVVAVECMFTWYWVADLCAAECIPCVLGHALAMKALHGGKAKNDRIDSHKIAVLLRGGLLPQAYVYPAARRSTRDLIRRRLHLVRKRGQLLAHIQNTRAQYNLPVFGRTLAYRTNRAGVVEHFPDPSVQKSIAVDRALIDQYDALVIDLELTIVREAKRHNADACHRLRSVPGIGKVLALTILYEIHDITRVDRVQEFASYARLVKCKNQSGGKTLGTGGAKMGTVHVKWAFSEAAVLFLRHTEGKKLIARIQKQHGKGQALSILAHTIGRAVFYMLSRGTVFSRETFLAA

SEQ ID NO: 424008 - protein, 298 aa, unidentified
MRSTSLLGNDQAGFRQLIKAAKKYPGAVQFVFEATGPYHLGLALALWEAQIPLSVLNPARVRYYAKAQGKAKTDPLDTQVIGDFARSFRPQPTPAPDPVRRELTELLQRRDGLISSRAAEQNRLSQCRHKIIKGQIGRMMAQLAEQIDQIDGLMKKLVNSSEELKAKVKALCQVKGVGHLTAVTLLITLPELGTLGRNRIVRLVGLAPLNDDSGTQKNKRYIQGGRARPRCALYMPALSASRHNPVLKEVYERLLKAGKLKKVALTALMRKLLICLNALLRKLADQHPSPQGLCLAKP

SEQ ID NO: 424009 - protein, 310 aa, unidentified
MDEPLAVFVGIDVSKDRLDVHLRPSGETFCVSRKATGLDELIVRLATFPVALVVLEATGGFEAAALAGAGMPLCVVNPRQIRDFARAMGRLAKTDALDAEAIALFAERIRPEAKPLPAPEIGRFAELVARRRQIVEMLGMEANRRRRAADNHLAKKLDRHIAFLEKELAELDRDIGDGIKSSPVWREKEALLKSVPGIGDVTARTLLAEMPELGTIGRQQLAALAGVAPVNRDSGLMRGRRTIAGGRAAVRNVLYMAALVAIRHNPIFKAFYDRLTGRGRPKKVAIVAVIRKLLTVLNAILRDQKPWQNA

SEQ ID NO: 424010 - protein, 364 aa, unidentified
MIVIGTDTHKQSHTCGAVDAATAKALGEHTAKARKRGFDELLVWARKLGSECTWAIEDCRHVSGGFERFLIARGERIVRVAPKHMAGARKSARERGKSDSIDAFAIARAALREGIESLPTAHLDERALDIRLLLDHRDDLVSERGADQRRLRWHLHDLWPELEIPTGALDRDKWLAKVAGRLARAQQGARVRVARELVRQVKERTRRIRALERELEPLVTSYAPQLLEERGCGPLTAAKLIGEIAGAERFASDAKLARMGGVAPIPASSGKTSRHRLDHGGNRQLNCALHRLAVNKGKYCPESAAYLKRKQAEGKSRREALRCFKRHLARRVWRLLRAPTPDGSDPLALTTITTATRPQLAAVT

SEQ ID NO: 424011 - protein, 343 aa, unidentified
MKIYALGIDLGKTVFHLIGLDSSGQVVVRKRCSRTQLLAFTGNLQVQLIGMEACSGAHFLGKALRAQGHDVRLMPAQYVKPYVKTNKSDYIDAEAIAEAVQRPRMRFVPIKTEEQLDLQALHRVRERWVMRRTAVVNQIRSLLLERGLTLPKGRSHLGQMLPRILEDAELNLSGAFRVLLAQLKLELEQLAARIEQMDMVIQQQARENESCQRLTTIPGVGPVTATALIAAVGNGSAFGKERDLSAWMGIVPGEYSTGGKQKLLGISKRGNKYLRRLFVQGARSVLQRRDKQAPGLSCWLAQLLARTHQNVVVVALANKLVRIAWAVLCKNENYRAPVLAATT

SEQ ID NO: 424012 - protein, 424 aa, unidentified
MLGVGIDWAESFHDVAFGRPGEGVIEQFRIEHGPAGVGRLVARCLELEPDPAEVRVVLETRHGLLVEALADAGFTVLPVNPDLVARRRGPAKKKDDAEDARICCLLALDQYAELRKLIPHGERGTELRAIARDDERAARDERRIGNRLRADLLAVFPAAIAIAGGDPGAPVFLGLLERWPSAADLAAASRQEIEDFARARRHGWPARFAGQVTEAMAAPRLPVRPELARAKAGAIRLAAAQLLLLRAQRRAWERRMGELLLGAPRTGRDKTPEDPDPGKAFPGGEIYLSMPGLGDRLAARVAGEIGEHPEQFTTPNALQCYAGRAPVTRRSGRSEFTVARRLAYNRHLGEAVQQWAFCSLSRSAWAREFYDAKTAAGKSHHAALRALGNRWLEVLWHCLDKKARYDEAVHTANRARARSLKPAA

SEQ ID NO: 424013 - protein, 349 aa, unidentified
MEKLYVGVDWHKRTSTWVAINEARRQVYERSWGCTPEDVHAAISSLPAAPEQMVLGVEPVCGWRWMTQLCADRGIRDVRVANPKRLREIAETAKKTDKNDAHTIAELLRMDYLPCAYRASDEVYALRLLARQRTFFTRLGIATKCRIHGVCTALGATQTAERPLHKAGRIAISNGSNEELREMYALMDEIAARKERIERKIAGVVGDTQLYRIVSSIPGIGPVTGAAIIAEAGDFARFHAPSSLISYAGLYPRERSSGGAQRLGGMSKEGSRTLRYAIIEAAMRVRDTERSRNLYTHYDAARNRRKKTPKQARVVLAHKMLTILWYLVGRGVCYDDRAVKPAQREMTSS

SEQ ID NO: 424014 - protein, 321 aa, unidentified
MNIQNLVGVDTHKDSLACYCNGRFKEFKTTKEGFAKAIKWANSSKWAIEGAYCFGQAFSYFLIKNGCDVYEINPLLTKSWRTALKVAAPKNDFGDAKVISIFANMDNMNKVSFETIKLKEKLTARKALIKQKTQLTNHLKMLIYTRGEELPFKALDTKKAINWMSEQNDIIIQTNGKILESILVGIKKLEEEIEKEMPEPAKALTQIEGISTITACTIYAETKGKLTNKAQFASYCGVAPVDCSSGKTTRKRNNKGGNRILNSIFYSLSIAQKRYNEKAKIYYEKKLSEGKSPRHARKCLARQLTNIVFRTLKNATEQGKP

SEQ ID NO: 424015 - protein, 336 aa, unidentified
MLIIGCDYHPRFQKIAMLDTATGEIKVNRLEHENGEAKKFYASLPKGVLVGIEATGSTQWFERMVSECGHELWVGDPAEIRARRVRKQKTDERDALHLLDLLTTNRFPRVWVPSPEDRDARQLLQHRQKLVGMRTSVKNQLHGLAMGQGLCRKQKLWSESGRKQLEALELGMWASRRRQELLTLLDELNPQIAELDQGVEAEAARRPEVARLRVQKGVGPVVGLAFVLTLGTVERFPRSRQLVSYLGLNPREDSSGPHQYLGHISKQGNSMMRWLLVEAAQTAARLDPELGRVYKRLKYRRGANVAKVAVARRLAVKMFWILRQGPGTAPAGSHVR

SEQ ID NO: 424016 - protein, 326 aa, unidentified
MSQPNPLCVGIDVSKTTLDIATANNEFAQFTAGNDTDGFELIIAELRKHSVALVLMEATGGLEAAVACSLQAEGFDIAVINPRQARNFSRAMGYLAKTDRIDAKVLSQMAEVINRHPERERFIKAIPDAERQILAAMVVRRRQLITMLVAERNRLHPAHPQNRKSINTIIKALEDELSRIDEAMNNHIKTHFKELAARLSSIKGVGAMTVATLLSEVPELGSLSRREISALIGVAPVNRDSGTMRGRRTIFGGRAGVRTALYMAALVATRFNPVIKDFYTRLITAGKVRKVALVACMRKLLTILNAMIRKNEEWSDSYVSDSSEPY

SEQ ID NO: 424017 - protein, 419 aa, unidentified
MSKSLFCGCDIASDNNTIWLMLDDGSQPVKLFGVDNNQLGAEVLVERVYSIAEEHCVSDILIGTEATSMYDWHLLEYLAESKLALEFNLKLYRFNAKWIKNFKKSLAPRGKTDPIDSFAIAERLRMGRLPKEYVPDVKYQPLRKLTRFRYHLMQQITREKDFFLANLFLKASAYSSVKPFGSTFSATSLAVINDFFSVDELAAMPIEELTEFILEKGKSHFSKPDEIVDNLKRVARESYRLKPELTPTVNLILASTFNNIHCYKEQVKLVDSAIAENLKAFKHTLESISGIGPVYAAGILAEIGDVHRFPNDSALAQFTGLTWPKHQSGKFQAEETRMSHTGNQYLRYYLVEAANSVKRCDATYKAFYEKKYKEATKHHHKRALVLTARKLVRLVWTLLTRQALYQPGYCSFEDLSKIG

SEQ ID NO: 424018 - protein, 401 aa, unidentified
MKRLFGGIDVGSERHHVIIMDDKEKILFDREVEQKYSDFHEAVEEFKEIEAKEKMAIEFAMEGKNGYGTPFDRLLIENGFRLYNVDNLKLRRFKDVFGAEWRNDRRDAKMIAKMLQLREHVDKGKEKAFIEVTKMPIVNEKLKILSRHQQSLINEKIRIQNRLRKRVQEVCPDILEFGTTDSKKLLRLLIKHPDFSKYKKLTMEALLKIKMIGTKQASLMIDGLRDIQCLEEMAETYKTIISSSARRVLELKEEIKMLDGKLEELGEQSPEVKRLISMSGIGTKLSSRLVGEIGDIHRFERSDQLAVYCGVACINDDSGKSKKTRAVYKANRICKATMIEIAGCTIRYVPQSRTYYEKKRAEGKKHNHALRCLARQLIKVIFKLLKEDRDYVMKEEVKKAA

SEQ ID NO: 424019 - protein, 430 aa, unidentified
MEVIYPKACGVDVHKSFIVAVICDSTSVKPQYLRKRFSTFNNSLIEFRNWLLANDCQNVCMESTGKYYVPVYNALESHISNVVVANPKWVRCIKGEKDDNKDAKWIADLFKLGIVRSSFIPDKDIRILRELTRYLYKLTNMRTSEKNRFTNALTVGNCKLDMVFSDIFGKTSSAIINTILSQNEYNDEDILKNIHKNCKSSNEDILNSISGISWHDAQKQRMNVIQEHIDYLDKSIKTVRDLIDSIIAPYESAINLLCSVPGVDRNSAITIISEIGTDMSQFSSHYRLASWAGLAPGCNESAGKKKSVKISRAGVYLKPALVEVAHCAVKDKNNPYYANKFNVLSKRRGKKRAYIAIARKILVAIYHMLSTGEFFNPTDLSKVETSDKDKIKYTKNNFMQSTKQLISLGLTIDDLQTLMQSKISESTPVI

SEQ ID NO: 424020 - protein, 482 aa, unidentified
MAERKKSTFQRLHDGRLNRRQRKELAQQLAKDDPGLEIVHRDAAGIDIGNASHFVAVPAGRDAEPVQEFGSWSRDLQRMAEWLKKCGIRTVAMQSTGVYWIAAQEVLEQAGFEVWLVNARGTKNLPGRKSDVQECQWLMKLHTYGLLRNSFRPPEQIRAVRTVWRLRDRVVSDAGRTVQQMQKALTKMNVHLANAINDVSGVTGLRIIRAIVSGQRDPKQLAKLRDVRVHASEEEIACSLEGNWQSDVLFELEQALETYDFHQKQLAACDAQLQRYMAALPDREGGPVAEPVAEPREPGGKRRKAKPRRKAKNYPSFDLGAELERKTGVDLTTIDGINVMTAQTIFAELGADLSAFPSEAHFCSWLSLSPKRDVSGGKVIKHVSSPVQNRVALALRMAAQSLFNSDSYLGARCRQLRGRLGGLKAVKAMARYLACLVYRLLTKGQAWVDHGAAHFEKQRKLRDMAALGRRAAAMGLQLVPVT

SEQ ID NO: 424021 - protein, 350 aa, unidentified
MVVVGADVHKRTHTFVAVDGAGRKVGEKVVAATSVGHAEAVMWARERFGPEVVWAVEDCRHLSARLERDLLTAGQQVVRVPPKLMAQVRASARTRGKSDPIDALAVARAFLREPDLPIASHDEVSRELKLLVDRREDLVAQRTSTINRLLWRVHELDPERAPKSRSLDLPKHRRLLGDWLATQPGLVAELARDEMADITRLTEAINALAKRIGDRVRTVAPALLAMPGCGELTAAKLVGEAAGVARFKSEAAFARHAGVAPIPVWSGNTVGRVRMTRSGNRQLNTALHRIAVTQIRLEGLGQAYYRHRLTTGNSTTEALRCLKRRLARVVFHHLHTDHQNRIQPCQTAAA

SEQ ID NO: 424022 - protein, 409 aa, unidentified
MDVIVERPAALDVHKGQVTACVRVPGPGGVRSEEVAQFQTTVRGLLTLHDWLAAHRVTQVAMEATGVYWKPVWAILEDEFDCLLVNARHVKQVPGRKTDVSDAAWLCQLLEAGLLRASFVPPKPIRALRNFTRYRKTQIAERQREANRLHKALEDTGIKLDCVASDILGVSGRAMLDALVAGTTDPAVLAELARGRLRQKLPALREALEGRFDPLHAVLIGAILAHLDFLDEQIERLSEAIEEQLRPFAPAVELLRSIPGVETRTAQVIIAEIGTDMSVFPSARQLASWAGQCPGNDQSAGKRRSGRTRKGSKWLDQALKEAAMAATRTRDSYLQAQYQRLRPRIGHGRALGAVKHTIICVCWQMLTTGELYHDLGGDYYRRRDPERQTRRLIAQLEALGHTVTLQEAA

SEQ ID NO: 424023 - protein, 330 aa, unidentified
MTFFIGVDLHKTQFTVHVRTEEESESLDQIRQYPTTPDGYAEFLARINRYKATGADVKIGVESTGNTRFFKNQVEKAGAEVTVINTLKFKVINESAKKTDKHDASTISEFLSKDMLPESYLCGKETENIRRLLKSRERLVRSTVGQKNEIHALLVSLGLSDELRSLQRVKLMFEIIERIEESVKIIEKQLVELTKDDEMVNRLLTIRGCGKITAWTIRAYTEDISRFATAKKYAAFCGLVPWVQDSNETIHHGKITKRGPQELRTCFVQLVLGIRRCKDTSNWRMMQRYEYMKTNKGSGKSIVAAARKMAEIVGKYKPMSLAEEALTAMN

SEQ ID NO: 424024 - protein, 345 aa, unidentified
MEYYAGIDVSLESASLCVVDATGRIVREAKVASEPEILIEWFRGLGFAVARIGLEAGPLSQWLYVGIREAGLTVELLETRHVRDAFKAMPVKTDRKDARGIAQLMRLGWFRPVHCKSLPAQETRALLTARKLLQTKNHDVEMSLRGVLRGFGLKVGPTTPRTFPGRIRELVAGHPTLSTVAEALLAARRTLFEQWQKLEKRLRSLAREDGRARLLMTAPGVGTIVALTYASAIDDPGRFRSSKTVGAHFGLTPKKYQSGETDITGRISKIGDRGVRTALYEAANVILTRPVKGSTLKSWGMRLAARAGMRKAKVALARKLAVVLHRMLTDGTSFVADKAAAAVTR

SEQ ID NO: 424025 - protein, 340 aa, unidentified
MKSNTQFFIGIDVSKPYFDAALLPVVDHQKKEMICKRFDNTNEGMKSFGQWLKSHKVTFNENTLLVIENTGIYHRLLWAFCSKKNLPIHIGNAAHIKWSFGIARSKNDKIDSQRLCNYAFKESDTLKATPVLNPVLLQLKDLMTARTKLLSQINAIKVYVKELKSVSDTAIQKTLEQGYKQALEGMAASIKNFETEIKKIIAANTDLKTNYNLLITVPGIGHFTAVYLICCTNNFAGKISGKQLACYAGVVPFTHKSGISVKGRDKVHPMANKDLKKALHLCALTVIQFYPEFKDYYERKKAEGKHSMCVLNAIRNKIVLRAVAVVNKQQPYVDNTQKVA

SEQ ID NO: 424026 - protein, 456 aa, unidentified
MSKRRGKAKREQKVAKQELQNLPVLNLDAAAIDIGSEQHLVAVPPGRDTESVRSFGAFTVDLHAMAHWLKQCGVKSVVMESTGVYWIAPFQILEQYGLEVLLIDARAAKNLPGRKSDVLDCQWHQQLHTFGLLSGCFVPAAEIAPLRSYLRLRDELVKASTQGIQHMQKALFEMNVQLANVISDITGETGLAIIGAILAGERDGKKLAELKHRRIVASKETIAKSLEGNWRPELLFALQTALDRYKFYQQQISQCDEQIAQALAKLPTRQLQAQTKPEINTLQSAKEQKLSPLATQLQRIAGVDLTSIDGIGQQIAQIILSELGPDLQRSFRSEKHFSSYLGLCPGTKISGGKVLKRKSRKVKHRVATALRLAARSLHSSDSALGANFRRLKARLGAPKAITAMANKLAKLVYRLLVYGKDYFDRGAQIYEQKFRLQQIRRLQKQAKMLNLKLVPA

SEQ ID NO: 424027 - protein, 316 aa, unidentified
MAKRVEQITLGIDVSKDKLDSYHWEREECLSLANERAPIRAWLKGLSGPVRIALEPTSTYHLVVVEEAVALGIKVYLVNPRQLVHYREAVNQRNKTDPDDAWLLGRFLAHEHSQLRPFQPQCRQAQQLWALLKRRAVVVSARKQLTQSLAGINLSARALFTQMTRVLERIDRRMQALVKALHWTQAYQRCLSIPGIGPLNAAALVTAYHRGAFASSDAFVAYLGLDVRVRESGRFTGMRKLTKRGEAELRRLLYCAAASSRSYPRFGQYYQRQLEKGLPKTAANVILGRKLARIAFALIRNEQSFNHDLLKACSMP

SEQ ID NO: 424028 - protein, 428 aa, unidentified
MNCNTQNAKIASITEKTLIVGIDVGSETHYARAFDWRNYEYSKKPLEFSNTEAGFLTFKAWVEDIAEKHGKTAVIPGMEPTGHYWFALGKFLQDNGMKPVHVNPHHVKKSKELDDNNPNKNDRKDPKTIAALVNEGRFSYPYIPAGIYAEIRSLSNLRFQTQEELTRIKNRIARWFAIYFPEYKGVYGDLKAVSGRMVLKEAPLPEDIRKLGVKGVNQIWRDAKLRGTGMKRAKTLVSAAEHSVGSKEAPEAARYELRNLLNDMDVYAMRMEELLRSIEEKLKEIPYVDKLMEIKGIGLITVSGFVAEVGDIGRFDNPKQLQKLAGYAIVANDSGKHNGESRISYRGRKRLRYVLYEAAISLVGKNAEFKAIHEYYRTRKENPLKKMQSVVAVACKILRVFYTILTKGVDYDPVKLMGDIRRPQLQAA

SEQ ID NO: 424029 - protein, 355 aa, unidentified
MKKYMGCDAHARYSVFVSVDEAGRASPPVRVNHGSRELRDYLATLEPETPIAVEASGGWYWFMDELEAAGMDARLVNPLEAKRRMGGKNKTDKLDAKGLAILCRNGTLPEVWIPPAELRDLRGLMRGRLALRSHTTVLKNRIHAALRRYGTLAGEPPSDLFSKKNRLRLSLAISGTPPETRLATLHEWELLDFVERHIGEMEARIRERIGKLGWIRLLKTMPGVGEILGATIHLEIGDVGRFPTAAHLASYAGLVPTVHASGGKSHHGPTSPQANHYLRWAFVEAAGCILMHRHRLADQYALHLYDRLKARKCHGKAAVAVARHLAESSWWILTRRKPYQQPHAHAAAMSSSKNG

SEQ ID NO: 424030 - protein, 341 aa, unidentified
MTFIPAFVGLDYHTETIRVCVMTREGDIVVNRNVRNCTAAVADLVRSQNVLVQGVAIEACCGAADFSARLAEATEWDVRMAHPAYAQKLKQGRDKTDCGDAALLADLLRVNYLPEVWLADEATRQLRRLVRYREGLVEERKAVKLRLRALLREERVDCESAKAWTKPWFLWLDTVRLGEQTRWILDRERRHLVQLEEEIREVDARMEQATADDPVVQKLRQQVGVGLVTALVLRAAVGRFDRFRNGKQLAKYCGLTPCNASTGKRQADAGLIDAGNPALRSVLIQLAKRLPRHADRWRELHAKLRRTKPANVASAALANRWMRHLHHVMVERPEGMEHQAA

SEQ ID NO: 424031 - protein, 336 aa, unidentified
MSQQYVGIDLHRRRSVIVRTDAAGTVLGEARIENDPLALAAEIAKAGPAPEVALEATYGWYWAADLLAECGARVHLAHPLAIKAFEHRRVKNDRIDATLLAELLRMGRLPEAWIAPVPVRELRELVRYRHKLVDIRSGLKSQVHAVLAKEGVRVPMSDVFGVAGTQLLDDLELGDAYLVRVESLRDLIIGLDAEVTMLDRRIHERLATNPSYRAVQQIPGVGPVIGAVFVAEIGDVTRFRHAAQVASWVGLTPRHRESDTKIRRGQITKQGSRLVRWAAIEAARAPRAHSWLKTHYHHLAQRRGKNIAAVAIARKIVTLAFYALRDGELRCLTRTA

SEQ ID NO: 424032 - protein, 340 aa, unidentified
MKHIGMDVHSTTTDACVRNGRGVIVLQRRIQTTQNELINFVANIQGPKRVVVEEDQMADWVTRLLQPHVDEVIRCQPQYNKLISGSEDKCDKMDAKSLSELLYLNRVKPVHHPEMKYRILREAVRAYWIASRDLTRAKNRLKGWYLFNGLFESGRSIYSMRNRGKRLQAMQQEGRNTELAELLYEHVETCRQLKAKHIRMLRKAARPVKDLVQLVMTMPAIGPISGYTLVSLLEDGWRIPNKRKLWRYAGLSLRRHESRDLGIKGASKSGNRLLKRVAMSAAITIVARGERNGLLALWERDIRQNVNPKRARRNLARKIVVIAQHLLRSKQEYLDERIKA

SEQ ID NO: 424033 - protein, 439 aa, unidentified
MRDGNDGEIEFAAYIGIDWADQKHACALQSSTGSGVVQGELIHKPEAVEAWAADLYRQFGGRPIAIALEQSRGSLLFMLLKYEHLVLFPVHPSTLVNYRKGFRPSGAKNDPSDATLLVDLLVRHRERLRRLHPDSEQTRTLQFLVEGRRKFVHEKVRYSNRLTAYLKMYFPQVLDWFSAVDSAIVGDFLLRWPTLEKLQKARPDTLRAFFRQHNSCKSDSIERRVQEIRDAVPATHDTAVIRSCCKAALSFARMLREVRAAIRSYDQDLEKLTREHPDFALIDSLPGVGPVLAPRLIAALGTQRDRYQSASELQCYSGIAPVLASSGKQYWVHWRWACPKFLRQTFQEWAVHSLASCAWAKDYYEQQRAKGKPANTVVRALAYKWIRILFRCWKDRTPYCESTYLQGLERCQPLARKGVLVKTRWKTSAGFRKIDAATS

SEQ ID NO: 424034 - protein, 387 aa, unidentified
MIYIGIDIAKNSHFASAVNSDNEVIVKPFKFTNDDKGFNLFINTFKDFDLSNCLVGLESTGIYGDNLTTFLFSKGFKIGRINPIQTDSLRSSNIRKTKNDKIDTLLIAKCLILGNYTLVTEKDIEIIKLKTLCRFKFDVKKSQSKAKVQLVTCLDIAFPELSNFFKGNLHIKSSYALLSKYPSAKVIANTRIDALTNLLYSASKGHFKSDKAIALKDLAKRSIAMDNPAIGKQIQMLIEQIQMLQKQIDLLDIDITNIMEKLNSPILSIPGIGVWLGAIIISEIGDITRFSSATKLLAFAGLDPSVRQSGNFNATNTKISKRGSKHLRYAINYAAELIIWNDDTFYQYYTMKLAQGKSYLNAIGHVAHKLTRVIFKLLTTNTTFNKS

SEQ ID NO: 424035 - protein, 413 aa, unidentified
MNAVGIDVSKKKSTVTIRQPGDVVLLPPRDYCYTQSSINELIATIKGLDGETKVCMEHTGRYYEPIASWLANAGIFVSAVNPKLIRDFGDESLRAPKTDKADSKKIARFALDRWTKLRQYSPMDESRNQLKIMNRQFSFYTDQKTAMKNNLIALLDQTFPGANGFFDSPARSDGSQKWVDFVYSYWHVDCVRSKSLSSFTEQYKSWCKRKGYNFSADKAEEIYRVATDLIAVFPKSDNTKMLIRQAASLLNTTSQMVESFRIKMDQVASALPEYSVVMAMNSVGSTLGPQLMAEIGDPTRFTHREALTAFAGVDPGSDQSGDHDRKSNRTSKKGSPYLRKTLFLIMDGLIKRSPVDNPVYAFMDKKRTQGKPYLVYMTAGANKFLRIYYGTVRDFLKQKDQWPDRESDEVTPV

SEQ ID NO: 424036 - protein, 398 aa, unidentified
MTESSDYESVQVFIGVDVGKDTHHAVAINRSGKRLFDKALPNDENKLRSLISDLKQHGQILLVVDQPATIGALPVAVARSEGVLVGYLPGLAMRRIADLHAGEAKTDARDAAIIAEAARTLPHALRTLKLADEQIAELSMLCGFDDDLAAQTTQASNRIRGLLTQIHPALERVLGPRLDHPAVLDLLQRYPSPEKLASLGEKKLAAQLCKLAPRLGKRLAADIAQALAEQTVVVPGTNAAAVVLPRLALQLITLRKQRDEVALAVEQRVLAHPLYPVLTSMPGVGVRTAARLLTEVACRAFASVAHLAAYAGLAPVTRRSGSSIRGEHPSRRGNKALKRALFLSALAALRDPLSRAYYTRKMSQGKRHNQALIALARRRCDVLFAMMRDGTFYTPQAS

SEQ ID NO: 424037 - protein, 546 aa, unidentified
MERNDTEQTTSTPAGADADVVCTEPRAFGMLSAELGKAAAHAPNSAGASCPTERLSSARPMFIGRVAAGDCGDILPGQDFTSIPPRPSPCPDEKGEEVARHTNRFEEVRRFVAGVDLAGDADHYVCGPRKDDGTHDVERFGTTTNELLRMVAWMKERKVESAAMESTSVYWIPVYDTLESAGVEVVLVDTRTVKMVPGRKSDVKDCQWLQRLHGCGLLRGAFRPPERFNAIRSVIREKANVLAMRTQSLQAIQKSMDQMNIRLHHAVSDIDGVTGMRILGAIVGGERNPRALAKLRDRRCRKSEAEIAEELTGSWREEHLFNLKQAYQTLRFLDERVAEYDRQIRDMYAKIAESPPVDPPPDGGKKPKDKEDAKAKADLVRICGGFDMTKTGGIGYDSAAAILSELGPDLSAFPTERHFVSYIGVAPALGKSAWKNVSSRKKHKNTSRVGLTLKMSASTLFRSESALGARIRCVRSRTCSRTAIKDAAREMGRQIYRGLKYGQAYVDEGEQAYMNRTRERTIKSMRKKISKLGISAEGLGIYAVAM

SEQ ID NO: 424038 - protein, 454 aa, unidentified
MSRSRGRRQHLSIVNPNAAGIDVGSAEHWVAVPPDRDPKPVRRFGAFTGDLEAIAEWLKRSGVDTVAMEATGVYWISLFQILETRGFKVMVVNARHLRRVSGRKTDFNDCQWIQELHTLGLLNASFRPENDVCALRSLVRHRENLVHSAAQQVQLMQKSLIQMNLLLQKVVTDITGVTGRRIIDDILAGQRDPKLLAQHRNPHIKASEEDIARHLKGDYREEHLFTLRQAVDAYDFFMRQLDDCHQSALRILGRFKTKLPPQALALDSPAPTRRKRSKNAPPKEFHDLLFQCAGSDLTKVPGIEVSTALTVVSEIGLDMSRFPNEKRFASWIGLAPSPKVSGGKTIGHDRPNIRNRAAQALRMAASTLRKSPTALGAQFRRFNARLGPGKTIKAMAHKLAKIVYRLLKYGTAYVDAGDQAYQEQFRARRIRALKRNAADLGLALVPMPAGEPVS

SEQ ID NO: 424039 - protein, 422 aa, unidentified
MLEQTQDEQEIIERVAALDIGKAELVCCVRVPDPKGGSRRVQEVTTYSTMTRSLQVMAERLLDLGVTRVVMEATSDYWRPPFYLLEAHGFEAWLVNARDVKNLPGRPKTDRLDAVWLCKVAERQMLRPSFVPPVPIRRLRDLTRYRISLVADQTREKNRVEKLLEDAQIKLSVVASDIFGVSGRDMMAALIAGERNPQVLAQLARASMRKKIPQLEEAFVGYFTDHHRFLLAKMLSRIDALDADIADIDTKIEAQIAPFAPAVARLDEIPGVGATTAAVIIAEVGVDMSRFPTPAHLSSWARFAPGVKESAGRKKGTGSTGHGDRYLARVLGEAAVGTSRTNTFLGERYRRIARKRGKKKAVVAVGRSILVIVWHLLSDENAHFQDLGPGYHDSRINPERKKRNHIRELEALGYTVTLQPAA

SEQ ID NO: 424040 - protein, 337 aa, unidentified
MTNYVGLDIHKRFTYGIIKDNQGNKIKEDKFENSQENFDSFLKDCKPEETKIVMESTGVWEYIYDLLESKNYEIKLANPMKTKAIACAKIKTDSVDASTLADLLRANLIAESYIPDKETRKIRDVIRQRKSIVKGRTQIKNKIHAILTRHGIKLPKVTLCDSAIKWMLEEGVSNLPSVKIILVSYVNLLQKYDEELETIEERIRDISDKSSKANLLTTIPGIAEIRAVEIMAEIADINRFESSEKLCSYAGLVPSIRQSGDILRFGRLMKQSSRTLKYALIESSWCLIKSKKETSLKMFYQKLLFRKSKQKAICAVARKLCCVIHSMLRKNQEFHYS

SEQ ID NO: 424041 - protein, 439 aa, unidentified
MERFELLNPHSAGIDIGSMLMVVSYTDREGMINLREFDSFTSSLYELAELLQKEGIEKVVMEATGPYWESLYNILEKHGMEMFLVNPSHYRNVSAQKTDINDAQWLHQLLAHGLIRNSHIAPELYRELRQYLHEREIYQNYKSDSLNRMQKTLTLMNIKFQHLISDVEGVAGMKLLRAISSGICDGQTLLARIDVTKLKASPEDLLSSLQGEYKQHYIHILSITLKSYDFFKEQMQVYESHIEHTLKELLACKGEAPTVIQQKTKKVRKNQYSFNLKDYLLGILGVDLTEVEGLDEIGLLTILAVTGTNMKKWPTAEHFVSWLNLSPRPKISGGKIIGYERRNNNNPATQAFRLAAHCLWQSKGPMGQQYRRLASTKGSKKAIKAIARKLAVIFYHMVLNKQAFDATRIQPDIEQQKARKIARLQKDAAKLGMIVQKEA

SEQ ID NO: 424042 - protein, 395 aa, unidentified
MFIVGIDVAKRSHEVCMITSDGQTVQRPFSIRNNCTGYNLMLEKIRKHTNIKSQIVFAMESTAHYWLALFTRLRKDGYHVILLNPIQTSAMRDMFIRKIKTDAKDSFIIAELIRFGRYAESNVAQDRLLALKELCRNRFYLVDMAGDLKRKLVALIDRVFPEYEAQFDTIFCKSSVALLKKYPTPQKLSNAHLDKLTELLWNSSNGHFGEWKARELKELARNSFGVEDCDGAYSTLILLMLDQIQSLSGKADALEKEISRLFQSFDTTVTTIPGVGPIIGAVILSEVGDISRFSSADKLAAYIGVDPSVNQSGEFQAAHAHMSKRGSPYLRRCIWMASQVAVQRDPMFRAYYEKKAAEGLKYMTIIGHVTRKMTTVIFAILRDHKVYEPVLPTAA

SEQ ID NO: 424043 - protein, 369 aa, unidentified
MNDITYVGLDVHKATVCVAIAESGRGGEVREVGVFENRPDVLRKMVDRLGKHRRRLNFCYEAGPCGYGLHRLLTGLGHDCVVVAPSLIPMKAGDRVKTDRRDALMLAKLHRAGELTPIWIPDAAHEAMRDLVRARATAVRALSKARQHLQGFLLRHDRIYHGARAWTLAYRRWLTTVRFDHPAQQIVLQDYIHAVEDAESRRDRLTRQIEELMPSWSMAPVATSLQAMRGVALVAAVTVVAEVGDFRRFTNARQLMAYLGLVPSEHSSGSTVRRGGITKAGNALARRVLIEGAWTYRMSARVSRKLHDRLEPLSAAIRDIAWKAQVRLCARYRRLVAIGKPKVVVTTAIAREMVGFIWAIARVAQPELI

SEQ ID NO: 424044 - protein, 380 aa, unidentified
MNTTTVGIDLAKSIFAVCEGDSRGHGSRSSILKSGEFLKWLRTLPTGTVVAMEACSSAHSWGRTMQALGLEPRLIAAEFVRPYRKNQRIKNDTRDAEAVLTALHAPGMRFVTIKTEDQQQRLAWHRLREGWKAERTALFNRIRGLLTEFGIVVELGAAKIRRKLAELESDTAYPQSIQLMAQSVRAQIGILDQRLAECERQIARQSKSDPAVARLRSRPGIGPLTADAIVATVGNARQFKNGRQFAASLGITPRQHGSGGKTHLGAITRRGDSYLRCLLVQGARCVLQAALRLHKNKPDTLNRLQLWMITLNERVGYHKAAVAIANKHARQVWAMITRGEAYNADAYKDWEAAHATVRPGDIQEASDYDLSTAALAAASV

SEQ ID NO: 424045 - protein, 341 aa, unidentified
MKNLFIGIDFSKEKVDVAVIFAEGLVETSVRVFNEFKNSVSGYKLLVKWVEKNANGIDSSLWLFCGENTGDYSKPLCNHLYGRGFDMWLENSKCIKDASGIRRLKSDRADAAMIAEYAMRNHDKAIIYEPLSESLTQLREYYLYRQMVIRHRCSFEVRRGEKRLMMEKSAAKTVIAQSGKHIVSELNKEIAKIDRKIASLIESSDELSEVYRIVTSVPGIGTQNAVCLMVYTDNFRKFNYDARSIACYYGIAPFGQDSGTSVHVDPHVHYMANRHIKAMLTQAALAAVRFNPIIAQYYQRLIGRGKKMPVAMNNVKNKLLHIVTSMVKNKQVYKPEYRFSA

SEQ ID NO: 424046 - protein, 338 aa, unidentified
MNKRNISRLDDSMRMFVGLDVHKKYTEVAIVDEEGVIEKQERIENEPRQIEEFSNTLSNADMVLESSSSWFWLYEILSRKHRVVLSNPAKTKAIASAKLKTDKVDALMLANLLRGGYIAESYVPSRRVMGLRELVRYRANLVRMRGTVKNRVHAYLLMNNVKIGGSPFTKGFLEELKKVKDARVEGYLRIIERLNLEIHEASKIVCNEASNDESAKLLMTIPGISFYSALLLISEIGDVDRFPDSAHLVSYAGLASSTHSSGGTTYHGRITKAGSPYLRWVLNQCTWVHVRSQPEGSVALFYARLSKKKGRSKAMVAASAKLLKIVYWVLKEKRPYQG

SEQ ID NO: 424047 - protein, 410 aa, unidentified
MQTLIERGCGLDVHQATVVACLLIALQNRKVQKQVRTFDTTTRELLKLREWLLAEGCTHVAMESTGVYWKPVYAILEGALEIVVANAQHIKKVPGRKTDVKDAEWIADLLCHGLLRSSFVPPKPIRELRDLTRYRRKLVESQTAECNRLLKLLETANIKLASVATDVFGVSGWLMLEALVEGRATPQEMAEMAKGKLRKKISQLEPALEGKLEEHHRFLLRLQLDRLLAVEKDLALLEQRIQEKLQPYEAQVTLLDEIPGVDRTLAAVIIAEMGVDMSVFQSVSQLASWSGVCPGNNESAGKRKSSRIPKGNVYLKTALVEAAHAAAKAKGTYLRDKFYRLKARRGLKRAAVAVAHKILVATYHILSHRVCYNELGDLYLDKLNKHDLTRNLVHRLERLGYNVTLEQKAA

SEQ ID NO: 424048 - protein, 385 aa, unidentified
MIVIGADTHKGSHALCAVDAGTGRVRGSREIKADEPGHLAAVRWARGLDGERVWAIEDCRHVSRRLEQALLAAGEQVVRVPPHRMGASRKGEREPGKSDEIDALAVARAVVKDGVEQFPVAYLDEQAMEIRLLLDHRNDLVADRTRTVNRLRWHLLDLCPELERSLKRGALNQARVLDRIDRQLRKLPAGARVRIAREHVAQLRRLNPQIDQLAAELAELVRAHRPKLLAEQGCGPVTAAILIGHTAGNERFRSDASFALQTGTAPIPCSSGKRTQHRLNRGGDRQLNHALHIIAIARAQRDPATQEYLARKEAEGKTKKGALRSLKRHLARHFHHLLAEPPLAPTDDRATPERLAPETGERDPDTVEAAIAGAIHPQVPMLCVT

SEQ ID NO: 424049 - protein, 319 aa, unidentified
MGKSKIEFEQVIDRGCGLDVHRDTVVATVMGKGIKTETRTFGTTTSSLNELGVWLESLNVTDGAMESTGIYWKPVLHVLRAYPLNLMVVNARHIKNVPGRKTDKADSQWICKLLISGLLKGSFIPPENIQELRDLHRYKKKLIGTVASEKNRIIRVLEDANIKLSSVVSDTSGVTASYLIKGLIEGRKDLEKLIAECYHRKLQASPGQIKEAITGRLTAHHAFILKSMQKHIASVEEQIAEIDVEIEKYIKDFEKEIELLQTIPGVGKGGAIGIVAEIGVDMDVFPNEHHLASHSGMCPGNNETAGKKKVQEQDMGTNI

SEQ ID NO: 424050 - protein, 353 aa, unidentified
MRTYYVGMDVHRASIVIVVLNGAGKVVEQVVVETSAARVQSYLKQLKGRVCVTFEEGTHAQWLYDVVRSLVTEVIVCDPRHNKLLQSGNKSDRIDAQKLAALLRNGSLKAVDHQDHGVRALKELVRNYDCLVSDTTRVMNRLKAMFRRQAIACAGHDVYRQDRCEQWLSKLTERGAKERARYLYRQLAALKPLRHEAKLAMVREARRQAAYGWLMSVPHLGAVSVAQVLAVVGTPHRFRSKRQFWTYVGLAVVTQSTADYEMVNGVLRRNQRPAATRGLNRNHNHLLKRVFKSAASSACHSEPFKASYQLRRQQGMAPALARLTIARQLAAITLSIWKRGETFQTERMMRQAA

SEQ ID NO: 424051 - protein, 369 aa, unidentified
MGDRITYIGLDVHKDGIVVAVAEGGRRGEVREYGRIGNTPAALQRLASKLGREGVELRFCYEAGPCGYGIQRQLSAHGHECIVVAPSLIPKRPGDRVKTDRRDAASLAKLHRAGELTAVWVPDRRHEAMRDLVRARLDAVRALRRARQQLSGFLLRQGCHYGRPAWTKLHRRWLAGLRFEQAVHHIVLEDYIAAVEAAEARRDRLTAQIEAMLPDWTLAPVVAALQTMRGMALVNAATLVAELGDLSRFANPRQLMAYLGLVPSEHSSGASVKRGGLTKAGNSAARRLLIEAAWCYRFPARVSRELLLRQEEQPKPIREIAWKAQLRLCARYRKLARTGKPANVVTAAIARELAGFIWAIARRVPPATS

SEQ ID NO: 424052 - protein, 433 aa, unidentified
MQEAEDEPLFAARAAGIDIAKAGIEVTIRVPSDTRRTGRQQETRSFRTTRKDLLAVADWLRCWGVTKIGMESTGDYWKPVYFLLESEGLACVLYHAAQVKALPGRPKTDKLDSAWLAKITERGALPGSFVPPAGIRALRTHTRYRRHLTQARTAEKQRVEKLLEDAHLKLSSVISDIHGVSGRAMLEAIAAGERNPKALAQLARGTMRGKIARLEEALDCAFVTEQHAAVLAMMLATIDYYSAQIGELTAKIEVLCQPYLHQIAQLDAVPGTGVITAQDVIAEIGTDMTVFPAAAHLVSWAKWCPQVAQSGGKRKGANASGRGNRYLGAALGEAAASAGRTYSFPGAKYRRLVKRMPKKKALVATGNSLLTIYHALLSDPQAIYTDLGTDYYERRTNIRRQARNHVRGLERLGYTVTIEPVNPATGELQPANS

SEQ ID NO: 424053 - protein, 421 aa, unidentified
MDHERIDYAAWIGLDWGSDKHAICLQAADCSSVERCILEQKPEVLHHWFMNLLARFGGRKVAVAIEQTRGAVIHFLLGLDFVHVFRIHPKSLKNYRDALHPSGAKDDPTDAQLLLQFVTLHQDKINPWVPEEPEIRLLLRLVEFRRKIVGKRVRLTNELTQLLKEYFPAALDCAGDLDKAMACDFLSKWPTLEKLQKSRPNTIRKFYQEHGSRRRDVIEERLKQIRSALPLTTDAPVIEPSVFMVQSIASQLHSVIEAIAQFDQRIKEVFQKHPDAPIFSSFPGAGPALAPRLLAAMGADRSRFSSSLEVAEYSGIAPVTERSGKSKWVHRRFACSQFVKQSFHEFAAQSILYCDWARGYYDQKKTEGKQHHAAVRALAYRWIRIIYRCWKDRIPYDEAKYVKALRQRQPAWLDSLPISES

SEQ ID NO: 424054 - protein, 339 aa, unidentified
MQVVPVGVDIAKNVFQIHYVDSDTGEIVNKPLKRAKFLEYFSNRAPCMIGMEACGGAQHWARALTRMGHLVKVMPARFVKAFNIGNKNDAADARAIWFAMQQPCKAIAVKTESQQAVLALHRMRQQLIKFRTMQMNSLRGLLTEYGEVMGKGRASLNEAMPLVLASLVDRVPAVLIDTLREQWNGLTDLDKRIAEIERRLRQWLQEDRAVKSIAAIPGVGVLTATAAVATMGDASAFRSGREFAAWIGLVPRQTGSGGKVAMLGISKRGDTYLRTLLVHGARSVLRLRKDPETWVEQLRERRPLNVAIVAQANKTARTIWAMLAHGTVYEPRHLNTRPA

SEQ ID NO: 424055 - protein, 426 aa, unidentified
MNAMTDFAATIGLDWADQKHDLWIRPAEGAKAQHLGLEQTPEALHEWAAKLRERFGNRPVAIGVETSRGPVISALMAYEFVVLFPVNPKALKDYRAAFSVSGAKDDRTDAQLLEEFIRLHRDKLKALEPDTPLTRQLSGLVENRRHLVDERTRLVNQLHSVLKTYYPLAETWRHRQMNQPMAADFLARWPDLESLQKAEVQTLRAFFYQHNSRSSQKLEERWAALKQAKALTADPAIIRPARLLVVALASLLKPLHRAVAQLDKEIEQALDQHPDAAIFRSFPGAGPALAPRLLVAFGTNRDRFESAGEVAQFYGLAPVVIQSGNSQTTHLRRRCPKFGRQTFHENAGCAFKEEPWARAYYEQQRKRHDDKHHQACRALAYKLIRIYFACWKQRKPYEPARYLRALEKQGSPLHAQLETQTALRCE

SEQ ID NO: 424056 - protein, 366 aa, unidentified
MSPWRRKPITTAATHHEPGTTTEATLCVAFALREKTWQLGFTTGHGQQPRERTVTARQQERVLDEIAQAKRRLGLPDTAPVVRCSEAGRDGCWLQRFLQGHGITTPVVDAAAIAVNRRRRRAKSDGLDVRTLLRLVIRSAHGERQVGQVVQVPAVEAEDHRHLHRDVDTLKQERARTTTRIQGVRRSQGIRLTSLSNWPEHLEALRRWDGAPMPPGLRRRVLRVDAHHTCRSAPMAAVEAARRAQLQASTEACIDEVRQLMHLKGLGSNGAWVLVMAFFGWRACKNRRDGGGVAGCTPTPYHSGARAREQGMTKSGNRHVRGMTTELAWSWRRLQPDSALRGWFRARCGGGGTRLRRIGMVAVARK

SEQ ID NO: 424057 - protein, 321 aa, unidentified
MSTGTSKAGFVGIDVSKDRLDVGLWPSGETFGVNNDAEGRAALAGRLAALQPRLVVLEATGRLETPMALELDGHGVPYRIVNPRQAREFARAMGKLAKTDRIDALMLARFAESAKLEPKALPDAARRELRALVMRRAQLIEARIAEKNRLGGETAPFVCKSLKTSIAWLKRQIAQLDRELDRTIQGNPEFAALSDVLDTVPGVGPNTVRVLAAAMPELGKLSRQCASALVGIAPLNKDSGKSHGQRFCWGGRAEVRSALYMAALVATRHNPVIRAQYLRLRAKGKPAKVALVACMRKLLTILNAMVRDNTPWRQTPAAAAA

SEQ ID NO: 424058 - protein, 420 aa, unidentified
MSDSFRFFVGVDLGAERHAVVLLDAAGEVLGRRSFAHNGAEVLELFTWLAKLTGAGSHEIALAAETPRGSIVEAALERDHPVFSINPKQLDRFRDRFSMAGAKDDQRDAWVLAASLRTDPHCFRRLRLGDPRVVLLRELSRSEGQLQESFRRAANQLWSLLQRYFPVLLTLAQAADEPWLWSLLRAAPLPAAAARLKLPRLEKILSRHRIRRFSAAELTELLKQPPLPMAPGAAEALAESALLLVPQLELLHRQLAQLALRIEKAIDALQQDADFPQHRDLEILRAFPGLGRVFTATVLAEAYGPLVERDYHALRTLTGAAPVTKQSGKTCLVQLRRACNHRLQHALFHSAQVFAQKDPRAKRQYQLLRDHGETHARALRGVGDRLLELLFVLLKAGSCYDPQRRKIAPLEGTPPPQKNS

SEQ ID NO: 424059 - protein, 359 aa, unidentified
MSTITLGVDLAKRVFSVCEMDAAGRVLRWHELRREAFAAWLGQQPAGTVVAMEACSGAHHWARRCLALGLQPKVIAAQFVGPFRKSRTTKNDRNDAEAIATAARQGNMRFVPVKSVEQQARLAWHRVREGYKAESLAIGNRLRGLLAEFGIVVATSDLALRRVLADLDAHDGLPGEFRELLRDLAAHWAQLHERIDACDARIDTHARQDARCIRLRSIVGIGPITADVVVATLGAATDFRNGRQLAAWLGLVPMQHSSGGRARLGTISCRGDAYLRTLLIQGARSSLQRAKAVVTEKATPEQLWIRTLDRRMPFGKVLVAIANKHARQAWAMLVRDVDYDPHACLQHPRHQQTNTAQAA

SEQ ID NO: 424060 - protein, 348 aa, unidentified
MKNKSFVGIDISKNVIDVSIFREDTNIKMFPHEVFNNTRKGFGDMCSWLKKSRVVLSQALFGMEFTGCYSLDLEKILTSKNYSFCMLSTRIVKHHPMGTIDKRDKNDSAKIADFLYRYDGTECAKPYKLPSKAMQQLKQLVNERKFLVEQRTNFMNRMQMFETKEDSAMYESYIKKLNHDIEKIDQEECELMSKEEDVFDTFQNLLTIPGIGFVNATNIIAITRNFTAFDTARQYARYVGVAPCSHTSGTSVKWRARPSAHCNGQVKADLSMAALRAVEYDVEMQMFYNRKLGGRKDSDTKRKALNAVKFKLIRRMFAIGKQKRKWEVLNTSDDRKNLHIEKSKASEL

SEQ ID NO: 424061 - protein, 319 aa, unidentified
MADSFPFVGIDVSLATLDLAWCDDPAAGRSFTNDARGIGQVVQLLRELTPPPQLIVVESTGKIEQPLLLALLDAGLPVARVDPKRVRLFAYGIGQLAKTDPIDARVLAKFAELAAPRLTEKKSQNRSELAELLTCRRQLIDTRTAHQNQLSRTASSFARKSLESVLRHLQSRLEKLDREIARIIDDDDEMRGLEKLLRSFKGVGPILAATLIGQLPEIGRLGHAQLAALVGLAPYNRDSGTQRGRRSIRGGRAPVRQMLYMCTVAAIRHNPTLKATYARLRDAGKVPKVALIACARKFLRILNAMVRDHLTWSPRAVGA

SEQ ID NO: 424062 - protein, 408 aa, unidentified
MKTLHKRCAGVDVHKAEVVACLRLITNRKVEREVRRFPTTTHGLLELAEWLEKARCTHVAMEATGVYWKPVWHILDGRFALILANAAHVKTVPGRKSDVNDASWLADLLAHGLIRPSFVPRAAIQELRDLTRTRKQLTREVVQHSQRIQAVLEEANVKLCSVITDILGASGRRMLKAMIAGETDAHKLAALGSERLGCAPVALVEALTGRMREHHRFLLAQHLRTIEQLEETIRVFDTRIEAKLVPFRDIVERLKEVPGLGTTAAEVVLAEIGTDMSPFPSAGHLLSWAGFVPRLDESAGKRRSTRIRKSAPWLKPVLVQAAWGAARKKNSYFQAQFLRLKARHGAKKAAIAVAASILTTVYHMLRDGTCYRDLGPDYFARRNPAKIAARLANRIRNLGYHVEITAAA

SEQ ID NO: 424063 - protein, 381 aa, unidentified
MKRNKKLTPTSPQQTEATAEVIKLGIDIHKTKYVVIRQIDNQAAQSPQKFGPAEFVVWVQRQRLLAKRVVSCYEAGCFGFVLHRKLEACGVENFVVRPRNWDEYGSSVKTDARDARELCGHLDRYLAGNERALCVVRVPTEEQEQERSLSRQRETLAKERKRLQNVGTSSGLYHGVDVPPNWWKPKVFTQLCSEIPEFMKLILEPFQQVLEMIDKQLRETTAREERKANRKIPVGLGALTTSILDQEFVDYTRFSNRGQVSSFTGLCPGESSSGNKRQQGSINKHGNPRIRHMLLEAVWRMIQFQPDYKPIKHWKKRQANEPFGAAKKKKMAVAIARQFAVDWWRIQTGRIQPEDVGLRVEYPSAYSTRALREGRVSKVYA

SEQ ID NO: 424064 - protein, 355 aa, unidentified
MLTPIYDEPDSRSGVVGGVDTHKDLHIAAVVTTAGDVLGTQAFSTTRAGYRAMLRWFRSHGDVLRVGVEQTGSFGAELTRHLALAGVPVLEVTGPEPAQRRAQGKDDELDAIAAARAAQSGQRVQVAKDRSGAVEALRVLRTTRSTAVKCRRAALQQLRNTILAAPDEVREPLRYLTRMQLIRTCAGSRPDAMAWRDAAVATRIALKALARRILDLNDEIAGLDTMIKPLVAELGPGLVELEGVGTENAGAFIVAAGDNPDRLKSEASFAMMCGASPIPASSGKTQRHRLNRGGNRQLNSALHMVVVCRMRTDERTKNYIARRTREGLSKRETIRCLKRYVAREIFHALVGKSVH

SEQ ID NO: 424065 - protein, 402 aa, unidentified
MNAVGIDISKGKSMVAVMRPFGEVVCAPFEISHTDKDLTDLAKMLKSLPGETRVVMEATGSYHLPVAWMLYSAGLYVSVVNAVLVHDYGNNRLRRAKTDKKDALKLANYALDQWINLPRFTPEEENRQLLKTCYRQYQQYSKVQTALNNNLVSLLDTVFPNVNRLFKSPARADGSVKWVDFVYSFWHKECVSKLSLKAFTAKYQKWCEKHGYHFSEQKSLEIYTAAKSGVAAMPKTDATRCMMKQAVSALRACSKALAELGKQMLSLASSLPEYPVVMKMFGVGPTLGPQLMAEIGDVRRFHSKKALVAYAGIDSPPNDSGQVVGKHKKMSKVGSSALRRTLFIVMSVYLQNSPQDEPVFHFMNRKRTEGKPYKVYMMASANKFLRIYYATVKAYLNSLNQS

SEQ ID NO: 424066 - protein, 326 aa, unidentified
MQIIGTDISKGKLHSSLLVDPQRKKAKNKAAQNTPAGFRSLLEWACRHGKCEASQLHFVMEATGIYHENLAEFLVEAGCKVSVVNPFQAKKFAQSHGFRSKNDRHDGLVLALYGHERQLPAWTPPPVEVRHLEALLARLNALETDINREQNRLEKSQVGKAPSEVITSLDNSIAFLNEQKDRLQKEIDDHLNKHPHLREKKDLLRSIPGIGDKLALKFLALFTSKSFCKAPQAAAFIGLIPVEYESGTTVYRRPRMSKAGDATLRAALYLPAVTATRCNPDIRAFYQRLLRAGKTKMAAIGAAMRKLVHIAFGVFKNRVPYQPQNA

SEQ ID NO: 424067 - protein, 293 aa, unidentified
MRNAVGLDISKLTFDASAMVGNAEYSAKFDNDSKGLDQFSDRLKSLGCQNLHICMEATGNYYEEVADYFAQYYSVYVVNPLKISKYAESRFKRTKTDKQDAKLIAQYCRSAQESELVKRQKPTDEQYRLSRMTAAYAQIKSECAAMKNRYHAAKDEEAAKAYAEIIKAMNEQLEVLKEKIKEQTEKPKCKEGVKCLETIPGIGRMTAAVLFHHLTSSKFETSNKFAAFAGLSPQQKESGTSVRGKGKLTKFGNRKLRAVLFMPAMVAYRIRHFPTSSKGWKKRRSLKKSSSQH

SEQ ID NO: 424068 - protein, 444 aa, unidentified
MARKNPQQRFEVVHSDCAGIDIGSREHWVGVNPAQHAHPVQRFETFTDDLGRLADWLESLNIKVVAMEATGVYWIPLFELLDARGFDVYLVNSRATRQITGRKSDVLDCQWIWQLMTHGLLRGAFRPADAICSLRSLVRQRANRVRDQAQTLNRMQKALSQMNIQLANVISDISGVTGMKILRAIIAGERCPEKLATLRDGRIKAGQDTIARSLHGNWRLEHLHALAQEVALYDFLEQQIAGCDKAIGQALEFLPALEAAPKSATKVLRSPHRSTAEQAMLHQALYRILGVDLTAIPTIGVDTALVLASEIGPDLSRFPSSQHFCSWLGLAPPTRISGGRQLGGGGPKIINRAAQALKQAASNARNEKGFIGASHRARLSRMDTSCAIKATAHQLARLIYSMLTKGQAYVEQGIEAYESRSQERQFRALLRKARKLGMDLVKVA

SEQ ID NO: 424069 - protein, 351 aa, unidentified
MIIIGCDFHTRFQKIAMVDTEIGEITKRRLEHGNGEARAFYATLSGPARVGMEATMNAQWFERLLQEHHHELWVGDAARIRAAEVRKQKTDDRDALHILDLLVRDKFPRIWIPSPENRDLRQMLRHRDKLVRWRTSVQNQLHALAMSQGLCRKAKLWTKAGRKELEGLQLDPWASRRRWELLELLDQLDPQIDELDKVVIQEAENRPAAVQLMTQAGVGPVTALAFVLTIGPVERFPTSKQLVSYLGLNPSEDSSGGRQRLGAISKQGNSMMRHLLSEAAQTAVKFDPELRRDYLRLKFRRGISGVAKVAIARKLAVRLYWKLREAAQPNTAARTQGSPASLMVEATPSRS

SEQ ID NO: 424070 - protein, 374 aa, unidentified
MEGTSPSRVLRDTENGNRVPRWEVRSLINSLGRGSPMTIIATGIDLAKNVFAVHGVNRGGGVQLRQPKVCRGKLGALIGALPPTVIGMEACTGAHYWARQFQAQGHTVRLMAPKLVTPYRMTGKRGKNDAADAAAICEALQRPNMRFVPIKTEDQQARLMVHRARQGFVTERTACINRIRGLLSEFGIVLPLKAEVVRREARNHLEDLPGFANLVIGDLLSEVAHLDERIKQYDVHVRTMARDCTAAQQLMQLMGVGETTATAIVAMVGNAREFTCGRQFAAWIGLVPGQYSSGGKARLGRITKAGDPYLRSLLVMGARSVLNAAKGKTDSLSRWAVALEARRGYWKAVVAIAAKNARMCWAVLSRGESFKLPT

SEQ ID NO: 424071 - protein, 441 aa, unidentified
MNSKSLEAKRHFINGKTIIGIDPAKKKHQAVIIDSVGVPIGNTFKFNNSFYGFHQELFHKLNYHISDLSPDKVVFAVEISINLWQKLCCFLCNKGFTVLMVSPLFTHHERPKINNNFSRTDPKDALAVANCARQGYFNFYRLYPSDQNAMHRLSITYDKLKVHMTQTKQRIRSQVELIFPEFINALDLDTDTARYLLSKYLSPKDFLNMNVFLEVPEVMKVSGRQHGEATLKSLKEAAKQTIGINLADEELISERITLNCWLGQYVLLKEQIQYVLDQLIALAEQTPYFSIISSLKGISDITAARFIAELRDLSYFDHYKKIEAISGINLKLSQSGQYTGYRRITHIGNHRLRAVIYSMAEETKNHIPEVRIRYLKRQMKQPRYRKNVIASCSNLLKLIVALVKEEHKYQYKEEKQKELAELELKYKEFKEKKKKNYKKSA

SEQ ID NO: 424072 - protein, 457 aa, unidentified
MSKGNKKAKSQSFKGSNLPQQLQHINLNAAGIDIGSERHMVAVPAGRDPGSVREFGSFTADLQDLATWLKQCGVTTVAMESTGVYWIPLFELLERRGFEVKLVDARHVKNVSGRKSDVLDCQWIQQLHTYGLLAGAYRPPDEVCVLRSYLRQREMLIQSSSMHIQHMQKALQQMNLLLHNVVSDITGVTGIKIIKAILAGERDPRVLARNRDERCQNSTATIAKSLVGNYREEHLFALRQAVDLYETYQAKIADCEQAIMKQLEKQPNSSDDGPPTAEKPVPARNRIRNGVDVRDLLFKKSGVDLFAIPGLAADTLLTLASEVGFDLTPWKTEKHFVSWLGVCPGTKKSGGKILRNKTKRHPNRATQAFRLAAASLYRSQTALGAFYRRIKSRAGGKQAVTATAHKIARIYYAMLTQGTAYIELGQQAYEQRYKERRLDHLKTQAKSLGFQLVPCAT

SEQ ID NO: 424073 - protein, 405 aa, unidentified
MEVIYPRCCGLDIHKKTVVACVITPEEKEIRTFSTMTEDILAMVDWIKNKGCTHVAMESTGSYWKPIYNILEIEGLNPMVVNANHIKNVPGRKTDVKDAEWIAGLLQHGLLQGSYIPSREQRELRELIRYRRSLIEERAREINRMQKVLEGTNIKLASVTTDILGKSSRAMIEAIINGEEDPAILSELAQKRLKNKKEELKKALNGLIGPHQRLMLKTQLAHIDFLDEQIALLDEEIKRRMLPFEEGLERLHNIPGIGRRTAEHIIAEIGTNMDQFPSAAHLCSWAGVAPGNNESAGKRKSGRTRKGNEKLRSVLVEAARAAAHTKDTYLSAQYHRIAARRGANRAAVAVAHSILTIVYYLLKRKERYNELGVNYYEERKKEAIVKQSIKKLEALGLKVTVENAV

SEQ ID NO: 424074 - protein, 388 aa, unidentified
MQTVADRPEAPTAIRTNLGAIFVSLELSRSTWLITSLSPGGGEKMSKQVVRGGDVAELLERFARLREKARARTGKVFPFVVIQEAGLDGFWIDRALQNEGIESHVVDPASIATSRRRRRAKTDGIDGEVLVRALLAYKRGEPRVCAMIKAPTPEEEDRRRLCRERKVLIVERVRHVNRVKGLLFSQGISGYEPLRRDRRRRLDTLQTGDGRLLPVHLKAQVCRELDRLELLLEQIKAVEAERDVLLAAQQVAAPVPAAMLLDIKGIGPEFAAILWSEGLFRHFDNRRQVASYAGLAPTPWQSGSVDREQGVSKAGNPRLRTTLIQLAWLWLRHQPHSALALWFEERVRRNGGSLKKTTIVALARKLLVALWKYVTAGVVIEGAVMKRT

SEQ ID NO: 424075 - protein, 313 aa, unidentified
MPSPMDFGVDVAKDTLQIASAQSPTQLSLSNRRSSISAWLAKLPRGSRLAMEATGRHHLLLAELAHAAGMIVYVLNPCDLRHYARAVGLRGKTDRVDARLIARYLLREQAELHPYVPPTPVQREIDQLLRRRATLVNTKTRLQLSLRGMASYAAGLRRVLKRLEALIAKFDQRLRQLATHQADAQRRVESTLGIGPLLGVALTNTFERVPLHNGDAAVAFVGFDPRAKDSGQFKGRRRLSKRGPAELRRLLFNGARSASKTKLWHPLYERYRNRGLSATEATVILARKLLRIAFSIYRHGTTFDPARLRSCLT

SEQ ID NO: 424076 - protein, 326 aa, unidentified
MEKVMLYVGIDVSKLSFDVAILNNSSYQNKQFVNDSEGFKALSKWVKPFSKEVVFCMEAAGIYGLALAKHLVQKGEKIIVANPIKTNAFAKMEMSRNKTDKADAQSISRYCKHLDDKGEITKNLFKPKGEAFEKLQFLITRLEQLDKIATQENNRLGVSLDKEAVRSIKSMLSHIDKQIIKIKTVLKEIVKQDDTLNQQVGLLISIPGIGEKTAWAILAYLGDISLFSNAKQVTSYAGINPKIEQSGTSVNKSSLSKIGNKHLRKALYMPALTAAKHNPLMKDLYERLQQKGKPNKVALCAVMRKLLVVAYGVLKSGKAFDPCYQR

SEQ ID NO: 424077 - protein, 340 aa, unidentified
MRLYLGIDLHSSNSYLGIIDETGKRVFKRKLPNDSEMILATLAPYKNDIVGIVVESTYNWYWLVDLLMVAGYTLHLANPTAIQKYSGLKYSDDQHDAFWLAEMLRLGILPVGYIYPKEDRPIRDLLRKRSHLVRLRTSLVISLQNIINRNIGFKLRGSKMMASTADHVAPLLEFNEDLALAGKVSKDSIDFLTLQIKALEAKIEGKVELREPYAKLITIQGVGKILGLTIMLETGPISRFDKAGNYASYCRKVSSKWISNNKGKGKGNKKNGNKYLAWAFSEAAELARRYCPEARAYYNRKMKETNTVIAHAALAHKLARAAYYIMRDQVPFMPEKLFGS

SEQ ID NO: 424078 - protein, 366 aa, unidentified
MIVIGADTHKATHALVAVDAGTGRIRGDREIKAEEPGHLAAVRWARELDDDRAWAIEDCRHVSRRFEQALLAAGERVVRVPPHRMGASRKGEREPGKSDEIDALAVARAVVKDGVECFPVAYLNDQSMEIRLLFDHRADLVAERTRIVNRLRWHLLELSPELERSCKRGSLSRSRPLGRVERGLRKLPAGARVRVAREQVRELRRLSREIDALHCELGALVRAHRPQLLAELGCGALTAAILIGRTAGNERFRSEASFALQSGTAPIPCSSGQRIQHRLNRGGDRHLNHALHIIAITRAQRDPATKEYLDRKEAEGKTPKGALRALKRHLARHFHRLLAEPAADQQRAAVDPNSTGVAPSPMVCIS

SEQ ID NO: 424079 - protein, 455 aa, unidentified
MSIVSSLPSEFERININAAGIDIGAQKHYVAVPKGRDPKGRDVRHFDTFTADLYALVDWLKQCHIDTVAMESTGIYWIPLFEILEQNGFEVRLVNPRSIKHAPGRKSDVVDCQWIQQLHAYGLLTSAFRPDEQINVLRAYHRQRTMLVNHAATHIQHMQKALEQMNLKLTNVISDITGTTGMKIIRSILAGERNPEKLAKHRDPRCKKSDKEIAKSLHGNWRDEHLFALQQAVALYDFYQTQIEACDKQIRAQLCRFEDRSDGGEPPVSTGKSKGSGKRLSFDATEHLYRMTGVNLTQIVGLNTPTVLTIIAEVGLDMSRWPTSKHFASWLGLCPGSKISGGKNFSSKSKPSANRAAHAFRMAAYSLHRSQTAIGAFLRRKKAQLGSPKAITATAHKIARIFYEMLKTRTEYKDLGVDHYQTRYKERMLRNLKRKAKAFGLELVNSNRDQSVMVN

SEQ ID NO: 424080 - protein, 384 aa, unidentified
MIKHNILFIGLDTHKVSTEVAHVEDQRGAKPVHYGKIKTTKAAITKLARQYQSKYPHATLHFVYEAGPCGYWIYRLLTSLGHCCYVVAPSLIPKKPGDKVKTDKRDALKLTKLLKDEELTPIYVPEPEDEAIRDLSRARETAMKDLKDAKYQLKALFLRNNIHCKVNDNWSLQHLRWLTELILPHPSQQIVLQEMIQIITERIQREKRLANELFHQVKSWRFYPVVKALQAVRGVRLLIATGIVAELGDLRRFDHPRKLMSYLGLVSKEHSSGDKRRLGSITKCGNSRARRLLVQGAHTYKHNANISTELQKRQEGLPKEITDIAWQAQLRLCRRYNRLLSRGKHRNVVVIAIAREMAAYLWAIAREVVITPVNTRLRISRVPA

SEQ ID NO: 424081 - protein, 339 aa, unidentified
MMIIGCDYHPGFQQIAFVDTGTGECGERKLSHKLEAENFYRGLHGHDVRVGMEATGHARWFERLLAELQFELWIGDPGEIRTKRVRKQKTDRQDAALLLQLLVENRFPRIWVPSPENRDLRQLLWHRHRLVQMRTRVKNQLQAIALNEGLRRQKGLWSKPGRAQLEGLSLAPWSGRRRQDLLELLDRLNPRIDELSAAIEQAAEQRPEVQRLMSHPGVGPITALAFVLILGVPDRFRCGKQVGSYLGLIPCEQSSGGRQRLGHISKQGNPLLRFLLIESAHAVIRYEPDWRRRFLHLALRRGRPIAKVAMARKLAVRLYWMWRRGWDYRQISKFGSHVE

SEQ ID NO: 424082 - protein, 362 aa, unidentified
MEYFAGLDVSVEETAICVVGDDGKVALETEVPTEPELIAEALERFAGRLRRVGHEAGSISPWLHAGLLALGLPAVCLETRHVRAALSAQRNKTDAADALGIAHIMRTGWFRQAHIKTEECYRIRLLLVQRRNLKRKFLDIENAIRHSLKVFGIRLGKVGRGSMAKAVREAVAGDAMTAGLMDCMLRARAALWEEYLILHKLVTQLAMRDELCRRFMAIPGVGPVTALTFKSAIDDPARFRRSRNVAAYFGLTARRWQSGSSIDVKGRISKAGDPDVRRALYEAASAMLTRFKGRDTIKTWGLKLAKTKCHAKARVAVARKLAIVMHAMWRDGTLYVGDPDAEAQEIDSAYAAKMQRLSYARS

SEQ ID NO: 424083 - protein, 411 aa, unidentified
MRRVIGMDIHRTFAEVVFWEAGKLRPAGRVSMTRAGLEGFGRSLHKDDEVVIEATGNAMAVVRVLSPYVGRVIVANPLQVKAIAHAHVKTDKIDAGVLASLRAADFLPEIWLPDAETERLRRLVARRNQVVRHRTRIKNEVHAILHAHLIPSCPHAELFGRLGRIWLSRQDVPDDERAAIDRHLRELDRLGEDLAVLDREIAQAAVDDSAIKRLLTITGVNLIVAAGLVAAIGDVRRFPDPQRLVSYIGLNPRVRQSGLGLAQHGRIRKRGRSHARAMLVEAAWAASKAPGPLRAFFLRIRARRGHQIAAVAVARKLAVLCWHLLTKNTDYQWARPALIANKLRSMELQAGQPARKGNKRGAAYAYNVKELRDREIDLARHAEQAYERFVSQWQRRGNPKQRTGAAKEERR

SEQ ID NO: 424084 - protein, 400 aa, unidentified
MLSIGIDVSKGKSTVCGMKPGGEIVYTPFEVQHTREGMSELVSLLRSSGEEVRAVLESTGSYHCPVVAALLENGIFVSVVNSLRMKRFCSQSIRKVKTDRIDAMQIALYGLAYWQELQPARLPEDTYRELQRLARQYYQMTSMLIKAKVDFNAICDQVLPGMQELMNDHAGRHKLSDFVLRYRHTTHILEMGETRFRKDYCKWAEKKGYRNCERMAALIFATAQNGIPVLPNAPSTQIVITEAIRVLHTVEASRDAILTQMQALAKTLPEYSLVREMPCIGDTLAPRLIAEIGDVRRFHSKRALIAYAGIDAPPYQSGKFCANNRHISKRGNRYLRKTGYEVMQSYVMHKPANDPIFTFIEKKRSEGKCGKLAMVAGLNKFLRVYYGKVTELYRSLPAIE

SEQ ID NO: 424085 - protein, 368 aa, unidentified
MKNITTYVGVDAHKKDLFIAMLVGDQTTPVTWQVANEPNAVRRLVRKLERDAPGPVRMCYEAGPGGYALQRQVTTPRVSCQVIAPGLIPRKPGERVKTNRRDARKLVELLRAGLLTEVRPPTPEEEAVRDLCRARDDAREDLQRCRHRLGKLLLRRGLYYSGRNWTRAHRGWVDGLEWAQPAERIVVDDYLLAIDQLEARLTELDTRLTDVAQREPYREPVAWLRCFRGIDTLTAILILAELHDFRRFHTPRALMAYLGLVPGEDSTGEKHRRGRITRTGNALVRRLLVETAWHYQHRPSVGVALTRRRKGQPGRVIAIADKAQQRLCRRFRRLAEQHKPAPKIAVAIARELAGFLWAALQPTPSPAK

SEQ ID NO: 424086 - protein, 309 aa, unidentified
MDEIIIDKGCGLDVHKETVVACVMGSGIKKDIRTFSTMTNDLLRLKTWLSRLGITHVAMESTGPYWKPVFNVLEDGFTLILANARHIKNVPGRKTDVKDSEWICRLLRSGLLSASFVPSQRIRELRDLTRYRRKLTQALSAEKNRIQKVLEDANVKISSVLSDTFGVSGNQMIEAIMEGKLREEEIADLAKGRLKSKKEEIREALVGYFHDHHRFMIKASLEHIKYLEKLISDLDRATKEKLEQYQKEYELLQTIPGVKEQGAAAIIAEIGADMDVFPSEGHLSTWAGMSPGNNESAGKKKEWKDDPRQ

SEQ ID NO: 424087 - protein, 338 aa, unidentified
MKLYCGIDLHSNNSVVVILDEADKVIYQKKLNNNLSLILQQLSVYKNEITAIAIESTFNWYWLVDGLMDAGYTVKLVNTAAVQTYDGLKYTDDKDDARWLAHLLRLGILPTGYIYPKEERAVRDLLRKRSQLVRQSTTNILSLQNILARNTAQSLSSYRIKKLDDNQAEKLINDPNITLSLKSNLNVIRCLQSTISDIEAAVLKQSRLRAEFKKILSVTGIGEILGITIMLESGDMNRFAKVGSFSSYCRCVKSERMSNGKKKGENNRKNGNKYLAWAFIEAANFAIRYNNQVKSFYQKKKSKTNGIIATKAVANKLARACYHVLKDQVTFDVNKSFS

SEQ ID NO: 424088 - protein, 422 aa, unidentified
MQTEQVPKRFIGLDIHRKYFVAAGVDSKQNPVLGPHEAPMRQIEKWAKKNLTPADAVVVEMTTNTYAVYDALKPLVHSVTVVHPPHVALIVRAQVKTDKKAAFTLAQLHAAGLLPAVWIPPIEVREMRALVAHRRKMVKLSSIAKCRLHALLHRHDIEEPEGFELFTEDMQAWWKSMKVSPLEKQCMLSDMATLEFAREQVKQIEAALNIEIAKDARAPLLVQITGIGLLTAVTILSAIGDIRRFPTAKQLVGYTGLGARVHASGMTYSTGRITKSGRKDLRWAMVQAARQAVAHHPHFKVEYERLSKRIGTKKAIVAVARKLLVVVWQVLTKETADKFANPTQVACGLFAFAHRARAKNLPNGQRALEFVREQMDRLGIGEDVAVIPWGTKTFKLPKSKLKQDEEPELHPFDLAQDKPAST

SEQ ID NO: 424089 - protein, 358 aa, unidentified
MRKVTRRAAESKSLVVTAKDSVFVGLDVHKKNVHAAVRVNGCELTTFVTPADVATVVRSLSRFKAALKRVVYEAGPTGYGLARALRKAGFPTEVIAPGKTPQPANRDSKSDRLDCRKLAEFAEKCLLKPVAVPTEEEEADRQVMRLREQLTKKRRRVMQQIKSLLLMHGIPQPEGLKHWTKTGVAALADLKVTLHLRLALDCLVEELTHLTGLRDQVRMAMKKMSRQKRHRTHERRLRTHPGIGETAALAFLTEVYQPERFEDAEALTKYVGLAPRVSQSGETRREGPLMKTGRGTLRALLVQASWKWIALDEGALEVFNRLWRNTGLKQKAIIGMARRMAVNLWCMLLRGEDYRRAA

SEQ ID NO: 424090 - protein, 390 aa, unidentified
MQNVADRPGASTAICTNLGAIFVSLELSRSTWLVTSLSPGGGERMSRHSVTGGDVAALLARLIDLQGKAQVRTGRCFPVVVIQEAGLDGFWIHRALRKEGVESHVVDPASIAVQRRRRRAKTDRIDGEALVRALLAYKRGEPRVCAMVKVPTPEEEDRRRLCRELKSLIGERIRHANRLKGLFFAQGITGYEPRRQDRRERLEELCTGDGRLLPPHLKALALREIEVLELLIRQIDTVKAERNALLAAERAADTTSGRVEMLLRLKCIGPGIAGALWSEGLFRHFDNRRQLAAYAGLAPTPWQSGSIDHEQGVSKAGNPRLRATMVELAWLWLRHQPESALSRWFHERVRHNGGRLKKTTIVALARKLLVALWKYATAGIAIEGAVMKPV

SEQ ID NO: 424091 - protein, 338 aa, unidentified
MKMTRIGIDLAKNVFQVHGVDSHGKTVLQKQLSRAKVIEFFAHLEPCRIGMEACAGAHYWARELSKQGHEARLIAAQFVRPYRKNEKNDKNDAEAICEAAGRPNMRFVPIKSLEQQAVLTVHRVRQLRVAERTALVNQIRGLLAEYGIVMAQGIARLRRELPRILEDADNNLPDLARAVFAELRSRLTELDRQIADYDRHVDQLAAQSEPARRLMKLEGIGPLTATAIVASIDDGKCFRNGRQFAAWLGLTPRQHSTGGKARLGSMSKRGDVYLRTLLIHGSRSALLRTAHRTDVKSRWVEALKRRSCNNVAAVALAAKHARIIWAMLARNQEYRLAV

SEQ ID NO: 424092 - protein, 354 aa, unidentified
MSNKSNPTVATMGIDIGKNSFHVVGLDQRGAIVLRQKWSRRQIEARLANIPRCLIGMEACVGAHHLSRKLQSHGHDARLMPAKYVRPYSKGQKNDFRDAEAIAEAVQRPTMKFVATKTADQLDLQALHRVRERLVSQRTGIINQIRAFLLERGVAVRQGLRFLRIELPGILATRSDVLSSRMMHIIEGLAGDWRQLDERIEDLSTDIKELADQDPACERLMTVPGIGPIISSAMVAAIGNGAVFSKGRDFGAWLGLVPKQISTGDRTILGKISKRGNRYLRVLFVQAAWVVLVKPKSWERYGLKPWIEAAKRRLHHNVLAIALANKLARIAWAVLNKERNFECVKTSEMASRSA

SEQ ID NO: 424093 - protein, 273 aa, unidentified
MTNEARWFAGIDWASQTHQVCLIDVGGKIIGERAFAHGGAGLTELCAWLLARTGAAPAAIAVAIEVPHGPIVEALLEHGFQVYAINPKQLDRFRDRFTVAGAKDDRRDALVLADSLRTDRHCLRRLAAEDAVVIELREWSRMTEDLQQERNRLANRMREQLWRYYPQALARSYHALRALSGVAPVTRRSGKRCIVARRQACQTRLRDAVYHWARVAIQHDELSRRRYAELRKRGHSHGRALRSVADRLLAVACAMLARQTPFDPEYAAKRAVA

SEQ ID NO: 424094 - protein, 417 aa, unidentified
MADYAALIGIDWSDAKHDICLLDPQTARRETSILRHSSQTIDEWAAALRARFGGQQVAVCLEQSRGPLIYALMKYDFITLYPVNPSTLSRYREAFSPSRHKDDSTDAAYLAEVLMHHRDHLRAWHADSEQTRTLRYLVEHRRRLVDDRTRTSNRMTSLLKCYFPQVLEWFPDIRTTLVCDFLLRWPALDTLRRVRRETLVKFFREHHSVRKETIEKRVDSIKQAVPLVIDRAVIASSVVMTRALAAQMKTTLEAINEFDSEIAALCAVNEDFALMQSLPGAGPNYAARLTAALGTDRERWQSADELARLSGIAPVLERSGKSCRVRWRYFCPKFLRQSFVEYAGESVRHSFWARAYYQQQRAKGQSHQAAVRTLAFKWIRIIYRCWKSRTAYDEVKYLEGLRKKGSSLLNYAANNPA

SEQ ID NO: 424095 - protein, 391 aa, unidentified
MINIGIDVGKFKHCATVLDDSTGEVLIKPFFLTNNRKGFDLLYSKTKQFIHRKHSVGMEDTGHYMINLTNYLLDKKFTVKYINPRATCLRRKGLGISAKNDRKDALLIAEMLSEKRFWRSISVRSIENSKFRDITRLYHQLQEQQNQDMNRLQRALDIVFPEVNSLSWTRYSKAYMKFLSTYPSASSIALEDIRILRKALKTEGRGRQCKVTAEEIRELAKCSVGEDNISIDLEVTSIIAIINTREEQIRMLEKKIEEFSHKLNSPIISIPGISHISGMTILAEIGDINQFQNTGNLISFAGMDPLVYQSGKYDAAHMPISKHGSRYMRKALYQAVFTVCKYSPTFHDYYTKKRNQGKSHRCAQGHCARKLLRVIYKLLSTNSLYDQNHIQ

SEQ ID NO: 424096 - protein, 350 aa, unidentified
MCSLPVFVGLDYHDASVRVCVLDTDGRELANADRCNDWKAIAEFADRFGRPVRAAIESCCGAADLAEELVSCAGWSVDLAHPGYVQRMKQNPDKTDYQDAQLVADLERIGYLPRVWLAPQHIRELRQVVRYRLQLTDQRRATKLRVRALLREQRCRAPQGVNAWTKAWDHWLRHTAELSAEGRWVANQHLQELACLVTRIRQVEKRLERLTANDVEVQRLQQHVGIGPVTAWTIRAEIGHFDRFRTGKQLARFCGLSPRNASSGQRQADAGLIRAANPALRAVLIEAAHRLVNYDRYWQKFAQRLRAAGKPGSVVAAAVANRWIRRLYHEMKTPSGELAVAVRSARSQDS

SEQ ID NO: 424097 - protein, 405 aa, unidentified
MIFVGNDWASDHHDVCVMDEHGTTLATRRIPENAAGATTMHELIARYAQEPGEVVIGIETDHGMWVTALVAAGYQVFAINPLSVSRYRDRHHVGGTKSDKADAKTLADLVRTDRHNHRLVAADTVAADAITVMARTHQNLVWARSAQQNVLRSQLGAYYPAAVDAFGGDLAHKDCLAVLRRAPTPRQGAALSVAAIRSALKKGGRQRNIDTRARDIQHALRGGGHLGAPEALTAAYAATVTATVEMLAALNTQIIQLETTMAQSFRAHPDAEIYLSMPGVGDITGARMLGEFGDDPERYATAKSRRNYAGTSPRTIASGKGHVVLARHIRNTRLNAAALCMAQSALTGSPGARVYYDTLRDQRKSHSQALRAVANRLVGILHGCLAHRTHYNEHTAWNHRTNLAA

SEQ ID NO: 424098 - protein, 337 aa, unidentified
MNNIEGCGVEVSARELVVARKGKAGVQLTRFANTAAGHRQLLRALTRGGQRVRVVLEATGLYALDLALLLSAQEQVQVMVANPRAVRHFAQAMMQRSKNDQLDAVVLLEFAERMPFTPWVRPAENTLALWAIARRLQALTKLCTAEKNRAHAMGLSEAIPAMVRRDIARSLQFHQRAMKKLRQQALQCIAADAQLQQRYQLLRSVPGLGEISAVQTLAELLLLPEDRDVRQWVAYAGLDPREYSSGTSLRKYTRISKVGNAHLRRALYMPALVASRVEPHLRGFYEHLLARGKSKRQALVAVARKLLHAIYGMFRSQRPYDGTRVYLAAAAQAEKFS

SEQ ID NO: 424099 - protein, 336 aa, unidentified
MIAVGVDTHKHEHLARAVDGLGQILGGLTIRADLSGYIELTQWLRTLGEDVVVGIEGAGSYGAGLCEFLLAEGIAVVEVERPRRQDRRRGKSDEIDALMAAKKVLAKDGLSTPRASGTRQALAALLIAQRSCVSERTRLLNQLQALHTTAPVALRERIGPGNGRKLAARLVKMRARSDAPQSEQLIFTVLRDLARRSEELAAQANAYKRELAELISSLDPTLLQEYGVGPISAAKLLVCDPRRLKGEAAFARCNGTAPKPASSGQIIRYRLSRGGDRQANNALHTIARIRARHDESTRAYLERRQSEGKTPREAMRALKRHLSRSLYKKLITIPLT

SEQ ID NO: 424100 - protein, 464 aa, unidentified
MRLPVTFTPPTKHKDSLHVNILALDLGKFNSVCCFFNDKTRRAKFLTTPTTPEHLSHIFRESKPDLVIMEACGPSGWINDLAKSFGLRTFVCSTNEEAWRWANVKRKTDKDDAIKLARMFGMEELKPVHMPSPEHREFRSLVKYRKTLDRRINKTKNTIRAWFVNQGITIDAGDKAWHTGRDHINSFRKPLAECGNNELWKGELDIELTILDSLTEQLSTVIKKLEAIGKTDSRIKRLMTIPGVGPRTAEILVACIDDPHRFENGRQVSSYFGLVPRQYQSGETDRNGRITKRGNPLARTILVECAWASLRYNPWAKGIYERICGKQKTRKKKAAIALARKIAVIAWAMLRDEKDWEPKRMIEVTESFGKMPASMKDTLQNMKPKENADQRKCRLRKEARMAKAAANEGTSKTPAARTKTKDQTARSTKAEVAKRSPRTDAKPTKKPRTRSSSSRRARKPVSRT

SEQ ID NO: 424101 - protein, 356 aa, unidentified
MTSSSKYIGMDVHKESISIAVRNAAGKIVMESVIETKANTILDFIDGLRGEVHVTFEEGTWSAWLYDLLKPHVTRLVACDPRRNALLQEGNQNDRVDARKLAELLQNNQLRPVYHKDHGLRALKELVRSYLTITKDLSRVMTRVKAIYRSWGISCSGKQVYSSRHRAEWLEKICEPGVRRRAELFYQQLDALRSVRQQVRKELLAESKKHKIWKRLCEIPSLGPIRAAVLLGIVQTTHRFRTKRQLWTYSGLGIEVHSSADHHVVKGQLERKKKPIEIRGLNKNYNHDLKTLFKSAATLASSKPGPFEEFYAALVSKGMRPEMARLTLARKIATIVLIVWKKGVCFDANHLKPQTA

SEQ ID NO: 424102 - protein, 410 aa, unidentified
MEVVLERCAGLDVHQASVVCCVLIGAPGRKAQKLLRSFGTTTRELEALRAWLAEHGVTHVGMESTGVYWKPVYAVLEGHVDLTVGNAHHIKNVPGRKTDVKDAEWIAQLVRHGLVAKSFVPPPVIRDLREMVRYRRTLIETRTAMRNRVLKLLEGANIKLSGVASDVFGVSGMAMLEALAAGTNNATEMAGLARGRMRRKHAALEAALEGRMREHQCFLLGMQLRTLRTIDQDLDALDARIGAQLEPFQAQHRLLMQIPGVDWVTAAFIIAEIGTDMDVFATARRLAAWAGVAPGNYESAGKQKGAGTRRGNVFLKSALFAAASAAVRTKGSYYRDKYNRLRARRGPVRAIMAIAHKLLIAAFHMLSTGEAFRDLGESYLDQVARKRSTAKLVQRLSNLGYDVMLVPKAA

SEQ ID NO: 424103 - protein, 336 aa, unidentified
MTKYIGLDIHSSTCSFCVVNNEGEILDQSEIVSNGRLLIEYIQSVEGHKKLALEECELSAWAYELFVNRVDELIVCDPVKNSVYKKAKTDKLDAKNLAALLRGGFLKPVYHDGSGRQQFRALMSGYQDIVDTGVRMKNRYASLFRKAGMRQRGSAFYDDESLINDLPRPDQRFVAKSFYGMISSLEAQRESYVDEIKKMSRGFKEIKLLKTIPGIGDIQAAKIVSQVVTPERFENKHKFFSYCGLVRQMQRSGGRDYPSARIHGNRILKCVYKMAAHRAIAGSSALKEYYDSLRLKGANAKAARNAVSRKIATISLGVWRNGSKYNDAMILESVKS

SEQ ID NO: 424104 - protein, 327 aa, unidentified
MNDATSFSDPSVFVGIDVSKKKLDVCLLAGSSKQLLSFDNTVGGIASLVDRLRAYPVRLVVLEATGRYERRCGVELMTHGFDVAIVNPRQPRDYARCQNLLAKTDTIDAFILASFAQVIGPRASQLPSANQLLLDEMVARRRQLVQMHAQEDNRLQQAFEKRIQTSIKRIMRLLDQQREDLDRAIAALIDRDDDWRGKLELLKTVPGVGTVTASTLVAELPELGKLNREEIAKLVGPAPMNHDSGKHRGQRHIQGGRSTVRCVLYMATLTARTFNPLIKAIADRLTRAGKPFKVVMTACMRKLLTILNTMARNREKWRTPCPAIPTT

SEQ ID NO: 424105 - protein, 425 aa, unidentified
MGKIIPVCCGVDVHKKFLVATILTGDGLIPQCKQKHFGTSYRYLLEFKQWLLDNNCKEVCMESTGKYWVPVWNVLEESFHVVIANPKWVSAVKGNKDDKKDSKWIGNLFRMGLVPSSYIPGKDIRILREFTRYRSKLVSMRSSEKCRFQNAFTVCNLTLDAVVSDMFGVSATDIENYLLATDTVDPEHCVSLLRRSLKKKAEAVKEAVEGFNMTPEQKERVRIIQGHFADIDKRIGQLNEIINRLVAEHEGTISLLCTIPGIDRRLAITILSEIGTNMNEFGTSRRLCSWAGLVPGNNQSAGKKKSVRITRAGVYLKPALVEAAHAAVKASETSPYFRIKYERIMKRRGKKKAIVAIARMMLTSVFAMLQTGETFCPSDLLKYDMPEELQKKRNLTAAKEAVKLLVSLGLIADGSISFEPLAQAG

SEQ ID NO: 424106 - protein, 391 aa, unidentified
MNTLYVGIDVSSKSNVVYLMLPNGDKHSNFSVANSHEGSTLLVKKIYSALTSHSLDTVLIGLEATSVYGDNLVYFLREDATLAPFNRKIHVLNPKQVKKFHDTYNDLPKNDYVDSFVIADCLRFGRINKEVYMGEYRYKALQNLTRARFFAVQNLVKEKQRFMNVLFKKYSTMTQEKVFSDAFSTTALAVYDEFESAEALANMDLHELTDFIIEKGKNRFPDPVAVAKAIQKAARSSYRLPKTVNDSVNQVLSISITSMKALESQIKEFDKAIKALMELLPNVLISIPGIGPVYSAGIMAEIGDINRFDNQASLAKYAGLAWKQHQSGGFEAEVTRLIPSGNRFLKYYLCEAAFSLVRCDKKYSDFYHLKYKEVNRCQHKRALALPVNLCA

SEQ ID NO: 424107 - protein, 489 aa, unidentified
MKIQPATKAQKDKKASKKASGKATPGKWDEMNRKQRREMMRKMQSEDLSLEVVHPHAAGIDIGNESHYVAVPPSRDPQPVRCFGCTTAELKKMAEWLTQCGIRTVAMQSTGVYWIAVYDILEEAGMEVYLVNARETKNLPGRKTDVQEGQWLMKLHTYGLLRNSFRPSQEIRTLRTYWRQRHDLVRSTGRHIQRMQKALTQMNIQLANVISDISGVTGQTILKAILDGQRDPRELAAYRDCRVEASEEEIVQALEGNWQEDQLFVLRQEQAGYEFCQKQITECDQQLAQYLARLEDQTQGATLPEETRKGRRKKKKGNPQFNLRQELFRMTGTDLTQIDGIDVMTAMTVVSEVGWDMSKWKTENHFVSWLKLSPDNKISGGKVIGKGRMPTNNRATTVLRMAATTLRESDSYLGAQFRRFRTRLGPPVATKAMAAKLARLVYRMLRYGMKYVNQGAEFYEAQHRKQQVIHLKRKAAQLGLEIIEVAAAA

SEQ ID NO: 424108 - protein, 335 aa, unidentified
MENSLPALSLLILFVGIDVSKAKLDVACRAGQQLSQRVFANSAAGYQQLCDWLASFAAKAVHICLEATGSYSPPVATFLEQAGYAVSVLNPAVLVDYRRSLNLRRKSDALDASLLARFAQERQPPLWHPLSQAVQVLRHWLRQRRQLLALHTQLTNFLEDPQLLAPIRQQWHEQREQIRQLQVISEVQVVRHLHQQPELLLLWQRLQTIPGIGWLSAAQLIAAVGSLSRFSHVGALVSFVGLAVSQQQSGSSVHRRPHLDHHGQRPLRALFYLAALNAMRSDPALAAWAQRLRERGKPEAIVHAAVMRKLVHIVYGVWKTGCDYDPQRAFPLQAA

SEQ ID NO: 424109 - protein, 400 aa, unidentified
MSERRARVWAGIDAGKGHHWAVAVDETGATLWSKKIDNDESAILAALGEILELAGEVHWAVDISGTSSALLLALLAARGQQAVYVPGRTVNRMSGAYRGEAKTDARDAYVIAETARQRRDFAVIDVPAQLAADLALLTAHRSDLVAGRVRLVNRLRDVLTGIFPALERAFDYSSHKGALVLLTGYQTPAVLRRRGRARLTAWLANRGVRGADAVAATALEAAQAQHTALPGEDVAAQIVADLAAQVLALDDRLKRIDKQIRDTFRSHPQAEIIESLPGMGPVLGAEFVVSAGDLSAYVDAGHLASAAGLVPVPRDSGRRTGNLHRPKRYSRRLRRVFYMSAQTSIIREGPNRDFYLKKRAEGCKHVQAVIALARRRASVLWALLRDGRVFTSAPPVTQAA

SEQ ID NO: 424110 - protein, 350 aa, unidentified
MTRQNPDPNPNPSTLSSPVFAAFIGLDWGDEKHAVSLCAAGSATLERTTLEQTPEALADWANALRTRFPNGRIAVCLEQARGALLAALLSYEHLVAYPVNPKSLARFRQALYPSRSKNDPVDGDLLLELILKHRDRLRPWRPDTVQTRQIALANEQRRHFIDHRTALTNQLTAHLKAIFPQALQLAGEELASPMATDFLKKWPTLQALQKVSPSVLRKFYYGHNSRSEELMTQRLQLVKTAVALTQDPAWLAVHSLAIQTLAAQLQALRPFLDQFDEQIAQLFAAHPDAALFESLPGAGAVLAPRLLAALGTDRDRFESAVAVSCYSGIAPVTEQSGKTQHWVHVRWSCP

SEQ ID NO: 424111 - protein, 270 aa, unidentified
MEQSIRCGVDIAKLVFQIHGVNAKSGGTSMVKKLARNEMLRYFANKPPMLIGIEACGGAHYWARELIKLGHTVKLMTPQYVASYRRGGKNDANDAEAICEALARPNVRFVAVKSESQQAVLVMHRMREQWVRERTSLMNQIRSYLHEFGIVINQGRAALAKTLPLVAESETLPLLFRQSIADLADRLTDLETRITALNKRIEAWSKQDTTAKALLELCGVGSVTASAAVATAGDVSVFKNGRQFAAWLGLVPKQNSSGGKTICFRFSNMM

SEQ ID NO: 424112 - protein, 461 aa, unidentified
MRKARRWRRKPGKKIVDVTAGLEVLRPHAAGIDVGNAEHYVAVPPGRSDPSVQTFGSFTADLHRLAQWLQACHIESVVMQATGVYWMGLYQVLESHGFQVYVVNAKYTQTLPGRKTDVLECQWLQKLHTYGLLNNSFLPPEEIRVLRTYLRQRENLVAAAGTCIQQMQKVLTEMNVQLANVLSDLSGTTGMAIVQAILEGQRDPQRLAALADPRVQASRKEIAQSLEGHWREDLLFVLQQVHDLYFTYLESITACDRRIEAHLKTLEAKADLAAQPLPPMPRLPRRKHIPQTNLREELYRITGVDLTRIDGIHVQTAQVVISEVGVDMTRWPDEHHFASWLGLCPNNRITGGKVIRRGTKKVLNRAATALRLAAQSLHRSKSYLGAKYRRLRARLDGPVAITAMAHLLARLIYRLLRYGTQYHDKGVEHYERKYRETQIKSLKKQAALLNMQLIPAPGVSK

SEQ ID NO: 424113 - protein, 338 aa, unidentified
MNYTTVGADIAKNVMQLYWVDPDSGEVINKAVKRAAFLEHFANRAPCLVGMEACGGAQHWARRLLEMGHQVKLIPAKFAKAFNIRNKNDAADARAIWMATQMPGKSVAVKTEAQQAILALHRIRQQKIKFRTMQMNCLRGLLTEYGEVMGKSRAAVDKAIPGVLERLTDRLPAMLIESLREQWNDLQNLDRQIAEIERPLRAWLKDDEACMTIAAIPGVGLLTSTAAVATMGDPKAFRSGREFAAWLGLVPKQVGTGGKTVLLGISKRGDTYLRTLLIHGARSVLSHSREPGAWIDQLTRRRHRNVVIVAIANKMARTIWAILAHGKPYEKDHASIAA

SEQ ID NO: 424114 - protein, 356 aa, unidentified
MTVYYIGADVHSNSTELAIEKRGKIVARYSVPTSIPAIINVLDSLQGKKYLAVEEGPMSGWLYRNLNGKLDQFISSDPRRNKLIASDGDKDDKIDAGKLASLLRGGFLRAIHHSDDDGRAELKHWVSLYHDRVRDAVRGINKIRARCRMHGVKIPRAALRDPARRIGWLQKTNHRPLANQLKMLWIGYDATVQQVKFAKRQLSTLSKKYDIIQQWNLLPGIGLIRATTIFAYLDTPWRFKKKNKLWKYCGVGLQRTTSGTDKKGKPKPARLKLSWAVNRTLKNAVLGAALSAINQQDNIFKDYYERMLKDGIITSNARHTVARKMLTVMWAMWKSNRSFDEKVVCNELNRPTVSVI

SEQ ID NO: 424115 - protein, 363 aa, unidentified
MEVAGRFVGIDLGKRTYEMCIVDQKGKITRTGGKTDFAGIDRLCEKLNGDDAVAIEACNLAFRIERAIRKSVGCKVCVMNAGRLAVIYMSTRKTDKEDSLKLAKLLKNHDEDELPIVTPPSDEEWERRKLLSEYRSLKCQRTKEINKLHAIFEHNGYTQFVRKDMCSEKNRANILPLLKGYEKEEAERLIERLTLLEKQIEQLLQKINAEVESDAKIQKVMTVPGIGPITALAYVAYVGDVKRFDNAHQVSNFIGFVPKVDNSCTICRSGHTTKKGNPLLRSLLVQAAWATVKSKNGGALREKYKYMAESRCIGKGKSIVTIARKLGELLYLILKTDQEYKPQKFVIPEFKISKLAEEALKCS

SEQ ID NO: 424116 - protein, 356 aa, unidentified
MIKTKDTPISFSGQHFYIGMDVHKKRWVITVRQNGMRLRSESIDPSPDVVQRHLQKHYPEGTFHIAYEAGFCGFWIARRFRELGMKCIVVNPGDIPTSNKEKDRKTDPVDSNKISRELEAGKLQGIFIPELEDQHLRSLCRLYRKQVQNKTRVQNRIKGLLHFNGIELPAHSSQWPSRFIQYLHSLPLDNGPARDYLDLCLEELQQHRQRILTITRKLRGYVRSDKSAEIFRHLLTIPGIGFKSAVVLYTEIIDIHRFRTFDQLKSYCGLVPSTHSTGEKDKTGGLTYRRNRHLRHILIEAAWVAIRNDGALLQSFNKLTIHMERQDAIVRIATKLLRRIQYVWKNNQPYVKGVVQ

SEQ ID NO: 424117 - protein, 404 aa, unidentified
MKRTKARGPVQRDAKEVLAEVLAKLTGKLEAPAVSSSVKESRRGNTVGPNRDRLTVGVDLGDRWSQYCILGLEGETLSEGQLRTTQEDVGEFFQAMTAARVVIEVGTHSAWVQDVISEWGHEVLVANPRLMEASKRRKRKSDRIDANKLARLGRVDPQSLHPIRHRSREVRQDLVVLRARDALVSVRTELINTTRGLVKSMGTRLPRCSSPSFAQKVKDAIPVEVEEALLPLVQLTKTVNDCIARYDQKIEELGQKKYGHTTLLRQVKGVGPITSLAYVLTLEDPQRFSSSRDVGPYLGLVPNQEDSGDSQPQLGISKAGDRMLRRLLVGSSQYMLGAFGPDTDLRRYGLRLCERGGKNAKKRAVVAVARKLAVLLHHLWVTGDVYEPLHHTGAETRTAQATAA

SEQ ID NO: 424118 - protein, 346 aa, unidentified
MQRIVKQVVGIDVAQQELVVCLGRMYDNWEPELYARQSFPNAPQGFSQLLEWITQQSTQTVPVRFVMEATGVYHESLAYWLNEKGYEVSIVLPNKISNYFRTLEVKTITDKTASQAIALFGLERKLNNWVPPHPLYKKLRQLTRERDQLVAERTMIKNQLHAEQAEAEPNKTSLGRIKKRIGLLDKQEQEIKAEIAAVIKQDEQLKGSVTLLCSIPGIGLLTAATVIAETNGFEHIRNKRQLASYAGLDVKEKQSGTSVKGKPHISKRGNRYLRKALHLPALAAIRHDERFKAIFARLVAKHGIKMKAVVAVQRKLLEMTYILYKTNKPFDREYLKREHEINLKQA

SEQ ID NO: 424119 - protein, 345 aa, unidentified
MPVVTVGLDLAKTIFQAHGVDEAGQTVLRRRLGRSELLAYFAKLPPCLIAMEACSSAHHWARELVILGHDVRLIPPQYVKPYVKRNKTDAADAEAICEAAGRPSMRFVPIKTRDQQAVLVLHRSRSLLVRQRTASINAVRGLVGEFGLITSKGRYRMSELRQRMNAMTPDHLPAIACQAINTLFDHIDVLEEQIAAVERQIVEWHKSNEDSLRLATAPGVGPITASAIVAAVGDGRQFQSARHFAAWLGLTPRMHASGKKERIGRISKGGDRYLRALLIHGARAIVGTLFRNNVTPRPWLVALAARRPTNVTAVAVAHKTARALWAMLTREEKYRKPIAAAPSAA

SEQ ID NO: 424120 - protein, 371 aa, unidentified
MKSILSVGMDVHKNSFSLCAYDGYTGEIVSESTFASDVKLVIKFIEALKSRYENDVEIKCGYEAGCLGYSLYKLLTARGVDCVILAPTTMQVSAKNKMVKNDRMDALNIAKNLASGSYKTVYIPDEEDVEIKEYIRMIHDFKKELKRVKQEICAFVLRHGYQYDGKSKWTIRYMNWIRELEMSEIQRETLNEYIAEMENLNDKIDRFMNRINEIYQSERYHEKVSKLRCFKGIETFAAMTIQVETADFERFPSAKAYASYTGLTTGEHSSGDKNNRIGITKQGNTVIRKTLVECAQSLVKGNVYAKKSQGLKSRQKGMDVNIIVYADKATERLKKKYQKLIERNVPRNKAIVAIARELACFIWGMETGNIH

SEQ ID NO: 424121 - protein, 387 aa, unidentified
MEDRAMIASPAASDCDPARIFVAIELSKKSWLVAVLTPLADKISLHTLPAGDGAALVALLAAARRKVEAACGGPVELMSCYEAGYDGFWLHRLLETQGVKNHVFDPASLQVSRRARRAKTDRIDVRGLLRTLMAHLRGEPKVVSVVRVPSVEEEDARRLHRERDRLVGERTQHVNRIKGLLATQGIYDYEPLRRDRRVRLAELRTGDGRALPPRLEAEIGRELTRLELVLAMIGEIEAERDAIATAKAVTHPHAAKIQTLVKLKAIGPEFATVLTGEVFHRTFANRRQVAAYVGLDASPFRSGGTCRDQGIAKAGNPKARTTMIELAWMWLRHQPDSTLSAWFRERVAALKGRPRRIAIVALARKLLVALWRYLETGLVPAGAILKA

SEQ ID NO: 424122 - protein, 397 aa, unidentified
MSMFFVGIDVSKDYSSVQGLDREGKRLFYLEFAMNGEGFSQFLKMLKTHCEDLSGVTVGMESTGCYHINLFAFLCSEGIVCVVINPLLISNFARLSLRKTKTDKKDALTIAQFLLAHRSKLSQVSYSQSSQDLKDLARERESLAVMMAGMKNDVRRLLQMSFPELEHRCKLFTETMLRFLIKFPSARAIRTAKPKEISKALIHTEGKRKRVFLSAEEIISLAKGSVASESVAKEWILSEKIETLLYLEEKKRRITEALVEACRSMRVDELDIITSVDGISAITGSTFLAELGDIQTFRSYKHVIAFAGLDPSIHQSGQYEGISRISKRGNRHLRRVVFLMTLCVVRSQNIFREYFLKRKGEGLPPKKAILATAHKLLRVLFTMLSSKSYFRKEVVEV

SEQ ID NO: 424123 - protein, 437 aa, unidentified
MRRKKNKASKSVNLQGLPLVHPNAAGIDVCAKEHVVAVPCDRDPRPVRTFQAFTPDLHELAAWLKRCGIETVALESTGIYWISLYEVLEQYGFEIRVVNARHVKHVPGRTKTDVLDCQWIQKLHSFGLLNGSFRPDQQIRELRTYMRLRDNLVVASTQAVHHMQKALFEMNVQLSNVISDIVGETGLHIIEAIIAGERDPKQLAALCSTRIKASRETVAKSLHGNWDEALLFALKAALETYRFNQTKIQECDCCVQQHLAQFESRAQLANSPRDLKTQLHRVCGVDLTKIPGVKEQSAQIIISEVGLDMSKWKTEKQFCSFLGLCPDNSISGGKVLHRATRKVYNRAADTLRLCAQSLTYSKSALGAKYRRLKARLGAPKAIVAMAHHLARLVYRMLRYGQNYVEQGMHQYELKFQLQRIKWLKREAKSLNLQLVPA

SEQ ID NO: 424124 - protein, 379 aa, unidentified
MDLQRTATPAGDVLYGALELSKNSWLLAIQFPDRAQPSLYPIPGGDTQALIAKLMAARNRWAKLNGKAPSIVLCYEAGYDAFWLARLLKAHGIECLVIDAASLQVNRRGRRAKTDRIDVAMLLRALMAWWRGERHVFSAVRIPSVEEEDLRRSHRERSRLVHERTAHINRIKGLLFGQGIRGIKVLSRREPLKIDKLLTGEGRPLPPRLANEIARELERLTLVQKQLVDIERELDEAPTPCQATEKKRRQLMLLKGIGPTFSAVMAREVYYRQFDNRRQVAGFLGLATSAFDSGELTRSQGISRAGSGLVRSAMIQASWLWLRHQPKSALTLWFQQRTQGQSGRIRRIMIIAVARKLAIALWRYLERGLVPQGAVLAGR

SEQ ID NO: 424125 - protein, 314 aa, unidentified
MRIVGIDVSKDKIDAAIVAASAHRSFANSAQDQQQMLSWLDEHDVEKAVMEATGGYERPWAKLLQDGGIAVQIVDPRRVRHYAQAAGQRAKNDRLDAEVIALFGETFADEPGQLHDEDGSALDQLVSGRARLKAIAWQLGNWTEHAPPQEIAEACQAVAAVLEQQLERLDKTIAGKIEQTEHFAERAAIIESVPGLGSGSAAGLIAGLPELGLVDNKAIAALLGVAPYDNDSGKHHGARSIRGGRAKLRQLLYLPTVGAATRHNPVIKAYYQRMIDNGKPPKVALIACMRKLIVILNTMIARGEKWDPTKHATP

SEQ ID NO: 424126 - protein, 343 aa, unidentified
MKHYAGLDVSVEETSVCILDETGRICREVKVTSHPEDLRRILQDPIWHFERIGLEAGQLSQWLFDALADAGLPVVCIETRHAKAFLKAQVNKSDRNDARGIAQMMRVNLFRPVHLKTLTSQKRRMLLTARKLLQEKAIAIENDIRGLLLNFGLKVGVVGAAKFEERIHELIRDMPDLAEIVERLLDARRRLREHFAALHRKLLDLARGDAVCRRLMTIPGVGPVVSLAFVATIDTPARFRKSKAVGPVLGLTPVRSQSGNTDRVGRISLCGDGMMRTLLFEAAQTMLRQTTRWSWLKAWAMRVAQRRGSRKAVVALARRLAVIMHRMWCDGTEFRWTREAPVA

SEQ ID NO: 424127 - protein, 316 aa, unidentified
MQTILDLGSDVDSRSIVIACAGHSFAAQRIANERHAIGTWLREVPCGSRLGLEATGSHHELLADLAHAAGLQVFVLNARDVRRYAQGVGRRGKTDRIDAEVIARYVAREHAELHAYTPPSKQQRALSRLIKRRAKLVVIKGMLTQSLRGLPGVRQELQQVTARLERLIGQIEVLMQHALQQLPAARQAAQHIATIPGYGSLGSTCLGHTFTRLPYANSDAVVAHTGFDPRPADSGQKHGRRRLSKRGPGETRRVLFNCAMAASKTKLWRPYYQAQRAKGLSSTAAIVILARKMLRVAFALYKHDQPFDPTRLSIIA

SEQ ID NO: 424128 - protein, 402 aa, unidentified
MNAVGIDVSKGKSMVAIMRPFGEIVSAPFEIKHTASDIHSLVELINSVEGESRIVMEHTGRYYEVLAHQLSKANLFVSAINPKLIKDFDNDSLRKVKSDKADAVKIARYALDKWQNLKQYNVMDELRNQLKTINRQFGFYMKHKTAMKNNLIGILDQTYPGVNTYFDSPARSDGSQKWVDFASTYWHVDCVRKMSLNAFIDHYQNWCKRKKYNFSQSKAEEIYGKAKELVPVLPKDDITKLIIKQAVNQLNSASTTVESLRTLMNETASKLPEYPIVMAMKGVGASLGPQLIAEIGDVSRFTHKGAITAFAGVDPGVNESGSYEQKSVPTSKRGSSDLRKTLFQVMDVLIKTHPQDDPVYQFIDKKRAQGKPYYVYMTAGANKFLRIYYGRVKEYLSSLPES

SEQ ID NO: 424129 - protein, 420 aa, unidentified
MKAYNINDFAALIGIDWADKKHDVCEHQVHNKKHHYSIIKSTPEALHDWAMSLKKRYPNQKIAVACELKKGPLIYTLTKYNHLVLFTINPSAVANFRKAFTPSGAKDDPTDALLQVEILTLHMDKLSIIEPESAAIRSLAQLVEYRRSLVQDSVDLSNKITATLKNYYPQALEWFKEKDTYIFCDFISKWPSLAKVKRVKKQTLLDFFNSHNSHYVHVNEARISSIKSAMPLTEDSGVIEPNQMLVEVLIKQFKVLLKGIEMLDKAIKLAYKAQHDKVIFDSLPGAGPQLSPRLLVAFGSNRDRYDDASELQKYAGIAPVIERSGKKMWTHWRYSCPTFLRQTFVEWAGFSIRYSFWAKAYYEQQKSKGKPHNSIIRSLAFKWIRIVFRCWKTNTPYDESTYLAALKRRGSPLLKFAINS

SEQ ID NO: 424130 - protein, 345 aa, unidentified
MESMYYIGLDVHKKTISYCIKDASGQVLQEGKIGATRGELDGWMKTLPQPWSVAMEATIFTGWIYDHLLPHAAQVKVAHPLMLRAIAAAKKKNDRIDAGKIADGLRCDFLPECHMAPTEIRDRRRILRYRHLLVRQMVQLKNRVSGLLMETGVSYNKQKLHKVGYFRELLSSNQEIHPNIRLLLKLSRDAIVRLQKTEYALVSSLQRDPLLADRIKRLRTVPGVGPITALTWALEMGEVSRFPSIKQAISYCGLCGDEKSSADKVIRTPLSKQRNKHIQRVLVEAAKLAPRENHELALVYETEKQKGNANRATLAVARKMVAYLLAVDRGRRNFVPTEDHRGVAA

SEQ ID NO: 424131 - protein, 451 aa, unidentified
MDPGFLEHLRLSPRAFIGPGARLLEFLFTGPHADDATQEEEMELLHRRCCGLDVHKETVVACLRLVADGKVTTEVRTFQTTTADLLRLSAWLAENDCTNVAMEATGVYWKPVWHILDDGDFVLVLANAAHVKNVPGRKTDVNDAMWLAELLAHGLIRASFVPDTQTQEMRSLMRTRKQLVREQSSHVLRIQKTLEDANIKLDSVLTDLMGKSGRAMLEALIAGETNPAKLASLADRRVKAPPEQLREALRGRVTKHHRFLLRLHLNQIDALDAAMATLDAQVEVNLGPFRTAVELITSIPGVKNLGAHVIVSEVGIDMSRFPSAAHLLSWTCICPRNDESAGKRRSNRMRKGGTWLKTTLVQCAWAAVKKKDSYLQAQFYRIKARRGPKKAIMAVAASILTAIYHMLKDGTMYKDLGRDHFDRRSTDRQKKRLIKRLTDLGYAVTIKPLAA

SEQ ID NO: 424132 - protein, 303 aa, unidentified
MRVASFKRNRQGCKKAMTWLREETPEGASVGVVMEATGALAEETAGWLLSLDPTLHIAIVNPIQTSAFIRSLGLRNKTDDLDAKALAQYGAQRKPGDWMPMPPEFQALRELTRTRTDLIGARTAMMLRLKDHKRLTKLVPQAMRAVIRTLDSQIARLDGAIQDHLEAHEILEAQTQIGQSIKGIGLVTAATVLAEMGDLRRFPRSRQLTAFAGLSPRQYLSGTSVHGRSPMCKRGSGRVRAALFMAAVCAVRFNPDMAEVYNRLIEKGKHKRVALGAVMRKLLVTMRALAIADKLWQPKAETA

SEQ ID NO: 424133 - protein, 446 aa, unidentified
MAQRTRMKLDVANPNAAGIDVGSARHFVAVPPDRDDEVVREFTSFTEDLESLADWLIACGIDTVAMESTGVYWIPLFELLEARGLTVYLVNARHVKNVSGRKSDVLDCQWLQQLMSYGLLSGAFRPKDEICALRSIMRQRTMLLSYQGQHIQHMQKALSQMNIQLGNVISDVVGETGQRILRAIIAGERDPLKLADLKHGRIQASTEQIAMSLHGNWRQEHLFALTQAVELFDAYSQALQRCDVRLESMLGALSRTRDEPGPTKRRRISKVKNAPKFDVRTYLFRICGVDLTTIDGIDTTTALKIIAEIGPDLSRFKTAKHFASWLGLCPGTKISGGKLLSGATKRSANRVAQALKMAAISLRASHSALGAYFRRMCARLDKGKAVTAVAHKLARLIYAMLTKGASYVDQGQEYYEERYRQRVLFHLKKKAAAMGLQLVPVQPQQT

SEQ ID NO: 424134 - protein, 338 aa, unidentified
MTVAFIGIDLAKNVFQLHGVDANGQALLKRRLRREGLLAEIAELEPCVIGVEACTGAFYWQRQFEALGHTVKVIALQYVKPFVKHQKNDQNDAEAICTALMLPNMKFVPTKSEEQQDIQALHRARRRLVNHRTALVSQMRGLLLDRGIPIALSIGRARRAIPEILENQTNGLSAMSREIIGDLFDFFGQIDAQITTFDRRIDAVFKSNEDCRRIARICGVGPKTATAVVAAVGDGREFKNGRHLAAWMGLVPRQHSSGDKRLLMGISKRGDRHLRTLLIHGARSVVRVAQLKTDPFSQWVNSLRERRGMNRAIVAVANKNARIIWAMLNRNEEFRAHA

SEQ ID NO: 424135 - protein, 408 aa, unidentified
MQVMHPRCAALDLGKDVLVAAVRLQEDAQLRRECRSHGTTHHQLLELVLWLKQERVTHVVMEATGSYWKSVWQALEGEFELTLAHPAQIKNLPGRKSDVNDATWMADLRAHGLIRGSFVPPAEITALRELTRTRKQFVREVGRHTQRIQKILDVGGYKLAGTITDTLGVSGRAIVRALIAGEIDPEKLANLADPRLKVKRQRLVEVLHGHLTDQQRSLLGMHLNLIEGLEVSITQLDQEIERAVRPFRNIIERLMGVPGLREVTVPALVAEIGVDMSRFKTHRHLVSWARLCPRLDESAGKVHSNRTLKGAKWTKTLLTQAAWGAVRTKNSYLRAQFLRLRHRGTKKAIVAVAASILTAVYYMIRDGSEYQDLGIQYFQQRDRSRTARRFVARLQQLGYEVQITERAA

SEQ ID NO: 424136 - protein, 440 aa, unidentified
MRLGTRMGNCRVQESAAHRISMSTEKRKVCGIDVHKAFLVATVVDREGKSETRRIQQNPESLLELRDWIQSENCDSVAFESTADYWRSLYLVLESRVPVTVANANHIKHVPGRKTDITDSRWIAQLELNGLITPSRIFAGEMYDLRSLTRSRELLVQNRTELKNKIHHLLDSASIRLSSVLSDLFGKSGTTILQGLVQNKPIEEIIESLPKKMRGSADAISAALPASIPPVTLVLLQSYLKLVDDLDNEIKLIEGRIRESLTGKSREIQILTSIPGIGFIGASTLIAEIGNVHDFEDADKLTKWAGLTPSVYQSANVTRTGSITKQGSRHIRWILVELAHVAIRSPGRIRTFFERLMPKKGYKKSIVAVARKMLRIVWHLLVHDEVFVDDFPRSKQVKFPKMPKKIQAVGINRIIELLSKASEVIIKDRNQEIFRLGLSD

SEQ ID NO: 424137 - protein, 373 aa, unidentified
MPRYSTAFGMDVHLRSTTVCALDAETGEAVTRRFRGNPWGEVAEWMSGFPGPSLAAYESGYLGFAPQRELSGLGVDCVVAAVSRVPRSAADLSSKNDRNDAARMAKAILSHDVTPVWVPSPEIEGLRDLAAAHDAATARLAAAKQRLLAFLARRGYAYGGTTPAGNPRRYWTYDFLRRLDKVRPADDGGIRALAALRSEVEAAAETRDDLLAEYRAAVAAGPLSAEVEALQSIKGCGFALAAAFASEVGDFSRFRSGRQVTAYFGLAPKQRSSADSVRLGGISGAGNALVRRLAVEGSWSYVQASHQPKLMPKGSGVPLEVRMHGRKGSERLLRRREEMLARGMPQAKANAATAAELVRWLWALGAMCREATE

SEQ ID NO: 424138 - protein, 419 aa, unidentified
MKPQASEAFAAFVGLDWADTKHDVCLQATGTEQREFLRLEHSPEAINAWVQTLRTRFNGQPVAVCLELNKGPIVSALRNYEFLVLFPVNPLTVAKYREAFTPSRAKDDPTDAELQVEILLKHRDKLTPLSPQSPTMRALAQLVEHRRRLVGDKVRLTNRLTSALKNYFPHVLQWFQEKDTVLFCDFLSRWPTLKAVQLARRATVEGFFRAHHVRSADVITTRIQAIKSALALTTDEGVITPNVLLVQALVAQLRVTLQAIADFDRAIAQRAQDHPDFPLFEALPGAGAVFAPRLLVAFGEQRERFTSADELQKYAGIAPVTERSGKKSWVHWRLQCPKFLRQTFVEWAAESTRHSFWAQVYYQQQRDKGKAHQAAVRALAFKWIRVLYRCWQERTPYDESVYLQALKRRNAPLLHNLAH

SEQ ID NO: 424139 - protein, 429 aa, unidentified
MPQSQGHKECSMNREQNARVSEKRYVGLDVHKHYITVGGMNGQQEIVLRPRDVEMERFKTWAESNLRKTDEVVLEATTNTWDVYDTIAPLVKRVVVAHPAEVKQIANSRVKTDHQDVIRLIRLLIADIVPEVWVPPVEVRELRALISYRWRLVKMSTAIQNRMHSLLHRHNIQAPQGKIDTGENREWWQKLKLSELENLRLKQEIKTLRLIRENIVEVERELGRLSNSERWGDQAVYLMQIPGVGIIVTMTILSAIGDIRRFESPKKLVGYAGLGAGVHDSGQKHRGKGITKFGRKELRWALVEASWQVIRSNPRWRAEYEALCKRKHQNQAIVVIAHKLLVTIWYLLNKQETYHHSNEEDLAYKMLTWAWHMDKSALNGMTNQQFAKYGLIRLGKGEELTRIVRGGLPRRIASKEEVLVLKPELCLKQ

SEQ ID NO: 424140 - protein, 341 aa, unidentified
MDKVSTIGLDIAKSVFQVHGVDAAGAVLIRKRISRAKVLEYFGELPPCLVGIEACPSAHHWGRELQGLGHTVRLIPPSYVKAYLKRGKNDAVDAAAICEAMARPDMRFVPVKSADDQAVLMLHKSRELLIKQRTMSVNALRGHLAEFGLVVAKGIGRVDELLALAQADARLPQIAKATVTELAQHLEGLDQSIDAIDDDIARAHRKNPKSCLIDQVPGIGTLIASVVAASAPDPGVFKSGRDFAAWLGLTPRQHSSGGKEKLGAITKQGNRYIRKMLVVGATSVLRVVGKRKGALADWINALRARKPERLAAVALANKLARICWAIMTTGESFRTETYVKA

SEQ ID NO: 424141 - protein, 350 aa, unidentified
MVVGIDVHKRSHAVALLDDRGGEIATLTIANDPRGYRRLVDWLVDHQAADAVIGVESPGSYGRCLVAALLGAGFAVLHVPAWRTHRERHRRGPGKTDAGDAISIAQVVLTRRDELGSAQEPEIVRALAMLELQRRRFVRDRTQAIQRLRSDWTQLDPVAEAAVIRCDRARELNRLKRIRFGTTLTEQIAARCIRELARDIADLNQRIKTLDTEIAQLLNDHGNPLADLHGAGTNLAATIIAHAGDVRRFRNAAAFARFCGAAPIPCGSGQTAGRHRLHRGGNRQLNAALYRIAIVQQRHHPAAKAFLTRKIAEGKTPREARRALKRHLANVLYRHLLTWANHTPAMNLLT

SEQ ID NO: 424142 - protein, 319 aa, unidentified
MAQNDLVVVGIDVAKDKVDACIRSLSLRQSCPSTAQGYRKLVGWLRKHQVNKAVMEASGGYERDWAKVLRQAGIEVRVVDPKRVRSFALSAGRLAKNDAIDAEMIAWFAETFSEAPGQVHDAAHEELQILVKARLSLIDFRMRLESQSEHATPGLVQKAQAHVLKSLASEIAKLEAAISAKIKSTPDFAERAEIIESVPGFAKTSSANLVAGMPELGRVSDKIAAALIGVAPYDDDSGKRRGERRIKGGRRWVRNAIYMPCVGAATLNNPVLKTYYQRLIAKGKEPKVALIACMRKLIIILNTMIARRQKWDPSRYVLS

SEQ ID NO: 424143 - protein, 288 aa, unidentified
MRTKSAGPFIGVDVSKATLDTAVDGETRVQQYANDEAGIAALAAFVTEHQPTLVVVEASGGWEMDLVASLAAAGLPAAVVNPTRVRNFAKATGQYAKTDKIDARVLAHFAAAIQPPVRPLKTGAQAQLSAVINRRQQLVTMLTLEKNRRVTTRNEMREQLERHICWLEAEIADLNEQLELLVAHCAEWQDKKKVLMSVKGVGVVTATTLLADLPELGSLNRQQIAALVGLAPLNKDSGRKRGKRHIFGGRAAVRSKLYMAALSASRTNPVIRPFYERLIANGKLGKVV

SEQ ID NO: 424144 - protein, 416 aa, unidentified
MRFYTTPHRYYCGIDLHARRMYICVLDAEGKILVHRNGPATPEHLLATIAAYREDVVVAVECIFTWYWVADLCAQEGIPFVLGHALYMKAIHGGKAKNDKIDAHKIAVLLRGGMLPMAYVYPRAMRATRDLLRRRCHFMRKRAELITHIQNTASQCLLPRFGKKIAYHGNRTDLAEHFTDPEVRKSIETNLALLDHYDRLLTDLELHLTRSAKVHDVNAFYRLRSVPGIGKILALVLLYEIHDIHRFPRVQDFASYCRLVKCAKESDGKHYGYSGAKIGNAHLKWAFSEAAVLCLRGNPAAQRYVARLAHKHGKAKALTILAHKLARAVYFMLSRGHAFDATKFFSGSAASGQAVGTPAGAPDTTSDAASPVRRAVGLDDAARPGAPRPVREGGRYLTTPEIAPSTEELSCTAPLE

SEQ ID NO: 424145 - protein, 314 aa, unidentified
MSEAITYRIGFDVAKGVFQVHGVANEPGERVALVRRLRRRQVAAFFATLPRSLIGMEACGSAHYWARLAQQHGHAVRLMPPAYVKAYVKRNKTDAHDAAAICEAVARPHMRFVPVKGEADQALLMLHRMRASFVEKRTAAANQLRAAVLVELARQWRSVAGAVRKMDAEIAAGVKQSARAQRLLAVPAIGPVGASALDALLPNPQVFRSGRDFAAWTGLTPREDSSGQSLRRGPISKQGDGYLRRILVLGATAHLARVRRGQVQGASAWVLKMAAHPKRKLAAVALANKTARIAWAMLARNENYRAPAAALQAA

SEQ ID NO: 424146 - protein, 345 aa, unidentified
MPIVGGLDIHRKQITFDYLDTATGEVRRGQIAPADRAHLRAWLARFAGRDDVACALEGCTGWRYVAEELAAAGVTAHVAEPADTAFARGRKRHAKTDKTDARHLRVLLEQGRLPECWIPPAQILECRALLEAYHDLRREHTAWIERIHAVFFHQGAPRLGEGALRTDRGLAALRQAAACHLSPAGQLQVATALDMLAAVEARMDTLRQQLLHAARHLAGARALQARLYGVGPLAGLAMTCWPGGAGRFSSSRKAVRFAGLDVTVYSSDGRRSPGHLSRQGPEILRWVAYEAGKTHGRASAPGHDYYAQVKDRQDGKIAALSQARKLIRQACRILAELGDDALTAA

SEQ ID NO: 424147 - protein, 324 aa, unidentified
MNIALQVKDNANFDKLYIAFELSNKKWKVGFSNGQKRRIKTVQAKDWEQLTAEIKVAKRKLFCKNDCEIVSCYEAGRDGFWIHRALEQEGIHNLVIDSGSIEVNRKKRRAKSDTIDVVALLRFLMRYDTGEHEALRVAKVPSVEEEDIRRLSRERERLISERTGHNNRIKSLLVLHGIAIDKITDIPALLPTAKACVTGYDLPMELRAEIEREYKRYQLIAEQIKELEKLRLERLKTPQNKTYESVNRLMQLRGVGYQTGWVVIVEFFGWRTFKNRKQVASCAGLTPTPYDSGDSCKEQGISKASARLAINVYGRLWSSFPGYG

SEQ ID NO: 424148 - protein, 390 aa, unidentified
MPKPNDLSRSPVALEQDSTLIAVIEMSQSSWLVSAMVPGLSREPLKKLDAVAGLLLLQLQRWREEAQAAGHTITRLAVAFEAGRDGFWLARWLRAQGIEAHVIHASSVAVSRTHRRAKTDRLDTKMLKRAFLGWLRGEAGHCNMAAIPSQAEEDARRPSREREALVGERTRIRNRMKALLACLGIRGFNPVLRKAPEQLEALRTPEGTPLPPNAHAKLQRDMARLQLVKQQIREIEAQRLAQLAQAKTDRRCAMIRRLASVHGLGLETADLLTSEVFLRNLRDRHALARYAGLTGSPDESGKRRREQGLARAGNARVRTAMIQLAWRFLSYQKDSALAQWYCQRTEALGGKPRTARKVMIVALARKLLITLWRMLTTGEIPQGLVLKPVS

SEQ ID NO: 424149 - protein, 411 aa, unidentified
MERIVERPGALDVHQASVMACVRVWDERELEEHVAEFATTVHGLLALRDWLEALGVTQVAMEATGVYWRPVWAVLEDRFELMLVNARHVKQVPGRKTDVKDSQWLCQLLEAGLLRASLVPPKPIRTLRNLTRYRKTQINDRTREVARLHKTLEDTGIKLAIVATNIMGKSGRDMLDALVAGTKDPEVLADLARGRLRAKIPALREALVGRFEPEHALIIGQILAHIDFLDEAISRLGAEIEQCLEPYTRERDLLITIPGVKQRVAEVLIAEIGVDMTAFPTPKHLASWAGVCPGNDQSAGKRRSGKTRKGSKWLRATLTEAAITAARTKNSYLAAQYQRLRGRRGHAKALTAVGHSILTAVWHMLQTGELYRDPGGDYYVRQDTDRITRRLVRKLEALGHNVSLQAPEAPA

SEQ ID NO: 424150 - protein, 397 aa, unidentified
MYIVGIDIAKRKHEAAVIDGDGAVIIKPFSFTNNCSGYNRLLAMLTKAKLPLDEVSFAMEATGHYWLALFTRLQKEGFRVQVINPVQTNSIRSFYIRQAKTDPRDALLIAEVIRFGHFSESTLHPENIYELRELCRGRHAIVSMQADVKRKVVALLDQVFPEYETAFTNMFGDTSMAILQTCPTPKELSEMPLEELCHLIEVSSHKRFRMAKAQELQALARNSFGFAMAGDVFSTMIRLYAKHLVFLKQQVQEMDRKIAEIMDTLDTLITTITGIGPTLGAYILSEIGDISRFSSAAKLAAYAGIDPTMRQSGEYNGVRNRMSKRGSPYLRHAIWLAASSAVLHDPALKLYFQKKRDEGKPYMASVGHACRKMVSIIYAVMRDNKAYTPHIPNEIST

SEQ ID NO: 424151 - protein, 391 aa, unidentified
MIFVGIDVAKDKHDCYITNSDGVVLFNSFTIINNLDGFNDLYQKIASVMEDVSKVKVGLEATGHYSYNLLGYLLDKGLPTFVINPLHTNLYRKSLSLRQTKTDKVDARTIASMLMSDVNLKSYSNTSYHNEELKSLTRYRFDKVKERAKLKTSISRLVCILFPELEKLVPKLHMNSVYSLLYEFPGAKQVANAHLTRLSNLIEKASKGHYTKDTAIVFRETARTSIGTNMPAKSLELKHTIKLIRELDAEIEEIENEIKIIMDEINSPILSIPGINYRMGAMIIAEIGDFKQFDSPDKVLAFAGMSPSTYQSGQLDNSHPKMEKRGSKYLRYALYNATIYVCLWDPSFKAYLSKKRAEGKHYYVALSHATKKLVRVIYQLEASGQQYIKAI

SEQ ID NO: 424152 - protein, 412 aa, unidentified
METIVERPAGLDVHKAQVTACVRIPAADGGRDEHVAEFQTTVAGLLTLRDWLTAHGVAQVTMEATGVYWKPVWAILEDEFECVLVNARHVKQVPGRKTDVSDAAWICRLAEAGLLRASFVPPKPIRELRNLTRYRKTQIQERAREANRLHKALEDTGIKLDCVATDILGVSGRRMLAALIEGTTDPDILAELAKGRMRAKIGALREALEGRFDHIHSVWIGAILAHVDFLDAQIASLTETIGEQIAPFEAAVELLCTIPGVQRRAAEVIVAEIGTDMSVFPSAGHLASWAGQCPGNDQSAGKRRSGRTRKGSKWLDWTLEEVALAAVRSNDAYLAAQYQRLRPRRGHKKALGAVKHSIIVAVWHMLSTGELYRELGGEYFRKRDPERITKRLVTQLEALGHNVTLEKELAAA

SEQ ID NO: 424153 - protein, 416 aa, unidentified
MASNQNTPVLSIVHPICCGLDVHKRTISACVIETRCDGSVQHHLGEFGTFTDELVRLRQWLLEMDCPIVAMESTGVYWRPVHNVLEGYAEVVLVNARHVKNVPGRKTDIEDSRWLAGLLRHGLVRGSFIPPKDVRQWREMVRLRRGYVEALSDFKRRTHKLFECANIKIDSVVSDLFGLTGGNLMQLLVSKETITLDEVKGCARGHLIRKVEELYRSIQGFFEDHHRFLLASLLETVKSLEGQISSLETRLKSLTKDHDTLVERLDEVPGIDQLAARAILAEIGSNLEAFPTVEQLCSWAGVCPGNNESAGKRHSGKSPVQRHPLKTMLVDVAWAAVKKKGSYYRAKYYRLKARRTAKKAIVAIAHRILKAIYAIIKHGARYRELGEQYLDRQTQARKLAKLKIEARQLGYKLVPA

SEQ ID NO: 424154 - protein, 350 aa, unidentified
MTTMPLRVTGGVDTHLDVHVAAALDDRGALLGVESFETTPAGYRRLLGWLGAFGEVELVGVEGTGSYGAGLTRHLHSEGVCVVEVDRPNRQRRRRRGKSDPQDAITAARAAQSGDALGEAKTRDGNVEAMRVLRVARSSARKARTQALNQMRSIIATGPEPIRAELRDLNVYRLLERAARYRPGQRHDVTSLTKRTLRMLARRAQALETEVAELDAILEPLVADTAPALVARPGIGAECASALLVAAGDNPQRLRDEATFAHLCGVAPIDASSGKHQRHRLNRGGDRQANAALWRIVITRMVYDPRTRDYIERRTKEGLTKKEAFRCLKRYIAREVYNHLPHPQLSLDGP

SEQ ID NO: 424155 - protein, 371 aa, unidentified
MSQPITNPVWVGMDVHQDSITAAILFGNDAQPQVERLPGDLNAVRRMFRRLSEQGTPRSCYEASGAGFVLQRCLEHDGFHCEVIAPSLVPKKPGDRRKTDRLDAIHLARHYRAGNLVPVTVPSQQQEEIRQLVRSRLAVQSHVVRLKHRIVRVLATHGHRFTEGKSNWTQKHRTWLRKLYRELEGPLATVLVHHLEHLEYLEGQKNALEMEIDRYARSEPFRQKVEALCCFRGVKTLTAMTILTELGDIKRFSKPTGLMAYAGLVPSERSSGNVQRRGRITKSGSQELRRILVEASWHYRKRAEGDLIIKRRRMGQDPQVVAVAIKAQHRLKKTYWKIATRKHPCTAVTAVARELCGFIWSALWAIESQED

SEQ ID NO: 424156 - protein, 470 aa, unidentified
MSKPPQGDASVPRRRSTKTPGKSRRKKAAALPSLSITYPDAAGIDIGASSHFVAVPVGRDAEPVREFAAFTDDLRRLVQWLRDCRITAVAMESTGVYWIPLYELLEASGFEVHLVNAYHVKGVPGRKSDVLDCQWLQQLMSFGLLRGAFRPADEICALRSIWRHRDMLLSYQSRHVQHLQKALTQMNIQLHHVISDLMGVTGQAIVRAIVAGERDTQVLAGLRDRRIRADEAQIARSLEGTWRAEHLFSLKQALALYDAYASQIADCDVELERLLRALKAHEAPDELEGGPRGGPSKNAPRFNARKALFEASGVDLTRIPGIEASSALKILSEIGTDLSRFPSVKHFTSWLGLCPGTKISGGKTLSGETKRCANRAAQALRMGAQSLRQSRSALGAYHRRLCARMDRAKAITATAHKLARLVYFMLTRGQAYVDSGQQNYEERYQQRMVQSLTQRARALGFQLVPSSQSA

SEQ ID NO: 424157 - protein, 327 aa, unidentified
MMFIGIDISKEKIDLSWLRDQLTNKIKTKVFKNKRQDFVTIEKWLLNTTKSAASELVITLEPTGVYHEALMYFLHEQGFNIILANPSKAKKYADALNIIHKTDKSDATMLAHYGCAKHAVVNYWQPEALAIRELKALIRRLDALESNRQREANRLEASEFSNVSARVCQSIKVTIAFLDDEIKQLKSDIDNHIDNEPDLKRNRKLLESIPGIGPVLSRELTYLFAAKKFNKAKEAAAYCGLIPRHNESGKLKGRTSISKLGPARIRCKLYMAAIVAGQWNKTIKRHKLTLINNGKTPMQAVCANMRKLIHICFGVIKNQEAFKLQES

SEQ ID NO: 424158 - protein, 339 aa, unidentified
MEEVSIIGLDLAKRIFQAHGGDKSGKCLFSRKLSRAQLLGFFKSQKPCIVAMEACSSAHYWGREIAALGHEVRLIPAHYVKPYVKRGKNDAADAEAICEAASRPTMRFVEIRSAEQHSQAMVFRSRDLLVRQRTQAINAVRGHCAEFGLSAPTGHKGYEALKGLIGEATDLPEVAREVLELLMASIEQLEEQIGALEKKMTQLAKRDPVNKALMSIPGIGPITALAVKALGPDARGFASGRDYAAWMGLVPSQHSSGGKERLGKITKKGNRTLRRLFVICAGTVITSIARSRTVPDPWLAKLLARRPRMVAVTALANKIARIVWALQVKGGVYQSPMTT

SEQ ID NO: 424159 - protein, 358 aa, unidentified
MTRCIPTDAATITLGVDTHKDAHVAVALDGLGRRQGTLSIPTTPEGYKKLVDWASGFGPLEHAGVEGTGSFGAGLARFLKSRGIKVFEVIRPKRTQQYRSGKSDPIDAESAARSVLADTAIGEPKGADGEVEMIRTLRITRRSAVKARAQAANQIQALLLTAPEGLKSELCGLSTARVVEKAWRLRPGATPSDVEEATKFALRSMARRYQHLSEEIGKLDEQLNRVVSQVAPELVAVEGIGTDTAASLLIAVGDNPERLKSEAAFAHLCGAAPIPASSGKTVRHRLNRHGNRDANRALYVIAVCRMSRDERTRTYVAKRTAEGKTKKEIIRCLKRYIAREIYRILASPSSHSTSISGP

SEQ ID NO: 424160 - protein, 315 aa, unidentified
MTLHQNIFGVDVAKDWIDVCDLSSGEVRRIETTPRALKALAANLSARPGTLVVFEASGGYERPLMEALEARGVPYARVNPRQAREFARACGKLAKTDKVDARILAQMGRALDLRPAAPADPARRRLAELVARREDILAAITAETNRLAQAREAFVRRDISSLIAILKRRKLGLDAEIEAHKQAHEDLAARDRRLRTAPGVGPTVASVLLACMPELGGTDRRAIACLGGLAPQACDSGRRSGKRQVWGGRPEVRRALYLAAFIASRCDPELRAMRQRLIAAGKPFKVALIAIARKLLTILNAMIRDGHDYERRLPT

SEQ ID NO: 424161 - protein, 322 aa, unidentified
MNEATPYIGVDVSKSTLDYFIPGERKTRRCENTPGGAASLARAALKRGFGVCCEPTGGYERKLLEACWGGGVPVATADAWRVRHFAKGRGVLEKTDAIDARVIAAFAAQNEMRPIPRPTCAQRELRELTRAIETLDRQIQISQGQLEHDGACGLVRKTVKAVLRCLQAERARLDGRRLAVVRGDDRMHSLFVRYQRVKGIGPATALAMIAEMPELGTVSDKGAAKLIGPAPIPNESGKKTGARAIQRGRFGARSALYMAALVATRHNPILKGFYRRLVDGNGKPRKVAIVAVMRKLVCLLNRIASDESFEPSPAASKPRPVK

SEQ ID NO: 424162 - protein, 410 aa, unidentified
MEVLHPVCAGLDIHKESVVACVRHMAQGKVTTVVKTFKTTTEALLALSEWLAQHSATHIAMEATGVYWKPVWHILSDGEFQLVLANAAHVKNVPGRKTDVNDAMWLADLMAHGLIRASFVPDEPTQQMRDLLRTRKQLVRERSSHTQRIQKTLEDANIKLDTVVTDILGLSGRRILEALIAGQTTPQALATLAHRNIKASTADLEASLRGRVTAHHRFLLKLHLDQIAAIDVAIASIDKEVEGNIEPFRQAIEQLSAIPGFSQLAARVVVSEIGIDMSRFETAGNLVSWAGLCPRNDETAGKRRSTKMKKGAPWLKTVLIQCAWAAARTKGSYFQAQYHRLRSRSGAKKAIGAVAAALLTTAYHMLKNGTLYQDLGPNHFDQQAKQRHVLRLLNRLENLGFEVQIKPKAA

SEQ ID NO: 424163 - protein, 342 aa, unidentified
MRIIGCDLHASQQSVAVLDQETGETFETTLKHEGDTVRDFYAALPRPALVGIEATGSMGWFLTLMEDLGITCRVGHPARIRATEPRRQKHDRRDAVLLRDLLADDRFPAIWQPSADVRDLRSLLLHRDEWVRMRTRVRNALQGVALAHGIRRRAGLWSRDGQATLNALPLPPHASDRRAALVALHGQLMQQIHALDEQVRAVAQERPHARRLMTHPGVGPVTALATEVFLGDPNRFRDGKAVASYIGMIPGEYSSGPRQRLGRLTKQGNRFLRFLWCEAGLQAARREPSCGRFYRRKVIQKGVGKARVAIGRKLGIRLWILLRDHIDYVEFCRRAPSRSTAA

SEQ ID NO: 424164 - protein, 342 aa, unidentified
MLHAGMDLHKKFSVVSVIDDDCELLIRGKRLENSETEIREFLSGFDSEVRVVLEAGPNWNWMCDLLDEMGLENKLAHPYRTKAIGSAKIKTDTLDSLVLARLLRSDFIAEAYKADHATRQLRELVRMRAYLVRSRAGYKNKVHAVLTRMNIPNPFSDLFSKKGMCYLKGLELAPAYRDSVDAYLGMIEALGVQIDRADGLVHEKFCERADAQLLATVPGIGEFLALMIAGEIGDISRFSSAKGLASYSGLVPSTSQSGNTTHHGKMTRQGSVWLRYALVEATIHAVRKPGPLRTFYARLSAKKGNKVARAAAARKLCTYVYHMLNEQKTYDEVMAFGRGDLG

SEQ ID NO: 424165 - protein, 338 aa, unidentified
MALYGGIDLHSRISWLVILNDALEMVRQVKLANDLTDFVRVLDPYRGELAGLAVESTPNWYWLVDGLEEAGYRMHLANTCAVQQYTGLKYTDDRHDARWLAHLLALGILPEGYIYPAHERPLRDLLRRRGFLVKKRTSMLLSLQGAFACHTSHRVNSDTVKKWTAVEIEELLDNATVARGLTCLLEPIKAMDTQIKMLEKEVLAQAKLRDEFALLRTVWGIGPILALTVMLEVGDIKRFEKVGNFASYCRLVKTERLSVGKRKGSGNAKNGNPYLSWAFSEAAHFAIRYHDAAQRFYQRKLAKTNRIVAVRALAHKLARASYYVMRDKVEFDPDRLFA

SEQ ID NO: 424166 - protein, 396 aa, unidentified
MKSNTQNAKIEAITEKTLVLGIDVGSETHYARAFDYRGIEYSKKPFKFSNTEAGFVTFKEWILDIKERHEKDKVVPGMEPTGHYWFNLGKFLQDNEMKPVLVNPHHVKKSKELDDNNPTKNDRKDPKVIAGLVREGRYMIPYLPDGVYADLRTASNIRFQLQAELTRIQNRISRWFNIYFPEYKTVYGKPDAKSGILILKAAPLPEDILTLGINGVNQIWRDAKLRAVGKARAKTLIEAAEHSVGSKEGAVAARMEIRMLLEDYESRNIRLQEVMTLIEGLIKQIPMAEKLLEIKGVGIRTVSGFLAEVGDISRFNNPKELQKLAGLALVENSSGKHKGETTISRRGRKRLRYLLFEVAMSLVAKNPEFRELHNYYTTRRLNPLKKCSHLWRLQPS

SEQ ID NO: 424167 - protein, 357 aa, unidentified
MRVVFGIDVSKVSSEVAILVNGEKVHNYTMSNDAIGFSRLLGDLRTVHKPEIIFEATGVYSRRLQAFLDEHGYAYTRLNPLEAKKQLDSLRVRKTDQIDAEKLAQSQFVLNRKPTYVQEEVYQELRDLSRFYQNLTEDIVRAKNRLHKVLQVTFPELETILSTPTGEQYGNLVVAFPCKDFVLDLSKDELSESIRQSTSKRISDKRVAYLAEKLIALANQSYCAVKKTSPMLEEVRYYAQELLRLSERRKAVLDQMVELAQPLPEYDILLSIPGIAETTATSIIGELGDIRRFQSANQINAFIGIDLRHYESGNFLAKEHITKRGNPYARKILFKCIHNIASASHTNPCHIADFYEK

SEQ ID NO: 424168 - protein, 340 aa, unidentified
MEISPSFVGIDVSKHTLDVALALDATPRRVTTARFANTTQAFVPLLTWLQAPSTAALHVCLEATGTYHDAVLAFLLEHGLCVSLLPSSRLREFRLSEGQRNKTDKQDAILLARYGQQKQPAAFVPVPSDLQWLRTQLARLRDLEKMHRQESNRLENSRMPETMCEQIRMHVQLLSQWEKEGCKQIRAWIKQQPPIQQAVELLRSIDGIGERTSWGLLSILGPDASRFSSAHQLVVYLGLDVARQDSGKRIKAGHLSKQGPSHLRQCLGMGAISATRWDPDIARFAAELSGRGKKPLQVRVAIMRKLVHLAYGVLKHQKPYDPRLAWPTHEHRQQEELPAA

SEQ ID NO: 424169 - protein, 338 aa, unidentified
MEVSIKPRWFGIDVSKDTFDVGMFPGEARKAPHIKLPRSRQGCQECLHWVDRQVPQGEESALVMEATGGYGKEMANWLLSLRAGVRVAIAQPWRVRQYAKGLGMVNKTDAQDAIMLARYGDTYNPRSYQPMSPAYEQLRALSRERAAMVKEAIRLGNRNEIPSNSKVAQTIREQTLAQVKKAVADLDQAIKAQIAKDPGLKKDFRRLQTVPGVGPVVAGTLMGECGDLRDFVHHKALQAFAGVAPGLVESGTSLHATAHMTKHGSGRLRQVLYMGAMAAARGQSPVAQSYDHLLKEGKPAMVALGALMRKILVTCRAVLLEEQDYDPKYVRKAPSEPI

SEQ ID NO: 424170 - protein, 269 aa, unidentified
MEWTFTKKSWSVHLRTDISDHKTLTIPSSCDVLFEYVQTHFKGHEVSLTYEAGCCGFSASRYFLNLGWNVLVVNPADVPRKDKQTYQKTDKIDCKNLAKQLHSGQLKGIFIPDEAQDLLKSLLRQRAETAKQLRAIKSNIKALLLYHGMEVPKEFDSPNWSKAFIQWLMNIKWTHQTGKICLDSKLRMFNLIHEEYLQLANELRAYCRKHHKNDYYLLKSIPGIGGYLASAIIAEIGDLRRFSSEAQFASYVGIVPTIRNSGGPKKSKE

SEQ ID NO: 424171 - protein, 313 aa, unidentified
MHEDTFVGIDIAQERLDVHVLPQGDAFTYQNDANSIEKLVRRLRKVAPKVIVMEASGGFEIPLAAELGAANLPLAIVNPRQVRDFARGIGKLAKTDAIDAYVLANFAQTNKIEPRPLPSEEEQLIKDLVRRRQQLISLRATEKNRLHRVRSKPVRESILVVIQTLDEQIRNIDHDLDNILRSSPLWREKEDLLKSFSGVGPVTARTLLALLPELGKANRQQIAALVGLAPLNRDSGKMRGKRMIAGGRTDVRNALYMAAVSASKHNSTIKAFYERLRQAGKPAKVALTACMRRMLVILNAMIKAKRPFEVLFA

SEQ ID NO: 424172 - protein, 350 aa, unidentified
MNRYIGIDAHDKSCTAVVLDERGSEMKRAVLETNGELIRDFIEQVPRARHVAFEEGNLSQWLYELIEPVAQVVVVFVPPRRSGPKDDYRDARSAAEGLRTHALERTVFKPTRELAELRCTVRAYRALGKDLTRAKIRLNSVFRSRAVFVGDEVYGKKGRLEALEQLPVAERKLATAFGEELDALQVLFRERTKALKSVRNEDVARLETAPGIGPVRATTIVAVVGTPDRFRTTRQFWSYCGLGIVSHSSSDWTRDSNGKWERTTRQSARGLNTNRNASLKEVFKGAALTLIGSDPDHPLVQGYRRRVAQGMESNLARLTMARQLAAIVLAMWKHKEDYDPTRHSSDKTNA

SEQ ID NO: 424173 - protein, 356 aa, unidentified
MTSTTKYIGMDVHKESISMAVRNTAGKIVMECVIETKASMILQFVDGLRGDVHVTFEEGTWAAWLYDLLRPHVTNLVVCDPRRNALLQEGNQNDRVDARKLAELLQNNQLRSVYHGDHGLRTLKELVRSYLTITQDLSRVMTRVKAIYRSWAIPCSGKQVYGTRHRGEWLGKIVEAGARQRAEFYYRQLDGLRLLRQEVRRDLLAESKKHKAWKRLCEIPSIGPIRAAVLLGILQTAHRFRTKRQLWTYSGLGIEVHSSADHQVVKGQLQRKKKHVEVRGLNRNYNHDLKNLFKGAAVAAATKPGPFEEFYAALLAKGMRPEMARLTLARKIATIVLIVWKRGVCFDANHLKPQTV

SEQ ID NO: 424174 - protein, 339 aa, unidentified
MKKFLFIGIDFSKSKFDVSLIEDIEQRGYAQATFENAEEGYSELLKWVGKQSTIKRADWRFCGEHTGLYSRGLSHFLANKKLFIWLENPLQIKRCSGIKRAKNDRLDSLVTAQYAYRYIDRAIAYQPAEKEIQALQLLVSYRSRLVKNKVSIEVAANEMRQVIKRDTTARFVYQSSMRDIKRIKKQINGIEQKMHDTIMNSSLKENYLLITSIKGVGMQTATMLIIHTNNFAGFENARQIASYCGCAPFPNQSGGVDKGNHISRLANKELKVLLSQCAVSAIQHNKEIATYAKRKLAEGKPKRVVINNVRNKLIQRIFAVVRYKIPYREDYLNPFEQCA

SEQ ID NO: 424175 - protein, 343 aa, unidentified
MKQLFIGLDVHKKSWAVTIQERQLVLKRFSMEADADLLIAYVSKHFPTYEVECCYEACCLGYGIYHALTKAGWLVLVVNPADIPKGNKQSTTKTDKVDSAYLAKQLASGHLRGIYVPSHKQEQFRSLFRRRNDLVKSLRRIKCHIKSMLLYYGITVPLQYDNVNWSKNFLQWLQKQHWSYAPANEALKSRLSEYQFLKKEYLHICNELRAYARKQYKKEYYLLRSIPGVGPFTAIGLLAEVGDIKRFHGIDKLSSYIGLVPSVRSSGEKSYTCGITYRSKGLLRSYLIEAAWIAAKKDPALMQYYQERKGSDHKKLIIKLAAKTLSRIYHVIKTGEPYQLATL

SEQ ID NO: 424176 - protein, 343 aa, unidentified
MDHFAGLDVSVKETSLCIVDDAGRIVREVRVASEPEALLAVLTNPACHFKRIGLEAGPLSQWLFNALAEAGLPVICVETRHMRAALKAQINKTDRNDARGIAQMMRAGLYRPVHVKTLRSQKLRMLLTHRKLLQSKAIAIENDLRATLRNFGLKVGVVGTVKFEARIKELVDNTPDLVVLVEPLLIVRRVLREQIGILHRRLLAIVRNDAVCRRLMTVPGVGPVVALTYRATVDVPSRFRNSKAVGAVFGLTPSKHQSGESNRTGGISRCGDEMMRMMLYEAAHIMLVRSAKWSWLKAWAMKIARHRGLKKAIVALARRLAVIMHRIWVDGTEFRWTREVAAA

SEQ ID NO: 424177 - protein, 404 aa, unidentified
MEQVYVGIDWADDHHNVYVTNDTATALDSFSIPHSYEGMEKLMKRLNKCSSSREEILVAIESHQGLLVYALLEAEYSVYPINPKAMDRYRDRYRMSSSKSDPKDAMVLANILRTDLHLYKPLPRETVADARLRQLTRSHKSLGQQKTKLLNQLTTQLKSYYPVALRLFSRLDHKITMAFLEQFPTPEKATAASLKDLRRFFSEQNYSHQWKVNSIYESLQQLSLRAPIELEGIHQTIVLSLIPILRSLVVEIENLASKIGEEFEHNQAHEVFSSLPTGELTAARINGELGSDGARYPSREYLQTAAGTAPVTRRSGKTVVVFFRWQCNKHLRAALQNLARDSVKRCPWARDYFAGQMRLGHKPSRAYRALANRWAAIIWKMLQTGQPFDQSRLDKHLAKAVATN

SEQ ID NO: 424178 - protein, 359 aa, unidentified
MSIVAHTYPFIIGADTHSRNHALAILAPTGEVIDEQIFPTTKTGLARAVDWACRRTGGDLDALWVIEGIGTYGAQLAQAVVDAGYSPAEAPRMNARAHRGTGKSDPLDARRIAAAALPLNTTQLRRPREQDGTRAAIRVLIGARDHMSTERTATINALIALVRTIDLGIDARNGLAASRITIIAAWRTRTEPLAMTTARAEAVRLARRIDALDKELHTNRNTLTTLISDTPGAGLLELPGIGPVTAAVVLAAWSHPGRIRSEAAFANLAGVSPIPASSGNTVRHRLNYGGDRRLNRALHMAIVTRIRMDPTTRAYVERRTAQGRTSKEIRRCLKRYLARQLYRHLATAYKMPNPALDNT

SEQ ID NO: 424179 - protein, 492 aa, unidentified
MDTPLPMEIHCVVGIDVAKASHVVCALDAPSGALRLKSTAIAADATGHAQLLEWLNTWSAAWSTPAAVLIGLESTGSLWEPLYDALSHAGYTVVVLNPRQTAAWATSLGLRAKTDGIDAHTLARGLLAGWARASAIPDETVQALRTLTRTRRDLVESQSAARQRLHDELVLVFPELVGHLPDHADLGADAVLRLLTTYSSAQAVAQTPLDDLRQTLSAVSAQAGPHRWGQAEAEALQALARASTASTRAVTARALVVRTLAQHLLDLHARIAELDTALAEAVRADPPSPRLQSEVPGLGPTWTATIRAELGDVTRFSRVDQVVAYAGLEPRTHESGRFVGQRHLSKRGPGALRHALFMATLVAARYRPEWRTRYQRLLDRGRAKKEALTILSRSLLKVIYHLLRTGVSYDPACLNSAPLAAPPAPQRCQPQMNSFSAPVQTPATRTPKARSHLGKRERPAFGMGAITVRNGEPHEIEWDGVSRGLARSFAPD

SEQ ID NO: 424180 - protein, 347 aa, unidentified
MKYYTTTTEFNCGIDLHARQMYVCIMNKEGKKLVHKNIKNNDFEFFLKLAAPYLHDLTVVCECCFNWYWLADACLDAGIEFVLAHALYLKHIHGGKNKNDRIDSEKLAHLLRTNLIPPSYVYPKERRPMRALLRQRMSYVWERSELLTHLSMNQTAEGLVPVAKGGHNRDVWEERILAQYTDPLLKLAVECDMELIRSYDRRIELLDQKLAAEARREHGRDFPLLMTVPGIGRVLALTLLFEIDTIQRFPTVKDFVSYCRLVKGSVASAGKVKGLCGGKMGNPYLRWAFGEAAVIAKRNHPLLTPYAEKLVSQHGKFKGNAILANKFGRAVYFMLQKGTAFDAELVV

SEQ ID NO: 424181 - protein, 349 aa, unidentified
MRSYIMRKRDASIIYVGVDIHITSWHITIRSRDEILSKASIGGDWEALRKVVSRWRPEQVVILYEAGFSGFCLYDEVIKWGGQCIVFPPSRIPVESGNRIKTDRRDSAKLAYLASTGHVPRVWVPSLSQRYDREVIRERRRLIRQTRQVQCQIKALLHCYGLKVSCRPGRWSQVFESRLWQLQFNNYYMQESFARLLERYHFLRDQIAAQTKLIKVLSEREDYRDKVTWLTSLPGVGILTAMELLVELGDISRFNKADQVAAYIGLTPSEYSSGTAVRRGHISRCGKAAVRSRLVEASWIAIRFDQQLAEVYRRIRVRQGGKRAIVAVARRLLLRVRRLWLDGRCYERP

SEQ ID NO: 424182 - protein, 343 aa, unidentified
MAEYAALDVSLQSTSVHIVDQQGRCIWRGKCPTDIAALSSTIRKHAPEVERVGLETGMLATWLYHGLAEAGLPVVCMDARQAKAALSCRVNKTDANDAEGLAQLLRTGFFRQVRVKARGTMLVRTLLGARRQLVRTELDLANQIRGLLKIFGLLLPRGGGRLFEMAVRERLADHQQLAAVIMPLLQAWRAVREQVLALDRIAYAVAKRDARCRLLLTAPGVGTITALAYVAAVEQPEEFKNGRAVSAWVGLTPTRYQSGQIDYSGRISRQGDVHLRTYLYEAANTVLTRSRADSALKRWGLGLKARLGHKRAVVAVARKLAVVLHAMWAKEETFKTDAVAAAA

SEQ ID NO: 424183 - protein, 354 aa, unidentified
MKGMAVTIVEDKPVITGGVDTHADLHVAAALDPIGGLLGVRQFPATAAGYADLLEWLGGFGDVGLVGVEGTGSYGAGLARHLAAAGVAVVEVDRADRQDRHRQGKSDPLDAVSAARAAQSGRASGVPKGRDGAVEAIRALMVAKRSARHERTQAINQARALIVTGPDELRTRFAGHSPAALVEAIAALRPRPGDVPGYATRVALRELGRRVQFLDAQLERLDELIGPLVTARAPGLLSLFGVGPDTAALLLVAAGDHPERLRSESSWAHLCGAAPIPASSGKTSRHRLNRGGNREANHALWRIVITRMGSRPGHPATRAYVERRSKEGLSKKEIIRCLKRYVAREVYRQLRGSA

SEQ ID NO: 424184 - protein, 454 aa, unidentified
MAQGSGLTRGDRNRNGRIAALRAVVRRDRAVLAVDLGEDKQVAALVDHEGRVLARKTVKAKAYQLGELLAWAAAKAAVAGFAGLTVACEPTGHRWKALMGLADVAGHGFVCVQSLAVARAREGDDYTRDKTDHRDAYLIGKLVIRLDCYLPERADEAWARLRHLGARRFALVADVVSCMQQVSDLLACAWPAALGVAARPLESTTWLAAMGAVADRCAGNPARLRTMGYEKFVAAVRRELPRWGAKNIWHKIARGLWEALADAGGVAAQRRGALERVHLLMGDWRSLLARLADTEKRMTGVLDELGLTELVTSIDGLSATGAAVILAETGDLSRFSSGRAVVKHAGLNPAEHTSATLAGKTRISHRGRPGLRTAAWRAVWGGMRHNRVLHARYAHLTGRPEGNRLSDGQARAACAATLLRWLYAVVTQRQMWDARIAAGVIPARPGTVTTPAAA

SEQ ID NO: 424185 - protein, 482 aa, unidentified
MKKRTIYTNQSQELLRLFEQVGNSAKVMCVPIDYAKKDHVVMFCNGYGDIVRKPFSVKNSPEGLKYLIDQVTRSCRHRRIRKEHVFFGGEDANSYAENFANTLRSKGWLVAHVNAHDAKKQRQNLQASTDRLDLMGIATMLLNRRANCSPAQTGIYRNLRTLVRHRKKLVVMKTEVRNRVHAVVDRLFPGFLSEKKTSITPFSNSSLYLMENSFSAQQIRRRKHSTLVNILKRYGTAAPEGAAAKLRTYAAQVLTTQNQYAATLQLSLAHHIKLYRCLLDNTEQLEKEIALPLAQSQGAFLTSIKGIGIVLAAGVTAEIGSPFEQKPLNNLTSYSGIIPRVKQSGGPNAQAHTGRVSKRSNHLLKDSVVQSAFHIGHFGPKELSLDYKRRKAAGQHADFGMGRRFLRMAMSLMKTSQIYLPPPLRNDQLRAQERAGYYLAVWPQLRDKWNKVDALKVAFAKHNPLGQWRHIVQELYGIKLKL

SEQ ID NO: 424186 - protein, 350 aa, unidentified
MQGNGRWIGLDLSKETYEMCYFDQKGKVGRSGGETTKGGRAKLYAKLKAEDIVAMEVNSLAFVMEKEMRQIGCTVVILDASQLSVIYASTKKTDKEDALKLARLVKIYEKEDLPTVDVPTDKEYYRRKLTKECKTLKDDRTQEINRLHALFLQCGITTMKRSNLQTDANRQKVLPQLFGYEVGQAKRVCERLTLLDAQIKELEQLIKKECKEDKDIQRLQTIPGVGDKTALAFAAYVGDGKRFNNGDEVANYLGLVPRVDCSGSINRYGHITKKGNRIVRALLYQAAWSIVRSKHGGALKAKYFYMTEHGKGKKISITAIARKMAKLMYLIMKNKGEEYKELPAPASRVG

SEQ ID NO: 424187 - protein, 453 aa, unidentified
MARKRKTQSKANQAVLPVMRADAAGIDIGATEIFVAVPPDRATENVRSFPTFTQDLYALADWLKQCGVKTVAMESTGVYWIPLFQILEDRGFEVYLVNARHVKNVPGRRTDVSDCQWLQFLHSVGLLRASYRPEQEVCTVRSLLRHRESLVQMAATHINHMQKALDQMNLQLHHVISDITGQTGLAILDAILGGERNPQVLAKLRNQRIRASEEVIAKSLVGDYRPEHLFTLQQSLLAYRSYQKLIADCDREIGRAMEQFNPPRPSQALAHDTGKPEPETSSADGVLHAELKRAFGIDLTKVPGIHTGIAQTLFGEIGPDFTKFRSASAFASWMGLCPDNDISGGKVLWVGTRKVNCRAAKALRMAAQSLHHSKTALGDFYRRMRAKLGAPKAITAAAHKLARIIFHLVTTRQEFDASHFAADQLRFQKRQEAKLRAKARALGFQLIPLEQAA

SEQ ID NO: 424188 - protein, 347 aa, unidentified
MLHAGLDLSRKKLDVCLLSDEGEHLDQLALPPDVDSLRRLARRIEEVHRQPVCAVIESMTGARIVHDTLEQQGWSVEIADAQKVKGLAPLACKTDKIDSQVLAVLSHRDLVPAIWLPDPSVREERELARFRLHLVKHKSALKCRIHSTLINFGKPCPVTDLFGVEGRRLLKRLQVPEPWRGNITASIELIDDLERQIVEINRRLKENHAEHPYVPLLLTVPGIGWVLAFTIAAEIGKIERFPSPEKLAGYTGLCPRVNQSGEKDRRGPLTKHGPTYLRWALLEATMHALKHPAYAERYQRIKRRLGKQRGAKVAQVDIARRLAHAIWHMLSRKEKFAPRGAAFRLAA

SEQ ID NO: 424189 - protein, 425 aa, unidentified
MKKVLYVGLDVHKESIVVATAPQGDTEAQPYGKIGGTLEALDKLIKKMDKPDLELRFVYEAGPCGYVIYRHMKKRGYFCQVIAPSLIPTKASDRVKTDRRDARQLARLFRAGELTAIYVPDEEDEAVRDLVRARDRAMVDQRKARQRLKGFLLRLGHRYLGRGNWSPEHLRYLAQIKLSHAAQQIAFQEYLEAITVATERLERLTKAMEAALTTWKREPVVRAVMSLRGVALINGMTLIAEAGDLTRFDSPTSLMCYFGLTPSEYSTGDKRVQGGITKAGNGACRRALVEAAHQYRIPPRVSPAMQKRQEGQSQEVRAIALKAQQRLHSRYRLLTARHKKPVIVVAALARELCGFVWAIVCQVSAPDKVKAREKGIVKESKPAVPTTSAPAKTSRPSDTTKKKYRLNAEKTFRKHAAANAGAAHE

SEQ ID NO: 424190 - protein, 309 aa, unidentified
MEAFVGIDVSKDRLDVHLRPAGESFAVARDGKALAALVERLLALAPALVVMEATGGYETVVASALAAAQLPLSVVNPRQIRDFARATGKLAKTDRLDAAAIAHFAEAVRPPVRPIADAEAQALGELVARRRQVIEMIVAEGNRRRRASQRRVIRAIERHLAVLQAELSELDGDIDEAIRKSPAWQADADLLVGVPGIGPATVRTLIAELPELGRLTRRKIAALAGLAPINRDSGTLRGRRTIAGGRPAVRAALYMATLVASRANPVIAAHYKKLRGAGKTGKQALTACMRKLLVILNAILRDQKPWQTA

SEQ ID NO: 424191 - protein, 348 aa, unidentified
MTDPVYILGIDLSTIRLDCALLPDERSFQVPYSPAGFQTIIEHLVDRRAQGRRVLAVVEATGGYERALVEAFHAADLPVAVVNPKRVRCYAKALGILAKTDRLDARVIARYGQDVRPRPAAPVTPERRDLIELLAYRSQLASEIAARTQQKRLYTSAAMIARADTAIARLRQEKRELDREIARMLEAGEALKDRASLLLSVCGIGAVVAAVLLAYLPELGRLTEKEIASLAGLAPMARDSGQRRGRRHIGDGRAKVRHALYMAVVAALKNNARLRGVYDRLIEAGKPVKVAMVAVMRKLLVMLNAMLRDGETWEPDARKRRERRADRSSALPEESSAAPEPASETATA

SEQ ID NO: 424192 - protein, 347 aa, unidentified
MKYYRTTTKFNCGIDLHARQMYICIMDPEGNVLVHRNIKGNDFDFFLKLVAPYRHDLTVVCECCFNWYWLADACLDAGIEFVLAHALYLKHIHGGKNKNDRLDSEKLAHLLRTNLIPPSYVYPRERRPMRALLRQRMSYVWDRSELLTKLSMNQTAEGLVPVAKGGHNRDVWEERLVGQYADPLHQLAVECDMELIRSYDRRIEILDQRLCAQARREHGRDFALLMTVPGIGRVLALTLLFEIDTIKRFPGVKDFVSYCRLVKGSVASAGKIKGLKGGKMGNPYLRWAFGEAAVICKRNHPLLTPYADKLVSKHGKFKGNAILANKLGRAVYFMLQKGTAFDAELVI

SEQ ID NO: 424193 - protein, 366 aa, unidentified
MEKIVKQSVGIDCSKDELDVCFGQQNEQWQVHHKATTAFKNNKQGFIQLVRWSSKLADKSVPVNFVIEATGVYHENVTHHLFDAQKRICVVLPNRARHFAQTLTVRTVNDKESSKMLATLGLEKQLDAWQKPEPVFTFLKQLTREREQLKNEGTICKNQLHAESHSAFPMKSSIQRINKRIAMLEKQCKEIETEIEQIVAAHPMIAEKVEKISTIKGIGRLTVVTIVAEANGFNLIRNYKQLVSYAGYDVVTKDSGTSVRGKPHISGKGNKHIRRVLHFPALTNVKYDEHHKNLYTRIEAKSGIKMKGYTAVQRKLLVLIYTLWKKNEAYDPYYKNKKGEVQKNLEQPIGAALIELDLVRPACPEA

SEQ ID NO: 424194 - protein, 440 aa, unidentified
MLKVITFEQVNYSAAGIDIGSEKFFVSVDGQQVENFETYTSDYFRCISYLKQHCIEKVAMEATGVYWISLYSLLEQNEIRVCLVNPRETRSRKGHKTDVQDCRWIQRLFSAGLLKESFIPQGLLFEIRYLVRERMDIIEMGSTYVNKMQRCLELMNIKLTSVISQIHGKSGLRMISAILEGERNPQALLLLCDERIINKKANRVLQALEGSYNDTYLFMLKQNLKPWEEHQKQIADIDSCLEQLLVSLTKNKSISNEKIGKSKKIRHHQPQIKNLHEIMVKLFGVNVSSVSGINDYTLLRLVGETGADMNRFPSVNHFVSWCGLAPGHYQNGKYRKTKRMPCSRTGQIFKEIAQGLENSKTVAIGSFIRKLKAKRNAPVAYKAGARKLAEAYYNALTKGTDYVEQGIKKYEEQLRQRERAILKRLAKKHNMQISEKEEAA

SEQ ID NO: 424195 - protein, 425 aa, unidentified
MGFITPQHLTDSLPYHWFVGIDWGSQTHQVCVLDRTRRCVAEREVHHDGLSLAQFATWLSELSAGEPTQVAVAIEMPHGAMVEMLVERGFAVFAINPKQLARFRERHSVAGAKDDRRDARVLADSLRTDLPSFRAVRLSAPELLVLRELSRAEESLLQEFRRTANRLRDHLHRFFPQMLQLCPAADEAWLWDLLELAPPPAHAQLLSEKQVHQVLKAYRLRRRQAPKVLTCLQAPALPVAPGVAEAAQAHCALLVPCLRVLAEQLRSCAQQVNTLLSILTRPTAETGPSDVAIVQSLPGVGRKITTWLFAEAAVPLAERDYEALRTQSGVAPVTRQSGKRRQVVMRRACNNRLRHALYHMARVAMQCDAEFSSVYQALRAKGQRHGQALRNIADRILRILIAMLRDRTLYNPAQRPFLTCAQMSR

SEQ ID NO: 424196 - protein, 343 aa, unidentified
MQTITTIGLDIAKSVFQLHGVDAAGQVVIRRQLKRRFVLAFFQKLPPCLVGIEACASSHHWSRELTALGHTVRLMPPAYVKPYVKRQKNDATDAEAICEAVGRANMRFVPTKAAEQQSGLVLHRTRHLFIRQQTSMINAIRAHLAEFGIVAPVGRRGVEQLLSVVADPNDKRIPEIARACLSALGTQLRRIKEQILEFDRLIRAWHRSNETCRRLDDCPGVGPALATALVASVADPRAFKSGRNFSAWIGLVPKQHSSGGKARLGGTSKQGDRYLRGLFVVGALAVIRYAKIHGTKHRPWLTALLARRPAKVAAIALANKIARMVWAVMAKGERYKEPVALAA

SEQ ID NO: 424197 - protein, 344 aa, unidentified
MSEVITVGLDIAKHVFHAHGVDDRGRPIFSKRISRGKLLDFFAAQPSCMVALEACGGAHHWARQLIQLGHQVRLIPPAYVKPFVKRQKNDAIDAEAICEAALRPNMRFVAVKSEQQQAAGLVFRTRDLLVRQRTQLINAIRGHLTEYGWIAPKGPSHVAMLADLIEREAIASSLPEAARAMFRCMLDQLAGLNGKIADLDKEIARRAREDEVSRRLMTIPGIGPISATAIAALAPPAETFAKGRDFAAWLGLTPLQRSTGGKQKLGATSKMGERTLRRLLIIGSSAVVQQASRRGAPKGSWLEQMLARKPRMLVTVALANKMARIVWALLIKRENYKAPVAAKA

SEQ ID NO: 424198 - protein, 343 aa, unidentified
MQVVRIGLDLAKYVFEVHGVDCHGKVVVRKTLRRASVACFFANLPRCLVGMEASNGAHYWARVLSDLGHEIRLISPQFVTPYVKSNKNDRNDAEAICEAVGRPSMRFVPPKSTDQLAVQAVHRIRRRLVADRVRLVNQVRGLLSEHGIVIARDISQLRRGLAVIVGNDDASLSDMVRSLMRELQAELAELDRRIATYDRRIRDIFRASEQCQRLGKIEGIGPVTATALIAAVGDRTCFKNGRQFAAWLGLVPKQRSSGGRARLFGISKRGDRYLRTLMIHGARAALGKASGKQDPRSLWLGKLRARRHPNVAAVALANKNARIVWAMLSGGTFYEHTPSVKAA

SEQ ID NO: 424199 - protein, 351 aa, unidentified
MLIIGCDFHTRFQKIAMMDTTTGELVTRRLEHGTGEAERFYAALAAPVRVGIEATLATQWFEKMLRHYGHELWIGDAAEIRAAMVRKQKTDDRDALHILDLLMQNRFPRIWVPSPAERDVRQLVRHRHKLVRFRTSVMNQLHALAMGQGLCLRKKLWTTVGRQKLESLTLDPWASRRRRELLELLDQLDPSIGELDRAVISEAESRPTAVCLMQQVGVGPVTALAFVLTVGPVSRFPNSKKLVSYLGLNPSEESTGGRQRLGAISKQGNSMLRCLLVEAAQTSARLDPELRRNYQRLKLRRGNSGVAKVAIARKLAVRLYWKLREADRPNTAARMQGSPASPVVGESLSAN

SEQ ID NO: 424200 - protein, 356 aa, unidentified
MKKYIGCDMHKKFSVFVSMDERGRVEAPVKVANDSLELQAYLHSLATGTPVAVEASGGWYWFVDTLEEAGLDVRLVHPLAAKKRMAGRNKTDTIDATGLAMLLRNGTLPEVWIPPAALRDLRGLLRTRLALRRHTTMLKNRIHGAIRRYGQYEAGEPRDLFAGKGRVQLSVYVGALPPETRLATRHEWDLVDQVEAHIRELEIRIRLGIGQLGYVRLLKTLPGVGEILGATIYLEIGEVSRFGHAGQLASYAGLTPTVYASGDKKRLGPTSPMANHYLKWAFVEAANCVVMQKQRYSQRHVVQLYERLRASKNHGKAAVAVARHLAEASWWVLTKKQVYREPAPASMSSSENGSAR

SEQ ID NO: 424201 - protein, 334 aa, unidentified
MTMVTLSVGLDYHPGCVQVCVMDPQGKVLANGTRPNCAEELDRVVRTFGERIRAAVEVSPGAAHLAHELVTRFGWSVEMAHPGYVARIKQSPDKTDFGDAKLLADLTRVGYLPKVWLAPPEIQDLRTLTRHRVELAAQKRATKLRVRALLRNYRLVGPANAWTKAWLAWLRDEAPLPEHARWVMERHLGEIERLTADIKRVEQRMADVTKDDPFVQFLMSQDGIGLVTAVTLRAELGRVDRFRNAKQMSRFCGVSPRNASSGARQADAGLIKASNPELRRVLIEAAQRLIRFDEHWVAFYKRMRERGKPYCVIVAAVANRWLRRMYHELKTLAA

SEQ ID NO: 424202 - protein, 415 aa, unidentified
MALKIVYKICCGIDVHKTFVVACIASTDHNGVTTYESHRFSTYTSGLKDLLQWLLKHNCKDVCMESTGKYWIPVYNVLENDCTIVLAHPKYVKAIRGKKTDKKDAKWIADLFKHDLVAGSFMPPADIRQLRDLMRYRFKLTCFMSSEKNRLQNCLTVSNIQLGNVVSDTFGKSAQAILDKLLENPADTSFDLEPLVYKSLKKKLPELRDAIDGYITPEQAAKLKVIKAHYENLESRKAELEELILALAAPYQQELAILQTAPGIRSNFTAIGIISEIGTNMEAFPSAKHLCSWAGLTPTNNESAGKKKSVRVSKAGCYIKPLLVQCANAVVTSKKHPEIRNRYLRLKKRRGHKKAIIAIARMLLTALYHMLKNSENYNAELYRKSDLPSIDREITVEQAILIARNQGYRIRSETA

SEQ ID NO: 424203 - protein, 412 aa, unidentified
MQVVYERCAGLDVHKRTVVVCAITSDAQSQQCRERRTFSTMTPDLLRMRDWLKELGISHVAMESTGSFWKPIFNILEGHLEVLVVNAQHLKAVPGRKTDLKDAEWIADLLQHGLLRPSFVPPVAQLEVRELTRYRISLVEERSRTINRLQKTLEDTNIKLTSVASDVMGRSARDMLTALLAGEVDPSILAELARGRMRSKRDLLSQALQGQLKPHNRFLLSEQLADIDALDEAIERMSTQIAERLRPYEQQIQRLMTIPGIKRRLAEVILAEIGPDMSRFPSARHLASWAGMCPGSHESAGKRFSGKTRKGSPWLRSALVEAAHAAIHAKDSCLSAQYQRLAVRRGGKKATIAVGHTLLVIIYHLLSQDKDYEELGGHYFDDWDRQAVQKRLVRRLEKLGYEVKLEPVSPTA

SEQ ID NO: 424204 - protein, 351 aa, unidentified
MWIIGCDYHPSMQEVALVDTETGEYDERQLNHSDREAEKFYRNLKQRGVNVRVGMEATGHARWFERLMAELGFELWIGDPAEIKAARVRKQKTDREDARLLLRLMSENRFPRIWVPNPENRDLRQLLWHRHRLVQMRTRVMNQLQAIAMGEGVRLRKSLWSRSGRAKLESLQLAPWAAKRRKDLLELLDHLTPKIEELNVAFEQEAWNRPEVRHLMTHPGVGPVTGLAFVLIIGTPQRFGCGKQIGSYLGLIPCEDSSGGRQRLGHISKQGSSLLRFLLVEAAQQAVRFDADWKRQYLHLAMRREKRIAKVAMARRLGVRLYWMWRTGWDGKQALQFGSHAGQLVRSHGLT

SEQ ID NO: 424205 - protein, 456 aa, unidentified
MRLPTSVIGVALFRSAFPSGTVPVRGSRGDCPARNSNARPAFSTDDTEKARLVMARVFIGVDPHKLSATIEVVDARETVLATGRFTTDKAGYTAMRRHVASYPERVWAVEGSNGAGRPLAQRLLADGESVVDVPAKLSARARLFDTGHNRKTDAHDAHAVAVVAVRTRGLRVLSYDSELEALRMLVDRREELTRARIQTVNRLQRLLSELTPGKAKKNITAPQAKTILAGVRPRDLAGRTRRRLAVEQLGELVALDKKITASTKELKAMVLARDSTLMDLTGVGPVVAARFLADVGDVTRFADRNRFASWTGTAPLDASSGEQIRHRLSRAGNRRANHMIHIAAACQIRIDSPGRAYYRRKLAAGKTPMEAMRCLKRRISDAIYRRLVADAQIAAAADVDAGPGGHRGASLQSSAASFHPHTGTSDQPQPGPAPETLPAPTPAGKTTRSRTLQSAS

SEQ ID NO: 424206 - protein, 463 aa, unidentified
MSGKKSKQGKASKQSKKTLDELTMANPNAAGLDIGSTEIWAAVPANREGETVRCFGTYTSDLLELADWLQALGIQTVAMESTGVYWIPVFEILEERGLEVLVVNARHIKNVPGRKSDVQDCQWVQRLHSYGLLRGSFRPQVEIASLRAYLRHRDSLIEHRAAHIQHMQKALLQMNIQLTQVLSDITGVTGLAILRAIVAGVRNPHALAQLRHGRCEHPPEELVKALTGHYRAEHVFALKQALALFDAYTQQLCECDEEIQRQFENFKPDLPDDLPPLPPNPKPGSHSKNAPAYDARSLLYPKVGVDLFAIPGMNAVLVQTVLTEVGLDMSRWPTAKHFCSWLGLAPHNGISGGKVLYSHIPNTQNRAGQAFRLAAQAVSRGKTVYSEFYRRVRARSGPKQAIVATAHKIARTFYYMLKRRQPFQSMDIEEYHRRQREKDVQRLSRNAARLGFQIQPIPATNML

SEQ ID NO: 424207 - protein, 339 aa, unidentified
MELYAGLDLHSRNTYIGIMDNAFNRVFKKRVPNHLELILQTLDPFRDQIKGFVVESTYNWYWLVDGLMDAGYSYAHLANPSAIKQYEGLKHSDDQHDAFFLAQLLILGILPQGYIYPKKDRPVRDLARKRMFLVQHKTAHILSLQSLIQRCCAMKVRANDMRHLTVKELELWLEEEHLVLSAQANLDSVNFLKQKIKQLEKAIIQKVKLNKAFKYLLTVPGIGNILAMTIMLEVGNINRFPKVGNFTSYCRCVPSRRLSDGKSKGQGNRKNGNRYLSWAFTEAAQLGRRHNQRFRRYYNRKIAQANTSLATKALGNKLARICYYIMRDQVPFREELFCH

SEQ ID NO: 424208 - protein, 418 aa, unidentified
MEIIYERVAGIDVGKKIIAVAVRTPGERPGKRRQQLRKFDTYYQTLTEMVAWLIAEGVTHVSMEATGVYWRPVFHALCETERALEVLLVNARHVKNVPGRKSDALDAVWLAELTECGLLRGSFIPPREIAAIRELTRYRKKLIEQRTSELQRLAKVLEDAGIKIDSVASALTTLSARDMIEALINGERDPSVLAELARGKMRRKIPDLRLACAGRFGAQHALMCTLHLEHIDHLTDMIARLDTRIDEASLPFVQQTTSLATIPGISERAAQVIISEIGIDMARFPTAAHLASWAGLCPGNNESAGKHRSGRTRKGNKELRALLTECAWSAGRTSTYVGAQFRRFHRRFGTKGGKKAATATAHTLIVIIWHVLAEATAYRDLGSDYFTRRLDSPEARKRRLIHELEALGHKVTIEPTAA

SEQ ID NO: 424209 - protein, 338 aa, unidentified
MLHVGLDLHKKYSTVAVMDDDGNIQLEDTLYHDDRPRLIEFFSKLAGKAVVTVEATRDWYWLYELLEELGVTVKLAHARKVRLIAESWLKSDKVDPKSLAQLERTGFLPEAYISPRPIRDNREYLRYRLTLVRLRTGLKNKVHALVDKLGIKHPFADLFCPAGRRFLGQLTLRPAYQEELTNYLALIEDIERRIVAATKEIQRQLKPDPRAKLLMTIPAIGHLTAYLLLNEIGDIKRFPTPGKLCAYGGIVPIVRQSADHRWQGHITKEGNRYIRWALTEVACLAPSKDYVLGSFYRRLKARRGNLKARVAVARKLLVAVWYVLTYGEPYKTTAFPTV

SEQ ID NO: 424210 - protein, 338 aa, unidentified
MNYTTVGADIAKNVIQLYWVDPDSGEIINKAIKRAAFLEHFANRAPCLIGMEACGGAQHWARRLLEMGHQVKLIPAKFAKAFNIRNKNDAADARAIWMATQMPGKSVAVKSEAQQAVLALHRIRQQKIKFRTMQMNCLRGLLTEYGEVMGKSRAALDKAIPGVLERIAGRLPAMLIESLREQWNDLQNLDRQIADIERRLRAWLKDDEACRKIAEIPGVGLVTATAAVATMGDPKAFRSGREFAAWLGLVPKQVGTGGKIVLLGISKRGDTYLRTLLVHGARSVLSHSREPGAWIEQLTKRRHRNVAIVAIANKIARTIWAILAHGKPYEKGHVSKAA

SEQ ID NO: 424211 - protein, 363 aa, unidentified
MGKHHLESEALRLINSDSDSPFSGYSIFNLSKTKVMKRLFIGIDISKDVFDYCILNSENEIIEKGQMANSRKEILEFCKKIKSLKEYEPWICMEHTGHYGYLLSCIFTEQNLCYSLLDPLNLKRSFGVVRGKTDAIDAYRIASYALSNKHKLVAYKLPSEELRKLKVLMTSRSRYSKISVQLQNGIKANKVANKSMNLEDEIQDDQETLAIFKVKIKSIEKKMLAIIKSTKELKTNYDKITSVVGIGPIIALYCIIETQNFVKFYDPRKFGCHCGLAPFAYSSGSSVRGKTRTSNLCNKYLKGILYKGAWSAIQHDPQLKRYFNRKIEEGKHKFSVANAVAFKIVLRIFAVVKRDEPYVKLAA

SEQ ID NO: 424212 - protein, 341 aa, unidentified
MTIGIDLGDVWSHYCTLNEDGEVVGQGRFRTSPSGVEKWFTDLPRVRIAMEAGTHSIWISEQLQELGHEVIVANVRELRAISHSDRKSDQVDAEKLARYARLDPKILRPIAHRTVAQQEALTLIRARNLIVRLRTAAVNAVRGLAKPCGYRLPASSTLCFAKRCVAVLPPGLTQALGPVLEQIAEMTVKIKHYDRLIKRLTETEYPETQALIKVYGVGQLTALTYVLTLGSKERFQRSRDVGCYLGLRPRRSQSGDRDPQLGITKAGNIYLRTLLVECANHVLGPHGRDSTLRQWGLHLASRGGKQSRNRAIVAVARKLAVLLHRIWITQEPYIPFYAVAA

SEQ ID NO: 424213 - protein, 355 aa, unidentified
MDGLKHQKEKRSMDHFAGLDVSVKETSVCIVDDTGKIVREVKVASEPEALLAVLTDPAYHFKRIGLEAGPLSQWLFSALAEAELPVVCVETRHMQAVLKAQINKTDRNDARGIAQMMRVGLYRPVHVKTLRSQKLRMLLTHRKLLQSKAIAIENDLRGTLRNFGLKVGMVGTVRFEARIRELVENLPDLAVLVEPLLVVRRALREQFVILHRRLLALVRDDEVCRRLMTTPGVGPVVALTYRATVDVPARFRKSKSVGAVFGLTCSKYQSGEIDRSGRISRCGDEMMRVMLYEAAQSMLWSRKWSWLKAWAMQIARRRGMKKAIVALARRLAVIMHRIWVDGSEFRWTREQAAAA

SEQ ID NO: 424214 - protein, 439 aa, unidentified
MIHPDAAGIDIGNESHYVAVPPTRDSQAVRRFGCTTSELKEMAVWLKQCAIRTIALQSTGVYWIAVYDILEEAGFEVYLVNARETKNLPGRKSDVQESQWLMKLHTYGLLRNSFRPSQEIRTMRTYWRQRSDLVRSAGRHIQRMQKALTQMNIQLANVLSDVSGMTGQAIIKAILAGERDPYQLAALRNWRVKASEEEIARSLEGNWQEDLLFVLQQEQDGYEFCQKQTAECDQRLQQYLQQREDRSHGASLPGEKRKERLRKKKKGNAPQFDLRAELFRVTGTDLTQIDGIDVTTTMTILSEAGWDMSKWKTEHHFVSWLRLCPDNRISGDKIIGKGRLPTNNRVTTALRMAASTLRLSNTYLGAQFRRLRTKLGAPVAIKAMAAKLARLVYRMLRYGMTFIDRGAEFYDAQHRKLQINYLKRKAANLGFQIIEASAA

SEQ ID NO: 424215 - protein, 334 aa, unidentified
MAKNVYQLHGVDRFGKTIWKRRLKRHQWLKVLLDKTEPGCVIGMEACASAHHWGRELQSRGYTVKLIPPQFVKPYVKSNKNDARDAEAICEAMSRPNMRFVTVKTVKQQDIQATHRIREEFKVRRTAKANQIRGLVAEYGLVAPKQLSSLRAAIPCWLEDAENGLTHYFRSLLHVLWSDLLALDDRMCEMDKTIKRLAKDNEDCVRLEQLRGIGPMTSTAMIATVGDARQYHKSRQMAAAIGITPRQHSSGDKHRLLGISKRGDVYLRTLMIHGARAVVTGAKHKHDPLSRWVTEIAKRRHPNVAAVALANKNARMAWAILRNKADYDPDFAMS

SEQ ID NO: 424216 - protein, 377 aa, unidentified
MEGETVIAGVDTHKDVHVLCLLDGLGRKIWSGSFGADPEGYDRLAEAIGDPGSCMVVGVEGTASYGAGLTRRLVELGYNVVEVLRPKRDKARPGEGKSDPLDAERAARKAASGRGCSVPKSQDGWVEAVRQLYVARRLAVATSTSCVACAKSMLTTAPSALRERFRGRERPKDLMPLLARGRKAGDALEESVLASLRSVAAVWKEARSQVESLDERIRALLEANAPALLGVEGCGTTTAAALVVAAGDNPGRLKGEAAFSMLCGASPIPASSGKTERHRLNRGGNRQANWALYEIAIKRMAYDERTRRYVARRTSEGKSRREAVRCLKRYIAREVYRVLMDPNPDGAAPEGPELAKMRKAMRVTQKKAAAELSLIHI

SEQ ID NO: 424217 - protein, 343 aa, unidentified
MKHYVGLDVSVKETSVCIVDETGKICREIKVVSHPEDLLRVLQDTAWHLERIGLEAGPLSQWLFEGLAQAGLPVVCIETRHAKAFLRAQINKSDRNDARGIAQMMRVNLFRPVHVKTLSSQKRRALLTARKLLQEKALAVENDIRGLLRNFGLKVGAVGAVRFEVRIHELIESMPDLIEVIQPLLQARRELREHFATLHRKLLALVRNDEVCRRLMTVPGVGPVVSLAFVATIDTPARFRSSKAVGPALGLTPVLHQSGESSRVGRISLCGDAMMRTLLFEAAQIILTRASRWSWLKAWAMKVAQRRGRGKAVIALARRLATILHRIWCDGTEFRWTREAQAM

SEQ ID NO: 424218 - protein, 316 aa, unidentified
MKSMNDGEINIGIDTGQTMLDIFVRPTGEILSVKNNPDGIRQAIRFIRQFKPTRILIESTGRLEMAFFCAAHKARMPVCVCDPVRVRKFAQSIGRLAKTDKLDAQDIAYFGEIMKPDPSELKPAKLRLLSDLLTVRSQCLEMSTMQKNRLQRMPKTVQQPIRSILKKIAVEIANIDLKLDQLVTEIPHYKERVDQLISAKGVGKVLAYTLLSDLPELGQLNRKEIAALVGIAPFNKDSGKHKGKRKIRGGRHKVRTVLFVSMMSAIQCHPKIKPMYERLIAAGKPKKVAIVACMRKQLIILNTMVRDGTYWDENMA

SEQ ID NO: 424219 - protein, 356 aa, unidentified
MSRDIKYIGMDVHKEAIVIAVLNGSGKLVMETIVETKASSILQFIHGLRGELHVTWEEGTWAAWLYDLLQPQVEQVLVCNPRRNALLKEGSKSDQVDAQKLADLLRTGMLRPVYHGENGLRTLRELGRSYQTISKDLTRVMNRLKALYRGWGIPCAGTQVYGPRYREEWLNKIPQAGVRRRAELLYQQLDGLQGLRRHLRPEFLAESRKHKAAKLLRQIPCIGPIRAARLIALMQTPHRFRSKRQLWTYSGLGIETHDSAQFRFVSGQLQRSRKPQQIRGLNRNHNHEMKEIFKSAATRASCGRGPFHDFYAGLLAKGMKPEMARLTLARKIAAITLTLWKKEERFDAEQLKTQAA

SEQ ID NO: 424220 - protein, 403 aa, unidentified
MNAVGIDVSKGKSMVAIMRPFGEIVVSPFEIKHTSSDINSLIELIHSIDGESRIVMEHTGRYYESLAHELSAANLFVSAINPKLIKDFDNDSLRKVKSDKADSVKIARYALDKWQNLKQYSVMDELRIQLKTMNRQFGFYMKHKTAMKNNLIGILDQTYPGLNAYFDSPARSDGSQKWVDFAATYRHVDCVRKMSLYAFTCHYQKWCKRKKYNFSQSKAEEIYGKAKELVPVLPKDEITKLIIKQAVEQLNNASATVEELRALMNETASKLPEYSIVMNMKGVGPSLGPQLMAEIGDVSRFTHKGAITAFAGVDPGVNESGTYEQRSVPTSKRGSSNLRKTLFQVMDVLIKTMPQDDPVYQFLDKKRAQGKPYYVYMTAGANKFLRIYYGRVKEYLATLPESN

SEQ ID NO: 424221 - protein, 462 aa, unidentified
MWMLKIENTSEYNKTTDWQVSKNLIEQREVSTMKSNTQNAKIEAITEKTLVLGIDVGSETHYARAFDYRGIEYSKKPFKFSNTEAGFVTFKEWILDLKERHEKDKVVLGMEPTGHYWFNLGKFLQDNEMKPVLVNPHHVKKSKELDDNNPTKNDRKDPKVIAGLVREGRYMIPYLPDGVYADLRTASNIRFQLQAELTRIQNRISRWFNIYFPEYKTVYGKPDAKSGMLILKAAPLPEDILTLGIDGVNQIWRDAKLRAVGKARAKTLIEAAEHSVGSKEGAVAARMEIRMLLEDYESRSIRLQEVMTLIEGLVKQIPMAEKLLEIKGVGIRTVSGFLAEVGDISRFNNPKELQKLAGLALVENSSGKHKGETTISRRGRKRLRYLLFEVAMSLVTKNPEFRELHNYYTTRRLNPLKKMQSLMVIATKLIRVFYVMLTKGVNYDPKKMVSDIKRPAVYLQAV

SEQ ID NO: 424222 - protein, 342 aa, unidentified
MDIKVLGIDLGKTVCSLAGLDEAGAVVFRKRIQRHRLMDFLVGLPPCVVAMEACGGAHHIGHFCLQNGHEPRLMSPLYVRPYVKVHKNDDRDAEAIAEAATRPTMSFVAIKSGEQLDLQALHRARERLVSDRTRLINQGRGFLMERGIRIGTGRHIFQKELLRLTAEGSDDLSRRMILLLSDMASELHVINERIAAIDDEVKALAQSDADMRRLMEIPGIGPTIATALVAAVGTGSSFGKGRDLAAWLGLVPRQITTGGKAKLVGISKHGNRYLRKLFIHGARTVLHLVRDRTSPITAWADSLKERAHVNVAAVAMANKMARIAWAVLTKGERYRPNALSGL

SEQ ID NO: 424223 - protein, 365 aa, unidentified
MQTQGTTINSDAQNVYIGIDVHLKSWKVSVMLDNTVFKTFAQEPCAKVLSNYLGRNFPGSTYYSAYEAGFSGYSTHRKLQEEGITNIIVNPADIPTTDKDRRQKEDKRDSRKIAKALRNGELEGIYVPSISSMDFRTLVRFRSTLVKEVSRNKNRLKSLLKFQGITIPPELHSASSHWSSRFTKWLEEEVKFSSDYGNLTIKTLIAITQYYREQLLELTRVLRQIPKDSHYGKRIKLLNTIPGVGLITAVTLIAEIDDINRFKTLDRFCSYAGIVPSTNSSGEKETVRGITPRSNRPLRNIIIESSWMAVRNNPVLAKKFNELCYKMDANKAIIRVAKKMLAIIRYVMIHEKEYKIDVNEKQKQL

SEQ ID NO: 424224 - protein, 482 aa, unidentified
MKKRNIYQNQSQELLHLFEDAGSSEKVMCVPLDYAKRDHLAMFCNGHGDILRKPFSVKNTPEGLAYMNDQVTRSCRRRGIKKKHVFFGGEDANSFAKNFVSTLRGKGFLVANVNAHDAKKQRGSVQASTDRIDLMGIATMLLNCRANCSPAQSGIYRNLRTLVRHRRKLVQMLTEVKNRVHGIVDEIFPGFLNERNSGIIPFTQSSLYLMEDRFSPKQIRRRRRQTLIEILRRFGTTTADKTAAKLQQYAAKVLHAPVEYVDTMQLSLAQHVKHIRCLKESVAQMDKEIALNLAKTQGAFLTSVRGIGIVLAAGVTAEIGDLNEQKPLNNLASYSGIVPRVKQSGGMDGKTYTGPVAKRCNRILKDYVVKSAYHLGLHGPQDLMVDYKRRDASGQHADFGMGRRYLRMAINLMRTSQVYLPPNLRKGDFTLEERAGYYLMNWLYLRDKWKKIGVHEAAFANNRPLGQWRQIVQELYDIKLKL

SEQ ID NO: 424225 - protein, 405 aa, unidentified
MRYYIGVDWADAEHAIWVADEQGTRVLSRAVPHTAEGLAEWGRWLDEQRAAGVELWAAIERPDGRVVDFLLDHGVVVYPVNPKALDRARDRFRMSQAKSDPFDAQVLAEVLRTDQARLQALQPSSAAAQELKLLTRDYARCVREQTRLVNQLTATLKEYYPRALEVCEDLTTQRARAFLRAYPTPEALAALSPKRWQRFARTQRWSAAQVATLWTTLQAPQLPVPAHVVRAKARLAGILVTQLEAAVHAVAEYREAVTGFFGTLPAAEWATTLPAGHGTTVPTLCAELGDAPGRWASWQHLQGHAGTVPVTVRSGKYRSIQFRFACNKPLRTALHQFALSSLQHSEWARAYYDRQRARGHRHHAALRALGAKWLKIIFVLWRRHVPYREEHHLATMARQQLRQAA

SEQ ID NO: 424226 - protein, 386 aa, unidentified
MQKLNDLSRSLTALEPDGTLIAVIEMSLSSWLVAGIVPGIERQPLKKLAVDESALLKLLHRWREEAEKAGRRIERIAVAFEAGRDGFWLARWLKARGIEAHVIHASSVAVSREHRRAKTDRLDTELLKRSFLGWLRGERDHCKMVAIPTMKDEDAKRPNREHDSLIGERSRIVNRMKAALVRLGIRGFNPKLKRASTRLDGLRTPEGEPIPPNALAELRRDMERRRLVNNQIRQIEEERLKRIEQAPCDGPHVMVRLLARVMGVGIETADMLVHEVLSRNMRDRRAVARYAGLTGSPDESGRKRREKGLARSGNTRVRRGMIQLAWRFLLHQKNSALTKWFRSRTENARGTRKPMIVALARKLLIALWRLVREGIVPDGVVLRAAQ

SEQ ID NO: 424227 - protein, 349 aa, unidentified
MTMLSETVDVVIGVDTHKHTHTAAAVTAQTGAFLEERTVPTNPSGYGELLALADAVGGRRAWAIEGTGSYGAGLTRFLAERGERVIELDRPWRAKRRDGAKSDSIDALRAARDALSRTKLAAPRSGSERAVLAVLLAARRSAVQASTDARRQLQAFVVVAPEPLAARFRGRSGLQMLRVATHLRINPNWDPETLATARVLRSLAHRALELSAEADAHEEAIKMAVRALRPELLKVTGVGPIVAACVLCAWSHPGRCRSEAAFAKLGGVAPIEASSGQTTRHRLNRFGDRQLNRALHTVVLTRLRCHDATRAYAERRRSEGKSDREIKRCLKRYVSRELYRLLEGAPNPT

SEQ ID NO: 424228 - protein, 403 aa, unidentified
MDVHKSFVVACIASTTEYGVTTYKSKRFSTFTGDLRRCAAWLAENSCKDVCMESTGKYWIPIYNILEPTCNIVLAHPKYVKAIRGKKTDKRDAKWIADIFKHDLVAGSFIPPADIRQLRDLVRYRWKLTNFTTGEKNRAQNCLTVSNIKLDDVFSDVFGKTASAITTRILENPAEKITDVSGFRTKGMKATNEQVLAAVDGEMCEEQAEKLRIIRSHMDSLQLCKLDLESLILATAEKYLPQLGLVMTVPGIQSFTAIGIISEIGVDMSVFPTSKHLCSWAGLTPQNNESAGKKKTTRISRAGAYIKPLLVQCALNAVRAKKFPEVRNRYLALKKRRGHKKAIIAIARMLLTAIYNILKKNESYNPELYRQTDRPPAHREVSVAEAIFILQRQGYLVAAPPTP

SEQ ID NO: 424229 - protein, 329 aa, unidentified
MNYKWFVGIDISKKTLDAVLYVKDSTQKSPHIQISNNNSGYKKLVKWLEKQGVTINSTLFCMEHTGIYGIKLANFLYEKSNCCLESPLHIKRSLGLTRGKNDKVDALQIARFCYLYREELKLYKPNSDSIIALKSLINERERLIKIRTSDKIIIKELDTKENTNCIKRAKERVINLTKNVDQIEEEIEEIIKKDPSIDTNYKLIKSVVGIGLVNAVIFIVFTNNFNSITDPRKYACYSGVAPFEYSSGTSIRGKTKVSKLANRKIKVNLTNGARSAIINDPELKIYYNRKKEEGKEHGTVMNAVKFKLINRVFATVKRGTPYVKLRQAG

SEQ ID NO: 424230 - protein, 347 aa, unidentified
MKKIIIGIDISKEKIDASAIDVRNSLLGVLKLDYQAFENRPMGFRRMIVWAKHLIKGVTLEEVMFCCETTGGYDRSLCDYLFAKGLDIWRESSLQIKKSSGLRKGKDDKADSLTIAEYAMRHMDKAVYYVSPNETVRELKALLLYRRKLEQEKTSKKVRVAELKATAAKSKSVSFILRDAQKSIRALEKSIKECEKQIMALYERDEELKRSYDHLTSIKGISIVNATAMIAYTNNFKNITTSRKLASYYGIAPFREKSGTSVDRKAQVKCYSSSMLRAYLTQAAQWTIKEHGIYRDYYLRMSAKGKCYGVILNNVKNKLLHLSVSLIANDMDYEENHEFLRVQRMAQ

SEQ ID NO: 424231 - protein, 426 aa, unidentified
MSRVVIGMDPHKRTATIEIMASDETVAGRGRYTTDAAGYRSMLAEARRWPERMWAIEGCQGIGRHIANRLLADGEQVVDVPPKLSARTRVFATGQGRKTDVTDAHSVALAATRMQGLRPVVDDAQLAVLRILADRRRSLGEDHTRMVCQLHQLLLELIPGGAKKALSAAQAKALLARVRPRDAAGKARRRVAAELISDLERIYQRKKDANKELNALLKATATTLTDLNGIGPSGAARLLVEVADVTRFPGKAHFASWNGTAPIDASSGDQVRHRLSRAGNRQINRVLHIMAVVQLRHRDSEGRAYYDRKVAAGKTPMEAMRALKRRLSDIVYRQMITDAQAVVTGPGGHVGAATGSSAAGSNPSTGASEKSLPGPAIHEPMPASRPILQVAPGASGPRRTAAVVKRRLLDDGEDRRTLARQEQPPS

SEQ ID NO: 424232 - protein, 404 aa, unidentified
MIFVGIDWAEAHHDICVLDSEGTVLATRRIPEGLEGVARLHALLDEHTEIPDDVIVGIETDRGLLVTALLAAGYLVYAINPLAASRYRERHTTSRAKSDRGDARMLADLVRTDRQHHRRVALDSELLGGIKVLARSHQNLIRTRQRQLNALRSALREYYPGALAAFEDLGHPDATAVLAVAPDPERGRKLSQARIVTILRKGGRRRNLEPRAAEIRMALRAPQLAAPAQVVEAQAANTVALVAVIATLNEQVTRLEAELSDAFEHHPDAEILRSLPGLGDVLGARVLAEFGDAPDRYLDARARRNYAGTAPVTRASGTSHVVVARLARNKRLFDACYQWAFCALTRSAGARAYYDDHDPGPHTAKVARRKLANRLVGILHGCLTHRTTYDEDLAWHRAAEQLAA

SEQ ID NO: 424233 - protein, 440 aa, unidentified
MAMRKREDLVFPNAAAIDVGASSHWAAVPPHATDAPVREFGAMTDDLNDLADWLIACGVDVVALESTGVYWIPVYEVLEQRGLQVWLVDARQVKYVPGRKSDVQDCQWLQRLMSYGLLRAAFRPGAEVCAMRAVARQREVLLTQQASWVQRMQKALVQMNIQLTEVISDVMGQTGQAIIRDIVAGERDAKALARHRHRRVKASEQDIVRALTGNWREEHLFVLKQALAMYDDIAAHLRECDSKLGELLAERSAASVDLGKAPRQGSKARAEYDARQQLANWAGADLTRINGLGLDSVMKILSEIGTDLGRFANVKHFCSWLGLAPATKISGGKVISARTKRSANRVRQALKMAAMSLSHSDSALGAFYRRLCSRMDKPRANTATAHKLARMVYFMLTRGEAYVDAGQQRYEEQQRQRSVAALKRRAAALGFQLNPVGTPA

SEQ ID NO: 424234 - protein, 396 aa, unidentified
MEVVAESVAGIDVHQKEITVTVLIGSAESAKPKKVHARFQTVTFDLKACGAWLKQQDVKQVLMESTGQYWRPVWQILEPFGFNMILCNPRIIKNIPGKKTDQKDSEWLSELARYGLVSASYVPPRQIQELRESTRLSKSITQQMTRLKNQVHDILQRSNIKLTTYVSDIFSGSGRRILALLENGEVINLASIEQAGTGKRGYRLKATPKQILASLDGALSYNDRFLMAMNMNLLASYQRELINLESRIYEQLEAFSELYHRLQAIPGVGEDTAQIIIAEIGSDVSPFPDAHHLASWAGLCPGSYESAGKKHGAHTLHGNKYLKTALITAAMAAKSTKQTGLRDFYWRLCSRMGKQKANVALAHKLLRIIYVMIQTGATYQEYKKSQRTEDTLTPKI

SEQ ID NO: 424235 - protein, 411 aa, unidentified
MELLVAHCAGLDVAKDEVVACVRVPDGRGGRQQEVRTFQTFTSGLEALADWLAAEGVTQVVMEATGQYWKPIWYLLEEAGFELLLVNARHVKILPGRKTDVCDAAWLAELLEHGLLRGSFVPPPAIRELRDLTRYRKRLIQAHSSEGQRVQKTLEDAGIKLDSVAADVLGASGRAMLTALVAGERDPQVLAELAKGRLRAKLPQLRQALRGRFRTHHALLVRLALEHLEQLERSIAELDAQVDRVMVPFAAARDRLDTITGVGKRAAECMIAEIGVDMSVFPTAAHLASWAGRCPGNNITGGKRRSGKPTKGNRWLGEVLIECAWAAARSRDTYLSAQYWRLARRIGKKKAALAVGHSILVIAWHLLADNCTYQDLGGDYFVRRDTDRQRQRAVAQLQALGYRVALEPLAA

SEQ ID NO: 424236 - protein, 435 aa, unidentified
MEEVEDEPLFCDRVAGIDIGKATVMVTIRVPGEARAKGRQQETREFGTTRRELLALADWLRCWQVERAGMEATSDYWKPVLFTLEQEGSGCLLCQASQVKALPGRPKTDKLDSVWLARITEQGSLAGSFVPPEEIRRLRTHTRYRRKLVQMRTAQKERCEKLLEDAHLKLSSVISDIHGVSGRDMLRAIAAGERNPKVLAQMARGVMRSKTARLEQALDCSFFTGEHAFILTMMLDGIDSLTAQIGVLDARIADMCQPYRRQLEQLDEIPGFGITTAQDLIAEIGTDMNVFPTAGHLASCARQAPRVKESAGKRKGKNATGRGNPCTGGALGEASISAGRTQTFLGERYRRLTRRMPKRKAQVAIMRSQLVIAHALLSDPDARYQDLGPDYYERKADIRRRARNHARALERLGYKVTLEAIDPGTGELHLAATAG

SEQ ID NO: 424237 - protein, 332 aa, unidentified
MDNFYFIGVDVSKKKLDFCVLFEGKVLREEQVSNHQQAVARLIGELKNDLEMDNEQFLICAEHTGQYTFPLVCACKSVECKLWLENPSQIKYSSGMQRGKNDKVDAKRIAIYASRFGDKVKYYDRPTEEIERLKQLERERALYVTDLAKYKGQMYDQKDFMPAALYRKKTKRMKGLIKELQVAIDAITAEMEKIIGSTEVLARQMELLMSIDGVGKVVALNVIIETEAFSRFDNPRKFCCHAGVAPFSYTSGSSQHSKNKVSHRANKNIKKLLHMAAVSVTHRKEGELKAYYMRKVEEGKNKMSVINALRAKIVARMFAVIKRNEVYTPIYS

SEQ ID NO: 424238 - protein, 374 aa, unidentified
MESQTQTQSIGKLYSQKEKEKEKVSYKNVNIYAGIDAHLKSWKVTIMTEHLVYKTFSQDPKPELLYEHLVKNYPGGIYHSAYEAGFCGYWIHNRLTALGINSIVANPADIPTTDKEKVQKEDARDSRKIAKSLMNKDLKPIYVPTIKTLADRSLMRARATLVKELTRNKNRTKSFLHFYGIEIPERFSGQTVWSKAFVNWLNSIELPEKTGRDALDTYIKASVDTRASLLRILRLIRALSETPEYKEQVILLRSIPGIALITAMTLLTELENIHRFESFDRLCAFIGFIPSTSSSGDWDGTGDITRRGHSVLRKTIIESTWMAIRRDPALAKSYHDYCKRMEANKAIVRVAKKLLNRIKFVLKNKQAYEYAVVK

SEQ ID NO: 424239 - protein, 427 aa, unidentified
MKHDNAIKYQQFCQFKAEIRGSREYLIVGIDVAKDKHHAFFGLATGRTLLRRLIFKNNREGFERLIERSRQLQAEHSLSKAVFVVEPTGNYHKPLAHWLLEKEEQLVLASNKSIADNRQSLDGRWDKNDNKDSANAADLASQGKCQYLEQPEEDIVELRTLLSLRKRLKKEAHRMRMQIRNGLVAKHFPEFDRLWGSCLTENLAIVRWCLDPRKIAAMPFNDFIRLVTTRDRGQRQVRRLRAIYAVAGVSIGCPMGQAAGFEARQLADRLAEKGAQLEDVMQRIEQVCRRFASYRHLRSIPGFGPYVAAVVLATIGDPNRFRGRRQVIRLAGLDLNAKRSGRHSESAVPVISKRGNADLRYALYQAAQIASYHNEHFRGLFIRYLKGREKERGIKTKVRVKLSAKMLVIAWTLMKDNTDFDPSLLIV

SEQ ID NO: 424240 - protein, 345 aa, unidentified
MYRTRVGVDLAKKVIQVCIYKNKKVQSNVEMTPEAFLYWLINNKPVTIIFEACSTSNYWKQKAIEAGHDARLVSAKLVSVVRQNQKTDKNDALAIVQTTFMPDVTFIGGKTVEQQQLQSIKRLRELTVKQRDASQKQLIALLFELNIKISSRRGGIISAIESVLEDATNGLSTECRRAIFLAKENLKGLLEAVRHYNDCLEKSVNTHPMCKKLLKLEGVGAMNAINLYIALGCAEIGSFSKGKDASACIGLTPIQHSSGGMVKLGSIGKFTKNSVLRSQLICGATAAVQHAVKRKAKTKKDVWIQGLVERRGKKCAAVALANKTVRTAFAMLTQNTEYKAEVLTA

SEQ ID NO: 424241 - protein, 341 aa, unidentified
MDKLDFSGIEVSAEELVVALQRKGDRKALKTFPNTLPGHQAIIRHLSAAGRTVRVCLESTGLYALDLALALHRAGIQVMVANPRAVRHFAEALMKRSKNDRLDAGVLREFAARMPFQAWQPPATAALQLHALARRLQALTEMQTAEKSRLAAIQATATTPAALRRDLDRSLRSLRRSIARLSGEAVKIIDQDKELKLRFDLLLSVRGSIAATSAIQILAELAVVSPDLDVRQWGAYTGLDPRECSSGSSVHKKIRISKAGNAHLRRALYRPALVAIRHQPHLRAFYPHLRAQGKLKRVALVAVMRKLLHAIYGMFKHQKPFDGSKVYSLPSPKISTEEVAA

SEQ ID NO: 424242 - protein, 350 aa, unidentified
MDKELYIGVDVSKQTLDLAYYDGECIDWKKAHIKVSNNNAGFKKIGSWVAKVSKGVDIVLFCMEYTGLYTQNFRLWLEEKHYIYRMVEPRKMHRFEPDLDDGLRSLDRIKTDELDSFRIAIYCEQNHRKILRNPSKLPPPVYFKLKRLLAERKQTVKQSVLYKQQLHDICAYDTDLSVERKNGQLKTLNDALKGIDNEIDMYIKEDADISKNFSLLTSIPGIGRVVALETIVLTENFMAIDNPRKYACYIGVAPFKKESGTSVRKGSSVSKKGFKQAKADLSIACLVCMQHIPNIRDYWERKRKEKCSGIVFNAIKFKMILRMFAVIKRGTPYVETDNYRNGKNKQPGVN

SEQ ID NO: 424243 - protein, 387 aa, unidentified
MEVRMENTPSAGSNNDPVRCFVAIELSKSSWVLGFQTPLANQTSRYQVKACDAKALLDLIERVRGRVARELVRPVEVMSCYEAGYDGFWLHRVLEAHGIHNHVLDPASLQVNRRARRPKTDRIDADRMVRALIRHLRGEPEACSVLRVPSPEQEDARRLHRERGRLIAERVAHVNRVKGLCATQGIYDYEPLRGDRLKRLEKLRTGDGRALAPRLKAEIVREIKRLEVVLEMIATVEAERDAILKEKKSTHLNADKIKMLAKLKAIGAEFSTTLVGEVFYREFANRRQLGSYVGLASSPFCSGSLDRDQGISKAGNPKARTMMIELAWTWLRYQPESALSRWFRERVGNLKGRPRRIAIVAMARKLLVALWRYLQTGVVPIGAELKA

SEQ ID NO: 424244 - protein, 340 aa, unidentified
MTITTVGIDLAKNVFAVHCVDQNGKTVLVKPKVSRAALPELIASLPPCVIGMEACSGAHYWARVFRQYGHEPRLMAAKFVSPYRMAGKSGQNDAADAQAICEAVRRPHMRFVPVKDESQQAMQCLHRTRQGFIEEKTATYNRLRGLISEFGVIAPQSTDALRHIVSEQKNSLPLQVQQCIDDLLEHINRIEDNIAEYDRILSRMAKTDHRSQRLMELKGIGPTTACALVASIGNAHDFKNGRQLAAWLGLTPSQYSSGGKSKLGRITKAGDSYLRTLLVQGARSVLIGAEKRTDSFSRWVCKLVERRGYWRAVVAIAAKNARLCWASLHYGDDFRLYSAS

SEQ ID NO: 424245 - protein, 345 aa, unidentified
MKITTIGIDLAKAVFQVHGVDERGKAVLRKQLKRKDIVKFFANLEPCLIGMEACGSAHYWARKLSELGHTVRLMAPQFVKPYVKTNKNDRNDAEAICEAVGRPNMRFVPVKTVDMQAVLALHRARQGFVKARTAQANQIRGLLAEFGMVIPKGIGHIAKRLPEILEDGENALPGMMRELLERLGKNLKEMDKQVGELERQIKLWHRDNEQSRKLEAIAGIGPITASAFVASVGDAKSFKNARQVPAWLGMVPRHDGTGGKARLGRISKRGDVYLRTMLIHGARSVIAQIERKPDQADEWLKKLLARRNKNIAAVALAARNARIAWALLAHERSYECDYVATRPAA

SEQ ID NO: 424246 - protein, 408 aa, unidentified
MNTLYVGIDVSSKSNVVYLMLPNGDKHSNFSVANSREGSTQLVKRIHSALISHSLDTVLIGLEATSVYGDNLVYFLREDATLAPFNRKIHVLNPKQVKKFHDAYNDLPKNDYVDSFVIADCLRFGRINKEVYLGDYRYKALQNLTRARFFAVQNLVKEKQRFMNVLFKKYSTMTQEKVFSDTFSTTALAVYDEFDSAEALANMDLHELTNFIIEKGKNRFPDPDAVAKAIQKAARSSYRLPKTVNDSVNQVLSISITSMKALESQIKEFDKAIKAQMELLPNVLISIPGIGPVYSAGIMAEIGDINRFDNQAALAKYAGLAWKQHQSGSFEAEVTRLIPSGNRFLKYYLCEAAFSLVRCDKEYSDFYHLKYKEVNRCQHKRALALTARKFVRLVFRLLKDNRLYRPAK

SEQ ID NO: 424247 - protein, 394 aa, unidentified
MKLVGIDVGKNSHHFCVMDKETGEFNVTPTSFSNNKEGFDFLINSLKPYSKKSILIGMEDTGHYHVALLKFLLSNGYPVALINPKTTDLTRKMEGGITKNDKLDTITICDVLDTPERKKQYRITKVDRFDLYEKRQLTRHHHNLKEELNVYCNRLQKSIDLVFPEFNTLFSSKYSIVYMNLLKTFGSAEAIASTDIRTIRKCFEIKGRGNRISLTPEKLKECAKNSIGISSEVETIQIKHLVSQITLIKEQIAEIDKKIEEFSITNNSPILSIPGISHFSGTSILAELGDIGNYSKPSQIIKFAGVAPYHYESSQYNAQHTGITKKGSKYLRKTLYQIILTVINNNPVFKKYYRLKISQGKGHRCAQGHCIRKLLRIIYHLLETGQSFDPALLR

SEQ ID NO: 424248 - protein, 352 aa, unidentified
MTSTTILAIDLGKYKCVSCAYDRATTAAEFRTATTSRAEVERLIRAARPAVVVIEACTLAGWVSDLCGELGVPVKVANTAAEAWKYKHAKRKTDRDDALRLAQLEALGQLPTIVVPAKAVREWRALIAHRQSLVTQRVAAQNRIRAVLVGQGLPAPRGAKAWAAAGLAGIAQFARPLADCAPDELWRGLLELALTAYRQAEELVVAAEAKLDEIGTADARVRLLDTVPGLGPRTAEAVVAHLDDPRRFKSGKQVSAYGGLVPRQFQSGEDDRRGHITKRGPSVLRKLLVQCAWCMLRYNRWARAVFDRLSRGKARRKQAVVALARRVLVRCWAMLRDNQPWRADPAPAATAA

SEQ ID NO: 424249 - protein, 370 aa, unidentified
MDKTFYIGLDVHKASISVTVAEAGRDGAVRFLGAIPNTPTDIAKLARGLGKDGHRLEFCYEAGACGYGIYRQLVGLGHGCLVAAPTLIARKAGDRVKTDRRDSEKLALQHRFGDLTAVWVPDPVHEAIRDLVRARMDAVMQLMRARQQCLAFLLRHGRIYGPNRKNWTLMHRRWLAGQTFEQTAHQIVFQDYVEAVWAAQNRRDQLEARITSMLPDWSMASLVDALRAMRGVDLITSVAFVAAVGDITRFESPRQLMAYLGLVPSEQSSGGRIRRAGITKAGNGEARRMLIEAAWSYRYQPRVSQGKTDIVVRQPKAVRDIAWKAQVRLCERYRKLSAAGKKQTVVVAAIARELCGFIWAIGKAMVPAPP

SEQ ID NO: 424250 - protein, 358 aa, unidentified
MEAQGKKIDFTDQNIYAGFDVHLKSWKVTIMAEDVVYKTFTQPPRPEILYNYLKEHFPGGTYYTAYEAGFCGYWIHDKLVSFGIKSMVVNPADIPTTDKERVQKEDKRDSRKIARSLSNGDLTPIYIPSIKTQIDRSLLRTRAMLVKDLARYKNRIKSFLYFYGISIDDAFFNPQNHWSNRFMSWLESIDMGEESGKEALHVLISECKNLRASILNVTKQVSRLSQTENYREQVILLRSIPGIGLLTAMIILTELEMINRFRNIDKMCGYIGLVPSTKSSGEKERTGDITPRGHNVLRTAIIESSWTAIRNDPSLVKSYLSYIKRMDSNKAIIKIAKKLLSRIRFVLTNNKPYICSMV

SEQ ID NO: 424251 - protein, 311 aa, unidentified
MASFLGIDVSSLSLDALVRPQGIKISVRNDPAGFEELVKSLRGLSIKRVLLEATGGYERDVMRFLQDANYKVIRVNPKRARWFADSLGIKAKTDAIDAAVLAHFAEVIPDKPTLKTSPERALLRELLQQRDRLVQQRDDDRRRLKQAQSAMVAIFLKTNLQHFASQIKLVEQAIKRQAAVLNDERIAKLDEVKGIGMVTATKLVALLPELGHVESREIASLVGVAPFNHDSGKSVGKRFISGGRFEVRRALYMACLVAVKHNPTLKARYEALRGRGKLAKVALVACMRIFIVRLNAMLRSGTPWRDDLPQP

SEQ ID NO: 424252 - protein, 349 aa, unidentified
MNSTTVAVDLAKNVFELAAADGQWRIVERHRLNRARFSRFFVHRPPCQVVMEACGSAHYWARRIRAEGHSVRLLPAHDVKRYVGRSKTDRADAAALIEAARSAQIREVPIKTVEQQQLQFLHRLRSQWLSTRQRYLSTLRGILREFGVMIPLGASAAKTQVALALAQADSDVPQGLRPALAEKLREIAPLEEKILSVERQLAALTRADERAQQLREIPGVGLLTSTALLSSVGDIQRFPSGLHFACWLGLTPTERSSAERRRLGKISKQGDVYCRTLLVHGARSALLAAHRTQRAGKPLDRLRRWALNCERLRGHNKATVALANRLARIVWATWKYERAFDGNWGNQAA

SEQ ID NO: 424253 - protein, 316 aa, unidentified
MNKDTEIIVGIDISKKRLDIQIQEDGQYFTCGNDIIDIGKLVDKLCSIHPTLIVLEATGGYEKGLVSALVEAKLPVAMVTPAWVRYFARSSGTLAKTDKIDARMLVRYGRANHPPIVILRSEIQERLSVRMARRSQVSLALISEKNHLSTITYPDVKVLIEASIQNLEQQIQQLEEMIAEIIDQNPELKNNEKIICSIPGAGKITAAILLADLPELGTLDHKKIAALVGVAPFNRDSGYYRGKRRIKGGRQSIRKVLFMTALTAMKWNPVIKEFYERLLARGKVKKVAVIACMHKLLTIMNAMVRAQTLWRPVFSS

SEQ ID NO: 424254 - protein, 345 aa, unidentified
MPIVGGLDIHRKQITFDYLDTATGQVERGQIAPADREHVRAWLGRFAGRDEAAFAVEGCTGWRYIAEELAAAGLEPHLGEPADTAALRGRKRHAKTDKTDARHLRTLLAEGRLPGCWIPPEHILEYRALLETYHDLRAEHTAWVQRIHAVFFHQGAPRLGEGALRTEPGLAGLRAAAAAHLSPAGQLQVATALDMLAAVEARMGPLRRQLLHAARHLVGAKVLAARLYGAGPVTALALTCWLGGAGRFSSSRKAVRFTGLDVTVWSSDRKGPPGRLSRQGPPVLRWAVYEAGKTHGRTPAPDHGYYAAVKDRKNGKQAALSEARKIVRQACHILTELGDDALTIA

SEQ ID NO: 424255 - protein, 326 aa, unidentified
MQGKVPSQRSAAAPVYIGIDVCKARLDVHIHPLGESLVVPNDAGGLKRLKKILARYDVVIVVMEATGKFHRLAHRSLHASGFKVAIVNPLRSRRFAEAIGTLAKTDRVDARMLALMGESLKPEALEPTPELMETLQELARGRESAVDSKTAIVNQIQTSNSKVLVRELKRQLSAVQTAIENLEAELQRQIDADPVLARRFEILTSIPGIGLVAAVALIVELNEIGRLSSKQVAMIVGLAPIARDSGQKTGTREIRGGRKHLRTALYMPANSAKQHNPDLKIFHDRLIKAGKLAKVAITAVMRKLVVLANTLVHEDRLWQPRAVIAK

SEQ ID NO: 424256 - protein, 423 aa, unidentified
MTNSLFIGVDVDMRGNQFCVMNFDQKVFFNLKFPNTPDGSAQFVQALKSVYEKFHFDKLFFCLESTGIYSFHIACFLSSDEFLNSFNSTVYEENANNIKQYKKSFTDREKTDPGDSWICADYVRVGRCKNLQPFKGSQFIALKRLTRQRFHISNNLVREKCYVMNNIYLSFSGLLVVDEKPFSNMFGATSTALFEEFTSPDQIAESSLENLLHFISVKGKNLVKNPKDKISILNKAIRASYRLDQTAYDPINSAIASSMNIIRALQSQLKNVEKAILKTIDGIDTNSYNVLLSIRGIGKVYAAGILAEIGSIKYFKHNSNLAKYAGLFWNRSQSGKFEKEDKSFSRCSNAYLRYYLVEAAASCIRNNFPFLKDFYDLKYNEVKTHQHKRALVLSARKLVRLIFGLLHKNQYYTPINSDQISKI

SEQ ID NO: 424257 - protein, 373 aa, unidentified
MSDYSAFVGLDVHKDTIAVAVADAGRMGEVRFWGEIANTPDAVGSMLRKLGGRHPLMHFVYEAGPCGYNLHRQIMLTQHHCEVVSPAQTPRKPGDRIKTDRRDAIILARLSRAGELTSVWVPDTIHEAMRDLIRLRQAMVKDLRAARQRTKSFLLRYGRVFKGTSWKRSHRVWLGNQSFTHPAQQIAFQSYLNAVDQAQARRDDVDVQIRIFAADWAMAPVVEALQALRGVAFITAVTVVCEVGDIRRFDKPRQLMAFLGLVPGERSSGETRRQGGITKAGNVLARSVLIEAAWSYRTPAKIGAQMMLRQEGIPQAAKDIGWKAQVRLCGRYRRLMARGKKSALAVTAVARELVGFIWAIAHITEPTGAEGAA

SEQ ID NO: 424258 - protein, 404 aa, unidentified
MRVREKIWVGIDVGKASHHACAVDADGKVVFSTSVANGQAPIEALIARAEKAGAQVVWALDMISGVAGLLLALLVDGQREVRYVPGRLVNRMAGAFAGEGKTDAKDAKTIAETARLRGDLVQVTSPDPVVTDLQVLTAQRADLMNDWVRGVNRLRALLTSIFPALERAFDYSARSPLILLTGHQTPAGLREAGASGVETFLREHGAWAKGIPAMTRTALAAASEQSVALPAEAVTAPLIARMAADLLELDRQIKDLDKQLTHRFGEHRQADKITSIPGFGPILGAQLLADTGGDLKATFRTPARLAAYAGLAPVPRDSGRVKNNLHRPKRYHRGLRRVFYMAALSSIRPDGPSRTFYDRKRAEGKIHTQALIALARRLVDVLWAILRDNREFQPNAPLKVPAAA

SEQ ID NO: 424259 - protein, 424 aa, unidentified
MKVTYQTCCGVDVHKSFLVATIVKTTGGIEPSYQKKRFSTFNNSILEFKQWLLDNHCHDVCMESTGKYWVPVFNLLEDKINVVIANPKWVKAVKGNKDDTKDSKWIGDLFRLGLVKGSYIPCKKVRILREYTRYRYKLVSCRSSEKNRYQNALTVCNVALDSIVSDIFGKSSTSIIDYLLEQSGTSINHEEIASKLLRSLKSKEDAVIESVEGYQMTDAQKYRMRLVRAHMDYITAEINDVDKMIENMISSNPDFENAVQFLCTIPGVKRDSAITIISETGTDMSQFSSSKRLCCWAGLTPGSNESAGKKKSVRITRAGVYLKPALVQCAHAAVKSDKSPYYKKKYESLVKRRGKKGAIIAIARMILTAIYQMLSTGEQWNPSDLYKIDMPVALVEKQKAKAIKQAKKLLQREGLLPPDEPLAS

SEQ ID NO: 424260 - protein, 304 aa, unidentified
MNGIGIDVSKRQLDVGTTDGETLQVCNNRSGFSELDVWLKKRPVSQIVLEATGGYERPVLDFLHAVGHPVVRANALRARRLAQGMGQMAKTDRLDAYALAQMAALVKLPAYQPLEPWQQKMREFVRARRQAMHALTIARQQLEMVGDRELRRLLQANITRLQTLVERLGKQIAEQVTQQPQLAVLKSMKGVGPGLQAVLASYLPELGKISGKVIASLVGVAPMSHDSGTMRGKRSIHGGRAEIRQVLYMASMSAMRHEPQLRDFYQSLRARGKEGKVAIVAVMRKMLVILNARVRDAENGLVPA

SEQ ID NO: 424261 - protein, 412 aa, unidentified
MQTLIERGCGLDVHQATVVACLLIVRKDGKVQKQMRTFGTTTRELVGLREWLLSEGCTHVAMESTGVYWKPIYAILEGALEIVVANAQHIKKVPGRKTDVKDAEWIADLLCHGLLRSSFVPPKPIRELRDLMRYRRKLVESQAAERNRLLKVLETANIKLANVATDVFGMSGRLMLRALIAGKATPQEMAELAKGLLRKKIPELQLALEGKLEEHHRFLLELQLQRLEAAEKDLAVLEQRIRQMLEPYAAQLALLDEIPGVDWTLAAVIIAELGVDMTVFGSVSQLASWAGVCPGNNESAGKRKSSRIPGGNVYLKSGLVEAANAAARAKGTYLRDKFFRLKARRGYKRAVVAIAHKILVAIYHMLSQRVSYNDLGDLYLDKRNKNHLTRNLVHRLERLGYEVTLTPQQKAA

SEQ ID NO: 424262 - protein, 342 aa, unidentified
MDATALTPVGLDVAKNVFQLHWVEPATGEVRNVRIKRAKLLEHFANRGCCLVAMEACGGAQYWARELIGLGHQVKLLPAKAVKAFVTGNKSDAIDARAIWMALRQGQIKPVAIKSEAQQAVLALHRMRQQLVKVRTMQINELRGLLTEYGEVFARGRAPLARGIAAALERLTARLPQVVLDTLLQQWQRVGQLDEQIGQIERRLQSLYRQDAAAQRIARIPGIGLLTATAASAAMGQASAFRSGREFAAWLGLVPAHTGTGGKTRMLGISKRGDTYLRTLFIHGARSVVTHTKHPDDWLRELLARRPRNVAVVAVANKMARTAWALLRYERDWQPGWPSQRA

SEQ ID NO: 424263 - protein, 334 aa, unidentified
MQNITLIGIDLGKHSFHIHCQDKSGKALLRKKFTRTKLMQFLATCPPSVVVMEACAGAHFMARCISDFGHETKLISPQFVRPFVKSNKNDFVDAEAICEAASRPSMRFVQPRTETQQAMRALHRVRESLIRDKVKTTNQIHGFLLEFGISLPIGDAVIKRLSLVLAEHEIPEYLSRLLVRLHTHYFYLVEQIAELESELSQSINADDTAQRIMTIPGVGPITASLLSSQLGDGKQFSCSRDFAASTGLVPRQYSTGGKSTLLGISKRGDKNLRRLLVQCARSFIMRLERKHGKLAEWVREQLNKKYSNVVTCALANKLARIAWAITTQKKEYQA

SEQ ID NO: 424264 - protein, 337 aa, unidentified
MEYFAGLDVSMEETHICVVDRDGGMVLETKATTSPEAIAAGLAKAPGCQRIVFETGRMAPTLYHGLDALGLPVTCIESRQAYQALKSLGTHKTDRNDARGLAHLARTGFFKPVHVKSLPAHAVRALIIARKKLVGQRVTLENQIRGLAVVFGVRLPRGLSPAFAEQAISGSEGIAGLSGAMRGLLAARNAVLKAIAAINGDLKHLARSSEACQRLMTIPGVGQLTALAFVAAIDEPERFRRSRDVGAYLGLVPRRYQSGEIDYTGSISKCGDRRMRTLLYEAANVMLTRYKPPLKLKDWALAIAKRSTMRKARVALARRLAIIMHAMLRHGTEFRTA

SEQ ID NO: 424265 - protein, 357 aa, unidentified
MESTTVGIDLAKQLFSICVVDVNGRVVQRKDLNREALAEWLVHLPAGTAVAMEACSSAHHWARVCRQHGLAPKLMAAQFVKPFRKSGAVKNDRNDAEAIATAARQGNMRFVSMKTEDQQARLSWHRAREGYKKDALAAMNRIRGLLAEFGIAINKSGVALRRALAQLDSYTLPATLVELIRLQQRHWEAIEDGLAACDAHIKVQVDQDERCIRIRALTGVGPITADAVVATLGNAADFRNGRQCAAWMGLTPSQFGSGGKVVLGGISCRGDTYLRTLLIQGARSSLQRAKVTPADKMTAEQIWIVQLASRLPFGKVIVAIANKHARQIWAMLARGEAYDPEAWLKHPMVHRGCVRTA

SEQ ID NO: 424266 - protein, 417 aa, unidentified
MWKKVDPLAMFCGIDWSKRHHDVAVVDQDGNLVAKRRIGDDAAGLTELLTMLAELGDHEQDPVPVAIETPRGLLVAAPCHRAARVCDQPDGGGPLSGRWTPARSKSDHADAMVLANILRTDQQRHRPLPADSELVRSVAVLARAHQDATWRRTRAVQELRSLLREYYPGFLAAFAEKGPANLASADARAVLAIAPTPADGVRLTRPRITAALRRGGRQRNIEAVTDNVHRVLRQPQLRHPALVEQAMGQQALALLAMLNAACDGADQLGQATAAAFRQHPDYGIVTSFPGLGELTGARVLAEIGDDRTRFADARSLRAYAGSAPVTRASGRSHIVTHRRIKNDRLAAAGFNWAFMAITHSSPARAHYDRRRGVGDGHPAALRNLFNRFLGQLYHCLGTGQIYDPVKAFGTHQPAVAA

SEQ ID NO: 424267 - protein, 387 aa, unidentified
MPQPNDLSRSLVALDQNSTIIAVVELSQSSWLVGGMLPGIERQPRKKLEPRPERLLAVLHRWRDEAVKAGRTITRIALAFEAGRDGFWLARWLAARGVEPHVIHPSSVAVSREHRRAKTDRLDTELLKRGFLGWLRGERGHCSMVRIPTLAEEDAKRPNRERECLVKERTRLVNRMKGTLARLGIRNFRPTLRKAAEHLAALYTPEGSPLPPNVSAELERDIARLGVVIGQIKQLEEARRQRLEEEPEHERHAMIRRLARVVGIGIETADMLVNEVLSRPLRDRRAVARYAGLTGAPDESGAKRREKGLAKAGNARVRRGMIPLAWRFLRFQKDSALARWYQARTADRRAGTRKTMIVALARKLLIALWRFVTTGETLEGVVLRPAG

SEQ ID NO: 424268 - protein, 467 aa, unidentified
MKLKRRRSPGKPRVSPTLLEHLNPNVAGIDCGSAEHVVAVPPDRDPTAVRAFSTCTTDLLQLADWLTACRVTSVAMEATGVYWIPIYEILEARGFEVLLVNARHFKNVPGRKSDVSDGEWLRELHSVGLLRGSFRPRADIVALRTYLRHRQTLVETASTCVQRMQKALVEMNLQLPLVVSDITGVTGLRILRDIVAGQRDPAHLAQHRDPRCHATETEIVAALTGHYQPAPLFVVQQHLEAFDTCQRQIAQCDTMIEDHLRTVTAPIPAPGALLPAARRPRRTRKNNDLPFDPRAPLFHLTGGADLTQIDGIGPLTALKLISEIGTDMTCWPTEKHFTAWLTLAPRNKITGGRVISSRTQPSANRAASTLRMAAMSLGRTQTALGAFYRRLAARLDKPQAITATARKLAILVYRVLKGELVYQDPGAANYDAEQRARVLRRLRQRASTLGFELVNRDTGEVLAAGVS

SEQ ID NO: 424269 - protein, 352 aa, unidentified
MSIIAFDSHKYYTFARVEDENGQNVQEYRIEHRRGNIAGFLGRQQPGSVVAIETIGNWYWIVDEIEKAGMRPVLVHAGKAKLMMGCINKTDKLDAKGLNMLQRVGRLPTVWIPPADIRDKRELPRVRMVFGNARTKLKNRIHSVLDKYGLQDEFEDISDIFGVKGIQRLNRVIEQLPEQTYCTTVLLLEHLEQTQQKIDCIEGRMKELFEETPQSILVETLPGVGFILAVVIIQEVGNIGRFSSAECFASYCGATPRVHASGGKVRYGRLRPDTNHYLKWAFSEAGNSVALNSKRLPARHVSQLYNRIRHRRNHGKAIGAVARHLAEATYWMLTKGEAYRERGLLEVSSTGA

SEQ ID NO: 424270 - protein, 352 aa, unidentified
MEIGVDTHKRTHCLVALDDEGRQLGTKAVANTPEGWTEALAWARGKQLQHHRCWGIENGGSLGKGFAQFLLAQGEADVREVSPQRTAQYRRRGRTQDKTDQADALAIARLLLAEGAHLPTIPRDDGSTELRLLSDHRDNLLVDRTRLINQLHAQMLQIDPGYQARSGALTARRGLLYCRDLALPEADGVTRTRLLIVGQLVGQILRLEEEIATITAALGERVRASRTPILALCGIGEVIAARLLGELGTVLRVPSAAALAALAGIAPVAVSSGGHGGYRLNRGGNRQLNRVIHLMALSQRRCDPRAQAYYAKKRAEGKTRRAAMRCLKRRLVDVLYRCFTRGTAAQPTVAAA

SEQ ID NO: 424271 - protein, 411 aa, unidentified
MLYVGIDWADDHHDICCTDDTATTLVQCQIAHNTEGFATLHAQIAKHQTNPAAVLVALETTRGLLVYDLLRQGYQVYAINPKAVNRYKDRHVLSAAKDDRLDALAMAHLLRTDRHRFKPLAPAPAHYRLLDRLCLDLRKLIDEKTRLSNQIASCLKEYYPQAVGLFRDVASPIALAFLQAFPDPDTVRQTDRSAFAAFFRAQHYTHPQRVDTLYERTHAPTPEADPVVVQAAKMRLAALVAQLAVVRTHQGTYEHTIQTILEEVPEAQPLATLPGIDKRLVPELVAALGPNRPEEPKRFAAASDLVKLSGCAPITRASGKRRTVLWRRACDKRLRRTFYDWAMASLSWSRWARAYYDHHKAQHQAHATILRGLGQKWAKIVYAVWSSGDAYDEARHIEQLKRHEVVWALSL

SEQ ID NO: 424272 - protein, 391 aa, unidentified
MIFVGIDVAKDKHDCFITNSDGEVLFKSFTISNNLDGFNELYQKIESVMEDVSKVKVGLEATGHYSYNLLGYLLDKGLTTFVINPLHTNLYRKSLSLRQTKTDKVDARTIASMLMSDVNLKSYSDTSYHNEELKSLTRYRFDKVKERAKLKISISRLVCILFPELEKLVPTLHQNSVYELLYEFPGARQVANAHLTRLANLVSTASKGHYTKDTALAFRETARTSIGSNMPAKSLELKHTIKLIRELDAEIEEIENEIKTIMDEINSPILSIPGISYRMGAMIIAEIGDFSQFDSPDKILAYAGMSPSTYQSGQLDNCHSRMEKRGSRYLRYALYNATTYVCLWDPTFKAYLAKKRSEGKHYYVALSHATKKLLRVIYQLEKTGQQYIKTV

SEQ ID NO: 424273 - protein, 404 aa, unidentified
MIFVGDDWAEDHHDIHLMDSDGARLASRRLPEGLTGIRQLHELVAEHAEEPDQVVIGIETDRGLWAGALAAAGYQVFAVNPLAVARYRDRHHASGGKSDAADAKLLADLVRTDRHNHRPIAGDSLDAEAIKVLARAHQSLIWARTRHTNAMRSALREYYPAALVAFEDLAHGDALGVLGRAPTPEQGAHLDLPAIQSALKRGGRKRNIATRAREIRAALRSEQLAAPAPVAAAFRATTRAAVGIIAELNRQIGELETSLAQHFETHPDADIYRSLPGLGVVLGARVLGEFGDDPNRYTDAKSRRNYAGTSPLTVASGKKRAVLARHVRNRRLYDAIDQWALGAINNSPGARAFYDQHRAAGDLHHQALRALGNRLVGILHGCLRHHTLYSEHTAWAHRQTTQAA

SEQ ID NO: 424274 - protein, 369 aa, unidentified
MFEAETKTYGEEHPMESLKYVGLDVHRDTISIAVLDDAGKLLMQSILATHATTILDFVGGLSGRVHVTFEEGTHSAWLHDLLARRVARVVVCDPRQNALLKAGNKSDKIDARKLAELLRAELLSPVYHGQNSAVTLKHLSRSYAALTEDTTRVKSRIKALYRSQAISSKGKKAYGRRYRGEWLAQLTQAGMHRRAELLYEELDALLLLRREARRELILESHKHSGVKLLCTVPFLGPIRAAVLIARVQTPHRFRTKRQFWAYCGLALETRTSADYRFEQGQLVRAKKPVFIRGLNENHNHDLKNLFKSAATSAGAMPGPFHDFYENLLTKGMQPAMARLTLARKIAAIALCVWKKGEPFNAEYLKPQAA

SEQ ID NO: 424275 - protein, 324 aa, unidentified
MVSSYVGIDVSKATLEVAWAGKATTKQFRNTPGGRSALLSALQAACAPTGVQVVLEPTSTYHHHLVQALAAAGIAYTLSNPARTAAYARMQGSRAKTDKADAKLLAAYGASQQPKASPPPDEAQERLKALRRHKEWLDVQAQAARNRLEAAQHSPWTPPAVIQSLKRTIQDLQREAQETQEALDELVAQEERWQQEVELLDSIPGIGTQTAVLLISELPPVQSCTSPKQWVAFCGVNPAPRESGKRKTSQLSRAGVTQVRAGLYLPTLSSMRCNPLIRPFNQRLKAAGKLGKVRVMAAMNKLLHLCFAVLKRQTPFVPSLPSRP

SEQ ID NO: 424276 - protein, 358 aa, unidentified
MIVIGADTHKSTHALAAVDAGTGQVHAEREITADDAGHRQALAWAHELDSEIVWALEDCRHVSHHLERALVTAGERVIRVAPQRMGASRRGEREPGKSDQIDARAIARAVLKEGVERFPEAFLDEAAMEIRLLCDHREDHVHEMNRLTNRLRWNLVILDPALEASIPARKMDFAGQLEKVARRLRGMEPSARVRIAKEQVRRIRELSRESRQLKRELHALVAAHRPQLLAELGCSTITAAILIGQTAGAQRFPTDAHFARMAGVAPIPVSSGRRDRYRLHRGGNRRINRALHVIAITRGRWDPATRAYLQRKEAEGKSRMEALRCLKRLLARHFHHILLQPPSNPTPERKTPLAAQTT

SEQ ID NO: 424277 - protein, 353 aa, unidentified
MNDSTSIAWLGLDAHSKNCLLGHLDNHGTEIKWWQFATQPQLLIKHVQAIPATDKRLMLEESNLARWIAQLLKPHVQQIVVCDARRNRLISHDHHKHDKRDAFALARLLRLNEFKPVWQPTEDQRVLFKRIAKSYENAVQRQTRLKLQLKSLFQHWDLFPAGATIYSKPGRVTWLRQLPFDTLRSQALLLYELLDQALAGQSQFRRLMCQTGRQFPEIQRLSTTPGVGLVGSHLFVAYVQDPARFPKFSRLSRYCRLGIRDRSSDDKPLGYQQLDRQGIGTLKAIGYRAYLQAAKRRAGPVWDFYQLSLRRTGSTTHARLNTQRKILLTLWTLWLTGREFDPNQFSRAQPIDV

SEQ ID NO: 424278 - protein, 427 aa, unidentified
MSDKKPLELRVSVDVGYRRHSVAIGLPSGEVLEEFEIAHGPEGFQEFFLRIEKHRKEQDCGVAVAMEGFNGCARPLDSMVRRRGYRLYNINNLKLARFKEIFPGAAKSDRIDARKGLELFQLSDHLPLAKEVLQEVKGTPQANEVLKRLTRRRRRLVDERVRVISNLQTDLQAVCPGLLEITKDAGNQWFLNFLVGAATLPQLARLRPSTLLKIPAVGRKYASVIQDWQKRAHFSEEVEWVSEMIQEDAKRCLELEEKVKTLEAKIREVAQDSKIAKLLLSIPGFGPVCTTELAGEIGTVERFSKEGSLALYLGMSTLDNSSGKYQGTKAPKHVNIRAKAAMMIALDRHRKNVPESQRYYEKKRAQGKKHNQAIRALGRHLCRIIYKMLKEERDYQLRSEKGDTQARVGPRSCVKTKIRRPKISANS

SEQ ID NO: 424279 - protein, 337 aa, unidentified
MLIIGCDFHPGFQQVAIFDNGSGEYEEKRLQHREEAEQFYRSLAGQRVRVGMEACGQYPWFERLLEECGHELWLGDAARIRASVVRRQKTDRRDAEQLQELMREERFPRIWVPSLAERDVRQLLVHRHKQVQARTRVKNQLQALALGQGVQRKRKLWSQGGRMELEKLELLPYAALRRERLLATLDQLEAEIAELDRGVEQEARRRAAAVKLMTHPGVGPVTALALVLTLGPAGRFQNARQVGSYFGLIPSEHSSGGRQQLGHISKQGSSFLRFLLVEAGQSAVRYDAQLGRFYRRLAARKHRALAKVAVARKLAMRLYWMLRQDWTYAQLCKAVCR

SEQ ID NO: 424280 - protein, 433 aa, unidentified
MNASTSTPTTNFAAFIGIDWADKEHEIWLQPTDGSPARRSTLSQNPVAIQEWVSQLRQQFGGQLLALSIELSHGPLLAALLGVEFLVIYPINPKSLARYRQAFRPSGAKDDRSDAELLCEFLRHHYAQLKPWQPEDAQTRLLGGLTQVRRHWVDEVTGAVERVRANLKHYYPVILELFTDGLAQPMVVHFLQRWPNLKSLQAASQSELRKFFYGHNSRSAQLLDARLQLILKAKALTEDPAVLGIYQTDTLVIAELLGVLLKKIKEIQKQIAKLFAAHSDAFIFQSLPGAAQVLGPRLLTACGTQRERFAQAVALAQLSGIAPITVQSGQSEYQMFRFTAPQFMHQTFWEFAKCSIKYCLWAKAFVDQKIHNGMGFNAAVRALAFKWIRIIWRLWQNREAYDETKYLAGLRRAKPACVEPLITSVSSLDSALL

SEQ ID NO: 424281 - protein, 349 aa, unidentified
MSARFNSEIAVIGIDIGKNSFHIEGLDRRGAVVLRQKWSRGQVERRLANLPPCLIGMEACVGAHHLSRNLTSLGHDARLMPAKYVRAYSKGQKNDFRDAEAIAEAVQRPTMKFVATKTAEQLDLQALHRVRERLVSQRTGIINQIRAFLLERGIAVRQGLRFLRAELPRILATPRNILSPRMAHVIEDLAGDWRRLDERIEGLSSEIEALARRNAGCERLMSVPGIGPLISSAMVAAIGDGDAFSKGRDFAAWLGLVPKQMSTGDRTILGKISKRGNRYLRVLFVQAAWVVLIKPKSWDRHGLKPWLEAAKKRLHHNVLAIALANKLARIAWSVLAHGRAFETTKIQAA

SEQ ID NO: 424282 - protein, 433 aa, unidentified
MTPDSAAVRATKGKSMKPWTDITHYAGFDWARDHHDVVIVDRQGQIVADFRIEHSLAGWQQFRDKVKSYSSLAVAIETNQGASVDQLLSLDCVIYPVNPLSAKSYRERKAPSGHKTDRLDAWSLAEALRVDGQQWKALQPLDPLTQQIQLLCRDEISLIEQRTGLINQLQQSLVEYYPAALQAFEDWTQPYCWDFIIQFSTPEKLVTAGRRRWEKFLHTQKLWRPETAAKRLEIFQNARQFCGSAAVTSAKSLLALSLAKLLNALQLQLDQYRQQIESLFQQHPDHDLFGSLPGVAQTLGPRLLGEIGGPPQRFADTEALQCVAGTAPVSFQSGQIHRVHIRYQCNKVLRHTVHLWAHCATQVCPWAEVYYRQKRAEGKSHACALRCLGQRLLKILWRMIQTHQPYDADLHARNQKQHGSWVLALMKPEPKAG

SEQ ID NO: 424283 - protein, 338 aa, unidentified
MVYGAIDLHMRYSQIRIVDAEGHVVRDGRVPTTGERLVAAFGDLGPMRILLETGTESEWVAQALEATGHTVIVADPNYAPMYGELRRRVKTDRRDVAALAEANRRGWYRATHRVSAQQREIRHVLRSRRQLVQMRSGAVSVVRALLRQAGYRLASGSVEGVPARLAQLAVPAALAATVTPLGRVIAQVSETIAEVDARLATYAAADPVVQRLRTVPGVGVVVGLTFRAFVDDVHRFARAAQVSAAIGLVPWEDSSAERRHRGHISKAGPRELRSLLVQAAWACWRSHGSAALRAWVERLAARRGRRIAVVALARRLSRILFAVWRDHSVFHAAQLAAA

SEQ ID NO: 424284 - protein, 372 aa, unidentified
MFYLAIDQHSKQLTVNLRNDQGDVVLRRQVSTKPNRVTAFFQQLADDCAAEGGYVAIVEVCGFNDWLLALLAEPWAKCRHVLLVQPEKRGKQKTDRRDADQLGQILWVNRQRLLAGKRVQNVRQVQLATADEAMDRQLTSFSRRSKQRRTRVINKVWRILHKHNLQHDLPAKGLQTKKARQWLVKLELPQIDRFELDHLLAEWKLLEEQLKAISQLILERFTSQSKAGLVATIPGLANYGALAVASRVGDIERFPRGASLANFFGLAPGCRNSGNTQGRTGRITKQGSNMVRFLLGQAVLHVLRKDPWMRHWYQQVKRRRGSSVARVAVMRRLATILWSMLKYNMPYIRGGPEEFQKALKACRELQRDMVIA

SEQ ID NO: 424285 - protein, 314 aa, unidentified
MNRTSYYAGIDVSKDYLDLHLLPSEQAERFTNDAAGHHKLIGVLQKHRVHLIVLEATGGYERAAVSAMVQAGLRVHVAQPQIIRAFAVSMKIRAKNDDIDSFVCARYAQDRDKQLPVITSIDPTQQTLQALLVRRSQLVEMSTMEQNRLQQVSDQQALQSVKRSLKFLQKQIQRAEKQMDQLIQQDQKLREKSKTLQETKGVGPQTTRVLLACLPELGSTSSKRLNALVGVAPYAADSGGHKGARYIAGGRKIVRNGLYMACMSAVHTNPVIAPYYKKLLERGLAHKTAMMACIRKLLNYLNEQLRPPKLTTPP

SEQ ID NO: 424286 - protein, 415 aa, unidentified
MYYVGIDIAKNFHVVSVIDDEEIKVINKPFKINNDAKGFEKLLTILDSISLDKSEFTIGLEATGIYGENLQEFLKSKAYLVKLLNPFQTTRYREQITLKKVKNDEIDSLVIALLLKSGKFSSGYITDDEYQSLRTLYRNRATIQADMKDVKKRILTQITVTFPEFENFMKPFSVSGLALLDKYPTAHHYKHSSVDRIMKLFRHIQGNNFTQSKALQLLELSKESIYSGKAKDARAIAIRSTIRLLQMYLSELDIIEAEILSLLQNSSVKTTVDEVGIEIQKTDTLLHNLKTIPGVAEKTIAALISECGDLTRFPSIPKFIGYLGLFPTENSSGNSKYIGHLSKRGSPLAKHALYMSAVSCLIHNTQLKQLYDTKRSQGKSKKEALIAVSRKIATIIYSIFKYNVPYDPNRVFAKS

SEQ ID NO: 424287 - protein, 343 aa, unidentified
MGDVITIGLDIAKSVFQVHGVDADGAVVIRKRVSRAKVLEFFAAVPRCLVGIEACPSAHYWSRKLEVLGHTVKLMPPSYVKAYLKRSKNDANDAAAICEAVTRPSMRFVSTKSEQQQSGLMLHHSRRLLVRQRTMLSNAIRGHMAELGIISAKGRNGTGELLEVIANAKDNCIPAAARFSLEVLARQYIAIATEIGVLEKRIHAWHRSCEESRRLEEIPGVGPIVATALIAEVGDWKAFASGRSLAAWIGLVPKQHSTGGKERLGGISKQGNRYLRWLLVAGAMAVIRYARRHGTKRLWLTRMMERRPIKVAAVALANKIARMAWAIIVRGERFREPRLLLAA

SEQ ID NO: 424288 - protein, 368 aa, unidentified
MKVIKYIGLDVHKNSISIATADQGRNAEVRYYGKISNDMDQLMKVFRKFISHGYELRCAYEAGCCGYHIYRFLTGNAVHCEVVAPSKIPRKSGDRLKNDKRDSLTLARLHRAGELTKVYVPNEEDEALRDLVRARADAQNAHKRAKQQLAAFLLRYHIVFHGKSKWSKAYFNWLVTISMSHPAQQITLQEYIDTVNMCNNRVIRLTEQIQTFSKQSRLYPLIGALQSMRGISLVVAATVASELGDISRFKHPEELMAYLGLIPSEQSSGDKQRKGSITKTGNGHVRKALIASSQAYRLPARKTQEILKRQEGVPDNICDISWKAQLRLCSRYRHLISRGKNTNVAKTAVARELAGFVWAIATELPLAA

SEQ ID NO: 424289 - protein, 416 aa, unidentified
MKTCGLDVHKDMIFCAIYDGKESVVKKYDTFTSDLEAMCDDIMSEGVDTVAMESTGIYISAVRTVLRHRGMRAVVVNPYLIKQMPGRKSDVKDSVWIATLMYNRMLNDSFLPNGALAQLRVYTRDYRRSVQRRDSTLTLVDQLLVGMGIRLSSCLSKITTKSFRRVAEAVAGGETNAEKLEKLVHGCLKHKRDGTLRKALAGCCEGQDLWRLKRRLKELEMYETQIDDALAHMEELADTNYREEVALLCTIPGVSRISAMCVIAEIGTDMSQFGSSARLAGWAGLRPRNDESAGKYKSTAITKGDKHLKAMLVQCAWGAIKAKNSRFACVFSRLLSRKSVKKAIIAVARKLLATIFAMLKNREQYCPQKTGRSLTQTQIARLLAKQVKQYERLCQQAAQAGLAVAVQPLTNTSTTA

SEQ ID NO: 424290 - protein, 427 aa, unidentified
MNYTQNHKISQITPTTLVIGIDVAKDKHVARAQDDRGLEFGKRLIFENRIHGFELLLDWAKRHAKENNKDHIIFGVEPTGHYWLNLAYYLTAKDNDFVLVNPMHVKKSKELDDNSPTKNDTKDARVISQLIKDGRYSVPNLLDGVYAELREGVKVRDQLIQQLMITEGRIQNMIDRYFPEFFDVFKEWDGKAAFCTLKLFPFPAQIKEMTPEEVLRQWKPFVQRGVGIKRATKLVETAKKSIGISIGLHFAKREMNNLLNQLELFKKQLEDLDQELEDVVTTVPGANEMMDIKGLGVATVTTVLSEIGDLRNYKHPQQLVNLAGLSLRENSSGKYKGQTTITKRGRSKLRRALYLAVRPLVAHNPTFKALHHYYTKRPEKPLKKQQSLIALCCKLLRVLFVIGKKQCPFDGTKLLQGIPQENTLQAA

SEQ ID NO: 424291 - protein, 433 aa, unidentified
MGSDTVWICVGEHLSEQTVRTFGTTTAQLRASAEWMESIGVDTVALEATGVYWVAAYEIYDEYGLRPILINSQSIRNFNGMKKSDFIDCQWIQLLHTFGILQASARPESKMIELRGYVRQRRTLTEQCSEQIQRMQKALTLMNVRLDQAVTDITGVTGMRILRAILKGERDPAKLAALRDAACAKSESQIAEALTGHWREEQLFVLEQTIRLWDFCQGLMRECDGQIEALLKTLPVKTEETPKAPRSKPRKNQVTFDGRTLLHQRLGMDLTQIKGLDLLTLLTVFSESGTNLTHRYPTDNHYVSWLGLAPGTKKSGHRVLSSRSRRTTNRAATALRLAGQSLLKSPNSELGAFGRALRARIGAEKAITAVAAKLARRIYLSLQTGHVFEDRGASYHDEQHQHRNLTSLRKRARRLGMQLVPLPERAITSANPH

SEQ ID NO: 424292 - protein, 335 aa, unidentified
MTLYCGIDLHSNNHVICVIDDKDKRVFETKLGNHAELTIRALLKYKKRLKAIAVESTFNWYWLVDAILEAGFKVELVNTAKVVQYSGLKRTNDRYDAFHLAHIMRLGILPTGYIYPRSKRGLRDLLRKRMQLVQDRSSHIIRYKSQIQMHTGQTIRADFIKAKKYQAPILGDANVQLALQSHLVMIRALSVQIKLLEKSILAQVEPNAAFMHLKTASGIGDILAETILLETGDISRFKSPGNFASYCRCVDSRRESNGKKKGENNRKNGNKYLAWAFIEAANFAIRRSEKAKRFYDKKSKATNIIVARKALAHKLARACYWMMRKREDFNEDLIF

SEQ ID NO: 424293 - protein, 430 aa, unidentified
MKSTQNKKIEQVKETSMIVGIDVGSEKHYFRAFNWRGIELTRKPIPFSNSMAGFDMFHSAVIELMENNHLEEALVGFEPTGHYWFNLGQFLSGKNIKFVMVNPHHVHKTKELDDNSPSKNDRKDPHIIANLVKDGRYFYTYMPTGVYAELRNASNRRFVLVEEHTRAKNRLQKWIAVYFPEYKGVYTHIDAKGGLMVLKKAATPDDIVKLGVDGIQQIWKDAKLRGSGFKKAMQIVTAATNSIGLKEGLEEAKMELLDLIEDYELQTKRIERVNDLIKNLCSQIRYVDKLLEIKGIGITTVAGFIAEVGDITRFGNAKELQKLAGLELVSADSGKHNGRTKISKRGRKRLRYLLVQAAVSVIGKNDEFKEIHQYYTTRDNNPLKKMQSLIAIACKLIRVFHVILTKGVDYDASKMLGDIRHPGVADRKAA

SEQ ID NO: 424294 - protein, 337 aa, unidentified
MTIIRIGLDIAKHVFQVHGVDENEVTVLRRQLRRSEMKKFFNKLAPTRIGLEACGASHYWARLLRGLGHEVVLLPPQYIKPYVKRGKNDANDAEAICEAMSRPGMRFVPIKSAESQAELMPLGGRDLLIKQRTAVINTIRGYAAEFGVIATKGPVKVAELLQQAHAEEASVPALALDMLRLLAAQLDALDAKLKLIETWLMALHRENPVSQCLASQPGIGPIGAVSFALRVTDPKSFRSGRHFAAWLGLTPKDNSSGGKRRQGRISRQGNEALRKLVVLGATAVIRFAKPGHGSPWLLNLLARKPKKFAAIALANKMARTLWAMMVSGEVYRRPLPA

SEQ ID NO: 424295 - protein, 332 aa, unidentified
MNAVSTLGIDLAKNTFSVHGVDANGVVTVRRTISRGKLAKLVARLPPCLIGMEACSGAHEWARRFAAAGHTVKLMAPKFVLPYRKSGKNDGNDAEAICEAVCRPNMRFVPIKSVQQQSDLSLHRVRQGFVEDRTATFNRIRGLIAEFGYVLPIGVEQLRRQVPDLLERLPERVARCVRDLLEHAERLRSKALEYEREIRLSVRDNALARRAHTRPGIGSITASAVVATVGNGHDFKNGRQFSAWLGLVPRQYSTGGKTRLGHITKRGDPYLRTLLVMGARSVLQRAYRQSDPLSRWALTLQQRRGYHRACVAIAAKNARVVWALLAKESASA

SEQ ID NO: 424296 - protein, 412 aa, unidentified
METLVERGCGLDVHQATVVACLLIVRKDGKVQKQVRTFGTTTRELLSMRVWLFSQGCTHVAMESTGVYWKPVYAILEGAFQIVVANAQHVKKVPGRKTDVKDAEWIADLVCHGLLRQSFVPPKPIRELRDLTRYRRKLVESQSAERNRLLKVLETANIKLASVATDVFGTSGRLMLRALIDAKATPQEMAELAKRKLRSKIPQLELALEGKVEDHHRFLLRLQLDRLERAEGDLAVLEQHIQEKLEPYAAQLALLDEIPGVDWTLAAVIIAELGVDMSVFQSVSQLASWAGVCPGNNESAGKRKSSRIPKGNVYLKTALVEAANAASRTKGSYLRDKFYRLKARRGYKRAAVAIAHKILVATYHMLSQQVSYHELGDLYLDTLNKNHLTRNLVHRLQRLGYTVTLTLEQKAA

SEQ ID NO: 424297 - protein, 400 aa, unidentified
MIDTGDIDVFLGLDVGKGEHHATAVTPAGKKAFDKRLPNTEPKLRELFAKLQAKHGTVLVVVDQPASIGALPLAVARDMGCPVAYLPGLTMRRIADLYPGEAKTDAKDAFIIADAARAMPHTLRAIDGEDETIAELEMIVGFDDDLAGEATRVANRLHGLLTQIHPSLERVLGPRLQHPAILTLLERFGSPAQIRKAGRRQLVTLLRPKAPRMAERLVDEIFVALDEQTVTVPGTEAAALIVPSLAGSLTAVLDQRKLLAGRIEELLEAHPLSKVLTSMPGVGVRTGARILIEVGDGSTFPTAGHLAAYAGLAPATRSSGSSIRGEQPSRRGNKQLKRAFFLSAFAALADPASRTYYDKKIAQGKHHTQALLCLARRRADVLFAMLRDGTFYEPQPTAVR

SEQ ID NO: 424298 - protein, 446 aa, unidentified
MSDRSGLSRGDRNRNARLARLRKLLPFDHAILGIDLADDKQAAVVTDHDSRVLARRRVNARAWELGELLDWALARARTAGFVSVTVVCEPTGHRWRVLDQLAAERGLALVCVQPLLVYRARESEDLTFDKSDPKDAVIIARLAAGLHCYEPERADAVWARLRHLGARRSQLTTDATAQVNQVRDLLECAWPAVLTASASPFRSASWRASAAVVLGRCAGDLARVRRLGPARFEAAVRRELPRWGATRPCLRIVRGVFAALADPAGVTAHRPGALERADLAMGDWHDTRKRLADTEQRMVTVLAELGLTELVATIDGLTPVGAAAILAETGDPARFASPRSLVKHAGLCPRDNASGGFQGKTSISGRGRPALRVAAWRAVWAAMPNNDVMAARFTLLTTRPDNRLARQQARTACAAALLRWIHVVVTRRVAWDPAIAAGKTPLPHAA

SEQ ID NO: 424299 - protein, 438 aa, unidentified
MKKFLEVCAGIDVGKRAIAVTILRGQPDAEPAADTRTFETTTPALEQCLAWLLANGVATVVMESTGSYWTPVWNVLSEKVAVIVANPDHVKARRGEKTDPMDSRRLAERLRVGDIRGSFIPTKPTVQLRDLTRRRKKLLSAAGSERNRIQKLLEQGNVKVGNVISDVFGSSGQRILDALLNHPSQTSTEMAELALGTLRKKMDRIRETLEGHRLDNHLRYMIQKSLDHLVFLEGEMRELGQKIAEAIKPQEREYELLQTIPGISAETAAVILAETGGNMAQFPSGKHLTSWAGVCPGNNRSAGKQKSASIKRGNRWLLSGLVQASWGAVRKRGSIFKKRFYRISQHRGRKRAVIAAARSLLTVVWHVLSRMTPYMEAPNEEMQRRELSKKVLHHLRRLRALGVNLASVELPPPLMTAEVPASLKPRPRAMGVLGIHTR

SEQ ID NO: 424300 - protein, 425 aa, unidentified
MGVYCGVDWAEGHHDIALVDDEGRLVGKRRIVEGLEGLAELTAMLAAAGDSAAEPIPVAIETPRGLLVAALRATGRPIYPINPLAVARYRERTSVSGKKSDHVDAMALANILRTDAHLHRMLPDDTSLARSITVLARAYQDAVWRRTKTVQELRARLREYYPGFLAAFAAGSGSGGGLSTTRLASRDARAVLAIAPSPAEGLRLSTARVEKALRRAGRQRRIAAVAGQVVAALRVPQLRQDPVVEHAMRIEALALLAVLDAVCASIEDLENALVAAFAEHPDHEIITSFPGLADVSGAIVLAEIGDDRSRFADDRALQAFAGSAPVTRASGKSRTVTRRRTKNNRLASIGYSWAFTASARPSPAREHYLRRRDRGDGHPAALRHLFNRMLGQLFHCLQTGQPYDPVKAYPHSTTITGAAATTVAA

SEQ ID NO: 424301 - protein, 387 aa, unidentified
MTKKRGRVIGLDVHPDSFAGAVVEGSDPASAKVLSTSSRVELEQLEQWALRYTRREDTLVLEASGNAFAVATRLRGIGREVEILDSHRAGKVGKVYCANDRVDAVKIARIYLSALSPIVWQPDQKTLERREVFSAYQAVVKESTRAQQQLRSMLNEHCVRLEKGFRLCHPNAIRRLLALRKWTPARRMLLQQLHGSLVAARARRTLLRRHRAQEIVAEEALLRLTRLCGINLITLYGVVAAVGDVRRFTHSKKLVAYLGLNPSVSQSGNFEGSGALRRHGRGALRALLIQSGKKLLEVNNSLQKWGLAVAARRGRNKAAVAVARKLCVALWHVMMGHAIGALERLDTLAIKLNKFATEIGPAALTAFGYNNKADFVEKKLYVLRSYP

SEQ ID NO: 424302 - protein, 344 aa, unidentified
MPTIDYIGFDIHKKTISFCVKAQDGTILEEGTIPALRNKLLAWAKARPRPWIGAMEATLFTGWIYDLLKPLAQALKVAHPPMLKAIAAAKKKNDKVDARMIADLLRCNLLPECYMAPVVIRDLRRMLRYRNLVVRQATRMKNRIAGLLMETGTAYNKERLHGKAYFSELLRSLKEVPRSVVELLELSRGQVEFFATIQRRLLQGLRDHPELSQRVMRLESIPSVGEILALSWALEVGEVSRFPSIAQAVSYCGLTSAQHNSAGKEQRGPISKQRNPHLQTILIEAAKLAPRYNPQLAAVHDRELQRGNRNRATLAVARKLVAYLMAVDKSGQPFQMRASDKEAA

SEQ ID NO: 424303 - protein, 319 aa, unidentified
MAQNDSVVVGIDVAKDKVDACIRALALRQTFTSTVQGHRKLVRWLRKHRVNKAVMEASGGYERVWARVLREADIEVRIVDPKRVRNFALSAGRLAKNDAIDAEMIAWFAEIFSEAPSQRHDAAREELQALVKARLSLIDSRMRLVSQSEHVAPGLVQKAHGRILKSLASEIARLEAAISIKIKSTPDFAERAEIIESVPGFAQTSSANLVAGMPELGQVSDEIAAALIGVAPYDDDSGKRRGERHIKGGRRWVRNAVYMPCVGAATQNNPVLQAYYQRLIAKGKEPKVAIIACMRKLIVILNTMIARRQKWDPSRYSLT

SEQ ID NO: 424304 - protein, 407 aa, unidentified
MRFVALDVHRDFCEVAIAEDGGVRLAGRVKTAPAALELFAQSLAVDDEVVLEATGNALAIARIIEPHVARVLLAHPKAVKGLTQAGPKTDKIDACALAKLLAGGFVPEVWAVDEPTRVLRRRIARRAQLVRQRTREKNQVHAILIRNLRERAPSSDLFGVAGRRWLASQELPADEQEMVEACLRQIDFLNEEIERIDKALAELALSSPAMRRLMTLPGISFVTAAALMAAIGDVSRFPTAAQLVSYLGLDPRVRQSGSEPARHGRISKQGPGEARHLLVEAAWHAARTTGPLRAFAERIASRRGSKVAVVAVARKLVVIAWHMLSKDEDYAFARPSLVREKLRRAELLAGAERQQGKRNPVRVFATGAQHRLEKELAAQAEIAYRRLVKDWQPAIKQGAGATPGRAS

SEQ ID NO: 424305 - protein, 432 aa, unidentified
MRLATPRSSRQGTPPATDHLSTGDNARGQATAQRAIAQRFRCYGARGEANDLSRSLVTLEQDSTLIAVIEMGQSSWLVAGIVPGIERQPLKKLAADQDGLLQLLHRWRKEAAQAGHPIKRIAVAYEAGRDGFWLARWLRAREIEAYVIHPSSVPVSREHRRAKTDRLDTELLKRAFLGWLRGEPKHCSMAAIPTVEDEDARRPSRERESLVGECTRIVNRVKANLARLGIRGFRPRLAHAPKRLETLRTPEGTAVPANTLAELQRDMAHLRFVKQQIKEIETARAKRLEQASGGGRDAMVRLLARVVGIGIETADMLVQEVFSRKLRDRKAVARYAGLTGAPDESGQKRRERGLAKAGNARVRHAMIELAWGHLLHQKDSALAEWYQKRTVDARGGTRKTMIVALARKLLIALWRLVTTGEAPAGLLLRPAA

SEQ ID NO: 424306 - protein, 407 aa, unidentified
MDVLIERACGLDVHKKTITACIVTPEGKEIKTFRTHTVFLIELIDWIKEHRCTHVAMESTGVFWKPIVNLLEAEDIEFLVVNAQHMKAVPGRKTDVKDSEWICDLLRHGLLKASYIPDRTQRELRELVRYRRSLIQERSREHNRVQKVLEGANIKLASVVSDIMGLSSRDMLDAMIEGENDPEKLAGFARRSLKRKKEELELALRGNMSAHQRLMLKTMLTHIDFLNEQIVDLDMEVAKRLDPFQEQLDRLDTIPGIARRTAEQILAEIGTDVGARFPSAAHLCSWVGLVPGHNESAGKRKPSKTRKGNKYLLAALTEAANSIRGSDNYLGAQYRRIAARKGKHRAAIAVAHSMMTIAYYLLTRGEDYRDLGANYFETRQQEMIVKQSVRRLENLGFTVSISNPAAS

SEQ ID NO: 424307 - protein, 316 aa, unidentified
MTNRKLTKSRVNVGVDVGKWSLDICIHEKELVWQVENTPEGIRSLMNRLSRYHVERIVMEATGRYEFALAEAAYDRGLPVCIAKPASVRKYAGAIEQLAKTDRIDAQVIAEYAAVIKPRVTPEKSKNLIAIKDLLARRRQILSLRTQEINRRHIMDGGIKRSCRRLIKYFDVEIAWVEKRLEKLVEAESEWSEKREILESAPGVGKTLAFTLLADMPELGSLTNKQASALVGVAPINRDSGKMRGKRRIQGGRASVRTTLYMATLSATQCNPAIKAFYKNLVAQGKHKKVALTACMRKFITILNAMIREKQVWCAT

SEQ ID NO: 424308 - protein, 405 aa, unidentified
MGGDAMSGLKGSFDVFVGIDVSKDKFDACGMTGNEVKLFQFSATMDRKGFEKLKGHLAAGSISSVLIGMESTASYHVNLFSYLVSEGYRVLLINPLLISNYVKMQLRKTKTDKKDAVVIAQFLLTNGDTLIQRATPSLISDLRDLSRQRESLVDEMTSLKIEIKQLLNITFPELEHMAGIFTKSILKLVQQYPSAFALRDANLDQLSQMLIADSYGHKREAFAAELIKAAHSSIGSKSPAKEMILKQKIALLIHLEDALQEITDMLIEMSRKLMEEEINIMTSIKGIGDKSAANFLIEMGGNINQFERSGKIIAMAGLDPAVYQSGKHEGKGRITKRGNRHLRRIIWMMTTRVIQYSDIFKVYYLKRRKEGLPYKMAVLATAHKLIRVIYAMLTQRTTFCPQVNS

SEQ ID NO: 424309 - protein, 417 aa, unidentified
MSTDVRFFVGIDWASETHQVCLVAADGKIIGERAFAHGGAGLAEMCDWLVTTSGEEPPKIAVAIEVPHGPIVEILLERRFQVDAVNPKQLDRFRDRFTVAGAKDDRRDAYVLGDALRTDRHCFRRLAVEDPVVIELREWSRMAEDLSQERNRLANRVREQLWRYYPQALELGDDLAADWFLDLWVLAPTPAKAVRLRESRVTSLLKAHRIRRLEAAEVLRILRQKPLVVASGTIEAATAHITAVAARLKLVNQQIKQAHRRLDELADKLAEGREEDGPGQKSKQRDVTILRSLPGVGRIVLATLLGEAAEPLRKRDYHALRTLSGVAPVTRRSGKRCVVLMRQACHLRLRTAVYHWARVAIQHDARSRARYAELRKRGHSHGRALRSVADRLLAVACAMLKTQSTFNPEHAAEAATV

SEQ ID NO: 424310 - protein, 396 aa, unidentified
MAKLWIGVDIGKTHHHVAAVDGDGRLVYSRRVANDETALLTVMAEVSTHGRGVCWAVDVTTGLSALLLTLLWRRQVQVRYVSGTVAFHMAAAFAGENKTDARDAVVIAQTIRLRPDIPILEPSDRLLAELSVLTGYRADLVGQRVATLFRLQELLTGISPALERAVDLNRKAPMMVLACWQTPAAIRHAGVDRITALQRRGHVKNAVQVAEAMVAAARQQTVTLPGQRAAAVVVGQMATEILAIDQRIAAVDDLIAEQLDQHPLAPIIGSLPGMGPLLTAELLVHTAGMTEYDSPTKLAAHAGLAPVSRDSGTVSGNHRQPRRYHRRLRHILWMAAFTAARECPTSRAYYEKKRAEGKNHRQAILALARRRVDVLWALIRDRKTFTRPAPVIRAAA

SEQ ID NO: 424311 - protein, 334 aa, unidentified
MKKFEFFLGIDISKNTLDYCLLDDQCKVLEKGKVNNEPVSLSKFFLKFENEYCCKTTLLIVFENTGIYSKPVARFLNENKWCYSEVSALEIKRSKGVSRGKSDRVDAHQIAQYGFRNLDKIMLCTEPELIHQQLKILNTEREKMLSAISSFSRTGEAEEFLGKEVFKVVKTHNRQTLSALRKQLKQLDDKISALLRSNEDLKKKQELLKTIPGIAEVGSLYLLLATKGFTRFKNWRKFACYCGIAPFEYSSGSSIRGRNRVNPLADKKMKSLLHLLALTSIRHDPELKLYYERKKEEGKHSLLALNNVKCKLVSRIFAVIKRETPYVKTHQFAN

SEQ ID NO: 424312 - protein, 420 aa, unidentified
MEGLHPLHRRVAGIDVHRMLHVVTVLIEETSGPSAGSISKHSREFGGFKRDCRALAQWLHELGVELVVMESTGIYWKSVYAHLENAGIQAWVVNAHFIKHVPGRKTDMLDSEWLAVLARFGLVRASFIPPKDLRELRLLSRYRRKLSAMCASEINRLHKILDDAGIKLGAVVADVHGVSARAMVKGLIEGQDVATLPGLARGTLKRRHEELALSLEGDLSERHRFVLQHIHAHIEVLQKQLAEIDAYLLDAMQPYAWAHGLLQTIPGIDQIAAALILIEIGDDMTRFGCAARLACWAALSPGNNESAGKRKSGRTGHGNSTIRYILCECANAARMTKSTLANKYKSLMVRKSHKKAIVAIAHKMIRLIYVLLTRRQGYIDQGIDYAAMSAAKNAPRWIKQLKAIGKWPAASTAPETAGAH

SEQ ID NO: 424313 - protein, 359 aa, unidentified
MRTQDSKKIGFNNLKLFIGLDVHKKSWHVTILSENICLKTFTQKPDSEALYHFLEHHYPGARYLSAYEAGFCGYYHHRKLNELGVKNIVVNPADVPTTDKDRKQKEDRRDSRKLARALKNGELTGIYVMNDEAEELRCLVRYRKTTMKELCRHKNRIKSYLHVKGIKVPAELNTESKYWSSRYTQWLMQVEFPTKYGKMVLYETTDTAEFLRSKLLKINRQLRSLAKDSKYAKHIRCLRSIPGVGLIVAITLLSELDTITRFRNLDRLCSYVGLIPSTFSSGEKEVVGNITRRSNKPLRASIIESAWVAIRHDPSLTLKYNQLRSRMEPNEAIIRIAKKLLNRIRYVLINEQEYVYAVI

SEQ ID NO: 424314 - protein, 321 aa, unidentified
MTYIGIDVSKDSFVAAYPAKSGYTTKSFQNTASGVHKFISSLPNECHCVMEATGNYSMLLLYLLQEKGIPASMENPQKIKHFARAMLSTTKTDEIDAKLIALYGEKMNPASYKIPSESVLLLKQKRTVLRQLKKQLTMMTNMQHSFAALPKQDPASKVALEQTIKFLRKQISKLEEEITNISNKEFRRQMALLTSIKGIGDEIASALIIATGGFTYFSSAKQISRFLGLCPTYQQSGTSVNVKGHINRNGDTYLRSQLYIAAVSSIRFNTACREIFERLKAKGKSGKVAIIAVANKLIRQAFAVVTNNRPYEDGYVSSLAK

SEQ ID NO: 424315 - protein, 345 aa, unidentified
MNQCNVIAIDLAKDIFQVCIMNSHGKIGFNQAFSRAKLKRWLPQQPLSVVAMESCGGASYWERLASSSGHGTLMMPPRQVKPFRTGQKTDPNDVIAIAIASRAPNIKPARSLTIEQQGLQCVDRMRDMLDKQKLQLSNQLRGLLLEFGIVINKSVRSFKERLPEILEDVDNELPVPMRQSLYQMWELYGRLEDDFDALDLRLKQLTDQDDECQRLVKLEGVGPITAVRLKLQLSHGGHFKNGRQASACIGLTPKQHSSGGKVKLGPISKVSCDRALRSCLYLGARAVVSKLKNRPAKTEKERWLKALIERRGVSCASIALANKTVRTAYVMLKNGSVYKPVPIAA

SEQ ID NO: 424316 - protein, 272 aa, unidentified
MDSKKYIGMDVHKESISIAVRNDAGKIVMECVIETKANMILQFIDGLRGDLQVTFEEGTSAAWLHDLLKPHVTKLVVCDPRKNASMREGNQNDKIDARRLAELLRLNHLSPVYHGEHGLRSLKELVRSYLTITKDLVRVMTRVKAIYRSWAIPCTGKQVYAPRHRAEWIAKINEPGVRRRAEFYYQQLDALRTVRQEVRRELLAEGKKHQAWKRLCQIPSIGPIRSAVLLGILQTPHRFRTKRQLWTYSGFGIETQWTGNCNERRNRVPFAD

SEQ ID NO: 424317 - protein, 348 aa, unidentified
MTVTIVETRAITGGVDTHADVHVAAALDPIGGLLGVREFPATTAGYARLLDWLAGFGTVALVGIEGTGSYGAGLSRHVATAGVRVVEVDRSDRQDRRRQGKSDPLDAVSAARAAQSGRACGAPKGRDGAVEAIRALMVARRSAAGERTRAINQARALLLTGPDDLRARFTRHTPAALVAGIASLRPRPGDITGYAVRIALRELGRRAEFLDRQLECLDELIVPLVTARAPGLLALYGIGPHTAALLLIAAGDHPGRLRSEAAWAHLCAAAPIPASSGKVTRHRLNPGGDRQANHALWRIVFTRMGSDPATRAYVERRTSEGKSKAEIIRCLKRYVARQVYPHLRPAAG

SEQ ID NO: 424318 - protein, 423 aa, unidentified
MEVMYERVAGLDVHKATVVACVRLGTDRKITRECRTFDTTTDGLRILLAWLEECRCSHVAMEATGVYWMPVWKILGEGNFGLIVANAAHIKNVPGRKTDLNDAMWIADLLACGLIKPSFVPEEEVQELRSLLRTRKQLGREQTRHVQRIQKTLAEANIKLDSVLSDIMGASGRRIIEAMIAGIRDPRRLAALANTRIKATPKQLYDALHGRLTDHHRFLLTLHLRQWDNLDATIREIDREVEARIARIDKEVKAGEAPFRDLIGLLCTIPGVSTLSATTILSEIGRDMSRFPTAGHLVAWAGLCPGQNESAGKRKPVRLRKGAPWLKTMLVQCAWAAKRKKDSYYKAQFFRLQARRGPQKAICAVAASILTAIYHILKNGTEHHDLGADHFNRRSTEAQTKRLVAQLTRLGFEVQLQRTAEAA

SEQ ID NO: 424319 - protein, 343 aa, unidentified
MITIGIDPHKRSLTAAALDPHSRLLGQLRLPATNQAATQLLAWAAAWPERRWAVEGASGLGRGIAQLLVAAGEEVLDVPAKLAARARLLGTGSARKSDLADACSVAAAAIHHRRLRPVALEDQTVVLRLLSDRRDDLVAERTRTLSRLHVLLADLQPGGAKRELTAARAATLLRQIRPITVADVERKRIARQLLADVRRLDRQVKTASQAIRQAVGEHGTTLTEVFGVGPVLAAKLLGHTGDIARFPDRDHFASYSGTAPVEASSGDVRRHRLNRGGNRQLNTALHLIAVCQIRDPSPGQAYYQRKLAQAKTPEEARRSLKRHLANVVHAHLVADHRRRIPAS

SEQ ID NO: 424320 - protein, 363 aa, unidentified
MEVAKEGRFVGIDMGKTGYVLRMIDCCGKITGWEGKTNPEGRKELYRRLRPEDRIAIEACNLAFIMNKEFKKLTGTEFYILNPGKLYQIYMTDKKTDKEDALKLAKEIRDKAAEDLPRVFAPTEEMKEMRKVVSEYREIVRLHTQRVNRLHTVYEHCGITDMKRCDLKTRTNREKNLGLLCGYEREEAERLMQVIDLLEAQKNELEKKIREAENTNEKVQAVEQVPGVGKITAYAFVASVGSADRFSSVAQVSSFLGFVPKIDCSSQTSHYGHITKKGNPYLRGLLVQAAWVLVRCKDGGALKEKYHALVLHGLSRKKAIVAVARKMAELMYTLLKNNSRYEPRKFVAPLSRTERLAKLAVAG

SEQ ID NO: 424321 - protein, 340 aa, unidentified
MTITTIGLDLAKSVFQAHGVDETGATVLTKRLHRKQMLPFFSKLPPCQIAMEACGTAHYWARTLAAVGHVVRLIPPSYVKAYVKRGKSDALDAEAICEAVQRPTMRFVPVKTVEQQSILMAHRARSLLVRQRTMLANALRAHLAELGLVANPGIANLAKLAQQALSDENGLPSYARTTLEALVRQIMALSEEITALDRKLLAWHAENEASRRLAAIPGVGIVTATAIAATVTDPGQFRSGRQFAAWLGLTPQQHSTGGRTQLGGISKRGDRYLRRLLVVGATAVIRHTKDKPTPMANWIRKLMAKKPFRIVSVALANKLARIAWVVLTRKEAYRPYQLAA

SEQ ID NO: 424322 - protein, 342 aa, unidentified
MFFLGVDVSKKTLSVVLTDHKDKTLWSNKSIPNDEVGFKKLVETVIKNTSKKAGKEEYSIAAGMESTGVYGERLAYYLNGNSHNGRIVTYVLNPAAVRAFGTSVMAPNKNDSADAQLIASYLSMAVTKEQISPWKAPSPEGRALRELSRRREELTELHASECNRLEKLECMQEPPEAIVRNVRELISYLEDSIHNLEKEIEEHIDDDPGMREDIELLRSIPGIGDVTSVTLQGESDGLINFASVKGLVSFVGIAPSEHTSGTSVFKKSKISRRGNSRIRHHLYMATLVAARVNPVIKEFYERLLNRGKCKKLALVACMRKMLHIIWGVMKNRKRFDPCYSLK

SEQ ID NO: 424323 - protein, 352 aa, unidentified
MEHSSTLSALPQTLGLDLGDRHCSLCLIGAAGEVLEEGQVHTTRQALAALFERLAPCRVVLEACGHVHWIAQLASQPGHEVIVANPRELRLISQSGRKNDRNDARTLARLGRVDPQLLRPIQLRGDGCRASRALLHARDQLVRMRTKLVTLTRGQVKSFGGRIPACSAESFHKRAGGYVPEILQEIVGPMLELLAQLEVRIRAFDKQIERVSKARHPETAILRQVRGVGPVLALAFASSIEDPRRFSSSRTVGNYVGLAPGLYDSGARTPQLRISKCGDRLLRRLLVNAASYILGPFGGDSDLRRLGERIAGGGSQRDRARARIAVARKLACLLHHLWRTGSVWEPNYALTH

SEQ ID NO: 424324 - protein, 408 aa, unidentified
METMHRRCAGLDVRQKEIVACRRIVSGKKVRSELERFAATTPGLVALSNWLMEARVTHVAMEATGVYWKPVWHVLCGDFKLILANAAHIRNVPGRKSDANDATWIADLLAHGLVRASFVPPQPIQELRDLTRTRRELTREIVRHTQRIQAVLEEANIKLTSVISDILGMSGRRILKAMISGQSDPRRLAELGSSRLACTPEALAAALEGRVRDHHRFLMSQHLKTIEQIEATMGEFDARLEAALAPFRDAVERLKDMPGVSDNVAATLIAEIGADMSAFPSAGHLVSWAGLCPRLDESAGRKRSRRLRKGAPWLKPVLVQAASAASKAKNSSFKARYHSLKGRIGPKKALIAVAAAQLRTVYHMLKDGTFYKDLGPDYRKPRNPQRTAQNLANRIRALGFQVEFKQAA

SEQ ID NO: 424325 - protein, 405 aa, unidentified
MAFKIFRKNCCGLDVHKTWIYACIGITDTNGRTEYKQARFSSFSKGLRELADWLAKYSCTDVCMESTGKYWMPVFNILENTCFVTLAHPKYTKPQKGNKTDRKDAKWICDLFMCDMIKPSFIPPADIRQLRDLLRYRTKLTNILTGKKNRALNCLTVSNLKLDDVFSDVFGKSSRSIISYILEHPGQSFDVTPFVDKHCKKPIEEIQAAVDGAIFREQAAKLKECLCHIDEIRAHKQNIELEIQRLAEPYAYALELLRTIPGLNSDPITAISVISEIGADMSVFPTSKHLVSWAGCCPRNDKSDSKVKSTRISRAGTYLKPLLVQVSNALIRSDKNPEFKERYRRLKARRGHRKAVIAICRMLLTAIWNILSKLVPYSPNGYLKDKITEHSVLISKAEGLALLRK

SEQ ID NO: 424326 - protein, 425 aa, unidentified
MHQSRTLDVGMDVPTESSAVAYVAKEHDAEVISLGTFGTRQCDSDTLMRKLQAQATHLVCVSEAGPCGSGLSRSLTKKDSGCWVVAPSFMPQKAGARVKTDRRDARPLARLLRSGDLTPVSVPAGAAEASRALRRAREDTRRDRKAATLRLKAFFLRHDIRDTGRATWSPAPLRWLSEVGWPTPAQPSVLQAYVQTVTEQRARLGRLALARHEQGKTWRFAPGVEARQALRGVQCPVAGTTGAALGDLTRVANPRQLRHSLGRTPSAYARGARRQQGRLTQTGHTHARRALGEGAWAYRYPAKVRRHLPLRLAKLPTALRPAAGRPRSASAHGIARAWPQAKRPSRSSAPWPEHEGLAGGPWPSRWPGHRKPKAGGGLTHKLSRFPTALGRDAAPVWCHPRRRYEAHRDARPSHEAGTRRRQGRW

SEQ ID NO: 424327 - protein, 329 aa, unidentified
MKVTAIMGMDVSKKTLDCHLFVQQKSLAAVNNDNKGFKLIKRWLKKEVRNLDGLLVVMEYTGIYTYQVEHFLQQHNIQFVKRPALDIKRSLGMVRGKSDKIDARFISKYGWMRKEELQPMCVVSDSQFELQQLMSHRDKLVADHASYQSKLKELVLQMGKKINKEMVDSMKLVMEILKQEIKKAEKNIKQLISSDDSLVTNYELAYSVTGIGFATAVHLLIATENFTRFSDARKLICYCGVAPFEHSSGTSIRGRVRVSHLANKKLKSLLTMAAISAIQHDPELKAKYEQKVKEGKAKMCVINIIRAKLIERVFAVIRKQKPYELRLAA

SEQ ID NO: 424328 - protein, 383 aa, unidentified
MNYSAIDYHKKNSFISTCNEQGERIAEAKICGNDPSAFARYFARLGEGPGKVVVEACWNWSWLHDVLSELEPIEEVVLAHPYKTRVIAEAQIKSDKLDARILSQLLRTKLIARAHVPSKQTRQRRLLLRQRMFWVRLRTMVRNRVHALLARQHGLTLPQRADLFGSGGMKFLRSVQLEGSEAKLLGQDLEVLEQLELQIKQSEKEIRRQMGQEPEVERLQSIPGVGILLSAVIAAEFDGAERFQSNTKLWAYCGLAPSTRSSDSHTWHGPLFFRCNKWLRWAFIEAAWIAIQHSAYFAAIYQRQLTRGKIPNKAIVVVARRLCEIAWKVLREKRSFSAQPPPRQANPFSRSPSRHSGGAYCKQYRLAPSLSIGDRESNPLPCG

SEQ ID NO: 424329 - protein, 368 aa, unidentified
MKMNAIKAAPAASAIAIKNEKSAKAKRILIGTDVHLRGYQAARKVDNGVIGVVENFRSEEALLLHVEKQCERAEQVVVVYEAGPLGYTLYRKLTACGVLCYVCAPDSSEQKRKRRKNNKIDARNLTSKLFNYLNGDEGALQLARVPTEAQEQLRLASREHDQMVEERKRLGAKGNALLLSQGFGSWSNWWRPKAWAQLSSLVPEWLLERLKIWVDVLKMLDEKICLAKVALARACSGPRPKGVGALSQIQLQSEVLDWSLYTNRRKIACLAGMVPSEWSTGDTERRGSITKVGVPAIRRIIVEMVWRIVLFQPQYKPVQKWQKVLQGTNPALKKKAVVAIGRQLIVDLWRLQTGRVSAQELNLVMVGA

SEQ ID NO: 424330 - protein, 414 aa, unidentified
MKVVYQICCGVDVHKKFLVATIITTTKGVQPHYQKKRFSTFNTDLNRFADWLNENNCVDVCMESTGKYWVPVYNILEMRGIRTTIANPKWVKAVKGNKDDTKDSKWIGDLFRLGLVPGSFIPRKEFRVLREYTRYRYKLTSMKSSEKNRFQNAFTVCNVALDAVVSDMFGVSASAITNYLISTEQFDEEYCKSLLKRSLKKKSDTVIESIQGYCIEPEQKLRMQFVRNHLDYLENEISQVDAVIDTMVEKHEGLIALLTTIPGIKRDSAITIISEIGDDMSQFGSSKRLCCWAGLTPGNNESAGKKKSVKITRAGVYLKPALVEVAHAAIKATDSPYYRIKYEKIAKRRGKKRAVIAIARMILTAIFQMLSTGEVWNPTDLVKVDMPKELKQQQLQKQINQAVAFLKLQGISVT

SEQ ID NO: 424331 - protein, 353 aa, unidentified
MEHKYVGLDVHQSSTVAVVQDEKGKSVIDSILATEAEAIRDFLKGLRGTIHVTFEEGTQAAWLYEIVKPVVAEVIVCNPRRNKLLAVGNKADRVDAQKLAELLRCGQLKPVYHGTPGVRLLKELVHSYDSLVGDTTRVMNRVKAIYRGRAISCAGRDVYYQRNREQWLEKLTEPGVRQRAVFLYQQLDTLRGLRREARKAMLKESQRHPAFPILKEIPVLGPIRIAQILAKVASPHRFRTKRQFWAYCGLAVVTRSSADYQFREGKAEKRKRAPMTRGLNPNFNHRLKYVFKSAAVDGIHQAPFEGYYARLLVKGIRPELARLTLARKIAAVTLTLWKRGERFDELKVSEQAA

SEQ ID NO: 424332 - protein, 368 aa, unidentified
MAELITGFVGLDAHAESTAIGFAEAGRTAPRFIGTVGATREELTKALGRLGEPGSLLIVYEAGPCGYGLARELGALGYRCEVVAPSKIPKKAGERIKTDRRDALKLASLARAGELTAVTIPDERDEAIRDLSRARVDAVRARLKARQQLQALLLRHGRRYTGKTAWTAAHERHLASICFRHAAQTIAFTEYRQAVSECDTRVKRLSEALAHEVESWRMQPVVGAIMTLRGLDLVTASTVVAELGDLKRFARPRELMGYLGLVPSEHTSGAKRRLGTITKTGNGHVRRVLVEAAWNYRFPARVSRALQIRQERQPAVIRQIAWRAQLRLSHRYRRLKARGLQHNKVCVAIARELAGFIWDIGRHVGPNA

SEQ ID NO: 424333 - protein, 337 aa, unidentified
MKLYAAADLHSNNHFLAVIDENDTRILDRRLPNDLAVTLKTLDPYRADIRGIAVESTFNWYWLVDGLMDAGYPVMLVNTAKARQYEGLKHTDDRHDAFWLAHQMRLGILPTGYIYPKVQRALRDLLRERRRLVRQRTTHVLSTQSTFWRHTAVRLPSKAILGVIQKPWPELPDANLELGVHAHRATIKVLTSHVERIERKVLQSLKPRPEYQMLLTVPGIGPVIAWTIVLETGDLSRFASAGHFASYCRCVDSKRTSNEKKKGENNVKNGNAYLAWAFFEAAHFAIQYLPAAKRFYQRKSAQRNPILAIKALAHKIARACYYIMRDRVPFDAARLFA

SEQ ID NO: 424334 - protein, 405 aa, unidentified
MDITPIHRRVIGLDVHQNKITACALIEQADGRVAVQQREFGGFKRDRRALAAWVHGLAPDIVVMESTGIYWKSPYAALENVGIAAWVVNARHVKNVPGRKTDISDAQWLATLARAGLVRASFIPPAEIRHLRLIARQRQKLGGMLAAEKNRLHKVLADAGIRLNVLLSDLHGQCARAMVKALLGDEPIHAILERAGRLRASREDLFEALQPEELSAKHRFVLNEIMAHIEYLEATMARFEQQLLVGLAPWEPQMRLLETVPGIDRLGAAMLLVEIGTDMDSFGSAERLASWVGICPGNNESAGKRKSARTRKGNAWVRRLLCEFAQAASRTRCALKDKFSALAIRKGHKRSIVALAHKMLRIVYAMLANTTPYQDRTVDYEALMVGRNAPRWLKMLAKHGHIATA

SEQ ID NO: 424335 - protein, 347 aa, unidentified
MRFYKQQHQFYCGIDLHARKMYICVIDQKGKTRLHKNIPTEAEMFFELIFPFLKDIVIGVECVFCWYWIADLCSQHGIPFVLGHALYMKAIHGGKTKNDKIDSFKIAALLRGGNFPLAYPYPAPMRATRDLLRRRMYLSRRCGELVAHIQNTNTQYNLPEFAKKISRKYNREGVAERFENPVVRKSVEVDLAVIDALNQTLRQLEWYIEKTAREHDYKTLYLLRSIPGVGQILALVILYEICDIKRFATVQDFSSYARLIRPVKESDGKWAGKGNKKIGNHHLKWAINEAVILMLRESDQAKHFVERLTQKHNKGKALGILTHKLGRAIFFMLKNNEAFNMKRFFSS

SEQ ID NO: 424336 - protein, 317 aa, unidentified
MATTAGYVGIDVAKRHLDLALHATGHPWQVANDATGVKQVVKHLLTVAPTLIVLEATGGLETRVVSALAAAQLPVVVVNPRQVRAFAQATGTLAKTDRLEAQVLAHFAAAMQPTPRPLPDAATQELSAVLTRRQQLVDMVTAESNRLGAQPNSALRKRIRVHLTWLTKELGRTEKELTQLIQQSPVWRVQDDLLQSAKGVGPVLSQTLLAEVPELGHLHHKQMAALIGVAPFNQDSGGKRGKRRIWGGRARVRAVLYMGALVATRHNPVIKAFYERLLATGKEKKVALTACMRKLLRILNAMMKHQTKWQDVSINTH

SEQ ID NO: 424337 - protein, 358 aa, unidentified
MAAYPTETQVIGGVDTHKDLHVAAVVDHRDRVLGTESFPTTRHGYRLMLAWMRSFGDLLRVGVECSGSYGAGLLRYLQAADVEVLEVTAPDKHDRRRRGKNDDYDAESAAHAAFAERHTVTPRSRDGMVESLRVLRVCRKTAVQARRIALQMIQMTIVCAPDKIREPLRSMTRMQLIRTLAAWRPDLTAYRKVEEAYRISLKSLARRYLELHDEVSDLDDMIGAIVKDLAPELLAQTAIGLNSAAQLLLTAGDNPDRLKSEASFAALCGVSPVPASSGKTVRHRLNRGGDRAANSAIHIIAIGRLRLDPRSQDYVAKRIAAGNSKLEAIRCLKRYIAREVFGLIMRRHREINQSQIAA

SEQ ID NO: 424338 - protein, 419 aa, unidentified
MKSTKTKKVKKINAKTVIAALDIGKNVQYGYFRAPNGNDVKPFAFYNSQKSYNAFWQKLCEFKTKEGLEQIVIGFESTGPYAEPLFHFLRTKDVKLVQVNPVHTKRVKELVGNSPNKTDKKDPRVIADVISLGHALSLVVPNGAAAHLRRLTQARERALKQRTATINQLQDLIFVIFPEFLSIMKGISTKTAAYLISHHPSAESICAIGVEALATKIKQTSRGRLGRERAQQLVAAARASVGINQGKESILLEVEHLNRRIENENRFIDKLEHQMAEYLQCIAYSGSILSIKGIGTVTVAGLIGEVADFNNFDTISEVMKLAGLDLYEISSGRHKGQRRISKRGRPLMRKLLFYAAINTVKAKGIMHEKYQQMLARGMLKMKALVAISRKLLGLIFAVVRDNSMYVQGYCSKHHYKLAA

SEQ ID NO: 424339 - protein, 349 aa, unidentified
MIRNKPQGAVTYGIDIGKNLFHVVGTDGEGKPIQKVKFRRDTLLQFFERAEPAIVGMEACPGSQWLARKLQERGHTVRIIPAQFVKPYVKSNKNDIIDAAAIAEAVTRPTMRFVEVKQPEQVDLQALHRIRDQMVRSRTRLICQMRAFCLEYGVPMRQGAGVFKLDLQRVLADDGNDLTPTMRRLLGDLADDLAHLERRIAVVSREIDALAARDDVARRLTTIPGIGALGATALLAAVGAGHQFAKARDLAAWLGLVPRQHSTGGKQTLLGISKRGNPYIRRLLIHGARSCMLHLDRSRDQLGRWIDQLQQRMHPNKATVALAAKIARIAWVVLTKPGALYARRDPVVA

SEQ ID NO: 424340 - protein, 409 aa, unidentified
MTAYRFYVGIDWATEAHRVVVLDADRRSLHDRTVRHEGVALETFAHWLAQDVAAGVASDVAVALEVPRGAVVDTLLARGFHVFALNPKQLDRFRDRYTVAGAKDDRRDAQVLASALATDQPAFRRLEPEDPLIVELRELSRLEDDLRQELGRLTNRLREQLHRYFPQLLQLVPAANEPWLWALLERAPTPSAAQHLPRATLRTLLTRHRIRRVDAETVRTLLRTPALAVAPGTVQAALRHLAVLLPRLRLVHQQQAECATLIDGLLERLAESQEHRDVPILRSVVGVGRVVAATMLAEASRLLAARDYHGLRAQAGVAPVTRQSGRRTLVAMRHACNPRLRHAAYHWGQSAARHDPVSRAHYAQLRARGHSHARALRGIVDRLLRVLIAMLTAGTLYDPTRRRVVADAA

SEQ ID NO: 424341 - protein, 459 aa, unidentified
MPIARKHKKYTVSAPRLESLKQIEPNAAGVDVGATELYVCVSQDRDPQPVRVFETFTCDLHNMAAWLKQCGVRSVAMESTGIYWVPLYEVLEEAGFEVRLINAREAKNMPGRKSDLLDCQWIQQLHSYGLLRASFRPSKEIVAWRSLVRHRDNLIAARAAHIQHMQKALHLMNIQLDNVLADITGVSGLRILRAVVAGERNLDVLASYRDPSCKNSAEVIRRSLEGNYQPEHLFQLKQSLELYDYYSGLIQECDREIEKQCQRLSAQATPPAQPLPPSRKPRQKKKPRKSEPTFDLRSHLYQMAGVDLTAIDGCNASTIQGVLSETGVDMSRWRTSGHFASWLGLSPHNDISGGKVLRSRSKRTRNRAKTALRLASYSLTHSDSWLGAYYRRMRSRLGAAKAIIATAHKIARIIYFMLKHRCEFRDLGADHYEAQYRWRQVASLQKKAASLGLQLVPAA

SEQ ID NO: 424342 - protein, 371 aa, unidentified
MNSIVYVGMDVHKEQYTLCCYSYETDKVEYKQTIPSDYKLVLKYMEQVRSRYDGEVTFVCGYEAGCLGYSLYHQLKEHAVDCKILAPSTMAVTNTHHIKTDKRDAANIARCLAFHTYSEVYVPDNDDNDVKEYIRMRDDQKLYLKKVKQQILAFVLRQGKRFEGGKTYWTIAHLKWLKNLELSALQRETLDEYLLTYEYLTEKINRFDERIEELASAKRYEEKVKHMGCLLGIKTHTALSMIVEVGDFERFEKAPKFASFLGLVPSEDSSDTRVNRYSITKAGNSHLRRLLVEAAQSYTRGNAGHKSVALKQRQKGNPPEVIAYADKANERLRRRFYKMTLNKGVNRNVATTAIARELACFIWGMMTEHVS

SEQ ID NO: 424343 - protein, 337 aa, unidentified
MQQITKNEFYKHYIALDWSKVNFALASIRDTGTKYKVLEHPADLKLLKQCLKQLPGKKILTIEETTSSQWLYVELKDYVDKILICDPFHNSLLQSGPKNDKIDAVKLCTLLRNGSLKEVYHTTDELYKLRKLVSAYEDFVTASVRMKNQRSSMFLSEGKDHKKENVLSGNAINKFITEKQNLTIEHVAHIRKEFEQLFGKIQKENQTIKQLVKISGIASKLAVAILAVVTDARRFENKYKYYAYCGLVKHLKESGKKDYGKRKARHSGILKRCYKIAANAAIGGKNDIREYYEYLLQNNYSYEDARNEIARYIAKVSYAVMKNKTDYRPYQWREGKQ

SEQ ID NO: 424344 - protein, 412 aa, unidentified
MRRVIGLDIHRTFAEAVAWDDGRLIRLGRLDMTCTALEGFGKSLRPSDEVVVEATGNAMAVVRVLSPFVARVIVANPLQVKAIAHAHVKTDKIDAGVLASLHAAGFLPEVWTPDPETERLRRLVARRNQVVRHRTRIKNEVHSILHAHLIPRCPHADLFNRRGRDWLSRQPLPVDEKATIDRHVRELDRLAEDLDVLDREVAQGAIGNPSIERLITITGVNLTVAAGLVAAIGDIRRFTSPQKLVSYVGLNPRVRQSGLGLAQHGRISKVGRSHARAMLVEAAWAAAKAPGPLHAFFVRIRARRGHQVAAVAVARKLAVLCWHLLTKETDYLWARPALVAIKKRSMELQAGQPARKGNQRGPAYTYNVKELRNREMLVATQAERAYEHFVGQWRPRGPGKGVRERLNPARHE

SEQ ID NO: 424345 - protein, 334 aa, unidentified
MEQTQDNEVIIERVAALDIGKATLMCCTRVPDPGRSGHRLQEVKEYSTMTRSLMGMAERLLDLGVTRVVMEATSDYWKPAFYLLEAHGFETWLVNARDVKHLPGRPKTDRLDAVWLCKVAERQMLRPSFVPPPPIRRLRDLTRYRAALVSDQTGEKNRVEKLLEDAQIKLSVVASDIFGVSGRDMMNRLIAGERDPLVLADLARSSMRKKIGQLQEAFVGRFNEHHAFLLARMLARIDALSADIDQVEARIEAEIAPFAQTVGRLDEIPGVGLTAARVIIAEIGVDMSRFPTPAHLASWARFAPGIKESAGRKKGTGATGHGNPYLMGVTGPTA

SEQ ID NO: 424346 - protein, 336 aa, unidentified
MEHLAIDLGGRESQICVRSSDGQIVEQRRCRTTALPAYLSTRPRSRVVVETCSEAFGIADAALSVGHEVRVVPATLVRSLGVGARRLKTDRRDAQVLSEVSCRIDLPSVHVPSQQARQRKTMCGMREALVGARTKLVNTVRGCLRAEGRRPRGGEVSTFASRVRVIYADTPLPTYVERQLRTIESLDREIADADRELTATAKADPIARRLMTVPGVGPSTSVRFVAALDEISRFSGAHAVESYLGLVPGENSSSERQRRTSITKAGPTALRWCLVQAAWAARRTRRKDPMQRWADEVEKRRGTRVAVLALARKLAGILYAIWRDGTEYEPRRSSAI

SEQ ID NO: 424347 - protein, 408 aa, unidentified
MEVFHERCAGIDVHKEVLYVCVLIGQGRTFQKFKFKFGTFHHQLLEMRKKLVELGVTHVLMESTGVYWMPVYDVLEGFVEIVVGNAQHIMNVPGRKTDENDAEWLAKLLRYGLVKPSFVPQRQFRELRQLTRYRRAIVQTRASEQNRVEKHLQIAGVKLSSVASNVFGVSGTNMLNSIADGTTDPTRLAELALGRLRKKIPQLREAFTGSISEHTQGLIATQMDQMNRLECTIAQVELKIDHKVEPHAELLARLDQIPGIDLRSGIDILAEIGTDMSAWATHRQIAAMAGLCPGNYISAGKRLKNRSRQGNPYLKSILVQAAASAINTAGSYYQSKFRRLKQRRGHKRALVAIAHAMLITIYHMIKKGEDYRELGANFVTDYEDGRKKNDLVKQLQKLGYAVSLTELA

SEQ ID NO: 424348 - protein, 361 aa, unidentified
MEKVIRIGMDTSKSVFQLHGVDESERPMLRKKLRRQQVLAFFGKLEPTEIGLEACGAAHYWARELAALGHRAVLLPPQYVKAYVKRGKNDAADAEAICEAMSRPSMRFVPVKSAEQQAAQMLIGTRDGLVRRRTQLSNAIRGNAGEFGLVAAKGLGRLEPLLARIAADPGVPALAKQMFALLAREYAELDARLTEIETRLMAWHRQNELSRRLAEIPSVGPVGATAMAIKVTDPKAFRCGRDFAAWIGLTPKDHSTAGKLRLGVITRAGDEMLRSVLVAGATAVIQQVRRGTGRPSPWLAALLQRKPPKPAAVALANRTAPLAWKLMVSGERYSPNHAAQRRSRALAWQGEPAEAVAAIGA

SEQ ID NO: 424349 - protein, 355 aa, unidentified
MTNVPGPVTGGVDTHGETHHAAVIDQVGQQVADAEFPTTAAGYRALLAWLHGQGQVERVAVEGTGAYGAALGRYLREQGVAVVEVDRPDRKTRRAKGKSDPIDAYAAARAALSGQASGTPKTRDGKVEAIRVLRNARGGAVKARTQAVNQLKGLLVTAPAALREQLRSLDTAALVGACAHLSPGTDLSDPANAVKTALRRLATRIRAFDTEIADADRDLAPLVSAAAPRLVALMGVGPEVAGQLLVTAGDNPDRLRSEAAFAHLCGVAPIPASSGRTDRHRLNRGGDRAANCALYRIVLCRLRYDPATQAYAERRTKQGLSKPEIIRCLKRYVVREVYHALLPVPKQTEDLAPAA

SEQ ID NO: 424350 - protein, 355 aa, unidentified
MFYLLFYQGFSEKIKKSFQIDPGSLNEFYHNPDHNTYVMIEASTNTFKFVELLRDKVRKVIVANTYKLKLISHTKKKTDKVDAKKLAVYLKMEIMSGEELISSVYIPNQKIQDLRSLFVTYKLIRKETGALKNRIHALLKQNLFPFTKQFIFVKKMKEAILNIKMHDTLRFQISLLFETLDQLEDKLQKVKEKIYLEGSFYRKQIDILTSMKGVSVITALAIIADVATIKRFPNCKHFTSYLRSAPGIDNSNETHRVLNTNKQARKLSITFISQSLNHFRDNDPRLRGWNDKLNSFNKPKGKIRMGLCRKVFAQIYQMLKKEEYHWYRDSENHKKKMMEYDRFLEKNSLLLRKSA

SEQ ID NO: 424351 - protein, 413 aa, unidentified
MLRIVYSVCCGMDVHKSFLVACIATTNGQGITTYKSKRFSTFSGDLRRCAVWLAGNNCKDVCMESTGKYWIPIYNILEPTCEIVLAHPKYVKAIRGKKTDKKDAKWIADIFKHDLVCGSFIPPADIRQLRDLMRYHWKLTTFTTGEKNRVQNCLTVSNLKLDDVFSDVFGKASSAIIERILQNPSDKLTDISVFRTKGMKASDEEVLAAVDGEMCAEQAEKLRIIRSHMDSLNLCKLNLESLILTTAEKYLPQLNLVLTVPGIKSFSAIGIISEIGVDMSVFPTSKQLCSWAGLTPQNNESAGKKKTTRISRAGAYIKPLLVQCALCAIRAKQNPEIRNRYLSLKKRRGHKKAIIAIARMLLTAIYNILKKNEPYNPELYRKGDKPPIHREVSVEQAVFILQRQGYLVSVPTH

SEQ ID NO: 424352 - protein, 412 aa, unidentified
MDVIHQRCAGIDIGKADVKVCVRVPGPGTRRRTEVRTFSSMTRDLLAMRDWLMSERVTLVGMEATGAYWKPIFYLLESEVECWLLNARHMKTVPGRKTDVKDAEWIAKLVEHGLVRPSFVPPQPIRQLRDLTRYRTEVVRERTREAQRRHNVLEDAGIKLTCVVSDVLGKSGRAMLEALIAGERDPHTLAELALGRLRGKQAVLIDAPTGTFTEHHAFLARAMLDRIDAATAMHNRLTARIDSLVQPYRRRVELLASVPGVSEHTAQVILAEIGSDITRFPSAGHLASWAGVCPGNNESAGKHSSGTTRPGDPWLKSVLGQAAIAASRSKNTYLAARYRRVMARRGRKRALVALQHSILIAVWHMFTNDTTYHDLGANYFVERAGKARGTRRLIGQLNHLGYQVTLNPLAVT

SEQ ID NO: 424353 - protein, 424 aa, unidentified
MKFKMQDKQNQLIERISSQHLVVGVDIAQEVHVARAVNFRGIIVGDPLSFNNNEEGFARLLQWMNQLQTLKGFDSTIVGMEPTGHYWINLSKWLYEQDIEVVTVNPHLVKKNKENRDNSRSKSDKKDALVIADMVKNGYYSFIRPASEAFEKLRVLMSNRDMTIKRLVSAVNQINRWVDIVFPELRQVFKDVKGKGAIATLRLFPTPLELRSMKAQDIVNGWKTQMKRQAGLKKAQLLIELAKHSVGTHQALDAYKLHLEQLIEEFDLATIQLERVEKEVTEVLKQITFARKLLTIKGISEIALAGILGEAGDLSGFAHGNSLLRHAGLHLAEASSGKWKGQIVLSKRGRSRLRRFLYLATMSLVMNNPDFKELHSNNVHVKKMKKMKSIMKLINKFARILVGMARKNESYRPDEVHPITPLAA

SEQ ID NO: 424354 - protein, 351 aa, unidentified
MTTMTSADRFVTGGVDTHRDFHVAAALDQLGGVLGTAQFPTTPAGYRSLLAWLSGFGQVVEVGVEGTGSYGAGLARHLAEADIAVIEVGRPNRQVRRRHGKTDVVDAIAAARVVQSGDATAVPKSHDGPVEALRALKMVQRSGRKARTQAINQLHALVLTAPEELRGKLRGLKTRQLITTCAAFRVRTDDETLAAVLRLSMRELAQRVLLLDDQNRTVTTRMRRITTDLAPVLVATHGIGPDTAATLLITAGDNPERLGHEKSFAALTGTSPIPVNSGQIQDRVRLNRGGDREANSALWRIAIVRLATDPDTRDYLQRRQKEGKTKSEAIRCLKRYIAREVYNALPNQAPA

SEQ ID NO: 424355 - protein, 348 aa, unidentified
MEFYAGLDVSLEATSVCVVNGEGKVVREGKLPSDPDAIELFLAEWGIHLKRVGLEAFSFSAWLYAALDEKGLPIVCIETRHTKAALNAMLNKTDRNDARGIAQLMRTGWFRPVHVKSREAQALRMLLAGRKALLGKVLDMENMIRGLIRPFGLKVGPVSIGKFDGRVRELVAGLAELEQIVEPLLAARAAMRLQFARMHRLALAAARQDKAVRRMMTVPGVGAIVALTFRATVDDPARFRKSVTIGAHFGLTPRRYQSGETDWSGRISKCGDAMTRAMLYEAAIAILTRIPKTFKLRLWGLKLMKKKGLKKAATAVARALAVLLHKIWVDGSTFRYGVGLKGGRIARA

SEQ ID NO: 424356 - protein, 412 aa, unidentified
MQVVYRCCAGLDVHKKTVVACVLTSTAATTATQEVRTFGTMTRDLEALSGWLVAAGVEQVALESTGVFWFPVFNLLEEAGLAVTLVNPRHTKQVPGRKTDVGDAAWLADLVRHGLVRASFIPPAEIRALRELTRYRATQVRARAKEVQHLLKTLESANLKLANVATDVVGVSGRQMLAAVASGEEDPEALAQMAKAGLRRKLDALEEAFIGRVKPHHRVLIRVSLDLLRFLERSIEQLDEEVERALAPFAAQRAALVAVPGIGEVAAAAIVAEIGVEMDRFPSAAHLASWAGVCPGNKQSGGRRLSSATTKGNAWLRRILGEVAWAAIHERNSVFRARYYRLKPRLGAQQAVVAIMHQLLKVIYHLLKTGEAYHELGPDYYQPDDPQRTVCRLTKRLERLGYRVTLAPAPAA

SEQ ID NO: 424357 - protein, 411 aa, unidentified
METTYKIVGIDVHKSMLAVVVADVAAEGEFQFERRKFGTTESELRQLAQWLAERNVREAVMESTALYWRPVWQQLEGQCDLYLAQAQSNRAPRGRKRDFVDAERLLRRHVAGELILSFVPGPEQRMWRTMTRAKHQLTRDRVRIHNQLESLLEDGRIKLSGCVSDLLGLSSRRMLKALAEGERDASRLASLADPTLRATSEQLQDALYAAPTLSALHRQILGLFLTRLELIEHQIEVLDTSVGQALRAHQDAVLRLAEVPGYGVDSAQQVIAEVGPVAATFPSPEQLSSWVGTCPGREESAEVSKNNRSPKGNRMMRRVLNQVAHAAVKTKGSVFQALYRRFVIRLGHNKAIWAIAHRLCRLTWKILHQGVRYIEFGTRSNSKAAQTRINRLIRELRSLGYQVQLPQTTTP

SEQ ID NO: 424358 - protein, 349 aa, unidentified
MEHYVGIDVSLELSSVCVVDVGGKIVAEAKVESHPDAIINFLRKLGLSVKRIGLEAGPLSQWLHAGLTKGGFETVLLETRHVKAALSAMTVKTDRRDARGIAQLLRMGWFRPVHCKSPGSQEVRALLVARKQLLGKLLDVEFSIRGILRGFGLKMGVVTRTGFEARVRELCAGQAMLEQIAEAMLAARAALRKEYSKLHKAMLALVRRDEICRRLMSAPRVGPLVSITFKTAIDDPARIRKSKAVGALLGLTPRKYQSGETDVTGGVSCVGDEMARTALYEAANAVLSRVTRFSALKRWGMDVAKRRGTKRAKVALARKIGVILHRMWVEGTSFRWTKEASKAPQLARA

SEQ ID NO: 424359 - protein, 299 aa, unidentified
MPKYSTAFGMDVHLRSTTVCALDADTGEAVTRRFPGNPWGEIAGWMDGFPGPSLAAYESGYLGFAPQRELAGLGVECVVAAVSKIPRSAADSASKNDRNDAARMAKAILAHDISPVWVPSPEVEGIRDLAGAYDGATARLATAKQRLLAFLAKRGFVYGGTTPAGNPRKYWTYDFLRWLDKVRPEDDGGVRTLAALRNEVEAAAEARAVDLLSEYRAAVDASPIAAEVAALQSIKGCAFALAAAFSAEVGDFTRFRSGRQVTAYFGLAPSQRSSGDSVRLGGISGAGNALVRKLAVEGS

SEQ ID NO: 424360 - protein, 367 aa, unidentified
MRKHNTAKESAVTGKRANRKLTVGIDLGDRSSRYCILDEQGEVLAEGIVAMTKRGFAQIFGSKPRSRLALEVGTHSPWVSRYLADLGHEVIVANPRRVRLITDSTRKDDRLDAKTLARLARIDPELLSPIRHRSAQSQADLMVIRARAVLVEARTMLVNAARGVTKSFGERLESCGTGQIREELATSLSEPLQNALKPLLGEVESVSERIRAYDEQIENIAKSRYPVSALLQQVHGVGTLTALTYVLTVDDPYRFRRSRDAGAYFGLRPRRRESGDSRPQLRITKEGDAYMRKLLVQCAHHILGPFGPDSNLRRWGLELAAHGGKNAKKRALVAVARKLAVLLHKLWVTGEVYEPLHVRKGSTEVAA

SEQ ID NO: 424361 - protein, 412 aa, unidentified
MLFVGDDWAEDHHDVEVVGEDGRRLAARRLPEGPGGIAALHALIARFVPEEWAELDPLAAAARVKVGIETDRGPWVAALSAAGYEVFAINPMSVSRYRDRHSTSGAKSDAGDAHLLAEIVRLDRAHHRPVAVDSTLSQAMKLVARSHQSLIWERTRHVLRLRSTLREYFPAALVAFEDLDSSEALELLAAAPDPDRAARLSKARIAAALRRAHRRKVAERAEIIYSTLRDAALRQPDAIQAAFAVITASEVRLISVLTGEIDSLGEVVAEHFGRHRDADIYASQPGLGVTLGARILGEFGDAPGRYVDARARRNYAGTSPITKASGTKRVVLARYARNRRLSDAVRQWALGSLRGSPGARTYYDTMRDRKIGHEAALRQLGNRLVGILHGCLKTHTLYDETIAWAHWNTLAA

SEQ ID NO: 424362 - protein, 387 aa, unidentified
MSEAFDPRKSTTAFDQASTLVVVVELSGKSWRVGANAPGVSRRPLRTVAARDIGAVLEAIERWKGEANKVGCEVGRVVVGYEAGLDGFWIARALTAHGVEVYVMHPASISVERRGRRAKTDRIDVDILLRTLLGWLRGEPRHCTMAPIPSEAEEDMREPGRQREALTAARLKVENQMRSLLARFGIADFRPRLKKAAELLTRLRTVDGRPLPPNTMASLERLLAQHQLLSKQLKEIETAREQVVAVADPDRLQRMIQMLAGLVGVGVETATTLVHEVFSRRFRDRRALAAFVGMTGTPYDSGGSTREQGLSKNGNPRVRRMLTQLMWRWTIFQPQSLLTRGFVARTGGAKGRMKKIMAVALARKLLVALWRYVETGVVPEGARLAAA

SEQ ID NO: 424363 - protein, 404 aa, unidentified
MPVHVAPVTSSTIVVAFDVGKTSALFSVTDADRHGLIKPSEFAMNRAGLACAQSRVMAVIPASAQVKVAVESAGHYHRPVLDHRWPDGWEVLELNPAHVAEQRRVQGRRRVKTDVIDLEAITEIVLAGRGYPVTGRDAVIGEMSAWAGHRNRRVATRSATKNQLLGQLDRAFPGLTLALPDVLGTKIGWLVATEFSDPSRLAALGVNRLIRFAAARDLRLRRPVAERLVTAARDALPTRDALIARQILAADVNLLADLDAQIQAAEAQLAILLPASPFATLTTVPGWGVVRVSNYAAALGDPNRWPGPRQIYRASGLSPMQYESAHRRRDGSISREGSVALRRALIDLGIGLWLTEPSAKAYAAGLKDRGKRGGVIACALAHRATRIAHALTRDHTAYDPARWS

SEQ ID NO: 424364 - protein, 444 aa, unidentified
MDVIFTHCAGLDVHKKTVMACRVTPDPTGQQADGLMELQEFGTMTADLLMLSDWLAAAGITHVAMESTGEYWRPVYNLLEGNFTIFLVNAAHVKQVPGRKTDKADARWLAKLMRYGLLQASFIPPQGQRDLRDLTRYRTKLVQERSREVNRVQGVLERANIKLAAVATDMMGVSGRAILAALLAGRADPATMAELAKGRMRTKIPLLEQALTGLMRDHHRRLLALQLAHIDFLDEQIDTLNTDIARGLMALGPSEPLAPSGREAGGNTGAPDMATGPLPFPRAVSVLDTIPGVDQRGAELLVAEWGTDMTRFGTAARLAAWTGVAPGNDESAGKHRSGKTRQGNRALRTGLTQMAHAAARTKGTYLSALYHRLAARRGKKRAIIAVAHAMVVSAFHMLSRHESYQELGGNYFDEQRRHHLVHRLTRRLEHLGYRVNLELLPATT

SEQ ID NO: 424365 - protein, 369 aa, unidentified
MADHTLFVGLDVHKRTIAVATAPDTAGTSCTYYGTIANTPDALRRLCKKLAAAGAELHFAYEAGPCGYVVQRRLSRLGHRCDVVAPTLIPRKAGDRVKNDRRDAMTLAQNLRAGHLVEVWVPDEAHEAMRDLVRMRALAKRDQRRARQQLQSFLLRHGRSYSGSSWSKAHRGWLADLSFAHPAQHLVLQEHVRRIERADELCERVNQAIVDLLPAWTLAPVVEALQALRGISVVNAATLVAEIGCFGRFDHPRQLMAYLGLVPSEHSSGQTIRRGPITKSGNTLARTCLVEAAWTYRFPARVSRIIQGRSGHLPEPIRATAWKAQVRLTRRYRRLMAAGKVAPKVITAIARELLGFIWAIARMVEPKTA

SEQ ID NO: 424366 - protein, 404 aa, unidentified
MKTYILRNPKPVQPQKASRPGVPRPVAPATPKGPVLCIGLDVHNDSIAVSLAPSDSTEVRRYGIIGGEHDDVLKLAKKLADAHPGTLLRFCYEAGPRGFALCRCLQTHGWDCILVCPSKVPRKPGERVKTDRRDADDLARLYRAGELTGIYVPAPADEAMRDLIRARFQVGRQQHRARQQLKMYLLRQNFRYGGQTSWNAAHLRYLAKLKMPFPVQQIVFQEMLEVISEATARLERYDREIERAVPGWRWAPVVRALMSLRGMALLHAATLVAELGDFNRFEHPGQLMGYLGLVPSEHTTGNDRQQGGITKMGNAPARRALVEAAWQYRVPARLSPHLKKRQEGLPKAITDIAWEAQRRLHHRYTHLTRVGRKKSQVAVTAVARELAGFVWAIARQVPPVTRPT

SEQ ID NO: 424367 - protein, 392 aa, unidentified
MFYTGIDIAKDDHELSIIDENGSAIGGSIKFKNTKNDCEKIIGRFNQYSINNSNCVIGMEATGHYWLSVFTYFIGLGFDVKVINPIQTNAFRKMYIRQVKNDSKDSFIIAQVMRFGEYSSSALLNDDMMALRQLARYRVCLVDSCSVVKNQVIGVLDMVFPEYANLFSDIFGVTSKELLLKYSTPEEILKVSTTKLANFISKCSRGRFGREKAEEIKSCAENSFGIKIAIDSFSFQIKQMIEQIQHTEKQIEELDGKIKELFEKTNSVITTIPGIGDTLGAVIMGEIGDISRFEHASNLIAYAGLDAKVKQSGKFTGNNMKISKKGSPFLRRALWLAATSAYRSDLVLSKYYNSLTSRGKHHSTAIGAVARKLCNIIFAVLKSNEPYKVPVS

SEQ ID NO: 424368 - protein, 315 aa, unidentified
MRDVPCFVGIDVAKAQLDIALRPSGERWAVPNETSGGTTLVDQLQARHPTLIVLEATGALERLVASALATAGLPVVVVHPRQVRDFARATGQLAKTDALDARALAHFADVIRPTPRPLPDAQTQELRALLGRRQQLMGIRTAEQNRLAGTSTRLAKDMTEPITWLNARLATLDNDLETVLRASPLWRDNDDLLQSAPGIGPVCSRTLLLELPALGTLTRQQIAALGGVAPLHCDSGTLRGRRTIWGGRAHVRTVLYMGPLVATRFNPQIKTFYERRLAAGKVKKVALTACMHKFLTILNALLKHRTPWQPQEVQN

SEQ ID NO: 424369 - protein, 400 aa, unidentified
MLSVGIDVSKEKSTVCGMRHLGEIVFGPFEIAHTESDLSELARMIVRLDDDARVVMEATGIYHLPVATFLREQGLFVSIINPYEMKVYRSQDIRKVKTDKRDSMVIANYGVDKWINLREFTPQEDVYVELRLLGRQYRFFMESRIEQLLNLTHLLDYTMPGLKSCFSGWSEYSGKDKLCDFVEEYWHYDNIIKFSESKFVERYQKWTKKKGYQFSETKAVQIYRLAKEGIPTVPSNAPSTKMLLLEATKALREINSALFAILTRMKELAKTLPEYPVVRAMSGVGDVLAVKLMAEIGDIRKYHSSKSLVAYAGIDPPPYESGKLIGTNRHITKRGSSTLRKIGYEVMRCVKANGRSEDDPAVYDFMLKKESEGKAKKAAKIAALNKFLRIYYARVLEVYA

SEQ ID NO: 424370 - protein, 411 aa, unidentified
MPYTIAAIDVHKKVLMVAVADMSAPEADQHFEHRRFGATRSELQALAAWLEQRAVQEVVMESTAQYWKPVWLSLEPHFQLHLAQAQSNRAPGGRKSDFRDAERLLRRLVADELFLSYVPEPEQRLWRTLTRSKVQLVRDRARLQNQIEALLEEARIKLSSVVSDLIGASGQRILRALAAGEHDAQRLAALGDRRLQASEQELADALNGDLQPAHRAILQLFLARLELVDAQLVCLSQLAADQLRSHQCAIARLVMVPGIGLDSAHQILAEVGPTAQAFPTPEQLCSWVGVCPGRNESAEHNHSGRCPKGNRYLRRILCQAAQAAVRKNGSFLQALFRRLLPRLGYLKAVWAIAHRLCHIVWKILHQGAEFIEHGQLGSSQEQKRRARKLVTQLRRLGYSVELNFVAPPQAG

SEQ ID NO: 424371 - protein, 352 aa, unidentified
MAVYIGVDLHVRTQTVCWLDTTDGEEHEIALVHERDDVRAFYSRFPVPVLVGVEASGYSLWFHRLLEELGHHLLVGDALAIRQFARRRQKNDRRDARLLLELLCHGEFPAIHIPAPASREVLALLRYRHRLVRIRTMLRNGLQAVALSHRLRLGPKLFTVHGQQQFAALPLTSAFAIQRQHSLTLLASLAEQVHAVEQALEARAHDDLRVARLRTHPGVGPLTSLAVVHALEPVTRFDRARRVAAYCGLDPQEHSSGDTQRFGHISKQGNRLLRFLLIEAAHNAIRGDHDLRRFYFHLQARKNSSVAIVAVARKLVLRLYRMLRDEIDYDQFRRRGRDARRAREDASPVTPG

SEQ ID NO: 424372 - protein, 362 aa, unidentified
MSESTTIIAFDQHAQSVMAAVLSPRDAEPALHALTSDLPAIGRFVRGVLEHGPVQCCYEAGPCGFALQRFLTAHDVPCEVIAPTLIPRRPGDRIKTDRRDARQLAVLYRAGALTPIQIPSEQEEAIRDLLRCREAMNADLLRARHRLKKFLLRHDRRYTHTKCAWGPRHTAWLRSLQWPLPALEQTFGAYLRAVEETATRLAILDETVRTYFACELFAEPVRRLRCFRGISDLGALTIAAELGDARRFPTASRVMGFVGLVPSEHSSGTRRGRGAITKTGNAHLRRILLEAAWHYRHPPQVGVKLRARQRGAAPEVLSRAWAAQHRLSRTYRRLTGRGRPPQIAVTAVARELVGFVWATLAS

SEQ ID NO: 424373 - protein, 455 aa, unidentified
MQTFYLGIDASKGYADFIIINRYKKVVFESFQLDDTFDGHCLLYELLMNFSTDHPDSIICAALESTGGYENNWHNVLLEFQGTLNLQTARLNPLGVHHNSKADLKRNVTDKISARNVAEYMIAHPEKVSYQSQDHLASLRKQWGFVKMLTKQCTQLLNQLESLLYSANPEILTYCKDGVPAWVLKLLVKYPTAANLARAKMGSVSRIPFVSTAKAEALVLNAKKSVASAVDEVTQQLVAATVKQILHLKETIKIQGAIMARACAVPEVELLKTFIGISDASAIGLMLNIQSVKRFKTVKKLAAFFGLHPKLKISGDGVSYVRMSKQGRAEPRQILYMVAMAAITRNPLIREIYQERVGQGMEKMAAIGLCMHKILRIVYGMLKNNRPFDPEIDRRNRQKPISHRKQKQNKIRRYQDYDFKAPISRRQKAKRMEQRQSQSDNGAECGILAPVPFPT

SEQ ID NO: 424374 - protein, 338 aa, unidentified
MKLYGGIDLHSNNHVLALLDDEGQTVYRRRLPNDLATVLEELAAYREAIEGLVVESTYNWYWLVDGLMEAGYRVHLANTAAIVQYAGLKYTDDNTDALWLAKLLRLGLLPEGYIYPKEERAVRDLLRKRSQLVRQRTSNLVSVQNLLARNRGDSLSANAIKRLSFDQVDRLLPQAHLALAVKSNLGVIRALDELIDGLEKVVKAQIKPRPDFQPLLTVSGIGEILGLTILLETGAIRRFPGVGHYASYCRCVGSERVSNGKRKGRGNTKNGNKYLAWAYLEAANFAVRYNPLIKRYYQRKCAATNGWVALKTVAHKLARACYYILRDHVAFDVKKAFA

SEQ ID NO: 424375 - protein, 343 aa, unidentified
MKITRVGVDLAKKVFQVHGVDRAGRRVWQRQLKRSSWLSVLTETVEPGCEIGMEACGGAHHWARELKSRGFKVKLISPQFVKPYLKSLKNDVNDAEAICEAMARHHMRFVAIKTVEQQDIQAMHRVREGLMNHRKAKANQIRGLVAEYGLVAPRQMGPLRKAIPCWLEDAENGLRSAFRVLLHGLWEDLQNLDVRLNVLDKEIFALSESHADAKRLKQLRGIGPLIATAMVAQFGDGRHFKRGRQASASVGITPRHAGTGGKNHLFGITKKGNPYLRSILIHGARSVVSKAKHKDDRLSRWVTELARRKHPNVAAVALANKTVRIAWAMLRNGTDYDPELAMA

SEQ ID NO: 424376 - protein, 349 aa, unidentified
MTIVEDTHVITGGVDTHAEMHVAAALDPIGGLLGVREFPAAAAGYAELLDWLGSFGPVALVGVEGTGSYGAGLARHLAAAGIRVVEVDRADRQDRHRQGKSDPLDAVSAARAAQSGRASGAPKGRDGAVEAIRALMVAKRSARHERTQAINQARALIVTGPDELRARFAGHTPAALVGAIAALRPRGGDVPGYATRVALRELGRRAQFLDAQLDRLDELIGPLVTARAPGLLSLHGVGPDTAALLLIAAGDHPERLRSESSWAHLCGVAPIPASSGKVSRHRLNRGGDRQANHALWRIVITRLSSRPGHPATRAYAGRRSKEGLSKTEIIRCLKRYVAREVYHQLRDSL

SEQ ID NO: 424377 - protein, 530 aa, unidentified
MNEPGVREETMALLRYKVNGSATYDRHVIGASPRRSQRRGASPLLSMVGDSSATVVSGVSRIPFERSSRIRRLPWRCRSLTMMEQPMAVRKREDEVFPNAAGIDIGASSHWVAVPRHLAEAAGDEPVREVGAMTDDLNGLARWLVKLGVDTVAVESTGVYWIPVFEVLEQHGLKVWLVDARQMKYVPGRKSDVQDCQWLQKLMSLGLLRAAWRPSAEVCVLRAVARQRETLVAEQASWVQRMHKALVQMNIQLTEVITDVMGQTGQAIIRAIVAGEREPKVLASHRHRRVKAAEADIVRALEGNWREEHLFVLKQALGVYDDLARHLAECDSRLDALLDERANQAVDIGKLPRQGSKSRAEHDVRQRLADWAGVDLTRINGLGVTVVMKLLTEIGPDLSRFASVKHFCSWLGLCPGTKISGGKVLSSGTKRSANRVRQALKMAAMALCRSESALGAFYRRLCSRMDKPKANTATAHKLARMVYFMLTRGEAFVDQGQQRYEEQQRQRSIVALRRRAAALGFQINPVEIPA

SEQ ID NO: 424378 - protein, 331 aa, unidentified
MSMHLQGGVAKDAARPNAGIDVSKEHLDVCCGHDKRRVSNDVRGWDELAAMLRAAGVDLVVVEATGGYERGLVCALQGAELCVARVNPRQARDFAKSMGVLAKTDAVDARTLRDFADVLARHAQRQRYITPMLEQARRDLSELMTRRRQLVDMRVAEHNRLEHAGARAARSIHSVLKLLDKQIVALDRQIDDHMDRHFKSQRALLDSVKGVGPVTVLTLTAALPELGRLGRRQIAKLVGLAPLADDSGRRQGKRRTWGGRSNVRAVLYMAAIVAMRHNPVIREFYERLLRAGKPKKVAIVACMRKLLTILNAMLRDQSMWNAAHHLSSPSA

SEQ ID NO: 424379 - protein, 370 aa, unidentified
MLDTTTFVGLDVHARSIKAVSLDVMTGEVRAATFGYDAGAVAEWVRSVDPRARCVYESGVTGFDLQKRLSGLGVDCVVGAVSKMIKPSADRRRKNDRNDAEFLARMLSVGNVVEVWVPDDECEAARDLTRALEDARDDLSRSKQRLSKFLLRHGLVFDERTPTGRRKGNWTRAHWSWIESIGFAEGADNDVLAYYVDAVRRAAEEKARLEGLVEAEARKPRWRKRVDSLRCLKGVDTASAADLVFEAGEFSRFGNARSFAAWVGLTPSEHSSGESDRRGAITKAGNKHLRKTLVEAAWHYLTCSGRPKDLARGQAPDRGARRHAAKGVRRLVERREALLARGVHGNKANVATARELACWVWAVGLMAEEA

SEQ ID NO: 424380 - protein, 376 aa, unidentified
MIKHSLGIDVSASSLACCISSIDLQQQVQVLATRTFANSQPGFKSLIHWTKKHHKQTHIPLVCLLEATGVYYENCALALTTAGLYVSVILPNKSKKYMESLGLKSKNDKIDARGLARMGAEQSLPRWQPLSKYFFTLRTMTRQLESLQKTKTSISNQLHAAENNIYKVGMVTRQLKSLIRTLEKQIKALEAAIADHLRSEAQMTEKVAHLCSIKGVGLKTAAVILGETNGFALIENVSQLVSYSGYDVVEDQSGKRVGKTKISKKGNSRIRRALYFPAISAVGCGVKPLHDLFHRTHGKHHIKMKSYVAVQKKLLILIYTLWKKNEPYKEPDPENECLERTQVTQTVNGQKRKFPTNGREPQGKPPHEMAVSSQME

SEQ ID NO: 424381 - protein, 426 aa, unidentified
MRVLYDRVAAIDVHKDMVKVAIRVPGAKRGTRKTDVLEFRTFYGVLQAMARELRGRGVTHVVMEASGVYTDPVYYALRELDFTEVMVINPAHAKALKGHKTDAKDAIRLLDLYECGLLSGSYMPSEDLREVRDLARYRMKTVQARTSEIQRLQKTLETAGIKLSSVLSDVTGASAAAMIEALISGERRGSVMAGLAQTRLRTAGKMADLSMALAGRFTDHHALMCRLHRDRITIFDDAVKDLDAKIAPLVARYAREAELLKTLPGFGDVIVAGWLGAIGPAPYQHFATASRLASWATICPGNYMSARKSKGGRTGDGGAYIKPLLIQAAWAAVRVPGRLQARFGRLVRKFGGPRNKGARKRAITAIAHTLLKIAYSVLKTGKPYADLGADFYTRRESPDARQDYLMRQLQKLNPGCVITITPAEAA

SEQ ID NO: 424382 - protein, 469 aa, unidentified
MEVSFKPLAVCLSDWTTILQCGFASVHLKLDSYMRGCRCSMIMGFTKPIEHFNLQRKKVITMNTLYVGIDVSSKSNVIYLMLPNGDKHSNFSVANSHEGSTQLVKRILSALTSHSLDTVLIGLEATSVYGDNLVYFLREDATLAPFNRKIHVLNPKQVKKFHDAYNDLPKNDYVDSFVIADCLRFGRINKEVYMGDYRYKALQNLTRARFFAVQNLVKEKQRFMNVLFKKYSTMTQEKVFSDTFSTTALAVYDEFESAEALANMDLHELTDFIIEKGKNRFPDPDAVAKAIQKAARSSYRLPKTVNDSVNQVLSISITSMKALESQIKEFDKAIKAQMELLPNVLISIPGIGPVYSAGIMAEIGDINRFNSQAALAKYAGLAWKQHQSGGFESEVTRLIPSGNRFLKYYLCEAAFSLVRCDKEYSDFYRLKYKEVNRCQHKRALALTARKFVRLVFRLLKDNRLYCPAK

SEQ ID NO: 424383 - protein, 457 aa, unidentified
MNAPKKVKKKAISKANIQMPTLHPHAAGIDIGAAEIQVAVPCDADPDPVRTFATFTDDLHALRDWLLKCRVKTVAMESTSVYWIPIFQILEAAGLEVCLVNARHCKNLPGRKTDISDCQWIQYLHSVGLLRASFRPPEQICAMRSLLRHRANLARYAGSHVQHLQKALTQMNLQIHNVISDLTGVTGLAILDAILAGERDPQKLAALKDHRIKASHDTIARSLHGDWRLEHLFVIQQALDTWRHYQKLMGQCDEHIQQQMARFDSKVDLNQHPLTANRRGNKKPQRNEPKFDARTELYRLCGVDLTLVPGIQVTTALVLFTELGPNFVTRFPTAKCFSSWLGLCPDNRITGGKIISVKTRDVKSRAAMALRLAAQSLWHSKDYLGECFRRWKARLGTPKAITAMAHKLARIIWHLIKFSTPYDPAVWKQAEAKLKQKKIKRLQQNAAALGYQILCPS

SEQ ID NO: 424384 - protein, 351 aa, unidentified
MKKRNSAPELAFQPDAAYLGIDVSKEHFDAALCLARHRTLQEVICKRFGNDANGIKALDKWLTSQGVDSALRPQLLVVMENTGIYHRRLWQYCCVQNLHATIGNAADIKWSMGLVRGKDDVTDSMRLCEYAYRHEDRLWQADAFDEDVLLLKDLQTLRRRLLKQLSANKVALGELHGINAKATHAIIEKASKAAIEGIKKSLREVEIQIKTLIRSNEAMCKNYKLLLSVPGIGKVIAVYLIACTANFVGQPTGKQLACYAGVAPFGKSSGIIKGKPRVHKMANKELKAILHMGARSVANHNPEAKAYYERKAKQGKHDLSIINALKNKILLRAAAVIRNGEPYVDNFKAAA

SEQ ID NO: 424385 - protein, 341 aa, unidentified
MEIDILGIDLAKHVFQLHGADRRGRPVHRVKISRGSLLEAVRTLKPRMVIMEACGTAHHWARRFRSLGIEVRLISPQYVSPFVKTNKNDRNDAEAIVEAGSRPAMRFVAIKSVEQQDIQAAHRMRAILIRHRTALINQMRGLLGERGLTISRSPEAFKRAIPDLLSKSADELTSFCQTLLTELLQHLKAIEERVHLIEASIQSFMKQSTLCKKIAQVPGIGPITATAMVAAVGDAKQFRNGRHLAAWLGLVPRQHSSGGKSRLHGISRRGDTYLRTLLIHGARAVLRYAMKKADPQSVWLQQLIARRGYYCAAVALANKNARVVQVLLSSDSTYVTRCATA

SEQ ID NO: 424386 - protein, 422 aa, unidentified
MNFKRTNTTNQRIERITMKTAVVGIDIAKDVHAAQITDFRGRTLTSRHLSFANDRKGFEKLLDWVRQNQSKHGLTSMIIGLEPTGHYWFNLTEWLLKQQIPVVLVNPVTTHRNKENRDNSPSKSDPKDALVIADLVSRGYYTDYVPQAEAFERLKTQMNNREFWVTMSVRLSNRIVRWIDLYFPEFRQVFKDWTSVRSIAALKAFPLPSDLQGLTAEDVVQKWYEQGMRRAGGATGKAVAVKLLYAASRSIGNTHAPEEARRDLARLIDDYERLQQQLAEMQEEVEALLEDIPLTHQLRSIRGLGTITIAALLACAGDLRLYAHGQQLLRRAGLNLAERLSGKYKGQIKLSKRGDGMLRKYLYWGAISLIAQNPEFGRLHKRNQRRGMKKIASLFKCIGKLARIIIGMVQRGESYRPEMLAA

SEQ ID NO: 424387 - protein, 333 aa, unidentified
MDTHADTHVAAALDPRGGLLGVKEFPATVAGYAGLLSWLGGFGSVALVGIEGTVSYGAGLARHVAAAGIRVVEVDRADRQDRYRNGKSDPLDAVSAARAAQSGRAAGAPKGRDGAVEAIRALMVAKRSARNERTQANGQARSLLITGPDDLRARFARHPAAALAEAIAALRLRPGDAAEYAVRVALRELGRRVEFLDGQLERLDELIVPLVTARAPSLLSLHGVGPDTAALLLVAAGDHPERLRSEAAWAHLCGVAPIPASSGKVRRHRLNPGGNREANHALWRIVITRMSSHPATRAYVERRTKEGLSKKEIIRCLKRYVAREVYRHLRASC

SEQ ID NO: 424388 - protein, 412 aa, unidentified
MSFVLPEALFFTGIDWAAETHAVCVLDAAGKVAAEFTIGHSADGIATLIRRLARCGAPGDLPVAIERPDGRLVDLLLEAGHPVVPVKPNAIKTWRDGEVLSGAKSDAGDAAVIAEYLRLRAHKLRVVAPYSDQTRALRTVVRARGDLVEMRVVATNQLSALLETHWPGAKAIFADVESPVSLEFLTRYPTPAAAAHLGEKRMAAFCVKHGYCGRRTAAELLARLRSAPAGTTLESLTEALRDAVLAAVGVLTALNAAVKNLDRSIAAHLGEHPDGAIFTSLPRSGQVNAAQVLAEWGDARQAYEHPDSVAALAGVTPVTSQSGKHRSVYFRWACNKRFRVAVTTFADNSRHASPWAAKIYSDARASGKDHPHATRILARAWIRVIYRCWLDGTPYDPARHGAATALASQTAA

SEQ ID NO: 424389 - protein, 352 aa, unidentified
MSEHSKESVVTVVGIDLAKRSFHVYGADGHGKQVFSKKLTRARLSPFMANLPACTVAMEACGGAHHWARTFRTYGHEVRLIAPQFVKPFVKSNKNDAADAEAICEAAQRPTMRFVAVKTVEQQDIQAIHRMRSLVVERRTAQINQIRGLLLEYGIEIAQSRAAVGRRLPEILEDADNGLSARFRAELHELAEELRHLDARVSHYDAQLEEIARNDPQAQRLMTIPGLGAKGATALVAAVGEDPRLFQNGRGLAAWIGLVPRQHATGGRERLLGISKRGDVYLRQLLIHGGRAVLRWVEHKEDRTSRWATALKARRHTNIACVAMANKIARVAYAVLTTGKPYDPASGALAKG

SEQ ID NO: 424390 - protein, 424 aa, unidentified
MSKKKSSLAGLQALYARACGLDVHKKLVVACVRILDSKDGTVQSTLRKFGTMTADLLELRQWLAELKVTHVAMESTGVYWQPVFNLLEGHFKVWVVNAQHIKKVPGRKTDMKDAEWIAQLLQCGLLRPSFVPERQQRELRDLTRQQTKLVQQRNAVDNRIQKVLETANIKLGSVASDVLGVSGRKMIEGLIAGEKDVTALADLAQRQLRGKIPELQRALEGELNDHHRFLLHQLLGQYDFLEKEIASVSERLGAVAPPSFRAAVEQLDAIAGVGERGAKALLAETGTDMSRFPTHKHFASWAGRCPGNHESAGKRRSGKTPAANRHLDAVLTEMAHAAVRTKNSYFKAQYHRLAGRRGKKRAIGAVKHSLLVTVYFMLRDNRPYKDLGVDYFDKLNPQQRIRYHVRRLQELGQEVELSPIADAA

SEQ ID NO: 424391 - protein, 422 aa, unidentified
MNESKQFKATIGLDWADQKHDLWIRPADGSKSEHLRLEQSPEALHEWAAKLRKRFDTGQVAIGVETSRGPVISALMSYDFIVLFPINPKALKDYRAAFSVSGAKNDRTDAQLIEEFIRLHSEKLKALQPDTELTRKLSGFVQDRRHLVDERTRIVNQMHSKLKTYYPLAETLIGSEMNSLLAAEFLSRWPDLESLMAAQASTLRAFFYQHNSRSAKKMEQRLEAIKTAKALTTDPGIIEPARELVLALAGMLKCLHKSVARLEQAIELAMDQHPDAPIFRSLPGAGPALAPRLLVAFGTQRDRFGSAQEVAQFYGVAPVVIQSGNSELVRIRRRCPKFGRQTFHENASCVAKTEPWGRAYYEQQRKKHDDKHHQACRALAYKLIRIYFSCWKTRTEYKSNTYLNALQKHGSPLHNRLNRIGE

SEQ ID NO: 424392 - protein, 377 aa, unidentified
MKNVRFVGLDVHAETIAVAVAESGGEARSLGVIPNRAESVGRLIRKLGKAEQLRVCYEAGPTGYVLYWQLSELGVKCEVVAPTLVPVKAGDRVKTDRRDAQKLARSYRAGDLTPVWVPDQAHEALRDLVRARLAAKRDQLRARNRLSKFLLRHGRRAPTGMSPWADRHLQWIRSQVHFEHRVQEITLGDYLHEVDHVAARLARLECSIDAAIQELPVKKRAVIEALQSLRGIAQLSAVSIVAELGVLSRFEHPRQLMGYSGVVSRERSSGGRIRRGAISKAGNAHLRRIVVEAAWAYRHRPSVGKTLAVRQRNSSAAVTALAWKAQLRLHQRYVRLMGRGKSKQQTVTAVGRELLGFIWAIGVHVEREHHLSARQAA

SEQ ID NO: 424393 - protein, 354 aa, unidentified
MAKTTQKAIAVIGIDIGKNSFHVVGHDKRGAILLRQKWSRGQVQTRLANMPPCLIGMEACAGAHHLSRKLKSLGHDAKLMPAKYVRPYSKGQKNDFRDAEAIAEAVQRPTMKFVATKTAEQLDLQALHRVRQRLVSQRTGIINQIRAFLLERGIPVRQGFRFLRAQLPLILAAPPDVLSPRMVHMIEDLAADWRRLDERVEGVSAEITALAGSDAGCERLMSVPGIGPIISTATVAAIGTGDAFSKGRDFAAWLGLVPKQMSTGDRTILGKISKRGNRYLRVLFVQAAWVVLIKPQSWDRYGLKPWIEAAKKRLHHNVLAIALANKLARIAWAVLAKGRNFEMRRTADAVAQPA

SEQ ID NO: 424394 - protein, 366 aa, unidentified
MKKSSTVQTCRSEIFKEQELTIGVDLGDRWSFYCVLDEAGKIILEQEVPTTPEAMKQVFGKIPRSRIALETGTHSPWVSRLFTELGHEVIVAHAQKVQLITKSNRKDDRHDARTLARLARIDPELLGPVRHRSVQAQIHLTVIRARAALVSARTALVNAARGLVKSYGERMPKCGAYQVSGKLADGLSAELREVLVPLLGEIESLNERIKEYDERMEKIAKEVYPEVSLLQQVKGVGTQIALTYVLTLEDPHRFLKSREVGCFLGLKPGRRNSGESEPQKKISKEGDRYLRTMMVQGAHYILGPFGEDSDLRRWGRKLAERGGKNAKKRAVVAVARKLAVLLHRLWVSGQVYEPLRNSQKAMRAVA

SEQ ID NO: 424395 - protein, 355 aa, unidentified
MVTGPKHQKEKRSMEHFAGLDVSVKETSVCIVDDTGKITREVKVASEPDALLAVLTNPLYHFKRIGLEAGPLSQWLFSALAEAGFPVICVETRHMRAALTAQINKTDRNDARGIAQMMRAGLYRPVHVKTLRSQKLRMLLTHRKLLQSKAIAIENDLRATLRNFGLKVGVVGTVKFEARIRELVENVSDLVVLVEPLLLVRRVLREQIGILHRRLLVIVRDDDVCRRLMTVPGVGPVVALTYRATVDVPARFRNSKSVGAVFGLTCSRYQSGQVDRNGRISRCGDEMMRVMLYEAAQSMLRSKKWSWLKAWAIQIARRRGMKKAIVALARRLAVILHRIWVDGTEFQWTREAAAA

SEQ ID NO: 424396 - protein, 342 aa, unidentified
MSIVVAGFDVHRSQITFDALDQESGELSRGRIASTPEAVKQWAERFPGREIHIAVEACTGWYFVCEALTEAGAMAHLADPAETRARRAKKRRAKTDREDARLLRTLLEEDRLPEAWIPPPHICELRTLTRLRKTLVDERTAWLERIQATLFHHGVSGAPAKLRSESGRAFLAALELPAASHRRIEVSLAMIEALDAQLAPLVAELRAFARRQAGCKALMAHYGIAELMASTILAELGDVARLSSSRKAVRFAGLDVGVNRSDRRSRAGKLTRQGSPQLRWALYEAALHASKKSSPDRAYYLSLRERLSHTQATLTIARKLAKRCFHSLRELGPGALEPIPSE

SEQ ID NO: 424397 - protein, 365 aa, unidentified
MAEITRSAVARVGVDLSKRVFQVHAVDRSGRMLLAKAMSPDRFFAWCAELPAGCLVAMEACGGAHHVARRLRLLGRDARLVAGHFVTPYRMAGKSGKNDANDAAAICEAAGRPHMRFVPVKTAQQQGQLAVHRLREGFKEERTALINRIRGLLAEFGLVFPQSPEALRAVLADVIEDASNELPGVARLALQRAQLHWIDIELQMSWCDERIVGHVRCDERARKAARLQGIGPVTASALVASVGDFGQFANARQFGAWLGLVPSQNSTGGKASLGRITKRGDDYLRTLLIQGAKSAVMSAGKRTDRISRWLVQLKERVGWQKAVVALANKNARILWAVLTRDADFDPDHVPEPPAARGGLRLQAAA

SEQ ID NO: 424398 - protein, 360 aa, unidentified
MRIIGCDLHARQQTLAMLDTETGEVVNLTLMHEGKEVREFYSQLPRSVLVGIEATGSMQWFLDLMEELGIECRVGHPATIRAAEPRKQKHDRRDADLILRLLAENRFPAIWLPTKELLDLRALLLHRHQWVRIRTRIQNALQAIALANGLRRGPSLWSYDGQAKIAFLPLPPHASYRRSALQAMYRKMEEEIENLTKQVAEQAELRSGARWLMTHPGVGPVTALATDVLLGDPGRFVDGKALASYVGIIPREYSSGGNQRLGKITKQGSPLLRFLWCEAGAHAVRRDPELKRFYRRKLVQKGLGKARVAVARKLGIRLWIMLRDEIDYEEFCRRGQKQPSGAACAGMLEVGYGAKKSPTD

SEQ ID NO: 424399 - protein, 414 aa, unidentified
MDVIVERCAGLDVHKKTVVACVRTPGVGRQKRHSEVRTFGTFEHELVAMRDWLLGLGVTQVAMEATGVYWKPVWHVLDDGDHFEQVLLVNPAHIKNVPGRKTDVNDATWIGQLLECGLLRGSFVPPNEIRELREITRYRRQLTESRVRESQRLQKLLEDANVKLSSVVTDTLGVTGRLILDALCDGERDPEVLAAMAKGRLKVKIGFLRQCVPGRFNSFHAAMTRELLAHIDYITTAEHRLDEQIDRLMVPFAEARDRFDTIPGIAKRNAEIIVAEIGIDMSQFPTPAHLASWAGLCPGNNESAGKHKSTKTRSGNPWLTSALVEAAWSAVRTKDCYLGVRFRRIAKRRGDQRALIAIAHTILVICWHLLVDETTYTELGTDYLAGKDQPDRRSKHLIAQLEQLGYTVEVTPAA

SEQ ID NO: 424400 - protein, 386 aa, unidentified
MLQPKNDLRKSLIPFEQHKTVLAVVELSLRTWLVGGIVPGVHREPLKKLAADENALLRLVQRWRDEAVKAGHTITRIVVTYEAGRDGFWLARWLRRHGIEVHVIHPTSVAVSREHRRAKSDRLDIGQLKRSSLGWLRGEEAHCTMVAIPTLEEEDAKRPHREREHLVGRCTSITNRLKATLVRLGVRGFNPTLRKAPERLGELRTPEGELIPPNTVAELQRDMAHLRFLKDHIKQIEDAREEELKQAPQEPINSKVLHLRRVRSIGVETADMLVHEVFWRELRDQRAVSRYAGLTGSPDESGARRREKGLSKAGNARVRRGMIQLAWRFRTHQKHSALAQWFEARVTAGKGRKTMIVALVRKLLIALWRFVTAGEVPDGVVLRPAL

SEQ ID NO: 424401 - protein, 358 aa, unidentified
MKKTSTTASSFATAQVLGLDISDRKSTYVALDSEGAVVVEGKVGTEATAIEKLLEGAPRLHIALEVGTHSAWLAALLQALGHDVVVANPWQLGIIYKERRKNDRRDALHLAQLCRVDPSLLAPILDRGREAQLALAVVRPRDVLVTTRTELINHVRGVVKTVGARLPSCTADAFLTKAVPAVPQELQPALAVVVEQIAGLSSSIDQYDRQIASLVRDAYPETRRLQQVAEVGPITSLTFVLTLEDPHRFATSRDVPAYLGLTPGQEQSGARDPEKRITKAGDAWLRRLLVQAAHYVLGAFGPDTDLRRWGTALIGGGRKRLKKRAVVAVARKLAVLLHVLWRDGTVYEPLRNARQVAA

SEQ ID NO: 424402 - protein, 399 aa, unidentified
MSSPRSVVIGADTHLETIHLAALSDTGKPLGDAEFPTNPTGYYVAVKWAQSFGDVLLAGVEGTNSYGAGLTRVLQAAGIGVVEVNRPDRAARRRRGKSDPLDAYAAARTALSGHGLAAPKDERTVALSALLTARRGAVKAHTAATNQIQSLLVTAPAELRERFRRHTTRGLVKALARCRPAAHTDPTTIAVLTALKTLAYRAQFLHRQEHELTEQIHALVQDINPGLRAAHGIGPDTAAALLITAGMNPHRLHSEAAFAALCGTAPVPASSGKTTRHRLSRGGDRSANNALHRVALVRMSNDPRTREYVARQTTNGRSKIEILRLLKRAIAREVFRLLTQPCAIDDYSDLRPTRQAKNITLTTVAKHFDVWPNDISRLERGLKRDDTLAANYRQYLTAA

SEQ ID NO: 424403 - protein, 342 aa, unidentified
MQITTIGLDIAKNVFQVHGIDVAEKVVVRKQLRRGQVMKFFEALSPCLIGMEACATAHYWARELTKLGHQVRLMPAKDVKAYVKRNKNDAADAEAICEAVRRPTMRFVRIKSAEQQGQLMQHRTRDLLMRQRTQSINALRAHLAELGIVAAQGDKGVKELLAIVADEKDARLPIDARASVIVLAAQLQAVQTLIGSIEKRIKTQHRSNEASKRLETIPGIGVIGASAITATAADPTVFRSGRDFAAWIGLVPRQDSTGGKQKLGPISKQGDRYLRRILIVGAISVLRRAQENPGKYPWLTQLLARRPFKVVAVALANKMARMAWALLAHGGTYRAPVLAVAA

SEQ ID NO: 424404 - protein, 415 aa, unidentified
MQTLVERGCGLDVHQATVVACLLIVLKNGQVQKQLRTFGTTTRELVALHAWLLSQGCTHVAMESTGVYWKPVYAVLEAEGALEIVVANAQHVKKVPGRKTDVKDAEWIADLLCHGLLRSSFVPPKPIRELRDLTRYRRKLVESQAAERNRLLKLLETANIKLASVATDVFGVSGRLMLRALIEGKATTQEMAELAKGLLRKKIPQLETALEGKLEEHHRFLLKLQLERLEAAEKDLAVLEQHIQEKLQPYATQLALLQEIPGVDWTLAAVIIAELGVDMKVFGNVPQLASWAGICPGSNESAGKRKSSRIPQGNVYLKTALVEAANAAARAKGTYLRDKFFRLKARRGYKRATVAVAHKILVAIYHMFSHHVSYKELGDLYLDHLNKHHLTRNLVHRLERLGYTVTLELKAASAA

SEQ ID NO: 424405 - protein, 304 aa, unidentified
MHLHDAGWRVVNDASGWDALIAKLKESQADLVVVEATGGYERGLVTALHRAQLSVARVNPRQARDFAKSMGVLAKTDRVDARCLRDFADVLARHKDRHKYITLPADPEREVLAALMTRRRQLIDMRVAESNRLEGATARTVRSIRSVIKTLDKQLQDIDGDIDQQLEQHFKPQKELLDSVRGVGPVTILTLTSALPELGRLGRRQIAKLVGVAPLADDSGRRKGVRRTAGGRSEVRAVVYMATLTAIRHNPVIKSFYGRLVEAGKPKKVAIVACMRKLLTILNAIVRDQAPWRTDATLTSSRST

SEQ ID NO: 424406 - protein, 348 aa, unidentified
MRFYNETHPYYCGIDLHARSLYICIINGNGIVVLHKEIKPSTEKLCEILAPFIDNIVVGVECMDCWYWLSDYCENNNIKFILGHALYMKAIHAGKAKNDRIDSYKIAILMRSGTFPLAYVYAEEMRATRDLLRRRNRMVNYRAQLKAHVKNTTNQYNLLAPTVNLRYPKSRESMRNIFKQANESVLCSVNLDLDTVEHMNKDISKVERHIEAMAKQHNTQDYSLLKSIPGVGQIIALTILYEIGNINRFASVQNFASYSCLIKCKADSGGKSYGSRGNKIGNGHLKLAFSQMSALYLRDNSEAQLYFKKLQKRMSKAKALAVLSHKLGRCVYYMLKNKSLFDKNRLLN

SEQ ID NO: 424407 - protein, 420 aa, unidentified
MPATFSIPRTNDLERAMTAVMIGVDPHKGSHTAVVIGPAEEPLGEIRVRASAGQAEKLAEWAAAWPERTWAVEGAAGLGRLLAQQLVAAGERVLDVQPKLASRVRLLQAGDTNKNDPNDALSVAIAALRSRTCRQVAAEDHPAVLKVWSKRHRDLARLRNQVACRLHAVLCDLVPGGTSKQISAAQAARILGQITPSGAAGLARAELAAEFLQDMRHLDAQLRGTRKKLAAAVKVSGTTLTEVFGVGPVIAGTIIGDIADVSRFPGRDHFAAYNGTAPVEVSSGNHKIHRLSLRGNRRVNHAIHMAAITQIRHKHSEGRTYYAKKLAEGKTHKEALRSLKRKISDAIFARLQADARQAAAARAKGPGGHPGNDSASSAAGSHPARQLFGQATPGPGTSLRPGTTTGTPPKPVSKKTRPTT

SEQ ID NO: 424408 - protein, 317 aa, unidentified
MYVGIDVSKEHLDVATDDGAFSARFANDEQGFGELVVRLQEVKPTLVILESTAQYQLEVSLVLATAQIPLAIVNPRQVRDYAKALGILAKTDKLDAVTIARFGATVKPAAQTLPDAETLELEALLTRRRQLVGMIASEKNRLQAIFGPAKQGAAAQSVRDTLSYLTKQLKQLEKDLQKRLERSPAWKAKEDLLKSVPGIGKVTAMTLAIDLPELGKLNRKQIASLAGVAPFNCDSGKNQGKRSIRGGRATVRTALYMACLASLKHLSEPTASRYERLKTQGKKPHGVAIVACMRKLLTILNAIVRDGKPWNPDLASA

SEQ ID NO: 424409 - protein, 351 aa, unidentified
MMIIGVDYHPSFQTIAFFIEETGECGEQQLNHSDGGAERFYRDLQQRGIRVRVGMEATGYSRWFERLLAELGIEIWMGDPAEIKAKRVKKRKTDRNDALLLLRLIREDNFPRIWVPSPENRDLRQLLWHRHRLVQMRTRIMNQLQALAMNEGYRWKKKLFSEQGRAQLEKLSLAPWASRRRQELLELLDRMNPTIEELTVAVERKARKRPEVLRLMTHPGVGPLTALAYVLIIGTPTRFPRGKQIGTYVGMIPSEDSSAGKQRLGHISKQGSSLLRFLLVEAAQAAARIHPDWRRRYIHLAMRRHKSIAKVAMGRRLAVRLYWMWRNGSNYSSRLEFGSYVGQLGMRHGVK

SEQ ID NO: 424410 - protein, 403 aa, unidentified
MDGVFAGLDWASRVHAVCVIDQRGSVREQCEVAHDAAGLHDLVRRLRARGVRRIAIERPSGLLVDVLMQSGFEVVPIHPNAVKASRPRYRSHGGKSDASDAYLLADLLRTDGHRFSALATQSDTIRALRALVRGRDDLVATRVQLANQLRELLQTYWAGAGEVFADVDSPIALAFILRYPTPESASRLGPKRLAAFCAQHAYCGRRSAQELLARLHQAPSVRTGELEIDAKGELACCLARALQRLVEQIRLLSSRIEHHIADCDDGRILMSFPRAGRICAAQILAELGSVRERFDSDEHLAAEAGVAPVTYESGKHKAVTFRWACNHRLRAAITCMADNSRHASAWAAAVYAKARSRGCNHPHAVRILARAWLRVIWRAWIDRLPYDPRRHRAAQLISQTPGG

SEQ ID NO: 424411 - protein, 410 aa, unidentified
MAERFVGIDVALHEHRVAVLDRDGEAVGPSFTIAASQDGVATLLRTLDARAATAAQTLIGLEASGHLWENLEAALVGAGYRVLVLNPLQTRRYRDVVRRKAKTDDIDAHVIAGLLRSGAAQASYVPDEPIQSLRELARLRARLMADRQDYLRRLVAQLDVVLPEHHAVLGDLLTARARGILAQFPTAQHLATATPRAIRRAAADAGARGFALDDATGVRDSARRSLYRGKAAAARAHVVRTLVGQLERLTTAIDEVDRAATTLLPPSEPGTGPSDTELLQTIPGIGPQTAATLLGELGTLTRFTDARALVSYVGFYPVINQSGDRAATPRLSRVGSRIARHSLYLAAVNAVRRSGEWRTIYLRKKAQGKTGKQALVVVAVKLLHAVYAMLKHRQPYNPSRLLVASATIGT

SEQ ID NO: 424412 - protein, 334 aa, unidentified
MPHKNTSSVPTAQQKIEPQRSYVGIDVGAAFLDVCVRPEGLFSDGKLYRYANTSAGHRQISRKLKTLTVVSVTCEATGKLERLIARTLSAQGYVVHVLNPAQLVGFRKAKGKVAKTDSLDAELLSLFAEVMQPECRPFPDEQTLALRELSVRRRQLIALRTAEQNRTYRVEDAFVAKQVKSHIRLIARQIAAVDDRLKGLLSENAALQTRFNLLATIPGIGPVVAMTLILELPELGSLSDKAITSLSGLAPMNKDSGKYEGRRKIRGGRKAVRAALYMAAMSARRFNCVIKAFYERLIFRGKPKLSALCASMRKLIIIANHILASNRPWQVLPA

SEQ ID NO: 424413 - protein, 383 aa, unidentified
MISRNAPNIHGDGKMDLSNIHFINANAGGAFMAKYNIGVDYHKKFSYLVVKEEKGKVLRSGQVNNSKKAVADFLGPFRNNSKAVIESCRNWCVMHDWLEDIVDDVILANPFKVKAIAEAKIKTDKIDATILADLLRADLIPQSYIAKRPVRDMRNVLRERIFFVRLRTMTKNRITTIFDRYPEEVRKEKAKTDLFGKRGRQQLEKIDLRDADRALIDRELNFIDLIDMFIKETEEVIGENFKESKNAKYLKTIPGIGQFFSMLIDAEVGDIKRFRNEKKFAAYIGVVPSTYSSGGSSVNGRIIKGGNKLLRWAFVEAVIPAITHDEYLRWEYDKLRERMNYNKAKTAMARKLSSIAYKCLKDQRNYRKFNKVELEYKKLGRAS

SEQ ID NO: 424414 - protein, 370 aa, unidentified
MTKDTSRNRKQIGNKGRNEDREGFSFYIGIDLGDKNSDVCVLDQDGEVSKEFRLRMKEEDLRAYFASIPRSRVAVEAGGQSRWVAEVIEKCGHEVYVSNTRKVPYIHQSDDKDDPGDAYKLAELLYFKPRLLHPVQHRSREAQADLSWIRAREVLVESRTRLINAVRGISKAFAVRLEKCQAEAFTTKLASQVPEAIRGAVAPLLETIDHLNEQIRYYEEMEKHIARERYPKYRLLEQVNGVGVHTALSFMLTIGDPERFQKSRMVGSFLGMRPKKQDSGESKPQLGITKAGDEYLRKTLVNCAHYILGPNRKDSDLRRFGQRICARGGKNAKKRAVIAVARKLAVLLHRLWITGEAYEPLRNSKQAMAA

SEQ ID NO: 424415 - protein, 337 aa, unidentified
MKRYVGVDLHRTQFVVCTRWENGEQEIRQWRIGELPRFVKQLREEDQIAVEAMGTTAHFYDAVVGRVARVVVVNPHQFKVISESVKKTDRHDAQALALYLEKDLLPEVRMKPKQNRELMHLAETRDLLVKQRSALKGKINNLLAMQGIELKREALSSKIALERILVLPVSGMVKVELRILVEQIRSLSESIAELDERLEEEGQQLPGYENLTSIKGIGSLSATVLLTVIGKISDFADENKLAAYLGLVPKIANSNESERSGRITKQGNKLARTALVQCGLVAKRYSPYLQRFYERIKQRRGGGKAKIALARKLVKIVYDTLKNQWVFEDFPSFTLAA

SEQ ID NO: 424416 - protein, 374 aa, unidentified
MKNFSTFIGMDVHKETIAVAIAGEEGVPRYYGEIMNTPEAIAKLLKKVAGKKDLTAFCYEAGPCGYGVYRQLKGMGYRCDVVAPSLIPKKAGDRVKTDRRDAVMLTRLYRAGELTAVWVPELEQEAIRDLTRAREDIKGMERHARQRLGGFLLRHDKKYSGKSKWTPGYFRWLEAVCFESPIQQIVFQEYVDMVKDLKERVVSIEEEMRKAVTDWSLGRVVEALMALRGVSLITAMTVVAEIGDMSRFESPRQLMAHLGLVPSEHSSGSSQKRGGITKTGNGHARRVLTESSWSYRLPARKTAHLQRKAEKTSDQVQAIAWKAQKRLCKRYWYLIHKGKLPVQACTAIARELTGFIWAIAREVMGKNNVCRAEA

SEQ ID NO: 424417 - protein, 433 aa, unidentified
MDNEFVAYVAIDWADRKHAWALQVTDGSLRESGSLDHSPEAVDIWAAELRLRFSGRLVAVALEQSRGALVFMLSKYQHLVVFPVHPTALANYRKSFRPSGAKDDPHDAGLLLDILLRHRDKLRRLNPDTVETRTLQFLVEERRKLVHEKTRYSNRLTAHLKLYFPQVLKWFDDIGSRIAADFLLRWPDLETLQRARSATIERFFLEHNSRSMERIRERLEQIRKAMAATNDQAVVSCSSAAVVAWAGLLRQLLQAIQKYDERIDRLAHQHPDYAVMNSFPGAGPVLTPRLIAALGSQRERYQTAHEVQCYSGIAPVVATSGKQRWVHWRWACPTFLRQTFHEWALHSIAHSPWAQEYYQEQRAKGKSRHTAIRALAFKWIRILFRCWKDGNPYDELAYQRVLAARRPKPRADEAVELQWKSVAGFNKITNARA

SEQ ID NO: 424418 - protein, 365 aa, unidentified
MNNAHNAAIGLDVSDRKTQVCVMAKDGKSPKIVMETTIPTTREGLAKFLSTQDRSTPVAFETGTHCRWMDEVARKLGFKAYVANPCRLRMITESKTKNDVNDARMLARLALLDPELLHPVKLRGPEHQKMINLHEARNLAVKQRTEAIVQLRAMAKSMGFRIAKCQAAGFHNLDRRAWPEAFRDIAWPMLKNLEQLAITIKTYEKQIRELAETPTFKAQVERLREIHYVGLYVATGFIAATGGDMDRFEKPRDVGPWLGITPKQDQSGDVDRQCHITKAGSPFMRRLLVESAQMILRDGAVDTDLKVKGLRICARGAKIAKRKAVTAVARALAVLMVAMLKKPDAPYVPLSERCGKELLAMRAST

SEQ ID NO: 424419 - protein, 338 aa, unidentified
MKFYGGIDLHSNNSYLGIIDKKEREVFKKKLPNDLSEIERALKPYRKDLEGIAVESTFNWYWLVDGLMEKGYNMHLANPSAIKQYEGLKHSDDARDAFHLAQLLKLGILPEGYIYPKEERPMRDLLRKRLQLVRQKTSHILSFKNLVSRNLGFQMPSNDIKKLREEDVEDMFKEEHLVLAGQANIATMRFLKEKITEIEKAVLEKAKLKKEYHKLLTVPGIGKILALTIMLETGDIKRFREVGNYVSYCRCVGSTRISNGKSKGEGNRKNGNKYLSWAYVEAANFAIRGYPYVRSYYQKKAAKTNNIVAIKAVSHKLARASYYVIKNQEVFDPKKAFS

SEQ ID NO: 424420 - protein, 316 aa, unidentified
MSISETFIGIDVSKEQLDCASRPNGTTSSFKNSVTGIDALIKQLQEQRPRLVVLEATGGLERALVAALVVAQIPVVIVNPRQVRDFARAVGQLAKTDRIDAAVIAHFAEAVKPEVRTLPDQLTQEMDALMKRRGQLVAMLGVERNHLVSATSPVSNHVKEHISHLEELIKRLDQEIDQMIGKSPIWKAKDELFQSVKGVGPVLSRTLLAELPEIGQLSRQKLSKLVGVAPLNNDSGKRKGKRSCWGGRSGVRAILYMSALSATRFNPVIKEFYQRLLAKGKTKKVALVACMRKLLTILNSMVKNNTPWDPSFAQRG

SEQ ID NO: 424421 - protein, 358 aa, unidentified
MRQRIRKASRKQVRVSSRDRVFVGCDIHKESLHVTVLVNKRVAQQTVMPPTFHALDRLLDPLRPGLQEVAFEAGPTGYSLPRTLQKADYPALVCAPGKTPRAPNEDPKCDRRDAAKLAECAEKGDLKRIVIPTLQEEADRQVVRMREQTGKKLRRVQQQIKSFMLLYGLHPDTGEDQWSKGFVTWLRETSLNPQLRFCLDTLLRQYDFFREQMTSIESHMAQLGKTERHAEAIRLTMTHPGVGLVTATVFRSELYNPERFDGPKQVAAYVGLAPDVRDTGQNKGHRPLAPAGHAELRRLLVQAAWQWVRLDPRANAVYRRLVHNTGCAQKAIIGVARRLAINLWLMTIRHEAYRTKPA

SEQ ID NO: 424422 - protein, 346 aa, unidentified
MKVLIGVDPHKASFAVAVVDEALGELVERATFPQNRAGLRSLERWAKRFPERRWAVENAGGLARHLVGRLAAAGESVVDVPPKLSARVRVLSTGNARKNDGLDALATALAASRNGQLAAVDPEADSEVLRLLSERREDLVAERTRALNRLHGLLRDLVPGGVAGTLSADRAARILRGIRPRGDSAPLRRRLASEVLRDIRTLDRKIADLDERIEAEVKASGTALTEIFGMGPILAARIIGTVGNVARFPTRAHFASYSGTAPVEASSGEVVRHRLSLAGNRKLNYALHMVATCQARSDARGGGYYRKKIAEGKSRKEALRCLKRRISDAVFRSLVADSQAPSRDAA

SEQ ID NO: 424423 - protein, 338 aa, unidentified
MQTITTIGLDIAKSVFQVHGVVIVRRQLKRRYVLTYFQKLSPCLVGIEACASSHHWSRELQALGHTVRLMPPAYVKPYVKRQKNDATDAEAICEAVTRANMRFVPTKTPEQQSGLLLHRTRHLFIRQQTAVINAIRGHLAEFGIVAPVGRHGVEELLNVVADPSDRRVPEMARACLLAFGAQLRRIKEQILEFDRLIRAWHRSNETSMRLDEAPGVGPVLATAVVATVADPKAFRSGRNFSAWIGLVPKQHSSGGKNRLGGISKQGDRYLRGLFVAGALAVIRYAKIHGTKHRPWLTALLARRPTKVAAIALANKIARMVWAMMVKGERYKEPVALAT

SEQ ID NO: 424424 - protein, 404 aa, unidentified
MDLAPIYRCAVGLDVHQAQITVCVLSEGADGAVAAEVREFGGFKRDRRAMAAWVVGFQPDVVVMESTGIYWKSPYAALEQAGIRALVVNARHVKRVPGRKTDIADAQWLAILARAGLLTGGFVPPANFRELRLIARQLQKLTGILAGEKNRVHKVLTDGGIRLSVVVSDLHGQSAWAMVKALAAGETPEQVLRHASARLRATEQELRDAVDGDLSEAHRFVLAQLVDHVEDLDRRIACFRERLLAGLAPQRGLLGALQTLPGFDALGAALLLVEIGDDMQAFGKPEKLAAWAGVCPGNHESAGKRQTGKQRKGNPYVRRLLCEAAHAVSRTRCALAEKYKALLVRRGRKRAIFALAHKLLKLVFVLIDRGDYYRDATVDYEALSVARNAPRWIKMLRKHGYLAA

SEQ ID NO: 424425 - protein, 418 aa, unidentified
MDTLYSRVAGLDVHLKTIEAAVRRRQEDGKLVQEVHSFGTMTRDLRGLANYLEAWGVTHVALEATGVLWKPVWNILEGRFSLLLVNPHHLKKVPGRKSDVSDAQWIAQLLQCGLLRGSFVPGRPLRERRDLTRLRTQLVSESTRVVNRIHKLLEDTNLKLGAVASDVLGVSGRAMLESLLEGTEDPEKLADLARGVLRKKLPQLRLALEGHFTTHHRFLLQQLLNHHDELQRHIGELSEQVTLRLHALLPVEDQQRLDVIPGVNLLTIENVIAEIGVDMSVFPDEHQLASWTGICPGNEESAGKRKRSRTRKGNRWLRRALAEAAWAASHGKDSYLAAQYRRLAARRGRKRALLAVGHSILAIIYHLLKTKDLHYKDLGADFFDRLEPDRLKRYLVKRLERLGYDVDLKPQEAKTPAA

SEQ ID NO: 424426 - protein, 343 aa, unidentified
MVRPVATLGLDIAKTVFQVHGVDAAGQVVIRQRLTRGRVLAFFEKLAPCLVGMEACGSSHYWARELTARGHEVRLMPAQYVKPYVKRSKNDAADAEAICEAVTRPTMRFVAAKTPEQQSVMMLHRVRLMLNRQRTQLSNSIRAHLSEFGIVAPIGRRGIDQLVAVVADAGDTRVPADARLCLQMLAAQLAVVKEQIIENDRRVRLTARTELGRRLMQIPGVGPLLASAFIATVADPAAFKTGRDLAAWIGLVPKQNSSGGKERLGSITKAGNRYLRQMLVVGAMAVIRYAERHGTQRSWLVQLMQRRSTKVAAVALANKTARIIWALMTSGERYREPTAAMAA

SEQ ID NO: 424427 - protein, 429 aa, unidentified
MKIIYPRVCGIDVHKKFIVAVICISESVEPVYLKKRFSTFHNDLIRFREWLIQNDCQNVCMESTGKYYIPVYNVLESHISNIVVANPKWVCAVKGEKDDDKDAKWIADLFKFGIVRSSFIPQKDFRILRELTRYKYKLVNMRSSEKNRYQNALTSGNCKLDMVFTDVFGKSASNIIDLILSDNPYTDEDILSKVHKNCKASPDMILNSINGTDLTPVQKSRIELVNDHIKQLSSNIQRLDKLIDLMIEPYEDYISFLCQIPGVSRNSAITILSEIGVDMNQFTSTRRLTSWAGLTPSSNQSAGKKKSVRISRAGVYLKPCLVEVAHAAVKDKNHSYYANKFNKISKRRGKKRAYIAIARKILVAAYHMLLTGEIWNPADLAEVETPVEQRIKYVKNNLKSDIKQLLDIGLTVEELTLMIQQNANNIATQ

SEQ ID NO: 424428 - protein, 338 aa, unidentified
MNIVFLGIDLAKNVFQLCGLNQAGKPVYTKRTGRKELLQTLANIPACLIGIEASTGAFYWQREFEKLGHKVKVISPQYVKPFVRGQKNDGNDAQAITVALMQPTMQFVPPKSPEQQDIQALHRERQRIVNHRTATVCQIRGLLLDRGLPIGSAVSRARRAIPLILEDAENGLSSRMRRTIAELYDLFNDPERRIHFFDKEIETVFRQSEACQRIAKVKGIGPETATAVVAAIGKGTEFKNGRHLAAWLSLVPRQHSSGDRQVLMNMTKKGDKHLWTLFIHGARTVVRVATNNNDGHMNQWVNQLKERRGFNKTTVAVANKNARIIWSMLRNETGYQVV

SEQ ID NO: 424429 - protein, 419 aa, unidentified
MAFKILRKNCCGLDVHKTWIFACIGITDFNGRTGYKQARFSSFSKGLQDLADWLGKYSCSDVCMESTGKYWIPVFNVLEKTCLVTLAHPKYTKPQKGNKTDRKDAKWICDLYMCGMVKPSFIPPPDIRQLRDLMRYRMKLTNMLTGEKNRAQNCLTVSNLKLDDVFSDVFGKSSRSIIQHILDNPGQQFDVAPFIDRRCKHPVEEIQAAVAGAVSREQAAKLKECLLHIDQLNEHREHIETEILRLAEPYPHQLELIRTVPGFSAAPLTAVALISEIGVDMSVFPSAKHLVSWAGCCPRNDQSNKKVKSTRISRAGCYLKPLLVQIANSIIKSNKYPECKERYRRIKARRGHKKAIIAVGRMLLTAIWNVLSKLEPYSPKGYLEDKLTEHSVVITKAEGLALLRKRGYIFKDELAAESG

SEQ ID NO: 424430 - protein, 369 aa, unidentified
MGNRSMFVGLDVHKETIDVSIAEGHRGGEVRHYGVIASDLEPLDKVVHALRAPDRQLHFVYEAGPCGFGIYRHLTKRGEHCVVVSPSMVPKRSGDRVKTDRRDSLALARLHRAGELRAIYVPDDADEAMRDLVRAREDAVVVGTQAKYRLKAFLLRQGRRYPGREGWTLPYRRWLTDLSFPTAPQHITLQEYRDTIDETERRIVRVTEQLRQLAPTWRWAPVVAALQALRGVSFITAVAVVAELGDLTRFAHPRELMAYLGLVPSEYSSGPSVRRGGITKAGNPHVRRLLAEAAWAYQGIPRIGRQHAYRQEALPKVVCDIAWKAQLRLTTRFRRLVARGKAKPKVATAIARELAGFIWAIAQKVSPAS

SEQ ID NO: 424431 - protein, 351 aa, unidentified
MTESSSTVEVGDSIVGVDTHKDVHVAVAIDSLGRRLAELLVPMTPAGLTRLRRWAEDLSSARVWGIEGTGSYGAGLTRHLRGAGKSVHEVSRPNRRVRRERGKSDSLDAELAARSVLAQQGLGAPKSGAGSAEALPQLRATRRAAVKARTQAANLLAALLVTAAEDLRADLDQGTLRQRVARCSRLRPGTAVDQPREACKLSLRSAARRWQHLSEEITELDAAIASITAAAAPDFLDQVGVGPDVAAALLIAAGGNTNRLRHEASFASLCGVNPLPASSGKTRRRLNRGGDRQANAALHTVALTRMRFDPRTQDYVVRRTAQGLSKREIMRCLKRYIARDLYPHILASQAG

SEQ ID NO: 424432 - protein, 387 aa, unidentified
METVNPICDAQSSVSGEAATLFISLELSRARWLVTSLSPGSSKISRHFVVGGDSRDLLRLLADLRAKAERNMGATVKIVTIQEIGFDGFWIHRILASNAIESHVVEAASIAVPRRRRRAKTDAIDGELLLRTLMAFKRGEPRVCAMVVVPSPDEEDQRRLSRERKTMIKERIEHINRIKGLMACQGITGFEPMRANAQEKLGELRTGDGRAIPERMKAEIRRELDRLALLRQQIADVETERDALLHTEEAPNGSPGAQLLKLRGIGPEFASVIWQEGLYRRFANRRQLAAYAGLAPSPWRSGDMKREQGISKSGNARLRTTMIEAAWLWLRHQPGSALSRWFQERVRADRGRLRRVSIVALARKLLVALWRFTNHGEIPEGASLKAA

SEQ ID NO: 424433 - protein, 318 aa, unidentified
MLIHYIDIAKRNFVIAVSSLSKTKTETNNPKGIAHTIEYLKKHKVALVVTESTGGLEIPAAKAIRRAGIAVIIANPRQTHQFAQSQPLTKTDAKDAKMPAFFAQMTAQKEDSQTMPYQPPTEAEEVLEALVNRRNQLVDMRTAEKNRLHQVHETQVGSVKQLIAHFDWLIDELDKQIDDHTHTHFDGKAQVAEQIKGIGSITTATLMAMLPELRRLSHKRIAGLAGIAPHPRESGETKFKSRCFGGRSAVRKALHMATVAATRFEPLIRDFYQRLLSEGKPYKVAVTACMRKLLTISNARMRDYFAENDTAENGIRTA

SEQ ID NO: 424434 - protein, 371 aa, unidentified
MKDHIMVGCDLHDKNILIKVAHDRGKPVQKTFGNTIGGRKRMIHVLKKQASEAGDAIVVFAYEASYMGFGLYDELTEAGFQCHVLAPTKIARSVKHRRRKTDARDAERLLEIVRGHVLGGNEIPSVWIPDHRTRDDRELVRMRLEVGRKITAGKSQILVLLKRTSFRKPQKVGKNWTKGHREWLNESSSSGSALSVGARYALSSLVRQLRALEREVARLEKHIEALACTERYAVPVRELKKLKGVGTLTAMTYLTEMGDLSRFGNRRQVGAFLGLVPSSNESGEKDDRKGHITHHGPPRVRKVLCQAVWSRVRTDPNEKKVYERIVARNPKHKKIAIVAAMRRLAVKMWHEGMKAQQRAGCFQSQPQTEAA

SEQ ID NO: 424435 - protein, 342 aa, unidentified
MDHFAGLDVSVKATSVCIVDDTGRIVREVKVASEPEALLSVLKNPAYHFKRIGLEAGPLSQWLFSALAEAGLPVICVETRHMRAVLKAQINKTDRNDARGMAQMMRAGIYRPVHVKTLRSQKLRMLLTHRKLLQSKAIAIDNDLRGTLRNFGLKVGMVGTVKFEARIRELVENLPDLAALIEPLLIVRRTLREQFCVLHRRLLAIVRDDEVCRRLMTTPGVGPVVSLTYRATVDVPARFRKSKSVGAVFGLTCAKYQSGEVDWSGRISRCGDEMMRVMLYEAAQAMMRSKKWSWLKAWAMQIARRRGMKKAIVALARRLAVIMHRIWVDGTEFRWTREAAVA

SEQ ID NO: 424436 - protein, 317 aa, unidentified
MVLFAGEDHSNYQHQVFSNDYTGFDKMEKWIRSLTDTALEKILFCCEHTGLYALPICRWMVAKDAKLWVENALQIKRSIGLKRGKSDKADAYAIADYGFSKQYQARLYKQPDANITQLKHLLTQREHLVRHQASFKSSISEFKGFDEQNAAFCIDQNKELIKYYNQKIKDVDEQLAAIVMEDSDLKKKFDLVCSVHGIGKQTALFILIHTKAFTEFDDYRKFACYCGIAPFPYGSGTSIRGRDRISNLANKKIKTLLTMCCLNVLKGENEFQNYYRRKKAEGKSFLSILNAIKNKLISRIFAVIRKGVPYQMELNPA

SEQ ID NO: 424437 - protein, 346 aa, unidentified
MEITTIGLDLAKNVFQVHGINGAGEVVVRKALRRSQMRRFFEQLDPCLVGIEACGTSHYWAREIRKLGHEVRLMPPAYVKPYVKRGKTDASDAEAICEAVSRPTMRYVAIKSPEQQAALALHRSRDLFVKQRTQLVNMIRGLLAEFGVEVRRGIEQALQLAKRIAADEVADIPPLAAKVIAGLAGQVLDLQARLGEIERELLAWHRSNDIARRLATIPGVGTICATALAASVTDPHQFRSGRQFAAWLGLTPLQHSSGGKERQGRISKMGDKYLRRLLVVGMTSLIRRAKYKPEAADPWLADLLSRKPARLVTVALANKAARVVWAIMVRGGVYRTPAGGRVMASA

SEQ ID NO: 424438 - protein, 356 aa, unidentified
MASLPSGPGTVYVGMDTSMREIVCGVLLPGRDVPAVERVPNDEASVRRLVGRLGDRSLLSVCYEAGPSGYELHRLIASMGVACQVIAPSLVPKGASERVKTDRRDAVRLALALRAGMLTAVRDLARARGDLLDDRKRMQQRLNALLLRHGRVWGGGSKWTIAHRAWVDRQRFDQAALQDVLDAYRGGLEARECELRQAEARLLAWARQEPLAPAVTGLSAYRGIAELTALTLAAEVTDWRRFPSARAFMGFTGLVPSEYSSGARASRGSITRAGPQAVRTALVESAQAYRHRPRIGADLRRRQAGASPGTLARSWKAQQRLHATYQKMSGRGRPHGVVATAVARELAGFVWAEMTS

SEQ ID NO: 424439 - protein, 344 aa, unidentified
MENRPEFIVGIDVSSEYFTCAAGQAKEKWKISLLPQDFDNKTSGFNKFSQWLQKAGIEKEKAVICMEKTGVYNELLVAFLCKQGYRVCVEDPIKVKKAFKPHGIKSDSVDSKQIAEYGWRFFDQLHYWKPLSETIEKVKTLLSVREDLVKANTADKNRLHTFRRKAYRVQLAEDILDSNIAERDKEIKAIEKEINNLIHQLPYLAQTFRNLQTIPRCKLLLAANFLVFFHEFDGEITYKKAAGRLGICPYEHSSGSSIKKRAKSFGHGTGTIRKLLHLAACSLCKYDPRYQQYMAEKLAFGKPKMVIYNNVANKLVKIIVKIYRSNMQYNPNHQSVHPRFLTKS

SEQ ID NO: 424440 - protein, 337 aa, unidentified
MEYFGGLDVSMAETHVCVMNRDGAVAYEVKVPSTPADIAAALAQAPTCARVVFETGRMAPMLYHGLSQLGLPIVCIESRQAYHALKSLATHKTDRNDARGLAHRARTGFFKAVHVKSLSAHALRSLIVARKKLVGQRVTLENQIRGLAVVFGVRLPRALTAAFIRQALRASEGIIGLSAAMRGLVAARTAVLAAVAAIDADIRQLARASAACRRLMTIPGVGQLTALAFTAAIDDPGRFRRSRDIGPYLGLVPRRYQSGEVDYTGSISKCGDRRVRTLLYEAANVMLTRYKRPLKLKDWAFAIGKRSTMRKARIALARRLAIIMHAMLRDGTEFKPA

SEQ ID NO: 424441 - protein, 411 aa, unidentified
MSESHKPPALPYAVFCGLDVGKSDHHACALAPDGTRLHDKALPNDETSLREVFGRLAALGPVLVVVDQPASIGALSIAVARSMGLQVAYLPGLAMRRIADLHPGEGKTDARGAYVIADAARTLPHTLRRVGTDDETLAGLTVLAGYDDDLAAQSTRLTNRLRDALLHVHPALERLLGGHMDRGGVLDLLAAAPTPAVLATLGVEGMTALMRPRSPRLAKTLPAKILLALQAQQVTVPGTAEFGRVIAGVAAQLRDVHTERHALAAELEARLEAHPLAEVLTSMPGVGLRTAIKLLTIVGDGSAFPTAGHLAAYAGLAPVTRRSGSSIKGETRSQRGNHALKSALFLSAFASLADPTSRAYYDRKRAAGKRHNAALICLARRRVDVIYAMLRDRKPYTPPTVADPTPEPLAA

SEQ ID NO: 424442 - protein, 455 aa, unidentified
MAKKQKICVTTKSQGLRVTHPSTAGIDIGKDLMQVSVPEDRSEKSNRSFGSFTKDLKEIISWLRECRIERVVMESTGIYWIPLFLQLQEAGFEAILVNAKEVKNMSGRKTDVNDADWLRFLGSCNLIRPCFQIAAVSRRLREYHRIHASKVRDMARELQHMQKAMGSMNIKLDSVISDIAGKSGMSIMRAMLNGERNPATLASLTDPHCKNDKATIEAALQGTWDIEHMLALRMAMETYDHLQTQIVRIEKEMEIFLDSYELTPVPSVKASDINDNRSGKRKQSKNPIHFDVELYSFLMYGVNLMRIPGVSDSTLITLMCELGPDFTSKFKTPGKFCRWCNLTPVDNVTGGMVTSSKVPKRPNPVGQALRQAASTLRKSDTPLGQYRRRMAARLGPAQAVVATAHKIAEIIYLMVERKVEYDESKTSQSESELTQKRIRFLEKKLSKLKSAQNTL

SEQ ID NO: 424443 - protein, 407 aa, unidentified
MTAVMIGVDPHKATHTAVVIGPAEEPLGELRVRASAGQAEELVAWAADWPERTWAVEGAAGLGRLLDWQLVAAGERVLDVQPKLASRVRLLQAGDTNKNDPDDALPVAVAALRFKTARPVMAGDYPAVLKVRAERHRDLARLRNQVACRLHAVLCDLVPGGHTKEISAAQAARILEQASPSGAAGRARAELAAEFPGDMRRLDAQLRGTRKKLAAAVRTSGTTLTEVFGTGPVIAGTIAGDIADVSRFPGRDHFASYNGTAPVEVSSGNRTIHRLSLRGNRRVNHAIHMAAITQIRHKHSEGRACYDKKVAEGKTHKEALRSLKRRISDAIFARLLADARRAGQQPARRAWEGNRGTTLTPARPAHTPNAGSSDKPLPDPGTTIRPGTRAATPSPPKPTPKKTLTAT

SEQ ID NO: 424444 - protein, 451 aa, unidentified
MNEKVIHAGFDVHAKTNVAHFLHPDGSWAHQPFEFEQDKKGFSRLEKALQKMAQEHPDVVFLCGIEATGPYWFPLGAFLTALPLRVKVTAINPSVVTNFKKVHLKKVKTDPIDARETAEYMRIFKPEPTDFFTSEHIALRQLARGRKFFLKQHSAAMNQLRSQLAVAFPEISGKDTNLSETILAVLDRFPSASSLKKATDKQLKKIRFPNSGKRVKCNMASALRETAKDSIGITQEPMCELYIRQLVHNIRFLHQQVQKAEKELETYYMEHFAHTRIHTIKGIGTLSAALIMGEILDAKRFESITHWIGYIGIYPEWKWSADKKDYAFKMTKKGNRYLKHIIYCCTFPAIRFNPIIRRHYHNQLSRGKKKMVAIGSCMRKLASLIFGVMKTQRDFDPLYNSGMKEKTISTKKTRQIKLKKEEAPQSNIVAGEVVNATKSFSGPKIEVASSL

SEQ ID NO: 424445 - protein, 341 aa, unidentified
MEHVAIDLGGRESQVCVRAADGTILDERLWPTGKLSGYLRKRPVSRVVVETSAEAFAVADRALEQGHEVRVVPATLVRSLGVGARGIKTDRRDAQVLSEVSCRIDLPSVHVPSEASRSRKSMCGAREALVDTRTKLINTVRGWLRTQLLKIPSGRSETFPKRVRDKLVSEPDGSPEFIERLLVVLEKLNEQIGEAGKELEQLAQQDELCQRMMTAPGVGAVTAVRYSAALDEVGRFAGAHAVESYLGLTPGENSSSTRKRRTGITKAGPPKVRWALVQACWAMRRCRPDDPLVQWAEQVEQRRGKRIAIVAMARKLAGILYAMWRDGTDYDPHYEARKNKT

SEQ ID NO: 424446 - protein, 370 aa, unidentified
MGNRSMFVGLDVHKETIDVSIAEGRRDGEVRHYGVIASDLEPLDKVVRALRAPDRQLHFVYEAGPCGFGIYRHLTKQGEDCVVVSPSMIPKRSGDRVKTDRRDSVALARLHRAGELRAIYVPDDTDEAMRDLVRAREDAVVVGTQAKYRLKAFLLRQGRRYPGREGWTLPYRRWLTDLSFPTAAQHITLQEYRDTIDETERRVERVTEQLRQLAPTWRWAPVVAALQALRGVSFITAVALVAELGDLTRFGHPRELMAYLGLVPSEYSSGASVRRGAITKAGNPHARRLLAEAAWAYQGIPRIGRQHAYRQEALPKVVCDIAWKAQLRLTTRFRRLVARGKAKPKVATAIARELTGFIWAIAQEVSPASS

SEQ ID NO: 424447 - protein, 337 aa, unidentified
MTPVTPLPKARLGIDISKYYFNVALIKAAVKLQEPVSEHAHFDNTPDGFKQLKGWLKARRVKQVYAGMESTGRYGDALALWLHTQGHVVSVINPAYIHDYASSRGRRNKTDAQDADLIARYCVKESPPVWSPPTPEVQDLQALLKCLADLKATRQQESNRLKSIISCARAVAVVQHHIDFLDQQIKALEADTRAFTQSVPPFKAQFRLLVSIPGIGPLTAMRLIAFDLLRFEDANAAVAMAGLNPSENRSGSSCQRKTRLSKRGHADIRMALFMPAITALTHNPLIRDFAARLEAKSKHALVIICAAMRKLLRLAYGVLKSGRPFDPAYSPRSPKIA

SEQ ID NO: 424448 - protein, 370 aa, unidentified
MKSIIYVGMDVHKASFTISCFSVTTQETFATVKISPDAKAIKKYLDGVSLSRSEECEFVCGYEAGCLGYTLYHQLTAMNIRCVIMAPTTILRNSKRVKTDRIDAENLARCLAYGGYKSVYIPTAQDEAVRDYLRMRDDHKLMLKKIKQQINAFCLKHNKIYPGNKSKWTQAHVKWLNALEFDGYLQDAFNEYMITYRELADKVERLESQIEQLAELEEYRDKVKKLICIKGIKTHTALSLIVETGDFSRFQSAERYASYIGLVPGEHSSSEDQKRLGITKAGNRHMRMLLIEAAQCYSRGVPAKKSKDLKSRQKGASPEVIAYADKASIRLRRKYIRMELVNKKKANVAKTAVARELACFIWGMMTDNIA

SEQ ID NO: 424449 - protein, 345 aa, unidentified
MKYFFIGIDVSKEKLDATMIHYESESDSEQQLAYTTVENDPKGFRSLVSWSKKNAGRGVKTDTMLFCCETTGGYDRALCDWLYGNGLNIWRESALQIKRSMGLRKGKDDKADSEMIAYYALRFRSQATLYKPLDGNMRSLRDLFLYRQSLVAERQAKMVSSKEKQHISSKSKVDNFIYRDAQKGIDILTKSIKKCECRMLEIIKEDEEMYRNYLHLISCKGVGLITSVMLIIYTDNFKSWNAKKMASYCGIAPFYESSGSSVFHKANTSGYSNRRLKGILTQAARSAITHNPTLRQYYLRMKAQGKPYGVILNNVNNKLVHILFSLVLHDCDFELDHEAKRALRA

SEQ ID NO: 424450 - protein, 361 aa, unidentified
MVTGEKSGYSFVGHSFYVGIDVHKKSWKVSIYGEHHEHKTYSQNPSADELAAYLQRQFPGGTYHAVYESGFSGFTACRRLRELGVNCQVVHAADVPASQKEKLQKTDTVDSRRLARLLRGKELKPIDLPHLELEADRSLVRLRQKLVKDICRTKNRVKSLFFQFGIAIPARFTASQSRYWSRAYMSWLETLPLNQLPLKQTIQAHLSVGRLLRKELLVVNGQIRQLAATDRYRKEVDLLIGIPGIGLISAMLFLTQLGEINRFQKEDKLCQYVGLVPRMHGSGDHLKVGKLMNRGRKELKIVLIEVSWVAVAKDPALMGKFNELSRRMHKNNAIIRIARKMLNRIRYVLRTGKPYLIGTVK

SEQ ID NO: 424451 - protein, 346 aa, unidentified
MMIIGCDFHPSWQQVSWLDTETGETDERKLVHANGDGKTFYQQLAAPALIGMEATGNSQWFIELVEDLGHEIWIGDAAQIRASYVRKQKTDQRDAAHILKLVVEGRFPRLWAPDRGQRDLRQLVLHRHKLVMIRSRVKNELQHLALNKGMQKKRTLWSQAGQKLLRELPLKPWAACRREDLLGLLALLDQQIGKLDQAVQQAAEQNPQSKLLMTQPGVGPNTALAFVLSIGDASRFARGKQVASYLGLIPREESSGGRQKLGAITKQGNRMLRSLLVEAAQIAVRYDPQFRREYLHRCHHKPKAVAKVAAARKLAVRLYWMLRTQVAYPEIVRNESSPRVALVGAS

SEQ ID NO: 424452 - protein, 332 aa, unidentified
MKFTSFIGIDISKLDYDVAHLDVNGTVVDTKKFSNNSSGFRSMLSWIKKSSATEQLLFCLEHTGVYCLGICVFFEEYGLNYSLQSGLQIKRSMGIQRGKNDKADACVIGKYAYLNRNEIDCYRLPSKIILKLKQLVSYRERLVKSNVALKIAAKELKAFTDKDMHGYIVSDSQEHIKHITKSIIEIDHSLKQIVAEDPALNRMFKLITSVKGVGLHIAINMIVVTHGFTRFKNWRKFSCYCGLAPFEHRSGSSIRGKTKVSHLGNKKIKAIIGNGIASAIQHDPEIASYYKRKLEEGKHKMVVMNAIKNKLISRVFAVVKRGTPFVPLYQHI

SEQ ID NO: 424453 - protein, 295 aa, unidentified
MQKITTVRRGAKKVFKGQLTIGLDLGDRSSSYCVLDENGEILLEQKVATTPEAIQQAFGKMPRYRIAMETGTHSPWVSRLLEALGHEVIVAHAQKVRLIVKSRRKDDRLDARTLARLARIDPELLSPVQHRSAQAQLHLTEIRARAGLVSARTALVNAARGLVKSYGQRLRKCGTLQVSREITVGLSPGLREALEPLLREVESLNERIQEYDRRIEKMAKETYPETALLKQVKGVGDLIATAYVLTIEDPHRFRKSRDAGCFVGLQPGRRNSGESEPQMHISRVENLCDHAGWPA

SEQ ID NO: 424454 - protein, 373 aa, unidentified
MDQLFTPVKYGVGIDMGKDEFYACVSAIDNAQRVKIKATHAFKNTPQGIAEFYKWATHHAKDHTISIQFLMEATGVYYEQLALFLHQRGAYVCVVLPQKAKHYVKALGIKTKTDGVDAQALATMVCQQRLEAWRPISEAMYKLRQLTRQQIDLQEFKTQLSNQLMALETGMYHSPEVKKQLTKLIAEIDKQLTDCEKLIANAIADNPEWKRKVAQICTIKGVGLLTVANLITETNELVLFENQRQLVSYAGYDVVENQSGKRVGKTRISKRGNSRIRRALHMASLMVVRYEQTPFLGLYERVFERTKIKMKGYVAVQRKLLTLIYALWKKDETYEGSFVSEKQKKVAPTEGATLHQPSLAVLNEVNMGELVES

SEQ ID NO: 424455 - protein, 334 aa, unidentified
MFYCGIDIAKYKHEATVIDQAGAAVQESISFANSKEGCEKLLALFQRLDISKEGLLIGMEATGHYWLSVYGYLLEQGFEVKVINPIQSEAFRKMYIRQTKNDRKDSFIIAQIMRFGQFSATNLSEEVIVAMRQLSRYRLALVDTCGDCKRRVIALLDQVFPEYDSLFSDTFGVTSKEVLSQYPTPEDMLTVSIRKLTTLLEKASHGRFGKEKAEQLKAAAASSFGVNFTKDAFAFQIRQLIEQLEFLEGQVAELEEQISSLLKQTGSYITTIPGIGDTLGAIILSEIGDIHRFDAPNKLVAFAGLDVRVTQSGEFTGTRQKISKRGSPYLRRAI

SEQ ID NO: 424456 - protein, 339 aa, unidentified
MQVTIVGLDLAKNIFHVHGITAEGSVAFNRALRRSQVLTFFERISPCLIGIEACGTSHYWARELSKFGHRVRLIPPVYVKPYVKRGKSDAADAEAICEAVGRPTMRFVEIKSAEQQALLSLHRARDLIVRQRTQTVNMLRGLLSEFGYVTARNIERATALARNIVRGDGPKLPEIAEAVIASLCQQLLLLNDKVRWFTRQIAAAARLDKRIRLLQTIPGVGPITASAIVATVGTPAQFRSGREFAAWLGLTPLNRSSGGKERLGRISKMGDRYLRRLLVTGMTARVRVARAKPERADPLMISLLERKPVRLVTVAMANKTARIIWAVLTRNEPYKPAAA

SEQ ID NO: 424457 - protein, 359 aa, unidentified
MGKFINRINTVMSAIGLDLADVWSDWAGLDESGTVVRRERVKTTESELRRVFGAIEATTIAIEVGTHSAWISRLLSSLGHTVIVANARRVALIHRNKRKNNRIDAELLARLVRADKELLFPIQHREERGQADLAVLRSRDVTVRSRTKLINHVRGTCKTFGVKLPRCSAEAFVVQCSALVPAALHGAVHDVLALIADMTAKIKSYDATIAAMIKRYPAAQLVGKITGVGPLTSLAYVLTIEDPHRIVRSRSVGAYFGLVPGSDDSGEKHQQRRITKQGDRFCRRLLVNAAQYILGPFGAKVDSDLRRHGEAIASRGGKNAKKRAVIAVARKLAVVMHHLWVHHQDYVPLFNAARTAVAV

SEQ ID NO: 424458 - protein, 360 aa, unidentified
MFCERTSVGLDVHARSVVAAAIDGRSGEVFRARLTPSHADVIEWVGKLPGPCAVVYEAGPTGFGLARALSAAGLRCQVAASSKLLRPAGDRVKTDARDALNLARLLRLDEVVPVRIPSAAEEAARDLVRTREAARADLMGARHRLSKLLLRHGIVYYDGKAWTERHDRWLHHQRFDAAPTQSAFEDVYEAVVLATARRARLDEKITALAADSEFSPLTRRLACLRGISTLTGFALAVEIGDWDRFTGASIGAYLGLVPSEYSSGTSRTQGAITKTGNSHVRRLLVEAAWHHRSTYRPGAVLRHRWDQAPAAARARAHAGNQRSHARWVGLNLRRKAAVIANVAVARELAGWCWSLAVLPD

SEQ ID NO: 424459 - protein, 433 aa, unidentified
MQEAEDEPLFAARAAGIDIAKAGIEVTIRVPSDTRRTGRQQETRSFRTTRKDLLAVADWLRCWGVTKIGMESTGDYWKPVYFLLESEGLACVLYHAAQVKALPGRPKTDKLDSAWLAKITERGALPGSFVPPAGIRALRTHTRDRRHLTQARTAEKQRVEKLLEDAHLKLSSVISDIHGVSGRAMLEAIAAGERNPKALAQLARGTMRGKIARLEEALDCAFVTEQHAAVLAMMLATIDYYSAQIGELTAKIEVLCQPYLHQIAQLDAVPGTGVITAQDVIAEIGTDMTVFPAAAHLVSWAKWCPQVAQSGGKRKGANASGRGNRYLGAALGEAAASAGRTYSFPGAKYRRLVKRMPKKKALVATGNSLLTIYHALLSDPQAIYTDLGTDYYERRTNIRRQARNHVRGLERLGYTVTIEPVNPATGELQPANS

SEQ ID NO: 424460 - protein, 430 aa, unidentified
MKSNTQNAKIEAITETTLVLGIDVGSETHYARAFDFRGIEYSKKPFKFSNNEAGFMTFKAWILNIREKHGKDKVVPGMEPTGHYWFNLGKFLQDNEMKPVLVNPHHVKKSKELDDNNPTKNDRKDPKVIAGLVREGRYMIPYLPDGVYADLRTASNMRFQLQAELTRIQNRISRWFNIYFPEYKTVYGQPDAKSGMLILKIAPLPEDILTLGIDGVNQIWRNAKLRAVGKARAKTLIEAAEHSVGSKEGALSARMEIRMLLADYESRNVRLQEVMALIEELVKQIPMAEKLLEIKGVGIKTVSGFLAEVGDISRFDNPKELQKLAGLALVENSSGKHKGETTISRRGRKRLRYLLFEVAMSLVAKNPEFRELHVYYTTRKRNPLKKMQSLMAVATKLIRVFYAMLTKGVDYDPKKMISDIKRPAVYLQAA

SEQ ID NO: 424461 - protein, 321 aa, unidentified
MTYIGIDVSKDSFVVAYSPDKNSKTKTFKNTTRGIHEFIRTISKEEHHCVMEATGNYSALLVYLLSEAGITTSLENPLKVKNFARAMLSTVKTDEIDARLIALYGEKMQPMPYKLRSDAILTLKQKRTVIRQLKKQLIATRNLKSSMEALPFFDAKCRKSVEKTIAFLEKQVKDLEEDLASLAKSEYKKQMDLLTSVKGIGITLAAALIMATGGFTYFDNAKQLTRHLGLSPTYQQSGTSVNFKGHINRNGDSSLRSQLYVAAFSSIRCNTECRACYDRLRSKGKPGKVAVIAVANKLIRQAFAVVTQEKPYVDGYISSKK

SEQ ID NO: 424462 - protein, 355 aa, unidentified
MTNAKYIGMDVHKEAISIAVMNSAGKLLMESIIETKASTILQFVAGLRGDLHITFEEGTWAAWLYDLLKAHVSEIVVCNPRKNALLKDGNKSDRIDARKLADLLRGNYLKPVYHGENGLRMLKELSRTYLTISKDLVRGMNRLKALYRSWGISCSGRSVYAPGHREAWLNKITETGVRRRAEYFYQQLDTLQRLRLEVRRDLLSESRKHSATKILRRIPAIGPIRSALLIALIQTPHRFRSKRQLWAYSGLALETHDSAQYRYLDGQLLHSRKPQQLRGLNQDHNHDLKSIFKGAAQKATSGAGPFRDFYEGLLTKGIKPSMARLTLARKIAAITLTLWKKGARFDPEQLKPQAA

SEQ ID NO: 424463 - protein, 349 aa, unidentified
MTQQRISYAGERVYVGVDVPKETYTVTCVCRKQIVKTATVPAEPVSLAASLLQWFPGAMLASAYEAGFSAFVLHRALTQGGITTIVVNPASLAVAAHDKVKTDRRDSKRLAIDLADGRLRGIYVPTEAEELARLLPRTRAQLVEHRATIARQIKATLHQFGLIAPASRRLLSNRYLREIAAWARPPELHVRLTLLAEQWRFATRQRIEIRHLLREQAIAQAALEHVYRSVPGIGAVVARTLATELGDMTRLAHERALFSSTGLTPSEYASGPAVRRGHISRQGSGRVRHLLIETAWRAVPRDKVLQEIFDRIAATRGKKRAIVAIARRLTGRMRACFRQGTPYAVGTYA

SEQ ID NO: 424464 - protein, 448 aa, unidentified
MPTRKPSRPRKMKLPKDLQHINPHAAGIDIGGRSHFVAVPEGSCEQPVREFTSFTDDLHRMADWLLACGVSTVAMESTGIYWIPVFEILESWGFEVRLVNARHVKNVPGRKSDVLDCQWLQRLHSYGLLEGAFRPSEQVCTLRAYVRQRMNLVRYAASHIQHMQKALAQMNLQLANVVADITGGTGMRIIKAVLAGERDPLALAQLRDARCKSSEATIARSLQGNFRPEHLFSLKQAVDLYEFYQGQIGECDRQILNQLSSFDGPDASGNGPAESLDEALQRMTGVDLTQIDGINSNSALKIISEIGTDMSRWKSAKHFASWLGLCPGTKISGGKRLSAKSKPVANRAAGTLRMAAFSLFNSKSALGAYLRRQRSRLGAPKAITATAHKLARLVYSMLKHGTAYVDVGQKRYEERYRSRVVENLKRKAHDLGYALVEVCAKQPQPVAS

SEQ ID NO: 424465 - protein, 370 aa, unidentified
MLDTTTFVGLDVHARSIKAVSLDVMTGEVRCATFGYDAGAVAEWVRSVDPKAKCVYESGVTGFDLQKRLSGLGVDCVVGAVSKMIKPSADRRRKNDRNDAEFLARMLSVGNVVEVWVPDDECEAARDLTRALEDARDDLSRSKQRLSKFLLRHGLAFDERTPTGRRKGNWTRAHWSWIESIRFAEGADNDVLAYYVDAVRRAAEEKARLEGLVEAEARKPRWRRRVDSLRCLKGVDTATAADLVFEAGEFSRFGNARSFAAWVGLTPSEHSSGESDRRGAITKAGNKHLRKALVEAAWHYLTCSGRPKDLAKGQAPDRVARRHAAKGVRRLVERREALLARGVHGNKANVATARELACWVWAVGLMAEEA

SEQ ID NO: 424466 - protein, 338 aa, unidentified
MKGFCISLDVSKGSSFYQGFKGFDEPITKPKKIEHNLEGFKELLKLKETIRKEYNEDCIVVFESTGVYHRSLQTYPDEHNFKYTIISPLLSAKVRKSDIRGTKTDAKDCASIAKVFYLKELRIYSKIDEIYDDLKEKSRYYDFLMDEMKRWKIEFRRLLDIIYPGFDGVYDDLYGDFIQTFLLEYSHPEIIRKRRLDTIAKFLEKHTCHKETYCIRQAQTLKEYVENCASGCSSKSYLVRQFDTVIHNLNAQIKHLEIVLEEIVELAKTLPNYDSIRSIPGIGNNLAGRILAEIGEVNRFNNASQLVAYAGIDPQIYQSGQISGLHLKISKKGNKKLR

SEQ ID NO: 424467 - protein, 453 aa, unidentified
MGKRFSLDNTLSIGIDPHRETLEAVGIRFPEEILLSGTFDNTPAGHRELLAKAKELASKHDLKLVFGLEESGNYGYKLARYLVKQGCQVKEVNPRMTNRQRDFYGQDKTDRLDALSAAAIVLRAYERLPDVTPIQEATEATRELSRYREQLVKEQTANLNRLHSLLANQYPAYKTFFSQVNGATALAFWATYPTPGHLSGVIIDELADFLYQKSNHRLGREASRNKAQHILGSCHWENVSEPDLLTKAQAQIIKDLAQRLLQLRESIQTVESRLKETISATGQQLETFHGLGTVLAGIFIGETLSTARFDHDKDKFASYSGTAPATRGSGKHTRQVANRWCNRRLKDAFNQLALSAARFEPLSEEYYQGLLEQGMDSSEAKKRLMRRLSDIIFAMMRDKTPYDPAIHRRKQERKAWQPLAGGMSLPLSPLSVGQVYHTGEALSNGLQLEHHPV

SEQ ID NO: 424468 - protein, 377 aa, unidentified
MHSENIAAYVGLDVHKETLAVAIAAPERLGEVRYYGTINNEAQAVRRLFQKLQGLYGNILSCYEAGPCGFRLYHQLTAMNIKCQVIAPSRIPKSPTDRIKNDHRDAISLARLLRAGELTPVWIPDLTHEAMRDLIRARAAAKRDSRVARQRILSMLLRTDKHYAGKHWTGKHRTWLANQSFSQPSQQIAFQHYCQSLEQIEDRILQLDQEISRLLPEWSLCNLVCQLQALKGVGQLIAITLVAELGDFSRFSNPKQLMAFLGLVPGEYSSGNSIRPRGITKVGNSELRRLLYEAAWSYRTPAKVGAWLIYYRPDSVTQYSKDIAWKAQQRLCSRYRSLTAKGKKSQVAITAVARELTGFMWDIALTAQSSFSQQKQN

SEQ ID NO: 424469 - protein, 311 aa, unidentified
MSQTIGIDISKDTLDAYRQSDGQRFQVRNDRDGHRALLRWIGRNAELLVVFEATGVYHRDLELTLGARGLPFAKVNPKQARRFAQATGRLAKTDRVDAAMLARMGTALALAPQAPRQQSFHDLRELLAARRALIKDRTAAKIRRSTARLALIKRQLDARLKRVDDDLERIDAELASLANMEAGLAERLAILRSIPGVGDVTAIALIVDMPELGELEGKQAASLAGLAPVARQSGKWQGKERIEGGRATVRQALYFPAIAAARFNPDLKKKYEALIAAGKEKKVALTAIMRKLIVMANALIRDGRRWAATPA

SEQ ID NO: 424470 - protein, 370 aa, unidentified
MDESIKFFIGLDVHKDTIAVAVAEAGRAPARLIGSIAHDVGKLRKLLARYGEPALVQVVYEAGPTGYGLQRELARRGYQCQVIAPSLIPKRAGDRIKTDHRDGLRLAELARAGELRAVWIPDPTDEAIRDLARAREDAVNARTQARHQLKGFLLRHDVRYAGKTSWSKTYYRWLATLNFGLPGAQTAFTEYWQAVTAADERVVRLTAAAANSIEGWRFEPVVNALQALRGIDQISAIGLVAEIGDIGRFAHPRQLMAYLGLVPSEHSSGERVVRGSITKAGNAHARRLLTEAAWNYRFQPRIGRRAQQRAEDLPQAIRDVAWKAQLRLSRRFTQLRARGKEINKVCVAVARELAGFVWAIASTQAKLARS

SEQ ID NO: 424471 - protein, 358 aa, unidentified
MSNLKYSIGIDVSKKDFHCCLSVIDTEQSVKVKSTHKFTNSTSGFKLLIEWVRRNRKEDLQVFCVMEATGVYHEQLAWYLHDKDFSISILLPNKAKKYLQANGAKSKNDKIDARGLAQIGAEKKLDLWIPPSRKLYNLRSCTRQHQSLSEMHSAINNQLEAITHSQFQSKDIIRQMKKTMRLLEQQINEMDKIIEEIVKEDEVLNFHYKNISEIKGIAMLSFAVIAAETNGFVLFKDAGSLVSYAGYDVVENQSGNHVGRTKISKKGNSRIRRILHMPALCAVREDQPQFKNLYERVYKRTGIKMKGYVAVQKKLLVMAYYLWRKKMKYQADFDYSEKIIAPEKSEATHDKIPEGRFH

SEQ ID NO: 424472 - protein, 370 aa, unidentified
MGNRSMFVGLDVHKETIDVSIAEGERQGEVRHYGVIASDLEPLDQVVRALRAPSRTLHFVYEAGPCGFGIYRHLTGRGEDCVVVSPSMIPKRSGDRVKTDRRDSQMLARLHRAGELRAIYVPDDTDEAMRDLVRAREDAVGVGTQAKYRLKAFLLRQGRRYPGREGWTLPYRRWLTDLSFPSAAQHIALQEYRDAIAETEQRIDRLTEQLRQLAPTWRWAPVVAALQALRGVSFLTAVALVAELGDLTRFRHPRELMAYLGLVPSEHSSGPSVRRGAITKAGNPHVRRLLAESAWAYQGIPRIGRQHAYRQEALPKVVCDIAWKAQLRLTTRFRRLVARGKAKPKVATAIARELSGFIWAIAREVSPTPR

SEQ ID NO: 424473 - protein, 341 aa, unidentified
MKQEISVLGIDIAKRVFHAVGMENRGPVVYRKRVSRHDLMPFRAKLPPVRIGIEACGGAHYWARRFWAYGHEVQLMAPQCVKPYVKSNKNDSRDAEAIAEAVTRPTRRFVPAKDVDQQDIQALHRVRERLIGERTALVNAVHGLMHEYGMVMPNGVAKFRQAVVGKLEAEKDKLTPLRQEMLWKLVEEFAALEKQLAYDQEQLEALATTHPACQRLMTIPGIGPLTATALVAAVSDASAFKNGRQFAAWLGLVPRQYSTGGQARLLGIRKRGDSYLRKRLIHGARATLRWVGRTTDRRSQWMRQLVERRGKNRTAVAIANKNARIVWALLTSHQVYEPAKG

SEQ ID NO: 424474 - protein, 420 aa, unidentified
MKAYNINDFAALIGIDWADTKHDICEHPSHTEKYHYCIIKNKPEALHDWAMSLKQRYPNQQIAVACELKKGPLIYALAKYSHLTLFTINPSSVANYRKAFTPSNAKDDPSDALIQVEILTLHMDKLTVIEPESASMRSLTQLVEYRRNLVQDSVNLSNKLTATLKNYYPQALEWFKEKDTFIFCDFISKWPSLAHAKRARKQTLLGFFNSHNSHYAHVNDARILSIKHAMPLTEDKGVIEPNELLVGVLIVQFKVLLKGIESLDKVIKQAYKVQQDKPIFDSLPGAGPQLAPRLLVAFGSNRERYNDASDLQKYAGIAPVIERSGKKMWTHWRYSCPTFLRQTFVEWAGFSIRYSFWAKAYYEQQKSKGKPHNSIIRSLAFKWIRIVFRCWKTNTPYDESKYLEALKRRGSPLLKFAVNS

SEQ ID NO: 424475 - protein, 353 aa, unidentified
MKRPKEKLHAGIDLHSNNLTIGLVNQDGKRMAHRKLECNLNEVVDFLKPHRAQLESIAVESTFNWYWLVDGLRKLDYPIDLANPAKIQQYHGLKHVGDKDDAYHLAELQRLNILPKAHVFEPELRPVRDLLRRRTSLVHQRTSLLLSFKSLFVRTTGQGLDLKELKKMEPKQAPKLYEHPANQLIAQIQAQHIQGLDRSIGRIEKAVLDCAREIPLYEKLPTLPGIGRILGMTITMEVGDIGRFKTDGDFASYCRAVDAKRISNDKRKADNNRKCGNRYLAWAFVEAANFARRYDPSCRKWYDRKAAKTSKVIATKALACKLAKAAWHVMAKPCDYDPQRMFPEPATKALTQK

SEQ ID NO: 424476 - protein, 339 aa, unidentified
MAKHNLIAVDLAKNVFQVCGMTKHYKVVFNKQLKRRELPEFMANQPPVEIAMEACYSSHYWGRCFEAMGHTVILLPPQHVTPFVRGNKSDHNDAVAIAEAAHRPNIKPVPVKTIEQQDIQCLHRIRERYMAHRLAVINQTRGLLSEYGIIAPQGHKAFCQLLREVSQPSHKALSPLLKTHINQQADEYYQLTDHVVDITQQLSTIAKQQPLCRLLMSLPGIGVINATAIYCAIGNGSQFNNAREFAVWLGLTPKQSSSGDTFTSSGITKRGNRYLRKQLVHGARAVLYRCKDKTDRLSRWGNQLMSRRGMNKASVAMAARLARLAWVLLQKQETYQPVP

SEQ ID NO: 424477 - protein, 405 aa, unidentified
MREFPSFTVDLNALADWLTACGVDTVAMESTGVYWIPLFELLESRGFKVLLVNARHVKNVSGRKSDVLDCQWLQQLMTYGLLRGAFRPADAVCVLRALWRQRGMLLRGQGRQVQHMQKALTQMNIQLTNVISDVVGETGQKILRAIVAGERDGFVLAAMKNVRIRASVDEIAKSLSGNWRAEHLFALKQALAMFDFIGTQLAECDREIEQQLQSLQAHEGEPAKGKKRGRARNAPKFDLRTQLFQMCGVDLTRIDGIDVTTALAVISETGADMSRFPTVGHFASWLGLCPGTKITGGKVMSGKTRRVANRAAQALRLAAAALRSSQSALGAYFRRMCSRMDKPKAVTAAAHKLARLIYSMLTKGEEYTDQGQDYYEERYRQRVLHQLAQRAEKLGMKLVATEQPA

SEQ ID NO: 424478 - protein, 339 aa, unidentified
MKKVFIGIDFSKLKFDAAIYNVDTKAIVSTEVFENEQSGYTDFLQWVKENTHCKKSGILFCGEHTGYYSGNLSVFLYESGYDMWLVSGLEMKLTQGIKRNKTDRVDACKIAEHAYRYQDKVDLFQPVSKVLDEIRELLSYRERLVETRKVLTTSAQEMKRVKNNVSCDYIYRDSIEYIKTLNASVRDCEKRIEALLKQDISLKTNYCLVSSVVGIGLVNAALILVATDNFTKFDNPRKFGCYCGVVPFEHSSGTSVRGKTRVSKMANRHLKTKLTLAAQNAVRFDPELKEYYQRKRSEGKNNWLVLNNVKNKLIHRIFAVVRDGQIYEKQYVHPLKQAA

SEQ ID NO: 424479 - protein, 428 aa, unidentified
MSARESVQEEAKFVALVGIDWADQKHVWCLQAADSGQCESGELEHRPEVVEAWVSALCQRFGPGPIAVAVEQVKGALVYMLGKYECLHLYPVPSTMTAKMREALYPSGAKDDPRDADLLLELLLLHRDKLRRWTPDNEATRRVQNLVEERRKLVDEKTAQLNRLIGYLKVYFPQMLEWFAKLDSKLVCDFLERWPSLEELQKVPSGELKRFFRHRRGRHGELTEWRMQGIGQAMPAIRDRAVLEAKRTVVQVLAQLLRTLLEGIATLDRKIAEAAEAHPDFFIFQSLPGAGAALAPRLLAALGSQRDRYGNAAEVQQYSGIAPVTERSGKKKWVHFRWASSKFLRQSFHEWAGHSIAQSVWARAYYQRQRERGKEHHAAVRALAFKWIRIVFRCWQDRVAYDESRYLTALAERGSHLASAYTAAAVSM

SEQ ID NO: 424480 - protein, 367 aa, unidentified
MGKDSTAVIGLDVHKESVDIAIADGGQARLFGRVGGEAAAVDRAVRKIRSVHRDPLFVYEAGPCGFWLYRRLRAQGARCMVVSPSMTPRRSGDRVKTDRRDALMLARLARAGELVPIYVPDARDEAVRDLVRAREDAVCMQRQARQRLQALLLRNEIRYVGRSAWTQAHRRWIAHLKLPDPAQQIAFEEYVSAVEEAGRRLERLEHSIAAQLEHWRWRPVIEALQALRGVSAIHAVRIVAELGDLTRFESPRKLMGYLGLTPSEDSSGKRRRQGAITKAGNSSARRAFIEAAWAYAHPARVSWVIARRHTGLSQRVTDLAWKAQLRLCSRFRRLAARRLPRNKVVVAIARELSGFVWAIAQQVRPVA

SEQ ID NO: 424481 - protein, 322 aa, unidentified
MEAVYVGIDVSKQWLDVGMWPGSESVRVANDAAGIAQLVERLRALSPRAIALESSGGLEVLAASELHAAGLTVAVVNPRQVREFARSLGTLGKTDRLDAVVLAQFAHSHHSHGRLAPMRLAEEAEVELRALVVRRRQLLGMLVAETNRRERAPKVVRKSVVQTIKGRKRALADIEQQLKQVLANSPTQQAKAILLSAVPGVGPQLSYTLIAELPELGQLGRRQIASLVGVAPHPHESGKFKGRRLIWGGRARVRTMLYMAALSAVRYNPRLRAHYRALLERGKAKKLALVACMRKLLVTLNAILRDSSPWKPNYIVDFQHSR

SEQ ID NO: 424482 - protein, 392 aa, unidentified
MYIVGIDIGKNHHEASIVSPEGKQIGRSLRFATTHKGADSLMSFIFKNIGNSPCVFGMEATGHYWYPIYSFLKAKGYTIYVINPIQSDSLRKMYIRQTKNDSIDSFLIAEVIRFGQFGTTSMADENILAMRQLCRYRDSVISSRTEIKLRIGTIMEQIFPEYEKQFSSLWVSTSMGILEKYLTPENIENTPIDELFEIIKDKSHNRLTRAKAISIKEAAADTFGIKIAQDAFSFQLKQLIDRMNFLDKQIEALDCQILEYYEKFDCYLHTIPGIGIIGAATILAEIGDISRFKNSSALVAFAGIDPTVRQSGEFNSTHNHMSKRGSPYLRHAIFLAATTCSFHNSPLNAYYKKKRDQGKHHLTATGAVARKLTTIIYAVLRDSKPYEPKKFC

SEQ ID NO: 424483 - protein, 304 aa, unidentified
MTITTIGIDLAKNVFAVHGVDQNGKTVLVKSRVIRAALPGLIAGLPLCVIGMEACSGAHYWARLFRQYGNEPRLMAAKFVSPYRMAGKSGKNDAADAQAICEAVRRPHMRFVPVKDESRQAMQCLHRPRQGFIEEKIATYNRLRGLISEFGVIAPQGTDALRHIVSAQKNSLPLQVQQCVDDLLEHVDRIEANITEYDQILPRIAKTDHRSQRLMKLKGVGPTTTCALVACIGNAHDFKNGRQLAAWLGLIPSQYSSGRKSKPGRITKAGDSYLRTLLVQGARSVLIGAEKRTDSFSRWVCSLV

SEQ ID NO: 424484 - protein, 429 aa, unidentified
MTQDGIAVWLGIDWADEKHRWAMRINGESRIHQGELEHTPEAVEQFVSGLAIRFPGRQVAVALEQSRGALIFMLGKYAHLVLYPIHPNTVDHYRKSAFPSGAKSDPGDAVLILDLLYRHAERLRPFHPDTVETRTLQLLVEARREAVDDKTRYLNRLTAQLKMFYPQVLDWFSTPDTVVVGRFLLKWPTLEKLQRARAGSIADLLSEHRIPDSRIETLMELIAQAVPAVKDAAVLESSVLIVRRLVQQLEVLHEAIADHDKKIAALAKSHPDYGIFSSLPGAGPAMAPRLIAAFGTQRDRYATASAIQRYAGIAPVTESSGKQKWVHGRWVCPKFLRQTFHEWAWMSTKKSTWARSFYDQQRNRNKSHHAAVRALSFKWIRIVFRCWKDRVPYDETRYTLSLQKRSTSKNVEIRVKNFYGFAQFDGLSC

SEQ ID NO: 424485 - protein, 351 aa, unidentified
MAILAERFVHVIGVDTHKRTLTAAVLNSIGGVLEWCDVPANAAGHEQLVAMAAGYSGPVLWAVEGTGSYGASLTELLLATGHTVTEVDRPKRPARKRGKSDQIDAIRAGREALAMKQLNAPRRRREREELRVLQVTRAELVRTKTTLSNHLQQLVVTSSEKMRARFIEPTPRSHASERLARKCLTARASRQFTAEDQLRLRTMRDVSHLIVGLARRADGYEREMKRLVETMAPGLLAQSGLGTLTAAQVLISWSHSGRIASEAAFASLAGVAPIPASSGQTVRYRLNHGGDRKLNAALHTIVLNRCRYDEKTRGYVARRSAEGKTSREIRRCLKRYLARQLFRFLDGLDEG

SEQ ID NO: 424486 - protein, 355 aa, unidentified
MSQEKYIGMDVHQATISVAVLDSRGKLIMESILETKAATILEFLQGLHGSLSVTFEEGTSAAWLHDLLKPHVTHLVVCDPRKNALLKDGSKSDRIDARKLAALLRGNQLTSVYHGEHGMRTLKELGRSYATITTDLTRVMSRIKALYRSWAIACSGTSVYAPRHRAEWLDKIPQPGVRLRAERLYQQLDLLQPVRQQARRDLLTESRKHHAVKLLRQIPSIGPIRAALLVAQLQTPHRFRTKRQLWAYSGFALETHDSGEYRYVRGKLQRNRERMTVRGLSDNHNPEVKNLFKGAAISASTHPGPLYDFYIALLEKGMRPTMARLTLARKIASITLTIWKKGADFDATQLHRQEA

SEQ ID NO: 424487 - protein, 360 aa, unidentified
MAKAKTLVGLDVHATKIVAAVLDAETGQLQTFGMSGDTDGAAGFCAGLPRPVRVAYEAGPTGYGLAREIAKRGVECVVAAPSKIPRASGDRVKTDRRDAEHLVRLLLAGKLHAVRVPGDEEEALRDLVRARDAVRMDLMRARHRLSKLLLRHGIRFDDGQAWTERHRQWLATITLDWPAAHTTMLDARGAIDALCHRRDGLEREIVALLPACPWAVQVGRLRCLRGVDTLTAVGLCSEIGDFERFARAGQLSSYVGLVPSESTTGQQRRLGSITKTGSGHARRLLVEASWHYRPRPSIGKALSDRQADQPPEAIAIAWSAQRRLHRTWTRLEARAKRRTIIAVAAARELAGFCWAITQIE

SEQ ID NO: 424488 - protein, 464 aa, unidentified
MHLGGFSPRLFNVDELPKRTAVCCITQVKSTSSKVRIPTRAIPSLHISGRDLMQDILTCAMGLDVHRDVIVACLARGELGTEPEIEIRSFSTLIPEMRKLRDWVLEVECRHVAMESTGIYWQPIYEMLEPCFDGQINILVVNARHMKNVPGRKTDMRDAQWIATLLRAGLLKGSFIPDKTFRELRHLTRYRKSIVHDITAQKNRIDKFLQSSGFRFTAFLSDAFGASGRNIIRHLMEYGDISREALDKCLKTQTRKRIDEILVALNGSLSEHQRSFLRMIFEHLESLERHRHTVEDVISEEIVKHEAALNLLCSIPGIDITAAASIIAEIGTDMSAFPDSQHICSWAGLSPGNNESAGKRKSAHINKGNPYLKSMLCEVGWVIAGKRTLYLSGWYWRIKQRKGAKRATIALALKLLALIYTMLKTGTPYNEECFEIRRKQSERKRASRMVNELQKLGYFVVAPD

SEQ ID NO: 424489 - protein, 350 aa, unidentified
MKKDIRKANRRLPEETIGIDLGDKMSHYAILSGEGTVVEEGTFRNQPESIRLHFSGKPARIALEAGAQSAWISRELKQLGHEVIVANARQVKWVTAGDNKHDRVDARKLARLARADEQLLAPIEHRSADQQADLSVIRSRDALVRARTLLVNAARGIAKGIGHRLPKTITLTFGKRAAAALPEQLLPVLAPLLAQIDKLSEGIAEYEARIDTIAARRPEAKKLTSVPGVGTLTALAFTLTLGRASRFERSRDVGSYLGLRPRRQQSGARDPELGISRAGDPYLRRLLVQCAHHVLGRFGPESALRQWGLAKAGGTKATKRAIVAVARKLAVVLHSLWVSGEEFKPFPMKG

SEQ ID NO: 424490 - protein, 297 aa, unidentified
MRDSRTRYVGLDVHQESIAVAYAREARDAEVVCWGRLGTRQRDSDKRIRTLTSKTQQLVFVYEAGPCGYGLSRDLSRKHLRCGVVAPSLVPTKAGDRGKTDRRDATQLARLLRSGDLTAVDVPTGADAAIRDLARARAEAIRDRQAAKNRLTAFLLRQDLRYEGRATWGPAHRRWLAAVVCPTPAQPIVFQEDGRAVAAHDARRQRLETARREPVQGWRLAPVVQARQARRGGQCTVAVTRVAERGDRTRFEHPRPLMSDLGLTPREYSRGDRRRPGTMTTAGHTCARRALIAGAWA

SEQ ID NO: 424491 - protein, 356 aa, unidentified
MSHDVKYIGMDVHKEAIVIAVQNESGKLVMESVIETKASSILQFLHGLRGELHVTWEEGTWAAWLYDLLQPQVQHMVVCNPRRNALLKEGSKSDKVDAGKLADLLRTGMLRPVYHGENGLRTLRELGRSYQTISKDLTRVMNRLKALYRGWGIPCAGTQVYAARAREQWLSKIPHTGVRRRAELLYQQLDGLQALRRNVRPELLAESRKHKAAKLLRQIPCIGPIRAARLIGLMQTPHRFRSKRQLWTYSGLGIETHDSAQYCFVRGQVQRSKKPQQVRGLNRNHNHEMKEIFKSAATRASCGRGPFHDFYTGLLAKGMKPEMARLTLARKIAAITLTLWKKEERFDVEQLKTQAA

SEQ ID NO: 424492 - protein, 323 aa, unidentified
MTMTYVGIDVSKTTFVVAYSSDKASKTKTFRNTVKGVHEFIQTISSAGHHCVLEATGNYSSLLVYLLSQAGITVSLENPLKIRNFARVMLSVTKTDETDALLIALYGEKMQPAPYRLRSDAILTLKQKRTVIRQLKKQLIATRNLKGSMEALPFFDSKCKKTIEKTIAFLERQVKDLEEELANLAQGEYRKQMGLLTSVKGIGVTLAAALIMATGGFAYFDNAKQLTRYLGLSPTYQQSGTSVNVKGHINRNGDSSLRSLLYVAAMASLRCNAECKECFNRLRSNGKPGKVAVVAVANKLVRQVFAVVTQEKPYIDGFKSAKP

SEQ ID NO: 424493 - protein, 389 aa, unidentified
MIYVGIDVASDKHDFMLMNDNGIFYTKHSITISNTEDGYKKLHNSITEFCGANNDNQVRIGLESTGFYHLNLVFYLLKKEYKITILNPILTNMFKKSRQVHTPKNDNLDSLNICKYLKDNQQDFKPYTLTSYHTEALKSLSRDRFSIIEELRQAKIDIYRILSQLFPEYLKLFSNVYQGSALEIISKYPSPKKLAKAHLETISNMLHAKCKASAEDIINAAKASIGNDNEYLSFSLIQAIKTLNFIQSKIDDYDKMIKYYVDKLNTKILTIPGIGYTTAGLILGEIGDISRFKNAEHLVSFSGLDLEVYESGKFKATNHRISKKGSKYLRYALYQVTKVCWIHDSTLHAYYEKKKSEHKHFFVIVGHLEKKMVRIIYSILKSGNAYTPR

SEQ ID NO: 424494 - protein, 318 aa, unidentified
MANSSIISAGIDTSKNKLDAAIHGRDGTTCVSNDEAGWKTLADRFLAAGVTRIGIEATGGYERGVTRYLQNAGFTVRLLQPLQVKAFAQARLRRAKSDQLDAQLIAACVHLMGEHDQMPPDPRFDALADHLTFIEQGEEDIVRVKTRIEHTPAGRLRRALEADVKRLATRRGKEIERLIAALCAHADLARRFELVLGIPSIGERTALSIIIRLPEIELVNREQAAALAGLAPFVHKSGQFEGQTHIGGGRARLRRSLYIAALSGAHRWNPQLMALYRRMTAAGKSPKSALVACARKLLIFAITVVQRGTPWQDRPVAG

SEQ ID NO: 424495 - protein, 364 aa, unidentified
MTVIHYIGLDVHKKTVSYCIKTAAGQIVRQGRLEASRPALRAWAEGLRVPWHGAVESTLFSAWIYDTLKPYAEKLVMGHPARMKAISAGKKKSDAIDASTIADLLRCNLLPTCYVLPPELRDLRRLLRYRNLVVQESVRMQNKMAGLLMESGTAFEKDKLHGKKYFTQLLKSLEEVPESVKDLLRMSRSSLEMFQSTQKQLVERLLSEPALEQRLERLLSIRAVGPITALTWALEIADPHRFASIADAVSYCGLTAAFRSSAGKQQRGPISKQRNAWLQSVLIEAAKLAPRWNPQLAALHAHELERGHANRATLQVARKLVAYLLAVDKSGQPFQVHTPAPPADTKAKNKTRRKSKKAAALAAA

SEQ ID NO: 424496 - protein, 343 aa, unidentified
MGDVSTIGLDIAKSVFQIHGVDVDGAVVVRKRISRAKLLEFFAALPACLVGIEACPTAHYWSRQLGVLGHTVRLLPPSYVKAYVKRSKNDANDAAAICEAVTRPSMRFVATKSEEQQSSLMLHRSRQLLVCQRTMLSNAIRGHMAELGIISAKGRNGTAELLKIIADEQDDRIPVAARFSLEVLARQYAAVRAEIAAIEKRIHVWHRSCEEGRRLEEIPGVGPIVATALVAEVGDWKEFTSGRSLAAWIGLVPRQHSTGGKERLGRISKQGNRHLRWLLVAGAMAVIRYARQHGTKRPWLARLMDRRPIKIAAVALANKIARMAWAMMVRGERFKEPKLLPAA

SEQ ID NO: 424497 - protein, 460 aa, unidentified
MKDVTMKLKNSSKNKAKRIKKHLEQINLYAAGIDIGSREHFVSVPESLDDDPVRKFGCFTIDLENMADWLVRIGITTVAMESTGIYWIPVFEILEARGLQVILVNAHHVKNVSGRKTDVKDCQWLQQLHTYGLLAGAFRPEDEFCVLRAYMRQRGTLVSSLSTHIQHMQKALRQMNILLDNVVSDITSKTGMSILRAILLGERNAEKLASYRDRRCKNSAEVIAKSLMGNYRKEHVFSLKQSIELYDFYHEKLKDCDQEIEQQLIQFEKQTGLAERQSPTKKRYKKHEKNTIQFDVASYLYDLCGTDLTDIDGLDEGSVLKVLSETGTDMSKWKTASHFVSWMGLSPNNKISGGKVLSSKTIKTRNRAKQAFKLAAWGLSNSKSGLAAHYRRLRARIGAPKAINATARKIAVIFYNMLKNKTSYISQSQEEYDNAHKQRILKQLQQKAGQFGFELTPTVA

SEQ ID NO: 424498 - protein, 340 aa, unidentified
MNIVYLGIDLAKNVFQLCGLNQAGKPLYTKRVDRKILLQTIANIPACLIGVEASTGAFYWQREFEKLGHKVKVISPQYVKPFIHGQKNDGNDAQAIAVALMQPTMKFVPPKSPEQQDIQALHRARQRIVSHRTATICQIRGLLLDRGIPIGAAITRARRAIPLILEDAENGLSARMRRTIAELYELFLDLERRIGFFDKEIDTVFKQSEACQRIAKVKGIGPKTATAVIAAIGEGTEFKNGRHFAAWLGLVPRQHSSGDRQILMNMTKKGDKHLRTLLIHGARAVVRVATNNNDSYLNQWVNQLKERRGFNKTIVAVANKNARIIWSILHSGTEYRPAVI

SEQ ID NO: 424499 - protein, 363 aa, unidentified
MNYVGVDIHKKYSVLCAVDEVGKKVGEGRVEGNSEKGFARFFAGLEGPSKAVLEACWNWGLIHDLLEEIEEVEEVVLAHPLKTRLIAEAQIKNDRLDAYALGTLLRGELVARTHIPGRETRARKNLLRQRLYWARLRTMLRNRIHALLDRQRGMQLPQCSDIFGVRGLGFLRRLELGEPDGTLLREALVLHDLIAQQIKAQEKRIVPEFEDEAEHRCLRSVPGIGATLAAVIGCEIDGILRFGSAEKLCAYAGVVPTTYASGGKVVHGRLLPSCNKWLRWALIEASWVAIGCSAYFGTFYQQQRARRKKPNTAITIVARRMCRILYQLLQEKRDFEKQPPRAHSKSCPRLLRVKTDGNTTACC

SEQ ID NO: 424500 - protein, 322 aa, unidentified
MNDTVVGIDVSKKTLDTSYAQGQRKQARIFENSSDGWKQMLSWLKAKGSQPAHVGMEATGRYSLGAALMRHDAGHTVSIINPAQIRDFARSKLGRNKTDKADAALIREYTTLFRPQPWTPPSPAMRRLCELQTVRAGLVANRTEWKNRLGSGLGDSTAIQVAKAVIDALSSQLKVIDQAIAETIEQDGDLRGRRDLLLSVIGDTLAALLLAEMPEPGVLRHSAEMIAYAGLNPSHHRSGTSIDRPTRISKIGNATLRSALYMPALSAMRFNPVVAALAARLKSAGRLKPKQIVVAAMRKLLVLCFGVLKTGKPFDPAIAMPT

SEQ ID NO: 424501 - protein, 372 aa, unidentified
MKIIGCDYHPGFQQIAFVDSETGELQERRLEHPEEAEKFYRDLGAQGACVRVGMEASGHARWFERLLSELKFELWIGDAAEIRTKRVRKQKTDRQDAELILQLLVENRFPQIWVPSWENRDLRQLLWHRHRMVQARTRIMNQLQAVALNEGLLCKKRLWRETGRKQLESFPLAPWASRRRQDLLELLDRLTPTIAELTQAIEREVENSPEARRLQTHPGVGPLTALAFVLVIGKADRFQCGKQIASYLGLIPLEDSSGKRRRLGHITKQGNSLLRFLLVEAAQVTVRSDPEWRSKYFHLAMRRGRKIAKVAMARRLAVRMYWMMRKGWDYERLNKFGSQGRKSGLSCWSTQCFDPVPEAAKFPNHSISAPAS

SEQ ID NO: 424502 - protein, 405 aa, unidentified
MNAVGIDVSKGKSTVTIRKPGDVILMSPCDIPHSQSAINDLIKQIKSLEGETKVCMEHTGRYYEPVATWLSDAGIFVSAVNPILIRDFGDDSLRTPKTDKADSKKIARYTLDRWAKLKQYGIMDKTRNQLKTMNRQFGFYMAQKTAMKNNLIALIDQTYPGANDFFDSPARNDGSQKWVDFIHTYWHVDCVRSKSLNAFTEHYQNWCKRKNYNFSAEKAAKIYQISSDLIAVFPKDDITKMLIWQAVALLNTASKTVESLRSKMNELASTLPEYPVVMDMNGVGATLGPQLIAEIGDVSRFTHREALTAFAGVDPGKNDSGKHIQNSVRTSKKGSPYLRKALFQIMDSLIKRSPVDDPVYAFMDKKRSEGKPYYVYMTAGANKFLRIYYGRVREYLSNLSNNETI

SEQ ID NO: 424503 - protein, 309 aa, unidentified
MHIASIGIDLGKTNFHLVALGERNKVLVRKKFSRAQLLVYTANLSSSLIGLEACAGAHFMGARLREQGHQVRLIPAQFVQPYRKSNKNDFIDAEAIAEAVTKQNMRFAQLKTEEQLDVQAMHRVRDRLVQRRTALINEIRGFLLERGITFAANPIHLRKSLPGVMEDAEQNLSPRLRWLLERLWQEWKQVEIDIQTITDEIERISKENALCRRLRQIPGFGPLVSTATVAAIGNGAAFRRGRDFAAWVGIVPRQYSTGGKQKLFGISKRGNIYLRRMLIHAARAVLLRVKYDTGGFGRWVAPACPAGTT

SEQ ID NO: 424504 - protein, 368 aa, unidentified
MPRIAEQVLPVTGGVDTHADVHVAAVVDQVGRVLGTQAFPATAAGYRAALAWMRAHGELAKVGVEGTGSYGAGLARYLAACGIEVAEVMRPNRQARRQRGKSDAADAVAAALAALSGEASGVPKSRDGLVESIRALRVARAGAVKARTQAGNQLRDLILTAPEQVRRQLAGLPCQRQVDLAARFRLRDLAGPAEGAKAAMASLARRHQQLAAEIARLDAAPEELLTRAAPPELLAKQGVATVVAATLLTTAGDNPGRVRTEASFAALCGASPVDASSGKQLRHRLNRGGDRQANSALWTIAMTRLAHDPRTKAYAARRTTEGKTRKEIIRCLKRYIAREIYKTLCQPKPPATTSAPQAKQDLSAPVLT

SEQ ID NO: 424505 - protein, 372 aa, unidentified
MGSEADKLFPVFTIPNNKAGFDELYEKMFSVTDDKTKIKVGLEATGHYSLNLLGSLIDKGLPTCVINPLHTNLYRKGLSLRKTKTDKVDARSIAMMLMTNKTLKPYSDISYHNEELKSLTRYRFDKVQERAKLKSSVARLVNILFPELEKLVPSLHMASVYSLLSKLPGASYITECHLTHLKNLLETASKGHYGRDMAITLRNTARDSIGSVIPAKSMELKHTIHLIKVMTEEIDEIEDSIKSIMDTCNSPIMTIPGISYRMGAMILAEIGDFTRFNYADQILAFAGLSPSTYQSGQLDSSYSHMEKRGSRYLRYALFNAAKFVCKWDENFGAYLSKKIGEGKHYNVAIGHATKKLVRTIYRMELTGEAYRR

SEQ ID NO: 424506 - protein, 412 aa, unidentified
MNYQDYLFVGVDTHKNQHTAVVINCFHQKLGVVETHNNPSNFDELIKELETLTPNQETLVFGLEDTQGLGRSLAQWLIKRDYQVKEVNPALTKRERQHSPNPDKSDQVDGEAIANVLLAQWDKLPTIHEDGNHKAIKQLNNHLRGLVKQRTQIKNQLHNLIHQQYPNYEKFFSNPFKVKTALAFWKKFPHPNKLKHYGEKRLQKFLKKQTKNISNDKASKILSLVDKDQEQDVSVRARNKLIVMLIEQLRLINQQLEKIKTELQEAVDNSPYQLTTMPGISYNLAAQFIAEIGNISRFNSANQLARYSGLAPTEHSSGKSSHTSRKKYGCRNLNNAFYMLALQQISTTRNGKPKNPVAYNYYQKKLAEGKYGKSALVCLQRRLVDIIFAMMRDKTAYKLPETPDYDVLNKAG

SEQ ID NO: 424507 - protein, 457 aa, unidentified
MNKKSDKKSSQKKSQKGSQSELKIKFTHAAGIDLGSREHWVCVPAEATQSNIRCFGCTTPELLALANWLTECGVTSVAMESTGVEWIPLFQILSERDFKVFLVNAKSVKTVPGRKSDVKDCQWLQQLHSYGLLAPSVVPEGDIAVLRSYLRQRENLIQSSSTHIQRMQKSLTQMNLQLHKVISDITGVTGLNIIRAIIAGERNPNKLAKLADKRIKSTPQAIRNALTGNYQESMVFILAQELELYEFYLAQIAGLDGQIEKCLDKFPSVTSEAAPASKKKNRRRSTHPPFDLHSHLYRITGVDFTSIDGLDVVTVQTIISEVGLEPSKFKTVKHFTSWLGLCPGCRITGGKVKSSQTRAVVNRASTAFRLAAQAVSRSNSALGAFYRRIRSRAGAPKAITATAHKIARLFYVLWTKKESYHDLGADYYEQQYRARLVKNLKKKAQSLGFELVEASPA

SEQ ID NO: 424508 - protein, 345 aa, unidentified
MEYYAGIDVSLESASICIVDDKGAIVREGKAASEPAALCKWLRDAKLELRRVGLEAGPMSQWLHAGMMKAGLPVELLETRHVRTALQTMPVKSDRNDARGIAQLMRLGWFRSVHCKSLPSQEMRALLAARKLMQGKLQDVERSLRGILRGFGLKVGKTTARTFEGRILDLVAGQATLQEVANALLAARSVLGREFASLDQKIHKTARQDERVKLMMSVPGIGSIVGMAYVAAIDDPTRFQRSRSVGAHLGLTPRKYQSGETDITGRISKSGDAGVRALLFEAAHIILIKPVKKAGALKRWATALAKRSGPHKAKVALARRLAVMLHRIWMTGVPFDATKAAAASA

SEQ ID NO: 424509 - protein, 347 aa, unidentified
MELHAIGIDLGKTLFHLVGVDGCGNVVVRKRCSRTQLLRYTANLRVQRIGMEACSGSHFLGRALREQGHDARLMPAQYVKPYVKTNKSDYIDAEAIAEAVQRPTMRFVPIKTEEQLDLQAVHRVRERWVMRRTAVINQIRGLLLERGVTLSKGRSHLEQALPQILEDANLQLSDSFRVLLAQLKLELEQLTARIEQMDSVIQHTVKENEACQRLTTIPGVGPVTATALVAAIGNGSGFRRGRDLAAWVGMVPREYSTGGKQKLLGISKRGNNYLRRLFVQGARTVMQHRDKQSPGLSNWLAQLLARTHQNVAIVALANKLVRMAWAVLCKNEVYRSPVLATSILNQA

SEQ ID NO: 424510 - protein, 326 aa, unidentified
MHKSKEFIGIDISKKVFDVWSEKWGYKQFKNTSEGFSAFLLLLTSQSWCVMEFTGSYYHQLALFLHDNDVAVSVVNPLVIKRFIQMKLQHNKTDKSDARMIVRYAKEQPLSLWKPQPHYIRDCKDLHTVISLYHKQRTALKNKLHSFVDQGLKGKVVTSVKRHIRQLDAEIKLLESQLETIIKTHEQELLSNLLSIPGLGRKTAILLIVCTNGFKTFENSRQLSAFFGLSPVIRASGSSVRGKTRISKRGNPMVRNHLFMCSFTAYSKNHQCKALYERIVNKGKSKKLALIAVTNKLLAQSLAIAKSGVRYDPDFKAVNPSNNFSF

SEQ ID NO: 424511 - protein, 395 aa, unidentified
MNGKGGNICNHPQQADGKGDKMNYIGIDLHKDSLSIVGVNENNLIFVKERIPTKCIGKIQEFFTRPDISPCIVACEAIGFYWWFYDLISDKVDKFILANPIETKKYSWNNPKTDFRDATRLALLIISGEFERNRSLSSYAPDKTIRTFREMTRTRSNLVYRKNSFVNSARRIFLKNNISGPKILNSSTLCSFVDKFFDKFNQYHRKLLFIYAENLFYLERQISEIEREIYQFLNMERFNKVHKILTTIPGIGDMVSATLISEIGDFKRFPEPSCLCSYAGMTPRVFQSSETIRYGKITKQGSVYIRKALINASWVGVRESERIRKIFIRIEKRAGRKKAIVAIGRKMLCWSWHLVINEKTWEEFCKRNPTENRSGMTLQWLLNQRDESIKKNSVA

SEQ ID NO: 424512 - protein, 346 aa, unidentified
MEQYAGIDVSLEYSSICIVDARGKVLKEAHVASEPEALIAWFAAQEVAMARIGLEAGPLSQWLFAEMKAAGLAVELIETRHVRDAFKAMPVKTDRKDARGIAQLMRLGWFRPVHCKSLPAQEVRALLTTRKLLQAKRHDVEMSLRGVLRGFGLKVGPTTPKTFEGRVRDLVEHHATLRMIAEALLNARTALDQEFKAIQKRLYVIARGNPPTRRLMTTPGVGAIVALTFSSAIDDPARFRSSRMVGAHFGLTPRKYQSGETDVTGRISKIGDHGVRVALYEAANVILTRAVKGSDLKSWALRVAKRAGMKKAKVALARKLAVVLHRMLASGANFIAKAPPGAATAA

SEQ ID NO: 424513 - protein, 335 aa, unidentified
MLDLCERIRTRVARETKKRVEVVSCYEAGYDGFWLHRLLEAHDIRNYVIDPASLQVDRRARRAKTDHVDAERLLRSLIAYLRGEPKVWSVVCVPSVAEEDDRRLHRERSRLINERIQHVNRIKGLLAIHGIYDYQPLRRDRMQRLERLCTAADGRTLPPRIKAEILRELQRLELAIRMIKTIEAERDAIASAAKTETKHTSAKKIQHLAKIKSIGPEFATTLVGEVFYRSFDNRKQLASYVGLTPAHFQSGAMSRDQGISKAGNAKARTVMVELAWLWLRHQPESPLSVWFRERVGKLKGRIRRITIVAVARKLLIALWRYLETGLVPEGAALKV

SEQ ID NO: 424514 - protein, 340 aa, unidentified
MMTTTIGLDLAKSVFQVHGVSSEGQVTFRRKLRRSELMSFFRALPACLIGMEACATAHYWARELAALGHEVRLMPPSYVKAYLRRQKNDAADAEAICEAVTRPTMRFVPVKSAERQAILTLHRTRELLVRQKTTLIHAIRSHCAEFGLVVPQGARRIFDLLQLVRDADPLTLPETAVVTMQMLGAQLDALSVQIRTLERRLLAWHRENQTSQRLATIPGVGIITATALAASISDPSLFRSGREFAAFLGLVPRQNSSGGKERLGRISKKGDGYLRKLLVVGATSVIRRARTGVTPSAGWVQSLLERRPSRVVTVAMANKTARIAWAVMARGESYRPMATV

SEQ ID NO: 424515 - protein, 343 aa, unidentified
MQTITTIGLDIAKSVFQVHGVDAGGHVIIRRQLRRRYVLAFFQKLPPCLVGIEACASSHYWSRELQALGHTVRLMPPAYVKPYIKRHKNDATDAEAICEAVTRANMRFVATKTPEQQSCLTLHRTRHLLIRQQTSVINAIRAHLAEFGIVAPVGRQGVEQLLGVVADASDKRLPEVARACVAALGAQLRVLKAQILEFDRMIIAWHRSSETSKRLDAIPGVGPALATALVASVADPKAFRSGRDFSAWIGLVPKQNSSGGKERLGNISKRGDRYLRSLFTTGALAVIRYAKIHGTGHRPWLTALLARRPTKVAAIALANKIARMAWAMMAKGERYKEPVALAA

SEQ ID NO: 424516 - protein, 338 aa, unidentified
MRVYVGIDLHSNNCVMVMISETGHVLYEKRLRNDLALILSELMVYQKRCAGIVVESTFNWYWLVDGLMDAGYEVHLANTAKMQQYNGLKYSDDRSDGRWLAEMLRLKVLPEGHIYPKEGRGVRDLLRKRSQLVRQKVAHILSIQDLVSRNGGISLNANTVKAVTGWDLDRLLPDPLVARAAKSNLKVYRCLVTEIKELEEIVLSHVQERPAWTNLLSVYGVGKILGLTILLEAGDMGRFASAGHFASYCRCVGSEKLSNGKKKGKGNTKNGNKWLGWAFIEAANYAVMHYEKAKRFYQRKKARTNGVVAFKAVAHKLARACYHVLKDGAQFQEERAFA

SEQ ID NO: 424517 - protein, 400 aa, unidentified
MFAGIDWGGSFHQVCLINAHGEVIVQQRVQHDLAGLAELDRLLLVHRNAAGRLRVAIERADGLLVEHLHTIEVEVFCVSPKISARARERYRLAATKSDAFDAFVLADTLRHEHRHWRALSPASPALAELRAISRDRDRVVIAQQATENRLRAVLEAYHPAPLHLFSSLDRDITLDFVTDYPTPEQAARVGEARMQQFCRRHGYSGRTDPTVLVERLRPHLLSAAKGTEAGKAFSATMFTEELRLLNAHLRAYDKRLVELLDQHPDTPIFTSFPGIGPVVAAALISEMGEDRGRFPAPEALLAEAGLSPVTRASGRTRQVRFRYAANRRMRHMIDWWAFVAAREDAWSRRIYDDARARRQGKYRALRGLGSRWTRILWRCWTDHTTYDPAIHHKQQEPAQA

SEQ ID NO: 424518 - protein, 343 aa, unidentified
MKYFAGLDVSLNETAICVVDEEGIILKEGSVPSEPDAIMTWIRRLDVVISRAGLEIGGLSRWLYGELRAAGLHAFCIDPRKLRGITKTMPVKSDRNDARAIAQVMRVGWYSIVHVKSHRSQEMRMLLTNRRTLLTKQIDIENEIRGTLRVFGVKLSGRITQANFERLALELVEPHPTLAAMIRPMLIARAALRDQYAVLHKMLLRMVRDDEACRRLMTIPGVGALTAVMLTTTIDDPDRFQRSRDVGAHLGMTPRKYASGEIDRNGGISKCGDASIRATLYQASLALLCRSQRWSKLRTWGMAAVKRRGVRRAIVAVGRKMAVLMHWVWADGTSFRWGNEVTA

SEQ ID NO: 424519 - protein, 356 aa, unidentified
MSRDIKYIGMDVHKEAIVIAVLNGSGKLVMETIVETKASSILQFIHGLRGELQVTWEEGTWAAWLYDLLQPQVEQVLVCNPRRNALLKEGSKSDQVDAQKLADLLRTGMLRPVYHGENGLRTLRELGRSYQTISKDLTRVMNRLKALYRGWGIPCGGTQVYGPRYREEWLNKIPQAGVRRRAELLYQQLDGLQGLRRHLRPEFLAESRKHKAAKLLRQIPCIGPIRAARLIALIQTPHRFRSKRQLWTYSGLGIETHDSAQYRYVGGQVQRSKKPQQIRGLNQNHNHEMKEIFKSTATRASCGTGPFHEFYAALLATGMKPEMARLTLARKIAAITLTLWKRGERFDAEQLKTQAA

SEQ ID NO: 424520 - protein, 333 aa, unidentified
MYSLYVGIDISKLSFHAAMLSGNNTVVDLGCFTNDYSGFENLIVRLKQESKCEKNEWFICFENTGTYSKSLLEWLVSQQIPCREENALRISRSMGLRRGKDDKVDARDICVYAFRHRDTLKPTQLTKPGISRLRKLLSRRSFVIRQKHGCQVSLKEQKSELDVDLNKIMSDQNDRLLQLYNEQLTVLEKLIRETIEKDPAMKKNDQLAQSVKGIGPITSAFIIAHTHNFERFENARQFACYSGIAPFPNRSGTSLKGKTRVSPFGNKQLKALLSNCANAAIAFDKELKSYYLRKKAEGKEYGTVLNAVKNKLVQRVFAVIKRQSPYVPLMNYT

SEQ ID NO: 424521 - protein, 372 aa, unidentified
MHQSSTLYVGMDVHKESIAVAYVAKDHDAEVISLGTFGTRQCDIDTLIRKLQSKAKHLVFVYEAGPCGYWLSRYLAKKDYVCWVVAPSFIPKKAGDRVKTDRRDARQLARLMRSGDLTPVYVPAVDDEAIRDLRRAREDTLRALQAAKLRLKAFLLRHDIRSTGRANWRPAHLRWRSEVVCPTPAQQIVLQEYVQTVTEQSERLGRLELALHEQVKTWRFAPVVEALQALRGVQCTVAVTTVAELGDLTRFANPRQLMHYLGLTPSEYASGGRRQQGGMTKTGNTHARRALVEGAWAYRYPAKVSRHLQLRLEKLPTAIQAISWKAQVRLCKRYRQLMAKGKHAHQVVVAMARELRAFMWAIAKQVAGSPQA

SEQ ID NO: 424522 - protein, 340 aa, unidentified
MSEITTIGLDLAKHVFQVHGIDAQGKTVLRKRLRRGQVSAFFSRIPRCVVGLEACATAHYWARELGGLGHEVRLMPAQYVKAYIKRNKHDAADAEAICEAVERPTMRFVPVKTAEQQATQLLHRGREQLVRQRTMLVNALRAHLAEFGIIAAQGLRNVAQLIVIVRDGEETRLPDVARQVLQVLAHQIEQIEAAIAALERQLLAWHKTNPVSQRLASIPGIGPIIATAIATTVTDPNVFRSGREFAAWLGLVPRQNSTGGKTRLGGITKRGNRYLRRLLINGASANLLRSKATKADPWVIGLRRRRPPLVVAVALANKTARIAWAVILRQREYQPRAVAA

SEQ ID NO: 424523 - protein, 491 aa, unidentified
MGKGSGQGPTGPEFFEEGTKMIYSVGIDLHQGQHRARCLDDRAQSCDGFSFQTTPEGLAVLEERVFRDGANPTIVLEPAGLPWKMVAVYLRSRHPDCRLVKAKTQKVAALRRYLRGPVKSDRLDALTLAKMPFIDPEKLVDIYLPPAEIHALQRLTRQRKRIESDISGRKIRISAIVDGYLPGVRRAFNDAWASPVRAFLRSQLNPYAVAREGEEALHTFLSKACPRSKWSRAETHLVFLACHSVADVCELSRSAGTVNEEFFTDLQDEIARELRLMESEEAESESLARRIMELYRKLHPSDNLTSIPGVGEHTAPIFLSAVGDPARFHSQSAFANWEGVVPGARQSSDVEAKGLRMTKAGPSIMRMGLYQAGDIGRRWDPQLAAVYYREMVYHGKNHRQAMGAVMSHLGARVFTVLKEDRPYELRDTEGSLISKDDARRLILDKYQVPEEIRRERRRRNPKASNTVGVPRKDREMATYRTNEAAKAPQPV

SEQ ID NO: 424524 - protein, 460 aa, unidentified
MSNNITISKSIKHKNKLGFIDPSVAGIDIGDKLIHVAFPDGKGSAYVKEFQTTTPQLLKIIAELKKAKVTTAVMEATGVYWVPLYDLLELMRLKAVLVDAKSVKNVPGRKSDVEDCQWIQTLYSNGLLRAAFRPPRDRLRLRAYVRHRMKIAKTKQYALTRIEKSLQLMNIKLSTAVSEIGGVSGMNIIRAIVFGETDPVKLAELRSSRCTRPEELFVEALTGNFQEQYIFEMKQNLELFDFASKQMKECDDQILAELDTYPTLIDTPPPKRDKDKNSSQNFSGWRKPSRNDVSFDVRTVLWKKTGIDLTAIHGIQANTALLLFAELGGTDVSAWKSQKEFASWLKLCPGNNISGGKRRRSKKQPCTNYINQALRMAALAAKRSKTALGAHIRRISARTDKPKGIKAGAHKLSHMLYYMCKNGWVYFEKGEDYYERAYAERCLKNLQKRAKDFGYKLVAV

SEQ ID NO: 424525 - protein, 344 aa, unidentified
MEKHTVAAVDIAKVVFDVALSDEPGRVRMTRRLPRSGFLPFFAQLPAATVVMEACGSAHYWARRLQELGHQVVLLPPHQVRPYVTRNKTDRTDAKGILEAYRNADIRPVPVKSVPQQVLVSLHRFRSGWLGARTAHINTLRGLLRELGIVIPVGAEKVLPLVRTLIADADSEVPDALRPVLDAACEEIETLSERIKMTQRQIEAIAEQTPVVDLLWSIPGIGLLIATALVAFVGDIHCFPSGRHFASYLGLTPREYSSGMKRRLGRISKRGDAYLRMLLIHGARSILCHAKNAKEHDRLRTWALDLERRVGHNKAAVALANKLARIAWATWKNGRPFESLPKAA

SEQ ID NO: 424526 - protein, 388 aa, unidentified
MNRIIKIGMDVHSTNYTLCAMEPTIGTEDRVFGEIQVAPDYKEIILFIESLKQKLGLSNNCSIECGYEAGCLGYTLYHQLTGAGIKCVILAPTTMLSPQGQRIKTDKRDAHLIAQCLCYGGYHPVYIPTGEDDAVKEYLRMRDDHKLAFKKVKQQINAFVLRHGYLYTGTKWTIKHLSWLRKLELGPMYRETLNEYMASYEEYETKIERYDRRIEEIASETRYQENAKKLGCFLGIRTHTALSLIVETGDFKRFAKGNIYAAFLGLTPGERSSSTKVNRLGISKAGNTHLRRLLVEASTGICKGIIGHKSKELRFRQADQSSEIVAYADKANIRLRSKYYKMIRHGKKRNVAAAAVARELACFVWGMMTGNISAHCGSYSSKPAGSQG

SEQ ID NO: 424527 - protein, 389 aa, unidentified
MPQSNDLSRSLTALDQDSTLIAVVELSQSSWLVGAIIPGVERRPAKKLAEDLLLALLHRWREEAVKAGRPIERIALAFEAGRDGFWLARWLRARGVEAYVIHATSIAVSREHRRAKTDRLDAALLLRAFLGWLRGERDHCTMAAIPSLEEEDARRPSREREALVGERTRIGNRIKGALARLGIRAFKPALRKAAERLAQLRTSEGVPLPANTLAELQRDLARLRLIDDQIGEIEAARLERLRQQPDAPRHPMILLLARVVGIGIETADMLVQEVLSRNLRDRRAVARYGGLTGSPEESGARRREKGLARAGNARVRRGMLQLAWRFLMFQKDSALAQWYRARTADQRGATRKTMIVALARKLLVALWKLVTTGEVPHGVVLRPAIQTAV

SEQ ID NO: 424528 - protein, 358 aa, unidentified
MKTQSNKIDFTGQNIYVGFDVHLKSWKVTVMTENIVHKSFSQSPSPKALYSYLKDNFPGGTYYSAYEAGFCGYWIHNQLLSLGIKSIVVNASDIPTTNKEKVQKEDKRDSRKIARCLRGNELTAIYVPSDKTLEDRAILRTRKMLTKDLTRFKNRIKSFLYFHGIEIPESFKNTQSHWSRRFMNWLTEIEITETSGKIALNTLIFEANHLRNSLLNITKQIRILSRTENYNESVILLRSVPGIALITAMVILTELETMSRFKSIDQLCGYIGLVPSTNSSGDEEKVGDITPRGHHILRTALIESAWIAVRKDPALIKCFNDYCKRMQPNQAIVRIAKKLLSRIKFVLKNKQPYICSIK

SEQ ID NO: 424529 - protein, 345 aa, unidentified
MEPMYYIGLDVHKRKISYCVKDSGGKVYAEGSLPATRLDLDLWMKTLPQPWSAAMEATMFTGWIYDHLKPHAAALKVAHPLMLRAIAAAKKKNDRIDANKICDCLRCDFLPECYMASTAIRERRRTLRYRNLLVRQMVQMKNKTSMLLMEAGVSYNKQRLHKAGYFRELLATNPDIDEGLVPLLRLCRETVVRLQRTESALVRSLERDSLLMDRVERLMTIPAVGPITALTWALEVGDVQRFSSIKKAISYCGLCGAEKSSANTVQRTPLSKQRNKHLQTTLIEAAKMAPRNSSELAMLYDTEKQKGNANRATLAVARKLVAYLMAVDRRQRAFQVVETSSGIAA

SEQ ID NO: 424530 - protein, 448 aa, unidentified
MGRVVIGVDPHKRSVTIEVVDRREKMLGSGRFTTDQAGYAAMRTYAKTWPDRVWAVEGANGVGRPLAQRLLEAGEQVLDVPAKLAARARLLDTGHGRKTDAHDAHAVAVAAVRAKDLRVLAPDAQLEALRTLVDHRDQLSRRRVQTVNRLHRLLAELVPGAVKKDLTAPQAKQALASVRPRDIAGKTRRRVAADELADLVTVEKKVKELTRQIQAIVTERGSHLTDLYGVGPVVAGRILADVGDVARFADRNRFASWTGTAPLDASSGEHTRHRLSRAGNRRVNHMLHIAATTQIRNDTAGRAYYRRKIAAGKTPMEAMRCLKRRISDAVYRQLIADAQAADIATESESPEQRLDDDGAGSGGQSGASEESSAADLHTPVIGSSDQPQPEPAAPRLPARRSSPTPHAASASQPPRRRAGAVKVQRPTGRTTLTATSTGAHSKAPELGS

SEQ ID NO: 424531 - protein, 347 aa, unidentified
MNGEYAGRQVVGMDLHRRRSVLVRMTEDGQKLGTARIANSPAALRAELARAGENPRVVLEATYGWYWAADTLAAAGAEVHLAHPLGVKAYGYQRVKTDARDAANLADLLRMGRLPEAWITPPEIRDLRELTRYRQKLVGLRTSCKDQVHAVLAKLGIAVTCSDLFGAWGTAWLDGLALPQPYAGKVTSLRQLIGELTTEIAMLTEVIADLLAGHPGYLVIQRLPGIGPVLAAVIIAEIGDVTRFRTPGQLASWAGLTPKHHESDTTVIRGHATKQGSRQLRWALVEAIQHAPAGSGPGQAKNAIIARRGRQARNIAKVAAARRLLTLVYYGLRDGQIRCLPEPARAA

SEQ ID NO: 424532 - protein, 423 aa, unidentified
MEVMHERVAGLDVHKAMIVACVRIMAGGKISRECRTFETSTAGLEALLGWLTQSGCTHVAMEATGVYWKPVWNILSDGEFELIVANAAHIKNVPGRKTDVNDAMWIADLVACGLIKASFVPEQEIQELRSLLRARKQLTREQTSHIQRIQKTLEEANIKLDSVISDILGVSGRRMIEAMIAGVRSPLRLAELADRRLKVSPKALYDALHGRLTDHHRFMLELYLGQHDALSGAIARLDQAVEALIARMDEEVAAGQATFLSLIMLLCTIPGVSILSATVILSEIGRDMSRFPTAGHLLAWAGLCPGQNESAGKRKSSRLRKGAPWLKTMLVQCAWAASRRKDSYYKAQFNRLRSKRGPKKAICAVAASMLTAIYHMLKDGTLHQDLGADHFDRRSTEVKAKRLVAQLTKLGFQVELQPLPQAA

SEQ ID NO: 424533 - protein, 338 aa, unidentified
MHRAGLAFASMSQNNKTINDNKLSFYAGIDVAKATLQLSINATSWTLSNDPKGCIRILKLIAEAEATRPGYKIHVIVEATGGYEAALVETLHRANQRLSVIQPSRVRHFANAKNKRAKSDPIDAAILAQFGEAIQPPPTLPPNAAQIHLVRLVARRAQLIETRITELNRAAHYRDKLLHKQSQQLLALLNRQVQQCEHAIAAQLAADQEMKTRAERVQQVPGIGPVVAAILQAQMPELGALRDTEAAALAGLAPYNRDSGPRKGTRSIWGGRASVRCALYMAALSAVRHDPILRNFYTRLRAAGKNLSVALTAVMRKLVVLLNHMLSKPTFKLAVRPN

SEQ ID NO: 424534 - protein, 457 aa, unidentified
MNANNARFQSASKIRISLLLIVLQCPMKGGDFMKNNFLSTLFVGIDVSSKTNVLCALDFQGNKLLNLKALNNQPGAESILESILDCLNSNSLNFVVIALESTSFYSTHIANFLSSNEVLLAYSPMVYCLNPKTIANYRKSFVDMDKTDPLDAYIIADFARCGRIKSQPWRGAQFLALQRLTRHRLHLVEAIAKEKTYMVSNVYLKFSQLTVLEKADRPFSNTYGATSEAVLTEFLSLEDIAYSSIEDLVAFIKDKGKNRFSNPVGTAELLQKAARDSYRLDKVLYEPINIAIASSFNVIKALQIEIKEIDKAIEKNIKGINTTEYQSLISIPGIGPVFASGILAEIGSITSFSSNDALAKYAGLTWRIKESGDYSASETNMTKTGNKYLRYYLIEAANSVKNNIPEFNVYYRKKFNEVPKHQHKRALALTSRKLVRLIFGLLTKNQIYSSSKVGEVK

SEQ ID NO: 424535 - protein, 320 aa, unidentified
MMAQDDLVVVGIDVAKDKVDACIRRFTLRQTFPNTAQGRRKLVAWLREYQVGKAVMEASGGYEREWRNVLHNAGIEVRIVDPRRVRSFALSAGRLAKNDPIDAEMIAWFAETFSQAPGQIPDAAREELAALVKARKVLIDGKIRLQAQDEHAAPEPARKAYARVLKSLAAEIDKLEAAISAKVKATPEFAERAEIIESVPGLAQATSAILIAGMPELGQVSDKVAAALIGVAPYDDDSGKRRGERCIKGGRRWVRNGIYMPCLGAATQCNPVLKAFYQRLLAKGKEPMVALVACMRKLIIILNTMLARRQKWNPGRHATA

SEQ ID NO: 424536 - protein, 334 aa, unidentified
MEQSSVCVVDAAGKIVREAKVASEPEDLVRFFRELGVRVVRIGLEAGPLSQWLHAGLAAAGFEVVLLETRHVKAALSAMVVKTDRKDARGIAQLLRMGWFRPVHAKSPATQEIRALLVARKLLQAKLLDVELSIRGILRGFGLKMGEVSRGRFEARVRELVMGQAMLERIVAPMLGAREALRTEYGRLHREMLAIVKLDAVCRRLMTVPGVGALVAITFKSAVDDPGRFAKSKAVGAHFGLTPKKYQSGETDVTGGISRVGDAMVRTALYEAAHIMLSRTVRFSSLKRWALDLARRRGLRRAKVALARKLATVLHRMWLDGTDFRWGKKVGAAT

SEQ ID NO: 424537 - protein, 440 aa, unidentified
MIAVRTTYFTCSAQKIPFFGFGFRSGIANLRNNALFVGIDVSSKNNVAYIMKPDGNKHSSFSVPNNRPGAEILVDKIVEVLRGLFIPKVVIGMESTSVYGDNLMYFLRETGKFSGFEKKLHMLNPKQVKKFKDAYSDLPKNDFVDAFIIADHLRFGRINKEVYMGDYRYEALKALTRARHQTVQSLTREKQRFLNQLFLKFSGFTQEKIFSNSFGATAVAILEEFESLDELAYMDAGELAAFIQKHGKGRFEDVDGIVADLQKAAKNSYRPPTVIADSVNQILAISMSTIRLLQGQVKEYDKAIEKQFSTIPNTLTSVKGIGLVYAAGIVAEIGDINRFPSQASLAKYAGLTWTQHQSSDFEAEDTRLIQSGNHHLRYYLCEAANSLRKCDPEFRRFYNLKFHEVTKHQHRRALALTARKLVRLVYALLKTNRLYIPPEE

SEQ ID NO: 424538 - protein, 460 aa, unidentified
MKKKAHHRSNKKQKIDTQMPILNPAAAGIDIGHREIWCAVPADRCEQPVRAFGTFTQDLEDMARWLQECGMKTVAMESTGVYWIPAFQILERQGLEVRLVNARHVKNVSGRKTDIQDCQWLQRLHSFGLLNASFRPPDEICILRTYLRYREDLVGLRSMQIQHMQKALQQMNVQLHQVLSDVTGLSGTRMIEAILNGERDPETLAALADKRVRASKATIQKALRGDYRPEHLFVLQTAYDLYKIYDRKIHLCDKQALAQMARLPSRAQNPLPERKAGRKPIQDMVAGKDLRTELHRWAGADLTAIEGIGVLTAETILGEIGTDMSRWPSEKYFTSWLGLCPDNRISGGKVLSSHTRQVVNPVSDALRRAAVTLQNSQTALGAFYRRMRGRLGAASAITATAHKLARLIYRLLKYGEHYVQQGMEAYEKKYRERVLHNLKKTAASLGLELVQKQQLATGVS

SEQ ID NO: 424539 - protein, 325 aa, unidentified
MQAGEGIIGIDISKDSFDVVLRSTRGEQHRVFSNDQKGYTSLVGWAEKQPERVVHICMEATGSYWEGLAEYLYQGGYTLSVVNPYQIKRYGDHLLNRNKTDKADASLIAEFCEKDRERLRAWKPFSPEIKALRSMGRRLDELQEMKQQEQNRLKSGVTDLVVIASLQEHIKQLKDQIKALWKQIQEHVKQHPDLREQQRLLTSIPGIGKLTAIKLIAEIGDIKDFASASQLAAYAGLAPKQFRSGSSVHKQTRISKQGRTELRRCLYMPAVVASEHNPIIRNLKRRMLASGHVMMEVIVASMKKLLHLVYGVLMSGKPFDPDYGK

SEQ ID NO: 424540 - protein, 415 aa, unidentified
MEKQRNKVYGADIHKKFLVATILSRDGCKIKDRFGMNIEDLVKFKDWVIRNGCEEVAVESTGVYWVPIYTILEDKVEVIVANAYKIKHTPGRKTDSSDSEWIAELCLNGMIDPSRIFPKLDRELRSLTRAREGYINNRTQMKNRIHKELESSCIKLSSVLSDVFGKSGRRMLNSLLDGKSVDEILKEIKSRSIRKKEALLREALSNSLNPTQCILIRTYLDMIDSIRAKIAELDREIMIRITRRKDDLSIAMSLPGIGFVSGAAILAEIGNYEDFKTHEQLAAYCGLTPSVYQSADKLTTGSITKQGSKHIRRMLIEVAHIIYRTRDSKLKRFFLHLKAKKGSKVAAVALARKMICILHHLLKKREKYDDQGIQRVKPSRIDMTSFPIEMTLEEMIETIVKAGYSITKIGSGGHG

SEQ ID NO: 424541 - protein, 341 aa, unidentified
MEHVAIDLGGRESQVCVRSPDGQIVEERRIRTDRIRSYLEKRGPSRVIVETCAEAFSVADAVKAVGHEVRVVPSTLVRALGVGDRSTKTDRRDAQKLSEASCRIDLPSVHIPSQLARERKTLCGMRETLVSARTQIANNVRGWLRTRGMRVPSGTVATLPMRVRELPDPLPTYVERNLKALESLSEQIVEADKELEQLAKQDPTCRRLMTVPGVGAATAMQFVATLDQVERFPSAHTLESYLGLVPGESSSSDRQHRLSITKAGSPRMRSLLVQCAWAARRTRGAHPMAAWAHEIEKRRGKRIAIVALARKLAGILFAIWRDGSVYARDRAALPPSLSPAL

SEQ ID NO: 424542 - protein, 397 aa, unidentified
MSSEYAVYLGLDVGKGEHHACALDAAGRRLYDKPLPNDEARLRALFEGLAEHGAMLMVVDQPASIGALPVAVARASGCQVAYLPGLTMRRLADLHPGQAKTDARDAFVIADAARTLPHTLRRVDTGDEALAELEVLVGFDDDLAAEATRVRNRIRGLLTQIHPALERVLGPKADHPAVLEILSRFGGPQGLRQAGRRRLLTPARKLAPRMGEQLVDDIMAALDAQTVTVPGSAAAEAVLPRLADSLRTVLGQRKQIATQVERMLDAHPLAQVLTSMPGFGVRTAARVLLEVGDGTSFPTSGHLAAYAGLAPVSRISGTSIRGERPPKGGNKHLKRAMFLAAFASLSDPTSRAYYQRKRDQGKRHNAALICLARRRCDVLFAMLRDGTTYQHPAPQAA

SEQ ID NO: 424543 - protein, 366 aa, unidentified
MTPDFKVGKDNKWFRQCVGIDIAKDKFNACLFMYDIASDMGCGTKSVEFKNTKQGFNQLVKWARKECIKEYPLTFLMEPTGVYYEPLAYHLCKIQQTVYIVMPNKARDFCNYEGIKTKTDEMDARCLALLGCVNRKLTPWQPPKAIFHELRQMTRFVEEMQKVRTMLSNHLEALTHGAEPVASVVKHYEKLIADIDKQLETNLKNIKAKIATDKELEEKVERICTIKGIGYLTVVTIIAETNGFNLITSRKQLASFAGLDVIARQSGNEDPKHVISKKGNTHIRRVLYWPGISSSRFNPQMKDMYGRICKRNPKVKMIGITAAMRKMLLLTYTLWKNGEVYDESKKGTCTPDKRTVDEDGRQLVQD

SEQ ID NO: 424544 - protein, 343 aa, unidentified
MDQHIGLDVSLKDTSVSVRQDGKRIWRGKCASDPKLLAEVIRKRAPNAKRVVFETGPLSVWFFHALTAEGLPAICIDARHAKAALDMAANKTDANDADGLAHLAEVGFYREVRVKGFDSMLMRTLIAARRQLMKMRVQMSNQIRGLMKTFGLVVPKGAGSVFDRNVISLLEGEDNLARIILPLLKAWGDIRLRVAELTKQLVAMAGADQRCRLLTSVPGVGTVTATAFAAAVEDSINFKNSRAVGAWVGLTPKRYQSGEVDYEGHISRRGDAKLGTLLYEAASVILNRSTETNALRTWALALKERLGFKRAAVALARKLAVIMHAMLKTGELFDPNAGAAAPT

SEQ ID NO: 424545 - protein, 368 aa, unidentified
MKQVTTYVGIDAHKKDLFIAMLIGNEKTPVTWQLVNEPNAVRRLVRKLERETPGPVRVCYEAGPCGYALQRQMTTTRVECQVIAPALIPRKSGERIKTNRRDARKLVELHRAGLLTEVRPPTPEDEAVRDLCRARDDAREDLQRSRHRLGKLLLRRGLHFSGRNWTKAHRRWIDSLEWTHAPERVVVDDYLLAIDHLEARLIELDARLTDIAQTNPYREPVGWLRCFRGIDTLTAILILAELHDFRRFQSPRALMAYLGLVPGENSTGEKHRRGPITRTGNALVRRLLVETAWHYQHRPGVGVALMRRRKGQPGRVIAIADKAQQRLCRRFRRLAEQHKPAPKIAVAIARELAGFLWAALQPTPTTAS

SEQ ID NO: 424546 - protein, 344 aa, unidentified
MEHFAGLDVSVKETSVCIVDDMGKIVREVKLASEPEALLQELAKPAYRFKRIGLEAGPLSQWLFSGLAEGGLPVVCVETRHMRAVLKAQINKTDRNDARGMAQMMRAGIYRPVHVKTLRSQKLRMLLTHRKLLQSKAIAIDNDLRGTLRNFGLKVGMVGTVKFEGRIRELVENLPDLAMLVEPMLIVRRALREQFVILHRRLLAIVRDDDICRRLMTVPGVGPVVALTYRATVDVPARFRTSKTVGAAFGLTPSMHQSGESERTGAISKCGDEMMRVMLYEAAQIMLVRSTKWSWLKAWAMKIARHRGLKKAIVALARRLAVIMHRIWIDGTEFRWSRQEAAAA

SEQ ID NO: 424547 - protein, 345 aa, unidentified
MKIVGCDLHTRYQQIAMLDDETGELVERRLEHADGEARDFYTKLVGPVRVGIEATGHTRWFERLLAELGHELLIGDAARIRAADVRKQKTDARDAALLLELLLIGKFPKLWRPSSEQRDLRQLLWHRQKLVWMRNAIGNQLHALAMGEGVCRKKQLWTKKGRAELEGLRLGDWASYRRQELLTLLDELDGSLEKLDRAVEEQSQQNQAAVLLRTHPGVGPVTSLAFVLTLGPVERFARSKQVVSYLGLNPREHSSGGKQRLGAISKQGNPMMRSLLVEAGHSAARLDAELRKDYQRLKLRRGSGVAKVAIARKLAVRMYWMLRSQASYAQLVRTQASPRGTLVES

SEQ ID NO: 424548 - protein, 410 aa, unidentified
MDAADGLDLPAFRGLREGQFPAPFPNAMDWPSRVAKEVQPVAESTLTVGMDVHKESVAVAVLRGHESTPYLVQTLPHDPSRLRRFFGRLRREGEVRACYEASGCGYVLQRAMGSWGVPCEVIAPSLIPKRSGDRRKTDRRDAVNLAHLYRAGELTAVRVPSEAEESVRSLLRCREAISHELQQSRQRIVKHLYARGVVYTNGKHWTLRHMRWLRALTLEAHDALVLHTHLTMMDHKSLHLAGLDEKIEALSHEDPYRAPVARLRCLRGVDTLTAMGIVVEIGDVRRFPNPRALMGYLGLTVSEYSSGGTERRGGITKAGNGRARRLLVEAAWHYRFPARSSTWLQDRRRGQDPALVVHAERAEHRLHKRYFQLQLRMPTTRAVTAVARELSGFVWAILWNEPHLLSGGRR

SEQ ID NO: 424549 - protein, 416 aa, unidentified
MDALNTTSFTAFIGIDWADTKHDVCIQPSSGDQREFDVIPHQVERIDEWVHGLCRRFGSPIAIAVELTKGPIVYALQKYDCFVIFPINPLTLAKYREAFQPSRAKDDPTDAELALDLILRHPERFKPLQPQSMEMRKLALLVEQRRQLVGDKIRITNRLRCALKQYYPQALEWFDHVDTPLFCDFITRWPTLIQAKRARRNTLKSFFHQHNMRRERVLEERLAAIKTASPLTLDEAVIVPHRLQVLVFVAQLRVILDAIKQFDEEIDDVAQQHVDYALFRDLPGAGPSLAPRLLVAFGEQRERFKSAADLQKYSGVAPVTERSGKKHWVHWRWQCPTFLRQTFVEWASQTINKSFWAGAYYRQQRAKGCTYQAAVRSLAFKWIRILYRCWQTRTPYDEVVYLKALERRGSSLLTTK

SEQ ID NO: 424550 - protein, 408 aa, unidentified
MLHCGIDWAWEELTLVIVDDNGIHLKEFKIKNSLDAFFYALSTIRQLCGEQEIIFGIETSNHRIVDFLASYGYKLYLINPNSMDKFRKRYKISGVKSDYLDAFVIANVLRTDLGTLKIITSKDELTEELGIVLRDRESLVELKTRLTNQLRACLREYFPQALKLFSDIACGLSLEFLEAFPTHEEALNGTKKQIESVLRRSKSYSHDKVQEIYEALREQQFPPSKAVIRAKRGLTLALISQIKPLIKQIEAYDKRINSLFEQNPDSQLFLSLPGVGNTLAAGMIALLGDERARFHSPRQIQALGGTAPITKSSGSYSHTQFRFSCNKDLRKVLSQFAFTSITKSIWARSYYNKKRREGKTRSHALRCLANAWVKVIFAIWRDNSLYDENLHLASVSRHIINQNSLSLT

SEQ ID NO: 424551 - protein, 352 aa, unidentified
MMVFGVDPHKQSHTAVAADGLGRRQAHKTVRARREGHRELIAWARELAPDGRRRAVEDVRHVASGLVRELLAAGEEVVFVPTRLMAGMRSGGRERGKSDPIDALANARAALREDVFLPAARLNGQVLDVRRLSDHRDDLVTARTRTINRLRWLVHDLDPALAPAPRTLSRTRKARRQLETGLRALPASAGRRIALSLLAAVTALTGEIAGLDEDLTALITRLCPELLAVCGIGVVSAARILGETGDIRRFRSPAAYARHNGTAPIPASSGTRDTHRLNRGGNRQVNAAIYRAALVQARCHDGARALLDRRAATIRETRKAALRVLKRHLSDVIYRALQADAWRLDHPQQHAA

SEQ ID NO: 424552 - protein, 457 aa, unidentified
MSKVNNQALQKATMEVEIIHPHAAGIDVGSRSHYVATGQNKEDVKKFGVCTDDLHQLCKYLEQQGITTVALESTGSYWQPLFVLLQQYELNPVLVNGKYTKNAAGRKTDVQDCQHIQKMHSLGMLEGSFIPDLFTETVRQYYRHRQTLVEGAARYINKMQKALRMTNIRLDAVLRDIMGRSGTDIIKAILSGERNPKALASLVQPSVKATTQEIEKALSGDWREAYLFELRHCYELYKYYHQKIDECDKAIETLLNQEISKQQQQPAYTAPPKVKIKKKKARKNEANIDLQKKAFDLSGGIDLSQIDGLGLGFLLCLISETGLNLSSFPTGKQFSSWLQVAPNVKKTGDKVKSSKTPKGKNRLAHAFMHAANSIGNKKNGDYLTHFFKRICYKKGRPAAIVATARKLAVIVWNMLVKKQPYQPQPTAQYLDYMRKKQIKNVKSKIRQLGITPDELAA

SEQ ID NO: 424553 - protein, 405 aa, unidentified
MARVFVGHDWAEAHHDVHVDDESGGRLAAARLPEGVEGVRRFHELIAAHADTPAEVTIATETDRGLFVGAMVAAGYRVLAVNPKSTSRYRERHSTSGAKSDAGDAKVLAGLARLDGHNHRPIAGDSDLADAVKVLARAHQSLIWTRQRQTNQLRSTLREFYPGALDAFDDLASGDALAVLAVAPTPTLGGSLSRSKIASALRRGGRQRRVDQRAVEIQTALRAEQLHAPEVVADAMGVSVAALVAVITTIKAQIGQLETQLADRFEQHPDAKIIRSLPGLGMILGARVLAEFGDDPDRFGDAKSRKNYAGTSPITKASGRHLVVLARHARNRRLADACYQWAFAAITASPGARVYYDQRRTAGDTHHRALRALANRLVGILHGCLRHHTPYDEHTAWAHRITTAA

SEQ ID NO: 424554 - protein, 429 aa, unidentified
MICAAVERCAGIDVGKTFLAVCRMSGPLEGEARVEKQRFGTIRGELEKLRDWLKEGGITHVVMESTGSYWKPVFNVLEGSVKVYLANPQEVKTRKGHKTDDKDGWWLAHLLRHAMIHPSFIPPRPIRELRDLTRRRKRLLSNATAEKNRIQKILEDANVKLGNVLSDVFGMSGQLMLEALLKGDTAPGQIALLAQGSAKKKIPEILAALEGHQMSDHHRRMIRYSLEHLKFLEEQLQQMDRDIAEQIRAAGLEEQWRLLQTVPGIQDRSAANVLAETGADMQQFPTPKHLSSWAGLCPGNNRSAGKNKSSRTTGGNPWLRGTLTESAWAAAATKNCFLKEKFWRLSSKSGGKKPPALIAVAHNILNLVYQVLSTGQPYQERGAPPLQENQRQRMIRHHFHRLGKLGIAIPRYVADSFEPKTKTCMPRTQ

SEQ ID NO: 424555 - protein, 311 aa, unidentified
MTPLSQTAVYIGVDVSKDKLDLAVDGQTEVSTFSNDAAGIDQLIERIRPMHPALIVIEATGGYERAFLNAALDARLLIARVQPSRVRHFAKAQGLLAKNDGIDARLLALYARCIQPSVCEKRPKNQVELENLLVLRRQLIDSRTAHTNQVKLTDSSFARATLAELIRKIHDHVKKVNKRIERLIDSDEDLSGRCDLLMSVPGVGKTTAATLAGKLPQLGTINRFKVTALAGLAPYDRESGKWTGKRSIFGGRAEVRSVLYMATVTAIRCNPVIKRFADRLKEAGKPRKVVITACMRKLLTILNAMARDSNQ

SEQ ID NO: 424556 - protein, 330 aa, unidentified
MYLGIDTHKKYSQVAVVDGDGNLQDEIRLPNDRLDKLAEEYAGGDAAIEASGNYRPIYEMLDEHLDVTLVNPSKNRIIADATVKTDRVDAKRLAHMLRADMLAESYVPPDEIRTLRDLVRTRKSLVEERTAEKNRVRAVLTRTDNTYDSELFGPTGREFLAELSLSDADRTIIEAHLSVIDAYDEQIEAIEETIEQKVLESPAAQRLLTIPGVGQYTAAVIVAEVGEIDRFDEDKELVSYAGLDPTVHQSGDKEIRGGISKEGSAPLRWALVQCANIAVRCDEYLGNYYTRLKERKNHQIAIVATARKMLVSIFHMLQRKEPYDPPEVSA

SEQ ID NO: 424557 - protein, 433 aa, unidentified
MLKLNYMSTLFVGIDVSSKTNAVYAMDFEENKYISSSFGNNQPGADQLVTMIAECMHKHKNLDTVLIVLESTSVYSVHISNFLSASEVLMPYRPYVFCVNPKATSNYRKSYIGMEKTDPTDAYLIADFGRVGRTKKLEPWRGGQFISLKRLTRHRMHLSECITREKTYMVSNLYLKFSELQLLEGDDKPFGSLYGATSSAVLTEFLSPQEIIDMPEEELLTFLAGKSRNRISDLSKTSELLRKAARDSYRLDKCMYEPLSISLASSFNCIHAYQKEIKLIEQAIEKCINGMNPNALLILQSIPGIGPVWASGILSEIGDITAFHSSDALAKYAGLYWPKGDSGDFTSEDNKMSKAGNPYLRYYLGEAANSVRKHIPEYADFYARKYAEVTKHQHKRALALTSRKFVRLVFGLLVKNQLYTGEKLDTEYNIESN

SEQ ID NO: 424558 - protein, 365 aa, unidentified
MAMTNIKEKNKKRETISFKGQQINVGLDVHKKNWSVSIYLGQQFIRTYHQESNGSILLKYLQTNYPEGIYRACYEAGFCGFSLHRELTSLGIECHVINPSDVPQTSKGMLSKTDASDSRRLGEAFSKNMLRSIYVPVSSDEADRNLIRYRKRVQEDVRAKKQMIKSILNVLGIKIPVEHDKSYWTNNFMTWLKELTINDVSNKNTIMFLVEDVVLLRKRLFATNKQIRIMSQTERYSKVYSLLITTPGVGLITAMTLLTEIGDIKRFDNFSKFNSFIGFCPSEFSSGEHIHKGKITIRCHKTLRSLILEAAWIAMRCDPALTLKYHELLKTKTAKRAIIIIARKLLSRLYTIWKTNTPYEKGIVK

SEQ ID NO: 424559 - protein, 300 aa, unidentified
MALTIVEDTRAVTGGAGTHAGMHVGAALDLVGGLLGVGEFPATAAGYARLLGWLGGFGTVCLAGIEGTGSYGAGLARHVTAAGIRVVEVDRSDRQDRRRQGKSDPLDAVSAARAAQSGRARGAPKGRDGAVEAIRALMVAKRSARSERTQTINQARALIVTGPDNLRARFARHTAAGLVSELAALRPRPGATVGYATRIALRELGRRAEFLDGQLGRLDELIVPLVTARAPALLALHGVGPDTAALLLIAAGDHPHRLRSEAAWAHLCAVAPIPASSGKRTATASTPAATARPATPCGGS

SEQ ID NO: 424560 - protein, 360 aa, unidentified
MKKHNNSRKNSELTSKRAKSRGPVQRDTKEVLAELVGKLKEKLDRKKVAARSTGEEHPGGELRPNLDRLTVGVDLGDQGSHYCILGLEGETLAEGQLRTTQEDLATFFQGLNAARVVVEVGTHSAWVQEVISGCGHEVLVANPRLMDGSKRRKRKNDRIDANKLARLGRVDPESLYPIQHRSREVRQDLVMLRARDALVAARTEIINTTRGLVKSMGTRLPKCSSRSFAQKGEEAVAVEMREALLPLVRLAATLSADIKEYDKKIETLGREKYGHTALLRQVKGVGPITALAYVLTLENPQRFAKSRDVGPYLGLVPKQEDSGESQPQLGISKAGDTMVRKLLVGSAQYILGPFGPDTDL

SEQ ID NO: 424561 - protein, 340 aa, unidentified
MKITTIGIDLAKNVFQVHGVDAHGKAVLKKQVKRIEMAAFFANLAPCLIGMEACGSAHYWARKLQSQGHTVKLMAPQFVKPYVKTNKHDAADAEAICEAVTRPTMRFVPIKHVEQQAVLALHRARQGMVRARTAQANQIRGLMAEFGLIVPQGITHLYQRVPLLLEEAKDELPGLFRELVQRLLAHLKVLDRQVDEMELQIQIWHRSNPLSRKLEKIPGIGPLTASALVASVGDAKSFDNGRQLAAWLGLVPKQHSSGGKPTLLGMSKRGDCYLRTLLIHGARAVIYALSRKPPATGWLTNLLARRDKNLVAVALANKNARIIWALLAHGREFQSDYAGA

SEQ ID NO: 424562 - protein, 341 aa, unidentified
MKATTIGIDLAKEVFQVHGVDEHGKRLFNKQLKRSQIASFFADIPPCLIGMEACASAHFWANKLQGLGHTVKLMAPQFVKPYVKTNKHDAADAEAICEAVTRPNMRFVPIKSPEQQAVLALHRSRQGFIKQRTAQANQIRGLLAEFGIVMPIGIHQLLRRLPEILEDAENQLPSLFRVQLSLLQKHIEYLFDVVSTLDKQIEQCHQQNALCQRIGKIPGIGPITASALIATIGNANNFENGRQLAAWLGLVPRQHSSGGKQVLLGISKRGDTYLRTLLIHGARAVLQSVKRKQDTVSGWASRLLERRNNNIASVALANKNARIVWALLAKDQEYCAPVMNA

SEQ ID NO: 424563 - protein, 411 aa, unidentified
MSHEITWLFVYGSPRVIIFTSEVIFMVFVGIDVAKDKHDLYAVDSDGVVLCDNFTFANSAAGFASLLERISVWGKIKVGIEATGHYSSNLLSFLKAHDFEVVVFNPLSVSRLRSAASLRKTKTDKNDSRYIARLLLTGVANPYQSQSYNISVLKSMTRARFRLFQEIQPLKNRFRRLLHVLFPELQGFFSNLYGNTSLNLLSVLPSAKDIAECNILKLTKILSEFSRGMLKRGRAEQLKSLAQNSIATYNYGDAFELKQTVRRIQFLSSQMSEIESEIDSVMAVLNSPITSIPGIGNLLGATILSEIGDIKNFDNPDKLLAFAGCEPSTYQSGKYTATNTPMVKHGSRYLRRALYCAADMAYVNSPSFRSYIDRKRAQGKHYYVAMSHGMKKLVRIIFAVLSRNIPFSEPA

SEQ ID NO: 424564 - protein, 411 aa, unidentified
MDEEVFYERCAGIDVHSKLLVVCLRIGRKSETREFGTLTHEIRDMVAWLKDNDCQMAAMESTGSYWKPLYNIFEEEGIPAMVCNAYHIKNVPGRKTDVGDAQWIARCLSQGLLNPSFIPDREQRELRDMTRFRKSQIEDRARNLNRLQKFLEAANVKLSEWVSDIDGKSATALLELIIDKPDFSLADVAARMHGKLKSAPELLFHALEGSITATQREFFAHVMSVIKDQTAQIEKTDAMIQRSFSENYKAAVEALSKIPGIGKVSAEQIVAESGTDMSRFKNQHAFSKWMGVCPGNNESAGKRKSGKTPPGNATLKSSLTQCAKTAKRNKSSFFSAQYSRLVPHRGKNRATMAVAHSLAIAIYFVLSGHEYKDLGADYYNQFNREKKISSHVKQLSRLGVTIPDVFLRSAI

SEQ ID NO: 424565 - protein, 357 aa, unidentified
MQTQVNDLNFNGENIFVGIDTHKKNWKVALYSNDIALKTFTQNPEPGLLVDHLRKNYPNANFSCAYEAGFGGFWIQKQLAAQGINCIVVNPADIPTTSKEKEFKTDPRDCRKIAKSLRSQLLTPIYIPSDRGLAFRSVVRLYNDAVKNQTRQKNKIKGHINFYGIRYPDEFKLETSHWTKSFCLWLSELKLDCEENTWTFQFYVQEYLKAQGEVMEVTKKVREIAKKAPLSKSVNRLISIPGIGVLSAMKILTEIEDIQRFKSLDQLCGYIGLVPTTKSSGEKENVGEMTNRGNKHLKTTIIECAWSSIHHDPGMSQKYFELIKRMDSNKAIVRIAKKLVARIIFVLTKEEEYKVIK

SEQ ID NO: 424566 - protein, 410 aa, unidentified
MLKIVYPICCGIDVHKKFVVACIASTDDRGVTSYRSNRFSTFTSGLNKLSEWLLSNSCRHVCMESTGKYWIPVYNILEDISHITLAHPKYVKAIRGKKTDKKDAKWIADLFKHDLVAASFMPPLCIRQLRDLMRYRFKLTNFGSSEKNRMQNCLTVSNIQLASVVSDTFGKSSMKIIDHLLKNPDDRDLDFIPLLHGSMKSKADSIRLALDGMITVEQQQKMKIILCHYSEIKKCKKDLESVILSLSEPYARQCSLVSTVPGIKNPFSAIAIISEIGADMSVFATAKHLCSWAGLTPQNNESAGKRHSVRISRAGVYIKPLLVQCANAVVRSEKHPEIRGRYLSIKKRRGHKRAIIAITRMLLTAIYHILSKEEPYNPELYKKVEILPKTRSITVDQAISFARRHGYSVA

SEQ ID NO: 424567 - protein, 321 aa, unidentified
MEGTPGAVRLEVFVGIDVSKHSWDVCVLPAMIRRSFPATDEGLASLLELLRQHPVTLIVLEATGGYERRLAAGLHDAGCEVAIVNPKQVRDFAKALGRLAKTDRLDAEVLALFAQKIQPRPSEKCPEKRAELDALVARRRQLLQLRTMERNRLHMAEYKLTRKSIQKVIDVLNKQIDQLDAAISKLIESDDDWRQKAQLLESVPGVGAVTSATLVAELPELGKLNRQAIAALAGLAPFNCDSGQHAGQRKVRGGRAGVRTALYMAALTGRRFNPILKRFADRLQAAGKSAKVILTACMRKLLTILNTMVKNNTHWNPKRAS

SEQ ID NO: 424568 - protein, 386 aa, unidentified
MQTVADRPEAPTAIRTDLGAIFVSLELSRSTWLITSLSPGGGEKMSKQVVRGGDVAGLLERFARLREKARARTGKVFPFVVIQEAGLDGFWIDRALQNEGIESHVVDPASIATSRRRRRAKTDGIDGEALVRALLAYKRGEPRVCAMVKAPTPEEEDRRRLCRERKVLIVERVRHVNRVKGLLFSQGISGYEPLRRDRRERLDTLQTGDGRLLPDHLKAQVRRELDRLELLLEQIKAVEAERDVLLAAQQAPAPAAMLLDIKGIGPEFAAILWSEGLFRHFDNRRQVASYAGLAPTPWQSGSVDREQGVSKAGNPRLRTTLIQLAWLWLRHQPQSALTLWFEERVRRNGGRLKKTTIVALARKLLVALWKYVTAGVVIEGAVMKRT

SEQ ID NO: 424569 - protein, 427 aa, unidentified
MDVHKKTVEATVRLLQGQQVQAETRRWGTMTGQIQALAEWLETQGVTHVGMESTGVFWKPIYNILETRFTVVLTNPGHMKQVPGRKSDVRDSQWGAYLLQYGLLRGSFIPARWQRELRDFTRYRAQLEAERTRVANRLHKHLEDANIKLGSVATDILGMSGRAMIKALMEGEQDAAQLADMAQGKLRTKLPELQLALEGKVTPHHRLMLRLLWKELEAVEELMAEVDRQVQEVTRPYTPQIEQMDPVPGVDRRVAEVVLAEVGPNVDPFPSDQHLSSWAGMCPGNEESAGKRRTGRTTKGNRWLRAALVQAAWAASHTKRSYLGAQYRRLAGRRGKKRALVAVGHSILVILYHLLKDSRPYSDLGRDFFDRMNHDRLIRYYSRRLAELSQKVTVEPLPEVIPGEGMVNVHPLAKAKGMTAGGICNDP

SEQ ID NO: 424570 - protein, 343 aa, unidentified
MQAITTLGLDIAKSVFQVHGVDASGNVIIRRQLKRRYVLAFFEKLTPCLIGIEACASSHHWSRELQALGHTVRLMPPAYVKPYVKRHKNDATDAEAICEAVTRPNMRFVATKTPEQQGCLTLHRTRHLFIRQQTSVINAIRAHLAEFGIVAPVGRHGVEQLLGVVSDAGDKRLPDVARACIAALGAQLQRLKVQILEFDRMIRAWHRSSEASRRLDDIPGVGPALATALVASVADPKMFRSGRDFSAWIGLVPKQSSSGGKDRLGNISKRGDRYLRSLFTTGALAVIRYAKIHGTKHRPWLTALLTRRPTKVAAIALANKIARMAWAMMARGERYKEPAALAA

SEQ ID NO: 424571 - protein, 347 aa, unidentified
MNFYNNMHPYYCGIDLHARLLYVCIIDNTGLVLVHKKIKDDPEALLKLLKPYIGDIVVGVECMHCWYWVADFCKEYTIDFILGHALYMKAIHGGKAKNDKIDSHKIAKLIRGGNFPLAYVYDKDMRATRDLLRRRTKIVRHGADLKAHVANTASQYNLPAHNVNLKNVCDREKMRYYFPDPVVQRSINLNMAILDCYHKELKPLEHYIEQMAKQHNPVHLNILQTINGIGRILALTIIYEIGDINRFSSVQKFASYSRLVKCKAESAGKTYGTQGNKIGNAHLKWAFSEAAVLLLRHNHNANKYLEKLQKRMSKAKALSALAHKLGRCVYYMLKKETVFDEAKFLKS

SEQ ID NO: 424572 - protein, 421 aa, unidentified
MTTMTQVSVSEQARLGHREVTGGVDTHKDTHTAAAVDARGQVLGHREFPATQAGYAALLAWLRGFGQLLVVGVEGTGVYGAGLTQYLQAGGVELVEVDRPDRTARRRHGKSDPVDALAAARAAQSGRATGIPKTRGGRVDALRALRVARRSAVAARADAQRRIKSLLVAAPDPLRAQLRELGVRELVAHCATRRPDRAAAADPTTATVLALRSLARRHQQLSTEITELDALITPLVTALNPTLLTLAGVGPDVAGQLLVTAGDNPHRLRSDAAFAMLCGAAPLPASSGRTTRHRLNRGGDRHANAALHRIVLCRLHWDPRTRAYAQQRTTEGLSKPEIIRCLKRYVAREVYTALLNPALLTPHPLTPAPSSVPASSCAAPEESTCSARSAARTNDVDTDQRRKTITAGGRTTPDNPTRNTT

SEQ ID NO: 424573 - protein, 316 aa, unidentified
MPTLHPFVGIDVSKALLDSAARPASRLPQVPNTPAGRARLTRHLVALAPALIVVEATAGLQAPLVVALSEAGLPVSVVNPRHARDFARATGRLAKTDRLDAEALAHFAEAVRPTPRPLPRPAICELDALVTRRRQLITMLVAERNRLEMMPARVCGSIRRQISALRRELERIDGEIERAVAADDELRTRARTLETVRGVGPVTSATLLAELPELGALSRREIAALVGVAPINRDSGRRRGRRACWGGRASVRTALYMAALSARRHNPTIRAFYEQLVGRGKPKLVALTACMRKLLTILNAMAREGAVWDDALARGH

SEQ ID NO: 424574 - protein, 344 aa, unidentified
MEDTIYDHYIAIDWSIQNMAIARMTKKSNKITVIDVPSDIEDLQVYLKNLKGSKIFAIEETTTSQWLYAELNECVDRILICDPNRNKLLNEGAKTDKIDASKLVQLLKAGLLKEVYHSTDKFLYLRRLVSGYEDLVNAGTRLQNQRYALLRACGKSGKEKRGIPIKSQEGAHFVLDSLDRQIEAYESEKEDYEREFESLARKHAEIKHQKSLPGIGAINAVKIVARVVTPHRFPDKGHYLSYTGLIKLEKISGGRSYGKRNPRYSRQLKSVYKTGVLAAIRGNNPINDYYEYLIQEKGYAEHNARQKACRRLAILSLGVFKSGKKYRPFRRNDVKSSKEVASGL

SEQ ID NO: 424575 - protein, 388 aa, unidentified
MQVAADRTDASTAIQTDLPAIFVSLELSRSTWLITSLSPGAGEKMSKHSIRAGDVAGLLVRLAQLKEKARGRTGRDFPIIAIQEAGLDGFWIHRVLQSEGIESHVVDAASILTSRRRRRAKTDGIDGETLVRTLLAYKRGEPRVCAMVKAPTPEEEDRRRICRERKTLVGERVEHVNRIKGLLFAQGVSDYEPLKRNRRARLGELKTGDGRPLPAHLKAQISRELDRLELVLPQLKAVEAERDALLKPVSEGCPTPAAMLAQLKGMGPEFTAILWSEGLFRSFSNRRQLAAYAGLAPTPWQSGSVAHEQGVSKAGNPRLRTTMIQLAWLWLRHQPTSALSVWFQERVQSNGGKMRKTMIVALARKLLVALWKYSTSGVVIEGAAMKTI

SEQ ID NO: 424576 - protein, 487 aa, unidentified
MTVRKTRSRNDRQPRPAGRRAAPARREAAATAELATLPVQHTHAAGIDVGDASHWVCVESTPDGSDTVREFPAHTPGLRDLIAWLRHCGVTTIALEASGVYGHVLFLTLIEEGFSAVMTSPAFTRQIKGRPKTDRRDCQWIQRLHKHGLLPSVFQPDEATQTLRSFVRQRANLVRLGGQHIQRMQKALELMNLKLTKVLGDITGVTGLKIIRAILAGVRDPEALAKLRDRRCQRAEPEIAQALDGRYRPEHLCELKSCLVMWEKYQEVIAELDAVIAAQLRVMRRESSLPPLPPRPRVRGRKPHDPKFDVRQALYYVTGVDLTAIEGIDEIHALTLVSELATDFTKWPTVKHFASWLGLCPNWKKTGGQVKSSQTRKGKNRAAGALRLAAWSLIRSHSYLGAYLRRQRARLGAPKAITATAHKLARIIYNLMRYGLAYMKQSEDAYAEQVRERLEKQLHRRAKELGYTLTRIDPPAAPTSAEQPTAV

SEQ ID NO: 424577 - protein, 382 aa, unidentified
MEKNITFVGLEVDDNAFHAALVNAQTGEIDEFKCRPQLAALVKRLQGFAETTELRICYEASYIGFSISRALKEKGFTCEVIAPSLTPMTPGAMVKTDRLDAVKLARFYMGGLLTIVHVPDAQDEDVRDLIRSRHFVQGQLKAIKQRIVSTCRRAGMEYRQEVEKPTANYWTKDHCMWLQSRMHHSSRGALKTNLLMLLNQMRTLEGQIEAFDREITGWSKHERYVKSNQALCTFRGLDVNSAMTLVSELGDIKRFAHPKALASYLGFDLAEYSSGATQRRYHITKMGNKYARTTLVESAHHAFLAPRVGQRMQVRRENADPRFVEIADRCMNRLYKRSHYLLAREKPRNKVVVACAREMLGFIWEALRAAQAIPPAAAGTAA

SEQ ID NO: 424578 - protein, 416 aa, unidentified
MLFVGDDWAEDHHDLEIEDEAGRRLVRVRLPEGLAGITGLHTLLAEHAPADWAELPAEQIAAQVVVGIETDRGPWVRALRAAGYQVYAINPLSAARYRQRHSTSGAKSDAGDAHVLAEIVRLDRDHHRPVAGDSDLADAVKLLARAHQTAVWERTRHVLRLRSLLLEFFPAAVDAYPDLAAADSLQLLARAPDPARAAKLSRTQLVSALRAARRHHVDAKADAVQAVLRAPGLRQLSTTEDAYATIVRTQVSLITALNEQIATLQTAVDEHFGRHPAAEIYLSQPGFGVVLAARTLGEFGDDAGRFVNARARKNYSGQSPITRASGKKTVVLARYATNRRLGAALHLQAFAALGASPGARAYYDALRDRNIGHHAALRQLANRLVGILHGCLKAGTVYNEHTAWAHHNTDTATAAA

SEQ ID NO: 424579 - protein, 347 aa, unidentified
MSITMIGLDTAKSVFQVHGVDETGKMEIRRKLRRSELFLFFEKQEVCTVVMEACGAAHHWARVLSSLGHEVKLIAPEAVRPFVKKGKKNDPADAAALCEAASRPDMKFVPVKTIEQQGILALHSARSLLVKQQTMLANAMRGLATEFGLTVPQGIGRLAELFLLVDADKAFPEKARQVFTALFEHCPALAASISAFEAEIVAHARHDETARRLATIPGVGPITASLIAATVADIGLFKSARHFAAWLGLVPRQYSTGGKTRLGRITKTGNRDIRRLLVLGATSMVYRAPQWNSVAGMWTRGVLERRPVRLVTVALANKMARIAWALMTRKEVYRAKGRVAAATEAAA

SEQ ID NO: 424580 - protein, 346 aa, unidentified
MVIIGCDFHPSWEQVCWLDTETGETAEQKLVHSAGELQRFYAKLPAPALIGLEATGNCHWLLDLLRDLGHQVWIGDAAEIRASYVRRQKTDKRDAAHILKLLVEGRFPRLWVPGREQRDLRQLLIHRHKLVEIRSRVKNGLQHLALNQGMQKKQRLWSAVGQQALRELPLQPWASRRREDLLGLLASLEQQIAPLDRAVAEAAQQNRAARLLMSQPGVGPITALAFVLTIGDVSRFARGKQVASYLGLIPREHSSAGHQRLGAISKQGNRFLRMLLVEAAQSAVRYDPEFRREYQHRCHSKPKNVAKVAAARKLAVRLYWMLRSEKARPESVAIESSPRVPLVSAS

SEQ ID NO: 424581 - protein, 414 aa, unidentified
MLKIVYRICCGMDIHKSFVVACIASTNEQGVTTYKSKRFSTFTGDLRRCADWLSENNCKDVCMESTGKYWIPVYNILEPTCNIVLAHPKYVKAIRGKKTDKRDAKWIADIFKHDLVSGSFIPPADIRQLRDLFRYRWKLTNFTTGEKNRAQNCLTVSNFKLDDVFSDVFGKAASAITAWILEHPTEKITDISAFRTKGMKATDERVLSAVDGEMCKEQAEKLRIIRSHMSSLQLCKLNLESLILSTAEKYLPQLNLVMTAPGIQSFAAIGIISEIGVDMSVFPTSKHLCSWAGLTPQNNESAGKKKTTRISRAGAYIKPLLVQCALCSIRAKQFPEVHNRYLALKKRRGHKKAIIAIARMLLTAIYNMLKKNEPYNPELYRQADRPPAHREVSVDEAIFILQRQGYLVTAPSTT

SEQ ID NO: 424582 - protein, 425 aa, unidentified
MNLLILKGVPMALKIVYKICCGIDVHKTFVVACIASTNDKGVTSYESHRFSTYTSGLKTLLQWLLNRNCKDVCMESTGKYWIPVYNILENDCSIVLAHPKYVKAIRGKKTDKKDAKWIADLFKHDLVVGSFMPPADIRQLRDLMRYRFKLTCFQSSEKNRLQNCLTVSNIQLGNVVSDTFGKSAQAILDKLLENPADTSLDLEPLIYKSLKKKLPELRDAIDGYITPEQVVKLKVIKAHYESLESRKAELEELILAIAAPYQQELAILQTAPGIRSDFTAIGIISEIGTNMEAFPSAKHLCSWAGLTPTNNESAGKKKSVRVSKAGCYIKPLLVQCANAVVISKKHPEIRNRYLRLKKRRGHKKAIIAIARMLLTALYHMLKNGENYNAELYRKSDLPPADWEITVEQAIIIARNQGYKIKSATA

SEQ ID NO: 424583 - protein, 430 aa, unidentified
MTTDIPFAAFVGIDWADEQHAVALCLPDARQYEPSDLMQRAEDLDEWVAQLRTRFGGRPVAVCLEQSRGALIYALMKYECLVLFPINPKQLASYRDSFKTSRAKDDPTDARLLCQFLAERHSQLRPWRPDDETTRALRLLVEGRRRWVDQRTALGNQLWQQLKEVYPLAVTLAGAQVFAVGFLEMLVKFPSQKELQQASPKQLDHWLPKRRITTDEPSLEQQQRDGIAKLRAVPALVTDPAILQAGRLAVLSLAQMLQQLNQTIAQYDRDIAARLATHPDAELFQSLPGAGEVLVPRLIAAFGTDRERLESAEDLQELSGIAPVTSRSGKTCTVRKRRACPHFLRQTFHEFAGASIRFSRWAGAYYRMLRDRGTQHHAAVRALAFKWIRIIFHCWQQRTPYDEQRYLQQLTLKHAPLLAYLAPENSSSNP

SEQ ID NO: 424584 - protein, 366 aa, unidentified
MKKHGIRIKNGKGDWEGKKLTIGMDLGDRTSRYCVLDQEGQVLFEGSAATTQKGLSEAFGALPPSRIAIETGQHSPWVSRHLSGLGHEVIVAHAQNVRLIGESTRKDDRLDAKTLARSARIDPALLSPVRHRSAEAQAHLTRIRARAVLVGARTALVNAIRGLTKAYGDRLRKCHPEQIRKELAAELSSELRTALEPLFQEVQSLTERIQHYDREIEKIAKQHYPEVAQLQQVNGVGTLIALTYVVTVDDPHRFRRSRDLGCYIGLRPGRRNSGKSQPQLHISKQGNRYLRTMMMQGAHYILGPFGKDSDLRRWGLKLAQRGGRNAKKRALVAVARKLAVLLHKLWVSGELYEPLRNHREDKREAA

SEQ ID NO: 424585 - protein, 363 aa, unidentified
MDSITNIELSSLEGTRCQFNGGKCAIKLGIDVHQDFYVVVIQEDGANPKPPQRFQKHAFLHWAAKLKQSGTEVHAVYEACGFGFTLQRQLSAFGIHCYVACPQKLDERNKRVKTDGLDAKALCLKLDRFVQGNGDALAIVRVPTEEEEQARAIHRQREQLVGARKRLEAQGRSLMVNHGLEPVQNWWKPRTFAALPVPQWMRELLLKSQPILLALQEQIALLTLQLQSAATANQPRGLGKMTSVIIDREIGDWRRFNNRRQIASYTGLCPGEYSSGNTRLQSCVTKHGNPRLRAALVELAWRLTRFQPNYKPVVKWRQILAKGALATGAARKKAIVAVARQLAVDLWRIKTSRLTAEQLGLTI

SEQ ID NO: 424586 - protein, 368 aa, unidentified
MDKITTSFVGLDVHKDCIAMGVAPTGRDAPRFVGTVVPQWAPLCKALRRLGRVRELQIVYEAGPCGYTLARQLRSHGYACEVIAPAKVARRPGDRIKTDRRDALLLARAARAGELVSVTIPDERDEALRDLSRAREDAVRARLKARQQLKALLLRHGHRYAGKSSWTAAHERYLAEVSFAQPAQDIGFAEYRSAVREAQERVGRLTEALRAQLEHWRMRPVVEALMTLRGIDLIAAVTLVAEIGDFNRFARPCELMGFLGLVPSEYSSGSKRRQGAITKTGNSHARRVLVEAAWNYRFPARVSRVLQVRQEGQPKAVRDIAWRAQLRLARRYRHLSARKLALNKICVAIARELSAFVWDIARQVKPIA

SEQ ID NO: 424587 - protein, 370 aa, unidentified
MRKKVLYIGLDVHKNTIDAAIATGRSNAKARSYGKINNTLDALNNLVDKLSGKNVELRFVYEAGPCGYQIHRHLKSKKISCAVVAPSMIPRRSGDRVKTDRRDAINLARLFRAGELTSIYVPTPEDEAIRDLVRCRDDMKRFERKARQRLLAFLLRHGYHCSGKRHWTKGFYTWLSTIKFSHPAQQITFQEYIDTVNDCSERLKRITEQIQAHVDLWSRAPLVKAYQALKGVSLIVSATVVAEIGDMNRFANPKQLMAYLGLIPSEHSSGKTVRRGPITKTGNSHVRRVLVEAAWTYKLPARKSKYLLKRQQGLPKSVCDISWKAQTRLCARYRRLIARGKSRQTTTVAIARELGAFMWAIDKQMQLVVK

SEQ ID NO: 424588 - protein, 348 aa, unidentified
MQIATIGLDIAKNVFQVHGVDASERVVVRKQLRRGQVLGFFKALPPCLVGMEACATAHYWARELTELGHQVRLMPAKDVKAYVKRNKNDAADAEAICEAVRRPTMRFVWVKTAEQQSRLMLHRARDLLMRQRTQLINALRAHLAELGIVAAQGREGVRELLRIIASERDARLPIDAHASLVVLAAGVQAVQTMIGSIEKRIVAQHRSDEASKRLRSVPGIGIVGATAIAATIPDPKIFRSGRDFAAWIGLVPRQDSTGGKQKLGPISKQGDQYLRRILVVGAHAMLKRARHQPEKYPWITRLLGRKPFGVVAVALANKMARVAWALLARGGTYRAPALAVAAQGSSQN

SEQ ID NO: 424589 - protein, 341 aa, unidentified
MDNATIIGIDLGKRSFQLHGAASDGSVIFRKKLSRPQLLAFLADQPGCTVAMEACATSHFWGREIGNLGHEVRLIPPVYVKPFVKRQKNDANDAEAIAEAASRPTMRFVSVKSAEQQAQGMVFRTRDLFVRQRSQLINALRGHLAEYGVSIAQGMVQFRRMMAYFDDLASGLPTPVRDLCRMYIDQILVFDDRITTLDGEIRGRAKTDMTTSRLMTIPGVGPMCATTIQAFAPPMEEFENGREFAAWCGLVPRQKSTGGKQILGRTSKMGQRDIRRLLITGAMAVIRWAIRKGPPAGSWLANMLARKPRMLVATALANKLARIVWAISTKNEVYRNPVQVA

SEQ ID NO: 424590 - protein, 393 aa, unidentified
MRKPKKQKKPLNDQSRSLIPFDPNQTLTAVVELSKKAWLVAGIIPGVERQPLKKLAADENELLKLLERWRAEAEKAGHKITRIAVAFETGRDGFWLARWLRARGIEAHVIHAASVAVSREHRRAKTDRLDTEQLKRAFLGWLRGEREHCKMAAIPTVAEEDAKRPHRERETLVGEHTTIVNRVKATLARLGVRNFNPKLKKAPERLEHLRTPEGEPISPNTLAELQRDLARKQLVAEQIGQIEKARLEQLKQAPKAGANLMVLVLVRVIGIGIETADMLVKEILSRNLRDRRAVARYGGLTGSPDESGSQRREKGLARSGNARVRKGMIQLAWRFLEFQKESALAKWFRARTENNRGSRKKMIVALARKLLIALWHFVRDGVVPEGVVLRPAH

SEQ ID NO: 424591 - protein, 365 aa, unidentified
MDQTARGEIVRVGVDLAKRVIQVHAVDSSGRVVVAKALTRERFIAWCAQLPPKVLVAMESCGGAHHWARKLAAMGLQPRLIAGHFVSPYRMEGKRGKNDANDAAAVCEAASRPSMRFVPIKTVDQQALLAVHRLREGYKEERTACVNRIRGLLTEFGFVFAQSPDALRLALPEVMEDAINELPAIARLALQRAQLQWLELDGHIAWCDERIAVHVRNDEQARVAVKLCGIGPVTASALVATVGDFRQFKTGAQFGSWLGLVPTQNSSGGKVSLRRDTKRGDNYLRTLLIQGGKSAVMTAHKRQDRISRWLVQLLARVGWQKAAVAMANKNARILWAVLAKGRRFDPDHISIKPEGPAMVVPTMAG

SEQ ID NO: 424592 - protein, 290 aa, unidentified
MGTSPHSQARGVRRGKGTRQERPSEGHSVFVGIDVSKARLDVAFRPEGTSFEASNDEAGIGDCVRRLQALRPELIVVEATGGFETALVAGAAVVGLPIVVVNPKQVRHFAKAIGRLAKTDSIDAEVIAHFAEAVRPEVRPIQNEAGELLTALLSRRRQVLDMVVAENNRLTTTRERQVRQRITHHLHFLKQELRELDKDLDKEVRSSPAWREKEDLLKSVPGVGPVLARTLLAELPELGRLDRKRIAALVGVAPMNGKTGKVALVACMRKLIVILNALVRSGERWNAEAT

SEQ ID NO: 424593 - protein, 437 aa, unidentified
MTSHCRSCNYKISGGVLLAFKIFRFNCCGLDVHKTWIFACIGLTDANGRTEYKEKRFSSFSRGLRELAAWLASYKCTDVCMESTGKYWIPVFNVLEKTCNVILAHPKYTKPQKGNKTDRKDAKWICDLFMCDMIKPSFIPPAEIRHLRDLVRYRSKLTNMLTGEKNRAQNCLTVSNLKLDDVFSDVFGKSSRSITEYILAHPGEAFDVTPFVDKRCKTPIEEIQAAVDGAVSPEQAIKLRQCLDHIDELEKHKAEMEREILRISNPYLDALELIRTVPGFDKNPFTAIQVLSEIGGDMSVFPTDKHLVSWAGCCPRNDQSNFKIKSTRISRAGSYLKPVLVQVANALIKSKKHQEITERYRRIKSHRGHKKAIIAVCRMLLTAIWHILTDLKPYTAEGYLSPRPVKKDKILTTSQALNLLKLRGYVIKDDDSSVTAS

SEQ ID NO: 424594 - protein, 339 aa, unidentified
MNNSVIGLDIAKNIFHMYTFNEEKSKPVKKKLKRAELLAFFANYPASLIGIEACGGAHHWARELTKLGHEVILLNARYVKSFVIGNKNDFNDAAAIFDAVTRPNKRTVSVKTIEQQDIQLVHKIREGLVGKRTALVNQVRGLLSERGIVIPKGIKKVRVELPLILEDAENDLTHLSREMFAEQYEKLVTLDEEVKNQDRRISRLSNSNPLSKRFLDVPGIGPITATIVASDIGAGKGYQSSRDYAASLGIVPRQHSSGDKQVYLGISKRGNRYIRTLLIHGARSVLKYCSGKEDKLSLWLQALIERRGFNKAAVALANKNARILWAMANQDKEYNASLV

SEQ ID NO: 424595 - protein, 402 aa, unidentified
MISIGIDVSKDKSMACIVSPQDNVMVKPYEIAHTDKELERLCSYILSLDKEARVVLEATGAYHLPVVLKLKEHNIFVSIINPLLMKKYSSIKIRKGKTDKIDALKITSYGIDNWFHLVDYTCSKDVYDELRFLGRQYSHYVKVKIQAKLSLSNILDRTMPRITSLLTSHNTAKLLKNKLLDFVEEYLHYDNILALGEDSFIESYNRWAKEKGYRASDRKAKTIFSLASIGIPTLSSSLSSTKMLTLENVRVMKEINKTLDIILSQMQELANVLPEYDVVRQMSGVGEVLSVRLIAEIGDVRRFKNGSSLVAYAGLDSPPYESGQFIATKRSISKRGSSLLRKTGYEVIQCIKSTKPTEDSAVYDFVMKKQNEGKPRMVANIAGLNKFLRIYYARVKEVYSVV

SEQ ID NO: 424596 - protein, 275 aa, unidentified
MENNSTVVGLDVHKETITIAVLRPDKDRSEPSITFENQPSTIERKVKELNRRHAPLEFVYEAGPGGFALYRQLTQLGYRCAVIAPAWMPTKPGDRVKTDRKDAEKLSWYWRMRDLKEVRVPTPEEEAVRDMLRVREDVLANQLRARHRLLKFLLRQGRIYRDGKNWTKAHSEWLRQQKFELEYLAKTYEANYRILAEIDAHLADLNREVESLAQSEKYKTAVDYLKCLKGVNTLTAMTLLAESGDFRRFKNARSYMRYTGMVSWENSSGSRVYRG

SEQ ID NO: 424597 - protein, 423 aa, unidentified
MSDPQNDYAAFVAIDWADCKHTFSLLAAGHAKKESGTLEQKPEVIGPWVAGLRERFGGRPVAVALEQSRGALIHALLAYDFLVIFPIHPTTVARFREAFKFSRAKSDPLDTEQILEILTKHLPLLKPLQPDTAATRLLARLAEDRRKAVNLRTAHAQAAVAALKEYFPQAIAALNGNLCSRLAGNFLKQWPTFEKFQQARPQTMKKFFLGHNIRSPQVIAKVLALAEQGQPLTSDPAIVESGSRLAQLHAQMIQTLNPLIQEYERRIQEVFNDHPERAHFQGLPGAGEALAPRLAAFFGTDRSRYEQAGNAQCFAGIAPVSRKSGKMRVVHFRRACPKFARQTFHEFAGLSVAKSQWARNYYDYCKAQGKKHHAIIRALAFKWIRVLFACWKNRTAYDDTKYMAALEKRGSIFATLHLTETTK

SEQ ID NO: 424598 - protein, 320 aa, unidentified
MSGFIGIDVAQGDFVVAREGVAGSRSYPNTERGHRDLIKDLSRDGGNTERIVLESTGGYERKLVAALGAAGLPVVVINPRQVRDYARGTGQLAKTDQIDAHVLADFAAKIKPEIRPLPSEDQQELRAFLTRYEQLMQMLVAEKSRLLQAEGQSRHALRKKIKNHIKFLEREITLLDSDLDDTLKKSELWRESDDLLRSVPGIGQGTSRILLGLVPELGTVSAGEIAKLVGVAPFNRDSGKFRGSRHIGAGRGRVRAVLYMATLAAIRCNPVVKAWYQRLVGAGKPKKVAIVACMRKMLVVLNQMMKTKTRWQAHLTHATA

SEQ ID NO: 424599 - protein, 348 aa, unidentified
MQISVLGIDLGKNSCSVVGLDEAGRIVLRRRLSRARVIELSSQLPACVMAMEACCGAHHLGRILAAHGHRVRLMSPEYVQPYVKAQKNDERDAEAIAEAATRPTMRFVDLKSEEQLDMQSLHRARSRLVGERTALINQLRAVLLERGIIVAQGRRRLAQYLSQALDGDEAAPLQLSSRIRLLIEDMRAQWRELDRRVAEFDGEFVAAARSEAAARRLSTIPGIGAINATALVAAVGDARSFARARDLAAWLGLVPRQATTGGRPRLLGITKRGNKYLRTLLIHGARAALPSLLTVESPLGNWLRGLSARAHRNTVIVALASKLARIAWAVLRSSTSYNAAIGRSVIAA

SEQ ID NO: 424600 - protein, 312 aa, unidentified
MAMLSFCGIDVSKDRLDVVVLPEGWFFSVSNDTAGWAELVVRLRPLTVSAIGLEPSGGYERGIIRALLAAGMSVRRINPNKLRQFARARGVLAKNDRLDARLIAEYVAIMPTRVVQRDEAVEKLAEVVTMRRQLRDEHVTVENQAAHIEDAMLRRLNKRRLARLEADTRLLDKRLAEMVATNAALAQRYELLTSMPGVGPVLAFTLIALLPELGQMSRKQIAALVGLAPYDFDSGKLRGHRSIYGGRMPVRNVLYMAALSGCRYNPALKAFHKRLAAADKKSKVVIVAVMRKMITTLNAMLRDNVEWQPKSA

SEQ ID NO: 424601 - protein, 377 aa, unidentified
MATTRTVLRDQLTAKPGDLYMSLELGDKHWHISIGGERRSVSHYIVEAGHTEEVADCIAKAAARLHTARVHSCYEAGRDGWWLHRWLTELGVDNIVVDPASIEVNRRARRAKTDRLDADKLLAMLVRHHRGERVWSVLREPSPSDEDARRAHRELQRLTHERIAHTNRISSLLVLHNLRPRIVIGGRDWPVWWNEHREQVPPTLRAELEREAVRLKVVKEQVRAIEAARARELAEGKQPLVAQLVRLRAIGAKGAWVLVKEVFGWRHFANRRELAGSLGLVPTPYASGDSEIEQGISKAGNRRVRALLVELAWSWSRLQPASALTQWFNRRFAGGGKRMRRVGIVALARRLAIALWRYLQTGEIPIGARLKPTGSGI

SEQ ID NO: 424602 - protein, 399 aa, unidentified
MLAVGIDISKSKSAAAILNSDGTVHTKPFEFHHSQPEMDALIRYIKEQNQPVTILMENTGHYHYPVLKAFEAADLPVCLINAYQMKKYGDMELRKAKTDKKDALRIARYALEKGYSLVPHTSMDQKYEDLRFLARQYDQRMGTLTTNKVFLINLLDETMPGITKLLSLTTRDPETSLTMLFIKRFKSYDRIKKMGRTRFLDSYNKLARKSRNRRAYGYGLAIYELAVNSITTRGENEFTLAAQDQCVDLVSESQKAADAIILNMQTLAETLPEYAVLRSMAGVGDRLGPLILAEIGDIRRFHSGKALNAYAGNDAPPYQSGTFESHNRHISKRGNAALRKYCFEVMQALKLTRPQDDPVYLFLIKKEQEGKPYNVAKMAGVNKFLRIYYARAMEALRLQ

SEQ ID NO: 424603 - protein, 355 aa, unidentified
MPSKADTAVARTIGIDTGKNTLHIIGLDERGAIVLREKISRARIAARFVNLPPCLVGIEAGMASHYVARELVALGHEVKQVPPAYSKPFRHGHKNDFRDAHAVAEAVERPSTRCVPIKTDGQLDLQALHRVRSRLIGNRTAVINQIRGFLLEHGIPVRQGHHFLRKQLPLILATRTDVLSPRMIRIIGDLMADRKYLDERIERVTDEIEALAHADEGCQQLITVPGIGPIISSAMVAAIGNGAAFCKGRDFAAWLGLVPKQMSTGDRTVLGRITKLGNRYLRMLFIQGARAVLLRPASWVKHSFGSWLTAATRRLHRNVLAVALANKLARIAWTVLAQGRRYEARVEPRVEPAAA

SEQ ID NO: 424604 - protein, 406 aa, unidentified
MIFVGIDWSEEFHEVELQAGSGRVLKRLKLRADLAGLTRLQEVITDAAEEPSQVVVAIEASHGLLVNALVASGYRVYDINPLTAARARQGESPAGSKSDAGDAHLLANLVRTKRQDLRPLAGDSEQAQAVHIQARSHVRAIRHQQRLRNQLRSSLAKFFPGALPLLGDEPEELRDALAVLTLAANPVQARRLSLNKLRASLARHGRQRNLDAKAAQIQEQLRQPQPELSSAKVLSAHSDEVRYLVRSLVQVRSEVALLEEQLAQDFEEHPDAKIILSLPGLGVVLGARVLGESGDDPTCYANAKARKNYAGNAPITRRSGKWEARNRRVARNRWLADATFLWARSALSASPGARRYYDQLRARNKTDNVALRALANRLVGILHGCLRTRYIYDESIAWPGVLEHAA

SEQ ID NO: 424605 - protein, 453 aa, unidentified
MPVGGKVAAVCRTGRDSRSRSLQRIDGMEGGVRPDWMACDMITTNIHHEVGAALAVSCNLYQSTPSVIKLGVDVHQGSYTVVAQEDHATPQPAQRFAPAAFVPWVARLVARGHRVFVVYEACGFGFGLQRALVAVGAECYVVAPCRLDERGQRVKTDDRDATALCQRLSRFVDGNRKELAIIRVPTEEEERLRAEHRQRETIVRARTRLAAQGRALVVNHSGESHRTAPIPARWWRAAGWKALAGTLPAWLRERLEMLRPVLAVLDTQIAALTGTLEDAAPEGLPAGQGKMTSVILTREVCDWHRFNNRRQVSSYTGLCPGEYSSGGKRVTGSVTKHGNPRLRAALVELGWRMVRFQPGYPPVAKRIHILGKGAKATGAARKKAIVAVARQLAVDLWRLNTGRCTAAQLGLRVTGGEPTQAPEEVVDSGGTVPREAALPPRGFTPPPAPEAAS

SEQ ID NO: 424606 - protein, 321 aa, unidentified
MAMSATPIEAGVDTAKDELVIQSAPSTKPFAIPNTPKAIKAWLKTLPKGSALAIEATSTYHMEMAEQAHAAGFAVYVIDGLRLSKYRESVAVRAKTDAHDAALLARFLSNERGSLKAWAPPPAGHREIQMLLRRRAKLVAVRGMLRMSLSGDTMFASALKSLEETVKRVELLLEKQLRTVIKTAGLSDQLRRVQKLPGVGFLTAAGLVMSFMRGEFKNSDAFVAYLGMDVTVAQSGKWAGRGKLSKRGDAEVRRLLYNASMSGSRTKTWSQFYAHHQARGKKTTQALVILARRLARLAFGLMRHQADWKPEIYTGGAKPAS

SEQ ID NO: 424607 - protein, 317 aa, unidentified
MYNKNNQNEINIGVDTGKTQLDIYIRPLDIFFTVPNDDNGIKKAISEFKKYKPTRIIIEATGRLEHAFIVACSKANLPFVVANPTHIKKFAGAIGRLAKTDKLDAQLIAHYGEAIKPVLSKLKPENLQLMSDLLSRRRQLMTMQTMEKNRLQIMPKEITGSIKPMLTVLKNQLEKIDNKLSKLIKECDEYKAKNDIIQSMPGVGNIVAFNLLSDMPELGYLTNKQASALIGVAPINRESGIYEGKRMIRGGRHNIRTVMYMAMMSAMQCNPVFKFTYQRLVAAGKPKKIAIIACVRKMIVILNSMVRDGVMWDSKMS

SEQ ID NO: 424608 - protein, 400 aa, unidentified
MEHVIIGVDPHKLSATIEVVDEREQLLGSGRFTTDQAGYSAMRKYAATWRERVWAVEGSNGAGRPLAQRLLEDGEQVVDVPAKLAARVRLFDTGHNRKTDAHDAHAVAVVAVRTKTLRVLQPDGDLEALRMLADRREALTRRRVQTVDRLQALLAELLPGQAKRDITTGQAKAMLASVRPRDIAGKTRRRIAAEELAELVAVEAKIKKATAELKEIVIARGSHLMDLHGVGPVVAARVLADTGDVTRFADRNRFASWTGTAPLDASSGEQNRHRLSRAGNRRMNHMIHIAAISQIRLDTEGRVYYRRKRAEGKKPLEALRCLKRRTSDAIYRQLLADAQQAAGTGPGGHCGATLQSSAVDLPPPIDSNDRKQLAVVVTLTSTDVLLDCLGIVLSGRCGSR

SEQ ID NO: 424609 - protein, 294 aa, unidentified
MMNYIGLDAHSKTCSLVCLDESDKIIRKAHLETTESQLLSFLRSVAGPKKLVLEESGLSQWLFMLLKDQVDELVVCNPLYLSRNPKAKTDFNDALHLARELKCGHVVSVHHEDSDLMRMRSLISGYQDTVNAMTRAKNQFKAILRKEAINIKTTTVYFDQDIFEKLSNPSDRFVAKGLQDIIVSLDALNLRYQAEFIKNGKQNEVLKLLMSIPGIAHVRAHVIASAICSAERFPNKYKLWSYAMLVRHQDQSGGVVLSNRKNMHDQILKESLWRRLLRSYKGKAVLRNITSTFD

SEQ ID NO: 424610 - protein, 352 aa, unidentified
MIVLGADTHKRSHTVAAVAAATGELLGEQTVQVGRRGFGALLRWARSLDGDRVWALEDCRHVSGSLERFLIERGERVLRIPTHLSAKARKSARQRGKSDPIDALNVARAALQEGLESFPTALLDGPELDLRLLVDHRERLIRHRVELNSTLLWHLHDLWPELTLPGGALFSKRWSTRIGRRLARAEQTMRVRIARDELRRLRELTLAVRQLEREITALVTQIAPQLLQQPGFGPLIAAKLVGEIAGAQRFATAAKLARAAGVAPIPASSGNTRRQRLDQGGNRQINAALHRVIVTRARCHTPTRDYIARRRAEGKSTREAIRCLKRYLTRHVWRLLQPSHPVPETPPHPSIS

SEQ ID NO: 424611 - protein, 312 aa, unidentified
MLTPSVYLGADVSKSTIDLGCSLFAVPDSIPNTPAGFKALLKVLGKSPGPIQVVCEATGPYHKAFVAALHQAGLPVSVVNPRLPRDFARARGQLAKTDKIDARMLADYGRTMQPAPTPQPEAQMTLLDDLVTRRAQLVEDRAREKTRLPQTTCAEALSSLKLHLRHLDGQIEKLLARIAEVVASTPVLRAKVARLVEVQGVGTLTASALLAALPELGTLSKNEVTALAGLAPFNRDSGAFRGTRSIRGGRSAVRLALYMAALSAARCNPVLKAVYQRLRAAGKAHKVALVAVMRKLLVYLNSLLKNLAPQSA

SEQ ID NO: 424612 - protein, 361 aa, unidentified
MIEVGMDQHKRFTAAAALNPETGQVIERRLEHDDPDSIVAFLESFDEAVRVTLETTGNWYWLADLIEAAGASVRLCHTVEAKRRRRGRAKNDRLDAIALAELSAEDRVPESYVPARDDRDRRERHRFRIRLVRIQTALKNWIHALLAKLNIGVPFEDAFGKGGRAFLDALELREPYGGHLRAALRILDALASEIKREAIAIRATLKADDRAAILLSAPGIGELTAYLMLHEIGPIDRFPGPKQFARYCCVTPGTEESADWRGRPGVGRAGNLYLKEAFTNAMIGAIRKDATIRTFYNRQLRRNGAKKARMAAAHKLARAVYFMLARRQAYRPAPSVKRSVARKTTVKETMAGKPVLCLGRL

SEQ ID NO: 424613 - protein, 353 aa, unidentified
MDTIYIGVDFHARQQTICSLTTEGGEVVTHQLKHQDKDQVRAFYAQFRGRVIVGLEASGYSPWFEALLEELGCEVWLGDATEIRRRARWRQKNDRRDAELILDLLVHDEFPRLHRPSPQSREILRMLRYRQKLIKIRTMGKNSLQALALQSGLARRSHLFTKTGQQELRTATMSPAMQWQREQWFQLLEPLNERLVETMLWLKQQSQGDARIKLLRTHPGIGLLTSLCVVHTLWPVSRFRNQRKVAAYAGLEPMERSSAERKHFLGVSKAGSRVLRYLLVEAAHTAVKKDDDLKRFYQRLAARRGRPKAKTAAARKLLIRSFIMLRDEIDYAEFRRRAVAARLARQSSRPPCL

SEQ ID NO: 424614 - protein, 342 aa, unidentified
MTQQMSVLGIDIAKLVFHVVGMDDTGHVVLRKRLARSELLPFIAKLPPLRIGMEACGSAHYWARCFREHGHDVRLIAPQFIKAYVKSPKNDARDAEAICEAVTRPTMRFVPIKRIEQQDLQALHRIRERLIKARTALVNEIRGLLNEYGIVLPQSITKFRTLIVSKLQNEQAKLTALSTEVFWQLYEEFLNLEKRLAYYDKKLVAMAQAHPECQRLQTIPGIGPISATAILAAISDATQFKNGRQFAAWLGLVPREHSTGGKPRLLGISKRGDSYLRKLFVHGARATLRWVDSKHDERNRWLKALIARRGKNRAAVALANKNARIAWALLAHNQEYRVKTVV

SEQ ID NO: 424615 - protein, 367 aa, unidentified
MKKVSTAGAKPSKKISQQKLTVGLDLGDRNSWYCILDESGQIQLEQRVRSNAKALREVFGQLPHSRIALEVGTHSPWISRLLSELGHEVIVANARKVRLIGESRKKDDRLDAQTLARLARIDPGFLSPVKHRSAQAQADLMMIRARAGLVRARTALVNTVRGLAKSYGERLRGCNVRNMNPEKADGLSPELQSALEPLLAGIEELSEQIREYNERIEKLAQESYPQVALLRQIKGVGTLIALTFLLTLEDPHRFRKSRDVGCYLGLQPGRRNSGQSEPQLHISKEGDPYLRTLLVQGAQHILGPFGVDCDLRRWGLKLAERGGRSGKKRAIVATARKLAVLLHHLWVSGEVYEPLHNSRRTAVAAAA

SEQ ID NO: 424616 - protein, 372 aa, unidentified
MITATLFLKPILYSNSSNGADSLIDKLKKYSTDDIIIGMEATGHYWLALYSYLLEKDFNIIVINPIQTDAWRHATDIRKRKTDSSDSVLIADFIRFGNFKTSSIADEKYLNLRNMTRFRHSLIEQIGDLKRKIIANLDLVFPEYSSYFSDIFGQTSKEILLNFNTAEDFKNLKTRDFEKVLRNITLKKSATIKLNSLKQMSQSSFGVKFALSSYSIQIKCLIEQIKVIEDQTKLIENEIESIVKDLNTPIFTIPGIGYVTGAVILAELGDINKFSSDKKIVAYAGLDATVNQSGQSDGQHGHLSKRGSTHLRKALFQAAFVASTNDTIFKDFYDKKRKEGKHHLVAVNTVARKMCHVIYAVLKKNEPYVEQK

SEQ ID NO: 424617 - protein, 331 aa, unidentified
MQFSYFVGVDISKDTLDAALYPAKDRQKDFLHFDNTKKGLGEMMAWLKTLGVKRSDLLICAEYTGVYTNTLIEFAERKGIALSLNSPLDIKRSIGLVRGKNDAVDAARIAEFAYRRRENLRLYEKPCDAIMKMQYLLTERRQYVRQRTALMNLHSAMGPYETPSGRSRNESAILHIEKLIKKVEDQLLSVASEDASIKKNFDLVHSVKGIGLINAINTIVYTNNFKSFESPRKYACYIGVAPFDHTSGTSVKGKTQVSKICRTQQKSELSMAARSAIIHDPGLKRYYQRKIKEKGGGKSAHGIVLNAVKFKLILRMFAVVRSGEPYKVLNY

SEQ ID NO: 424618 - protein, 340 aa, unidentified
MNYYAGIDVSLEYSSVCVLDSNGKIVREAKVLSEPEALIAWFGSLGFGVERVGLEAGPLSQWLFAAMKQAGLAVELLETRHVRDAFKAMPVKSDRNDARSIAQLMRLGWFRPVHCKSMEAQETRSLLTARKLVQSKLFDVKNSLRGILRGFGLKVGKTTELEFAGRIKELVAGHPHLEMIANSLLAVHDVLRNEFKTIEKQVNKIVRSDTRARLLMSTPGVGPIVALTYASAIDDPGRFKSSKQVGAHFGLTPKKYQSGETDYTGRISKIGDSSVRTVLYEAAHVILTKPLKGCSALKGWATRIARRAGMSKAKVALARKLAVIMHRMLVDGKPFNAALT

SEQ ID NO: 424619 - protein, 414 aa, unidentified
MPVYLGIDWSTQKHAAFFTNEKGTALQYLEVEHTLVGLNKLDAARHSLGISPQECLVGIETAHTLVMDFLAERNYQQIYVLHPNMVKSAQGRFRQSGAKDDRADARLIADLLRTDLHRLTRWQPDSPLTCQIRARISLAHFLTRQAVATSNRLWSVLLRYYPAALEVFSGLEALITLLFIQAYPTPQAALQLSYAEFTAFLAAHHHRRPVEWPICFARLHTPQPAADPNIVLAYTPQAILLAASLETLLRNKYQLLQETHALFLQHPDAPIFASLPGTGKLLQPALLAKFGDNRLRFPSPAAVQQVAGTCPITRRSGKSKAVLFRLACDRNFRNIVHDWARASTVKSPWAAAYFHSVRSHTNSDTHALRCLANRWLAILWKLWQSRQPYDENYHLQQHLQRSLPRLEIPAFAIP

SEQ ID NO: 424620 - protein, 431 aa, unidentified
MTLSCHLSSPWSTHSCKILHTDPYFGTTEDGLNTSLQGTQWFVVPMAIGTTNRGTARPIIAWWDAFTTLDSKVGGLLLRPYLEQLNAPEGPCPFEPVTTRMRMTTTIKNQNISAPPCWIGVDVSKTELQIHAGRKSVKLPEQVVYGKAGLNTITRLLLKLERPHVVFEASGGYDLALLEKLQASGIACSRVNPRHVRNYAKAKGLLAKTDKIDAMLLADYGATMRPAITPEADPALANLAALIAYRRHLVEALSQERMQMEHPKPPCILVMIKSRIKALESQIQKLDESIASHVSGEPSLNRAVTALSAVKGVGSLSAAALLAAMPELGTINRNQAAALAGVAPFNRDSGSLRGTRRIHGGRPEVRQALYMAAVSASRHNEILRVAYQTMLNRGKPKKVALVALMRKLLICLNSIMAKILRESNAPILSPC

SEQ ID NO: 424621 - protein, 445 aa, unidentified
MEIVNPYAAGIEVGSRSHWVAVGQQAEDIKEFGVYNEDLLALADWLSQHEVKTVAMESTGTYWQSLYAVLIQQGFQVILCNGKFTKNIKGRKTDVQDCQWIQKLHSIGLLTGSFLPDGHTEQLRTYCRHRANLIDMAADTQKKLQKYLRLLNLRLDVVVNDICGLTGMAIMEAICAGETQPEKLAALRHFNCRKPEEEIARALQSNGRKDYLFALQQELDMYKTLQHKIDACDAEIKKFLENSIHDNDDKRQHTIEKKTHKRVNKNDPKNIDLNLAGYQYFEGVDLLAIEGFSHSTLLTLMSEVGPDGIRKFPTAKHFASWLRLSPNNKVSGGKVLSNKIPKGSNRLKLALRNAANAIGNLKSSTPLADFFKRINFRKGRVSAISATARKLAVIIWNMVVKHIPYVNPEGYLFLDQKRKLHAAKRIKKQMINFGLLPADIGITTV

SEQ ID NO: 424622 - protein, 371 aa, unidentified
MYHLSHAVQMNGCQNHCKLMKTKTTAFNPKLYIGIDVHKKSWTFHYQTDLFDGKTITQPANPNTLVEWVEKHYPSHEVTCAYEAGFSGYSAARLFQKQNWNVLVLNAADIPRPQKQSVVKTDKIDCRNICKQLKNEALKSITIPEEQRESFRSLFRERNNFVMGLRHIKLNIKSYLMYCGITIPEEFDNASWSKNFIEWIKNQRNEYETGSLKISYLLKRYEFMYQESLSVSNQIRLYARKHYKKDYYLLMSVPGIGGITASAILAELGDLRKYNRFDDLASSVGFVPGIYSSGDKTIVKGITPRAKNLLRSYLIEASWQAVRFDPVLQEYYRSHYGKQPNKIIVKVARKLLSRIHAVIKTETPYQIGVVK

SEQ ID NO: 424623 - protein, 342 aa, unidentified
MTTIKYSVGVDIASSTFTVSVSEIPWKVILKPETFENVEDGYQTLLEWLAEHHLSVSETVVCMEATGVYSEGLAYFLYAKGYRVAVQSPLEVKRTFKPYGPKSDAVDSLQIAEYACRHMDKLSFWRPRNELLEQVKALLAVREQFVSQSTAHKNALKAIQRKVVRIPFAEQAYLQLIEQVKKQIKAIDLEIRRLIESDPTFKEMLLLLLSVPGVGLLLAAHFILLAQFSLEYKVLASFLGISPNEHSSGTSVFKHATSRHFGPPAIRKLLYLAACSICTHRPQFGRYLARKAKEGKPPRLVLNNVENKLIRIMCAVLQSKTAFIENYHSVQPFVFQNTLTGS

SEQ ID NO: 424624 - protein, 340 aa, unidentified
MNYYAGIDVSLEASCICVIDANGKVIREGKVSSEPTALIAWLSEVGVSLTRIGLEAGPLSQWLYAAMRQAGLAVELLETRHVRNAFKIMPVKTDRKDARGIAELMRLGWFRPVHCKSMEAQETRAMLTARKLVQKELLETESSLRGILRGFGLKVGKTTPVGFEGRIRELVAGHPSLEVITSALLSVRAVLRRQLNEFERRVRAIARTDTRTRLLMTTPGVGVIVALTFACAIDDPSRFKSSKAVGAYFGMTPTRYQSGETDYSGRISKNGDGSVRAVLYEAGHLILTRPLKGCTALKSWAMKIAKRSGMKKAKVALARKLAVIMHRMLADGTPFTTQPA

SEQ ID NO: 424625 - protein, 339 aa, unidentified
MTRYLGVDLHKKSFTVSFFNAESGKHKLRTYRLKDLDLFYKDLSKGDVVGVEALANTRYFVDKIKDYVCEVKIVDPYQFKVISKSVKKTDRHDAKKIAEFLSKGMIPEVKLKEKTTSQINSIANTRDKLVKLRTVLKNKIHSLLNSEGIDSGIKEFTGKKSLKQVLKHQLDPIVKLELEVIVDQIEKLSEGIKKLDIELEERGKDMDGFENITSIKGVGNRSGSILLSIIGDINNFSSKKKLAAYFGIVPRVSQSGEKAIYGRITKRGSKLGRTTLVQCTLTAIQYSPYLCSFYNKIKAKKGCGKARVATSKKLLGIIYDTLKNKWVFDDFPNFKIKTI

SEQ ID NO: 424626 - protein, 359 aa, unidentified
MQTQSIKPDFSGQNIYVGFDVHLKSWKVTIMTEELTHKTFSQDPNPKLLHTYLEKNFPGGIYHSAYEAGFCGYWIHNSLKSLGINSIVVNAADIPTTNKEKVQKEDARDSRKIAKALRSGDLTPIYVPSLKTLEDRCLLRTRSTLTKDLARYKNRVKSFLHFHGIEIPEQFNRSKGQWTRNFIKWLEAIELTELSGKQSLDAYVLSSKNLRESVLQTTRHIKKLSETEVYSSKVELLRSIPGIGLLTAMTLITELETIDRFSDFDKLCNFIGLVPSTHSSGDNDIVGDITPRGHSVLRAAIIESAWVAVRFDPALLLSYHNYCKRMEPNKAIIRIAKKLLSRIRFVLRKKELYVCSVVK

SEQ ID NO: 424627 - protein, 450 aa, unidentified
MQFMKKKAGFPVLYPNAAGIDIASREHYVAVNPDAAEQSIRSFGSFTDDLHEIAAWLLQCKVDTVAMEATGIYWVSLYLILEEAGFEVVLVNAKHVKNVSGKKSDVKDAEWIRQLHSCGLLSKGFQPDHFTRTLRAYMRHRKNLTEMAATHIRMMQKALEQMNIKLQNVIADITGKSGQAIIKAIIDGEHDPQNLVKLLDGRIKATKESICKSLHGIWKTENLFELKQSFDLYHTYQEMIKECDLHIKRHIEEKASYCESDQIQSLYPVKKKYKTNKNNLNFDATDMLQKIVGTDLTEIFGITDTNATEIISEIGLDMSKWPTAKHFTAWLNLAPNNKVSGGKLLSSRVPRKRNKAGQIFKMAAFAVQRSKNWLAIFYNRIKMRSGTSRAVTATARKIAVIFYKLMKEKVRFCPLDRDQYLESFKVRQLKKLKQQATRLGLVLVPDNLVT

SEQ ID NO: 424628 - protein, 360 aa, unidentified
MAQVRTWVGLDVHAAKVVAAIADSESGELATRRMSGVTKQVAELCAGLPGPVRVAYEAGPTGFGLARALMAKGIDCTVAAPGKIERPAQDRVKTDLRDAERLVRLLMIGGLHPVRIPTPAEEAMRDLVRAREDVRGDLMAARHRVGKLLLRHDLRFEGNNWTQRHLDWLGRVELPEPVAQSVLLDGIGAIDALLVRRESLETQMAALVPGSPWEQQVARLRCLRGIDTLSALGLCAEVGDFERFQRPAQLMSYLGLVPSEQSSGEKRRQGSITKSGSRHARRLLVEAAWHYRRAPRKGTALRSRQEGQPQSVCAISWKAQRRLHRSWVRLDSERGKRRTLCAVAVARELAGFCWAVATAD

SEQ ID NO: 424629 - protein, 426 aa, unidentified
MSEIGPQPEPEFAAFIGIDWADQKHIWSLQTAGSGKRETGELEHTPEAVESWVAHLYQRFAQCPIAVAVEQSRGALVFMVSKYEPLHLFPVPPQMASSMRQALYPSGAKDDPRDADLLLDLLLQHRNKLRRLSPDSEATRRVQNLVEERRKLVDEKTAQINRLTDHLKVYFPQMLEWFGRLDSNVVCALLERWPALEELRKAPPASLRAFFRKHRCRDREQIEHRMDAIRQAIPAIHDRAVIEAKSAAVRVIVRVVRVLGEGIEDLDGEIEEAAAAHPDFFIFNSLPGAGPVMAPRLLAAFGSQRDRYRNADELQSFSGIAPLTEASGKRKWVHFRWACPKFLRQSFHEWAGHSIAQSEWARAYYQQQRSKGNTHHEAVRALAFKWIRIVFRCWQDRIAYDENTYLAALVKRGSPLGTTVATAKTL

SEQ ID NO: 424630 - protein, 346 aa, unidentified
MQNDTLVAVDIAKEVFEVGLSDRPGHVARRRRLARYEFLEVFAQLPAATVVMEACGSAHYWARRLEELGHVVVLLPPQYVRPYVVRNKTDRKDVDGLLEAFRNDRIMPVPIKSVTQQVLGTLHRLRSGWLADRTRAINALRGLLRELGFFIPEGRTHVLPDAWEIIQDPNSGLPDALKPSLGSLCQEVASLSTRIEEIEAQLEALAKQLPVVARLRSVPGVGLLTATALYAFVGDALRFPSGRHMASFLGLTPREYSTGLHRRLGRISKRGDVYLRMLLIHGARSILWHAKRMKQPDRLRAWALRLERKLGHNKAAVALANKLARISWAVWKNDRNFEPLPELQAA

SEQ ID NO: 424631 - protein, 376 aa, unidentified
MEKVTYVGIDVHKAFHQVAMLIPGREAPVEWRAETDARGIRRLIRRLLREAVGVVHVAYEAGPCGYGLQRALEAHGIACTVVAPSLIPRKPGERIKTDRRDARKLAELLRAGVLTAVMPPTPEEEAARDLFRAREDARQDLLRARHRLAKWLLRQGVRYTRGKKAWTREYQGWLRTLDFADPTAQAVFDAYRVQAEQRAQACRGLEEALATLATQPTYTEAVGYLRCFRGIDTLTAIGIVVELFDFGRFDSPRGLMSYLGLVPSEHSTGGHPRRGAITKTGNRPVRRLAVEAAWHARHPVHVSRALAARRQGQPAGVIAIADQAMARLHRRYWRMVSRGKPTNQAAVAVARELAGFLWAVLYPRAMGIDPASVPTP

SEQ ID NO: 424632 - protein, 352 aa, unidentified
MKNFFGCDAHKKYSMFASINEEGHRAHCIKVKNDRHQFSCFLKTLPPGSPIAVETVGNWYWMIDDMEKAGHVPKLANAWKAKLMMGQINKTDKLDANGLALLLRNGTLPSVWIPPRELRDQRELPRMRMALVSVRTKFKNRIHATLAKYAILITEVSDIFGVRGRSLIKERLSELPPYTRRSVEMQLELLDQTVEHIKVCEKQIGEVIKKTPAIMLLMTLPGVGPVLAIVIALEIGEIERFARAENLASYAGTVPRISESAGRTRYGRVRPDVNRYLKWALVEAANTVVMNQSCWSERHVVRLYRRIRGRRGHAKAVVAVARHLAEASYWVLKKNESYKEPKRYEPISSTQK

SEQ ID NO: 424633 - protein, 355 aa, unidentified
MAVTIVEEARPGTCRTAITGGVDTHADTHVAAALDPVGGLLGVREFPATAAGYAGLLGWLGGFGTVALVGIEGTGSYGAGLARHVAAAGIRVVEVDRSDRQDRRRQGKSDPLDAVSAARAAQSGRARGAPKGRDGAVEAIRALMVARRSAAGERTRTINQARALLLTGPDDLRARFTRHTPAALVTGLASLRPRPGDVAGYAVRVALRELGRRARFLDGQLQRLDELIVPLVTARAPGLLAMYGLGPRTAALLLITAGDHPGRLRSEAAWAHLCGVAPIPASSGKVTRHRLNPGGDRQANHALWRIVFTRLGSHPATRAYAERRTAEGKSKAEIIRCLKRYAAREVYRHLRPAAG

SEQ ID NO: 424634 - protein, 430 aa, unidentified
MGLIVPTAMHPERDNQPMPYEWFVGIDWGSQRHQVCVLDRDRRRVGERAIDHDGASLAQLAAWLWTVSAGQPQRVAVAIEVPRGAMVEGLLERGFHVFALHPKQLDRFRDRHSVAGAKDDRRDAFVLADAVRTDQPSFRRLQLDAPQLLRLRELSRAEETLLEDFRRSANRLQDQLHRLYPQMLQLCSAADASWLWDLIDLAPTPAHAALLSEEHVQRVLKAHRVRRVTAQEVLACLQAPALPVAPGAAEAAQAHCGFLLPCLRVLAEQLQACSQQVSALLHTLAEEPGDGEGPSDVAIVLSLPGVGRKMTAWLFAEAAQPLAERDYQVLRTHGGVAPVTKQSGKRRVVVMRRGCNPRLRHALYHMARVAMQRDAHFRRVYAALRAKGQRHGQALRNVGDRLLRILMAMLHNRTCYDASRIRREPVVQRG

SEQ ID NO: 424635 - protein, 322 aa, unidentified
MIKYKEIFGVDISKDVFDVHGNISGHNQYKNDASGFKKFLKELPADCLVAMEATGYYHYRLAQFLFKHGVEVSVINPLSIKRFIQMKLAKVKTDKSDSKAICDYALLNEVPIYNALTDVQSECLQLFRLMDTYLKHRTATKNKIHGEEVLGIPSKSVYRSLKRNKKHLDKEINGIDQQLLSLVKEDQQQQLSLLKSIPGIGTKTALFLIVITDGFSKFENASQLCSYAGITPTIRESGSSVRGRSRISKVGNRKLRNLLFLCSFNACKHNKACRAIYERIINKGKSKKLALIAVTNKLLKQCFAIAKSGRPYDETYVSVLPR

SEQ ID NO: 424636 - protein, 310 aa, unidentified
MPTPPFQIVAVDVSKDSLQIKTDSDSFAVAATPEGLAKLLKFIQKLQHPLVVCEATGGYERHLINHLHKAKIASRVLNPARIRAFAESEGIKAKTDPIDAEMILRFAIEKNVQPGPEPTALQQELTALMDRRSQITGEIAREKNRLEKACKIIANSIKRTLKFAEAELKRLEKSIRETIASDFTLTHYAKTMQSVSGVGEITTWTIITYLSEITEIGRNQLIAMAGVAPYNKDSGKKSGKRSIRGGRPKVRRVLFMAAHTAASSNAVIKPYVQGLLGRGKPYKCAIVAAMRKLLLHLQSLLKKAQISLAS

SEQ ID NO: 424637 - protein, 424 aa, unidentified
MTPHENVEPAAAEDFAAWVAIDWADKKHVWALQQTGATSRQRGELEASPEAVDAWVGELLRRFPERRIAVALEQKRGALLCLLSKYAALVLYPVHPATVSRMRAALYPSNSKDDPKDADLLLDILLYHRKHLRRVDADTVETRKLQILVQDRRLLVDQGTAYSNQLRAKLKLYYPQALRWLPDLHAVVAGEFLKRWPTLPLLQKARRETIEKFFHRHNCRSEELIRMRLDEIPRAVVATTDAAIVDSSVAMVRALVDLMAVLHTHIAALDQEIAATAAVHPDLPIMASLPGAGRVMVPRLIAAVGTQRARFACADEMSSATGIAPVKQASGQNEWIHFRWACSKFARQSFHETAGHSIAQSAWAKAFYEAQIRQGKEHHAAVRALAFKWQRILFRCWQDHQPYDEQKYLAALRRRGSPYAQAAA

SEQ ID NO: 424638 - protein, 345 aa, unidentified
MDHFAGLDVSVKETSVCIVDDLGKIIREVKVASEPEALLAVLKNPAYHFKRIGLEAGPLSQWLYSALAEAELPVICVETRHMKAVLKAQINKTDRNDARGIAQMMRAGLYRPVHVKTLRSQKLRMLLTHRKLLQAKAIAVENDLRATLRNFGLKVGVVGTVKFEARIKQLVEDVRDLAVLVEPLLIVRRVLREQISVLHRRLLAIVRDDDVCRRLMTVPGVGPVVALTYRVTVDVPVRFRKSKSVGAVFGLTPSRHQSGESDRPGAISRCGDEMMRSMLYEAAQILLVRSTKWSWLKAWAMKIARHRGMKKAIVALARRLAVIMHRIWVNGTTFRWTREQAAAAT

SEQ ID NO: 424639 - protein, 343 aa, unidentified
MGEVSTIGLDIAKSVFQIHGVDVDGAVVIRRRVGRAKVSEFFAALPPCLIGIEACPTAHHWSRKLQVLGHTVRLMPPNYVKAYLKRSKNDANDAAAICEAVTRPSMRFVPTKSEQQQSGLMLHRSRQLLVRQRTMLSNAIRGHLAELGIISAKGRNGTAELLEVIANQEDDRIPAIARFSLEVLARQYAAIAAEIGVIEKRIHGWHRSCEESRRLEEIPGVGPIVATALVAEVGDWKAFASGRSLAAWIGLVPRQHSTGGKERLGGISKQGNRHLRWLLVAGAMAVIRYARQHGTKRPWLARLMATRPIKVAAVALANKIARMAWAMMVRGERYKEPTLMIAA

SEQ ID NO: 424640 - protein, 344 aa, unidentified
MESVPILVGLDYHSGSVQACVVDAAGKVLLNSKRASSVPDVVSVVQSLGHVQRVAIEACCGAADFGDHLAHATRWRVSLSHPGLVSKMRSSIDKSDRSDARVLADLCRTGYLPGVWLPPEPIRELRTLTRRRHQLTDAIRRAKTRIGALLRDKRVATPAEIVTKWTLRHVAWLKALTLPPCARMVLDDLLAEIKYHAQRRDTIDAQLEQATAGDAMIARLRQVKGIGPVTAWTLRAVIGRFDRFSNGKQLSRSCGLTPINASSGERVADAGLVRAGDPTLKTVLIQVAQRVVRCAGEWNSLYLGLLERGKPACVAIAAVANRWTRRLWHDLKGMGDGGQVVAAA

SEQ ID NO: 424641 - protein, 317 aa, unidentified
MNTTEIQTSLNIGVDVGKANLDIALHPSGQFYSIPNSEAHIRRFVKILKNYDIERIVVEATGRHEHALVQACNQAGLPIIVVNPTSVRRYAQAIGVLAKTDRIDAQVIAKYAATLKPEFRPIPDKTSQKIRDLLARRAQLLEMSTMEKNRLQIMPRPLHRSIKSLLRMLQSQIETITRQIEQEVAKVDHWRTKMDIMTSVPGVGKVLAYTFLSELPELGSLNRKEIAALVGVAPINRDSGKLNGKRRIRGGRPRVRTVMFMAMLSSIQCNPVFKRFYERLKAQGKIPKVAVVACMRKMIVVLNTMVKNQEPWRENMA

SEQ ID NO: 424642 - protein, 215 aa, unidentified
MHPTTIGLDLAKHVFQVHGVDAAGKVIIRKKLRRSELKAFFEKLPPCLVGMEACGTAHYWGRELSSLGHHVRLMPAAYVKPYVKRGKNDEVDAEAICEAVTRPTMRFVPVKSAEQQSILMLHRTRDLFVRQRTMLVNSLRGQLAEFGLIAPQGIWRRRHFAAWIGLVPQQNGTGGKVHLGRISKKGEPYLRRLLVLGATAVVRYARDKPEFAGCG

SEQ ID NO: 424643 - protein, 363 aa, unidentified
MRVPELVVETRGFHKQDPREEEEAPMDRQYVGIDFHRRRSVIVRLDSNGERLGVHRIVNDPFELSRVIALCGEAPQVVIEATYGWYWAVDLLQDLGATVHLANPNALNWGDRRVKNDEIDAHDLADMLRLGRMPRAWIAPPAIRELRERVRYRAKLVKLRTGLKAQVHAVMAKEGVLPRVSDMFGPAGTRQLDALELGAPFAHRVASLRELIGVYDREIATLERDIHAHLKAHRGYQAVQAINGIGKVSAAVLVAEIGDITRFATPAHLCSWCGLTPKHRESDTKTRRGRISKQGSALIRATLIEGISRYHGGSALDAQYQRIAKRRGRNKARVALARKVLTLVYYGLRDGEIRCLAPVEAAA

SEQ ID NO: 424644 - protein, 397 aa, unidentified
MIVDQRGAVAAEFSFPHSAEGWAAFRQKTAGYGALGVAIETRSGAAVEELLRCECTVFPVQPKAAARYRERKAPSGVKDDQLDAWSLADALRMDGRAWRALAPEDPLIQELRLLCRDEVALIDQRTALVNQLRAALREYYDPALEAFDDWTQPATWALIVQFPTPAELAQAGKRKWEKFLHVHKLWRPETAQKRLELFARAADWKRSEPVTRAKSRLAVSLAKTLQTLERQLEEYRQAIEELFGRHPDHDLFGSLPGAGSKLAPRLMSELGADRQRFDTPQSLQCLAGTAPVSFQSGQIHRVKMRRHCNTHLRHAVHLWANCSRAMCGWAQAYYQAQRQRGKSHACALRCLGHRWLEVLWKMWQSRTRYDGELHMRNQQKHGSWVINILTVPAAKPA

SEQ ID NO: 424645 - protein, 316 aa, unidentified
MLYVGIDVAKNKHDVTALNVPGKTVLKPLTFSNNKAGFELLDLSFRQLNQDCLIALEDTGHYAFNLLNFLHEQGYKVYTYTPLLIKEFAKSLSLRKTKTDKKDAHGIALKLLSDPNREQFQHDNRQVELKILARHIHRLKKKQSDWKVQYTRCLDIIFPELDKIVGKHSEYTCQLLTCYPNPQKRLEAGFDKLIEIKRLTASKIQDILSVAPRSIGTTSPAREFEIIEIIKHYKRLIDKAETCVNDLMAEFNSVITTVTGIGGRLGAVILAEIRNIHAFDNPAQLQAFAGLDSSIYQSGQIDLAGRMIKRGSPHLR

SEQ ID NO: 424646 - protein, 450 aa, unidentified
MSQSQTLNVPSEFAAFIGLDWADRKHSWKLVAAGSVEGESGELNHTPEALQQWATDLQDRFAGAPVAIALEQRRGAVVFQLSKFPHLVVYPVHPTTAAKYRQAFFPSGTKNDPLDSALLLELLLQHRDRLRRLDPDTPATRLLQLLVEHRRKLVDEKTRLSNRLTAALKSYYPQPLQWFDDIDAPLGCAFLQRWPTLAQAQHSHPGTLRKFFVQHNCRSAERIRERIEGIHQATPAVTDTALLEAGGIIVSGIVRASQALSESIAAVDARLQSAVTEHPQAGIFAGLPGAGAVLLPRLIAAFGTQLDRFPSASKLQCHTGIAPVHSQTGNTEIVHMRRACPKFLRQTFVEFAAHSVAKSVWARAFLQNQLAQQKDYNVAIRALAFKWQRILHACWRNNTPYDEQRYLQTLQKRNSPLAKLSAIPKSAPTDPTAVGWKSVAGFHTLAMKNT

SEQ ID NO: 424647 - protein, 333 aa, unidentified
MNYQFCVGIDVSKSTVDVALLNNTQPELVHHNKFTNDEAGVNGLFDWLYAVPGFDQSQTIFCMEATGLYCHTLTEQLNMRGAAIWIENSVQIKRSMGIVRGKDDKIDAIRIAKYAAKNTDRIRLWKPVREVVEKIKHLATLRERLVQTQKRLLTPIEELKAVGNPNMARLLEKSISKSVQAIEKDLKKIETEILSLINKDESLRKLYLLITSVVGIGFVTAINLIIHTNEFTMINNSRKLACYCGVAPFPYQSGTSIRGKTRVHAMANKKLKTNLHMASLTAVKLDYDLKAYYQRKVAEGKSKMSVLNAVKCKMLARVVAVVNKQTLYVKKSA

SEQ ID NO: 424648 - protein, 347 aa, unidentified
MKVLIGVDPHKTSVAVAAVDEAAGELLERASFPQDRAGLSALERWAKRFPERRWAMENARGLGRHLAVRLAATGESVVDVPPKLSARVRVLSTGNARKNDGLDALATALAASRNVRLAAVDPEADLEVLRLLSERREDLVAERTRALNRLHGLLRDLVPGGVARTLSADRAARILRGIRPKGGASDRLRRRLASEILRDLRTLDRKIADLNGRIEAEVGASDTTLTEIFGVGPILAATILGTVGDVARFPTKAHFASYSGTAPLEASSGDVVRHRLSLGGNRKLNYALHMVGVCQARSDAPGGAYYRKKIAEGKSRKEALRCLKRRVSDAVYKSLVADSQAPSCSAA

SEQ ID NO: 424649 - protein, 377 aa, unidentified
MSKLRFVGLDVHADTIAVAIAEFGGEVRSLGIIPNRLESIRKMVGKLAPIGTLKCCYEAGPTGYVLYWQLTQLGVACEVIAPSLIPTKAGDRVKTDRRDAEKLARCYRAGELTPVWVPDAAHEALRDLVRAREAAKKDQLRHRHRLGKFLLRHGKRPSEAGKAWTQKYLNWIRIHVRFDQPALDATLSHYLEEVDHVAERIAKLEQVIDEAVKQAPAEVRAVIEALQALRGVALTTAATAVCELGSLARFESPRQLMGYSGLVPREYSSGNRVQRGAISKTGNAHLRRVLMEAAWTYRHRPNLQGRLLRRQKSLALSDEVKRISWKAQQRLYKRFTALTARGKNHNQAVTAVARELLGFMWAIAVHTESQHKQAKAA

SEQ ID NO: 424650 - protein, 419 aa, unidentified
MVEDVHWFVGIDWATQSHRVCLLDAEGRRVGEREFAHGGAGLTELQDWLLEKTGVAPGQIAVAIEMPHGPVVEMLLEHGFAVFAINPKQLDRFRDRFTVAGAKDDSRDAHVLGDSLRTDRKAFRRLAADNPVVIELREWSRIADELQQERTRLANRLRQQLWRYYPQATELTDDVGDDWFLALWQKVPTPAAAAKASEKAIARILKDHRIRRLDAANVLQTLRKTALFVAPGTTEAACVHIRSLAARMHLVNQQIKEAYNALDSLCAKLGTPDEESPSGQSREQCDVTILRSWPGIGRIVLATLLTEAAQPLQARDYHALRALAGVAPVTRQSGKQRFVIRRLACNRRLQTAIHHWSRVAIQHDAAARRRYDALRQRGHGHARALRSVGDRLLSALCSTLKSRTLYDANRGSSQISVKQ

SEQ ID NO: 424651 - protein, 338 aa, unidentified
MSVTLLSIDLAKNIFQLHGVDERGRPVLSRRVSRARLLEAVVGIPCFRIVMEACGGAHYWARRFSTMGHHVQIIAPRFVKPFVKSQKNDRNDAEAIAEAASRPTMRYVAINSVEQQDIQSMHRIRSLLMRDRIAQINQIRGLLAEYGVVIAQTPLKVRHQLPAILDDQANDLTGLTRSMVRDMYERLALLDTQIARYDNLISQAHKASPPSQRLDKIRGVGPMIATAAIAAAGSATEFANGRQFAAWIGLTSRQHSSGGRQRLFGITKRGNGYLRMLLVHGARSVVQQAAKRNDPLSKWILELQARRGTNVAVVALANKIARTIWVLLARGREFEPPV

SEQ ID NO: 424652 - protein, 338 aa, unidentified
MTILMGLDQHRAQITTEWLDTSTGEVSRARVAPADRAAVRRFFARFRGQQLEVALEATTGWRFVVEELQRIGAAVHLAEPADTAALKGTKKHAKNDRADARHLRELLMAGRVPESWIAPAHILDLRARVRLRHALSEDRGEWQQRIQSVLYHHGCPRRGDLINRAGLTWLATLPMPACAREQVTVALGMIDALDRQLAPLDKELGGYARRQPGCKALMRHYGIGKLTSVTILAELGDPSRFSSSREAVRFAGLDITVYASDRRRAPGHLSRQGPPALRWALFEAAQCARRPGSPDHAYYVQAAEKLGGNRACLSVARKLLKRSYHTLRQLGEEAMQPA

SEQ ID NO: 424653 - protein, 351 aa, unidentified
MPFAGVDAHKRYSRVVVKDEAGSVLCRASLQNDVGSFRDFFSGIDGPTRAVLEAGRDWGVIYDLLEGIGVEPVLANPLKTRAIAEARIKTDTVDATILADLLRADLIPVVHVPSKGVRAQKNLLRQRLWLVQLRTRIKNRVHNILDRNHVGPPPVADLFGKAGRRFMDQLCLPAPDDRLLKAHLELLDLLQSQIAKSEEWIDEALGERPEVATMRTLPGFGKVLAAVVALEIDDVHRFSHPGKLCAYAGLVPTTYASGGKVRHGRLLPGCNRWLRWAFVEAAWVAQRHSAYCHAYFERIKRRKGANCAISALARRLCEIAWHCLTGSRPYEERKMTATRELARSPSKVPGR

SEQ ID NO: 424654 - protein, 414 aa, unidentified
MEIVHSYCAGLDVHKKTVVAAIIVPDEQGGLRKETRTVGTMTSDLLALSDWLLGCNVTHVAMESTGEYWKPVFNILENNFEVLLVNAQHIKAVPGHKTDVKDSEWIAELLRHGLLKASFVPPLGQRELRDLTRYRSTFVRTRATLVNRVHKVLESANIKLTSVATDVMGVSGRAMLAAIVQGQSTPEAMAELAHGRMRDKRELLAKALEGHVQAHHRFVLVELLGQIDSMDETIQRFNAQIEEYCRPFEEAVVLLDTIPGIGRETAEVIVSEIGTDMSRFPTAEHLASWAGVAPGNNESAGKRYSGKTTKGDKALSTALNQAAHAAACTRNTYLSAQYRRLAPRRGNKKAIVALEHTILVIAYHLIQRKVPYQELGGDYFDKRRPEATAKRLIRRIEQLGYSVSLLQPSALSPA

SEQ ID NO: 424655 - protein, 478 aa, unidentified
MAEGEDRQGLGSCEPVEESGQLSNEQEPVTKITNSRMHISVTFCQYLERRAEEKMNSRVQIACGLDVHRSKIVGSIVTSGGTQETRTFTTTIEDTLALKDWILTHECERVAMEATGIYWYPIYNLLEEHITVQVANPLFIKGIPGRKTDQLDAEWIATLCLNGLVKPSFVPGLQVRNRRDLVRTLQRLIQTRTRHKNRVHKVMVRAGIRIGAHLSDLLGPSGLRILHGLLDGQAIDTILKNLKNAKINKKRDELANSICGTLDENDVYLIRLELDAIGSINHLIDDLKQRISHLMTPVMDELTILMTIPGIGYDSAVNILAEIGDVRQFPSGKHLVSWAGLAPGLNESAGKQGPGHITKRGSKSLRTFLIEPAQSIAGMMRNNHLKRFFSRMRGKLGFKPAIIALARKLLMLVHHLLVNHEAYFEENFPPKKPAKIVLPSFLSMSPDQILDLLSKAVAELSDVDRAGFVRKLNRIGTV

SEQ ID NO: 424656 - protein, 387 aa, unidentified
MPQVNDLSRSLTAFDPISSLVVVVEMSKASWLVSGAVPGVERQPLKKLEPDATALLRLIERWRNEAMRAGRPISRIALAYEAGRDGFWLARWLIARGIEAHVIHSASVAVSRERKRAKTDRLDAAMLMRVFLGWLRGERGHCGMVVIPTIEEEAARRPSRERESLVNERSRITNRMKSALARLGIRGFKPHLRKAPERLAGLRTAEGTGLPANVIEEFRRDMARLALVREQISSIEKTRAERLERAPDTGPHAMVRLLARVIGIGIETADMLVREILSRKLRDRRAVARYAGLTGSPDESGLKRREKGLAKAGNARVRRGLIQLAWRFLMFQKDSALARWYRTRTEGPSGARKTTMIVALARKLLIALWRLVTTGEVPDGVELRPAA

SEQ ID NO: 424657 - protein, 335 aa, unidentified
MDNYIGIDIAKATLQIYIPKGQLDLEVANTKAGLSHLYKQLKETYKEAFHDLVFIYESTGSYSRPLEQFCQKKEIDCFKVGAYQSVSFSKTIKNRNKTDRVDARMLSAMHIVVREGDIKVPYRDEDAHQLRSYIKYYQSLNKEKTRLKNYLEAATYNQEDHYVLNQVKKRIKQTDKEQDKLIALSMVVIKANSDYLTAYENITSIKGVGQTSGIVLLYLFLRYPHASRQQITALTGLDPVQNESGTSLRRKTRISKQGISLVRGILYMPILCIVQHNDEMKIFYDRLIEAGKPKMSAQIAVMRKVVLLAHSLYENNQKYDETKYLDYIDFDKKAA

SEQ ID NO: 424658 - protein, 426 aa, unidentified
MFVESDDDEQIIERVAALDIGKAEIVCCIRLPATDGGKRRVQEVSTHSTMVPSLCELANRLVELGVQRVVMEATSDYWRPPFYLFEAHGLDPWLVNAKDVKHLPGRPKTDRLDAVWLCKVAERQMLRPSFVPPGDIRRLRDLTRYRADLVEVRTAEKNRVEKLLEDACIKLSVVASDIFGVSGRAMMAALIAGQRDPQVLAAMARARMRVKIPRLEEAFAGLPLGTFDDHHRFLLSRMLARIDAVSADIAAVEAEIGDHLAPFADAVARLDEIPGVGPDVAAVIIAEIGLDMSRFPTPGHLASWAKFAPGINSSAGKTKGNGSTGHGDRYLARVLGEAAVNAGRTDTFLGARYRRLARRRGKKKAIVAVGRSILVIIWHLLADPDTRFHELGADHYDRHVNTLAKRRNHIRQLEALGYKVTLEPAA

SEQ ID NO: 424659 - protein, 315 aa, unidentified
MTNTTIGVDISKDHLDAYRMNDGASRRFANKAAGHRAFLDWLGPSEARQGLRIVYEPTGPYHRSFEQKLAAAGVALVKVNPRQARRFAEATGQLAKTDPLDAAMLARMGALLELEARPVRSPIANDLKDLHMAREALVKNRTRAKTRAKMLALPLLKRQNAEQLKQIERQMAVIEKEIMAIIAADPDLASRLAILVSIPGVSAVTAFALLIDMPELGTLEHGQAASLAGLAPVTRQSGRWTGRASIRAGRANVRRALYMPALSAMQFNPDLKAKYQQLKAAGKAPKVAITAIMRKLVVLANALLRDQRTWAPSLP

SEQ ID NO: 424660 - protein, 310 aa, unidentified
MEAIVVGIDVSKNTLDVHVYPTGEAFTVARNADGIDALIARITPLGIHAVAVEATGGFETVVAASLGGAGLPVIVVNPAQVRAFAQALGKRAKTDPIDAAVIARFVEATKPEIRPLPDEDTRLLAELVTRRRQIVQMIVAERQRERQLPTRHLKKSATRLIRALEKELDVLNTDIGDNVRGSPVWREKEDLLQSVPGVGPVVARSLLAELPELGTLTRREVASLAGLAPWTRQSGKWRGKSFTGGGRAGPRTTIFMAAMVGTRHNPQLKAFYQRLVAAGKPKMVAIIAVARKLLTILNAILRDKTPWQHA

SEQ ID NO: 424661 - protein, 359 aa, unidentified
MDPSRLMRQALSFVAVLGGTFMNIATVGLDVAKQVFQVHAADLEGRVVLRRRLRRNQVINFFANLPACVVGMEACCGSHYWCRRISSFGHTVRLMAPQFVKPYVKSNKNDANDAEAICEAVRRPNMRFVPAKSVEQQDIQSLRRVRSRLVSLRTGLANQIRGLLSEYGIVLPQYVSQLRRGLPLILEEASNGLTAFSRRLFASLYDELLSLEEKIGVLDEQIESVYRASEPCQRVGAVEGIGPLTATALVAAMSDGKAFKNGRQFAAWLGLVPRQGSSGEKTRLFGISKRGDTYLRTLLIHGARAVVCRASRKTDPRSRWIADKQVRLGTSKACVAVANKNARIVWSLIARQETYRRAA

SEQ ID NO: 424662 - protein, 387 aa, unidentified
MPKHNDLSRCLVTLEQASTLIAVVEMGQSSWLVAGIAPGLDRYPLKKLGPDRDALLQLLHRWRNEAAKAGHAINRIAVAYEAGRDGFWLARWLRSQSIEAYVIHPSSVPVSREHRRAKTDRLDTELLKRAFLGWLRGEPKHCSMAAIPTLEDEDARRPGRERQILVGERTRILNRLKANLARLGVHGFRPNLARAPSQLGALRTPEGVAIPTNTLAEMRRDLDRLRFVKQQIKEIEKTRAERLAKAPDERRHAAARLLTRVVGVGIETADMLVQEVFSREIRDRRALARYAGLTGAPDESGQRRRERGLAKAGNARVRRGMIELAWGHLVHQKGSSLTTWYRRRTVDARGGARKTMIVALARKLLIVLWRFATTGEMPAGLLLRPAA

SEQ ID NO: 424663 - protein, 409 aa, unidentified
MERVIERGAALDVHKKSVTACVRVPGADGGRRQEVQTFGTTAAALLALRDWLSAHGVTHVAMESTGVYWKPVYYVLEEMFTCLLVNAAHVSKVPGRKTDVRDCEWLAQLLEHGLLRGSFVPPVPIRELRDFTRYRQVLVQDRTREANRLHKVLTDAGIQLASVATNVLGKSGRAMLAALVEGTTDPAVLADLAQGKLRRKLPALREALAGRFRTHHALLVSQLLAHLDYLDEALDILTTQIEEALAPFAREAARLDAIPGVGPRTAEILIAELGVDMRQFPTARHVASWAGLCPGTHESAGKHRAVRTRKGNRWLRAALIEAALAAINVRDSALAARYRRLVRHCGHKKAIVAVAHKMLTTAYVLLADGRTYQEPGAGYYDAQRKDRVIRRALQTLERHGFRVSLEPAA

SEQ ID NO: 424664 - protein, 340 aa, unidentified
MDKQRRQDVLYCGIDVSAKELVVAVSKEGNWHQRSFSNLQRGHRALIRWLQSQNRPVRVCLEATGIYGLDLAMALEKAEGIEVSVLNPRNVSRFAETLRRSKTDPADAQVLAEYARRMPFEPWQPPARAALQLRTVMRQLAAITKQHTMQVNRLHAASGSVTVPTCVRVELKRSLRHLAASTVRLRHAAGKIVKQDQQLEQRWQLLQTVPGIGKLAALQLLGELALLPRHLDVRQWVACSGLDPRHHRSGTSVEKASRISRAGNAHLRRSLYMPAMVATCHDPHLRTFYLNLAARRKSNRLALIAVARKILHAIYGMFRSGRPYDGSLLFPNLQLGSCPT

SEQ ID NO: 424665 - protein, 323 aa, unidentified
MKEDITNCAGIDTGKLKLDVALDLSADQLEVANMTEGHAKLSAWLRRHKVRRVGIEASGGYEQAVVSKLRGDGFVVVVFQPAQVRAYAKFHLRRAKNDKIDAALIAACTAATKKIHAPPDPRLVAMADHQTLIDQIVDQITRCKNYRESCRDQGPRQFWEDEIKRFRGLFRQQLKQLVAEIRRHPDLSERLDLIASVDGIALRTAVAILVRLPEIGRLSRGQVAALAGLAPYDDDSGERQGIRHIAGGRERLRNALYVAALPASFRWNAELIALYRRLRAARKEHKVALVACARKLLIFANAVVARGTPWQSGAHPSASLPAT

SEQ ID NO: 424666 - protein, 373 aa, unidentified
MQTRHYVGLDLHSNNTYIGVIDETERRVFKGKFPNQLEVILAMLEPYKESVAGVVVESTFNWYWLVDGLMDHGYKVHLAHPAAMTQYSGLKHTDDQHDAFYLARLLKLGILPEGHIYPREERQLRDLLRKRLKLVQQRATHILSFKSLVSRNLGLAISSNEIKKLEEEEMPDLFENEHLALSAKANVAVMNHLKWQIHEIQNSLLKSVRLKPQFEKLLTVPGIGNTLAMTIALETGDVGRFPTVGDFASYCRCVNSHRLSNDKKKGYNNRKNGNKYLSLAFVEAAHMARRYCPQAQAFYMRKCIKAHKVLAIKALAHKLARACYYIMRDQAEFDVTRIFGKPIKVDKGCASEPTRGLITKSRAPIGMTGAAAK

SEQ ID NO: 424667 - protein, 426 aa, unidentified
MSITQNEKISQVKDTTLVVGIDISSETHYACAFDWRGLELAKVFKFESASYGFENFSEWLSELCKTNQKDNIIIGAEPTGHYWFTLAEYLKENGIKFVFVNPMHVKRTKELDDNHPSKNDRKDPKVIAKLVIEGRYLIPYIPEDIYAELRVMNESRMRINKELVAIKNRIQRWFAIYFPEYKNVFGNWECDSSIEVLLNIPLPADAVNMGADAINQLWRAKKIRAVGIKRAKLLVEVAANSIGVKQGVNAARCEISMLIEDFLKNKEQEQRVIEILETLCIQVPNADKLLNIKGVGILTVASFLGEVGDIRRFDSPKQIQKLAGLAITENSSGKYKGQSCISKRGRKLLRYTLFQAVMSMIMHLPEFKELHRYYTTRTKNPLKGKQSKVALCCKVIRIFYVLLNKGVEYDSQKLMKDIVRPEVIAA

SEQ ID NO: 424668 - protein, 349 aa, unidentified
MIVVGIDPHKQTHTAVAVDGSTGLVLAELTVKARTPGFERLVAWARALDEDRSFAVEDGRHVSGHLERHLIARGERSVRVPPRMMGESRRTDRVWGKSDPVDATAVARAALRHPDLPDATLAGVEREIGLLVAHLESLINERTDRICKLRWLLHDIDPDIAPPLRTLDRFKTMDRLLRALEAMDLTVEVEICLDLLARCREITLRANELERRIGELVKVHAPALLQISGCASLTAAKIVAETAKVGRFRTEGHFARYAGTAPIPASSGARHRQRFNRRGNRQLNAAVHRIAVTQIRIHEPARDYVAKKRGEGKTKTEAIRALKRHITRVVFKTLTTMDQPAGRLTAAAA

SEQ ID NO: 424669 - protein, 506 aa, unidentified
MKVQASKPIFTIGYYPIRQYGSNICRQDIGRKRPYRSLLRQRYWAWSFTSKLITMAKVAKRKQTSKGLRLEVVNPNAAGIDISPKEMQVCVPSDRDGECNRTFGVYTEDLHYIAEWLKACCIDTVAMESTGIYWLPVFRILKESGFEVILVNASDVKNFSGRKTDASDAEWLMMLHSYGLLKPCFQPENIARTMRNLVRHRDNLIRSASREVLHLQKAMEQMNLKLDNVFSDILGKSGQSVIKAILNGERDPKVLADLADPRCRTSKEEIEKSLQATWDEEHLFEMRQSDSLYQFYQQLIAECDAKINGIAMQYSATVDAPKTELLRSEKYNAKKNRIGFDVEKVAFELWGVNVMRIPGMSRGSLLRLVGELGADFTTKFVDVNHFVSWANLVPNNKISGGALLSSKVPKKKNPVGMIFRQAANTLKAAKNPLGDYFRHMRAKGGHLQAMVATGKKLASIFYCMVQRKLEYNEKVYCNHRKQELQNKVAYLHKRLQRMESELANCG

SEQ ID NO: 424670 - protein, 388 aa, unidentified
MFKTVERPDAPAAIRMDIGAIFVSLELSRSTWLLTSVSPGAGEKMSQHATPAGDLRQLFECLAELKRKAMARTGKTYPIIVIQEAGLDGFWIHRALEREGIESHVVDAASIAVPRRRRRAKTDRIDGKMLLRTLMAFKRGEPRVCAMAKPPSVEEEDRRRLGRERKTLIAERVEHVNRIKGLLFTQGAIDYQPLRRDRRARLEALRTGIGDPLPARLKGLISRELDRLELLLAQIKAVEAERDALLAKQSGQAPAAAAMLLAFKGIGPEFATVLWLEGLFRSFANRRQVAAYAGLAPTPWRSGSIAREQGASKAGNPRLRATLIELAWLWRRHQPKSALTLWFEDRVKANGGRVKKTLLVALARKLLVALWKYVTTGLVIEGAVMNTA

SEQ ID NO: 424671 - protein, 438 aa, unidentified
MPTLAYVGLDVSQESARVCFLLADGEEPRPRWTIPNTQPGAEALSCELARLCFLYHVDQLRIGLEATGLLWWHLACALKDAEALAPFTPQIYALNPQLVETFRKNFGALPKSDHADAFLIAERIRYGRKLPSPFQLDTRYAPLQRLTRFRCHLVENLVREKNYFLSFLFLTFSAYGQVAPFGDPFGATSCAILEEFTAEDLAQRSLDDLTNYLHHKGHGRFADPSDLAATLQRAARDSYRLDKVLQEPLRLVLATTLASIRSLQQQLKTLDQTIAQELATIPQTLSSVPGLGPVWTAGLIAELGDIRRFDDQGAIAQYAGLTWPSAQSGEFAAEDTEMSKRGNSYLRYYLVEAANSVRTHCPEYGRYYVAKYAETPRHAHKRALVLTARKLVRLIDVLLREGRIYQPPQQRAPAPPATQPHNKCPGPQRRSKPVRAGT

SEQ ID NO: 424672 - protein, 354 aa, unidentified
MKTLKQHTLADKVQSDVWVGVDTHRDTNQVGLFSHEQGLIHHWRQPSSPGVLCKVLAPIKERVRMIVYEAGPTGFGLARTLRGNGFPVMVVAPSHIPKMPGRQPKTDSLDCQKLAMLAAKGMLQQVYTPTEEEEADRALMRQREQYVRKLRRVKHHIKSFLLFHGLPEPEGLTNWANRAIATLKAMHLNHELRFCLDQLLKELGWMQGQVLRVTKHIKELAATERHQQAYKQLTSVPGVGLITAMTFRTELLAPERFTRPEQVTRMIGLAPQIRQSGNSQWNGAVMKSGNARIRSILVESSWRWIRYDPWARSQYMRILSNTGSAKKAIVALARKLAIKLWRIETRGESYKMAA

SEQ ID NO: 424673 - protein, 391 aa, unidentified
MIFVGIDVAKDKHDCFILNSEGTVLADVFTIANNRIGFETLLSRIQSCSQGESKIKVGLEATGHYSYNLLGFLLDSGLVTYVINPLHTNLYRKSLSLRRTKTDRIDARTIAMMLMSDVDLKSYSNTAYHNEELKSLTRYRFDKVKERAKLKSSVARLVNILFPELEKLVSSLHIAVVYALLSNYPGASYIANANTEELAETLCTASKGRYTKSKTAEIQVAAGVSIGSKMPAKSMELKHTIALIRELDKEISEVESAIDKITSQMDSPIFTIPGIGRHMGAMILAEVGDFSNFASADKLLAYAGLSPSTYQSGQLQNCYAHMEKRGSRYLRYALFNAAKYVCLWCPTFSAYLEKKRSEGKHYNIAISHAAKKLVRLIFAMQRSGKAFLADY

SEQ ID NO: 424674 - protein, 443 aa, unidentified
MSAAIQSMSPAKTKGGISNMDIAYPICCGVDVHKKFIVATIIKTSDQIKATYIKERFSTFNNSILKFKAWLIANNCYDVCMESTGKYWVPLYNLLEDTIRVTVASPKWVKAVKGNKDDVKDSKWIGDVFRLGLVPGSYIPDKLIRVLREFTRYRAKLIGCKISEKNRFQNAFTVCNIALDSVVSDMFGKSASLITDYLLKSDEEFDPEYCKSLLQKSLKKKAAEVIESIEGYQITPEQKNRMLIVKDHLAYLEQTIENIDNMLNEMIEPYQSAITLLCTIPAVDRITAITIISEIGVDMSKFDSSKRLCNWAGLAPGNNQSAGKKKSVKITRAGVYIKPALVQAAHSTVKSTKSDYYRIKYERISKRRGKKRAVIAIARMILTAVFHMLSTGEVWNPTDLFKIDMPQDLKDKQKQRQITQAIKFLRNNGVILPDDIIASETAT

SEQ ID NO: 424675 - protein, 404 aa, unidentified
MSAVMIGIDPHKGSHTAVAISVAEEPLGELRVRAGADQAGTLAGWAAAWPERTWAVEGAGGLGRLLAQQLVAAGERVLDVPPKLAARVRLLQAGDTNKNDPNDALSVAVAALRSRSRRQVAAEDHAAVLKVWSKRHRDLARSRNQVACRLHAVLCDLLAGGISKQITAAQAARTLEQVTSSGPVAAARHELAGQFLEDLRRLDAQLRDTNKKLAAAVRASGTSLTEVFGFGPVNTGTVIGDVTDVTRFPSRDHFASYNGTAPVEVSSGNRKIYRLSLRGNRRINHALHMAAITQIRHAHSDGRAYYDRKIAEGKTHKEALRCLKRRISDAVFARLQADARQAKATAAAKGPGGQPGNDSDSSAAGSHPERQLFGQATPEPSPTLRPATPATSPRPTSRKTRRNP

SEQ ID NO: 424676 - protein, 463 aa, unidentified
MSKDTSKKPVRSNEKKLINKAVLPKHLQHINKMAAGIDIGSKSHFVAVPEGCVDDCVREFQSFTADLNELANWLEYCGITTVSMESTGVYWIPLFELLESRGFEVLLVNARHVKNVSGRKTDVLDCQWLQQLHTYGLLSGAFRPAEQVCALRAYMRQRHMLIQQMSSHIQHMQKALSQMNLQLHNVLSDITGETGMKIIRAIISGERDPQQLASYRNYRCKNSLEIIQRSLTGNYRDEHLFSLSQALELFDIYQNKIAACDEMIEKQLSTFEDTNKMDVTNLKKQSIKKKSKNAPRFDVRSHLFRMVGVDLTVIPGIEAYSALKIISEIGLDLSRWKSSKQFASWLGLCPGNKVSGGKRLGSKSKRTGSYAASAFRMAASTLHHSQSALGAFFRRLKFRLGAPKATTATAHKLAVILFNMIKNRVEYVETGADYYEIQYREKLIKSLNARAKTLGFNLVEIAT

SEQ ID NO: 424677 - protein, 339 aa, unidentified
MKYTPVGVDIAKHVIQIHFINEHTGEVVDKQLRRQDFLTFFGNREPCLIGMEACGGSQHWARELTKLGHKVRLLQARFVKAFVMGNKNDVMDARAIWMAIQQPGKEIAVKTEEQQSVLVLHRTRMQLVKFRTAQINALHGTLLEFGETIHKGRAAMERELPEALERMKERLPPYLITVLENQYNRLNELDSLIEDIEKQLTSVARQNETCKRLLDIPGVGPLIATAAVATMGEASAFKSGREFAAYVGLVPKQTGSGGKVRLLGISKRGDTYLRTLFIHGARAVALVAKEPGPWITELKKRRPASVAIVAMANKLARTVWAITAHDRKYDRNHVSIRPY

SEQ ID NO: 424678 - protein, 397 aa, unidentified
MYIVGIDIAKRKHEAAVIDGEGAVIIKPFSFTNNCSGYNRLLAMLTKAKLPLDEVSFAMEATGHYWLALFTRLQKEGFRVQVINPVQTNSIRSFYIRQAKTDPRDALLIAEVIRFGHFSESTLHPENIYELRELCRGRHAIVSMQADVKRKVVALLDQVFPEYETAFTNMFGDTSMAILQACPTPKELSEMPLEELCHLIEVSSHKRFRMAKAQELQALARGSFGFAMAGDVFSTMIRLYAKHLDFLKQQVREMDRKIAEIMDTLDTPITTITGIGPTLGAYILSEIGDISRFSSAAKLAAYAGIDPTMRQSGEYNGVRNRMSKRGSPYLRHAIWLAASSAVLHDPALKLYFQKKRDEGKPYMASVGHACRKMVSIIYAVMRDNKAYTPYIPNEISA

SEQ ID NO: 424679 - protein, 390 aa, unidentified
MIPVPSNPVFVPRNYDIFAGLDVDKTSIAAYFLDHEGNLKSMRIPHKSEHLLNYVQNHFPGQKVAFAYEAGPTGYQLHDDLTSKGYPCLVAAPSMIPTAPGQRVKTNRLDSQKIAENLRGGQLKSIHVPCESYRDLRHLIQLRDTFVRQAAAAKNRIKALLLFESIAFPEAPAGSQWSKSVILQLKSLACSLVVRFKLNQLLSSLEFNRSKAMETTKAIRHFCKGDPELERCAGFLMSIPGIGFILASHLLARIGNWRQIQNVRQLSAFLGVVPKEDSTGDRVRRGSITRSGDSRLRNKLIQGAWAAIRQDPELREFYRRIYHKHPRPIAAKKAIVAVSRKLTTRIYSVLHEQRNYVIRQKSDSVPLTQEETGLPQEMTRRHAEAVEQNS

SEQ ID NO: 424680 - protein, 403 aa, unidentified
MNSVGIDISKGRSTIAVMRPFGEVVISPFEVRHTDSELSELARQLKSLNGETRVVMEATGNYHAPVAKLLHDAGLYVSVINAKLVHGYGNNDLRRVKTDRKDAVKLANYGLDRWLTLPRYVPEEDTRLLLKNCYRQYRQYSKVQTVLKNNLISLLDMVFPNVNRLFSSPIRGDGSEKWVDFVAEFWHCRCVSEKSQKAFTNKYQRWCRKHGYNFSEAKAHTIHAEACGHIDVIPKSETTKLLVEQAVAQLRATSAALVALKHEMQALASMLPEYPVVMDMFGVGPTLGPQLMAEIGDVRRFYSKKALVAYAGLDAPPNDSGDVTGRHKSMSKIGASSLRRTLFLVMTVYLQNAPLDEPVYQFMDRKRAEGKPYRVYMMASANKFLRIYYATVKAYLESLEHTA

SEQ ID NO: 424681 - protein, 360 aa, unidentified
MRSKESKLDFSGQVFYVGIDVHKKNWQVSILSNGRKHKSMSQPPSAKVLADYLHRMFPCGTYLAVYEAGFSGFTACRELNALGVHCKMVHPMDIPTSHKEKQQKSDRIDSRKLARLLQDDYFTGIDIPGIEVETWRSLLRQRFRVVRDLARTKSRVKSLLFQFGIEIPDYINSSSSRHWSGSYLNWLRSLNPEENCLQTVIGNYISMGESLREQLLKINRQIRQLSETEAFRQNRDLLLGIPGIGMTTAMVLLCELYDIRRFKTLDTLCSFVGLVPRMYNSGDKERTGRMVKRGRKQLKIMLIEAAWEAVSADPALMLYFNNLSKRMHKNKAIIRIARRLLSRIRYVLIHQQEYVTGITG

SEQ ID NO: 424682 - protein, 324 aa, unidentified
MTDAVLGIDVSKNTFDTNLGAGIKARSQSFANSPDGWHHLIAWLGEHKIGQVHACLEATGRHGLGIALALHEAGHVVSIVNPAQIRDFARTKLGRNKTDQVDAVHIRQYAELFKPRPWTPPSPAMRRLCELQTIRAGTVAGLTEWKNRRGSGMADDLALSLVETTIQHFTSQLKVVDQAIAETIDNDLELSAKRDLLVSINGVGEALAGIVLAELPGPDILGSSAAVTAYAGLNPQQHQSGISVNRPVRISKIGNAVLRTALYMPALSAMRYNPAVAALVDRLKAQGRLKGKQIVIAAMRKLLVLCFGVLKTGKEFDPAMAMGK

SEQ ID NO: 424683 - protein, 447 aa, unidentified
MSQQFKHLNPNAAGIDIGSESHFVAIPEGRDSAIVREFSCFTGDLNRLADWLVQCGITTVAMESTGVYWIPIFEILESRGLEVKLVNARHVKNVPGRKTDVEDCQWLQQLHSYGLLSGAFRPAEQICVLRAFLRQRSTLVQYASAHVQHMQKALTQMNLLLHNVVSDITGVTGMKIILAVLAGERNPQKLAALRNCRCNNSEASIAKSLVGNYRKEHLFSLRQAVELFQFYQDKITECDREIEHLLAQFDAKTVASAAVKKKSKPRKGEPCFDVAGQLFRMTGVNLLRIDGISSLTALQVIAEIGVDMNRWPSSKHFASWLGLCPGNKISGGKRLSGKTRLCANKAATALRMAAQSLYHAKCALGAYYRRQKARLGAPKAITAVAHKLAKLIYNMLKYGNEYVDAGQDYYEKLYQAKVIQSLRKRARDLGFELTENSSKNNTLQVVT

SEQ ID NO: 424684 - protein, 407 aa, unidentified
MAHKMAGIDVHKKLLVVVVVEATKPDVVLQSYRFGAGSAELSCLLAGLQEHQVVEVVMESTAQYWKPVWMELEPHVRLHLAQAYSNKAPKGRKSDLADAKRLVRRFVAGELMLSFIPEPEQREWRMITRGRLPLVRERVQLQNQIESLLEEGRIKLTSVVSDSLGASGKRILRALADGQTNPEMLAALGDKSLKCSFAVLVDALSGAMRDIHRRLLAQHLDRIEWIDRQIGELDKLAAGQMQSYQEVVARLIEVPGIGAAAAQEILAEIGPQAEAFPSSQQLASWIGVCPGSNESAGENHSGRSAKGNRFLRRVLCQAAQAAARTNGSHLQVIFKRLVVRLGYVKAIWAIAHRICKIIWNILHQGARFIEFSEARNPQAVQRAINHHLRALRRLGYSIPNVVEVLPA

SEQ ID NO: 424685 - protein, 356 aa, unidentified
MKQVKTLSFAGQDIYCGIDVHKKDWSVCIRDDERELRSFSQPPQPAVLTDFLGRNYPHANFHAVYEAGFCGYWIQQALSHQGIDCIVTHAADVPTSDKDRRQKTDAVDCRKLAKELSEGSLKGIYIPSQQIIEDRSLVRGREQLVQDQTRYKNRILSWLHFFGIIIPEGYKKNTHFSRRFISWLEQLQLNESTKLALQVKLGGLQCIRQQLLLANRNLRKLALSDRYQKQVELLRSIPGIGITNAMIFLTELDNITRFETFDHLCSYAGLKPDIYSSSDTIIIKGITHRCNSLVRESLVESAWKAVAKDPALLMAYKQYKKRMNYNNAIIRITKKLLSRIRYVLLHQTYYVTGVVG

SEQ ID NO: 424686 - protein, 563 aa, unidentified
MNVDQKDALLVSLTGLESQYIQEGVMVQGSGLSRGDKRRNARLARLRELVPASNAILAIDLADEKQAVVLCDHDSRVLARRTVKAKAWRLGPVLAWARQEARKHGFADVTVGCEPTGHRWRVLDQLAAQQDMALVCVQPLLVGRARETEDYTRDKTDHKDAVLIARLVAQLDCYVPERADESWAQLRQLGAYRDRLITTATAAIQQLRDLLECAWPAVLTAAADPFDSITWCAALAVVLERCDGRPQRLARLGPTRFEQAVRREFARWGGRRGPRRRILTAVFTALTDPAGVLAQRLGALQRAKWVLADWRATKTRLAEVETHMVAILDELRLTELVSSIPGVSALGRPPSWLKPATPPASIARALVKHAGLCPRENASGTMTGRSRISGRGRPRLRLAAWRAVWGALPNNPVMAARYRHLTSRAQSAQRRASPSRYRGRAAALDTYHRHPPGDLGRRHRRPHRAARSCLTSPTPNQPNEIGWGQAPLGVEDHLDRHHEQAPPIPHRTRLHAVGASRTPVDRYVETMNGQAPQPLDKNPLRWCRGLLRLLAATYSQSRLRKLM

SEQ ID NO: 424687 - protein, 345 aa, unidentified
MEIRNIGIDLGKTVFHFVGVNARGEVVVRKKGSRTQLLRFTSNLPKCLIGMEACGGSHFLGRALREQGHDVRLMPAQYVKPYVKTNKNDYIDAEACAEAVTRPSMRFVPIKTDDQLDLQSLHRVRERWVGRRTSVINQIRGLLLERGITIRKGRHHIEESLPGILEDPDNKLSGALRVLLTQLRLEMQYLHRQVEESDKLIVRIAGELEPCTRLVAIPGIGPITATATIAAIGNGAAFKKGRGFAAWLGVVPGEHSTGGKQTLTGTKRRGNKYLRKLFVQGAHSVLLQRTKQSAGLSTWLAQLTTRKRAQVATVALANKMARMAWAVLYKGEAYRPPSLPQVIAA

SEQ ID NO: 424688 - protein, 433 aa, unidentified
MGLIVPTVMQPEREDQPSSYDCFVGIDWGSQQHQVYVLDRDRRRMGERVVDHDGASLAQLVAWLWGLSAGQPQRVAVAIEVPRGAIVEGLVERGFHVFAINPKQLDRFRDRHSVAGAKDDRRDAFVLADSLRTDQPSFRRLRLDDPPLLVLRELSRAEETLLEAFRRSANQLRDQLHRFYPQMLQLCSAADEPWLWDLIDLAPSPAHAMLLSEEQVQGVLKAHRLRRLKAQEVLARLQAPALPVAPGAVQAAQAHCRFLLLCLRVLAEQLQACCQQVGALLHTLAEMPGEGEGPSDVAIVQSLPGVGRKITAWLFAEAAQPLAERDYQVLRTHGGVAPVTKQSGKRRVVVMRRGCNPRLRNALYHMARVAMQRDAHFNSVYAALRAKGQRHGQALRSIGNRLLRILMAMLRHRTCYDASRIHREPIVQMGEKI

SEQ ID NO: 424689 - protein, 379 aa, unidentified
MVSASTPASLAETASATLFVALELSRSTWRVALHAPLTNKVSQHRLDGGDADGLLALITRKRSQAEEKLGRPVRVVCCFEAGYDGFWLHRWLYARGIENRVLDAASLLVNRRARRAKTDRLDAAGLLRTLMALERGEAQVCRVVRVPTPEQEDARRRSRERARLVVERGQHTSRIKGLLMTQGIRDFEPTRRDWPARFEALRTPDGLPLAPCLRAELLRECRRLWLVMEMIAEVEAEQKAVAEAEDGPAARLAQLRGIGLTFATVLGNEVFFRVFRNRREVGGYLGLAPSPWQSGAVRRDQGIAKAGNSRARRTAIELAWLWLRHQPESALTRWFHERVGSSKGRMRRILLVAMARKLIVSLWRYVTVGIVPEGAVLKV

SEQ ID NO: 424690 - protein, 343 aa, unidentified
MGDVITIGVDLAKSVFQVHGVDAEGTVVVRRQLRRRQMLPFFEELPPCLVGMEACSTAHHWGREIERLGHRVRLMPPRYVKAYVKTQKNDAADAEAICEAVTRPTMRFVELKTCEQQSILMLHRTRQLFVRQRTTLINAIRAHLAEFGIVAPIGRNGVEKLLQTIGDGQDARIPDVARTCLEALAMQLHLVNRQILEADRRVLAWHRTSEASRRLDRIPGIGPLIATALVASVPNPQAFKSGRDLAAWIGLVPKQNSSGGKERLGGISKHGNRYLRTLLTIGALSVIRYAETHGTAHRPWLARLLERRPAKVAAVALANKLARMAWAVMARGEVYREPKVQTA

SEQ ID NO: 424691 - protein, 344 aa, unidentified
MTIMMLGIDLGKNICSVAGLDSDGNVVLRRRMQPKTVLSFASKLAPCTVAMEACCGAHYLGRLLAEQGHEVRLMSPEYVRPYVKAQKNDDRDAEAIAEAATRPTMRFVELKSQAQLDVQSLHRARSRLVGARTTLTNQLRAILLERGTVIAQRRHKLEQAVDALLADPDFMSGSRILRLLADMRQEWIDLDRRIGALDREFVELARDNVAARRLTSIPGIGALNATALVAAVGDGATFAKARDLGAWLGLVPRQHTTGGKPRLLGISKRGNKYLRTLLIHGARAALPSLARSQTTLGVWLRNLLARRHRNTVVVALANKLARIAWMILRHEVTFQANRATAMAA

SEQ ID NO: 424692 - protein, 341 aa, unidentified
MEEYIGLDVSMKETAVSIRRDGKRVWRGKCPSDPKLIADLIRKRAPSVKRVVFETGPLSVWFYHALCAEGLPAICIDARHAKAALDMAPNKTDANDADGLAHLAEVGFFREVRVKGFDSMLTRTLVAARTRLVRICTELSNQIRGLMKTFGLVVPAGKGSTFEKNVRSLLVGQDGLAAILLPMLEAWRGLRIRAMELGRQLVAGARQNQPCRILMSIPGVGAITATSFATAIEDPANFKNSRSVGAWLGLTTRRYQSGEVDYDGHISRRGDRQVRGLLFEAATVILTRSSAESSLRRWGLKLRERVGFKRAAVAVARKLAVIMHAMLKTGTFFDRSAGAAA

SEQ ID NO: 424693 - protein, 492 aa, unidentified
MARLAQHSPRLESEFWPTWAVVFRKVDIGMPKTHARASKPDSEEEVSGLPVLRPKVAGIDLGSETHWVCAPSVDGSRREVEKFGATTPELGRMVEWLKARQVESVAMESTGVYWIAPHEILERHEFEVVLVNTRELARVPGRKKTDRVDCKWIQRLHGCGLLTGSFRPKEQVCMLRTLVRDQGNLVAEAGDWLRRMQKSLDQMNVRVHRAVSDLDGVTGMGIVRAIVKGERDARQLAKLRDRRCQKSEEEIAEQLSGHWREDHLFSLQQALKMYDAVQERIAEYERETLRKLGEMEREECREQEAPKLNNPQKAKAIGKRGEEPMRQALYRISGVDLTGIDAIGVETVKVVISEYGPDLSHFPTEKQFVSHVTLAPHKAMSGGKPVKKKKRGSASTRVAGALRMAALSLRHSDTALGAYYRQIARRIGADVAVFASARKLATLIYRLLRWGQPYVDEGAAAYETRYQQGRLKRLAGMAKDLGYQLTPKASQT

SEQ ID NO: 424694 - protein, 411 aa, unidentified
MHNRQNYLYVGVDLHKEHHTAVIINCWQEKLGEIQFENKPSTFSEFLLEVETYVSNGLSVVFGLEDVGGYGRALAKYLVDHEQVVKEVNPALSFLERKSQVMIQKNDSWDAECVARILVNKFNQLPDAKPNDLFWSIQQLVSGRNALVKAQSALKNQLHIQLNHHYPSYKKFFSELDGKTSLAFWQQYPSPSCLEGTNIKRLTAFLLDVSNNTCSVKKASEILKLVKEDGHTMKEYQETRDFLVRSIVRDIEFKKTEMKYIERELKQLVNLLDYQLETMPGIELVTASALIAEIGNVRRFPNANKLARFAGIAPVYFGSGGKGKTHKSKQGNRALHALFYNLAVQQVQVAKGSKLPRNPVFHAYYQKKLKEGKTKGQALVCIMRRLVNIVYGMMKYKAAYELPVVEEKEVV

SEQ ID NO: 424695 - protein, 409 aa, unidentified
MLFVGDDWAEEHHDIELVDEAGRRLAKTRLPEGIAGIGRLHELLAAHVAEDAEPDQVVVGIETDRGVWVRALVASGYRVYAINPLQVARYRERHSTSGAKSDAGDARVLAELVRLDRAAHRPIAGDSDLAEAIKLVARAHQRLIWDRHRQLLRLREALREFFPAALDAFDDLAAPDALELLQIAPDPASAARLSRARIRGALGRARRRNPDQRAALVQTALRAEQLGQPPVVTGAYAAIVRSLTAVIAALNTQISVMEAQVVAHFGRHPDAECYRSQPGLGLVLAARVLGEFGDDPGRYAGARCRKNYAGTSPITQASGKRRVVLARYARNRRLADALHQQAFCALTASPGARAYYDSLRARGIGHHAALRQLGNRLVGILHGCLKTGTTYDEQTAWAHHSTHQHHAAA

SEQ ID NO: 424696 - protein, 407 aa, unidentified
MQGSIITLDVSKGSCHYQGFIRKNRPSTKTRILKFTKKSFAELSAYRERLAIKAGQEDIPFIFEATGVYHKPLQKYLDDHGFTYYIISPLMSARYRKLELHSNKTDPLDCANIAKVFYEYDKLRVYQRMDKEYESLRDMNRNYEDMLVHLRKYKVRFKSMLDVIFPYYQKCFKNDGIYADLPLILLKEYKHPDIIHQTSEDIMVKKLSKLCPKHQTGYIRNKVQKVKELAEDVYSGCESTDIYVELFTELIETLQKQMKECDEQLIKIIETAAKSPYFDLIRSVVGIGDNLAARILAEIGDINQFDTRNKLISYAGLDPMIRQSGKKDGIHLSVSKKGNRYLRCLLYQAASANYRLKKHDVIYRFNQKKRQQSNPLNSKAANTATAHKILVIVYGMCKNGTYYNPCE

SEQ ID NO: 424697 - protein, 346 aa, unidentified
MFAGVDSHKDTLALAVIDDNGRPVLTRQIANEASGFTELAALALEHHVERLGIEGSTNFGWAAAMHLAEAGVTVVEVPPLMTSRERLSRPGQGKTDPVDAVAIARITAREDNLPAVRPMEGLPADLRVLMDYREQLIAERTATANRVHTDLGWLHPGYQHQLPKLTNPAHPQAAAALLKGDSSVRAAITRSRLQRMIAITTELAELRTQITDLVAASKTSLTKIYGAGVFVAARILAEVVDVRRYPSRYHFAAANGSAPIPASSGRTSRYRLNRGGNLQLNRALYTIAITEIRAETEGRAYHMRKRAEGKTGREALRCLKRRLSDVVYRTMRADLEPAKTPIPAAA

SEQ ID NO: 424698 - protein, 370 aa, unidentified
MLDTTTFVGLDVHARSIKAVSLDVMTGEVRCATFGYDAGAVAEWVRSVDPRARCVYESGVTGFDLQKRLSGLGVDCVVGAVSKMIKPSADRRRKNDRNDAEFLARMLSVGNVVEVWVPDDECEAARDLTRALEDARDDLSRSKQRLSKFLLRHGLVFDERTPTGRRKGNWTRAHWSWIESIRFAEGADNEALAYYVDAVRRAAEDKARLEGLVEAETRKPRWRRRVDSLRCLKGVDTATAADLVFEAGEFSRFRNARSFAAWVGLTPSEHSSGESDRRGAITKAGNKHLRKTLVEAAWHYLTCSGRPKGLAKGQAPDRGARRHAAKGVRRLVERREALLARGVHGNKANVATARELACWVWAVGLMAEEA

SEQ ID NO: 424699 - protein, 355 aa, unidentified
MKKVLKQVLGVDVAQGELVVTLGRMFDDLRVDLYAHKVFRNTENGILTLLDWVNKLTDPEMKVRFVMEATGVYHQKFAFYLYAENYEVSIVLPNKISNYMRTLENKTITDKSCSEAIAQFGLERNLDRWHKPKKTYRSLQQLTRERDQIVMERVMVKNQLHAEQSEAEPNERSVARLNERMRLLNKQEKEIKSDLTEIINSDRILKSEITNICSITGIGELTATIVLAETNGFELIRNKKQLTSYAGLDVKEKLSGTSVKGKPSISKKGNRHLRKAMYLPALSAVKHDENFRNLYVRIVSRQGIKMKGLVAVQRKLLEMIYVIYKSKNEYQKDYTDLKRSSALSQKDQYATQTGS

SEQ ID NO: 424700 - protein, 430 aa, unidentified
MKSNTQNAKIEAITEKTLVLGIDVGSETHYARAFDYRGIEYSKKPFKFSNTEAGFATFKEWILDLKERHEKDKVVPGMEPTGHYWFNLGKFLQDNEMKLVLVNPHHVKKSKELDDNNPTKNDRKDPKVIAGLVREGRYMIPYLPDGVYADLRTASNIRFQLQVELTRIQNRISRWFNIYFPEYKTVYGKPDAKSGMLILKAAPLPEDILTLGIDGVNQIWRDAKLRAVGKARAKTLIEAAEHSVGSKEGAVSARMEIRMLLEDYESRNTRLQEVMVLIEELVRKIPMAEKLLEIKGVGIRTVSGFLAEVGDISRFNNPKELQKLAGLALVENSSGKHKGETTISRRGRKRLRYLLFEVAMSLVAKNPEFRELHNYYTTRRLNPLKKMQSLMAIAAKLIRVFYAMLTKGVDYDPKKMVSDIKRPAVYLQAA

SEQ ID NO: 424701 - protein, 360 aa, unidentified
MKVTTVGVDTAKNVFQVHGVDEQGHRQFARQLKVSQVIEFFTRLAPCVVAMEACGSSHYWARRLSALGHEVKLIAPQFVKPYVKTNKNDAADAAAICTAARQPDMRFVAPKSVEQQAVMALHALRSGAMKARNALACRLRGLLLEFGIAIAKGIGHVRKRIPEIVEDAGNDLPGFLRVALQAEYDQMKLLDSHAASLEQQIQQWHRQCAASQAIERISGVGVLSATAYVASMGDAGAFASGRHASSWVGIVPKQNSTGGKTRLLGISKRGDKYLRTLLIHGARSVISSLKRRLQSGKDPASFNKRERWVLDVMQRRNPNVAAVALANKNVRTAWAMLAYGRAFEPDHVSISPRARMSMAG

SEQ ID NO: 424702 - protein, 343 aa, unidentified
MEYYAGIDVSLESSSRCVVDATGRIVRESKVASEPEALIAWLQSLGFDLARIGLEAGPLSQWLYAGLKQAGLAAELLETRHVRNAFKIMPVKTDRKDARGIAQLMRMGGFRSVHCKSLPAQETRSLLGARKLLQSKLHDIELSLRGTLRGFGLKVGKTTPKTFEARIRTLVADHPTLTLIAEALLRARAVLLDEFIKLDKKVHALARQDPRARLLTTAPGVGSMVALTYAAAIDDPARFRSSKTVGALFGLTPKKYQSGETDITGRISKTGDAAVRTALYEAANIILERPVKGGWLKAWALGVAKRAGMRKAKVALARKLAVVMHRMLVDGTPFDLNRVTATA

SEQ ID NO: 424703 - protein, 419 aa, unidentified
MAFKILRKNCCGLDIHKTWIFACIGITDSNGRTEYKQARFSSFSNGLRDLADWLAKYSCSDVCMESTGKYWIPVFNILEKTCWVTLAHPKYTKPQKGNKTDRKDAKWICDLYMCGMVKPSFIPPPDIRQLRDLMRYRVKLTNMLTGEKNRAQNCLTVSNLKLDDVFSDVFGKSSRSVIQYILEHPGEQFDVTPFIHRSCKHPVEEIQAAVDGVVSREQAAKLKECLLHIDQLNAHRERIEAEILRLAEPYPYQLELIRTVPGFAAAPLTAVALISEIGVDMSVFPSAKHLVSWAGCCPRNDQSNKKVKSTRISRAGCYLKPLLVQIANAVIKSDRHPECRERYRRIKARRGHKKAIIAVCRMLLTAIWNILSKLEPYSAKGYLSDKLTEHSVVISKAEGLALLRKRGYIFKDELAVESG

SEQ ID NO: 424704 - protein, 366 aa, unidentified
MRSVPHDAEAVYVGLDVHKDSITAGVLQPGRQTPELERFFHDEVSVRRFLDRLGDRRRLRVCYEAGPTGFELARLLEALRVDYLVAAPSLIPRAPGDRVKTDRRDARRLTRLFQGGQLTAIHVPTRQEEAVRDLCRTRTDMVIDLNRARHRLSKFLLRHDHPYRGGTEWTDRHSRWLTGIRFQDPALRATFGHYRGVVTTRTAELRAVETDLVPWCDREPFADAVHRLGAYRGITHLGALSIAAEVTDWRRFPKAGTFMGFCGLVPSEYSSGTHTTRGHITRTGNTNLRTHFLESAWSYRHQPAIGLTLARRHQGVEPHTLARAWQTQLRLCARFQRLTHRKNAAKLVAVAVARELAGFCWAEMTA

SEQ ID NO: 424705 - protein, 415 aa, unidentified
MALKIVYKICCGIDVHKTFVVACIASTDSKGVTTYEHHRFSTYTKGLKDLLQWLLKHNCKDVCMESTGKYWIPVYNVLENDCTIVLAHPKYVKAIRGKKTDKRDAKWIADLFKHDLVAGSFMPPADIRQLRDLMRYRFKLTCFKSSEKNRLQNCLTVSNIQLGNVVSDTFGKSAQAILDKLLENPADTSFDLEPLVYKSLKKKLPELRDAIDGYITPEQAGKLKVIKAHYENLESRKAELEELILALAAPYQQELAILQTAPGISSIFTAIGIISEIGTNMEAFPSAKHLCSWAGLTPTNNESAGKKKSVRVSKAGCYIKPLLVQCANAVITSKKHPEIRNRYLRLKKRRGHKKAIIAIARMLLTALYHMLKNGENYNAELYRKSDLPSVDREITVEQAIIIARKQGYKIKSATA

SEQ ID NO: 424706 - protein, 420 aa, unidentified
MKEITETGNKVKGRVYPLDNISWVVGIDIGKEKLSCALMKINKALICRFDIEGSLSGYNGLMDRVKRETRGNGKVVFALEPTGHYWMVLGQFFEDHNQSYVLIHPLVVARSREVHHLNKSKTDSLDACLIGELACDKSVIRTQIPEDHWATIRFYAREYIDREKEIAREKNRIMSYLETTLPEFMKIFPRPLCMSGRACLRVLADFKQALKGNGEHFEMRIRKHLACKRLMTSRIRRLHDMLQRGDVLGLRAGRQAMFFRIIHSLDRLEVFEGQEKAAKQAMLDVYEESEYKEYLDSIWGTAPAANALILGFMGDPALYDSPASLVKLAGCDPVPNESGKFKGRTSIFHRGRSLLRKAGDRVSFLLEKRSSFFRACFNRLMRRQKNKLTKRQARVACINKYFRIVWVLCHYKVHFNPALA

SEQ ID NO: 424707 - protein, 340 aa, unidentified
MKITTIGLDISKTIFHMFAVNQAGKLVKKRVIKRADLLSIFAQLEPTLIVIEACGGANHWAREFIKLGHQVKLIAPQYVVPYRRKNKNDFNDAEAIAEAAQRPNMTFVPIKSVEQEDIQMVLRMRKRHVKTMVAINNQVRGFLAEYGLCAAKGKTALAARLPKFIDDESNELSTFARESFRELYADFVAAQEKVEFYTKKINVYTRNNPICKRVKSVIGVGPMTAAELYASIGDGKMFHNGRHFAAWCGLTQRQNSSGGKTMLSGITKKGNPHLRSSLIHGARAALQYVDGKDDKLSRWAYELKCRKHSNVACVALANKLARIAWSVIANEEDYRLEYAA

SEQ ID NO: 424708 - protein, 352 aa, unidentified
MPKHKYVGMDVHSATTTIEILNEKGKSLATSTIETDGGVIEDFIRGLTGTIHVTFEEGVHAAWLYEIIQPLVAEVVVCDPRRNKLIQSGNKSDQKDAQKLAELLRLGSLKPVYHGDCGTRRLRESVRAYNTLSRDCLRVMNRIKAMFRGRGIDCKGTEVYRALHRQQWLERVGDPAAIARLELLYQELDCISSLHELARREMVNQVRSHNAYKILKQIKTLGPVRVAQIIGVVRSPFRFRTKRQFWPYCGLAVQTASSADYEIVNGKARRKAKRPATRGLNRNYNRELKNIFKGAAMLGTVTEPFKQFYDGLIAGGMKPEMARLTLARKIAAITLAVWKKGERFDATKLTKS

SEQ ID NO: 424709 - protein, 395 aa, unidentified
MFIVGIDIAKRSHEAIIIAEDGQVVRKAFSFRNNCTGYNLLLEQVRRLTLVKSQIVFAMESTAHYWLALYARLLKDGYTVMVLNPIRSHSLRELYIRKAKTDARDSLIIADLVRFGRCKASNVPQDKILALRELCRSRAYLVDMAADLKRKLIALLGRIFPEYESLFDSVFSKASIAVLSKYSTPQKVKNANLRKLTDLLMESSNGHFGEWKAHQLKEAACSSFGIDDSGGVYSTLLGMFLEQILSLTAQADSLEKQISIFFQEFNNPLTSIPGVGTVLAATILSEIGDITRFSSADKLLAYAGLDPSVKQSGEFKSNQNRMSKRGSPYLRRAIWLASTVAVHRDPMFQTYYEKKISEGLHYMNVIGHVSRKMTAVIFAVLRDGQPYQPILQSAG

SEQ ID NO: 424710 - protein, 401 aa, unidentified
MKLTVGIDWAKEEHAVCVLDAQGTVKARLTVPHTKEGLGALCRRLTKFAESAELEIALERPSGLLADTVVAAGFTLVPIHPNVVKASRPRYSTVSAKDDRGDAYLLADLLRTDGHRFRPLKPLSDEVRALRTLVRTRTDLVAKRVALTNQLRSSLEDYWAGAAVIFCTLDSPIALAFIERYPTPQHTRRLGEKRMAGFLSKNRYTGGRSPAELLKRLHAAPLGEAGELETEAKAQAVLAYVSAVRAIAAGIRRLTSLIELEVLRLPTGKVVASFPSAGKVNAGQILAEIGDDPSRFQTEAQLAAEAGVVPVTHASGKSRGVNFRRACNKRLRFAITTWANNSRRTSPWAQDTYERARARGCNHPHAIRIVSRAWIRVLWRCWRNGQPYDLEQHAGALRFAA

SEQ ID NO: 424711 - protein, 342 aa, unidentified
MDTFYVGLDLGSSNFHQVAVNGAGVSKVDREFPTSEANLIKAFSDLKGETEVHLEAGELAPWASSVIAPLVTRVVCSHPQTNAWIAKDSDKSDRVDAYKLADLLRLKRFKEVHYAPQQSRREFKTLVQHYAELTAQQARLKTKLKARLRMQGVIVTGERVFSAAGRKPVLAAVKSSAVRTAIKQLYAVLDQSVESQTEARLLMLRAAQAFPEIKLFRTAPGVGPIGACRFSAYIHTPQRFSTTRKLWKYCRLSVSHRSSNGKPLRRPRLDRFGCGRLKDVSRKAFDVAVRSRQDNGFKRAYQRALETTHDATQARLTVQRKIVSTLRAMWLTMTPYCDELMP

SEQ ID NO: 424712 - protein, 437 aa, unidentified
MVPHAGGAVEEEKTMDILHERVSGLDVHKNTVVACVRIMTGKETTRECRTFATTTDGLLALRAWLSECRCTHVAMEATGVYWTPVWRILSEGDFELIVANAAHIKNVPGRKTDMNDAMWLADLLAFGLIKASFVPTEPMHELRSLTRTRKQLVREQTRHVQRIQKTLAEANIRLDSVISDIMGASGRRIIEAMIAGVRQPHKLADLAGKQIKATPKELYDALHGRLTDHHRFLLDLHLRQWDGLDTTIRTIDLEIDQRIDRMDEVRAAGASPFRTLIGNADTVPGVSAVSAPAILSEIGCDMSRFPSAGHLLAWAGMCPGQNESAGKRKPSRLRKGAPWLKTMLVQCAWAAIRKKGSYYQAQFLRLRHRRGPQKAICAVAASILTAIYHMLKDGTEHHDLGADYFDRRSTETKAKHLVARLTKLGFTVQLQSSTKAA

SEQ ID NO: 424713 - protein, 341 aa, unidentified
MQITTIGLDIAKNVFQVHSIDAAEKVVVRKQLRRGQVMKFFAALPPCLIGMEACATAHHWARELTKLGHEVRLMPAKDVKAYVKRNKNDAADAEAICEAVRRPTMRFVGAKSAEQQGRLMQHRTRDLLMRQRTQVINALRGHLAELGIVAAQGREGLKQLLTIIADEKDARLPIDARASLIVLAAQLQALHTMIGSIEKRLTVQHRANESSKRLESVPGIGIIGASAIAATVTDPNAFRSGRDFAAWIGLVPRQDSTGGKQKLGPISKQGDRYLRRILVVGAHSVLRRAKQNPEKYPWLTKLLARRPFKVVAIALANKMARIAWALLARGGTYRVPALAAA

SEQ ID NO: 424714 - protein, 334 aa, unidentified
MIDVDLIYVGIDVSKANLDVCVGVMGSVSRLNNDEAGRDALCRMLKPLKVGLVVLEATGGYEFACAAALQSAGVPVAIINPRQARDFARAMGRLAKTDRIDAQGLAHLAQVWSARPDAAHLVKRLPDAQQQRLAALVSRRRQLVQMRTMEGNHLGVAHRSAHKSIKAVIKSLETQIRRIEADLAAHLKLHHADVSKLLSDVKGIGAATVAILMAELPELGTLTGRQVSALAGVAPYNHDSGRLKGKRCISGGRATLRTALYMATLAATRFNPLIRTFYQRLLAAGKPKKVALVACMRKLLTILNAIVKSGSPWNENLHTQEAKNAWLLRQLLIR

SEQ ID NO: 424715 - protein, 312 aa, unidentified
MDATVIGIDVAKDQLDVCVRPSGESFVVARNGAGIEDLTERLKKLAPRVVAIEATGGFETVVAAGLAAAGVPLLIVNPAQVRAFAQALGKRAKTDPIDAAVIAHFVEATKAQPRPLPDETTRLLADLVTRRRQIIDMMIAEGQRDRRLANKRLKSSIARLRRALEKELAEIDSELDDHVRGSPAWAAKEDLLASVPGVGPIIARTLIAELPELGSLDRRKIAALVGLAPWTRQSGQWRGKSFIGGGRKSVRTALFMAAMVAARHNPVLKTFRDKLVAAGKPKLVALIAVARKLLTILNALLRDNQRWQPKTA

SEQ ID NO: 424716 - protein, 411 aa, unidentified
MDVFCGIDWAEDHHDIALTDRDGQLLARRRISDDAAGLASLLALLAEHGDTAEDLVPVAIETPRGLLVACLRATGRKVCPVNPMAVARYRDRHSIAGRKSDHGDSFVLANVLRTDMHAHRPLPADTELAQAIAVLARAQQDAVWDRTTAHNRLRSHLREYFPGFLAAFAGVRDGIMRPEARTILAAAPAPAGAAALTLAQLRTLLKKAGRSRGIDTEAGRLHQAFRTEQMRQLPLVEQAMGRQALALLRQLDAACTSADELEHAVTESFNQHPDAEIITSFPGLGILTGARVLAEIGDDRSRFTDAKGLKAYAGAAPITRASGKTRSVTYRRVKNNRLNAVGYSWAFSALTASPGARAHYDRRRDDGDRHAAAQRNLFGRLLGCLHHCLTTGCEYDETTAFPNPSKLPAAA

SEQ ID NO: 424717 - protein, 349 aa, unidentified
MTIVEKTCPVTAGVDTHADVHVAAVVDGVGGVLGIESFTTTEAGCVQLIGWLRAHGSVNLVGVEGTGSYGAGLTRQLERAGIAVVEVDRPNRQVRRREGKSDPVDAVVAARAALSGQALGLPKARTGDVEAIRVLMVARRSATSERIAALCQPCHLCFTAHDQVRRRFERLSVAQLTAAAAALRPRPGDTVRYSTLLAMRTLARRVAYLDDELDNLAVVVRPLVERSSPGLLAMHGVGYDVAAKLLVAAGDNPERLRSEAAFAHLCGVAPLEASSGKTRRHRLNRGGDRQANNALYRIVITRMASHPPTKIYLARRRAEGKSTGEIVRILKRYVAREAFKHLRAGAVTD

SEQ ID NO: 424718 - protein, 370 aa, unidentified
MKSIIYIGMDVHKNTYSLCGIHSSTGEIIAQTKCGADVENILKFIDSAKERLSQGDEMEIVTGYEAGCLGFSLYHELAYHDVSCVILAPSTMHGSVKNKKVKNDRMDAFNIATNLMYNSYKAVHVPTEHDNEIKEYIGLREDVISSRKRIKQQISALALRHGFRYEGKSNWTIAHIKWLETIELPEITRETLNEYLKVYDYLNERIKKYDERIEEFSHEEEYEEPVSKISCFKGIDTLSAMKIHVTVSDFQRFPTAKAFMANLGMLPGENSSAEKHSNTPITKMGNAMVRKTLVECTQALVKGNGKKSKALKKRQKGQDDAVIAYADRAVERLQKRFKRMVLRGKPYNVAIMAVARELAGFIWGMETGRI

SEQ ID NO: 424719 - protein, 427 aa, unidentified
MSVTQNEKIRQVTDTTMVIGVDIASELHWARAFDWRGLELGKTVKFENSAEGFNFFLRWGSELTVEQKKDSVMVGLEPTGHYWFTLAAHLQGGDFKLVLVNPYHVKRSKELDDGHPSKSDKKDPKTIAKLVLEGRYVYPYIPQGLYAELRIAMNCRWRIRKELASLQNQIQRWLKIYFPEHSKVFGRFTGAGSMALLHSAPFPSDLISLGVEGISGIWKQMKLRGIGRKRAQRIYEAAQTSVGCTTGMEAARMELQILLEDYDAKLQQYERVMQVVENLCSQIPAVAELLKIQGLGLVTVAGLFAEIGDIRRFESPRQIQKLAGLAITENSSGKHKGPTEISRRGRSRLRAILFRAAIPLLAKNREFQLLHRYYTTRQNNPLQKIQSVIAICCKLLRVFYALATKDCAYSPEKVLADIQRNQPLKAA

SEQ ID NO: 424720 - protein, 412 aa, unidentified
MEGETVIAGVDTHKDVHVLCLLDGLGRKIRSGSFGADPEGYDGLAEAIGDPGSCMVVGVEGTASYGAGLTRRLVELGYNVVEVLRPKRDKARPGEGKSDPLDAERAARKAASGRGCSVPKSQDGWVEAVRQLYVARRLAVATSTSCVACAKSMLTTAPGALRERFRGRERPKDLMPLLARGRKAGDALEESVLASLRSVAAVWKEARSQVESLDERIRALLEANAPALLGVEGCGTTTAAALVVAAGDNPGRLKGEAAFSMLCGVSPIPASSGKTERHRLNRGGNRQANWALYEIAIKRMAYDERTKRYVARRTSEGKSRREAVRCLKRYIAREVYRVLMDPNPDGAAPEGPELAKMRKAMRVTQKQAAAGLGMSAASLGHLEHGRRRSTKLERRYYELLCELKGALPQTAY

SEQ ID NO: 424721 - protein, 320 aa, unidentified
MQTPSVVLNIGADVAKDAIVVACSEGSFSVREVANQRAAVLAFLRSLPAGSRIGVESTGTYHELFAEAAHQLGFLVFVLNPKDTRHYAKAVGLRGKTDRVDAELIARMIAHEHTKLHAWIPPTPQQREIDRLIKRRATLISLREAVAMSLHELAGFAEELKALRTHFNQLIARIDLRVKALVEASPERKQNFSRLCTISGVGPVVGTALVNTLERVPVKSADAFVAFTGLDPRPDDSGQHRGKRRLSKRGSAELRRLLYLAALSAVKTKPWRPLYEHYRAKGLSSTAALVILARRIARTAWSIYTYKTEFDPARLTSPLT

SEQ ID NO: 424722 - protein, 341 aa, unidentified
MNTLYIGTDISQTSFVGAAWCDGKAQLFGTYANDDAGFAAFSERVEQVRQTSQATTVHLILEPTGGYELKLALYAYGVGWLVSKPNPRQLRQWAQGMNFRTKTDQVDAKMLAEYGFRNQPAPQALMARAVRELDYLLRRRQDLEKTLRMERNRLANAQVHPDLPTTVLRNIEQTIGLLETQHQAIEQAIDHLVKGDATLRQQKRDLLSIPGVGPKNVLPLLVLLARFHALTQGKGTAKQLTAFLGLDVQFGDSGTSVHKRPVISKQGDRAGRTLLYMGALGGVRGHNVLRIFYQLLLSRGKAKKLALVACARKILTWAWAVFGSNTPFDPARFPHLTALPI

SEQ ID NO: 424723 - protein, 453 aa, unidentified
MAARNARVSRKPGKSRAALTITHPNAAGIDIGSASHFVAVPPDRDDEPVREFPSFTVDLNAIADWLEACAVDTVAMESTGVYWIPLFELLESRGFTVLLVNARHVKNVSGRKSDVLDCQWLQQLMTYGLLSGAFRPAEQVCVLRALWRQRGMLLKSQARHVQHMQKALTQMNVQLANVLSDVVGETGQKILRAIVAGERDGQVLGAMKNARIHASVDEIAKSLHGNWRGEHLFALKQALDAFDFIGTQLAECDLEVEQQLHSLQAHTGEPAKGKKRGRARNAPKFDLRTQLFKMCGVDLTRIDGIDVTTALAVVSEIGADMSRFPTVGHFASWMGLCPGTKITGGKVMSSKTKRCANRAAQALRLAAAALRTSQSALGAYFRRMCSRMDKPKAVTAAAHKLARLIYTMLTKGEEYTDQGQDYYEERYRERVLRQLSQRAQKLGMQLVAAEQPT

SEQ ID NO: 424724 - protein, 379 aa, unidentified
MEKDIRHAGFDVDSEKIAVAVAEPSGEVRSLGSIPYTAEAVHRLVKRLGPARRLKVCYEAGPHGYGLYRQLSKLGVHCDVIAPTLVPVKSGDRVKTNRRDAEKLARCYRSGDLTPVWVPDAAHEGLRDLVRAREAAKKDQLRARHRLGKFLLRRGLRGAAGVRSWTTKHLRWVKTLHFELPAQEATFLDYLHEVEHAAERVVRLERAIDQAIESASVEIRALIAGLQALRGIRQVSAATIVAEVGPLSRFPRPKQLMGYSGMVSSEDSTGSSVRRGAITKTGNSHVRRVVGEAAWAYQHRPSMSPILKKRQEGLSEEVKEIAWKAQYRLCSRYRRLMGKGKVRQKVVTAIGRELLGFIWAIGVQVESEVRSTKKRSRAA

SEQ ID NO: 424725 - protein, 432 aa, unidentified
MNTPPYDLVIGLDRSDRKADLHLIGVADNQRRCQTIDTSPEALWEWLLQLRQEHPQGRIALCLEQPAAHLIAYLEAYEWITLYPINPLTLQKYREAFVTSRAKDDTKDARYLAELLLAHHDKLKAWAPEEEPTRAIQQLVFHRRSVVNERVGLTNRLKDLLKQYFPQALVLCGEDLWRPLATRFLLKWPSLQAVRKAKTEKLKEFYYLNGSRSAKLMEQRLSLIDKAVPVTDQTAVLESFILRVQLICRQLQDVVVTIKTFDLRITEAFQEHDDHEIFSSLPGAGPVLAPRLLATMGSQRERFESAANLQNYTGIAPVTKQSGGKCHIHRRYLCPKFHRQSFHEYAKESILWSRWAAAFYLQQRTKGSYHHAAVRALAYKWQRIIWRCWQSRKPYEEKTYEAALRKAKSPLVKLFDQVELGKSPFKNKVNKN

SEQ ID NO: 424726 - protein, 367 aa, unidentified
MTQDSSFFYVGIDAHKDALAVAVLPEHADDPEAVRTLPNDPTAIRRFFRRLRQRGDASATYEAGCLGFVLYRQLTKLGIDCVVAAPGLIPVRPGDRRKTDRLDAIKLARDLRARELTPVRVPTVETEALRALTRTRDAMRKDVVRMRHRILKFTLLRGKAFREGQNWTNAHLRWLRQLDLGLDEDRRTLDFLFDELQHRCHSKDLLDERIRRRGQEEDLRQDVRALRAYRGVGDLTAVSVIAEIGDPRRFRHANQVASYCGLIPSERSSGQQIRKGGITHAGNAYLRRLLVECSQHYGRPYGSGRALAARRAEAPGRAVAWARKAEKRLKARFRSLAARKHRNVAKTAIARELAGFLWATLHPHMQP

SEQ ID NO: 424727 - protein, 295 aa, unidentified
MEVTTIGIDLAKSEFAVSCADARGKLVVRKQLRRGQVLEFVSRFKRCVAGMEACGGAHHWGRAIGKLGHEVRLMSPALVKPYRTGPKHDRNDADAICEAVGRPKMRWVAAKSVAQQDSLALHRVRAQLMKQRVALSNQLRALLHERGVAARLGAAGLRAGLARALADENAENHEVSGAMRELLVEMSGWLRELEQRISSLSGRIERAAKRDERCTRLMEVPGVGPLSASALVATVGNAREFKRGREMSAYLGLTPRQHSSGGKAVMLGSYPVSVDSVGLGFNVFGCLRRLALLLV

SEQ ID NO: 424728 - protein, 353 aa, unidentified
MKKFVGIDTGKRNIIAIRVADDSKPETLSCGTTADQFQKLKGWVSKTDIVVLEAGNLAFRIARLLIEKGCKVYVLNPSDLATIYNSLKKTDREDALKLARLGQRIPVSELPTVTIPSEKEEFCRRLVTEREHWTKTRTKSINRLHSLFVHAGITDIKKSQLRTVANRQKATELLSDTFLGEAKRTLSVIESAEVVLAEIEVEMKKLLREEKEYTTLAMSMPGIGPQAAFTLFAYIGDGSRFSHPSQVSYYAGLVPRVDVSGDQIHYGRIIKRGCRQIKRIFLQCSWGLISAKEGGPLKEFYNRLYPSKGKKKAAVAVARKMIETFYVMMRNGEFYRDVSTEVLNRKLKLYGLT

SEQ ID NO: 424729 - protein, 341 aa, unidentified
MGQVSIVGLDLAKSIFQAHGADAAGEVVFRKKLGRGRLLAFFAGLPPCVVAMEACAGAHHWGRELARQGHTVRLIPPIYVKPFVKRQKNDMADAEAICEAAQRPSMRFVPLKQEEQQASSVVFRARDLLVRQRTQTINALRGHLAEYGWIVPKGVPHVDRLIARVEDPAEALPPAARTILMVLISTLRTLDQQIAVLDAEIASRARHDPVARRLMTIPGIGPITATALVALAPSHEAFKSGRHFAAWLGLTPRQRSTGGQQKLGAITKMGERTLRRLLTIGASAVIKQAAIRGAPAGSWLDQMLARKPKMLVIVALANKNARIVWALLAKGDVYRAPGVLA

SEQ ID NO: 424730 - protein, 357 aa, unidentified
MENDSTLYVGLDVHKDSIAVAYALGMGEVEQLGKIGTTKTDVDRLCKRLQSKGRQVRVVYEAGPCGYGLYRELVQKGFDCMVCAPSLIPKKPGDRVKTDRRDAIKLVRGLRAGDLSAVYVPGVEDEAFRDLARAWAAAKADLRHARQRLKSFLLAHGVGYTGTANWGSAHRRWISSYSFPSHWQQLAFDEHRRTIEDRLAQCARLEGALREAVLEWRFYPAVLGLQAMRGIQFTTAIGMLSELGDLSRFEHPRQLMAWLGVTPSEYSSGERRRQGSITKTGNSYARKLLVEAAWSYRFPARVSTDIQRRQEGIPKPITDRAWDAQLRLCRRYRKLAERGKNANIAVVAVARELAGFI

SEQ ID NO: 424731 - protein, 402 aa, unidentified
MLYVGIDLHLKQLTVCTRDEQGQIIERRQVSTRPAKVRQFLDELARRPEGYVVIFEVCGFHEWFARLLREEPACKDMVVVQPKHRSKKKTDRRDANQLSELLWINRQRLAAGERAQGVRRVYEPTDDEQQDRRLTSVRQRLGRQRTKTLNQVHYILRRHNLEWERPTKTFQTKKVRHWLKTLPLGEMDRLEMDHLLEQWELWDRQIMQLDERIAVRFETNAAAQLLATIVGVSCYMALAIASRVGDISRFPSGRSLANFFGLTPGSRSSGETQRLGSITKEGSPQVRFLLAQLVLHVLRRDARMRAWFKRIKQRRGAKIARVAVMRRLAVIMWHMLSKQEAYRYGGAPQRTRGDCEQPLTEAELAAHHDAIRKSFAQGTAVAASSPDSPSAALETEAASCRT

SEQ ID NO: 424732 - protein, 476 aa, unidentified
MNKRQGNLQAPDAKPKRRRRNKGMCLEDRPVLEPNAAGIDVGAREMFVAVPPGRDEKPVRVFATFTEDLERLTDWLEQCGVTTVALESTGVYWIPLFEILEQRGIRPCLVNARHMKNVPGRRTDWHECQWLQFLHSVGLLRAAFRPGQDVCAVRTILRHRNELVAAASQHVQHMHKALTQMNLQIHHVISDITGSTGRAIVDAILAGQRDGAELAKLRDPRIKADTETIRKSLEGNWRPEHLFTLGQSRDLYRIYQQQIVNCDLEIEKMLQEFTPRIDPGERPLPPDRKRNRAGSKRRRKNGHPHPEFDLRTEAYKLFGVDISQIPGLEENALPLFSEVGRDMSRWPSAAHFVSWLALCPDNDISGGKLLWRGARRVKNRAGHLFRMAAYALHRSLTPLGNYLRRMKAKLGPQAATMATAHKIAVIFYTMIKNQVEYDETIWDARDAQREKKLQAKLKRQAKQLGYELVPIEPQAA

SEQ ID NO: 424733 - protein, 322 aa, unidentified
MKHILGIDVAKAKLDVSLRLPNGKARSKVVDNTPAGFAALSAWLQKHDVDNLHVCMEATGVYWEAVAEYLVDAGFIVSVVNPAQIKAYGAASMVRTKTDKVDARLIADFCLAQSPIPWQAPPPALRELRALVARRDALDAMRTQEQNRLLVAREVVKAGIEAHLEQLEKAITEVDKAIRQKIDDDPGLKEQSDLLDSVPGLGEKTIPVLLSYYGGPPRFEQAKEAVAFAGVDPRHHESGSSVRGKTRMSKIGHAAIRKALYMPAMVALHRTVWGRVFRDRLTSAGKIPMVIIGAMMRKLIHIAFGVLKSKTPFNPKLHGVAD

SEQ ID NO: 424734 - protein, 399 aa, unidentified
MRCVFGIDVSKASMNIAIVVNKILVKEDKLSLNSKGFKSLNQLVKTFNNPEIVFEATGVYSRRLQFFLDHQKLNYVCMNPLKAKKQLDNLRPNKTDRNDARRLAETQFLLNRLFTYKMNPIYHELMDLSRFYQEIVRDCVVNKNRLHRALQLTFPEIESLMYQPKGSFYWKLVNQFSDPRTVLKMNGSSIEQIIIEKAPDNTSAERTADLTDKLQELAKSAYPSVSSQSSLYYQINYLTHQLIVLDNQKALIIEKMVELAESLPEYNCLLSIPGFGKTTVVSLIGELGDIRRFKSSNALNAYIGIDLRHYESGSYVAADHISKRGNPIARKVLFKAIQNIATVAHYYPNHINDFYQKKKQQSSGRGTKKVAIATMHRLIRTIYHLVKYNQVYDYGTAKS

SEQ ID NO: 424735 - protein, 420 aa, unidentified
MIYAGVDIAKVDHVIGAVDERGSEACGPMGFKNGAAGFERCEAWLEGVAASPADVPVGMEAAGRYWMALYAFLASRGYAVAVIDPLQARAVRRFKGLGGVKNDRVDAGLIAEAMRIGRYDPTRLATDDARSLRTPTRYHQSLKSGLAEVKVQCACLLDAYFPEFSGVFSDMFGAAGRAVLSRGPLPSEVRRRRVDSPRRDISSAARGSRRVDGKAAEIKELAGRSVGIALGERAASLQVRSLVRQMDFLDAECAKIEAEARGLLDRVEPLVLTIPGVSYTTGAQIVAEIGDVSRFRNASAPVGYAGLDSSVRQSGMFDSGGGPITRHGSPYLRRALWLAASWARLHDPSLREFYERKRAEGKCRRVAVTAVARKLCHIVFAVMRDQVPYDPSRPGRDPSKHSVSGSQGAAKSKTKSKTEN

SEQ ID NO: 424736 - protein, 341 aa, unidentified
MHYVGIDLHKRTLVVAVENDRGPLGRTRRFDCRDESAIVKAFRRLRPFRAVIEASSSYRWLYDLLEPLGEVVLAHPLRLRAIVAARAKTDKLDAALLARLLRGGLVPEAYVPPQPYQVLREVTRTWARLGHRATLAKNQMHAVLRCRNLHPPYRKVFGVKGRRWLARQDLGIGGNLVRDELLRRLEHFERERLVLDDHLAMLADDFPQIEALLGLHGIGLYSALLIVAELGEVDRFHDARQVGAYAGLTPRVHQSGEQAWHGQITKQGSRWLRWILVQAAIKIVRKDRALANLYRRVRRRSGKKRARVAVARKLAGICWVRLRAWHRAHANDAAAEAVAAT

SEQ ID NO: 424737 - protein, 405 aa, unidentified
MEIIIDRGCGLDVHKGTVVACIMGTGIKKEIRTYTTVTNDLLRLKEWIQEAGITHVAMESTGVYWKPVFNILEDNFEVILVNARHVKNVPGRKTDVQDSEWLCRLLRSGLVRGSFIPPRDIRELRDLTRHKRKLIQAITAEKQRVEKVLEDANIKLSSIVSDTFGASGKRIIEELIKGKLQAEEMAELSKGRLRQKRGDLKEALVGQVREHHKFMIKVSLKHIRAMEKILSDNERKIQEKIDRQYQEEYALLQTIPGVKGEASTLIAEMGVDMERFPSEEHLSSWAGMSPGNNESGGKKKPGSTTYGNKCLKTMLTEFAWVASKTKGTYLRSKYHSLVGRRGKKKALVALGHKILIMCYHILKHRCAYKELGVDYLDHRRKDKIARSYIKRLHHLGYEVILQEAA

SEQ ID NO: 424738 - protein, 387 aa, unidentified
MTGQTQVSRFIPSDYDIFAGLDVDKRSIAMTVCDHKTLIKSQRLPYSSAQLLNYVGKHFPGQRVAFVYEAGPTGFGLHDDLTANHHTCLVVAPSMVPTAPGQRVKTNRIDSRKLSLGLRGGELRSIHVPSRSYRELRHLVQLRDTHVGQLTATKLRIKALLLCEGIPFPEAPPSSQWSARVVAELRVLPCPEEVHFKLEHLFGTLYFHFNSAAVVQKRIRRFCQNDPELRQSISLLKSLPGIGWIVAAHAVARLGDWREIENVRSIAGFLGLVSSEHSTGDKVNRGSITRSGDSRLRNKLIQSAWVAIAKDPELRAFYRGVFERQPKKVAARKAIVAVARKLTTRMYAVLKQQRPYVIRPDISTAPLTTEETVGPRERLDAAQSDQP

SEQ ID NO: 424739 - protein, 415 aa, unidentified
MSFWKAREIMNEFAVAIDVSNGSSHFRCFKSSSEPLGPSLKFRHDQDGLAFLEERVMKLQEKLAAEPVFVYEATGVYTRPVERYLLSHGYRICQISPLESAAQRRTDIHGKKTDKTDPAYIAQAYFSKTKKAPKEKEDPYWHALRLMNREYEETMNHLRTYKVSFQSTLAIVFPGYQTLGKDPYTPISLMALRRFPHPEMILHKKRETVIRRVMKDTRMSENRVARWVDKMIRLAQTTYPGCEKDDLEVELLIRKIDDILACDRRCKEILQQLIARAADSEYFECLCSIKGVGANLAARILAEVGDISRFRNVKALIAYAGLDPRKNQSGEKKGEHLGISKKGNRRLRTILYLAVTCNLRQGDPYDPISEYYKKKRQQSHPLAHTAAVIAASGKLLRTAYGMCNTKTMYLRHSPL

SEQ ID NO: 424740 - protein, 408 aa, unidentified
MNPLYVGIDVSSKSNVIYLMLPDGAKHSCFSVANSQDGSSQMVKRILSAVTSRSLDTVVIGLEATSVYGDNLVYFLREDASLAPFNRKIHVLNPKQVKNFKEAYNDLPKNDYMDSFVIADCLRFGRINKEVYLGDYRYKALQNLTRARFFAVQNLVKEKQRFINVLFKKYSTMTQEKVFSDTFSTTALAVYEEFESAEALAAMDLQELTDFIMEKGKNRFPNPDAVAKAILKAARSSYRLPKTVNDSINQVLSISITSIKALDAQIKEFNKAIEAQMELLPNVLISIPGIGPVISAGIMAEIGDINRFPGQAQLGKYAGLAWTQNQSGDFEAENTKLIRSGNRFLKYYLCEGALSLVRCDTEYSSFYHSKYKEVNRHQHKRALALTARKFVRLVFRLLKDNRLYRAAE

SEQ ID NO: 424741 - protein, 389 aa, unidentified
MPAVADRPDAPTAIQTNLAAIFVSLELSRSIWLITSLSPGSAEKMSKHSVRAGDVAALLARFSELKRKASERTGKSFPIVVIQEAGLDGFWLHRALQSEGIESHVVDPASIATSRRRRRAKTDRIDGEALLRALLAFKRGEPRVCAMVKAPTPEEEDRRRLCRERKVLIAERVKHVNRVKGLLFSQGVSGYEPLRRDRRQRLDELTTGDGRSLPMHLKTQITRELDRLELLLDQIKRAEGERDTLLAAQQAAAPGPAGRMLLEFKGIGAEFAASIWMEALFRHFDNRRQLASYAGLAPTPWQSGSVDREQGVSKAGNPRLRTTLIQLAWLWLRHQPQSALALWFKERVNRNGGRLKKTTIVALARKLLVALWKYVTAGVVIEGAVMKDA

SEQ ID NO: 424742 - protein, 340 aa, unidentified
MEEVSIIGVDLAKNVFQLHGAAADGSVLFRKKLTRLQFERFMAAHPACTVAMEACAGAHHWARTLAGMEHAPLLIAPRYVKPFVKRHKNDSADAEAIVEAALRPTMRFVEPKTAESQARAVLFRTRTQFIESRTVAVNALRAHLYEFGHIAPIGVHQIRRLAEVVEAEDSGLPAAVRLCCREILAQIAQIGERLAVLDREIARLSGEGETSRRLRTMPGVGPITALAVETFAPAMDSFRSGRDFAAWLGLVPTQHSTGGKQRLGRTSKMGQRDIRRLLIIGAMSTVQRTLRKGAPEGSWLARMLAKKPRMLVAIALANKMARGVWAMMTRNEDYRGPAMA

SEQ ID NO: 424743 - protein, 337 aa, unidentified
MNYSGIDLHSNNCVVAVSDETDRVLCKRRLANDLAAVLALLEAYRAELAGVVVESTYNWYWLVDGLQAAGYRVHLANTSAIKQYEGLKHTDDDSDAVHLAQLLRLGILATGYISPPAERALRDLARKRLQLTYSRTAHILSVENIVARQTGGRISGETVKRLDSEALHKLGQCADVTLAMSANVAVIQTLNAQIAKLETRLRNAVKPRDEFKVLTTTPGIGEILATTIMLETGTVKRFAGVGNFSSYARCVESKRVSNGKKKGRGNVKNGNRYLAWAFIEAAHFASRYCPEAKRFYERKKARTNSIVATKALAHKLARACYHMMKDNQPFEAKRCFV

SEQ ID NO: 424744 - protein, 368 aa, unidentified
MSDRVYRRCCGMDIHKDTVVVCVLPPEGTKSVVARKTYRTFRNDLTRMRGWLKQLRVTEIAMESTGVYWWPVWNVLEGQGFRLLLVNPAQVKALQGRKSDKRDAKRIAEFLQDGRLDASFVPPPEIRQLRQLIRHRLSLLQQRTEVHNQIRDLFERASLKLSSVASDLLGVSGRRIIEAMIAGEDSPELLSGRLRGSLQKKKKLARESLKGYFNDFHRQMLGMHYRHYEFISNQIQELEIEITRRMEPYSPQITLLMSIPGVERVVAWHLIAELGLDMSVFPDADHCASWAGMCPGSWESAGKQLSTRTKKGNKYLRHVLTQAAWAVSHCKHGYLRAFFYRIKARHGWGKAIMAVAHKILVFAGRFGV

SEQ ID NO: 424745 - protein, 339 aa, unidentified
MKAYVGIDLHSSNSYIGIINQDREKLFGKRFINNPDDILNALTSFKKDIVGIVVESTYNWYWLVDTLEENGYKVHLANPAAMVQYEGVKHTDDAWDSFWLADMLRLNLLKEGYIYPRETRGLRDLLRRRLLFVRQRTAQILSLQSTITRHLGIKFTVRQIKKLKPEDAQELFNCYEVALIAKNNIKAITYLSQIIKDIENEVLSKVKLTQEFQKLTTIPGIGEILGVTIMLEVGDINRFKKPGNYSSYCRAVSSQRISNGKKKGENNRKNGNKYLSWAYTEAANFSIKFLPQAQKFYHKKKAEKNNIVAIKALSNKIVRASYYIMRDKVDFNPDILFGN

SEQ ID NO: 424746 - protein, 326 aa, unidentified
MSNILGIDVSKDKLDLILLSEKGKSHKVISNDLAGFKTLDQWLISRHIDQVHVCLEATGQYGDAVSEYLYGQGHDVSVVNPTRIKRYGESKLHRNKTDKADADLIAEFCLKEKPALWEPLNPDLKHLRALVRRLIDLQANYRQEESRLSSGEKDAWVIQDLTVHLEYLKACVEATEAEIQNFTKGTPDLKAEQELLVSIPGVGEKTSARLLGEIGEVSRFENAPQLAAYAGLNPKGFSSGSSVHKKTCISKQGRSELRACLYMPAIVAMTHNPVIRALKERLQKKQLPNMAIIAACMRKLLHIVYGVLKSRKPFDPEYDRQFNYSA

SEQ ID NO: 424747 - protein, 347 aa, unidentified
MRFYTKQHKYYCGIDLHTEKMYVCILDERGNIRVHQNIRTDPEVFVSVITPFREDVVVAVECMFTWYWIADLCVEQNIPFVLGHALYMKAIHGGKAKNDKIDSHKIATLLRGGMLPQAYVYPARMRATRDLLRRRNHFMRKRAELFAHIQNTRSQYNLPDPLGCIAKPQNRQGIAQRFDDPSIQKSISANLLMIEAYDRLLTQLEHDIIASAKEHDLRSYALLQTIPGVGRILALVILYEIESIERFPSVQDLVSYCRLVKCIKESNGKIYGTNGNKIGNAHLKWAFSEAAVLFLKGNEPGKKYLLRLAHKHGKAKALSILAHKLGRAVYFMLKNKEAFNQKKFLGL

SEQ ID NO: 424748 - protein, 391 aa, unidentified
MFYIGIDIAKKNHEASIIDSSGKSLSKSISFPNSTKGIEKFNNFIAEFGVTTNNCIIGMEATGHYWISLFSYIIDLGFTCYVINPIQSDAFRKMYVRQTKNDSVDSFIIAQIMRFGEFSISNFSDENTFALRNLTRYRFALVDECSDWKRKLIAILDQVFPEYSSIFSNIYGVASKELLSKYPLPEDMLSIPAEELGDLLCKCSKGRLGINKAEEIQSCARETFGIKFAKRSFSFQIKQIISQISFLEEQLKEIEIEISYLLEDICPIITTITGIGSVLGASIVSEIGNISRFERANQLVAYAGLDTRVKQSGDFSATNTKLSKRGSPYLRRSIWLAATVAAFKDPALSIYYQGLRARGKAHGTAIGAVARKLTNIIFAVLRDQKPYTPNI

SEQ ID NO: 424749 - protein, 341 aa, unidentified
MNAATHTLGIDIAKRNFEVNLRSLEPGPSRHSSGFPNSPKGFGALHRWLIQHGITQAANLHACLESTSRYGDALAAWLRSHGYQVSMVNPRRTRHYADSQLSRTVTDQIDARLIADFCAEQRHKLVLWEPLSSDHRQLQDLTRTRTALVEHRDALANLLETATGLVRKAVQRQRVNLQREIERFDREIKKLLDQQPDSKLSTQVALADSVPGVGLLTAATVVAELPCIDKISRASQAIALFGLDPKSKTSGETVKTPARISKMGSKRGRRALYMPALVALRYNPLIRALGQRLKAKGRSGNYIVVAAMRKLLRQIFGVLKNGKPFDPNWSKSYAEQLQEVV

SEQ ID NO: 424750 - protein, 346 aa, unidentified
MIIVGCDFHPSWQQVAIFDSLTGEIVESKLVNGNGEAERLYRSLPVPSLIGMESCGNSQWFIELVEQLGHTVWIGDAAQIRASYVRKQKTDRRDAAHILKLLMEGRFPRLWAPDAEVRDLRQLLIHRHKLVEIRTRVKNGLQHLALNRGLQRKSRLWSEAGQKALRELPLKGWAACRREDLQRLRTVLDEQIGQLDEAVKHAADGNQQAQLLMTQPGVGPITSLAFVLTIGDVARFKRGKQVASYLGLIPREHSSGGKQHLGAISKQGNRLARTLLVEAAQSANRLDEGFRKQYQHRCHSKPKGVAKVAAARRLAVRLYWMLRSNMPYPEIVRIEGSSRFPMAGES

SEQ ID NO: 424751 - protein, 349 aa, unidentified
MRCFQPPPETRFYAGVDLHARSLFLSILDHDGQERFSRNLPAAPAPFVKAVAPFRAGLVVGCECMHCWYWLADTCREHQIAFVLGHAWAMKAVHGSKTKCDRHDAQAIARLLRGGNFPLAYAYPHERRGLRDLLRARLRLVRQRAELYGHVHTARRQANLPPVSSDVKYKSKRAAITADIADPFVRRRVETHLALLEPLDTTIRRLEAEIEEAAKEHYPTELAVLQTTPGVGAVLSLTILLEIDTIDRFDTRQQFCSYARLCGAVQESAGQRTGQGNRKAGNAWLKWAFSEAAVLAAQKDEQIGRLLERLASQLGKPKALSALAHKLGRAFYHMLHTKEVFDVNRFVRH

SEQ ID NO: 424752 - protein, 404 aa, unidentified
MSVHAAPVTSSTIVVAIDVGKTSALLSATDGARRRVLGPVEFAMTRSGLGAIVHRVSAVVPAFAQVKVGVEAAGHYHRPVLDYGWPPEWEVLELNPAHVAEQRRVAGRRRVKTDVIDLEAVTELVLAGRGRVITEREVCIGELAAWVIHRSQRIATRSATKNQLLGQLDRAFPGLTRALPDVLGTKIGRLVAAEFADPARLSALGVNRLIRFAAARDIQLRRPVAERLVTAARDALPTRDGSVARRVLATDLGLLADLDTQIADAEGELAALLPASPYSTLSSVPGGGVVRISNYAASLGDPDRWPGPRQIYRASRLSPMQYESAGKRRDGRISREGSVALRRALIDLGLGLWLTEPSAKAYAAELKSRGKPGGIIGCALAHRATRIAYALVRDHTIYNPSRWV

SEQ ID NO: 424753 - protein, 345 aa, unidentified
MNYVGVDLHKQVIVLCVVQLVSGRRQVMARRKLACRDVAELGQFFGQLRPFQLAVEATAAYEWLLELVDRQADRIVLVHPRKMRIIAESRRKTDRLDAQILAEFLAADELPEAWRPTPRVREHRALVRQLDRQRRRTSSLKCRLRNVLAHYNADRRDLFTAAGFAHLKNVPLHAADRLVADQLCAELAFQKQQRGGVWQQLKTFAADAPLGEREARAVLASVPGIGPMTTEVILSELGDVRRFRRQDEVAQYAGLAPGVRESAGKRQQLSISKEGSPLLRWTMIQLAWRLVNRTRRWGFAYEKLRRRCGPKKAIVAVARRVLCVLVSLLRSGQRYNLASEVLARC

SEQ ID NO: 424754 - protein, 379 aa, unidentified
MRFFNSQPHRFYCGVDLHARTMYLCILDPAGTIVLHKEVPAEPAAFLEAIGPFRDGLVVACECLFCWYWLGDLCQAENIAFVLGHALYTKAIHGGKAADDRIDSQKIAHLLRGGNLPIAYAYPKGLRETRDLLRRRMYLVHKRAEVVSHVVNTNSQYNLPPFGKKLIYARNRQALKVADRFADASVRKSIELNLRLLDSLDDLIGDVELYLERTVKVDDADTFYRLRSIPGVGKILALVLLYEIHDIARFVSAGAFLSYARLIRPLKTSAGKVKGGGGAKIGNAHLKWAFSEAACLLVRESDQAKRFLARKEKKHGKPKALGILAARLGRSVYHMLRQKKAFDPKRFWNGEPGVTPAQLKKSAVKRPRRAKGSRRVLEA

SEQ ID NO: 424755 - protein, 397 aa, unidentified
MIAVGIDISNAKSTVAVIDSDGTVLASPFTMAHTQPEMESFVTYLKGLGEPTTILMEYTGHYHYPVLKKLQDEGFPVCIVNPYQMKKYGDVEIHKAKTDKKDALRIAAYALEKSYKLVPYSSMEQKYEDLKFLSRQYNQRISYVAKLKVQLIALLDQTMPGITRILPLNSRNPEKCALLLFIKRFKSFDEIQRIGKARFLASYDVLAKKASERSASSKGLSIYELAVDSITTRGEDPYIWLSQNQCVDLLSATQNAADEIISQMRNIAETIPEYKVLRAMHGVGDRLGPVILAEIGDVHRFHSGKALNSYAGNDAPPYQSGQFESRNRHISKRGSSTLRKACYEVMQALKLTKPQDDPVYLFMLKKEQEGKPFNVAKMAGVNKFLRIYYARAMELYK

SEQ ID NO: 424756 - protein, 373 aa, unidentified
MNAKVRFLGLDVHAETIAVAEADGEVRSLGTIPNRAESIRKLVKKLGPVEHLRACYEAGPTGYVLYWQLTELGVACEVIAPTLVPVKAGDRVKTDRRDAEKLARSYRSGDLTAVWVPDEGSEALRDLVRAREAAKQDQLRARHRLGKFLLRVGQRPAPGVKAGTQAYLAWVRQMRFSQIAREATKLDYLHEVEHMAERVARLEQAIVEAIEQASPQIQEVVKDLQALRGIAQISAVTIAVELGNISRFEGARQLMGYSGTVPSEDSTGKRKKQGRITKTGNSHLRRIVVEAAWSYRHLPRVGPTLGKRQQGVAEEIKEIAWKAQHRLHKRYSRLAAAGKDRRKIVTAVGRELLGFIWAIGIKAEAAANQRMAA

SEQ ID NO: 424757 - protein, 451 aa, unidentified
MPEEMTAAEPEYAAYVALDWADREHAWVLELPGGKKESGKLSQTPEAIDAWAAELARRFGGRPVAVGLEQSRGALIYALQKYSHLVLYPIHPSTSASYRKALFPSGGKSDPVDADLLLDLLVRHRDRLRRLQPDDPRTRKLQLLTEKRRQLVDQQTAQTNRLTDLLKVYFPQAVEWLRPLDTPMSIAFLQRWPTLPQLKKEDPEVVRRFFFQSGSRSHQRIQTRLAQIQQARPAIEDEAIVGPCVLMAQALLKVITALREGIAALQQACQEAFASHPDAEIFSSFPGAGPVLAPRLLAAFGSQRDRWNTVEDMQPYTGIPPITVTSGNSLQIHFRWKCPKFLRQTFHEHAGCSIQHSQWARAFYDHQCQVKNHDHQAAVRSLAYKWQRILFRCWKNRTPYQESFHQERLLRQHAAAPALPSNRRSGTAGSNPVHFQFKMVAGFSKLSDATS

SEQ ID NO: 424758 - protein, 334 aa, unidentified
MLYAAIDIHKRMFQAAVLDVESGETVERRFGATREELNEWAMPLNGALAAVAIEATTGWRWVWRELSGRGFDVRLVDPAQAKALRGGIKRAKTDRLDARWLCVLLAKEMLPESWLPSAEIQTLRDQTRLRKALAEDRTRWAQRLHALLTHEGWPCQRARLLTVEGRRWVASLSLSPSARSQVARLLRLIEAVEDELHALETELRRFARDDRRCVALQTIYGVGPILACHLLAELGEAARFRRARQAVRAAGLDPVVDESGDTRRRGHLAKHGAPALRWALVEAAQHAQRANSPDRTLYTQAATRVGGKRAVLTVARKIGRRAYHVLNELEAQAA

SEQ ID NO: 424759 - protein, 355 aa, unidentified
MDSTKYVGMDVHTEAISVAVRNSAGKLIMESILETKANTILEFIEGLRGSVHVTFEEGTWAAWLYDLLKPHVTKVVVCNPRKNALLKDGNKGDKIDARKLSELLQLNNLKPVYHGEHGIRTLKELARSYLTISKDLGRVMNRLKALYRSWAIPCKGQQVYAPRHRSEWLSKITEVGVRRRAEYFYQQLDALQPLRQQVRRDLLAESRKQAATKLLRKIPCIGPIRAALLIALIQTPHRFRTKRQLWNYSGLGIETHDSAQYRFVRGELQRSKRPQQLRGLNKNHNHDLKNIFKSAATMATISAGPFHEFYEALLVKGRKPTMARLTLARKIAAITLIVWKKEVRFDAKHLKPQAA

SEQ ID NO: 424760 - protein, 470 aa, unidentified
MANSNEQSGTGPKVVGSKRSSQQKSSEQPVFQPHAGGIDIGAREIYVAVPADRDPHPVRQCGTFTSDLHQMAEWLVSCGVTTVAMESTGVYWIPVYDVLEQHGIRPCLVNPRNMKNVPGKRTDFHECQWIQYLHSMGLLHAAFRPDQEVCSVRSLMRHRNDLVEMASQHVQHMQKALTQMNVQFHHVISDITGLTGLAILDAIVGGERDAVVLARLRDPHIKADEETIRKSLEGSWRPEHIVALKQRLSLYRSYREQIHECDQEIEKLVSAFEPKVDPDDKPLPPDRKQKQRKRKKKSGDPNFDMRTEAYKLFGVDLTQIPGLMMLVFMLFSEVGRDMSRWPSAAHFVSWLGLCPDNDISGGKVLWRGARRTKNRAGTLFRLAAHALHRDPTPMGDYLRRMKAKLGPAAATTATAHKIAVIFYTMVKNQVEYDASLWADRDAMREKRIEARLQKQAARRGYKLVPLEAAA

SEQ ID NO: 424761 - protein, 402 aa, unidentified
MNSVGIDVSKGKSMIAVMRPFGEVVVSPFEIHHTDNELCELTKLLSGLSGETRVVMESTGNYHLPVAWLLNDSGFYVSVVNAMLVHDYGNNSLHRAKTDKKDAIKLANYGLDHWLTLPRYVPEEDTRLMLKNCYRQYQQYSKVRTMLKNNLISLLDTAFPGANRLFSSPPRADGSEKWVDFVAAFWHCECVCGLSEKAFISKYQKWCKKCSYNFSEDKALDIYASACGHFSVMPKTDTAKLLVEQAVSQLRATSAALAALKLEMQSLASSLPEYPMVMRMFGVGPALGPQLMAEIGDVRRFHSKKALVAFAGIDALPYQSGQMDIYSRSISKRGSASLRRTLFLLMGVYLPNAPVNEPVYQFMDKKRSEGKPYKVYMMASANKFLRVYYASVKAYLDALDEA

SEQ ID NO: 424762 - protein, 347 aa, unidentified
MDKVSRSQDSRIVAAGVDAAKSTFSVCAVDGARRIAAERTLNRARLLALFANLAPCTVGLEACSGAHQLARELTAMGHTVRIIAAKFVAPHRTSGKNDRNDARAIVDALLHPRTRFVPIKSLEQQALLSLQRARHGFVCERTALVNRIRGLLAEFGVTLPKGVERLRKLASAAAEAIPPLAREVIGDLLAHLRVLDERIGHCDRQQRILVRHSEPAQRLDELLGVGPVTALSTVAMIGNGAQFKNGRQFTAWMGLVPRQWSTGGKLRLGHITKTGETYLRMLYVQAARSALLSAHRRRDRLSRWALAVRARRGFGKAVVALAAKLARIAWALLSKGDRFRPEGLPAL

SEQ ID NO: 424763 - protein, 320 aa, unidentified
MTTFDSQVVVGVDVAKDEIVVHRRDLEKTQIIANETPALKKWLRSLPLDSAIAIEATNIYHVETVELAYSMGHRVFVVDPGKLSKYRDSLGKRAKTDASDAALLARYLAHEGAALRLWSPPPEVYTELKNLLHRRAKLVSIQVTLKQSWGNHADLPKEFGAVIDSLKALDQAIQDLMKDILNKAGLMPQIKRCEGIEGVGFLTATAFLTAYMRGDFASSDAYIAYLGLDLCVRDSGKKTGRRRLTKKGDPEIRRLGHNASMAACRSETWKPFYQRHLDSGKARTQALVILTRKLARVAFALMKNQTDYRPNSIFGASPQT

SEQ ID NO: 424764 - protein, 346 aa, unidentified
MEVTIGVDPHKGTNAVAVLNDREELLEYAVFATNRAGLRSLTRWAKRFGERRWAVEGASGLGRPVAQHLVAAGETVVDVPAKLSSRIRLLSVGNERKNDRVDAICVAVAALRGERLTEVGEEEGQATVLRMLSERRKDLIKERTRTLNRLHGLLRDLVPGGAPKNLSARKAALLLRGVRPRVDPALTRRRLAADLIGDVRRLDRGLSDLERRIREAIERASTSLIGLFGVGPVLAARIIGEVGTIARFPTKAHFASYTGTAPIEASSAEVVRHRLSRAGNRQLNHALHLVAICQVRHDTEGRTYYRRKLAEGKSEKEALRCLKRRISDAVFKHLYADLEGEISTAA

SEQ ID NO: 424765 - protein, 313 aa, unidentified
MKYSVIGMDIAKQDFQLHRVEVETGEVERIKLRRDAVLPYFARQAPAMVALEACGSAHWWARKLSALGHQVRLLHPKSVRPFVLRNKTDAADARAIWTAAQQPDARFVAAKTETQQAILALHRLRAQLLKFRIMQTNALRGLLYEFGEVLPEGHAALSKALPAALANLDTHLPAVLLDSLREQWTRVMSVDKEIAAIERRLATILRDPPSCQAVAEIPGVGLLTATAAVASIGEAKAFKSGREFAAWAGLVPRQRGTGGRLRQLGISKRGDVYLRTLLMHGARAVILRYRHVPWLDGLLKRRPYNVVVGGRRE

SEQ ID NO: 424766 - protein, 307 aa, unidentified
MFVGIDVAKDRLDVHVRPSGETFDVARDGEGIEELVRRLSVGVPTLVVVEATGGFETIVAAGLAAAGLPVTVVNPRQIRDFARATARLAKTDTLDAAVIAHFAEAVKPPPRPLADPQTQLLGELMARRRQLIEMIVAEGNRRRLLTARRTLKSVDRVLATLKAQLQQIDDDIDTAVRGTPAWREAEDLLISVPGIGPRIARTLIAEMPELGHLDRRRIASLTGVAPFNRDSGTLRGRRTIAGGRTVVRSALYMSILVSIRRNLPLAETYHRLRATGKPAKVAIVACMRKLVTILNAILRDRKPWADA

SEQ ID NO: 424767 - protein, 411 aa, unidentified
MSQMLVGIDVSLRSHHVHFMHGEGHTLADFSVSNDTEGANTLLQKLLRTAEKNQCEHIKIGLEATDQYSWHIAHYLKSELIGYEPSFQSAVYMLNARKVSRFKKRYDTLPKNDRIDAWVIADHLRFGRLPHEMQETIQYDALRRLTRTRFHIMHEIGRNKTYMMNQVFLKFSGLRQDNPFSNTFGATSVAVIEELDPETIAAMPIEELIEFLQEKGKNRFAEPEEIAKYLQKLARNSYRLDKMMADPINLSLSVIVSTIRHMESQVKRLDQEIDRMMKGITQTLTSVKGIGPVFAAGLLAEIGDIKRFDDHHALAKYAGLVWTQYQSGEFEAENTSRMRTGNKYLRYYLVQAADAVRKYDADYKAFYQKKYNEVTKHQHKRALVLTARKLVRLVHSLLRTNQLYIPPERRG

SEQ ID NO: 424768 - protein, 358 aa, unidentified
MREYIAFDSHKHYTLMERQDAQTGCAVQQRLEHQRGALCAGLRECEPGTAVAVEATGNWYWIVGEIEAAGLRPLLVHPRKAKLMMGMINKTDKLDVHGLNRLQQNGTLPTVWIPPADLRDLRELTRTRLVLVASRTRLKNRLLATLAKHGFSIEASDNFGAGARQQWSVLLPQLPEQTRFVTGQLLEQLDFLEQQIQSQAQRLESLLEITPAIQRLKTLPGIGLILAASIALEIGDIARFASHEHLASYAGTTPRVHSSGDKTRYGRLRADVNRYLKWAYVEAANAVVLQQRRWSQRHVVRLYRRIADRRGHSKAIGAVARHLAEASFWVLTRNEDYREPTPAKNLGDPKPAAARLGA

SEQ ID NO: 424769 - protein, 441 aa, unidentified
MSNIVNPNAAGIDISTKEHYVAVPEGRSKQDVRCFKSFTRDLHELATWLKECKVDTIAMESTGVYWYHLYTVLLDYDFEVYLVNAYHVKHVPGRKSDVSDARWLQQLHSFGLLKGCFQPDNLTRSLRNYVRQRKLLIKQIATEVQRMQKALEQMNIKLNNVIRDLQGKTGMTIINKILGGERDPKVLAQYSDPRIQASKEILIKSLEGTWREEQIFNLKQAYDHYSFLQGQLAECDKQCEKIVDNMSDESTPRKEIKSGRKQKNRPDFNVEQHLYNALGVDVTSIWGMKSSTALAVFSEIGPNLKEKFPTEKQFLSWLNVVPDNKITGGKVIYSRVKRKKNRAGQAFRDAASALWKAQNPLGDYLRRKKAMSGGRQAVVATARKIASIYYKMVTDKVEFDPQVLVTKTRRNLEKRVEYLEKALLKTKILLTENKEVSQFVI

SEQ ID NO: 424770 - protein, 315 aa, unidentified
MSDVPCFVGIDVAKAQLDIAVRPSGERWAVPNDAGGAVTLVARLQVLHPTLMVLEATGGLERVATAALATAGLPVVVVNPRQAREFARATGQLAKTDALDARALAHVADVIRPTPRPLPDAQTRELRALLGRRQQLIVMRTAEQNRLAGTSERLQTDIEAHITWLNAAIATLDDDLETMLRASPLWRENDDLLQSAKGIGPVSAHTLLLELPELGTLTRQQIAALVGVAPLNCDSGTLRGKRTIWGGRAHVRTVLYMSTLVATRFNPQIKALYERLLAAGKVKKVALTACMHKFLTILNAMLKHRTPWQPQEVQS

SEQ ID NO: 424771 - protein, 354 aa, unidentified
MNEDKYIGMDVHQASIVCAVHNPAGKCIAHSIIETKAETVRDFLRGLSGTLHATFEEGTQAHWLYELVRPLVSELIVCNPRRNHLLKEGSKSDRVDASKLAELLRAGLLKSVYHGAPAVRPLKELAHAYDHLTADRVRVMSRLKALYRARAIPCAGTTPYSQARRGEWLAQLEAGAGRLRAEWLYAELDAVSGLRRAARNRLLGEARGMPAYKLLLNIPGLGPIRVAQLIAAVGSPHRFRSKRQFWAYCGLAVVTKSSAEQELVAGRWVRRERAAQTRGLNEQFNHRLKAVFKGAALAALKDATFKRYYERLRARGLRAEVARVQVARKLAAVSLAVWKRTQEYDESKVLKQAA

SEQ ID NO: 424772 - protein, 331 aa, unidentified
MDQRNYVGIDVSARSLEVALVGAERRSATATFANTSTGHRQLIKWATKRGRLAQVCLEATGVYGLAVALALHHHPKTEVMVVNPKAIKNYAGATMQRAKTDAVDAQLILDYGRRMPFARWQPPSDEVLQLQAITRRISQLKVELNREANRLDAEDYKVATTDLIERDIQVNLRHLNRRMVRLEKEAVALVLSVPHLSMLFQRLLSIPGIGETSALRLLAELAVLPEGMKPPQWVAHAGLDPRPHESGQSVHRPRAITKAGNKYLRAALYMPALVAIRHQPNVKAFYDQLIDAGKKPLQAITAVMRKLLHAIWGVWKHDQDFDGQKFYKIAT

SEQ ID NO: 424773 - protein, 356 aa, unidentified
MPIPFKRYKGMKKIFIGIDFSKEKFDATVIKAEGVEERAERQHEVFDNKVSGFRRLLRWVKSVADEPDAGLWLFCGENTGGYSRALCNYLYGSGYDMWLENALSIRRSSVLQRAKSDKADAGAIAEYAMRNYDQMRLYKPLEKNLERLREVFLYRHNLVKLKASMTTRRGEKRLTQEKSDISRFMAQSSRHLISEFNKKIAECDRRIQEIIAGDEDLCRNFEIITSVPGVGTQNAVCLMVYTDNFGRFDYDSRKIACYYGVAPFGRQSGTSVNTPPHVSPFANKLIKALLTQAALASVNFCPQMAVYYRRLVEAGKKKPVAVNNVKNKLLHIITAMVRKGERYNPDHDYYAALKAA

SEQ ID NO: 424774 - protein, 389 aa, unidentified
MKIFVGIDIAKLNHFAAAISSDGEILIEPFKFTNDADGFQLLVSKLESFDKNSIIIGLESTAHYGDNLVRYLVAEFYQVCVLNPIKTCQMRKNTIRKTKTDKVDTFVIAKTLMMQDDLRFVSFYDLDMMDLKALGRFRQKTIKQRTRLKIQLTTYVDQVFPEIQYFFKSGLHQHAVYALLKEAPSPKEIASMHMTHLANLLKVNSHGHFTKEQAKELRVLAQKSVGANDSSISIQITQTIQQIELLDSQLEKIEAEMTDIMKFNDSVIMTIPGIGYINGGMILGEIGDIHRFSNPNKLLAFAGLDPSVYQSGNFQAKTTRMSKRGSRVLRYALVNAAWNVVRNNATFKAYYDAKRAEGRSHYNALGHCAGKLVRVIWKMLTDEVEFNLE

SEQ ID NO: 424775 - protein, 346 aa, unidentified
MVDPTTIAVDLAKSVFEVSVSRQPGRVCQRKRLTRSQFGQFLACQPPATVLMEACGSSHHWARVAQSLGHQVRLLPVQHVCRYRLREKTDHADTRALLEANRNEKISPVPVKTLFEQSIAGLHRIRSGWMATRTARLNTLRGLLRELGINIPLGARLVLPRLSEALSDPEGSIPESLHPVLLAAAEEIRALQANIRQVDRQLESLSQRLPAAASLRSVPGIGILTATALIASVGDPSRFKNGRRLASCLGLVPREHSSGSSRHLGAITKQGDSYLRTLLTHGARAVLWAAKHDPNPDALRRWALATEKRRGHNRAAIALANKLARIAWAVWSKNTLYQPTTVQAFA

SEQ ID NO: 424776 - protein, 360 aa, unidentified
MITVGVDVHKRQCTAVLQAEDGELRCFSAMENTREGWRKLLSQLPPDTEIALEVSTSGYFAMSVLEEAGWLERAHWVHTAGIDSLRKQKYDRLDAERLARKLSVAKQEPLPEAWFPPVEIRQLRMRARERCWLAALRTQVKNRLQSMLQMHGLRPTVTDVYGVAGRAWLAAQVLPEATRESVDQLLRVLDFLGEEIKKAEACLRAMDRQFPELARLRTIPGIGEILAPVIWSEMGKLERFRSAEAWVNYTGLVPSLYESGDVSIRGGITHQGSAWVRWALVQAASGVIQGVNPFARRYRRLRRRKLANVAKTAIARSLARCVYGVLKSGSDYQEARWGRRPEEFVARSSGASKPEVALGH

SEQ ID NO: 424777 - protein, 391 aa, unidentified
MSLYFVGIDISKYKHDCCILSAADQQVVARFVFGNDKGGFDELLTALQSLSSPEDIKIGFESTAHYALNLELFLEKAHHSFMEVNPVLISEFKKSTSLRRTKTDRIDCESIARWLMTVEYKPHSKGFYHAYSLKSLTRLRDRLIRQRSFYLVKITNVLDHTFPEFKPFFNDHFSKTALYLLKNYGSAEKMARMNSASYDKLRLLSRGRFTPQKFLALKSLAADTVGVSNEIFESELSCLLTLYENLAEQVSLLEAQICQLIGDIHPHYLSIPGIGPLSAAVIYAEYGDISNFSSPAQMLAFAGLEPGISESGTENHKGRMVKRGSSQLRYVLLNCALPLIRFDMTFAAYYAKKRSEGKPHRVAITHVAKKLVRVIFALERQNTDFAVQALR

SEQ ID NO: 424778 - protein, 377 aa, unidentified
MTRVRFVGLDVHAETIAVAVAEPSGEVRALGTIPNRVESIRKLMRRLGPPEQLRACYEAGPTGYVLYWQLSELGIRCEVVAPTLVPVKSGDRVKTDRRDAAKLARNYRAGDLTAVRIPDAAHEALRDLVRAREAAKKDQLRARHRLSKFLLRQGRRPAEGTKAWTQRYLGWVKRDVRFEQAAQEATLLDYLGEVEHAVGRIDRLERAIDEAVKVAPAQMRAVIEALQALRGIAKVSAATIACEVGQCSRFTSATQVMSYAGVVAREHSSGARVWRGGITKTGNAHLRRIVVEAAWSYRHRPNIGGGLRKRQERLSEEVKEIAWKAQHRLHQRYQALTWRGKSKQLTMTAVARELLGFIWAIGVKIEQQTPEHGRLAA

SEQ ID NO: 424779 - protein, 375 aa, unidentified
MTSSMPAPAERRKVIIGVDTHKHVHVAVAIDVWGIRLEDRSFPADSGGYRQLISWAIELGPIDAFGIEGTGSYGAGLTSAVRRAGYQVIEVNRGDRRARRANGKSDTMDAELAARSVLAGQSNAVPKTADGAVEMMRQLKIARDTAVKARTSAIISLKQIIVNAPAELRESLAGLTDKTLIDRCAGFRPGSIDSTTASAKHTLRALARRWLFLNDEIHDHDRHLDQLTAETSPKLRDGFGIGADTAAEMLIIFGDDPERIRSEAAFAKLCGVCPIPASSGMTTGRHRLYRGGHRQANSALYRSTIVRMRFHQPTIDYVARRTSEGMPKREIIRCIKRFLAREVYQRVMTDHRARTAAERVAPPAPSTPPALAAAV

SEQ ID NO: 424780 - protein, 318 aa, unidentified
MPKATTLTAGIDTSKDKLDVAIHGQSGSFTVANTAQGWASLAARLASAKVRQVGIEATGGYQRGAARHLQAAGFAVVTLQPLQVKAFAMMRLQRAKSDRIDAALIAAVTHLLGTGHKQPADPRFDPLQDHLTFIEQVEEDIVRIKTQLEHIEDARLRRIRLADIKRLAERRANELKRLIAALRGHDDLARRFDLVLSIPAIGERTAVSLIVRMPELGQVSREEAAAIAGLAPFVRQSGQQQGETHIGGGRARVRRALFMPAMVGAFLWNSPLKALYSRLTARGKPPKSALVACARKLLIMANAVLARGTPWEDRTAPA

SEQ ID NO: 424781 - protein, 388 aa, unidentified
MQNIIHRPEGRAAIRTDLGAIFVSLELSRATWLITSLSPGAGEKMSKHVVQGGDIVSLLRRLAHLQEKVRGRRRKEFPLVVIQEAGLDGFWIHRVLEHEGIESHIVDSASIMTSRRRRRPKTDRIDGEALVRALLAYHRGEPRVCAMVRVPTPEAEDRRRVSRELKTLTAERVGHVNRIKGLLFAQGVSGYAPLRRDRRTRLEELRTGDGRLLPYHLKRQIGRELDRLELLLEQMNAVAAERDALLVPAEEQAAPTPAKMLLGLRGIGPDFASVLWQEGLFRNFDNRRQVAAYAGLAPTPWQSGAVDHEQGVSKSGNPRLRTTMLQLAWLWLRHQPSSALSQWFHQRVGDNGRIRKVMITALARKLLVALWKYVTAGVVIEGATMKTA

SEQ ID NO: 424782 - protein, 352 aa, unidentified
MIIIGVDFHPEFQQIASVDTDTGEFQEKRLAHPEEAEKFYRALTGPKVRVGMEASGHARWFERLLAELHYELWIGDAAEIRAKRVRKQKTDRQDAQLILQLLLEERFPQIWVPSWENRDLRQLLWHRHRMVQARTRIMNQLQAVALNEGLRCKKRLWRERGREQLEAFRLAPWASRRRRDLLELLDRLNPIITELTHAIEQEVEQCPAAQRLMTHPGVGPLTALAFVLIIGKADRFQCGKQVASYLGLVPLEDSSGNRRRLGHITKQGSSMLRFLLVEAAQVTVRSLPEWRSKYFHLAMRRGRKIAKVAMARRLAVRLYWMWRKGWDYEQLTKFGSHAGQPGNRHGVQSNTE

SEQ ID NO: 424783 - protein, 399 aa, unidentified
MEILYRICCGLDVHKKTVAACLRFLSPTGTRAEEIRTFGTTTRELLRLADWLATAGCTHVAMESTGVYWRPVYQILEGSVELLLVNAQHIKTVPGRKTDVKDCQWIARLLEHGLLRASFVPPAPFRELRELTRYRRQLIEERAREANRVQKVLETANIKLGDVATDVLGASGRAMLKALIAGERDAHKLAALARGLLRKKEVQLREALVGRVTDHHAFMLPLFDGRIEVQTRPFMTVLERLDTITGVARRSAEQILAELGDDMSRFPTAAHAASWTGICPGNNESAGKRKSGKTRKGNRWLRATLVECARGAVRARDSYLAAQYHRIARRRGDKKGIVAVGHSILVVAWHLLRNGGSYRDLGHDYFDRLDRDRLVRYHTRRLADLGVVLPSPSPAQATA

SEQ ID NO: 424784 - protein, 362 aa, unidentified
MEQRYVGIDLHRRRSVIYTMDAEGQKLSCIRIANEPAALIAAVAPAGDAAHVVVEATYGWYWAVDLLRDNGFDVHLAHPSGNDWGKRRVKNDERDARDLADLLRLGRLAEAWIAPPAVRELRELVRYRAKLVNLRSGLKTQVHAVMAKEGVLPNVLDMFGPGGARQLDALDLAEPYTLRIASLRDLVPVYDAEILMLERKIHQRLSGNKGYEAIQALNGVGRTIAAIFCAEIGDVHRFRSAEALCSWAGLAPRHRESDTKSGAGLHHQDGLAAGALGGAGGGGALPRRHVAARGLLSHRGTTGQEEGARGGGAQDAHARLLRPAGRRDPLSARRPGGVSARTRPGRVLVERRDSRSCGSRSN

SEQ ID NO: 424785 - protein, 587 aa, unidentified
MSPLSDQQFAAYVGIDWADTKHDVCLQAAGDTRREFSCVPHQVACIDEWAKGLHQRFDGPIAVALELARGPIVSALQKYDFFVLFPVNPSTLAKYREAFKPSRAKDDPTDAELALDLLLCHPERFAPLRPQSAGMRCLMSLIEQRREMVGDKTRFTNRLCNTLKQYYPQALEWFEHIDTVLFCDFITRWPTLPAVKHAHRSTLETFFHAHNCRRPRLIETRLESIRSATSLTEDPGIVSPCRLHALALVAQLRAALAAIDVFDREIATVARTLPDFALFECLPGAGPHLTPRLLAAFGEQRERFRHAAELQKYSGIAPVTERSGKKCWVHWRWQCPKFLRQTFVEWAGQTINKSFWAGAYYRQQRAKGSSYQAAVRALAFKWIRILYRCWQTGTRYDESIYLNALRKRGSPPSWKPRASPLETLDGLTQGVIRPFKLPGSGRSIAGKADVIYWLQEKPMKRTWTIIGVADVARSFKWYQSLFGQPETLPAHDYFGQIVDTDGTVLLCLHQWGAHEHPPLASRYRAEPGNGLLLFFRIDDFDDALPRARALVAGLEEEPNVNPNTGTKEFALRDPDGYYVMVSALDPP

SEQ ID NO: 424786 - protein, 369 aa, unidentified
MDDITFVGLDVHKATICIAVAEGTRGGEVRQLGVFENRPEILRKVVSRLSKGGRRLSFCYEAGPCGYGLHRLLTGYGHECVVVAPSLIPMKAGDRVKTDRRDALMLAKLHRAGELTAIWIPDAAHEAMRDLVRARATAVRVLVKARQHLQGFLLRHERIYRGARAWTLAYRRWLSTVRFDHPAQQIVLQDYIHAVQEAETRRDRLTQQIEELLPNWSMASVVAALQSMRGVALVVAVTVVAEVGDFRRFVNPRQLMAYLGLVPSEHSSGSSVRRGGITKAGNALARRVLIEGAWTYRMSARVSRKLHDRLEGLPAAVRDIAWKAQLRLCARYRRLAATGRPKVVVTTAIAREMVGFIWAIARVAQPALV

SEQ ID NO: 424787 - protein, 342 aa, unidentified
MQTITIGLDIAKAVFQVHMENGQGQVVKQRRLRRAQVKPFFKKLPACVIGIEACGSSHYWARVLQGLGHQVRLIPAAYVKPFVRRNKTDARDAAAICTALKQFDMRFVPVKSPEQQASRSLERSRELLVRQHTQLCNSLRSQIAEHGIIAAKGRRGFATLIQLLDSGDARLPESLIAVLQVLRAQIEQLAKAVAELEARIVKAARTHPDMRRLATIPGVGPILAHAIVTAIGDGHRFRSARDFAAWTGLTQSVHSTAGKDKGKKGISRQGDNHLRKLFTLGASSVMLQVRLRDDRGTAWQRGILARRPVKVAVVAQAAKTARIAWAVLTSGGVYQAPATKAA

SEQ ID NO: 424788 - protein, 342 aa, unidentified
MEIKQIGIDTSKHVFTLHGVDASGAAILRRDLKRSAFEAYMAKLAPMEVALEACGGAHHWARRLMAMGHRVRLIPPQYVKPYVKRSKTDQADAEAICEAAGRPSMRFVPVKSAERQGELMVLRTRELLVRQRTQAINALRGHATEFGLVAPLGVSRVQELLAKLAADPGVPKVAHEMLALLGQQIEQIDKQVSAIDVRLLAMHKANDVSRRLAQVPGIGPITAVSLALTVEAAQFESGRHLAAWLGLTPREHSSGGKQRLGGISRAGNERLRQLLVVGATAVIRHASRPGARRAFLWLTQLLARKPRKLAAVALANKTARIVWAMMTRGEAYRARPLVGATA

SEQ ID NO: 424789 - protein, 416 aa, unidentified
MSTTDPLTSPVDPCGFTYVVGIDVGSEHLLYTICQPDKRAVVKPSQINNDRVGFGQLDQALHALGSEPSRILIGLEATSRYNENLYQFLAEQGYTLCLLHPRQTHQFAQQRGLRAKTDRLDASTIARLLLSGEARVGYVPDELIASYRELERLHSQLTAESARYQNEIHALLTVLFPEFTQVFADPCGATALGVLKRYPGAAAIATAGVEALTATLRELARRRYGRPTAVELVRLAERSAASGVATSARALSLKVLCDQLEHTLVNLAHREQELDRVLGGDEGASRLSSVPEFGRQTLAVLRAELGDVTRFSRIDQAVAYVGLDLEVRQSGKWKGQVKLSKRGSGRVRRVLSMAALRSLTLPDSPFAAYYHRLVARGLKGRKALMAVMRKMLLVACHLLRSNESYDPAKVCAVTGP

SEQ ID NO: 424790 - protein, 419 aa, unidentified
MSSLTQEFTAFIGIDWADTKHDICLQPANSQHREFDQLPHQIPAIEQWAYSLQKRFGGTIAVVLELSKGPIVYALQKYDFFVLFPVNPSTLAKYREAFKPSRAKDDPTDAELALDLLLCHGDRFKPIKPQSVEMRTLTYLVEQRRQLVGDKTRFVNRLCDTLKQYFPQTLDWFEHRDTVLFCDFMTRWPTLTQVKRARKASLETFFKTHNVRFDTVIATRISGIRAATPLTLDVAVLTAHQLQAMAQVNQLRTTLQAIDQFDDAIAKLAPTLPDYALFNALPGAGPHLAPRLLVAFGEQRERFTSAAQFQQYSGVAPVTERSGKKCWVHWRWQCPTFLRQTLVEWAAQTINKSFWAGAYYRQQRDKGCSHQTAVRALAFKWIRILYRCWQNRTPYDESKYLNALKRRNSPLLKQVTATS

SEQ ID NO: 424791 - protein, 330 aa, unidentified
MMLHAIDLHKRVLQVASMRADGEEVLQEARIPASREALSAYLAQWPASKHRVVVETTGSWYWVADELREQGAELKLAHATKLEAITSAKVKTDGVDTRSMLTVMRINMVPEAHVISPELREPRDLLRLRLRLVEKRTSAMNSIARLLEKYNRATVGALPELAQVQAGIHQEQIAMLNAQIRGLEKRIARELKPNETVARLRRIPGIGRVNAWTLYLEIDGIERFATDRNFFSYCRVVPGSDNSGGRTKNKRSRAGNRYLKLALSHAAVRAVQRYSEIGAAYRKKLRKKNQPLALAWVRKELARIVYYVMRDGIDYDNTFRGVALSRPKKA

SEQ ID NO: 424792 - protein, 380 aa, unidentified
MNILLTHCAGMDVHQKEIVVCVLTGNIEDSLQKETRTFSTLTKSLFDLLKWLEEKEVTHIAMESTGIYWKPVYNILEGYFDITLANAQRIKNVPGRKTDVSDAEWIAQLLRYGLIEKSFVPSQDLRELRDLTRLRKKWIGNLTAEKNRISKVLECSNIKLGSVISDIFGVSGRKLLNQLVDKGYLDQSDIDSNIHHSLKKKANSISDSLFGTLDEHQIFMIRSSWNHIEYLEKSIQELEKRINNLLQSYQEEKEILLSIPGVKEHTAACIIAEIGTDMSQFPSSRHLASWSGVSPGNNESAGKKKGAKSIQGNPHIKATLCEVGWAISRSKKTSMASTFWSLSARRGKKKALKAIAHKIIRIIYTLFLNNQSYSEPALSR

SEQ ID NO: 424793 - protein, 486 aa, unidentified
MSQSKTPKKQPRESSKRKRQRKIRQAQQRIPKLDIDPTGPGTAAASAATLAVVHPHAAAIDVHSDNHVVCVGPNQVQTFGAYTVDLQAITDHLAQHGVTTVVLESTGVYWAPLFELLETRGFEVFLIEPSQARHCGARPKTDVLDCQWLQRLHTFGLLRPSFRPPESVLTLRGYWRQRQLLVRYAASHVQHMQKALEQMNVKLTEVASDITGVTGSRIIEAILRGERDAQKLAALRDARCANAEEEYAKALAGTWRPEHLFALKQAFELYSFQHRQITACDEQINAELARLPDRAGDKPFPARVRRRGYKSNDIRFDATKPLFKALGVDLTLIDGIDVSTALVILSEIGVDVSRFPTEKHFASWLRLCPHLEESNQTQKKTRKRKGHGRLAQALRMAAQALSRTQTTLAAFYHRIKARLGGKGAITATAHKLALLVYRLLKYGVEYVRQSLDEYAAKIREQAERSLRRKAAQLGYELVAKEAAVAT

SEQ ID NO: 424794 - protein, 347 aa, unidentified
MKFYTTLHKYYCGIDLHAKILYVCILDQQGNKLVHQKIGADPLALLRLLEPYIGDVVVGVECMHCWYWVSDFCQTHEVDFVLGHALYMKAIHGGKAKNDKIDSYKIATLLKGGNFPLAYNYPKEMRATRDLLRRRTGVVRHGANLKAHVVNTDSQYNLPAQSLNLKNVSAREHLRHHYDDEVVQRTIELDMVLLDCYAKELAKVEYFIEKQAKQHHGTYLYIIRSFPGIGQILGLTILYEIGHITRFKSVQNFASYSRLVKCKAESAGKTYGTSGNKIGNGHLKWAFSEAAVLYLRGNDKAKNYLNKLQRRMSKGKALSALAHKIGRCIYFMLRDKTAFDEKKFLKG

SEQ ID NO: 424795 - protein, 312 aa, unidentified
MEKLSYGGIDVSKDRLDVVVLPEERFFSVSNDAAGWAELVARIRPLAVSAIGIEPSGGYERGIIRALLAAGLSVRRINPNKLRQFARARGVLAKNDRLDARLIAEYVAIMPTRVVQRDEAVEKLAEVVTMRRQLRDEHVTVENQAAHIEDAMLRRLNKRRLTRLEADTRLLDKRLAEMVATNAALAQRYELLTSMPGVGPVLAFTLIALLPEFGQMSRKQIAALVGLAPYDFDSGKLRGHRSIYGGRMPVRNVLYMAALSGCRYNPALKAFHKRLAAADKKSKVVIVAVMRKMITTLNAMLRDNVEWQPKSA

SEQ ID NO: 424796 - protein, 340 aa, unidentified
MSEITTIGLDLAKHVFQAHGIDAEGTTVLRKRLRRGQVLAFFSRIPRCVVGLEACATAHYWARELGALGHEVRLMPAQYVKAYIKRNKHDAADAEAICEAVQRPTMRFVPVKTAEQQATQLLHRGREQLVRQRTMLVNALRAHLAEFGIVAAQGLRNVGELIAIVRDDGDTRLPDVARQVLQVLADQIEQIETAVAGLERQLLAWHKTNPVSQRLASIPGIGPIIATAIATTVADPKVFRSGREFAAWLGLVPRQNSTGGKTRLGGITKRGNRYLRRLLINGASANLLRSKATKADPWVIGLRRRRPPLVVAVALANKTARIAWAVMLREKEYQPRAVAA

SEQ ID NO: 424797 - protein, 318 aa, unidentified
MERLSVGIDVSKRELVIAIDPTGARWTSDTTAPAISAVVERLRSLTPRIIVVEATGGYERPLVAALAAADLPVAIVNPRQARAFAQAIGRTAKTDAIDAAVLAAFGARLDLAARPVADAATQALAALVARRRQLVEMIGMERARLEHAPATGPITRELRRHIRWLERRVADVDDDIGNSIAAHPSWRVNEELLRSVPGIGPTTARTLLAELPELGRLDRRRIAALVGVAPVNCDSGQYRGQRHIWGGRASVRATLYMAALVAARRNAPLAAFYRRLRDRGKTAKVALVAVMRKLLTIVNAMMKHQVRWNAEVARAATV

SEQ ID NO: 424798 - protein, 353 aa, unidentified
MLAELVDHVIGIDPDRDWITAAVLDANTTGVIATAKFAANNDGYDEAVEWADAHTAAGDRSWVVEGSGSYGRGLTAALSRVGEWVIEFDRPHQRPTKDGAKTDELDAVRAAREALGRTRLHTPRSHDGHREALRVHTVTRAGVVRARTAAINELKALVLTSPDELRSELRGLSTKALVTRCAAFRTATKRPIAEQCVRNTMRVVARRVQHFNDEIEVHDVAMKQLVDDTAPQLVAEPGVGYVTAAMFVIAWSHPGRCRSEAAYARLGGVAPIPANSGQSQDRHRLNRYGDRQLNSAFYVVALARMCHHQPTKNYVARRRAEGKTDREIRRCLKRYIARKVWRLLEHQSPRITA

SEQ ID NO: 424799 - protein, 337 aa, unidentified
MEYFAGLDVSMAETHVCVMNRDGAVVYEVKVPSTPADIAAGLAKAPACGRIVFETGRMAPMLYHGLRQLGLPIFCIESRQAHQALKSLATHKTDRNDARGLAHLARTGFFKPVYVKSLPAHAVRALIIARKKLVGQRVTLENQIRGLAVVFGVRLPRALRPAFVRQALQASEGIPGLSAAMRGLVAARAAVLAAVSAIDADIRQLVRASAACRRLMTIPGVGQLTALAFTAAIDDPSRFRRSRDIGAYLGLVPRRYQSGEVDYTGSISKCGDRRVRTLLYEAANVMLTRYKSALKLKDWALAIAKRSTLRKARIALARRLAIIMHAMLRDGTEFNPA

SEQ ID NO: 424800 - protein, 379 aa, unidentified
MPTPTTHTDPPRANPTLHVALDLGNTSWCLAGAPAVAAAARVRMFPARSLARLHAELASARQHFGLPANAPVVLCYEAGRDGFWLQRACTAAGIVALVVDSSSIEVSRRARRAKTDRLDATALLRLLFRHTAGERGHWRVLHVPTVEEEDRRQVHRELARLTQDRTRAVNRLKGLLALHGIRLTSLRALPDHLPLLTQWDGAALPDGVRERLLLIWARLMLIQTQRTALVRARRALLETTTDPTIQMVRRLLQLRGVGEVSAWLLTMELFSWRRFRNRREVAGVLGLTATPQASGDRRRELGIGKGGSALLRGLAMELAWGWLRYQPASALSQWYRARFAAGGSRQRRVGIVALARRLMIALWRYVETGHVPAGATMKA

SEQ ID NO: 424801 - protein, 369 aa, unidentified
MNESTRFVGLDVHKASIAVAVAGAFGDPEDHGQIANDPSAVRKLLVRLGDGGVRLAVAYEAGPTGYALHRQVTGMGIACMVVAPSLIPVRPGDRIKTDRRDAAKLARLLRSGDLTPVWVPDEAHEALRDLVRARADAKEDQLRARHRLSKLLLRRAAHPPLGVRAWSRAHEAWLDKVTFAHPADQVVFEDYRAVVRAAAERVRRLEGALLHSAADGPQAELVTALQAIRGIGFLSAVTIAAEAGDLRRFPSARQFMAYVGLVPSEYSSGSSQHRGRITRTGNRLMRHVLGQAAHNARYRPNVSSSLRARQRAAPPTLVELDRRAQARLHARYRHLVGRIGVNKAVIAVARELAGFIWAAGQLVPAAVAA

SEQ ID NO: 424802 - protein, 411 aa, unidentified
MEAVVERCAGLDVHQGTVVVCVLLGAAGRKPRKEVRTFATVTADLVALRDWLKDLGVTHVGMESTGIYWKPVYAILEGHFELIVGNAHHIKAVPGRKTDVKDAEWIADLVRHGLVRASFVPPPPIRELRDLVRLRRSLSEGLTTERNRTLKLLETANIKLASVASEVFGVSGMAMLRALVENAATPAEMADLARGKLRRKLAPLARALEGRLTEHHRFVLALHLRRMAAIEADLAALDARIEAQMEPFRAQRALLRQIPGVDDRVAATIIAEIGIDMGVFGNAMRLASWAGVCPGNYESAGKQRKGSTRRGNVHLKTALVTAAIGASRRKGSYYKDKYHRLKARRGYLRAAIAIAHKILVAAYHMLATGAPFRDLGEAFLDQQARRRTTANLIRRLNTLGYDVMLQPRASA

SEQ ID NO: 424803 - protein, 351 aa, unidentified
MNTVTIGMDLGDKNHALCILDKSGKVVKQTTITNTSDDLKKFFAKYKGATVALEAGTHSPWISRHLTAMGCNVLVGNPRKLRAIWDSNDKSDNRDANMLARIARFDPELLYPINHRGEQAQIDLNLLHARDILVKNRSNIINHVRSSVKSFGSRLPKCSAECFHRKASEHLPEELCDILKPLLRIIEQLTSQTKAFDRQVDEISKERYPETELLRGIKGVGPLTSLAFILTLEDPTRFNKSRQVGSFLGLTPRRDQSGEMDKQLRITKAGNAYLRRLLVSAGQYILGPFGEECDLRRFGNRLAARGGKNAKKRAVVAVARKLSVLMHRLWLHGEIYDPCHASNSRRLAKAA

SEQ ID NO: 424804 - protein, 339 aa, unidentified
MLTIGLDVHERTTSLCILDACGRVVKEKTIRGHPRLAIAWLTALSEPFQVCFEASTNYGWLYEQLAGVAKRVVVAHPARLKLIFKSRRKNDRLDAARLAKLLFLNEVPEVHVPPKARRDWRSLIEYRTRCVRERTRTKNMLRALLRTHGIESPKSLWTKTGLAWIQELPFESSVALRREILLETLEHHARTIHRVERALREIAEGEPGVALLMTIPGVGVRTAEAFVAYVDDPHRFRANSIGAYLGLVPRQDASAGVNRLGRITREGPSTVRKMLAEATWQSIRRSPTVRAIAERFQGNRADRKKKALIATSHYLARVMLAMLKTGEVWRETPPLARAA

SEQ ID NO: 424805 - protein, 350 aa, unidentified
MNQLTDTVYTAYVGIDWAAAKHDICVQAAAGGAREFARISSQPEGIEVWAHDLYRRFGGPIAVALELNKGPLVTALQKYDFMVLYPINPSTLAKYRETFTPSGAKDDPTDAELAVDLITRHSERFTPLKPQSVSMRKLIGLVEQRGKFASDQGRMVNRLGHALKQYYPQVLEWFNEHHTLVFCDFLSRWPTLTQVKRARKASLERFFKSHHVNSAQLIEKRITAIKAAMPLTADPAVIEPHRLQVEILIEQLRITIKALKRFDEEIAATANKLPDYNLLFSPLPGAAQVLAPRLLAAFGEDRQRYPHADALQMYSGIAPVTKRSGKKTWVHWRWQCPTFIRQTFAPRALI

SEQ ID NO: 424806 - protein, 374 aa, unidentified
MDVHSTSYTLCAMEPVLDGEDRIFANIQVTSDYRNVIQFIDKLKEKLGSSDSYSIECGYEAGCLGYSLYHQLTKAGVKCTILAPTTMLTQQGKRVKTDKRDALMIAQCLSYGGYRAVHVPADKDVSVKEYLRMRDDHKVALKKIKQQINAFCLRQGYFYAGNKWTIKHLNWLKKLVLSDLYRETLNEYLTSYEEQTAKIERFDKRIEELAEDSDYQENVKKLGCLLGIKTHTALSLIVETGDFKRFRKGNTYAAFLGLAPGESSSGEKISRTGITKAGNSHLRMLLIEAARGMCRGRIGYKSKVLRSRQAGNPAEVIAYADRGNTRMRSKYYRMIRHGKKNNVAVAAVARELACFIWGLMTNNIAPKEEGTKAA

SEQ ID NO: 424807 - protein, 343 aa, unidentified
MQVSTIGVDLAKNVFQVHGVDSAGKVVITRQLRRKQVLDFFSKLPGCLVGMEACGTAHHWAREVSKLGHSVRLMPPSYVKGYVKRSKNDAADAAAICEAVARPTMRFVPIKSADQQALLMLHRTRDLLIRQRTQLINALRAHLAEFGLVAETGREGLAQLSAIITDESNHEALPSAMKQALQAIVDQLAALELQVGTLDRAIHVHHRANDMSCRLETVPGIGVIGATAIASTVTDPSGFKSGRDFAAWVGLVPRQHSTGGKERLGSISKQGDRYLRRLLVIGATAVVRQARLHPQKHPWIMRLLAKKPAKLVAVAVANKMARIAWAIMAKGGHYRGPELAAAT

SEQ ID NO: 424808 - protein, 386 aa, unidentified
MRCVLDWGHQNGMVRPCSCPASKRSWQGAPKTRSTPPNTAIAVIGIDIGKNSFHVVGHDARGAIALRQKWSRGQVEARLANMPPCLVGMEACVGAHHLSRKLASLGHDARLMPAKYVRPYSKGQKNDFNDAEAIAEAVQRPTMKFVATKTAEQLDLQALHRVRERLVSQRTGIINQIRAFMLERGIAVRQGIGFLRTELPTILATRTDALSPRMLRVIEELAGDWRRLDQRIDGLSGEIEALARQDQACSRLMTVPGIGPIISSAMVAAIGTGDVFSKGRDFGAWLGLVPKQISTGDRTILGKISRRGNRYLRVLFVQAAWVVLVRIKNWERYGLKSWIEAAKRRLHHNVLAIALANKLARIAWAVLAKGRAFELTRTDDAGVRPA

SEQ ID NO: 424809 - protein, 329 aa, unidentified
MNNSRNKAEVILGVDTHLDIHVGALLNSQGHLLGCLMVTTNISEYERLVTWANSFGCLKRAGVDGTGTYGASLTSVLRKHGVEVFDVNRPDRSKRRSQWKSDPTDAESAARAVLSGSVTAIAKTQSGAAEMMRVVSVARRSTVKAKTQAMNQLRTLLVSAPQNVRERLWKSKLADCAKGCARVRSLGTTELLHTLTTTLCFLAKRWLLLADEVEKLDVMLDALTHQYAHRLREQFGVGSQTAAVLLSTAGNNPERLRNETSLAALCGVNPLPVSSGKTVQHRLNRGGNRAANNAVCTIAIVRMRGEPQIQSYVAHRSAQGLLRKRSSAV

SEQ ID NO: 424810 - protein, 464 aa, unidentified
MTVVSPYEVLYHYLRKHTAFNLSNLPIGCKNRYLSNSLSLRGCRIEVKHTKDVQMHYYVGIDIAKSFHVACVVNQDDKIVKKSLKFNNDESGFDELLLLLNSIDEVSTFTIGMEATGIFFENLYLYLSEKGFNVILLNPYQTNRFREMDSMKKVKNDNIDALMIAALIKSGRYSKAYVSKDTYQSIKSLYRHKNSLLEEMKKHKRQISTLLAVVFPEMEKVIKDPFNVTGLALLEKYPTAKHYHHASVDRILKTFRGIKGNNFNEQKAQKLLELAKSSIYQGNGVDERAYVIKSHIRVIKLLQEELKELENEMLKLFHQAPQLDSNEEQEVMDIIDNLRTIPGVSDKTIFALISECGDLSRFKNNSHFIGYLGLYPTLEQSGNKLSYGPIAKRGAKLAKKALYQAAIAAIRHNEELHKLFKDKVSQGRAKKEAVVIVARKLAHIILAIYKNNVAYNPKRVFMAS

SEQ ID NO: 424811 - protein, 401 aa, unidentified
MIGVDPHKGSHTAVAIGPGEEPLGELRVRACLAQAGQLMVWAQAWPERTWAVEGAAGLGHLLAQQLVAAGERVLDVPPKLAARVRLLEAGDTSKNDPNDALSVAVAALRTRARRPVRAEDHAAVLKVWAKRHRDLARARNQVTCRLHAVLCELVPGGVSKEITAGQAARVLDQLTPSGAVAQARCELAAAFLEDLRRLDAQLRDTKKKLAAAVRASATTLTQLFGVGPVVAGTVIGDVRHVSRFPSRDHFAAYNGTAPVEVSSGNRKIYRLSLRGNRRLNHAIHMAAITQIRHKHSDGRAYYDKKIAEGKTHKEALRCLKRRISDAIYARLLADARQGAAASTKDPGGQPGNDSDASVAGSHPEHRLFGQATPESSPILRPVTQSDPIAAKRNLKKSRKTP

SEQ ID NO: 424812 - protein, 349 aa, unidentified
MTKVTIGVDLGDQYSQLYVVDAAGTCVETGRVRTTRAGLERWFARQAPARVVLEAGTHSPWASRALQALGHEVLVANPRKLRGLYENDSKDDRVDAEYLARVGRLDPALLKPITHRGAAAQADLAVLHARDALVRTRTQLISHTRGVVKALGGRLPRCSAEAFARRARADVPAELRPALAPVLAQVQQVTAAIRAFDRELERRCAEQYPATARLRQVSGVGPVTALAYVLVLEDPRRFARSRAVGAYLGLRPRRSQSGERDPQLGITKGGNPFLRRLLVQGAQYILGPRGPDCDLRRHGERIAARGGKNAKKRAVIAVARKLAVLLHRLWISGAVYEPLRHSTALAQAS

SEQ ID NO: 424813 - protein, 373 aa, unidentified
MALKIVYKICCGIDVHKTFVVACIASTNDKGITSYESHRFSTYTSGLKTLLQWLLDRNCKDVCMESTGKYWIPVYNILESDCSIVLAHPKYVKAIRGKKTDKKDAKWIADLFKHDLVAGSFMPPADIRQLRDLMRYRFKLTCFKSSEKNRLQNCLTVSNIQLGNVVSDTFGKSAQAILDKLLENPADTSFDLEPLVYKSLKKKLPELRDAIDGYITPEQAGKLKVIKAHYENLESRKAELEELILALAAPYQQELAILQTAPGISSDFTAIGIISEIGTNMEAFPSAKHLCSWAGLTPTNNESAGKKKSVRVSKAGCYIKPLLVQCANAVVKSTKHPEMRNRYLRLKKRRGHKKAIIAIARMLLTALYHMLKN

SEQ ID NO: 424814 - protein, 339 aa, unidentified
MDVYAGLDISLDAVAICVIGETGEMLWQGKVLGDPEAVKAVLRRWRDDLVRVGLEAGATSEWIGGHLVDEGFPVVCLESRHVKAALSAMTVKTDRNDAQGIAQIVRTGWFKAVHLKSAAGQRLRTLTAARKAAVRALTGNEQVIRGLLRPLGLKIGAVTRVRFEARVCQLIGTDRLLLAIFEPLLRLHKSLRQSLADLHRLVLRAVRTDPICRRLMTMPGIGPVTALTYRATIDDPKRFRRSRSVGAYLGLTPRRYQSGEVDRVGRITKVGDGETRTALFEAANVILRPTTRWSSMKAWAMKIADRQGVRRAKVALARRMAVTLHRMWIDEQDFRWTAA

SEQ ID NO: 424815 - protein, 416 aa, unidentified
MEVMFKCCAGLDVHKRIIVACALVSSAEGVQRHLKTWPTTLAGLEALAAWLTGLGVTHVAMESTGVYWKPVFNVLAPLFEVWIINASHLKQVPGRKTDVKDAEWIAQLMRLGLLKRSFIPEVAQRDLRDLTRYRTRLLGERASAANRLQKILEDANIKLASVASDVQGVSARAMLEALIQGETDAAVLADLALGRLRSKLPELEAALAGRIREHHRFMWRQLLHHLDTLNQELATLDAQIRVLTAPHAILIERLDAIPGIDRRTAEVILAEIGPDVTLFPTAQHLASWACLCPGNNITGGKRRSGRTRRGQNWLRAALVEAAWGAARTKDCYFSAQFHRLRARRGDKRAAVAVAHSILIVVYHLLAEPEAVYQELGGDYFLKRNPEQEQRRAVRKLETLGFTVTLAPVPAAAPASS

SEQ ID NO: 424816 - protein, 346 aa, unidentified
MENDTLAAVDIAKEIFEVGVSGRPGRVALRKRLPRDRFLEFFAQLPPATVVMEACGSAHYWGRRIEELGHVVVLLPPQYVRPYVMRNKTDRTDVDGLLEAFRNERIRPVPIKTVTQQVIATLHRLRSGWLADRVRSINALRGLLRELGFFIPEGRRHVLPEAWEIIQDHRRGLPDALKPSLAALCEEIASLSTRIEDVEAQLEALARQIPLVARLRSVPGIGLLSATALYAFIGDPSRFPSGRHMASFIGLTPREHSSGLRRHLGRISKRGDSYLRMLLIHGARSVLWHAKRMKNPDRLRSWALRLERKVKHNKAAAALANKLARICWAVWKNDRDFEVVPEPQAA

SEQ ID NO: 424817 - protein, 482 aa, unidentified
MKAKPQEKNKRATNHPTQHHWHEMNRKQRRETMRKIQSEDLSLEVIHPDAAGIDIGNESHYAAVPPSRDSQPVRCFGCTTAELKAMAAWLQQCRIRTVAMQSTGVYWVAVYDILEQAGLEVYLVNARDTKNLPGHKSDVQESQWLMKLHTYGLLRNSFRPSQKIRTMRTYWRQRNDLVQSASRHILRVQKALTQMNVQLANVLSDISGVTGQAIIKAILAGERNPHKLAEFRDPRVQASEEEIAHYLERNWQPDLLFVLKQEQDGYEFCQQQMAECDRQLEQYLQSTEDRSHGAPLPEEKRKGRLKKKKGNKPQFDLREGLFRMSGTDLTRIDGIDVMTATTVISEAGYDMSKWKTENHFVSWLRLCPDNRISGGKVIGKGRLPTNNPVSIALKMAATTLRQSKTYLGAQFRRLRTRLGAPIAIKAMAAKLARLVYRVLRYGMKYVDQGAAFYELKHRERQVHQLKWKAAQLGYKVTLLPAA

SEQ ID NO: 424818 - protein, 422 aa, unidentified
MNSEPEKVDYAAWIGIDWGSEKHAVCLRAADSSRLEHCTLEQKPDTLRAWFMSLLGRFGGRKVAVAIEQSKGAVINFLLGVDFVHIFRVHPKSLKNYRQALYPSGAKDDPTDAELILQFATLHQGKIHPWVPDDVDSRLLLRLVEGRRKIVNKRVSLTNQLTQLLKEYFPQALDWAGDLDRVMACDFLSKWPTLPKLQRSKPDVVCQFYRDHGCRRGECIDSRLEEIRAASPLTTDRAVVESSVLILKAIVPQLRALIEAVARFDQRIEEVYGQHPDSEIFSSFPGTGPALGPRLQVAMGADRDRFHDSEEVAEYSGIAPVTECSGKTKWVHRRLACSNFVKQSFHEYAGQSMVQCAWARAFYDSKKARGLGHHAAVRALAYKWIRILFRCWKDHVRYDEQKYMESLKRKQPAWLVFLAAAA

SEQ ID NO: 424819 - protein, 471 aa, unidentified
MFKQVDRVMQKNRDKNSKPDKEVGIEGLPVIRPDVAGGDLGSEIHWVCAPNVERTGLEVETFGATTPELERMAEWLKARKIESVAMESTGVYWIAPHEVLERHGLEIVLVNTRELARVPGRKKTDRVDCRWTQRLHSCGLLKGSFRPNEPVCMLRTLVRDKGNLVAEAGDWLRRMQKSLDQMNVRVHRAVSDIDGVTGMRIVRAIVAGERDAHELAKLRDRRCGKSEEEIVEQLSGHWREDHLFSLRQALKMYDAIQERIADYEREILRKLVEMERAECHGQEPPKLKNPQKAKAIQKRGEEPLRQALYRLSGVDLTGIDAIGVETVQVVLSEYGPDLSRFPSEKQFVSHVTLAPRQAMSGGKPVKKKKRGSASTRVAAALRMAALSLRHSETALGAYYRQISRRIGGDVAVFATARKLATLIYRLLRWGQPYVDVGAAAYENRYRQARIQRLAAIVKDLGYQLTPNPTKA

SEQ ID NO: 424820 - protein, 448 aa, unidentified
MRPHKLPKTRKMKLPKHLQHINPHAAGIDVGSRSHFVAVPEGSCEQPVREFTSFTDDLHRMADWLLACGVTTVAMESTGIYWIPVFEILEGRGLEVRLVNARHVKNVPGRKSDVLDCQWLQRLHSYGLLEGAFRPTDQVCTLRAYVRQRMNLVRYASAHIQHMQKALAQMNLQLANVVSDISGVTGLRIIKAILAGERDPLMLARLRHPRCKNDESTIARSLQGNFRPEHLFSLKQAVDLYEFYQSQIVECDRQILDQLADFDTTDGSGSGPPASLEEALLRMSGVDLTRIDGIDTNSALKIISEIGTDMSRWKSPKHFASWLGLCPGTKISGGKLLSAKSKPVANRAAATLRMAAFTLLRSKSALGAYFRRQRSRLGAPKAITATAHKLARLVYSMLKHGTAYVDEGQKHYEARYRTRVVQNLKRKAQELGYALVEVVEKQHQPAAT

SEQ ID NO: 424821 - protein, 351 aa, unidentified
MVVTGGVDTHKDVHAVAALDGIGRVLGTETFPTTVAGQADLIAWLASHGPLGRVGVEGTGSWGKNLARSLAGAGVEVIEVQRPSRQHIRRHGKSDPTDAIAAARSVLADDATGSAKTATGPAESVRLLRAVRSSAMKARTACGNQIHAVVATAPDTVRGQLRDLKLAKLVEAAARFRIVGALTTPDAAARWSLRQLARRYQTLTAEIADVDGELATVVAAAAPPKLLCEPGIGIDVAGAIVTAVGDNPQRLATDATFAALAGTSPVDASSGKQRRHRLNRGGNRELNNAIWRVVMVRLRWDDTTKAYMPRRTAEGKTKKEIVRCLKRYVARRIWTIYRDHLSVTDVIPVAA

SEQ ID NO: 424822 - protein, 358 aa, unidentified
MKVTYQTCCGVDVHKSFLVATIVKTTGGIEPSYQKKRFSTFNSSILEFKQWLLDNDCHDVCMESTGKYWVPVFNLLEDEINVVIANPKWVKAVKGNKDDTKDSKWIGDLFRLGLVKGSYIPCKIVRILREYTRYRYKLVSCRSSEKNRYQNALTVCNVALDSVVSDIFGKSSTSIIDYLLEQSGTSINHEEINDVDKMIENIISSNPDFENAVQFLCTIPGVKRDSAITIISEIGTDMSQFGGSKRLCCWAGLTPGSNESAGKKKSVRITRAEKCASCSFCTGNARSTDADQLLHSVCNRSGFCNHADHGTAGRYYWCEQTDSSSCIPVWRRTFQYFLADGRYRYHLWPGWNFPAEMV

SEQ ID NO: 424823 - protein, 402 aa, unidentified
MNAVGIDVSKGKSMVAIMRPFGEIVSAPFEIKHTASDIHSLVELINSVEGESRIVMEHTGRYYEVLAHQLSKANLFVSAINPKLIKDFDNDSLRKVKSDKADAVKIARYALDKWQNLKQYNVMDELRNQLKTMNRQFGFYMKHKTAMKNNLIGILDQTYPGVNTYFDSPARSDGSQKWVDFASTYWHVDCVRKMSLNAFIDHYQNWCKRKKYNFSQSKAEEIYGKAKELVPVLPKDNITKLIIKQAVNQLNIASATVESLRTLMNETASQLPEYPVVMAMKGVGTSLGPQLMAEIGDVSRFTHKGAITAFAGVDPGVNESGSYEQKSVPTSKRGSSDLRKTLFQVMDVLIKTHPQDDPVYQFIDKKRAQGKPYYVYMTAGANKFLRIYYGRVKEYLSSLPES

SEQ ID NO: 424824 - protein, 322 aa, unidentified
MNATAALPVVGVDLAKSVFQLAVADGSWRVVESHRLTRTQFERWFANRAVGLVVMEACGSAHHWARWLNGLGIAVRLLPAAYVRACVKRNKTDVADACALLEAAHCAEIVPVRVKSVEQQALQAMHRTRSLWMGTRTSRINALRGFCRAFGIAIAQGSRLGVEQIGRVLADPHAAVPLLLRRAMSLLVEEIRLLEVRITQVERELTALACQSPACTTLLSIPGVGLLTATAMVAATSGEVSHFCDARHFASWFGLTPKEHSSGGTRPLRRISKRGDRYLRMLLAHGARSVLRAATAALRDHEPCGAARPNKKVARTAFALPA

SEQ ID NO: 424825 - protein, 338 aa, unidentified
MKLYGGIDLHSNNCVLVLIDEQDRMVYEKRLRNDLELILSELAVYRKKLAGLVVESTYNWYWLVDGLMESGYHVHLANTAAIKQYEGLKHTDDRHDARWLAHLLRLNILPEGYIYPREARAVRDLMRRRHRLVRERVSNLLSIQNQFARLGMSGFSAERLKRLQVAELEALVADVNVRSAIAANLALVGCLNAQIARLEREVLAQVKLAAQFAPLMSVTGIGKILALSIMLETGEIGRFAKVGHFASYARCVDAQRLSNEKKKGENNRKCGNPYLAWAFVEAASFAIRYSPRVKRFFQRKCARTNKIVAFKACAHKLARASFYVMRDRVAFDEARAFS

SEQ ID NO: 424826 - protein, 409 aa, unidentified
MQIVHEHCAGLDVHKKSVYACAIWPSEKGEKKQEVRSFGTFTADLLKLADWLRKHGVTHVAMEATGVFWRPVWAVLEGQFELLLVNPQHIKAVPGRKTDTKDCEWIADLLQHGLLRGSFVPPSEIQDLRDLTRYRAELTQAQNKVDNRIQKLLEQCNIKLSSVASNTLGVSGQLMLEAIIKGQDDPAQLAELAQRRLREKIPQLQLALSGKVRDHHRFLLKEYLAEWRALGERMARIEQEIDRRMRPFEQAVALWESMPGVDHTTACNMVAEVGVNMSQFPSGGHLASWAGLCPGHHESAGKRLSGTMRDGNNWLRRSLCQAAWAVTRKKDCYLSAQFKRLAARRGIKRAVMAVAHTMLIIGYAMLKTGHTYHELGGTYFERINRDQLQRYFIKRLERLGLMVSVAPLA

SEQ ID NO: 424827 - protein, 407 aa, unidentified
MNQLFVGIDVGSRNNAVYIMLPDGSKHSSFPAANNLGGAQTISKRVVSALTEKNLCAVSIGIEATSVYGDNLMYFLREDGALGQFDRKLHVLNPKQVKKFKDSYSDLPKNDPVDAFIIADHLRFGRVTAPVYMDDYRHKALQNLTRARFYAVQSLTREKQRFMNHLFMKCSGLAQEKAFSDNYGVAALAVFEEFDTPDEIADMNIEQLAAFIAEKGKNRSSRPNEIAQAVQAAARGSYRLPKTVNDSVNQVLSISISSMRALKAQIKALDKEIERQFEAISNTLTSIPGIGPVFSAGIIAEIGDISRFEGQASLAKYAGLAWSQHQSGQFEAQHSRLIKSGNRFLKYYLCEAAFALVRCDTEHRRYYDLKYKEVNKYQHKRALALTARKLVRLVFRLLKDNRLYRPA

SEQ ID NO: 424828 - protein, 398 aa, unidentified
MHTNVRYVGLDVHAESIIMAVADAGDAPAAMWKALPYDLPRLLKELRQLGRLSQLKVCYEAGPTGFGLQRFLAEHGVDCLVVAPSLVPVQSGSRVKTDRRDARKLAHFLRSGDLTPIWIPDEHTEAIRDLERAREDARLAERRARQQLLKFLLRHGRRFTEGKHHWTQIHWRWIQRQRFEHEALQRVLEDYILAVRQAGERVQRLTGDIAQLVERWALAPLVRHLQAFLGVQLVTAVGLAAEIGNFERFEAAGKFMAFVGLVPSEHSSGGSRRQGGITKTGNRHVRRLLIEAAWHYHDANPGVSAALAKRREGVPPEVVTIAEKARLRLRRKAYKLRLAHKTPNKIATALARELAGFLWAAARASAAVSGRPARDRSSPPPSRRRPRTRRTAVTGINV

SEQ ID NO: 424829 - protein, 464 aa, unidentified
MKDHKRRRQMTQRRISAHLEQVNLFAAGIDIGSRSHYVAVPEELDSEPVREFACFTGDLNRMADWLVEIGIQTVAMESTGVYWIPAFEILEERGLGVLLVNARHVKNVPGRKSDIQDCQWLQQLHTYGLLEGAFRPPEETVALRTYMRQREMLVQRSSDHIRHMQKALRQMNLLLDNVVSDINGMTGMKIIRAILAGDRDPAVLAQFRDNRCRHDEKTLAASLEGHYRDEHLFALKQSVELYDVYQKQIASCEAAIQAQLDRMDSRGNKDTLPPRKKQKPKGSPDFDVRGELYRMSGVDLTRIDGLNETSVLKILAETGVDITPWPTEKHFASWLGLSPGNKITGGKILTGKTKPSANRAAAAFRMAAYGLFNSKSALGAYYRRQRARLGSPKAITATAHKLARTFYSMLKHGTEYVDQGQDYYEKQYRDRVTKNLKRRAASLGFDLVPHTEDQNIPDAVLSTT

SEQ ID NO: 424830 - protein, 355 aa, unidentified
MERYIGLDPHGTSCTFGVIGPSGRKLRNDVVETNGKALVSYLRGIPGRKHLCLEEGTQSAWLYEILSPHVEEIVVAGIGESRGQKSDVLDAFRRAEELRTGTIKKPVFKAPRMYSRLRELGRVHSMLVRDVVRVQGRVKAMYRARGVGTPGKSVYGPKERERWLRQLPVSSRWATEKLHEQYDLLLELKHEAEQELVAEARKHRISKVLATAPGLGPIRVARLLPIVVTPHRFRTRSQFWAYCGLGIVMRSSSDWIQSPNGGWMRAQVQQTRGLNRQHNSSLKNIFKGAATTVVMRLHTDPLYEHYIQLTSAGTKPNLAQLTIARRIAAIVLRMWKDEQEYDPGKLKQKVAPAAH

SEQ ID NO: 424831 - protein, 416 aa, unidentified
MSSKAKRDGRIKSDIVVVGIDVAKRRHVAAIRFPDGGIIKPFSFQNDRQGFERLMSRVEHARVESGVCEILFALEATGHYGHALQHYLLAEGRSVVGINPAHTKRSKELLDGSPEKSDTKDAIIIADLAWQGRGRPVTQLEGVYAELRRLGKLREQLTTERTRYLNRYTGLVDLVFPELVGLVYDVTCPTIRNLLREFPTAPDIARRQFRLIRRLLWKWSIGHFDEARCRQIYEASKHSVGVREGLEAVRLQMRLILTSLTTVESQISEVEKTQTEALYQVPYAEQLLTIPEIGPVTVATVLGETGDLRQYRSAAALIKLAGLNLYSLSSGTFHGRTRITRRGRPLLRRIIFLAALRMGKQGRPLSEFHDRLLERLAKPQIAVACSRKLLRMMFAIVRDGTNYQSDRLGVPVQAVA

SEQ ID NO: 424832 - protein, 311 aa, unidentified
MLGVGIDVGKRFLDLARHDALEVMRFDNTPAGIQQLIKQLAQWGELRVVLEATGGYEMAVLRALTGAGRWVCRVNPRQARNFARATGQLAKTDAIDAQMLADMAERLHAKLQRYVEPEPWQVTLAAYVTRRSQVVALIQQQTLQLDCLTIPTLLKAARRTLKALQAERDLLVAAITRLIKPYLSPAWTSMKGSGPVVQATLMSLLPELGCLSRQQVAKLVGVAPLNRDSGSLRGRRGIFGGRAHVRKVLYMAALSAVRWQPEFKAFYEQLRARGKPAKVALVACMRKWIVILNARLRDEMNTSCESQTVAP

SEQ ID NO: 424833 - protein, 314 aa, unidentified
MSEREVVVVGIDVAKASVEVLTLGGAGPEGEFGNDPEGHTALLARLPAGVLVVMEATGGYEAALACALQAAGLAVAVVNPKQVRDFAKGMGQRAKTDRIDARVLAEFGQALGRKADLARYLKPLVDEQVQDLAAWVTRRRQLLGMLLSERQRLGLARAKVRPSIELMIESIKRQLDQIEREMEAHVARHHRELDRLLRSAGGIGPVASVTLIAALPELGRLSGAQIGALVGVVPIARDSGRWKGRRWIQAGRFEVRRVLYMATLTAIRCNPTIRAFYARLVAAGKLKKVALVACMHKLLRILNAMVRDRQPFHA

SEQ ID NO: 424834 - protein, 408 aa, unidentified
MDVFHERCAGLDVHKEVIVICALIGRGSGYQKFKFKFGTFHHQLVEMRQKLLELGVTHVLMESTGVYWMPVYDVLEGFVEIVVGNAQHIMNVPGRKTDESDAEWLAKLLRCGLVKPSFVPSRQFRELRQLTRYRRAVVQTRASEQNRVEKHLQIAGVKLSSVASHVFGVSGSDMLNHIAKGTTDPGELAGLARGRLRKKMPQLRDAFAGSISEHTQHLIALQMEQMNRLECTIAQAELKIEEKVKPYAEIIARLDAIPGIDLRSAVDVLAEIGTDMSPWKTHRQIAAMAGLCPGNYISAGKRLKNRSRQGNPYLKSILVQAACSAINVDGSYYQAKFKRLKQRRGHKRAIVAIGHAMLVAIYHMIKKGESYRELGAKFVSDHEHARKKDDLVKQLQNLGYSVSLTQTA

SEQ ID NO: 424835 - protein, 336 aa, unidentified
MNSYIGIDVHQDKCHGTIQDRDGMTMKQGYFQNSPSGFKDFFDGTGEAKVAIEANDAWQPVYDWLTERGFDVKLANPHKTRIIAEVKIKTDCRDSEALADLVRADLIAEVYVPCDEIRELRGIAKQRGKLVQERSKFKSRIKAQLRKRGIEYRERNLWTNSGKQWLKDLEINAVDDFLEVLRTLNERISKLEKEIEEIAGDMEEARILMTIPGVSYYTALTIIAEIATIERFPSPAHLCSYVGVVPSVKQSGSKEVHGSIQGGRPLLRWILYQAAHNHIRNAPNSHVTRFYKRLKQKKPEKLAKIAATRKLTTVIYWMLKLKEEFHSEGYDPRTSS

SEQ ID NO: 424836 - protein, 366 aa, unidentified
MAITHVALDDSKRVIVAGILRAEATQPELREIPNDPRQVRRLFERLLHEGPVRACYEAGVSGYDLYRQLTGLGVECAVIAPALTPRKPGERVKTDRRDAAKLVRLFRAGELTAIHVPTEAEESVRDLTRCRDDIRADIVRWRHRVLKFLARHGRVYQTGKNWSQAHWTWIRAQRFEDIALERTLEASLDALEQAMRRRTDLDRVIEALASDAPYRDAVNALRCFRGINTLSAMILVAEIVDFQRFRRPRALMAYLGLVPSEYSSGERHRRGALTKAGNSHARRVLVEAAWHYRHRPGLGNRLARHTANQPPTVVAEAWRAQQRLHRRYRHLVGHGKRPTVAVAAVARELAGFVWAAMTQAVARQAA

SEQ ID NO: 424837 - protein, 390 aa, unidentified
MIYVGIDVAKDTHDCFIVDSDGVILSEPFTIQNNHIGFDELMAQLAVFTEDLTGIKVGLEATGHYSDNLLEFLLNKGLTTFVINPLHSTLFRKGLSLRKTKTDTLDARSIVTMLRIENLQPYTPLSYHIRELKSLARYRFSLVQDCARLKTSYNRLVTILFPELQRLVSTLHINSVYNMLIELPNAHAIASCHIKKLTHLLQQASKGHYGKAKAMEIREAAKVSIGSFNTAKSIELQQTICLIRMMLEQVTQVESMIKPLVDSLHSPIMTIPGISYRMAAIILSEIGDFKAFSSAEKILAFAGLEPSVYQSGQLNSTHAKMVKRGSKYLRYALFNATKYVCRWDSTFAAYLHKKRSEGKAYNVAVSHATKKLVRVMFHLVKSNQPFRCVD

SEQ ID NO: 424838 - protein, 383 aa, unidentified
MIIIGVDFHPEFQQIAWVDTDTGELQEQRLQHREEAEAFYRELAARAVQVWIGIEASGHARWFERLMGELRIELWIGDAAEIRTKRVRKQKTDRQDAQLILRLLLEDRFPRIWVPSWENRDLRQLLWHRQRMVQTRTRIMNQLQAVALNEGLRCKKSLWRERGRQQLESFQLAPWASRRRHDLLELLDRLNPSIAELSQAIEQEVESCPLAQRLMTHPGVGPLTALAFVLIIGKAERFQCGKQITSYLGLAPLEESSGNRRRLGHITKQGSSILRFLLVEAAQVTVRSLPEWRSKYSHLMMRRGRKIAKVAMARRLAVRLYWMMRQGWDYQQWVKFGSQGRKSGSHAGEPTASTRYPSLRSSRIIRLVRLRLEFAFTAGPRSS

SEQ ID NO: 424839 - protein, 321 aa, unidentified
MNGKSLRVIGVDVGKRAVDVACEGVRAIERSVNDVVGIAQFVRGLDPEHDIVVFERSGGYERLLEAQLAAAGVGWAVVHSKRVKAFRIAKGIKAKTDAIDCRLLRDFGRDQLNEGKLRFGRLEDVTLAALVARLRQLNGVLHAERCRHETAAIDLVQASIARTIALLEAELATIEAAIAQHIAVDPELRLKEQVMCERIGVGQTTARALLAALPQLGRATDKEIAALGGIAPRVHQSGGTQKRRGVEPGRFAIKVILFYPARSAMRFDPEIKAFAQRLRQRGKLGRVVLVAVMRKMLVKLNAALRDALAERRAEPAAQAAV

SEQ ID NO: 424840 - protein, 370 aa, unidentified
MGEYSGAFVGFDTSKTKHAVAIAEGGRGGEVRFLGEIASSPVRVERLVGKLASRYDKLHFCYEAGPTGYGLYRQIRELGHDCTVVAPSLIPKRPGERIKTNRRDAVTLARLLRAGELTAVWVPDAVHEAVRDLVRARAAAAQDLRRKRQQLLSFLLRHGRIFSGRQHWTLAHRRWLAEQSFAHPAQQVVFQDAVEAIAEALARLQRLEQQLVAIVPSWSMAPVVEAYQAMRGASFLVAVTFAAEIGDVRRFDNPRQLMAFLGLVPGERSTGETIRRAGLTLAGNRHARRVLVEAAWSYRHPARVSPTLRARLEGLPKPVRDTAWKAQVRLCARYRRLSAAGKKLPVVIAAIAREMAAFLWAIARHVAPAV

SEQ ID NO: 424841 - protein, 403 aa, unidentified
MVFVGIDWAEAHHDICVVDEEGQVLAKRRVPEGLEGVGKLHSLVAEHADDPAMVVVGIETDRGLLVGSLVAAGYQVYAINPFASSRYRDRHATSGAKSDPGDARVLADLVRTDRHKHRPLGGDSNLAEAVQVLARAHQGLVWTRQRQVNQLRNALREFYPGALAAFDDLDAIDAVAILERAPTPTRGRALSQAKIITALRHGGRERNLKAKAAQIQGQLRLSQLEAPALLAEAYGHSVAATVAVIKQLNLQIAALEHELASSFEMHPDAEIYLSLPGLGLVLGARAIAEFGDDRTRFLNPKARKSYAGTAPITKASGNRQVVLARVARNRRLADACYLWAFSALTRSEGARHRYDVLRARGQTHHQALRALANRLVGILHGCLTNRQAYSEHLAWSSHVEVAA

SEQ ID NO: 424842 - protein, 408 aa, unidentified
MTIFVGDDWAEDHHDIHLMDADGTKLASRRLPEGLAGIRGFHEMVASYADEPAQVVIGIETDRGLWVEALAAAGYEVFAVNPLAVARYRDRHQVSGAKSDAADAKLLADLVRTDRHNHRPIAGDTADVLAIKVLARAHQNLIWSRNRNTNALRNALREYYPAALEAFESLADRDALAILGRAPTPADAARLSVSKIRSALKAAGRQRNLDARALEIQAALRTEQLAAPAAVTAAFGATTRAAVGIIAELNRQIADLEAELRSHFEAHPDADIYLSLPGVGVTLGARVLGEFGDDPNRYTTAKSRKNYAGTSPLTVASGKKRAVLARHVRNRRLYDAIDQWAFCALSCSPGARAFYDQHRASGDTHHQALRALGNRLVGILHGCLRHHTAYDEHKAWAHRQPGPDTEAA

SEQ ID NO: 424843 - protein, 388 aa, unidentified
MTQRPGSLSHPIALDYENTLVLAIELSNASWVLAAQVPGLPRVKAKQTIAPRTEALLAAIDGYRDRSRAAGRSIERVVAIYEAGWSGFWLARWLARHGVETHIVQPSSVPVDRRARRAKSDGIDAELLLRTLLAWFRGEPRVCSMVPIPDEADEDERRRVREREDLVAERVSLVNRVGAVLATLGVRDYNPLRRDRRARLEALRTALGDPLPPHARARIFRMLDRLELVCAQIVELEQQRNAVLEEEAPDKAEKMIQQLAGLRGIGVQSATVLVREAFVRKFANGKTLGSYAGLTPTPFSSGAAQREQGIGKAGNPRLRTVMIELAWLWQRYQPGSAQVSWFRERVGATGRRMRKVMVVAMARRLLIALWRFATQGVVPEGAVINPAR
